United States Patent Application Publication US 2018/0305689 A1 - sequence listing, part 144

SEQ ID NO: 2007904 - RNA, 19 nt, Artificial Sequence
  Description of Artificial Sequence: Synthetic oligonucleotide
  Sense strand starting at position 966 of SEQ ID NO: 1880969
aucacaguuucguuuggga

SEQ ID NO: 2007905 - RNA, 19 nt, Artificial Sequence
  Description of Artificial Sequence: Synthetic oligonucleotide
  Antisense strand to SEQ ID NO: 2007904
ucccaaacgaaacugugau

SEQ ID NO: 2007906 - RNA, 19 nt, Artificial Sequence
  Description of Artificial Sequence: Synthetic oligonucleotide
  Sense strand starting at position 973 of SEQ ID NO: 1880969
uuucguuugggacagaaua

SEQ ID NO: 2007907 - RNA, 19 nt, Artificial Sequence
  Description of Artificial Sequence: Synthetic oligonucleotide
  Antisense strand to SEQ ID NO: 2007906
uauucugucccaaacgaaa

SEQ ID NO: 2007908 - RNA, 19 nt, Artificial Sequence
  Description of Artificial Sequence: Synthetic oligonucleotide
  Sense strand starting at position 1003 of SEQ ID NO: 1880969
aaccaagaguguuuagaag

SEQ ID NO: 2007909 - RNA, 19 nt, Artificial Sequence
  Description of Artificial Sequence: Synthetic oligonucleotide
  Antisense strand to SEQ ID NO: 2007908
cuucuaaacacucuugguu

SEQ ID NO: 2007910 - RNA, 19 nt, Artificial Sequence
  Description of Artificial Sequence: Synthetic oligonucleotide
  Sense strand starting at position 1121 of SEQ ID NO: 1880969
ggcucaaauguaggacuaa

SEQ ID NO: 2007911 - RNA, 19 nt, Artificial Sequence
  Description of Artificial Sequence: Synthetic oligonucleotide
  Antisense strand to SEQ ID NO: 2007910
uuaguccuacauuugagcc

SEQ ID NO: 2007912 - RNA, 19 nt, Artificial Sequence
  Description of Artificial Sequence: Synthetic oligonucleotide
  Sense strand starting at position 1132 of SEQ ID NO: 1880969
aggacuaagugacuucuaa

SEQ ID NO: 2007913 - RNA, 19 nt, Artificial Sequence
  Description of Artificial Sequence: Synthetic oligonucleotide
  Antisense strand to SEQ ID NO: 2007912
uuagaagucacuuaguccu

SEQ ID NO: 2007914 - RNA, 19 nt, Artificial Sequence
  Description of Artificial Sequence: Synthetic oligonucleotide
  Sense strand starting at position 1178 of SEQ ID NO: 1880969
ucagaaucccguggaggau

SEQ ID NO: 2007915 - RNA, 19 nt, Artificial Sequence
  Description of Artificial Sequence: Synthetic oligonucleotide
  Antisense strand to SEQ ID NO: 2007914
auccuccacgggauucuga

SEQ ID NO: 2007916 - RNA, 19 nt, Artificial Sequence
  Description of Artificial Sequence: Synthetic oligonucleotide
  Sense strand starting at position 1179 of SEQ ID NO: 1880969
cagaaucccguggaggauu

SEQ ID NO: 2007917 - RNA, 19 nt, Artificial Sequence
  Description of Artificial Sequence: Synthetic oligonucleotide
  Antisense strand to SEQ ID NO: 2007916
aauccuccacgggauucug

SEQ ID NO: 2007918 - RNA, 19 nt, Artificial Sequence
  Description of Artificial Sequence: Synthetic oligonucleotide
  Sense strand starting at position 1431 of SEQ ID NO: 1880969
aggugcaaaucaccagaaa

SEQ ID NO: 2007919 - RNA, 19 nt, Artificial Sequence
  Description of Artificial Sequence: Synthetic oligonucleotide
  Antisense strand to SEQ ID NO: 2007918
uuucuggugauuugcaccu

SEQ ID NO: 2007920 - RNA, 19 nt, Artificial Sequence
  Description of Artificial Sequence: Synthetic oligonucleotide
  Sense strand starting at position 1450 of SEQ ID NO: 1880969
ggagaauccuucucacauc

SEQ ID NO: 2007921 - RNA, 19 nt, Artificial Sequence
  Description of Artificial Sequence: Synthetic oligonucleotide
  Antisense strand to SEQ ID NO: 2007920
gaugugagaaggauucucc

SEQ ID NO: 2007922 - RNA, 19 nt, Artificial Sequence
  Description of Artificial Sequence: Synthetic oligonucleotide
  Sense strand starting at position 1470 of SEQ ID NO: 1880969
accugucuacucgagguuu

SEQ ID NO: 2007923 - RNA, 19 nt, Artificial Sequence
  Description of Artificial Sequence: Synthetic oligonucleotide
  Antisense strand to SEQ ID NO: 2007922
aaaccucgaguagacaggu

SEQ ID NO: 2007924 - RNA, 19 nt, Artificial Sequence
  Description of Artificial Sequence: Synthetic oligonucleotide
  Sense strand starting at position 2281 of SEQ ID NO: 1880969
guguacucagguugagauu

SEQ ID NO: 2007925 - RNA, 19 nt, Artificial Sequence
  Description of Artificial Sequence: Synthetic oligonucleotide
  Antisense strand to SEQ ID NO: 2007924
aaucucaaccugaguacac

SEQ ID NO: 2007926 - RNA, 19 nt, Artificial Sequence
  Description of Artificial Sequence: Synthetic oligonucleotide
  Sense strand starting at position 2399 of SEQ ID NO: 1880969
gcugucugugaagagauau

SEQ ID NO: 2007927 - RNA, 19 nt, Artificial Sequence
  Description of Artificial Sequence: Synthetic oligonucleotide
  Antisense strand to SEQ ID NO: 2007926
auaucucuucacagacagc

SEQ ID NO: 2007928 - RNA, 19 nt, Artificial Sequence
  Description of Artificial Sequence: Synthetic oligonucleotide
  Sense strand starting at position 2405 of SEQ ID NO: 1880969
ugugaagagauauguuaca

SEQ ID NO: 2007929 - RNA, 19 nt, Artificial Sequence
  Description of Artificial Sequence: Synthetic oligonucleotide
  Antisense strand to SEQ ID NO: 2007928
uguaacauaucucuucaca

SEQ ID NO: 2007930 - RNA, 19 nt, Artificial Sequence
  Description of Artificial Sequence: Synthetic oligonucleotide
  Sense strand starting at position 2778 of SEQ ID NO: 1880969
uggaauagucaggguuaug

SEQ ID NO: 2007931 - RNA, 19 nt, Artificial Sequence
  Description of Artificial Sequence: Synthetic oligonucleotide
  Antisense strand to SEQ ID NO: 2007930
cauaacccugacuauucca

SEQ ID NO: 2007932 - RNA, 19 nt, Artificial Sequence
  Description of Artificial Sequence: Synthetic oligonucleotide
  Sense strand starting at position 2797 of SEQ ID NO: 1880969
ggguguucugcacagaaca

SEQ ID NO: 2007933 - RNA, 19 nt, Artificial Sequence
  Description of Artificial Sequence: Synthetic oligonucleotide
  Antisense strand to SEQ ID NO: 2007932
uguucugugcagaacaccc

SEQ ID NO: 2007934 - RNA, 19 nt, Artificial Sequence
  Description of Artificial Sequence: Synthetic oligonucleotide
  Sense strand starting at position 2828 of SEQ ID NO: 1880969
ggauuugaaugccaagacu

SEQ ID NO: 2007935 - RNA, 19 nt, Artificial Sequence
  Description of Artificial Sequence: Synthetic oligonucleotide
  Antisense strand to SEQ ID NO: 2007934
agucuuggcauucaaaucc

SEQ ID NO: 2007936 - RNA, 19 nt, Artificial Sequence
  Description of Artificial Sequence: Synthetic oligonucleotide
  Sense strand starting at position 2866 of SEQ ID NO: 1880969
gucucagauuuguccaggu

SEQ ID NO: 2007937 - RNA, 19 nt, Artificial Sequence
  Description of Artificial Sequence: Synthetic oligonucleotide
  Antisense strand to SEQ ID NO: 2007936
accuggacaaaucugagac

SEQ ID NO: 2007938 - RNA, 19 nt, Artificial Sequence
  Description of Artificial Sequence: Synthetic oligonucleotide
  Sense strand starting at position 2899 of SEQ ID NO: 1880969
uuccauuggucaccagagu

SEQ ID NO: 2007939 - RNA, 19 nt, Artificial Sequence
  Description of Artificial Sequence: Synthetic oligonucleotide
  Antisense strand to SEQ ID NO: 2007938
acucuggugaccaauggaa

SEQ ID NO: 2007940 - RNA, 19 nt, Artificial Sequence
  Description of Artificial Sequence: Synthetic oligonucleotide
  Sense strand starting at position 2930 of SEQ ID NO: 1880969
gaaucuaugggcuggaaua

SEQ ID NO: 2007941 - RNA, 19 nt, Artificial Sequence
  Description of Artificial Sequence: Synthetic oligonucleotide
  Antisense strand to SEQ ID NO: 2007940
uauuccagcccauagauuc

SEQ ID NO: 2007942 - RNA, 19 nt, Artificial Sequence
  Description of Artificial Sequence: Synthetic oligonucleotide
  Sense strand starting at position 2931 of SEQ ID NO: 1880969
aaucuaugggcuggaauau

SEQ ID NO: 2007943 - RNA, 19 nt, Artificial Sequence
  Description of Artificial Sequence: Synthetic oligonucleotide
  Antisense strand to SEQ ID NO: 2007942
auauuccagcccauagauu

SEQ ID NO: 2007944 - RNA, 19 nt, Artificial Sequence
  Description of Artificial Sequence: Synthetic oligonucleotide
  Sense strand starting at position 3040 of SEQ ID NO: 1880969
uacccucaguguguaaaga

SEQ ID NO: 2007945 - RNA, 19 nt, Artificial Sequence
  Description of Artificial Sequence: Synthetic oligonucleotide
  Antisense strand to SEQ ID NO: 2007944
ucuuuacacacugagggua

SEQ ID NO: 2007946 - RNA, 19 nt, Artificial Sequence
  Description of Artificial Sequence: Synthetic oligonucleotide
  Sense strand starting at position 3041 of SEQ ID NO: 1880969
acccucaguguguaaagau

SEQ ID NO: 2007947 - RNA, 19 nt, Artificial Sequence
  Description of Artificial Sequence: Synthetic oligonucleotide
  Antisense strand to SEQ ID NO: 2007946
aucuuuacacacugagggu

SEQ ID NO: 2007948 - RNA, 19 nt, Artificial Sequence
  Description of Artificial Sequence: Synthetic oligonucleotide
  Sense strand starting at position 3490 of SEQ ID NO: 1880969
aaaguagaaguuuggaguu

SEQ ID NO: 2007949 - RNA, 19 nt, Artificial Sequence
  Description of Artificial Sequence: Synthetic oligonucleotide
  Antisense strand to SEQ ID NO: 2007948
aacuccaaacuucuacuuu

SEQ ID NO: 2007950 - RNA, 19 nt, Artificial Sequence
  Description of Artificial Sequence: Synthetic oligonucleotide
  Sense strand starting at position 3497 of SEQ ID NO: 1880969
aaguuuggaguuuaauauc

SEQ ID NO: 2007951 - RNA, 19 nt, Artificial Sequence
  Description of Artificial Sequence: Synthetic oligonucleotide
  Antisense strand to SEQ ID NO: 2007950
gauauuaaacuccaaacuu

SEQ ID NO: 2007952 - RNA, 19 nt, Artificial Sequence
  Description of Artificial Sequence: Synthetic oligonucleotide
  Sense strand starting at position 3826 of SEQ ID NO: 1880969
guugauucccacugggaaa

SEQ ID NO: 2007953 - RNA, 19 nt, Artificial Sequence
  Description of Artificial Sequence: Synthetic oligonucleotide
  Antisense strand to SEQ ID NO: 2007952
uuucccagugggaaucaac

SEQ ID NO: 2007954 - RNA, 19 nt, Artificial Sequence
  Description of Artificial Sequence: Synthetic oligonucleotide
  Sense strand starting at position 3840 of SEQ ID NO: 1880969
ggaaauauugaugguaugu

SEQ ID NO: 2007955 - RNA, 19 nt, Artificial Sequence
  Description of Artificial Sequence: Synthetic oligonucleotide
  Antisense strand to SEQ ID NO: 2007954
acauaccaucaauauuucc

SEQ ID NO: 2007956 - RNA, 19 nt, Artificial Sequence
  Description of Artificial Sequence: Synthetic oligonucleotide
  Sense strand starting at position 3849 of SEQ ID NO: 1880969
gaugguaugucugcaaaug

SEQ ID NO: 2007957 - RNA, 19 nt, Artificial Sequence
  Description of Artificial Sequence: Synthetic oligonucleotide
  Antisense strand to SEQ ID NO: 2007956
cauuugcagacauaccauc

SEQ ID NO: 2007958 - RNA, 19 nt, Artificial Sequence
  Description of Artificial Sequence: Synthetic oligonucleotide
  Sense strand starting at position 3850 of SEQ ID NO: 1880969
augguaugucugcaaaugu

SEQ ID NO: 2007959 - RNA, 19 nt, Artificial Sequence
  Description of Artificial Sequence: Synthetic oligonucleotide
  Antisense strand to SEQ ID NO: 2007958
acauuugcagacauaccau

SEQ ID NO: 2007960 - RNA, 19 nt, Artificial Sequence
  Description of Artificial Sequence: Synthetic oligonucleotide
  Sense strand starting at position 76 of SEQ ID NO: 1880970
ugugcaauagugggcaaau

SEQ ID NO: 2007961 - RNA, 19 nt, Artificial Sequence
  Description of Artificial Sequence: Synthetic oligonucleotide
  Antisense strand to SEQ ID NO: 2007960
auuugcccacuauugcaca

SEQ ID NO: 2007962 - RNA, 19 nt, Artificial Sequence
  Description of Artificial Sequence: Synthetic oligonucleotide
  Sense strand starting at position 77 of SEQ ID NO: 1880970
gugcaauagugggcaaauu

SEQ ID NO: 2007963 - RNA, 19 nt, Artificial Sequence
  Description of Artificial Sequence: Synthetic oligonucleotide
  Antisense strand to SEQ ID NO: 2007962
aauuugcccacuauugcac

SEQ ID NO: 2007964 - RNA, 19 nt, Artificial Sequence
  Description of Artificial Sequence: Synthetic oligonucleotide
  Sense strand starting at position 152 of SEQ ID NO: 1880970
cucuuagugcuguaagaau

SEQ ID NO: 2007965 - RNA, 19 nt, Artificial Sequence
  Description of Artificial Sequence: Synthetic oligonucleotide
  Antisense strand to SEQ ID NO: 2007964
auucuuacagcacuaagag

SEQ ID NO: 2007966 - RNA, 19 nt, Artificial Sequence
  Description of Artificial Sequence: Synthetic oligonucleotide
  Sense strand starting at position 179 of SEQ ID NO: 1880970
gaguuagccaguuagagca

SEQ ID NO: 2007967 - RNA, 19 nt, Artificial Sequence
  Description of Artificial Sequence: Synthetic oligonucleotide
  Antisense strand to SEQ ID NO: 2007966
ugcucuaacuggcuaacuc

SEQ ID NO: 2007968 - RNA, 19 nt, Artificial Sequence
  Description of Artificial Sequence: Synthetic oligonucleotide
  Sense strand starting at position 253 of SEQ ID NO: 1880970
gugagaauuaggcagccau

SEQ ID NO: 2007969 - RNA, 19 nt, Artificial Sequence
  Description of Artificial Sequence: Synthetic oligonucleotide
  Antisense strand to SEQ ID NO: 2007968
auggcugccuaauucucac

SEQ ID NO: 2007970 - RNA, 19 nt, Artificial Sequence
  Description of Artificial Sequence: Synthetic oligonucleotide
  Sense strand starting at position 263 of SEQ ID NO: 1880970
ggcagccauguuuagcaaa

SEQ ID NO: 2007971 - RNA, 19 nt, Artificial Sequence
  Description of Artificial Sequence: Synthetic oligonucleotide
  Antisense strand to SEQ ID NO: 2007970
uuugcuaaacauggcugcc

SEQ ID NO: 2007972 - RNA, 19 nt, Artificial Sequence
  Description of Artificial Sequence: Synthetic oligonucleotide
  Sense strand starting at position 265 of SEQ ID NO: 1880970
cagccauguuuagcaaagu

SEQ ID NO: 2007973 - RNA, 19 nt, Artificial Sequence
  Description of Artificial Sequence: Synthetic oligonucleotide
  Antisense strand to SEQ ID NO: 2007972
acuuugcuaaacauggcug

SEQ ID NO: 2007974 - RNA, 19 nt, Artificial Sequence
  Description of Artificial Sequence: Synthetic oligonucleotide
  Sense strand starting at position 502 of SEQ ID NO: 1880970
acaucagguaguuaguaau

SEQ ID NO: 2007975 - RNA, 19 nt, Artificial Sequence
  Description of Artificial Sequence: Synthetic oligonucleotide
  Antisense strand to SEQ ID NO: 2007974
auuacuaacuaccugaugu

SEQ ID NO: 2007976 - RNA, 19 nt, Artificial Sequence
  Description of Artificial Sequence: Synthetic oligonucleotide
  Sense strand starting at position 515 of SEQ ID NO: 1880970
aguaauacgaagugcucua

SEQ ID NO: 2007977 - RNA, 19 nt, Artificial Sequence
  Description of Artificial Sequence: Synthetic oligonucleotide
  Antisense strand to SEQ ID NO: 2007976
uagagcacuucguauuacu

SEQ ID NO: 2007978 - RNA, 19 nt, Artificial Sequence
  Description of Artificial Sequence: Synthetic oligonucleotide
  Sense strand starting at position 548 of SEQ ID NO: 1880970
ggucuuguucagggacugu

SEQ ID NO: 2007979 - RNA, 19 nt, Artificial Sequence
  Description of Artificial Sequence: Synthetic oligonucleotide
  Antisense strand to SEQ ID NO: 2007978
acagucccugaacaagacc

SEQ ID NO: 2007980 - RNA, 19 nt, Artificial Sequence
  Description of Artificial Sequence: Synthetic oligonucleotide
  Sense strand starting at position 580 of SEQ ID NO: 1880970
aagaaaguccacggauagu

SEQ ID NO: 2007981 - RNA, 19 nt, Artificial Sequence
  Description of Artificial Sequence: Synthetic oligonucleotide
  Antisense strand to SEQ ID NO: 2007980
acuauccguggacuuucuu

SEQ ID NO: 2007982 - RNA, 19 nt, Artificial Sequence
  Description of Artificial Sequence: Synthetic oligonucleotide
  Sense strand starting at position 734 of SEQ ID NO: 1880970
gugucugugaaugaaugca

SEQ ID NO: 2007983 - RNA, 19 nt, Artificial Sequence
  Description of Artificial Sequence: Synthetic oligonucleotide
  Antisense strand to SEQ ID NO: 2007982
ugcauucauucacagacac

SEQ ID NO: 2007984 - RNA, 19 nt, Artificial Sequence
  Description of Artificial Sequence: Synthetic oligonucleotide
  Sense strand starting at position 773 of SEQ ID NO: 1880970
uuuguuucucugugcauuu

SEQ ID NO: 2007985 - RNA, 19 nt, Artificial Sequence
  Description of Artificial Sequence: Synthetic oligonucleotide
  Antisense strand to SEQ ID NO: 2007984
aaaugcacagagaaacaaa

SEQ ID NO: 2007986 - RNA, 19 nt, Artificial Sequence
  Description of Artificial Sequence: Synthetic oligonucleotide
  Sense strand starting at position 795 of SEQ ID NO: 1880970
cugggaguauuccuaacuu

SEQ ID NO: 2007987 - RNA, 19 nt, Artificial Sequence
  Description of Artificial Sequence: Synthetic oligonucleotide
  Antisense strand to SEQ ID NO: 2007986
aaguuaggaauacucccag

SEQ ID NO: 2007988 - RNA, 19 nt, Artificial Sequence
  Description of Artificial Sequence: Synthetic oligonucleotide
  Sense strand starting at position 887 of SEQ ID NO: 1880970
gggacuuaaucccuagcgu

SEQ ID NO: 2007989 - RNA, 19 nt, Artificial Sequence
  Description of Artificial Sequence: Synthetic oligonucleotide
  Antisense strand to SEQ ID NO: 2007988
acgcuagggauuaaguccc

SEQ ID NO: 2007990 - RNA, 19 nt, Artificial Sequence
  Description of Artificial Sequence: Synthetic oligonucleotide
  Sense strand starting at position 1145 of SEQ ID NO: 1880970
gacggaagauauucuuaua

SEQ ID NO: 2007991 - RNA, 19 nt, Artificial Sequence
  Description of Artificial Sequence: Synthetic oligonucleotide
  Antisense strand to SEQ ID NO: 2007990
uauaagaauaucuuccguc

SEQ ID NO: 2007992 - RNA, 19 nt, Artificial Sequence
  Description of Artificial Sequence: Synthetic oligonucleotide
  Sense strand starting at position 1148 of SEQ ID NO: 1880970
ggaagauauucuuauacua

SEQ ID NO: 2007993 - RNA, 19 nt, Artificial Sequence
  Description of Artificial Sequence: Synthetic oligonucleotide
  Antisense strand to SEQ ID NO: 2007992
uaguauaagaauaucuucc

SEQ ID NO: 2007994 - RNA, 19 nt, Artificial Sequence
  Description of Artificial Sequence: Synthetic oligonucleotide
  Sense strand starting at position 1224 of SEQ ID NO: 1880970
uaggguuacggugauaaua

SEQ ID NO: 2007995 - RNA, 19 nt, Artificial Sequence
  Description of Artificial Sequence: Synthetic oligonucleotide
  Antisense strand to SEQ ID NO: 2007994
uauuaucaccguaacccua

SEQ ID NO: 2007996 - RNA, 19 nt, Artificial Sequence
  Description of Artificial Sequence: Synthetic oligonucleotide
  Sense strand starting at position 1813 of SEQ ID NO: 1880970
aggaaucggccguaaccua

SEQ ID NO: 2007997 - RNA, 19 nt, Artificial Sequence
  Description of Artificial Sequence: Synthetic oligonucleotide
  Antisense strand to SEQ ID NO: 2007996
uagguuacggccgauuccu

SEQ ID NO: 2007998 - RNA, 19 nt, Artificial Sequence
  Description of Artificial Sequence: Synthetic oligonucleotide
  Sense strand starting at position 1913 of SEQ ID NO: 1880970
cuacucaggccuugagaua

SEQ ID NO: 2007999 - RNA, 19 nt, Artificial Sequence
  Description of Artificial Sequence: Synthetic oligonucleotide
  Antisense strand to SEQ ID NO: 2007998
uaucucaaggccugaguag

SEQ ID NO: 2008000 - RNA, 19 nt, Artificial Sequence
  Description of Artificial Sequence: Synthetic oligonucleotide
  Sense strand starting at position 2268 of SEQ ID NO: 1880970
guuguaguuguguuucgga

SEQ ID NO: 2008001 - RNA, 19 nt, Artificial Sequence
  Description of Artificial Sequence: Synthetic oligonucleotide
  Antisense strand to SEQ ID NO: 2008000
uccgaaacacaacuacaac

SEQ ID NO: 2008002 - RNA, 19 nt, Artificial Sequence
  Description of Artificial Sequence: Synthetic oligonucleotide
  Sense strand starting at position 2387 of SEQ ID NO: 1880970
gugcgaggcccagagaauu

SEQ ID NO: 2008003 - RNA, 19 nt, Artificial Sequence
  Description of Artificial Sequence: Synthetic oligonucleotide
  Antisense strand to SEQ ID NO: 2008002
aauucucugggccucgcac

SEQ ID NO: 2008004 - RNA, 19 nt, Artificial Sequence
  Description of Artificial Sequence: Synthetic oligonucleotide
  Sense strand starting at position 2399 of SEQ ID NO: 1880970
gagaauucucugcaggccu

SEQ ID NO: 2008005 - RNA, 19 nt, Artificial Sequence
  Description of Artificial Sequence: Synthetic oligonucleotide
  Antisense strand to SEQ ID NO: 2008004
aggccugcagagaauucuc

SEQ ID NO: 2008006 - RNA, 19 nt, Artificial Sequence
  Description of Artificial Sequence: Synthetic oligonucleotide
  Sense strand starting at position 2713 of SEQ ID NO: 1880970
gcucaaagaaguuaagugu

SEQ ID NO: 2008007 - RNA, 19 nt, Artificial Sequence
  Description of Artificial Sequence: Synthetic oligonucleotide
  Antisense strand to SEQ ID NO: 2008006
acacuuaacuucuuugagc

SEQ ID NO: 2008008 - RNA, 19 nt, Artificial Sequence
  Description of Artificial Sequence: Synthetic oligonucleotide
  Sense strand starting at position 2961 of SEQ ID NO: 1880970
acaggagaaucgcuuagaa

SEQ ID NO: 2008009 - RNA, 19 nt, Artificial Sequence
  Description of Artificial Sequence: Synthetic oligonucleotide
  Antisense strand to SEQ ID NO: 2008008
uucuaagcgauucuccugu

SEQ ID NO: 2008010 - RNA, 19 nt, Artificial Sequence
  Description of Artificial Sequence: Synthetic oligonucleotide
  Sense strand starting at position 3110 of SEQ ID NO: 1880970
ucauuaauguggcugaauu

SEQ ID NO: 2008011 - RNA, 19 nt, Artificial Sequence
  Description of Artificial Sequence: Synthetic oligonucleotide
  Antisense strand to SEQ ID NO: 2008010
aauucagccacauuaauga

SEQ ID NO: 2008012 - RNA, 19 nt, Artificial Sequence
  Description of Artificial Sequence: Synthetic oligonucleotide
  Sense strand starting at position 3111 of SEQ ID NO: 1880970
cauuaauguggcugaauuc

SEQ ID NO: 2008013 - RNA, 19 nt, Artificial Sequence
  Description of Artificial Sequence: Synthetic oligonucleotide
  Antisense strand to SEQ ID NO: 2008012
gaauucagccacauuaaug

SEQ ID NO: 2008014 - RNA, 19 nt, Artificial Sequence
  Description of Artificial Sequence: Synthetic oligonucleotide
  Sense strand starting at position 3171 of SEQ ID NO: 1880970
cgagaacauuugccuguca

SEQ ID NO: 2008015 - RNA, 19 nt, Artificial Sequence
  Description of Artificial Sequence: Synthetic oligonucleotide
  Antisense strand to SEQ ID NO: 2008014
ugacaggcaaauguucucg

SEQ ID NO: 2008016 - RNA, 19 nt, Artificial Sequence
  Description of Artificial Sequence: Synthetic oligonucleotide
  Sense strand starting at position 3406 of SEQ ID NO: 1880970
gcacgaaauuauuuggcuu

SEQ ID NO: 2008017 - RNA, 19 nt, Artificial Sequence
  Description of Artificial Sequence: Synthetic oligonucleotide
  Antisense strand to SEQ ID NO: 2008016
aagccaaauaauuucgugc

SEQ ID NO: 2008018 - RNA, 19 nt, Artificial Sequence
  Description of Artificial Sequence: Synthetic oligonucleotide
  Sense strand starting at position 3438 of SEQ ID NO: 1880970
gagcuaaugugacucucuu

SEQ ID NO: 2008019 - RNA, 19 nt, Artificial Sequence
  Description of Artificial Sequence: Synthetic oligonucleotide
  Antisense strand to SEQ ID NO: 2008018
aagagagucacauuagcuc

SEQ ID NO: 2008020 - RNA, 19 nt, Artificial Sequence
  Description of Artificial Sequence: Synthetic oligonucleotide
  Sense strand starting at position 3491 of SEQ ID NO: 1880970
ccagcuacaugguuucuaa

SEQ ID NO: 2008021 - RNA, 19 nt, Artificial Sequence
  Description of Artificial Sequence: Synthetic oligonucleotide
  Antisense strand to SEQ ID NO: 2008020
uuagaaaccauguagcugg

SEQ ID NO: 2008022 - RNA, 19 nt, Artificial Sequence
  Description of Artificial Sequence: Synthetic oligonucleotide
  Sense strand starting at position 3542 of SEQ ID NO: 1880970
uguggcauucaauagugga

SEQ ID NO: 2008023 - RNA, 19 nt, Artificial Sequence
  Description of Artificial Sequence: Synthetic oligonucleotide
  Antisense strand to SEQ ID NO: 2008022
uccacuauugaaugccaca

SEQ ID NO: 2008024 - RNA, 19 nt, Artificial Sequence
  Description of Artificial Sequence: Synthetic oligonucleotide
  Sense strand starting at position 3589 of SEQ ID NO: 1880970
ccagcagugugaucuuaug

SEQ ID NO: 2008025 - RNA, 19 nt, Artificial Sequence
  Description of Artificial Sequence: Synthetic oligonucleotide
  Antisense strand to SEQ ID NO: 2008024
cauaagaucacacugcugg

SEQ ID NO: 2008026 - RNA, 19 nt, Artificial Sequence
  Description of Artificial Sequence: Synthetic oligonucleotide
  Sense strand starting at position 3595 of SEQ ID NO: 1880970
gugugaucuuauguaaauu

SEQ ID NO: 2008027 - RNA, 19 nt, Artificial Sequence
  Description of Artificial Sequence: Synthetic oligonucleotide
  Antisense strand to SEQ ID NO: 2008026
aauuuacauaagaucacac

SEQ ID NO: 2008028 - RNA, 19 nt, Artificial Sequence
  Description of Artificial Sequence: Synthetic oligonucleotide
  Sense strand starting at position 3613 of SEQ ID NO: 1880970
ugagacuaauaauucuagu

SEQ ID NO: 2008029 - RNA, 19 nt, Artificial Sequence
  Description of Artificial Sequence: Synthetic oligonucleotide
  Antisense strand to SEQ ID NO: 2008028
acuagaauuauuagucuca

SEQ ID NO: 2008030 - RNA, 19 nt, Artificial Sequence
  Description of Artificial Sequence: Synthetic oligonucleotide
  Sense strand starting at position 3708 of SEQ ID NO: 1880970
gcuugaauaguggaacuuu

SEQ ID NO: 2008031 - RNA, 19 nt, Artificial Sequence
  Description of Artificial Sequence: Synthetic oligonucleotide
  Antisense strand to SEQ ID NO: 2008030
aaaguuccacuauucaagc

SEQ ID NO: 2008032 - RNA, 19 nt, Artificial Sequence
  Description of Artificial Sequence: Synthetic oligonucleotide
  Sense strand starting at position 3752 of SEQ ID NO: 1880970
uugcacuugagagaguauu

SEQ ID NO: 2008033 - RNA, 19 nt, Artificial Sequence
  Description of Artificial Sequence: Synthetic oligonucleotide
  Antisense strand to SEQ ID NO: 2008032
aauacucucucaagugcaa

SEQ ID NO: 2008034 - RNA, 19 nt, Artificial Sequence
  Description of Artificial Sequence: Synthetic oligonucleotide
  Sense strand starting at position 3911 of SEQ ID NO: 1880970
ccucaagugucauucuuac

SEQ ID NO: 2008035 - RNA, 19 nt, Artificial Sequence
  Description of Artificial Sequence: Synthetic oligonucleotide
  Antisense strand to SEQ ID NO: 2008034
guaagaaugacacuugagg

SEQ ID NO: 2008036 - RNA, 19 nt, Artificial Sequence
  Description of Artificial Sequence: Synthetic oligonucleotide
  Sense strand starting at position 3917 of SEQ ID NO: 1880970
gugucauucuuacuuggac

SEQ ID NO: 2008037 - RNA, 19 nt, Artificial Sequence
  Description of Artificial Sequence: Synthetic oligonucleotide
  Antisense strand to SEQ ID NO: 2008036
guccaaguaagaaugacac

SEQ ID NO: 2008038 - RNA, 19 nt, Artificial Sequence
  Description of Artificial Sequence: Synthetic oligonucleotide
  Sense strand starting at position 3918 of SEQ ID NO: 1880970
ugucauucuuacuuggacu

SEQ ID NO: 2008039 - RNA, 19 nt, Artificial Sequence
  Description of Artificial Sequence: Synthetic oligonucleotide
  Antisense strand to SEQ ID NO: 2008038
aguccaaguaagaaugaca

SEQ ID NO: 2008040 - RNA, 19 nt, Artificial Sequence
  Description of Artificial Sequence: Synthetic oligonucleotide
  Sense strand starting at position 192 of SEQ ID NO: 1880971
uaguuuaugccugauaaag

SEQ ID NO: 2008041 - RNA, 19 nt, Artificial Sequence
  Description of Artificial Sequence: Synthetic oligonucleotide
  Antisense strand to SEQ ID NO: 2008040
cuuuaucaggcauaaacua

SEQ ID NO: 2008042 - RNA, 19 nt, Artificial Sequence
  Description of Artificial Sequence: Synthetic oligonucleotide
  Sense strand starting at position 403 of SEQ ID NO: 1880971
augucauauuccuuagaag

SEQ ID NO: 2008043 - RNA, 19 nt, Artificial Sequence
  Description of Artificial Sequence: Synthetic oligonucleotide
  Antisense strand to SEQ ID NO: 2008042
cuucuaaggaauaugacau

SEQ ID NO: 2008044 - RNA, 19 nt, Artificial Sequence
  Description of Artificial Sequence: Synthetic oligonucleotide
  Sense strand starting at position 787 of SEQ ID NO: 1880971
cccauuuggugguuaaugu

SEQ ID NO: 2008045 - RNA, 19 nt, Artificial Sequence
  Description of Artificial Sequence: Synthetic oligonucleotide
  Antisense strand to SEQ ID NO: 2008044
acauuaaccaccaaauggg

SEQ ID NO: 2008046 - RNA, 19 nt, Artificial Sequence
  Description of Artificial Sequence: Synthetic oligonucleotide
  Sense strand starting at position 1102 of SEQ ID NO: 1880971
ggacccugaagcugugaaa

SEQ ID NO: 2008047 - RNA, 19 nt, Artificial Sequence
  Description of Artificial Sequence: Synthetic oligonucleotide
  Antisense strand to SEQ ID NO: 2008046
uuucacagcuucagggucc

SEQ ID NO: 2008048 - RNA, 19 nt, Artificial Sequence
  Description of Artificial Sequence: Synthetic oligonucleotide
  Sense strand starting at position 1115 of SEQ ID NO: 1880971
gugaaagauuaaccuacuu

SEQ ID NO: 2008049 - RNA, 19 nt, Artificial Sequence
  Description of Artificial Sequence: Synthetic oligonucleotide
  Antisense strand to SEQ ID NO: 2008048
aaguagguuaaucuuucac

SEQ ID NO: 2008050 - RNA, 19 nt, Artificial Sequence
  Description of Artificial Sequence: Synthetic oligonucleotide
  Sense strand starting at position 1331 of SEQ ID NO: 1880971
acagauuccuaaucggaga

SEQ ID NO: 2008051 - RNA, 19 nt, Artificial Sequence
  Description of Artificial Sequence: Synthetic oligonucleotide
  Antisense strand to SEQ ID NO: 2008050
ucuccgauuaggaaucugu

SEQ ID NO: 2008052 - RNA, 19 nt, Artificial Sequence
  Description of Artificial Sequence: Synthetic oligonucleotide
  Sense strand starting at position 1367 of SEQ ID NO: 1880971
gagguaguaagaugugaac

SEQ ID NO: 2008053 - RNA, 19 nt, Artificial Sequence
  Description of Artificial Sequence: Synthetic oligonucleotide
  Antisense strand to SEQ ID NO: 2008052
guucacaucuuacuaccuc

SEQ ID NO: 2008054 - RNA, 19 nt, Artificial Sequence
  Description of Artificial Sequence: Synthetic oligonucleotide
  Sense strand starting at position 1369 of SEQ ID NO: 1880971
gguaguaagaugugaacac

SEQ ID NO: 2008055 - RNA, 19 nt, Artificial Sequence
  Description of Artificial Sequence: Synthetic oligonucleotide
  Antisense strand to SEQ ID NO: 2008054
guguucacaucuuacuacc

SEQ ID NO: 2008056 - RNA, 19 nt, Artificial Sequence
  Description of Artificial Sequence: Synthetic oligonucleotide
  Sense strand starting at position 1496 of SEQ ID NO: 1880971
gcaguuucuguauauaaga

SEQ ID NO: 2008057 - RNA, 19 nt, Artificial Sequence
  Description of Artificial Sequence: Synthetic oligonucleotide
  Antisense strand to SEQ ID NO: 2008056
ucuuauauacagaaacugc

SEQ ID NO: 2008058 - RNA, 19 nt, Artificial Sequence
  Description of Artificial Sequence: Synthetic oligonucleotide
  Sense strand starting at position 1757 of SEQ ID NO: 1880971
cuucuuggagccugagaag

SEQ ID NO: 2008059 - RNA, 19 nt, Artificial Sequence
  Description of Artificial Sequence: Synthetic oligonucleotide
  Antisense strand to SEQ ID NO: 2008058
cuucucaggcuccaagaag

SEQ ID NO: 2008060 - RNA, 19 nt, Artificial Sequence
  Description of Artificial Sequence: Synthetic oligonucleotide
  Sense strand starting at position 1850 of SEQ ID NO: 1880971
aguguugcacaagaguaaa

SEQ ID NO: 2008061 - RNA, 19 nt, Artificial Sequence
  Description of Artificial Sequence: Synthetic oligonucleotide
  Antisense strand to SEQ ID NO: 2008060
uuuacucuugugcaacacu

SEQ ID NO: 2008062 - RNA, 19 nt, Artificial Sequence
  Description of Artificial Sequence: Synthetic oligonucleotide
  Sense strand starting at position 2048 of SEQ ID NO: 1880971
cagagaacgugucuaaaug

SEQ ID NO: 2008063 - RNA, 19 nt, Artificial Sequence
  Description of Artificial Sequence: Synthetic oligonucleotide
  Antisense strand to SEQ ID NO: 2008062
cauuuagacacguucucug

SEQ ID NO: 2008064 - RNA, 19 nt, Artificial Sequence
  Description of Artificial Sequence: Synthetic oligonucleotide
  Sense strand starting at position 2299 of SEQ ID NO: 1880971
cuagguaggcuauauggua

SEQ ID NO: 2008065 - RNA, 19 nt, Artificial Sequence
  Description of Artificial Sequence: Synthetic oligonucleotide
  Antisense strand to SEQ ID NO: 2008064
uaccauauagccuaccuag

SEQ ID NO: 2008066 - RNA, 19 nt, Artificial Sequence
  Description of Artificial Sequence: Synthetic oligonucleotide
  Sense strand starting at position 2341 of SEQ ID NO: 1880971
accuguacagucuauaacu

SEQ ID NO: 2008067 - RNA, 19 nt, Artificial Sequence
  Description of Artificial Sequence: Synthetic oligonucleotide
  Antisense strand to SEQ ID NO: 2008066
aguuauagacuguacaggu

SEQ ID NO: 2008068 - RNA, 19 nt, Artificial Sequence
  Description of Artificial Sequence: Synthetic oligonucleotide
  Sense strand starting at position 2343 of SEQ ID NO: 1880971
cuguacagucuauaacuau

SEQ ID NO: 2008069 - RNA, 19 nt, Artificial Sequence
  Description of Artificial Sequence: Synthetic oligonucleotide
  Antisense strand to SEQ ID NO: 2008068
auaguuauagacuguacag

SEQ ID NO: 2008070 - RNA, 19 nt, Artificial Sequence
  Description of Artificial Sequence: Synthetic oligonucleotide
  Sense strand starting at position 2361 of SEQ ID NO: 1880971
ugcugaaugcuauagacaa

SEQ ID NO: 2008071 - RNA, 19 nt, Artificial Sequence
  Description of Artificial Sequence: Synthetic oligonucleotide
  Antisense strand to SEQ ID NO: 2008070
uugucuauagcauucagca

SEQ ID NO: 2008072 - RNA, 19 nt, Artificial Sequence
  Description of Artificial Sequence: Synthetic oligonucleotide
  Sense strand starting at position 2475 of SEQ ID NO: 1880971
auaugcaguuugucauuua

SEQ ID NO: 2008073 - RNA, 19 nt, Artificial Sequence
  Description of Artificial Sequence: Synthetic oligonucleotide
  Antisense strand to SEQ ID NO: 2008072
uaaaugacaaacugcauau

SEQ ID NO: 2008074 - RNA, 19 nt, Artificial Sequence
  Description of Artificial Sequence: Synthetic oligonucleotide
  Sense strand starting at position 2478 of SEQ ID NO: 1880971
ugcaguuugucauuuacuc

SEQ ID NO: 2008075 - RNA, 19 nt, Artificial Sequence
  Description of Artificial Sequence: Synthetic oligonucleotide
  Antisense strand to SEQ ID NO: 2008074
gaguaaaugacaaacugca

SEQ ID NO: 2008076 - RNA, 19 nt, Artificial Sequence
  Description of Artificial Sequence: Synthetic oligonucleotide
  Sense strand starting at position 2647 of SEQ ID NO: 1880971
uggaccaaaucugcauaaa

SEQ ID NO: 2008077 - RNA, 19 nt, Artificial Sequence
  Description of Artificial Sequence: Synthetic oligonucleotide
  Antisense strand to SEQ ID NO: 2008076
uuuaugcagauuuggucca

SEQ ID NO: 2008078 - RNA, 19 nt, Artificial Sequence
  Description of Artificial Sequence: Synthetic oligonucleotide
  Sense strand starting at position 2669 of SEQ ID NO: 1880971
uuuaccagaucauucugua

SEQ ID NO: 2008079 - RNA, 19 nt, Artificial Sequence
  Description of Artificial Sequence: Synthetic oligonucleotide
  Antisense strand to SEQ ID NO: 2008078
uacagaaugaucugguaaa

SEQ ID NO: 2008080 - RNA, 19 nt, Artificial Sequence
  Description of Artificial Sequence: Synthetic oligonucleotide
  Sense strand starting at position 2814 of SEQ ID NO: 1880971
cccaguuuaucauuagacu

SEQ ID NO: 2008081 - RNA, 19 nt, Artificial Sequence
  Description of Artificial Sequence: Synthetic oligonucleotide
  Antisense strand to SEQ ID NO: 2008080
agucuaaugauaaacuggg

SEQ ID NO: 2008082 - RNA, 19 nt, Artificial Sequence
  Description of Artificial Sequence: Synthetic oligonucleotide
  Sense strand starting at position 2815 of SEQ ID NO: 1880971
ccaguuuaucauuagacug

SEQ ID NO: 2008083 - RNA, 19 nt, Artificial Sequence
  Description of Artificial Sequence: Synthetic oligonucleotide
  Antisense strand to SEQ ID NO: 2008082
cagucuaaugauaaacugg

SEQ ID NO: 2008084 - RNA, 19 nt, Artificial Sequence
  Description of Artificial Sequence: Synthetic oligonucleotide
  Sense strand starting at position 2903 of SEQ ID NO: 1880971
caggaaguauaugucuaaa

SEQ ID NO: 2008085 - RNA, 19 nt, Artificial Sequence
  Description of Artificial Sequence: Synthetic oligonucleotide
  Antisense strand to SEQ ID NO: 2008084
uuuagacauauacuuccug

SEQ ID NO: 2008086 - RNA, 19 nt, Artificial Sequence
  Description of Artificial Sequence: Synthetic oligonucleotide
  Sense strand starting at position 3032 of SEQ ID NO: 1880971
gaaggccacuuguugaaau

SEQ ID NO: 2008087 - RNA, 19 nt, Artificial Sequence
  Description of Artificial Sequence: Synthetic oligonucleotide
  Antisense strand to SEQ ID NO: 2008086
auuucaacaaguggccuuc

SEQ ID NO: 2008088 - RNA, 19 nt, Artificial Sequence
  Description of Artificial Sequence: Synthetic oligonucleotide
  Sense strand starting at position 3043 of SEQ ID NO: 1880971
guugaaauagauugguaua

SEQ ID NO: 2008089 - RNA, 19 nt, Artificial Sequence
  Description of Artificial Sequence: Synthetic oligonucleotide
  Antisense strand to SEQ ID NO: 2008088
uauaccaaucuauuucaac

SEQ ID NO: 2008090 - RNA, 19 nt, Artificial Sequence
  Description of Artificial Sequence: Synthetic oligonucleotide
  Sense strand starting at position 3126 of SEQ ID NO: 1880971
cuguucuacucacugggaa

SEQ ID NO: 2008091 - RNA, 19 nt, Artificial Sequence
  Description of Artificial Sequence: Synthetic oligonucleotide
  Antisense strand to SEQ ID NO: 2008090
uucccagugaguagaacag

SEQ ID NO: 2008092 - RNA, 19 nt, Artificial Sequence
  Description of Artificial Sequence: Synthetic oligonucleotide
  Sense strand starting at position 3127 of SEQ ID NO: 1880971
uguucuacucacugggaau

SEQ ID NO: 2008093 - RNA, 19 nt, Artificial Sequence
  Description of Artificial Sequence: Synthetic oligonucleotide
  Antisense strand to SEQ ID NO: 2008092
auucccagugaguagaaca

SEQ ID NO: 2008094 - RNA, 19 nt, Artificial Sequence
  Description of Artificial Sequence: Synthetic oligonucleotide
  Sense strand starting at position 3404 of SEQ ID NO: 1880971
aucucagguuaauugaaau

SEQ ID NO: 2008095 - RNA, 19 nt, Artificial Sequence
  Description of Artificial Sequence: Synthetic oligonucleotide
  Antisense strand to SEQ ID NO: 2008094
auuucaauuaaccugagau

SEQ ID NO: 2008096 - RNA, 19 nt, Artificial Sequence
  Description of Artificial Sequence: Synthetic oligonucleotide
  Sense strand starting at position 3417 of SEQ ID NO: 1880971
ugaaaugaccuauguuaag

SEQ ID NO: 2008097 - RNA, 19 nt, Artificial Sequence
  Description of Artificial Sequence: Synthetic oligonucleotide
  Antisense strand to SEQ ID NO: 2008096
cuuaacauaggucauuuca

SEQ ID NO: 2008098 - RNA, 19 nt, Artificial Sequence
  Description of Artificial Sequence: Synthetic oligonucleotide
  Sense strand starting at position 3479 of SEQ ID NO: 1880971
aacuaaauggcuugguaca

SEQ ID NO: 2008099 - RNA, 19 nt, Artificial Sequence
  Description of Artificial Sequence: Synthetic oligonucleotide
  Antisense strand to SEQ ID NO: 2008098
uguaccaagccauuuaguu

SEQ ID NO: 2008100 - RNA, 19 nt, Artificial Sequence
  Description of Artificial Sequence: Synthetic oligonucleotide
  Sense strand starting at position 3481 of SEQ ID NO: 1880971
cuaaauggcuugguacaga

SEQ ID NO: 2008101 - RNA, 19 nt, Artificial Sequence
  Description of Artificial Sequence: Synthetic oligonucleotide
  Antisense strand to SEQ ID NO: 2008100
ucuguaccaagccauuuag

SEQ ID NO: 2008102 - RNA, 19 nt, Artificial Sequence
  Description of Artificial Sequence: Synthetic oligonucleotide
  Sense strand starting at position 3540 of SEQ ID NO: 1880971
cuaggacugccuugaacaa

SEQ ID NO: 2008103 - RNA, 19 nt, Artificial Sequence
  Description of Artificial Sequence: Synthetic oligonucleotide
  Antisense strand to SEQ ID NO: 2008102
uuguucaaggcaguccuag

SEQ ID NO: 2008104 - RNA, 19 nt, Artificial Sequence
  Description of Artificial Sequence: Synthetic oligonucleotide
  Sense strand starting at position 3555 of SEQ ID NO: 1880971
acaauugugccgucauguc

SEQ ID NO: 2008105 - RNA, 19 nt, Artificial Sequence
  Description of Artificial Sequence: Synthetic oligonucleotide
  Antisense strand to SEQ ID NO: 2008104
gacaugacggcacaauugu

SEQ ID NO: 2008106 - RNA, 19 nt, Artificial Sequence
  Description of Artificial Sequence: Synthetic oligonucleotide
  Sense strand starting at position 3766 of SEQ ID NO: 1880971
gcaacugucucagccauuu

SEQ ID NO: 2008107 - RNA, 19 nt, Artificial Sequence
  Description of Artificial Sequence: Synthetic oligonucleotide
  Antisense strand to SEQ ID NO: 2008106
aaauggcugagacaguugc

SEQ ID NO: 2008108 - RNA, 19 nt, Artificial Sequence
  Description of Artificial Sequence: Synthetic oligonucleotide
  Sense strand starting at position 3819 of SEQ ID NO: 1880971
cccaaucuugugcauggaa

SEQ ID NO: 2008109 - RNA, 19 nt, Artificial Sequence
  Description of Artificial Sequence: Synthetic oligonucleotide
  Antisense strand to SEQ ID NO: 2008108
uuccaugcacaagauuggg

SEQ ID NO: 2008110 - RNA, 19 nt, Artificial Sequence
  Description of Artificial Sequence: Synthetic oligonucleotide
  Sense strand starting at position 3821 of SEQ ID NO: 1880971
caaucuugugcauggaaag

SEQ ID NO: 2008111 - RNA, 19 nt, Artificial Sequence
  Description of Artificial Sequence: Synthetic oligonucleotide
  Antisense strand to SEQ ID NO: 2008110
cuuuccaugcacaagauug

SEQ ID NO: 2008112 - RNA, 19 nt, Artificial Sequence
  Description of Artificial Sequence: Synthetic oligonucleotide
  Sense strand starting at position 3822 of SEQ ID NO: 1880971
aaucuugugcauggaaaga

SEQ ID NO: 2008113 - RNA, 19 nt, Artificial Sequence
  Description of Artificial Sequence: Synthetic oligonucleotide
  Antisense strand to SEQ ID NO: 2008112
ucuuuccaugcacaagauu

SEQ ID NO: 2008114 - RNA, 19 nt, Artificial Sequence
  Description of Artificial Sequence: Synthetic oligonucleotide
  Sense strand starting at position 3835 of SEQ ID NO: 1880971
gaaagauguugaucagagc

SEQ ID NO: 2008115 - RNA, 19 nt, Artificial Sequence
  Description of Artificial Sequence: Synthetic oligonucleotide
  Antisense strand to SEQ ID NO: 2008114
gcucugaucaacaucuuuc

SEQ ID NO: 2008116 - RNA, 19 nt, Artificial Sequence
  Description of Artificial Sequence: Synthetic oligonucleotide
  Sense strand starting at position 3925 of SEQ ID NO: 1880971
caaauaguugcugaggguu

SEQ ID NO: 2008117 - RNA, 19 nt, Artificial Sequence
  Description of Artificial Sequence: Synthetic oligonucleotide
  Antisense strand to SEQ ID NO: 2008116
aacccucagcaacuauuug

SEQ ID NO: 2008118 - RNA, 19 nt, Artificial Sequence
  Description of Artificial Sequence: Synthetic oligonucleotide
  Sense strand starting at position 3967 of SEQ ID NO: 1880971
ccucauauugguggugaaa

SEQ ID NO: 2008119 - RNA, 19 nt, Artificial Sequence
  Description of Artificial Sequence: Synthetic oligonucleotide
  Antisense strand to SEQ ID NO: 2008118
uuucaccaccaauaugagg

SEQ ID NO: 2008120 - RNA, 19 nt, Artificial Sequence
  Description of Artificial Sequence: Synthetic oligonucleotide
  Sense strand starting at position 522 of SEQ ID NO: 1880972
gcaggaguaguuggagcau

SEQ ID NO: 2008121 - RNA, 19 nt, Artificial Sequence
  Description of Artificial Sequence: Synthetic oligonucleotide
  Antisense strand to SEQ ID NO: 2008120
augcuccaacuacuccugc

SEQ ID NO: 2008122 - RNA, 19 nt, Artificial Sequence
  Description of Artificial Sequence: Synthetic oligonucleotide
  Sense strand starting at position 856 of SEQ ID NO: 1880972
ggccucuuccuggaucaga

SEQ ID NO: 2008123 - RNA, 19 nt, Artificial Sequence
  Description of Artificial Sequence: Synthetic oligonucleotide
  Antisense strand to SEQ ID NO: 2008122
ucugauccaggaagaggcc

SEQ ID NO: 2008124 - RNA, 19 nt, Artificial Sequence
  Description of Artificial Sequence: Synthetic oligonucleotide
  Sense strand starting at position 1110 of SEQ ID NO: 1880972
agaagucagcuaugaauuc

SEQ ID NO: 2008125 - RNA, 19 nt, Artificial Sequence
  Description of Artificial Sequence: Synthetic oligonucleotide
  Antisense strand to SEQ ID NO: 2008124
gaauucauagcugacuucu

SEQ ID NO: 2008126 - RNA, 19 nt, Artificial Sequence
  Description of Artificial Sequence: Synthetic oligonucleotide
  Sense strand starting at position 1385 of SEQ ID NO: 1880972
aaguuaugguaggaaagaa

SEQ ID NO: 2008127 - RNA, 19 nt, Artificial Sequence
  Description of Artificial Sequence: Synthetic oligonucleotide
  Antisense strand to SEQ ID NO: 2008126
uucuuuccuaccauaacuu

SEQ ID NO: 2008128 - RNA, 19 nt, Artificial Sequence
  Description of Artificial Sequence: Synthetic oligonucleotide
  Sense strand starting at position 1422 of SEQ ID NO: 1880972
caggaauggucacaacaug

SEQ ID NO: 2008129 - RNA, 19 nt, Artificial Sequence
  Description of Artificial Sequence: Synthetic oligonucleotide
  Antisense strand to SEQ ID NO: 2008128
cauguugugaccauuccug

SEQ ID NO: 2008130 - RNA, 19 nt, Artificial Sequence
  Description of Artificial Sequence: Synthetic oligonucleotide
  Sense strand starting at position 1522 of SEQ ID NO: 1880972
cgcaaagccauguaagacu

SEQ ID NO: 2008131 - RNA, 19 nt, Artificial Sequence
  Description of Artificial Sequence: Synthetic oligonucleotide
  Antisense strand to SEQ ID NO: 2008130
agucuuacauggcuuugcg

SEQ ID NO: 2008132 - RNA, 19 nt, Artificial Sequence
  Description of Artificial Sequence: Synthetic oligonucleotide
  Sense strand starting at position 1594 of SEQ ID NO: 1880972
cgcggagcacuauggaaau

SEQ ID NO: 2008133 - RNA, 19 nt, Artificial Sequence
  Description of Artificial Sequence: Synthetic oligonucleotide
  Antisense strand to SEQ ID NO: 2008132
auuuccauagugcuccgcg

SEQ ID NO: 2008134 - RNA, 19 nt, Artificial Sequence
  Description of Artificial Sequence: Synthetic oligonucleotide
  Sense strand starting at position 2057 of SEQ ID NO: 1880972
gccgcaucgaaugcauauu

SEQ ID NO: 2008135 - RNA, 19 nt, Artificial Sequence
  Description of Artificial Sequence: Synthetic oligonucleotide
  Antisense strand to SEQ ID NO: 2008134
aauaugcauucgaugcggc

SEQ ID NO: 2008136 - RNA, 19 nt, Artificial Sequence
  Description of Artificial Sequence: Synthetic oligonucleotide
  Sense strand starting at position 2157 of SEQ ID NO: 1880972
ggacguucucgagagcuca

SEQ ID NO: 2008137 - RNA, 19 nt, Artificial Sequence
  Description of Artificial Sequence: Synthetic oligonucleotide
  Antisense strand to SEQ ID NO: 2008136
ugagcucucgagaacgucc

SEQ ID NO: 2008138 - RNA, 19 nt, Artificial Sequence
  Description of Artificial Sequence: Synthetic oligonucleotide
  Sense strand starting at position 2310 of SEQ ID NO: 1880972
uuggcaguguuuguaggau

SEQ ID NO: 2008139 - RNA, 19 nt, Artificial Sequence
  Description of Artificial Sequence: Synthetic oligonucleotide
  Antisense strand to SEQ ID NO: 2008138
auccuacaaacacugccaa

SEQ ID NO: 2008140 - RNA, 19 nt, Artificial Sequence
  Description of Artificial Sequence: Synthetic oligonucleotide
  Sense strand starting at position 2380 of SEQ ID NO: 1880972
uugggugacccaugaguau

SEQ ID NO: 2008141 - RNA, 19 nt, Artificial Sequence
  Description of Artificial Sequence: Synthetic oligonucleotide
  Antisense strand to SEQ ID NO: 2008140
auacucaugggucacccaa

SEQ ID NO: 2008142 - RNA, 19 nt, Artificial Sequence
  Description of Artificial Sequence: Synthetic oligonucleotide
  Sense strand starting at position 2387 of SEQ ID NO: 1880972
acccaugaguaucccugaa

SEQ ID NO: 2008143 - RNA, 19 nt, Artificial Sequence
  Description of Artificial Sequence: Synthetic oligonucleotide
  Antisense strand to SEQ ID NO: 2008142
uucagggauacucaugggu

SEQ ID NO: 2008144 - RNA, 19 nt, Artificial Sequence
  Description of Artificial Sequence: Synthetic oligonucleotide
  Sense strand starting at position 2389 of SEQ ID NO: 1880972
ccaugaguaucccugaacu

SEQ ID NO: 2008145 - RNA, 19 nt, Artificial Sequence
  Description of Artificial Sequence: Synthetic oligonucleotide
  Antisense strand to SEQ ID NO: 2008144
aguucagggauacucaugg

SEQ ID NO: 2008146 - RNA, 19 nt, Artificial Sequence
  Description of Artificial Sequence: Synthetic oligonucleotide
  Sense strand starting at position 2448 of SEQ ID NO: 1880972
aggagaaaguguuccaggu

SEQ ID NO: 2008147 - RNA, 19 nt, Artificial Sequence
  Description of Artificial Sequence: Synthetic oligonucleotide
  Antisense strand to SEQ ID NO: 2008146
accuggaacacuuucuccu

SEQ ID NO: 2008148 - RNA, 19 nt, Artificial Sequence
  Description of Artificial Sequence: Synthetic oligonucleotide
  Sense strand starting at position 2452 of SEQ ID NO: 1880972
gaaaguguuccagguagag

SEQ ID NO: 2008149 - RNA, 19 nt, Artificial Sequence
  Description of Artificial Sequence: Synthetic oligonucleotide
  Antisense strand to SEQ ID NO: 2008148
cucuaccuggaacacuuuc

SEQ ID NO: 2008150 - RNA, 19 nt, Artificial Sequence
  Description of Artificial Sequence: Synthetic oligonucleotide
  Sense strand starting at position 2503 of SEQ ID NO: 1880972
gagaucauagcguauguuu

SEQ ID NO: 2008151 - RNA, 19 nt, Artificial Sequence
  Description of Artificial Sequence: Synthetic oligonucleotide
  Antisense strand to SEQ ID NO: 2008150
aaacauacgcuaugaucuc

SEQ ID NO: 2008152 - RNA, 19 nt, Artificial Sequence
  Description of Artificial Sequence: Synthetic oligonucleotide
  Sense strand starting at position 2508 of SEQ ID NO: 1880972
cauagcguauguuuggaaa

SEQ ID NO: 2008153 - RNA, 19 nt, Artificial Sequence
  Description of Artificial Sequence: Synthetic oligonucleotide
  Antisense strand to SEQ ID NO: 2008152
uuuccaaacauacgcuaug

SEQ ID NO: 2008154 - RNA, 19 nt, Artificial Sequence
  Description of Artificial Sequence: Synthetic oligonucleotide
  Sense strand starting at position 2535 of SEQ ID NO: 1880972
aguaauaggccugagugga

SEQ ID NO: 2008155 - RNA, 19 nt, Artificial Sequence
  Description of Artificial Sequence: Synthetic oligonucleotide
  Antisense strand to SEQ ID NO: 2008154
uccacucaggccuauuacu

SEQ ID NO: 2008156 - RNA, 19 nt, Artificial Sequence
  Description of Artificial Sequence: Synthetic oligonucleotide
  Sense strand starting at position 2598 of SEQ ID NO: 1880972
gcaugaggaggucaccauu

SEQ ID NO: 2008157 - RNA, 19 nt, Artificial Sequence
  Description of Artificial Sequence: Synthetic oligonucleotide
  Antisense strand to SEQ ID NO: 2008156
aauggugaccuccucaugc

SEQ ID NO: 2008158 - RNA, 19 nt, Artificial Sequence
  Description of Artificial Sequence: Synthetic oligonucleotide
  Sense strand starting at position 2694 of SEQ ID NO: 1880972
ccgagagcuguuugacaca

SEQ ID NO: 2008159 - RNA, 19 nt, Artificial Sequence
  Description of Artificial Sequence: Synthetic oligonucleotide
  Antisense strand to SEQ ID NO: 2008158
ugugucaaacagcucucgg

SEQ ID NO: 2008160 - RNA, 19 nt, Artificial Sequence
  Description of Artificial Sequence: Synthetic oligonucleotide
  Sense strand starting at position 2745 of SEQ ID NO: 1880972
gcagaacaagcuuaucacu

SEQ ID NO: 2008161 - RNA, 19 nt, Artificial Sequence
  Description of Artificial Sequence: Synthetic oligonucleotide
  Antisense strand to SEQ ID NO: 2008160
agugauaagcuuguucugc

SEQ ID NO: 2008162 - RNA, 19 nt, Artificial Sequence
  Description of Artificial Sequence: Synthetic oligonucleotide
  Sense strand starting at position 2751 of SEQ ID NO: 1880972
caagcuuaucacuguguga

SEQ ID NO: 2008163 - RNA, 19 nt, Artificial Sequence
  Description of Artificial Sequence: Synthetic oligonucleotide
  Antisense strand to SEQ ID NO: 2008162
ucacacagugauaagcuug

SEQ ID NO: 2008164 - RNA, 19 nt, Artificial Sequence
  Description of Artificial Sequence: Synthetic oligonucleotide
  Sense strand starting at position 2753 of SEQ ID NO: 1880972
agcuuaucacugugugaga

SEQ ID NO: 2008165 - RNA, 19 nt, Artificial Sequence
  Description of Artificial Sequence: Synthetic oligonucleotide
  Antisense strand to SEQ ID NO: 2008164
ucucacacagugauaagcu

SEQ ID NO: 2008166 - RNA, 19 nt, Artificial Sequence
  Description of Artificial Sequence: Synthetic oligonucleotide
  Sense strand starting at position 2754 of SEQ ID NO: 1880972
gcuuaucacugugugagac

SEQ ID NO: 2008167 - RNA, 19 nt, Artificial Sequence
  Description of Artificial Sequence: Synthetic oligonucleotide
  Antisense strand to SEQ ID NO: 2008166
gucucacacagugauaagc

SEQ ID NO: 2008168 - RNA, 19 nt, Artificial Sequence
  Description of Artificial Sequence: Synthetic oligonucleotide
  Sense strand starting at position 2836 of SEQ ID NO: 1880972
gggccugacuguguuccaa

SEQ ID NO: 2008169 - RNA, 19 nt, Artificial Sequence
  Description of Artificial Sequence: Synthetic oligonucleotide
  Antisense strand to SEQ ID NO: 2008168
uuggaacacagucaggccc

SEQ ID NO: 2008170 - RNA, 19 nt, Artificial Sequence
  Description of Artificial Sequence: Synthetic oligonucleotide
  Sense strand starting at position 2838 of SEQ ID NO: 1880972
gccugacuguguuccaauu

SEQ ID NO: 2008171 - RNA, 19 nt, Artificial Sequence
  Description of Artificial Sequence: Synthetic oligonucleotide
  Antisense strand to SEQ ID NO: 2008170
aauuggaacacagucaggc

SEQ ID NO: 2008172 - RNA, 19 nt, Artificial Sequence
  Description of Artificial Sequence: Synthetic oligonucleotide
  Sense strand starting at position 2983 of SEQ ID NO: 1880972
ccucgagcccauuguuaaa

SEQ ID NO: 2008173 - RNA, 19 nt, Artificial Sequence
  Description of Artificial Sequence: Synthetic oligonucleotide
  Antisense strand to SEQ ID NO: 2008172
uuuaacaaugggcucgagg

SEQ ID NO: 2008174 - RNA, 19 nt, Artificial Sequence
  Description of Artificial Sequence: Synthetic oligonucleotide
  Sense strand starting at position 3010 of SEQ ID NO: 1880972
uggcuaucugaccacacua

SEQ ID NO: 2008175 - RNA, 19 nt, Artificial Sequence
  Description of Artificial Sequence: Synthetic oligonucleotide
  Antisense strand to SEQ ID NO: 2008174
uaguguggucagauagcca

SEQ ID NO: 2008176 - RNA, 19 nt, Artificial Sequence
  Description of Artificial Sequence: Synthetic oligonucleotide
  Sense strand starting at position 3023 of SEQ ID NO: 1880972
acacuagaggucugcaaug

SEQ ID NO: 2008177 - RNA, 19 nt, Artificial Sequence
  Description of Artificial Sequence: Synthetic oligonucleotide
  Antisense strand to SEQ ID NO: 2008176
cauugcagaccucuagugu

SEQ ID NO: 2008178 - RNA, 19 nt, Artificial Sequence
  Description of Artificial Sequence: Synthetic oligonucleotide
  Sense strand starting at position 3028 of SEQ ID NO: 1880972
agaggucugcaaugagaug

SEQ ID NO: 2008179 - RNA, 19 nt, Artificial Sequence
  Description of Artificial Sequence: Synthetic oligonucleotide
  Antisense strand to SEQ ID NO: 2008178
caucucauugcagaccucu

SEQ ID NO: 2008180 - RNA, 19 nt, Artificial Sequence
  Description of Artificial Sequence: Synthetic oligonucleotide
  Sense strand starting at position 3039 of SEQ ID NO: 1880972
augagaugggcuuggguuu

SEQ ID NO: 2008181 - RNA, 19 nt, Artificial Sequence
  Description of Artificial Sequence: Synthetic oligonucleotide
  Antisense strand to SEQ ID NO: 2008180
aaacccaagcccaucucau

SEQ ID NO: 2008182 - RNA, 19 nt, Artificial Sequence
  Description of Artificial Sequence: Synthetic oligonucleotide
  Sense strand starting at position 3081 of SEQ ID NO: 1880972
guguucccaugucuccaaa

SEQ ID NO: 2008183 - RNA, 19 nt, Artificial Sequence
  Description of Artificial Sequence: Synthetic oligonucleotide
  Antisense strand to SEQ ID NO: 2008182
uuuggagacaugggaacac

SEQ ID NO: 2008184 - RNA, 19 nt, Artificial Sequence
  Description of Artificial Sequence: Synthetic oligonucleotide
  Sense strand starting at position 3083 of SEQ ID NO: 1880972
guucccaugucuccaaagu

SEQ ID NO: 2008185 - RNA, 19 nt, Artificial Sequence
  Description of Artificial Sequence: Synthetic oligonucleotide
  Antisense strand to SEQ ID NO: 2008184
acuuuggagacaugggaac

SEQ ID NO: 2008186 - RNA, 19 nt, Artificial Sequence
  Description of Artificial Sequence: Synthetic oligonucleotide
  Sense strand starting at position 3542 of SEQ ID NO: 1880972
cuccguuucucacuccaua

SEQ ID NO: 2008187 - RNA, 19 nt, Artificial Sequence
  Description of Artificial Sequence: Synthetic oligonucleotide
  Antisense strand to SEQ ID NO: 2008186
uauggagugagaaacggag

SEQ ID NO: 2008188 - RNA, 19 nt, Artificial Sequence
  Description of Artificial Sequence: Synthetic oligonucleotide
  Sense strand starting at position 3741 of SEQ ID NO: 1880972
ggcccaggaguaugaugua

SEQ ID NO: 2008189 - RNA, 19 nt, Artificial Sequence
  Description of Artificial Sequence: Synthetic oligonucleotide
  Antisense strand to SEQ ID NO: 2008188
uacaucauacuccugggcc

SEQ ID NO: 2008190 - RNA, 19 nt, Artificial Sequence
  Description of Artificial Sequence: Synthetic oligonucleotide
  Sense strand starting at position 3746 of SEQ ID NO: 1880972
aggaguaugauguaccugu

SEQ ID NO: 2008191 - RNA, 19 nt, Artificial Sequence
  Description of Artificial Sequence: Synthetic oligonucleotide
  Antisense strand to SEQ ID NO: 2008190
acagguacaucauacuccu

SEQ ID NO: 2008192 - RNA, 19 nt, Artificial Sequence
  Description of Artificial Sequence: Synthetic oligonucleotide
  Sense strand starting at position 3750 of SEQ ID NO: 1880972
guaugauguaccugucuuu

SEQ ID NO: 2008193 - RNA, 19 nt, Artificial Sequence
  Description of Artificial Sequence: Synthetic oligonucleotide
  Antisense strand to SEQ ID NO: 2008192
aaagacagguacaucauac

SEQ ID NO: 2008194 - RNA, 19 nt, Artificial Sequence
  Description of Artificial Sequence: Synthetic oligonucleotide
  Sense strand starting at position 3755 of SEQ ID NO: 1880972
auguaccugucuuuaccaa

SEQ ID NO: 2008195 - RNA, 19 nt, Artificial Sequence
  Description of Artificial Sequence: Synthetic oligonucleotide
  Antisense strand to SEQ ID NO: 2008194
uugguaaagacagguacau

SEQ ID NO: 2008196 - RNA, 19 nt, Artificial Sequence
  Description of Artificial Sequence: Synthetic oligonucleotide
  Sense strand starting at position 3756 of SEQ ID NO: 1880972
uguaccugucuuuaccaaa

SEQ ID NO: 2008197 - RNA, 19 nt, Artificial Sequence
  Description of Artificial Sequence: Synthetic oligonucleotide
  Antisense strand to SEQ ID NO: 2008196
uuugguaaagacagguaca

SEQ ID NO: 2008198 - RNA, 19 nt, Artificial Sequence
  Description of Artificial Sequence: Synthetic oligonucleotide
  Sense strand starting at position 3937 of SEQ ID NO: 1880972
ccgccacauccagaagauu

SEQ ID NO: 2008199 - RNA, 19 nt, Artificial Sequence
  Description of Artificial Sequence: Synthetic oligonucleotide
  Antisense strand to SEQ ID NO: 2008198
aaucuucuggauguggcgg

SEQ ID NO: 2008200 - RNA, 19 nt, Artificial Sequence
  Description of Artificial Sequence: Synthetic oligonucleotide
  Sense strand starting at position 77 of SEQ ID NO: 1880973
agggauagacugugccaaa

SEQ ID NO: 2008201 - RNA, 19 nt, Artificial Sequence
  Description of Artificial Sequence: Synthetic oligonucleotide
  Antisense strand to SEQ ID NO: 2008200
uuuggcacagucuaucccu

SEQ ID NO: 2008202 - RNA, 19 nt, Artificial Sequence
  Description of Artificial Sequence: Synthetic oligonucleotide
  Sense strand starting at position 124 of SEQ ID NO: 1880973
uggagucaucccgggauug

SEQ ID NO: 2008203 - RNA, 19 nt, Artificial Sequence
  Description of Artificial Sequence: Synthetic oligonucleotide
  Antisense strand to SEQ ID NO: 2008202
caaucccgggaugacucca

SEQ ID NO: 2008204 - RNA, 19 nt, Artificial Sequence
  Description of Artificial Sequence: Synthetic oligonucleotide
  Sense strand starting at position 126 of SEQ ID NO: 1880973
gagucaucccgggauugga

SEQ ID NO: 2008205 - RNA, 19 nt, Artificial Sequence
  Description of Artificial Sequence: Synthetic oligonucleotide
  Antisense strand to SEQ ID NO: 2008204
uccaaucccgggaugacuc

SEQ ID NO: 2008206 - RNA, 19 nt, Artificial Sequence
  Description of Artificial Sequence: Synthetic oligonucleotide
  Sense strand starting at position 152 of SEQ ID NO: 1880973
guuuguaggacccagcaua

SEQ ID NO: 2008207 - RNA, 19 nt, Artificial Sequence
  Description of Artificial Sequence: Synthetic oligonucleotide
  Antisense strand to SEQ ID NO: 2008206
uaugcuggguccuacaaac

SEQ ID NO: 2008208 - RNA, 19 nt, Artificial Sequence
  Description of Artificial Sequence: Synthetic oligonucleotide
  Sense strand starting at position 163 of SEQ ID NO: 1880973
ccagcauagaguggucagu

SEQ ID NO: 2008209 - RNA, 19 nt, Artificial Sequence
  Description of Artificial Sequence: Synthetic oligonucleotide
  Antisense strand to SEQ ID NO: 2008208
acugaccacucuaugcugg

SEQ ID NO: 2008210 - RNA, 19 nt, Artificial Sequence
  Description of Artificial Sequence: Synthetic oligonucleotide
  Sense strand starting at position 165 of SEQ ID NO: 1880973
agcauagaguggucagugu

SEQ ID NO: 2008211 - RNA, 19 nt, Artificial Sequence
  Description of Artificial Sequence: Synthetic oligonucleotide
  Antisense strand to SEQ ID NO: 2008210
acacugaccacucuaugcu

SEQ ID NO: 2008212 - RNA, 19 nt, Artificial Sequence
  Description of Artificial Sequence: Synthetic oligonucleotide
  Sense strand starting at position 324 of SEQ ID NO: 1880973
ggugaauguuugggacaga

SEQ ID NO: 2008213 - RNA, 19 nt, Artificial Sequence
  Description of Artificial Sequence: Synthetic oligonucleotide
  Antisense strand to SEQ ID NO: 2008212
ucugucccaaacauucacc

SEQ ID NO: 2008214 - RNA, 19 nt, Artificial Sequence
  Description of Artificial Sequence: Synthetic oligonucleotide
  Sense strand starting at position 439 of SEQ ID NO: 1880973
gaggcuugggcugagaagu

SEQ ID NO: 2008215 - RNA, 19 nt, Artificial Sequence
  Description of Artificial Sequence: Synthetic oligonucleotide
  Antisense strand to SEQ ID NO: 2008214
acuucucagcccaagccuc

SEQ ID NO: 2008216 - RNA, 19 nt, Artificial Sequence
  Description of Artificial Sequence: Synthetic oligonucleotide
  Sense strand starting at position 637 of SEQ ID NO: 1880973
ccggauguaugaaagguga

SEQ ID NO: 2008217 - RNA, 19 nt, Artificial Sequence
  Description of Artificial Sequence: Synthetic oligonucleotide
  Antisense strand to SEQ ID NO: 2008216
ucaccuuucauacauccgg

SEQ ID NO: 2008218 - RNA, 19 nt, Artificial Sequence
  Description of Artificial Sequence: Synthetic oligonucleotide
  Sense strand starting at position 639 of SEQ ID NO: 1880973
ggauguaugaaaggugaug

SEQ ID NO: 2008219 - RNA, 19 nt, Artificial Sequence
  Description of Artificial Sequence: Synthetic oligonucleotide
  Antisense strand to SEQ ID NO: 2008218
caucaccuuucauacaucc

SEQ ID NO: 2008220 - RNA, 19 nt, Artificial Sequence
  Description of Artificial Sequence: Synthetic oligonucleotide
  Sense strand starting at position 1028 of SEQ ID NO: 1880973
gauuccuggugcugucaaa

SEQ ID NO: 2008221 - RNA, 19 nt, Artificial Sequence
  Description of Artificial Sequence: Synthetic oligonucleotide
  Antisense strand to SEQ ID NO: 2008220
uuugacagcaccaggaauc

SEQ ID NO: 2008222 - RNA, 19 nt, Artificial Sequence
  Description of Artificial Sequence: Synthetic oligonucleotide
  Sense strand starting at position 1148 of SEQ ID NO: 1880973
auggcuuucuccugacauc

SEQ ID NO: 2008223 - RNA, 19 nt, Artificial Sequence
  Description of Artificial Sequence: Synthetic oligonucleotide
  Antisense strand to SEQ ID NO: 2008222
gaugucaggagaaagccau

SEQ ID NO: 2008224 - RNA, 19 nt, Artificial Sequence
  Description of Artificial Sequence: Synthetic oligonucleotide
  Sense strand starting at position 1173 of SEQ ID NO: 1880973
ugggcagguucuucaguga

SEQ ID NO: 2008225 - RNA, 19 nt, Artificial Sequence
  Description of Artificial Sequence: Synthetic oligonucleotide
  Antisense strand to SEQ ID NO: 2008224
ucacugaagaaccugccca

SEQ ID NO: 2008226 - RNA, 19 nt, Artificial Sequence
  Description of Artificial Sequence: Synthetic oligonucleotide
  Sense strand starting at position 1176 of SEQ ID NO: 1880973
gcagguucuucagugaggu

SEQ ID NO: 2008227 - RNA, 19 nt, Artificial Sequence
  Description of Artificial Sequence: Synthetic oligonucleotide
  Antisense strand to SEQ ID NO: 2008226
accucacugaagaaccugc

SEQ ID NO: 2008228 - RNA, 19 nt, Artificial Sequence
  Description of Artificial Sequence: Synthetic oligonucleotide
  Sense strand starting at position 1180 of SEQ ID NO: 1880973
guucuucagugagguggau

SEQ ID NO: 2008229 - RNA, 19 nt, Artificial Sequence
  Description of Artificial Sequence: Synthetic oligonucleotide
  Antisense strand to SEQ ID NO: 2008228
auccaccucacugaagaac

SEQ ID NO: 2008230 - RNA, 19 nt, Artificial Sequence
  Description of Artificial Sequence: Synthetic oligonucleotide
  Sense strand starting at position 1243 of SEQ ID NO: 1880973
caaggaguccuaugacuau

SEQ ID NO: 2008231 - RNA, 19 nt, Artificial Sequence
  Description of Artificial Sequence: Synthetic oligonucleotide
  Antisense strand to SEQ ID NO: 2008230
auagucauaggacuccuug

SEQ ID NO: 2008232 - RNA, 19 nt, Artificial Sequence
  Description of Artificial Sequence: Synthetic oligonucleotide
  Sense strand starting at position 1312 of SEQ ID NO: 1880973
gggugucuuuguggugagu

SEQ ID NO: 2008233 - RNA, 19 nt, Artificial Sequence
  Description of Artificial Sequence: Synthetic oligonucleotide
  Antisense strand to SEQ ID NO: 2008232
acucaccacaaagacaccc

SEQ ID NO: 2008234 - RNA, 19 nt, Artificial Sequence
  Description of Artificial Sequence: Synthetic oligonucleotide
  Sense strand starting at position 1396 of SEQ ID NO: 1880973
ucugacauuugauaaagcu

SEQ ID NO: 2008235 - RNA, 19 nt, Artificial Sequence
  Description of Artificial Sequence: Synthetic oligonucleotide
  Antisense strand to SEQ ID NO: 2008234
agcuuuaucaaaugucaga

SEQ ID NO: 2008236 - RNA, 19 nt, Artificial Sequence
  Description of Artificial Sequence: Synthetic oligonucleotide
  Sense strand starting at position 3059 of SEQ ID NO: 1880973
gcccaaacuugguuucugu

SEQ ID NO: 2008237 - RNA, 19 nt, Artificial Sequence
  Description of Artificial Sequence: Synthetic oligonucleotide
  Antisense strand to SEQ ID NO: 2008236
acagaaaccaaguuugggc

SEQ ID NO: 2008238 - RNA, 19 nt, Artificial Sequence
  Description of Artificial Sequence: Synthetic oligonucleotide
  Sense strand starting at position 3063 of SEQ ID NO: 1880973
aaacuugguuucugugaga

SEQ ID NO: 2008239 - RNA, 19 nt, Artificial Sequence
  Description of Artificial Sequence: Synthetic oligonucleotide
  Antisense strand to SEQ ID NO: 2008238
ucucacagaaaccaaguuu

SEQ ID NO: 2008240 - RNA, 19 nt, Artificial Sequence
  Description of Artificial Sequence: Synthetic oligonucleotide
  Sense strand starting at position 3066 of SEQ ID NO: 1880973
cuugguuucugugagaaua

SEQ ID NO: 2008241 - RNA, 19 nt, Artificial Sequence
  Description of Artificial Sequence: Synthetic oligonucleotide
  Antisense strand to SEQ ID NO: 2008240
uauucucacagaaaccaag

SEQ ID NO: 2008242 - RNA, 19 nt, Artificial Sequence
  Description of Artificial Sequence: Synthetic oligonucleotide
  Sense strand starting at position 3068 of SEQ ID NO: 1880973
ugguuucugugagaauagu

SEQ ID NO: 2008243 - RNA, 19 nt, Artificial Sequence
  Description of Artificial Sequence: Synthetic oligonucleotide
  Antisense strand to SEQ ID NO: 2008242
acuauucucacagaaacca

SEQ ID NO: 2008244 - RNA, 19 nt, Artificial Sequence
  Description of Artificial Sequence: Synthetic oligonucleotide
  Sense strand starting at position 3129 of SEQ ID NO: 1880973
cuuaaauccuagcaggaga

SEQ ID NO: 2008245 - RNA, 19 nt, Artificial Sequence
  Description of Artificial Sequence: Synthetic oligonucleotide
  Antisense strand to SEQ ID NO: 2008244
ucuccugcuaggauuuaag

SEQ ID NO: 2008246 - RNA, 19 nt, Artificial Sequence
  Description of Artificial Sequence: Synthetic oligonucleotide
  Sense strand starting at position 3221 of SEQ ID NO: 1880973
ucaggauagucacagugau

SEQ ID NO: 2008247 - RNA, 19 nt, Artificial Sequence
  Description of Artificial Sequence: Synthetic oligonucleotide
  Antisense strand to SEQ ID NO: 2008246
aucacugugacuauccuga

SEQ ID NO: 2008248 - RNA, 19 nt, Artificial Sequence
  Description of Artificial Sequence: Synthetic oligonucleotide
  Sense strand starting at position 3479 of SEQ ID NO: 1880973
ucuaaagcugaaugucaaa

SEQ ID NO: 2008249 - RNA, 19 nt, Artificial Sequence
  Description of Artificial Sequence: Synthetic oligonucleotide
  Antisense strand to SEQ ID NO: 2008248
uuugacauucagcuuuaga

SEQ ID NO: 2008250 - RNA, 19 nt, Artificial Sequence
  Description of Artificial Sequence: Synthetic oligonucleotide
  Sense strand starting at position 3549 of SEQ ID NO: 1880973
ccaccaguguccuccaagu

SEQ ID NO: 2008251 - RNA, 19 nt, Artificial Sequence
  Description of Artificial Sequence: Synthetic oligonucleotide
  Antisense strand to SEQ ID NO: 2008250
acuuggaggacacuggugg

SEQ ID NO: 2008252 - RNA, 19 nt, Artificial Sequence
  Description of Artificial Sequence: Synthetic oligonucleotide
  Sense strand starting at position 3584 of SEQ ID NO: 1880973
aggugcucauuguaaccau

SEQ ID NO: 2008253 - RNA, 19 nt, Artificial Sequence
  Description of Artificial Sequence: Synthetic oligonucleotide
  Antisense strand to SEQ ID NO: 2008252
augguuacaaugagcaccu

SEQ ID NO: 2008254 - RNA, 19 nt, Artificial Sequence
  Description of Artificial Sequence: Synthetic oligonucleotide
  Sense strand starting at position 3595 of SEQ ID NO: 1880973
guaaccauuucucacuagu

SEQ ID NO: 2008255 - RNA, 19 nt, Artificial Sequence
  Description of Artificial Sequence: Synthetic oligonucleotide
  Antisense strand to SEQ ID NO: 2008254
acuagugagaaaugguuac

SEQ ID NO: 2008256 - RNA, 19 nt, Artificial Sequence
  Description of Artificial Sequence: Synthetic oligonucleotide
  Sense strand starting at position 3722 of SEQ ID NO: 1880973
gggccauccuuccgccaau

SEQ ID NO: 2008257 - RNA, 19 nt, Artificial Sequence
  Description of Artificial Sequence: Synthetic oligonucleotide
  Antisense strand to SEQ ID NO: 2008256
auuggcggaaggauggccc

SEQ ID NO: 2008258 - RNA, 19 nt, Artificial Sequence
  Description of Artificial Sequence: Synthetic oligonucleotide
  Sense strand starting at position 47 of SEQ ID NO: 1880974
gcaacuauccagugaggua

SEQ ID NO: 2008259 - RNA, 19 nt, Artificial Sequence
  Description of Artificial Sequence: Synthetic oligonucleotide
  Antisense strand to SEQ ID NO: 2008258
uaccucacuggauaguugc

SEQ ID NO: 2008260 - RNA, 19 nt, Artificial Sequence
  Description of Artificial Sequence: Synthetic oligonucleotide
  Sense strand starting at position 54 of SEQ ID NO: 1880974
uccagugagguaggaauua

SEQ ID NO: 2008261 - RNA, 19 nt, Artificial Sequence
  Description of Artificial Sequence: Synthetic oligonucleotide
  Antisense strand to SEQ ID NO: 2008260
uaauuccuaccucacugga

SEQ ID NO: 2008262 - RNA, 19 nt, Artificial Sequence
  Description of Artificial Sequence: Synthetic oligonucleotide
  Sense strand starting at position 140 of SEQ ID NO: 1880974
gcagauggaaaucagcauu

SEQ ID NO: 2008263 - RNA, 19 nt, Artificial Sequence
  Description of Artificial Sequence: Synthetic oligonucleotide
  Antisense strand to SEQ ID NO: 2008262
aaugcugauuuccaucugc

SEQ ID NO: 2008264 - RNA, 19 nt, Artificial Sequence
  Description of Artificial Sequence: Synthetic oligonucleotide
  Sense strand starting at position 146 of SEQ ID NO: 1880974
ggaaaucagcauugaagca

SEQ ID NO: 2008265 - RNA, 19 nt, Artificial Sequence
  Description of Artificial Sequence: Synthetic oligonucleotide
  Antisense strand to SEQ ID NO: 2008264
ugcuucaaugcugauuucc

SEQ ID NO: 2008266 - RNA, 19 nt, Artificial Sequence
  Description of Artificial Sequence: Synthetic oligonucleotide
  Sense strand starting at position 185 of SEQ ID NO: 1880974
augcuuauacuaggcuaau

SEQ ID NO: 2008267 - RNA, 19 nt, Artificial Sequence
  Description of Artificial Sequence: Synthetic oligonucleotide
  Antisense strand to SEQ ID NO: 2008266
auuagccuaguauaagcau

SEQ ID NO: 2008268 - RNA, 19 nt, Artificial Sequence
  Description of Artificial Sequence: Synthetic oligonucleotide
  Sense strand starting at position 755 of SEQ ID NO: 1880974
cgccuuaaaucucuaagau

SEQ ID NO: 2008269 - RNA, 19 nt, Artificial Sequence
  Description of Artificial Sequence: Synthetic oligonucleotide
  Antisense strand to SEQ ID NO: 2008268
aucuuagagauuuaaggcg

SEQ ID NO: 2008270 - RNA, 19 nt, Artificial Sequence
  Description of Artificial Sequence: Synthetic oligonucleotide
  Sense strand starting at position 819 of SEQ ID NO: 1880974
ggguuaccaccuugcaaga

SEQ ID NO: 2008271 - RNA, 19 nt, Artificial Sequence
  Description of Artificial Sequence: Synthetic oligonucleotide
  Antisense strand to SEQ ID NO: 2008270
ucuugcaaggugguaaccc

SEQ ID NO: 2008272 - RNA, 19 nt, Artificial Sequence
  Description of Artificial Sequence: Synthetic oligonucleotide
  Sense strand starting at position 1017 of SEQ ID NO: 1880974
ugaccaauguugcuacaca

SEQ ID NO: 2008273 - RNA, 19 nt, Artificial Sequence
  Description of Artificial Sequence: Synthetic oligonucleotide
  Antisense strand to SEQ ID NO: 2008272
uguguagcaacauugguca

SEQ ID NO: 2008274 - RNA, 19 nt, Artificial Sequence
  Description of Artificial Sequence: Synthetic oligonucleotide
  Sense strand starting at position 1036 of SEQ ID NO: 1880974
acgacuagauaugccauau

SEQ ID NO: 2008275 - RNA, 19 nt, Artificial Sequence
  Description of Artificial Sequence: Synthetic oligonucleotide
  Antisense strand to SEQ ID NO: 2008274
auauggcauaucuagucgu

SEQ ID NO: 2008276 - RNA, 19 nt, Artificial Sequence
  Description of Artificial Sequence: Synthetic oligonucleotide
  Sense strand starting at position 1059 of SEQ ID NO: 1880974
ggcuuaggguuucugagga

SEQ ID NO: 2008277 - RNA, 19 nt, Artificial Sequence
  Description of Artificial Sequence: Synthetic oligonucleotide
  Antisense strand to SEQ ID NO: 2008276
uccucagaaacccuaagcc

SEQ ID NO: 2008278 - RNA, 19 nt, Artificial Sequence
  Description of Artificial Sequence: Synthetic oligonucleotide
  Sense strand starting at position 1372 of SEQ ID NO: 1880974
cgucguugcgccaaugaag

SEQ ID NO: 2008279 - RNA, 19 nt, Artificial Sequence
  Description of Artificial Sequence: Synthetic oligonucleotide
  Antisense strand to SEQ ID NO: 2008278
cuucauuggcgcaacgacg

SEQ ID NO: 2008280 - RNA, 19 nt, Artificial Sequence
  Description of Artificial Sequence: Synthetic oligonucleotide
  Sense strand starting at position 2171 of SEQ ID NO: 1880974
gcgccuccugaugcgaaua

SEQ ID NO: 2008281 - RNA, 19 nt, Artificial Sequence
  Description of Artificial Sequence: Synthetic oligonucleotide
  Antisense strand to SEQ ID NO: 2008280
uauucgcaucaggaggcgc

SEQ ID NO: 2008282 - RNA, 19 nt, Artificial Sequence
  Description of Artificial Sequence: Synthetic oligonucleotide
  Sense strand starting at position 2346 of SEQ ID NO: 1880974
cccaguuugcagggaagau

SEQ ID NO: 2008283 - RNA, 19 nt, Artificial Sequence
  Description of Artificial Sequence: Synthetic oligonucleotide
  Antisense strand to SEQ ID NO: 2008282
aucuucccugcaaacuggg

SEQ ID NO: 2008284 - RNA, 19 nt, Artificial Sequence
  Description of Artificial Sequence: Synthetic oligonucleotide
  Sense strand starting at position 2361 of SEQ ID NO: 1880974
agaugaaaucaacguguug

SEQ ID NO: 2008285 - RNA, 19 nt, Artificial Sequence
  Description of Artificial Sequence: Synthetic oligonucleotide
  Antisense strand to SEQ ID NO: 2008284
caacacguugauuucaucu

SEQ ID NO: 2008286 - RNA, 19 nt, Artificial Sequence
  Description of Artificial Sequence: Synthetic oligonucleotide
  Sense strand starting at position 2370 of SEQ ID NO: 1880974
caacguguugguucguuga

SEQ ID NO: 2008287 - RNA, 19 nt, Artificial Sequence
  Description of Artificial Sequence: Synthetic oligonucleotide
  Antisense strand to SEQ ID NO: 2008286
ucaacgaaccaacacguug

SEQ ID NO: 2008288 - RNA, 19 nt, Artificial Sequence
  Description of Artificial Sequence: Synthetic oligonucleotide
  Sense strand starting at position 2377 of SEQ ID NO: 1880974
uugguucguugauuucgua

SEQ ID NO: 2008289 - RNA, 19 nt, Artificial Sequence
  Description of Artificial Sequence: Synthetic oligonucleotide
  Antisense strand to SEQ ID NO: 2008288
uacgaaaucaacgaaccaa

SEQ ID NO: 2008290 - RNA, 19 nt, Artificial Sequence
  Description of Artificial Sequence: Synthetic oligonucleotide
  Sense strand starting at position 2381 of SEQ ID NO: 1880974
uucguugauuucguaaacu

SEQ ID NO: 2008291 - RNA, 19 nt, Artificial Sequence
  Description of Artificial Sequence: Synthetic oligonucleotide
  Antisense strand to SEQ ID NO: 2008290
aguuuacgaaaucaacgaa

SEQ ID NO: 2008292 - RNA, 19 nt, Artificial Sequence
  Description of Artificial Sequence: Synthetic oligonucleotide
  Sense strand starting at position 2445 of SEQ ID NO: 1880974
gagagugccagucauaguu

SEQ ID NO: 2008293 - RNA, 19 nt, Artificial Sequence
  Description of Artificial Sequence: Synthetic oligonucleotide
  Antisense strand to SEQ ID NO: 2008292
aacuaugacuggcacucuc

SEQ ID NO: 2008294 - RNA, 19 nt, Artificial Sequence
  Description of Artificial Sequence: Synthetic oligonucleotide
  Sense strand starting at position 2453 of SEQ ID NO: 1880974
cagucauaguugcuggaaa

SEQ ID NO: 2008295 - RNA, 19 nt, Artificial Sequence
  Description of Artificial Sequence: Synthetic oligonucleotide
  Antisense strand to SEQ ID NO: 2008294
uuuccagcaacuaugacug

SEQ ID NO: 2008296 - RNA, 19 nt, Artificial Sequence
  Description of Artificial Sequence: Synthetic oligonucleotide
  Sense strand starting at position 2535 of SEQ ID NO: 1880974
gcuguaguccucuagauaa

SEQ ID NO: 2008297 - RNA, 19 nt, Artificial Sequence
  Description of Artificial Sequence: Synthetic oligonucleotide
  Antisense strand to SEQ ID NO: 2008296
uuaucuagaggacuacagc

SEQ ID NO: 2008298 - RNA, 19 nt, Artificial Sequence
  Description of Artificial Sequence: Synthetic oligonucleotide
  Sense strand starting at position 2560 of SEQ ID NO: 1880974
aguauagguucaguggaau

SEQ ID NO: 2008299 - RNA, 19 nt, Artificial Sequence
  Description of Artificial Sequence: Synthetic oligonucleotide
  Antisense strand to SEQ ID NO: 2008298
auuccacugaaccuauacu

SEQ ID NO: 2008300 - RNA, 19 nt, Artificial Sequence
  Description of Artificial Sequence: Synthetic oligonucleotide
  Sense strand starting at position 2963 of SEQ ID NO: 1880974
agaugugaccuuugaggcu

SEQ ID NO: 2008301 - RNA, 19 nt, Artificial Sequence
  Description of Artificial Sequence: Synthetic oligonucleotide
  Antisense strand to SEQ ID NO: 2008300
agccucaaaggucacaucu

SEQ ID NO: 2008302 - RNA, 19 nt, Artificial Sequence
  Description of Artificial Sequence: Synthetic oligonucleotide
  Sense strand starting at position 2969 of SEQ ID NO: 1880974
gaccuuugaggcuguauga

SEQ ID NO: 2008303 - RNA, 19 nt, Artificial Sequence
  Description of Artificial Sequence: Synthetic oligonucleotide
  Antisense strand to SEQ ID NO: 2008302
ucauacagccucaaagguc

SEQ ID NO: 2008304 - RNA, 19 nt, Artificial Sequence
  Description of Artificial Sequence: Synthetic oligonucleotide
  Sense strand starting at position 3139 of SEQ ID NO: 1880974
cuguguuguguggagaaua

SEQ ID NO: 2008305 - RNA, 19 nt, Artificial Sequence
  Description of Artificial Sequence: Synthetic oligonucleotide
  Antisense strand to SEQ ID NO: 2008304
uauucuccacacaacacag

SEQ ID NO: 2008306 - RNA, 19 nt, Artificial Sequence
  Description of Artificial Sequence: Synthetic oligonucleotide
  Sense strand starting at position 3261 of SEQ ID NO: 1880974
agaugacaacauuguguga

SEQ ID NO: 2008307 - RNA, 19 nt, Artificial Sequence
  Description of Artificial Sequence: Synthetic oligonucleotide
  Antisense strand to SEQ ID NO: 2008306
ucacacaauguugucaucu

SEQ ID NO: 2008308 - RNA, 19 nt, Artificial Sequence
  Description of Artificial Sequence: Synthetic oligonucleotide
  Sense strand starting at position 3265 of SEQ ID NO: 1880974
gacaacauugugugaagga

SEQ ID NO: 2008309 - RNA, 19 nt, Artificial Sequence
  Description of Artificial Sequence: Synthetic oligonucleotide
  Antisense strand to SEQ ID NO: 2008308
uccuucacacaauguuguc

SEQ ID NO: 2008310 - RNA, 19 nt, Artificial Sequence
  Description of Artificial Sequence: Synthetic oligonucleotide
  Sense strand starting at position 3309 of SEQ ID NO: 1880974
ggagguauuagguacucca

SEQ ID NO: 2008311 - RNA, 19 nt, Artificial Sequence
  Description of Artificial Sequence: Synthetic oligonucleotide
  Antisense strand to SEQ ID NO: 2008310
uggaguaccuaauaccucc

SEQ ID NO: 2008312 - RNA, 19 nt, Artificial Sequence
  Description of Artificial Sequence: Synthetic oligonucleotide
  Sense strand starting at position 3312 of SEQ ID NO: 1880974
gguauuagguacuccaaga

SEQ ID NO: 2008313 - RNA, 19 nt, Artificial Sequence
  Description of Artificial Sequence: Synthetic oligonucleotide
  Antisense strand to SEQ ID NO: 2008312
ucuuggaguaccuaauacc

SEQ ID NO: 2008314 - RNA, 19 nt, Artificial Sequence
  Description of Artificial Sequence: Synthetic oligonucleotide
  Sense strand starting at position 3335 of SEQ ID NO: 1880974
agagaaaggagugguuacu

SEQ ID NO: 2008315 - RNA, 19 nt, Artificial Sequence
  Description of Artificial Sequence: Synthetic oligonucleotide
  Antisense strand to SEQ ID NO: 2008314
aguaaccacuccuuucucu

SEQ ID NO: 2008316 - RNA, 19 nt, Artificial Sequence
  Description of Artificial Sequence: Synthetic oligonucleotide
  Sense strand starting at position 3341 of SEQ ID NO: 1880974
aggagugguuacuccugaa

SEQ ID NO: 2008317 - RNA, 19 nt, Artificial Sequence
  Description of Artificial Sequence: Synthetic oligonucleotide
  Antisense strand to SEQ ID NO: 2008316
uucaggaguaaccacuccu

SEQ ID NO: 2008318 - RNA, 19 nt, Artificial Sequence
  Description of Artificial Sequence: Synthetic oligonucleotide
  Sense strand starting at position 3348 of SEQ ID NO: 1880974
guuacuccugaauggcaaa

SEQ ID NO: 2008319 - RNA, 19 nt, Artificial Sequence
  Description of Artificial Sequence: Synthetic oligonucleotide
  Antisense strand to SEQ ID NO: 2008318
uuugccauucaggaguaac

SEQ ID NO: 2008320 - RNA, 19 nt, Artificial Sequence
  Description of Artificial Sequence: Synthetic oligonucleotide
  Sense strand starting at position 3404 of SEQ ID NO: 1880974
agggacaaauccuaggaau

SEQ ID NO: 2008321 - RNA, 19 nt, Artificial Sequence
  Description of Artificial Sequence: Synthetic oligonucleotide
  Antisense strand to SEQ ID NO: 2008320
auuccuaggauuugucccu

SEQ ID NO: 2008322 - RNA, 19 nt, Artificial Sequence
  Description of Artificial Sequence: Synthetic oligonucleotide
  Sense strand starting at position 3458 of SEQ ID NO: 1880974
gugugcaagcuuuacagga

SEQ ID NO: 2008323 - RNA, 19 nt, Artificial Sequence
  Description of Artificial Sequence: Synthetic oligonucleotide
  Antisense strand to SEQ ID NO: 2008322
uccuguaaagcuugcacac

SEQ ID NO: 2008324 - RNA, 19 nt, Artificial Sequence
  Description of Artificial Sequence: Synthetic oligonucleotide
  Sense strand starting at position 3590 of SEQ ID NO: 1880974
gagacagagucucuacuca

SEQ ID NO: 2008325 - RNA, 19 nt, Artificial Sequence
  Description of Artificial Sequence: Synthetic oligonucleotide
  Antisense strand to SEQ ID NO: 2008324
ugaguagagacucugucuc

SEQ ID NO: 2008326 - RNA, 19 nt, Artificial Sequence
  Description of Artificial Sequence: Synthetic oligonucleotide
  Sense strand starting at position 3803 of SEQ ID NO: 1880974
ucaagugguccacacacuu

SEQ ID NO: 2008327 - RNA, 19 nt, Artificial Sequence
  Description of Artificial Sequence: Synthetic oligonucleotide
  Antisense strand to SEQ ID NO: 2008326
aaguguguggaccacuuga

SEQ ID NO: 2008328 - RNA, 19 nt, Artificial Sequence
  Description of Artificial Sequence: Synthetic oligonucleotide
  Sense strand starting at position 3882 of SEQ ID NO: 1880974
uuagaaagcuuccucugga

SEQ ID NO: 2008329 - RNA, 19 nt, Artificial Sequence
  Description of Artificial Sequence: Synthetic oligonucleotide
  Antisense strand to SEQ ID NO: 2008328
uccagaggaagcuuucuaa

SEQ ID NO: 2008330 - RNA, 19 nt, Artificial Sequence
  Description of Artificial Sequence: Synthetic oligonucleotide
  Sense strand starting at position 3885 of SEQ ID NO: 1880974
gaaagcuuccucuggaagu

SEQ ID NO: 2008331 - RNA, 19 nt, Artificial Sequence
  Description of Artificial Sequence: Synthetic oligonucleotide
  Antisense strand to SEQ ID NO: 2008330
acuuccagaggaagcuuuc

SEQ ID NO: 2008332 - RNA, 19 nt, Artificial Sequence
  Description of Artificial Sequence: Synthetic oligonucleotide
  Sense strand starting at position 3887 of SEQ ID NO: 1880974
aagcuuccucuggaaguga

SEQ ID NO: 2008333 - RNA, 19 nt, Artificial Sequence
  Description of Artificial Sequence: Synthetic oligonucleotide
  Antisense strand to SEQ ID NO: 2008332
ucacuuccagaggaagcuu

SEQ ID NO: 2008334 - RNA, 19 nt, Artificial Sequence
  Description of Artificial Sequence: Synthetic oligonucleotide
  Sense strand starting at position 3909 of SEQ ID NO: 1880974
gguugaaucagcugggaaa

SEQ ID NO: 2008335 - RNA, 19 nt, Artificial Sequence
  Description of Artificial Sequence: Synthetic oligonucleotide
  Antisense strand to SEQ ID NO: 2008334
uuucccagcugauucaacc

SEQ ID NO: 2008336 - RNA, 19 nt, Artificial Sequence
  Description of Artificial Sequence: Synthetic oligonucleotide
  Sense strand starting at position 3935 of SEQ ID NO: 1880974
cuagcaugcuaauuagauc

SEQ ID NO: 2008337 - RNA, 19 nt, Artificial Sequence
  Description of Artificial Sequence: Synthetic oligonucleotide
  Antisense strand to SEQ ID NO: 2008336
gaucuaauuagcaugcuag

SEQ ID NO: 2008338 - RNA, 19 nt, Artificial Sequence
  Description of Artificial Sequence: Synthetic oligonucleotide
  Sense strand starting at position 137 of SEQ ID NO: 1880975
gugcauuggccuuugugua

SEQ ID NO: 2008339 - RNA, 19 nt, Artificial Sequence
  Description of Artificial Sequence: Synthetic oligonucleotide
  Antisense strand to SEQ ID NO: 2008338
uacacaaaggccaaugcac

SEQ ID NO: 2008340 - RNA, 19 nt, Artificial Sequence
  Description of Artificial Sequence: Synthetic oligonucleotide
  Sense strand starting at position 144 of SEQ ID NO: 1880975
ggccuuuguguacuugcua

SEQ ID NO: 2008341 - RNA, 19 nt, Artificial Sequence
  Description of Artificial Sequence: Synthetic oligonucleotide
  Antisense strand to SEQ ID NO: 2008340
uagcaaguacacaaaggcc

SEQ ID NO: 2008342 - RNA, 19 nt, Artificial Sequence
  Description of Artificial Sequence: Synthetic oligonucleotide
  Sense strand starting at position 168 of SEQ ID NO: 1880975
cuguguauccuugagagca

SEQ ID NO: 2008343 - RNA, 19 nt, Artificial Sequence
  Description of Artificial Sequence: Synthetic oligonucleotide
  Antisense strand to SEQ ID NO: 2008342
ugcucucaaggauacacag

SEQ ID NO: 2008344 - RNA, 19 nt, Artificial Sequence
  Description of Artificial Sequence: Synthetic oligonucleotide
  Sense strand starting at position 221 of SEQ ID NO: 1880975
cuagcaagugaacauauau

SEQ ID NO: 2008345 - RNA, 19 nt, Artificial Sequence
  Description of Artificial Sequence: Synthetic oligonucleotide
  Antisense strand to SEQ ID NO: 2008344
auauauguucacuugcuag

SEQ ID NO: 2008346 - RNA, 19 nt, Artificial Sequence
  Description of Artificial Sequence: Synthetic oligonucleotide
  Sense strand starting at position 300 of SEQ ID NO: 1880975
aagagauuccauuguuaga

SEQ ID NO: 2008347 - RNA, 19 nt, Artificial Sequence
  Description of Artificial Sequence: Synthetic oligonucleotide
  Antisense strand to SEQ ID NO: 2008346
ucuaacaauggaaucucuu

SEQ ID NO: 2008348 - RNA, 19 nt, Artificial Sequence
  Description of Artificial Sequence: Synthetic oligonucleotide
  Sense strand starting at position 302 of SEQ ID NO: 1880975
gagauuccauuguuagaau

SEQ ID NO: 2008349 - RNA, 19 nt, Artificial Sequence
  Description of Artificial Sequence: Synthetic oligonucleotide
  Antisense strand to SEQ ID NO: 2008348
auucuaacaauggaaucuc

SEQ ID NO: 2008350 - RNA, 19 nt, Artificial Sequence
  Description of Artificial Sequence: Synthetic oligonucleotide
  Sense strand starting at position 311 of SEQ ID NO: 1880975
uuguuagaaugguuucuua

SEQ ID NO: 2008351 - RNA, 19 nt, Artificial Sequence
  Description of Artificial Sequence: Synthetic oligonucleotide
  Antisense strand to SEQ ID NO: 2008350
uaagaaaccauucuaacaa

SEQ ID NO: 2008352 - RNA, 19 nt, Artificial Sequence
  Description of Artificial Sequence: Synthetic oligonucleotide
  Sense strand starting at position 314 of SEQ ID NO: 1880975
uuagaaugguuucuuacug

SEQ ID NO: 2008353 - RNA, 19 nt, Artificial Sequence
  Description of Artificial Sequence: Synthetic oligonucleotide
  Antisense strand to SEQ ID NO: 2008352
caguaagaaaccauucuaa

SEQ ID NO: 2008354 - RNA, 19 nt, Artificial Sequence
  Description of Artificial Sequence: Synthetic oligonucleotide
  Sense strand starting at position 356 of SEQ ID NO: 1880975
cagcgaagucuugagagua

SEQ ID NO: 2008355 - RNA, 19 nt, Artificial Sequence
  Description of Artificial Sequence: Synthetic oligonucleotide
  Antisense strand to SEQ ID NO: 2008354
uacucucaagacuucgcug

SEQ ID NO: 2008356 - RNA, 19 nt, Artificial Sequence
  Description of Artificial Sequence: Synthetic oligonucleotide
  Sense strand starting at position 516 of SEQ ID NO: 1880975
ucaagaucccaggaugcuu

SEQ ID NO: 2008357 - RNA, 19 nt, Artificial Sequence
  Description of Artificial Sequence: Synthetic oligonucleotide
  Antisense strand to SEQ ID NO: 2008356
aagcauccugggaucuuga

SEQ ID NO: 2008358 - RNA, 19 nt, Artificial Sequence
  Description of Artificial Sequence: Synthetic oligonucleotide
  Sense strand starting at position 527 of SEQ ID NO: 1880975
ggaugcuugauccgggaaa

SEQ ID NO: 2008359 - RNA, 19 nt, Artificial Sequence
  Description of Artificial Sequence: Synthetic oligonucleotide
  Antisense strand to SEQ ID NO: 2008358
uuucccggaucaagcaucc

SEQ ID NO: 2008360 - RNA, 19 nt, Artificial Sequence
  Description of Artificial Sequence: Synthetic oligonucleotide
  Sense strand starting at position 646 of SEQ ID NO: 1880975
ucggcugcucuguuacuga

SEQ ID NO: 2008361 - RNA, 19 nt, Artificial Sequence
  Description of Artificial Sequence: Synthetic oligonucleotide
  Antisense strand to SEQ ID NO: 2008360
ucaguaacagagcagccga

SEQ ID NO: 2008362 - RNA, 19 nt, Artificial Sequence
  Description of Artificial Sequence: Synthetic oligonucleotide
  Sense strand starting at position 670 of SEQ ID NO: 1880975
gucuauguccuuggacaag

SEQ ID NO: 2008363 - RNA, 19 nt, Artificial Sequence
  Description of Artificial Sequence: Synthetic oligonucleotide
  Antisense strand to SEQ ID NO: 2008362
cuuguccaaggacauagac

SEQ ID NO: 2008364 - RNA, 19 nt, Artificial Sequence
  Description of Artificial Sequence: Synthetic oligonucleotide
  Sense strand starting at position 714 of SEQ ID NO: 1880975
uuccuuguccuagauaggu

SEQ ID NO: 2008365 - RNA, 19 nt, Artificial Sequence
  Description of Artificial Sequence: Synthetic oligonucleotide
  Antisense strand to SEQ ID NO: 2008364
accuaucuaggacaaggaa

SEQ ID NO: 2008366 - RNA, 19 nt, Artificial Sequence
  Description of Artificial Sequence: Synthetic oligonucleotide
  Sense strand starting at position 719 of SEQ ID NO: 1880975
uguccuagauagguucuaa

SEQ ID NO: 2008367 - RNA, 19 nt, Artificial Sequence
  Description of Artificial Sequence: Synthetic oligonucleotide
  Antisense strand to SEQ ID NO: 2008366
uuagaaccuaucuaggaca

SEQ ID NO: 2008368 - RNA, 19 nt, Artificial Sequence
  Description of Artificial Sequence: Synthetic oligonucleotide
  Sense strand starting at position 745 of SEQ ID NO: 1880975
ggguccuuacaguaaguua

SEQ ID NO: 2008369 - RNA, 19 nt, Artificial Sequence
  Description of Artificial Sequence: Synthetic oligonucleotide
  Antisense strand to SEQ ID NO: 2008368
uaacuuacuguaaggaccc

SEQ ID NO: 2008370 - RNA, 19 nt, Artificial Sequence
  Description of Artificial Sequence: Synthetic oligonucleotide
  Sense strand starting at position 800 of SEQ ID NO: 1880975
ucaguauaccucugaguag

SEQ ID NO: 2008371 - RNA, 19 nt, Artificial Sequence
  Description of Artificial Sequence: Synthetic oligonucleotide
  Antisense strand to SEQ ID NO: 2008370
cuacucagagguauacuga

SEQ ID NO: 2008372 - RNA, 19 nt, Artificial Sequence
  Description of Artificial Sequence: Synthetic oligonucleotide
  Sense strand starting at position 817 of SEQ ID NO: 1880975
agcuguuaagguuacaaua

SEQ ID NO: 2008373 - RNA, 19 nt, Artificial Sequence
  Description of Artificial Sequence: Synthetic oligonucleotide
  Antisense strand to SEQ ID NO: 2008372
uauuguaaccuuaacagcu

SEQ ID NO: 2008374 - RNA, 19 nt, Artificial Sequence
  Description of Artificial Sequence: Synthetic oligonucleotide
  Sense strand starting at position 893 of SEQ ID NO: 1880975
ucagguuuacugggaagag

SEQ ID NO: 2008375 - RNA, 19 nt, Artificial Sequence
  Description of Artificial Sequence: Synthetic oligonucleotide
  Antisense strand to SEQ ID NO: 2008374
cucuucccaguaaaccuga

SEQ ID NO: 2008376 - RNA, 19 nt, Artificial Sequence
  Description of Artificial Sequence: Synthetic oligonucleotide
  Sense strand starting at position 978 of SEQ ID NO: 1880975
gcaaauucucucuggaccu

SEQ ID NO: 2008377 - RNA, 19 nt, Artificial Sequence
  Description of Artificial Sequence: Synthetic oligonucleotide
  Antisense strand to SEQ ID NO: 2008376
agguccagagagaauuugc

SEQ ID NO: 2008378 - RNA, 19 nt, Artificial Sequence
  Description of Artificial Sequence: Synthetic oligonucleotide
  Sense strand starting at position 1337 of SEQ ID NO: 1880975
aguauaccauacucggaau

SEQ ID NO: 2008379 - RNA, 19 nt, Artificial Sequence
  Description of Artificial Sequence: Synthetic oligonucleotide
  Antisense strand to SEQ ID NO: 2008378
auuccgaguaugguauacu

SEQ ID NO: 2008380 - RNA, 19 nt, Artificial Sequence
  Description of Artificial Sequence: Synthetic oligonucleotide
  Sense strand starting at position 1355 of SEQ ID NO: 1880975
uuaaucaguuaggcuuaaa

SEQ ID NO: 2008381 - RNA, 19 nt, Artificial Sequence
  Description of Artificial Sequence: Synthetic oligonucleotide
  Antisense strand to SEQ ID NO: 2008380
uuuaagccuaacugauuaa

SEQ ID NO: 2008382 - RNA, 19 nt, Artificial Sequence
  Description of Artificial Sequence: Synthetic oligonucleotide
  Sense strand starting at position 1428 of SEQ ID NO: 1880975
auauguccuucuguaauga

SEQ ID NO: 2008383 - RNA, 19 nt, Artificial Sequence
  Description of Artificial Sequence: Synthetic oligonucleotide
  Antisense strand to SEQ ID NO: 2008382
ucauuacagaaggacauau

SEQ ID NO: 2008384 - RNA, 19 nt, Artificial Sequence
  Description of Artificial Sequence: Synthetic oligonucleotide
  Sense strand starting at position 2799 of SEQ ID NO: 1880975
uucugucuguucuuaauuu

SEQ ID NO: 2008385 - RNA, 19 nt, Artificial Sequence
  Description of Artificial Sequence: Synthetic oligonucleotide
  Antisense strand to SEQ ID NO: 2008384
aaauuaagaacagacagaa

SEQ ID NO: 2008386 - RNA, 19 nt, Artificial Sequence
  Description of Artificial Sequence: Synthetic oligonucleotide
  Sense strand starting at position 2875 of SEQ ID NO: 1880975
ugagacucuuucuuugacu

SEQ ID NO: 2008387 - RNA, 19 nt, Artificial Sequence
  Description of Artificial Sequence: Synthetic oligonucleotide
  Antisense strand to SEQ ID NO: 2008386
agucaaagaaagagucuca

SEQ ID NO: 2008388 - RNA, 19 nt, Artificial Sequence
  Description of Artificial Sequence: Synthetic oligonucleotide
  Sense strand starting at position 3067 of SEQ ID NO: 1880975
gaguuuauuccguaacucu

SEQ ID NO: 2008389 - RNA, 19 nt, Artificial Sequence
  Description of Artificial Sequence: Synthetic oligonucleotide
  Antisense strand to SEQ ID NO: 2008388
agaguuacggaauaaacuc

SEQ ID NO: 2008390 - RNA, 19 nt, Artificial Sequence
  Description of Artificial Sequence: Synthetic oligonucleotide
  Sense strand starting at position 3075 of SEQ ID NO: 1880975
uccguaacucuguugucga

SEQ ID NO: 2008391 - RNA, 19 nt, Artificial Sequence
  Description of Artificial Sequence: Synthetic oligonucleotide
  Antisense strand to SEQ ID NO: 2008390
ucgacaacagaguuacgga

SEQ ID NO: 2008392 - RNA, 19 nt, Artificial Sequence
  Description of Artificial Sequence: Synthetic oligonucleotide
  Sense strand starting at position 3088 of SEQ ID NO: 1880975
ugucgaugucacuugcuuu

SEQ ID NO: 2008393 - RNA, 19 nt, Artificial Sequence
  Description of Artificial Sequence: Synthetic oligonucleotide
  Antisense strand to SEQ ID NO: 2008392
aaagcaagugacaucgaca

SEQ ID NO: 2008394 - RNA, 19 nt, Artificial Sequence
  Description of Artificial Sequence: Synthetic oligonucleotide
  Sense strand starting at position 3176 of SEQ ID NO: 1880975
agcuuuauugcuuagggaa

SEQ ID NO: 2008395 - RNA, 19 nt, Artificial Sequence
  Description of Artificial Sequence: Synthetic oligonucleotide
  Antisense strand to SEQ ID NO: 2008394
uucccuaagcaauaaagcu

SEQ ID NO: 2008396 - RNA, 19 nt, Artificial Sequence
  Description of Artificial Sequence: Synthetic oligonucleotide
  Sense strand starting at position 3257 of SEQ ID NO: 1880975
uuucucuagugauuaagag

SEQ ID NO: 2008397 - RNA, 19 nt, Artificial Sequence
  Description of Artificial Sequence: Synthetic oligonucleotide
  Antisense strand to SEQ ID NO: 2008396
cucuuaaucacuagagaaa

SEQ ID NO: 2008398 - RNA, 19 nt, Artificial Sequence
  Description of Artificial Sequence: Synthetic oligonucleotide
  Sense strand starting at position 3265 of SEQ ID NO: 1880975
gugauuaagagaggcaguu

SEQ ID NO: 2008399 - RNA, 19 nt, Artificial Sequence
  Description of Artificial Sequence: Synthetic oligonucleotide
  Antisense strand to SEQ ID NO: 2008398
aacugccucucuuaaucac

SEQ ID NO: 2008400 - RNA, 19 nt, Artificial Sequence
  Description of Artificial Sequence: Synthetic oligonucleotide
  Sense strand starting at position 3356 of SEQ ID NO: 1880975
agcacuauucuguaagcaa

SEQ ID NO: 2008401 - RNA, 19 nt, Artificial Sequence
  Description of Artificial Sequence: Synthetic oligonucleotide
  Antisense strand to SEQ ID NO: 2008400
uugcuuacagaauagugcu

SEQ ID NO: 2008402 - RNA, 19 nt, Artificial Sequence
  Description of Artificial Sequence: Synthetic oligonucleotide
  Sense strand starting at position 3377 of SEQ ID NO: 1880975
gugggauacuaagaauuug

SEQ ID NO: 2008403 - RNA, 19 nt, Artificial Sequence
  Description of Artificial Sequence: Synthetic oligonucleotide
  Antisense strand to SEQ ID NO: 2008402
caaauucuuaguaucccac

SEQ ID NO: 2008404 - RNA, 19 nt, Artificial Sequence
  Description of Artificial Sequence: Synthetic oligonucleotide
  Sense strand starting at position 3621 of SEQ ID NO: 1880975
uaaggaauauguguacaug

SEQ ID NO: 2008405 - RNA, 19 nt, Artificial Sequence
  Description of Artificial Sequence: Synthetic oligonucleotide
  Antisense strand to SEQ ID NO: 2008404
cauguacacauauuccuua

SEQ ID NO: 2008406 - RNA, 19 nt, Artificial Sequence
  Description of Artificial Sequence: Synthetic oligonucleotide
  Sense strand starting at position 3684 of SEQ ID NO: 1880975
agaugucaugcagaauuau

SEQ ID NO: 2008407 - RNA, 19 nt, Artificial Sequence
  Description of Artificial Sequence: Synthetic oligonucleotide
  Antisense strand to SEQ ID NO: 2008406
auaauucugcaugacaucu

SEQ ID NO: 2008408 - RNA, 19 nt, Artificial Sequence
  Description of Artificial Sequence: Synthetic oligonucleotide
  Sense strand starting at position 3847 of SEQ ID NO: 1880975
uuccauagaacggguuauu

SEQ ID NO: 2008409 - RNA, 19 nt, Artificial Sequence
  Description of Artificial Sequence: Synthetic oligonucleotide
  Antisense strand to SEQ ID NO: 2008408
aauaacccguucuauggaa

SEQ ID NO: 2008410 - RNA, 19 nt, Artificial Sequence
  Description of Artificial Sequence: Synthetic oligonucleotide
  Sense strand starting at position 3891 of SEQ ID NO: 1880975
aggcuuuaauaggugggaa

SEQ ID NO: 2008411 - RNA, 19 nt, Artificial Sequence
  Description of Artificial Sequence: Synthetic oligonucleotide
  Antisense strand to SEQ ID NO: 2008410
uucccaccuauuaaagccu

SEQ ID NO: 2008412 - RNA, 19 nt, Artificial Sequence
  Description of Artificial Sequence: Synthetic oligonucleotide
  Sense strand starting at position 3892 of SEQ ID NO: 1880975
ggcuuuaauaggugggaau

SEQ ID NO: 2008413 - RNA, 19 nt, Artificial Sequence
  Description of Artificial Sequence: Synthetic oligonucleotide
  Antisense strand to SEQ ID NO: 2008412
auucccaccuauuaaagcc

SEQ ID NO: 2008414 - RNA, 19 nt, Artificial Sequence
  Description of Artificial Sequence: Synthetic oligonucleotide
  Sense strand starting at position 3893 of SEQ ID NO: 1880975
gcuuuaauaggugggaauu

SEQ ID NO: 2008415 - RNA, 19 nt, Artificial Sequence
  Description of Artificial Sequence: Synthetic oligonucleotide
  Antisense strand to SEQ ID NO: 2008414
aauucccaccuauuaaagc

SEQ ID NO: 2008416 - RNA, 19 nt, Artificial Sequence
  Description of Artificial Sequence: Synthetic oligonucleotide
  Sense strand starting at position 3894 of SEQ ID NO: 1880975
cuuuaauaggugggaauua

SEQ ID NO: 2008417 - RNA, 19 nt, Artificial Sequence
  Description of Artificial Sequence: Synthetic oligonucleotide
  Antisense strand to SEQ ID NO: 2008416
uaauucccaccuauuaaag

SEQ ID NO: 2008418 - RNA, 19 nt, Artificial Sequence
  Description of Artificial Sequence: Synthetic oligonucleotide
  Sense strand starting at position 252 of SEQ ID NO: 1880976
agcuacauccaguggagaa

SEQ ID NO: 2008419 - RNA, 19 nt, Artificial Sequence
  Description of Artificial Sequence: Synthetic oligonucleotide
  Antisense strand to SEQ ID NO: 2008418
uucuccacuggauguagcu

SEQ ID NO: 2008420 - RNA, 19 nt, Artificial Sequence
  Description of Artificial Sequence: Synthetic oligonucleotide
  Sense strand starting at position 264 of SEQ ID NO: 1880976
uggagaaguucugcucuuc

SEQ ID NO: 2008421 - RNA, 19 nt, Artificial Sequence
  Description of Artificial Sequence: Synthetic oligonucleotide
  Antisense strand to SEQ ID NO: 2008420
gaagagcagaacuucucca

SEQ ID NO: 2008422 - RNA, 19 nt, Artificial Sequence
  Description of Artificial Sequence: Synthetic oligonucleotide
  Sense strand starting at position 447 of SEQ ID NO: 1880976
ugggauugguuagaacaca

SEQ ID NO: 2008423 - RNA, 19 nt, Artificial Sequence
  Description of Artificial Sequence: Synthetic oligonucleotide
  Antisense strand to SEQ ID NO: 2008422
uguguucuaaccaauccca

SEQ ID NO: 2008424 - RNA, 19 nt, Artificial Sequence
  Description of Artificial Sequence: Synthetic oligonucleotide
  Sense strand starting at position 498 of SEQ ID NO: 1880976
acccaugagcacugaaaga

SEQ ID NO: 2008425 - RNA, 19 nt, Artificial Sequence
  Description of Artificial Sequence: Synthetic oligonucleotide
  Antisense strand to SEQ ID NO: 2008424
ucuuucagugcucaugggu

SEQ ID NO: 2008426 - RNA, 19 nt, Artificial Sequence
  Description of Artificial Sequence: Synthetic oligonucleotide
  Sense strand starting at position 844 of SEQ ID NO: 1880976
caggaaggcuaucuuuagu

SEQ ID NO: 2008427 - RNA, 19 nt, Artificial Sequence
  Description of Artificial Sequence: Synthetic oligonucleotide
  Antisense strand to SEQ ID NO: 2008426
acuaaagauagccuuccug

SEQ ID NO: 2008428 - RNA, 19 nt, Artificial Sequence
  Description of Artificial Sequence: Synthetic oligonucleotide
  Sense strand starting at position 847 of SEQ ID NO: 1880976
gaaggcuaucuuuaguuaa

SEQ ID NO: 2008429 - RNA, 19 nt, Artificial Sequence
  Description of Artificial Sequence: Synthetic oligonucleotide
  Antisense strand to SEQ ID NO: 2008428
uuaacuaaagauagccuuc

SEQ ID NO: 2008430 - RNA, 19 nt, Artificial Sequence
  Description of Artificial Sequence: Synthetic oligonucleotide
  Sense strand starting at position 849 of SEQ ID NO: 1880976
aggcuaucuuuaguuaaga

SEQ ID NO: 2008431 - RNA, 19 nt, Artificial Sequence
  Description of Artificial Sequence: Synthetic oligonucleotide
  Antisense strand to SEQ ID NO: 2008430
ucuuaacuaaagauagccu

SEQ ID NO: 2008432 - RNA, 19 nt, Artificial Sequence
  Description of Artificial Sequence: Synthetic oligonucleotide
  Sense strand starting at position 850 of SEQ ID NO: 1880976
ggcuaucuuuaguuaagac

SEQ ID NO: 2008433 - RNA, 19 nt, Artificial Sequence
  Description of Artificial Sequence: Synthetic oligonucleotide
  Antisense strand to SEQ ID NO: 2008432
gucuuaacuaaagauagcc

SEQ ID NO: 2008434 - RNA, 19 nt, Artificial Sequence
  Description of Artificial Sequence: Synthetic oligonucleotide
  Sense strand starting at position 858 of SEQ ID NO: 1880976
uuaguuaagacuuggugac

SEQ ID NO: 2008435 - RNA, 19 nt, Artificial Sequence
  Description of Artificial Sequence: Synthetic oligonucleotide
  Antisense strand to SEQ ID NO: 2008434
gucaccaagucuuaacuaa

SEQ ID NO: 2008436 - RNA, 19 nt, Artificial Sequence
  Description of Artificial Sequence: Synthetic oligonucleotide
  Sense strand starting at position 891 of SEQ ID NO: 1880976
ucuuuauuggugugguuag

SEQ ID NO: 2008437 - RNA, 19 nt, Artificial Sequence
  Description of Artificial Sequence: Synthetic oligonucleotide
  Antisense strand to SEQ ID NO: 2008436
cuaaccacaccaauaaaga

SEQ ID NO: 2008438 - RNA, 19 nt, Artificial Sequence
  Description of Artificial Sequence: Synthetic oligonucleotide
  Sense strand starting at position 969 of SEQ ID NO: 1880976
gauauuaaucaguauugug

SEQ ID NO: 2008439 - RNA, 19 nt, Artificial Sequence
  Description of Artificial Sequence: Synthetic oligonucleotide
  Antisense strand to SEQ ID NO: 2008438
cacaauacugauuaauauc

SEQ ID NO: 2008440 - RNA, 19 nt, Artificial Sequence
  Description of Artificial Sequence: Synthetic oligonucleotide
  Sense strand starting at position 985 of SEQ ID NO: 1880976
gugaauugcuguuucuaua

SEQ ID NO: 2008441 - RNA, 19 nt, Artificial Sequence
  Description of Artificial Sequence: Synthetic oligonucleotide
  Antisense strand to SEQ ID NO: 2008440
uauagaaacagcaauucac

SEQ ID NO: 2008442 - RNA, 19 nt, Artificial Sequence
  Description of Artificial Sequence: Synthetic oligonucleotide
  Sense strand starting at position 1163 of SEQ ID NO: 1880976
gucugaaaucgagguguua

SEQ ID NO: 2008443 - RNA, 19 nt, Artificial Sequence
  Description of Artificial Sequence: Synthetic oligonucleotide
  Antisense strand to SEQ ID NO: 2008442
uaacaccucgauuucagac

SEQ ID NO: 2008444 - RNA, 19 nt, Artificial Sequence
  Description of Artificial Sequence: Synthetic oligonucleotide
  Sense strand starting at position 1266 of SEQ ID NO: 1880976
ggacaugugucacuggauu

SEQ ID NO: 2008445 - RNA, 19 nt, Artificial Sequence
  Description of Artificial Sequence: Synthetic oligonucleotide
  Antisense strand to SEQ ID NO: 2008444
aauccagugacacaugucc

SEQ ID NO: 2008446 - RNA, 19 nt, Artificial Sequence
  Description of Artificial Sequence: Synthetic oligonucleotide
  Sense strand starting at position 1390 of SEQ ID NO: 1880976
ggauuaggauaggaacaua

SEQ ID NO: 2008447 - RNA, 19 nt, Artificial Sequence
  Description of Artificial Sequence: Synthetic oligonucleotide
  Antisense strand to SEQ ID NO: 2008446
uauguuccuauccuaaucc

SEQ ID NO: 2008448 - RNA, 19 nt, Artificial Sequence
  Description of Artificial Sequence: Synthetic oligonucleotide
  Sense strand starting at position 1433 of SEQ ID NO: 1880976
ccacuacagucaguaauca

SEQ ID NO: 2008449 - RNA, 19 nt, Artificial Sequence
  Description of Artificial Sequence: Synthetic oligonucleotide
  Antisense strand to SEQ ID NO: 2008448
ugauuacugacuguagugg

SEQ ID NO: 2008450 - RNA, 19 nt, Artificial Sequence
  Description of Artificial Sequence: Synthetic oligonucleotide
  Sense strand starting at position 1699 of SEQ ID NO: 1880976
gccagauaaugggcacaaa

SEQ ID NO: 2008451 - RNA, 19 nt, Artificial Sequence
  Description of Artificial Sequence: Synthetic oligonucleotide
  Antisense strand to SEQ ID NO: 2008450
uuugugcccauuaucuggc

SEQ ID NO: 2008452 - RNA, 19 nt, Artificial Sequence
  Description of Artificial Sequence: Synthetic oligonucleotide
  Sense strand starting at position 1851 of SEQ ID NO: 1880976
agaccuuugucacucacca

SEQ ID NO: 2008453 - RNA, 19 nt, Artificial Sequence
  Description of Artificial Sequence: Synthetic oligonucleotide
  Antisense strand to SEQ ID NO: 2008452
uggugagugacaaaggucu

SEQ ID NO: 2008454 - RNA, 19 nt, Artificial Sequence
  Description of Artificial Sequence: Synthetic oligonucleotide
  Sense strand starting at position 2152 of SEQ ID NO: 1880976
cccuccagucccugagaau

SEQ ID NO: 2008455 - RNA, 19 nt, Artificial Sequence
  Description of Artificial Sequence: Synthetic oligonucleotide
  Antisense strand to SEQ ID NO: 2008454
auucucagggacuggaggg

SEQ ID NO: 2008456 - RNA, 19 nt, Artificial Sequence
  Description of Artificial Sequence: Synthetic oligonucleotide
  Sense strand starting at position 2153 of SEQ ID NO: 1880976
ccuccagucccugagaauu

SEQ ID NO: 2008457 - RNA, 19 nt, Artificial Sequence
  Description of Artificial Sequence: Synthetic oligonucleotide
  Antisense strand to SEQ ID NO: 2008456
aauucucagggacuggagg

SEQ ID NO: 2008458 - RNA, 19 nt, Artificial Sequence
  Description of Artificial Sequence: Synthetic oligonucleotide
  Sense strand starting at position 2159 of SEQ ID NO: 1880976
gucccugagaauugguacu

SEQ ID NO: 2008459 - RNA, 19 nt, Artificial Sequence
  Description of Artificial Sequence: Synthetic oligonucleotide
  Antisense strand to SEQ ID NO: 2008458
aguaccaauucucagggac

SEQ ID NO: 2008460 - RNA, 19 nt, Artificial Sequence
  Description of Artificial Sequence: Synthetic oligonucleotide
  Sense strand starting at position 2184 of SEQ ID NO: 1880976
aggugaacuccugggcaga

SEQ ID NO: 2008461 - RNA, 19 nt, Artificial Sequence
  Description of Artificial Sequence: Synthetic oligonucleotide
  Antisense strand to SEQ ID NO: 2008460
ucugcccaggaguucaccu

SEQ ID NO: 2008462 - RNA, 19 nt, Artificial Sequence
  Description of Artificial Sequence: Synthetic oligonucleotide
  Sense strand starting at position 2185 of SEQ ID NO: 1880976
ggugaacuccugggcagaa

SEQ ID NO: 2008463 - RNA, 19 nt, Artificial Sequence
  Description of Artificial Sequence: Synthetic oligonucleotide
  Antisense strand to SEQ ID NO: 2008462
uucugcccaggaguucacc

SEQ ID NO: 2008464 - RNA, 19 nt, Artificial Sequence
  Description of Artificial Sequence: Synthetic oligonucleotide
  Sense strand starting at position 2186 of SEQ ID NO: 1880976
gugaacuccugggcagaau

SEQ ID NO: 2008465 - RNA, 19 nt, Artificial Sequence
  Description of Artificial Sequence: Synthetic oligonucleotide
  Antisense strand to SEQ ID NO: 2008464
auucugcccaggaguucac

SEQ ID NO: 2008466 - RNA, 19 nt, Artificial Sequence
  Description of Artificial Sequence: Synthetic oligonucleotide
  Sense strand starting at position 2197 of SEQ ID NO: 1880976
ggcagaaucuugccuagag

SEQ ID NO: 2008467 - RNA, 19 nt, Artificial Sequence
  Description of Artificial Sequence: Synthetic oligonucleotide
  Antisense strand to SEQ ID NO: 2008466
cucuaggcaagauucugcc

SEQ ID NO: 2008468 - RNA, 19 nt, Artificial Sequence
  Description of Artificial Sequence: Synthetic oligonucleotide
  Sense strand starting at position 2198 of SEQ ID NO: 1880976
gcagaaucuugccuagagc

SEQ ID NO: 2008469 - RNA, 19 nt, Artificial Sequence
  Description of Artificial Sequence: Synthetic oligonucleotide
  Antisense strand to SEQ ID NO: 2008468
gcucuaggcaagauucugc

SEQ ID NO: 2008470 - RNA, 19 nt, Artificial Sequence
  Description of Artificial Sequence: Synthetic oligonucleotide
  Sense strand starting at position 2496 of SEQ ID NO: 1880976
gucugaggccuaugagguu

SEQ ID NO: 2008471 - RNA, 19 nt, Artificial Sequence
  Description of Artificial Sequence: Synthetic oligonucleotide
  Antisense strand to SEQ ID NO: 2008470
aaccucauaggccucagac

SEQ ID NO: 2008472 - RNA, 19 nt, Artificial Sequence
  Description of Artificial Sequence: Synthetic oligonucleotide
  Sense strand starting at position 2528 of SEQ ID NO: 1880976
agaaacgcucccuguauga

SEQ ID NO: 2008473 - RNA, 19 nt, Artificial Sequence
  Description of Artificial Sequence: Synthetic oligonucleotide
  Antisense strand to SEQ ID NO: 2008472
ucauacagggagcguuucu

SEQ ID NO: 2008474 - RNA, 19 nt, Artificial Sequence
  Description of Artificial Sequence: Synthetic oligonucleotide
  Sense strand starting at position 2626 of SEQ ID NO: 1880976
uuccguaacccugaggaca

SEQ ID NO: 2008475 - RNA, 19 nt, Artificial Sequence
  Description of Artificial Sequence: Synthetic oligonucleotide
  Antisense strand to SEQ ID NO: 2008474
uguccucaggguuacggaa

SEQ ID NO: 2008476 - RNA, 19 nt, Artificial Sequence
  Description of Artificial Sequence: Synthetic oligonucleotide
  Sense strand starting at position 2640 of SEQ ID NO: 1880976
ggacaucuuccgggaguuu

SEQ ID NO: 2008477 - RNA, 19 nt, Artificial Sequence
  Description of Artificial Sequence: Synthetic oligonucleotide
  Antisense strand to SEQ ID NO: 2008476
aaacucccggaagaugucc

SEQ ID NO: 2008478 - RNA, 19 nt, Artificial Sequence
  Description of Artificial Sequence: Synthetic oligonucleotide
  Sense strand starting at position 2881 of SEQ ID NO: 1880976
ggguucaagucggugaugu

SEQ ID NO: 2008479 - RNA, 19 nt, Artificial Sequence
  Description of Artificial Sequence: Synthetic oligonucleotide
  Antisense strand to SEQ ID NO: 2008478
acaucaccgacuugaaccc

SEQ ID NO: 2008480 - RNA, 19 nt, Artificial Sequence
  Description of Artificial Sequence: Synthetic oligonucleotide
  Sense strand starting at position 2891 of SEQ ID NO: 1880976
cggugaugucguccaccga

SEQ ID NO: 2008481 - RNA, 19 nt, Artificial Sequence
  Description of Artificial Sequence: Synthetic oligonucleotide
  Antisense strand to SEQ ID NO: 2008480
ucgguggacgacaucaccg

SEQ ID NO: 2008482 - RNA, 19 nt, Artificial Sequence
  Description of Artificial Sequence: Synthetic oligonucleotide
  Sense strand starting at position 3116 of SEQ ID NO: 1880976
gcagacauagccugauggu

SEQ ID NO: 2008483 - RNA, 19 nt, Artificial Sequence
  Description of Artificial Sequence: Synthetic oligonucleotide
  Antisense strand to SEQ ID NO: 2008482
accaucaggcuaugucugc

SEQ ID NO: 2008484 - RNA, 19 nt, Artificial Sequence
  Description of Artificial Sequence: Synthetic oligonucleotide
  Sense strand starting at position 3117 of SEQ ID NO: 1880976
cagacauagccugaugguu

SEQ ID NO: 2008485 - RNA, 19 nt, Artificial Sequence
  Description of Artificial Sequence: Synthetic oligonucleotide
  Antisense strand to SEQ ID NO: 2008484
aaccaucaggcuaugucug

SEQ ID NO: 2008486 - RNA, 19 nt, Artificial Sequence
  Description of Artificial Sequence: Synthetic oligonucleotide
  Sense strand starting at position 3122 of SEQ ID NO: 1880976
auagccugaugguuaauaa

SEQ ID NO: 2008487 - RNA, 19 nt, Artificial Sequence
  Description of Artificial Sequence: Synthetic oligonucleotide
  Antisense strand to SEQ ID NO: 2008486
uuauuaaccaucaggcuau

SEQ ID NO: 2008488 - RNA, 19 nt, Artificial Sequence
  Description of Artificial Sequence: Synthetic oligonucleotide
  Sense strand starting at position 3123 of SEQ ID NO: 1880976
uagccugaugguuaauaaa

SEQ ID NO: 2008489 - RNA, 19 nt, Artificial Sequence
  Description of Artificial Sequence: Synthetic oligonucleotide
  Antisense strand to SEQ ID NO: 2008488
uuuauuaaccaucaggcua

SEQ ID NO: 2008490 - RNA, 19 nt, Artificial Sequence
  Description of Artificial Sequence: Synthetic oligonucleotide
  Sense strand starting at position 3132 of SEQ ID NO: 1880976
gguuaauaaaugugccaag

SEQ ID NO: 2008491 - RNA, 19 nt, Artificial Sequence
  Description of Artificial Sequence: Synthetic oligonucleotide
  Antisense strand to SEQ ID NO: 2008490
cuuggcacauuuauuaacc

SEQ ID NO: 2008492 - RNA, 19 nt, Artificial Sequence
  Description of Artificial Sequence: Synthetic oligonucleotide
  Sense strand starting at position 3133 of SEQ ID NO: 1880976
guuaauaaaugugccaagu

SEQ ID NO: 2008493 - RNA, 19 nt, Artificial Sequence
  Description of Artificial Sequence: Synthetic oligonucleotide
  Antisense strand to SEQ ID NO: 2008492
acuuggcacauuuauuaac

SEQ ID NO: 2008494 - RNA, 19 nt, Artificial Sequence
  Description of Artificial Sequence: Synthetic oligonucleotide
  Sense strand starting at position 3310 of SEQ ID NO: 1880976
caccaucuggguugacaaa

SEQ ID NO: 2008495 - RNA, 19 nt, Artificial Sequence
  Description of Artificial Sequence: Synthetic oligonucleotide
  Antisense strand to SEQ ID NO: 2008494
uuugucaacccagauggug

SEQ ID NO: 2008496 - RNA, 19 nt, Artificial Sequence
  Description of Artificial Sequence: Synthetic oligonucleotide
  Sense strand starting at position 3717 of SEQ ID NO: 1880976
gcgagugcccacucaucuu

SEQ ID NO: 2008497 - RNA, 19 nt, Artificial Sequence
  Description of Artificial Sequence: Synthetic oligonucleotide
  Antisense strand to SEQ ID NO: 2008496
aagaugagugggcacucgc

SEQ ID NO: 2008498 - RNA, 19 nt, Artificial Sequence
  Description of Artificial Sequence: Synthetic oligonucleotide
  Sense strand starting at position 3 of SEQ ID NO: 1880977
agugaaacuugggucuagu

SEQ ID NO: 2008499 - RNA, 19 nt, Artificial Sequence
  Description of Artificial Sequence: Synthetic oligonucleotide
  Antisense strand to SEQ ID NO: 2008498
acuagacccaaguuucacu

SEQ ID NO: 2008500 - RNA, 19 nt, Artificial Sequence
  Description of Artificial Sequence: Synthetic oligonucleotide
  Sense strand starting at position 23 of SEQ ID NO: 1880977
ggguacuagaauugucaaa

SEQ ID NO: 2008501 - RNA, 19 nt, Artificial Sequence
  Description of Artificial Sequence: Synthetic oligonucleotide
  Antisense strand to SEQ ID NO: 2008500
uuugacaauucuaguaccc

SEQ ID NO: 2008502 - RNA, 19 nt, Artificial Sequence
  Description of Artificial Sequence: Synthetic oligonucleotide
  Sense strand starting at position 131 of SEQ ID NO: 1880977
gcaggagaauggguccaaa

SEQ ID NO: 2008503 - RNA, 19 nt, Artificial Sequence
  Description of Artificial Sequence: Synthetic oligonucleotide
  Antisense strand to SEQ ID NO: 2008502
uuuggacccauucuccugc

SEQ ID NO: 2008504 - RNA, 19 nt, Artificial Sequence
  Description of Artificial Sequence: Synthetic oligonucleotide
  Sense strand starting at position 780 of SEQ ID NO: 1880977
ugcugaaugcauuaaaguu

SEQ ID NO: 2008505 - RNA, 19 nt, Artificial Sequence
  Description of Artificial Sequence: Synthetic oligonucleotide
  Antisense strand to SEQ ID NO: 2008504
aacuuuaaugcauucagca

SEQ ID NO: 2008506 - RNA, 19 nt, Artificial Sequence
  Description of Artificial Sequence: Synthetic oligonucleotide
  Sense strand starting at position 829 of SEQ ID NO: 1880977
guucgacuugcuuauuuau

SEQ ID NO: 2008507 - RNA, 19 nt, Artificial Sequence
  Description of Artificial Sequence: Synthetic oligonucleotide
  Antisense strand to SEQ ID NO: 2008506
auaaauaagcaagucgaac

SEQ ID NO: 2008508 - RNA, 19 nt, Artificial Sequence
  Description of Artificial Sequence: Synthetic oligonucleotide
  Sense strand starting at position 831 of SEQ ID NO: 1880977
ucgacuugcuuauuuaucu

SEQ ID NO: 2008509 - RNA, 19 nt, Artificial Sequence
  Description of Artificial Sequence: Synthetic oligonucleotide
  Antisense strand to SEQ ID NO: 2008508
agauaaauaagcaagucga

SEQ ID NO: 2008510 - RNA, 19 nt, Artificial Sequence
  Description of Artificial Sequence: Synthetic oligonucleotide
  Sense strand starting at position 832 of SEQ ID NO: 1880977
cgacuugcuuauuuaucuu

SEQ ID NO: 2008511 - RNA, 19 nt, Artificial Sequence
  Description of Artificial Sequence: Synthetic oligonucleotide
  Antisense strand to SEQ ID NO: 2008510
aagauaaauaagcaagucg

SEQ ID NO: 2008512 - RNA, 19 nt, Artificial Sequence
  Description of Artificial Sequence: Synthetic oligonucleotide
  Sense strand starting at position 1255 of SEQ ID NO: 1880977
gaaauaagguuucugcuac

SEQ ID NO: 2008513 - RNA, 19 nt, Artificial Sequence
  Description of Artificial Sequence: Synthetic oligonucleotide
  Antisense strand to SEQ ID NO: 2008512
guagcagaaaccuuauuuc

SEQ ID NO: 2008514 - RNA, 19 nt, Artificial Sequence
  Description of Artificial Sequence: Synthetic oligonucleotide
  Sense strand starting at position 1263 of SEQ ID NO: 1880977
guuucugcuacagaaggaa

SEQ ID NO: 2008515 - RNA, 19 nt, Artificial Sequence
  Description of Artificial Sequence: Synthetic oligonucleotide
  Antisense strand to SEQ ID NO: 2008514
uuccuucuguagcagaaac

SEQ ID NO: 2008516 - RNA, 19 nt, Artificial Sequence
  Description of Artificial Sequence: Synthetic oligonucleotide
  Sense strand starting at position 1501 of SEQ ID NO: 1880977
gggcacuuauaaucaaaua

SEQ ID NO: 2008517 - RNA, 19 nt, Artificial Sequence
  Description of Artificial Sequence: Synthetic oligonucleotide
  Antisense strand to SEQ ID NO: 2008516
uauuugauuauaagugccc

SEQ ID NO: 2008518 - RNA, 19 nt, Artificial Sequence
  Description of Artificial Sequence: Synthetic oligonucleotide
  Sense strand starting at position 1563 of SEQ ID NO: 1880977
aggaguuccaggcaagcaa

SEQ ID NO: 2008519 - RNA, 19 nt, Artificial Sequence
  Description of Artificial Sequence: Synthetic oligonucleotide
  Antisense strand to SEQ ID NO: 2008518
uugcuugccuggaacuccu

SEQ ID NO: 2008520 - RNA, 19 nt, Artificial Sequence
  Description of Artificial Sequence: Synthetic oligonucleotide
  Sense strand starting at position 2090 of SEQ ID NO: 1880977
ucuuuauuucuggguguag

SEQ ID NO: 2008521 - RNA, 19 nt, Artificial Sequence
  Description of Artificial Sequence: Synthetic oligonucleotide
  Antisense strand to SEQ ID NO: 2008520
cuacacccagaaauaaaga

SEQ ID NO: 2008522 - RNA, 19 nt, Artificial Sequence
  Description of Artificial Sequence: Synthetic oligonucleotide
  Sense strand starting at position 2254 of SEQ ID NO: 1880977
aauaauugucaaggguaau

SEQ ID NO: 2008523 - RNA, 19 nt, Artificial Sequence
  Description of Artificial Sequence: Synthetic oligonucleotide
  Antisense strand to SEQ ID NO: 2008522
auuacccuugacaauuauu

SEQ ID NO: 2008524 - RNA, 19 nt, Artificial Sequence
  Description of Artificial Sequence: Synthetic oligonucleotide
  Sense strand starting at position 2255 of SEQ ID NO: 1880977
auaauugucaaggguaaug

SEQ ID NO: 2008525 - RNA, 19 nt, Artificial Sequence
  Description of Artificial Sequence: Synthetic oligonucleotide
  Antisense strand to SEQ ID NO: 2008524
cauuacccuugacaauuau

SEQ ID NO: 2008526 - RNA, 19 nt, Artificial Sequence
  Description of Artificial Sequence: Synthetic oligonucleotide
  Sense strand starting at position 2264 of SEQ ID NO: 1880977
aaggguaaugaauguaguu

SEQ ID NO: 2008527 - RNA, 19 nt, Artificial Sequence
  Description of Artificial Sequence: Synthetic oligonucleotide
  Antisense strand to SEQ ID NO: 2008526
aacuacauucauuacccuu

SEQ ID NO: 2008528 - RNA, 19 nt, Artificial Sequence
  Description of Artificial Sequence: Synthetic oligonucleotide
  Sense strand starting at position 2266 of SEQ ID NO: 1880977
ggguaaugaauguaguuaa

SEQ ID NO: 2008529 - RNA, 19 nt, Artificial Sequence
  Description of Artificial Sequence: Synthetic oligonucleotide
  Antisense strand to SEQ ID NO: 2008528
uuaacuacauucauuaccc

SEQ ID NO: 2008530 - RNA, 19 nt, Artificial Sequence
  Description of Artificial Sequence: Synthetic oligonucleotide
  Sense strand starting at position 2281 of SEQ ID NO: 1880977
uuaaacaugcugugacauu

SEQ ID NO: 2008531 - RNA, 19 nt, Artificial Sequence
  Description of Artificial Sequence: Synthetic oligonucleotide
  Antisense strand to SEQ ID NO: 2008530
aaugucacagcauguuuaa

SEQ ID NO: 2008532 - RNA, 19 nt, Artificial Sequence
  Description of Artificial Sequence: Synthetic oligonucleotide
  Sense strand starting at position 2444 of SEQ ID NO: 1880977
uugacaagacuuugugaau

SEQ ID NO: 2008533 - RNA, 19 nt, Artificial Sequence
  Description of Artificial Sequence: Synthetic oligonucleotide
  Antisense strand to SEQ ID NO: 2008532
auucacaaagucuugucaa

SEQ ID NO: 2008534 - RNA, 19 nt, Artificial Sequence
  Description of Artificial Sequence: Synthetic oligonucleotide
  Sense strand starting at position 2445 of SEQ ID NO: 1880977
ugacaagacuuugugaaua

SEQ ID NO: 2008535 - RNA, 19 nt, Artificial Sequence
  Description of Artificial Sequence: Synthetic oligonucleotide
  Antisense strand to SEQ ID NO: 2008534
uauucacaaagucuuguca

SEQ ID NO: 2008536 - RNA, 19 nt, Artificial Sequence
  Description of Artificial Sequence: Synthetic oligonucleotide
  Sense strand starting at position 2629 of SEQ ID NO: 1880977
cuacauaaaugcuugagaa

SEQ ID NO: 2008537 - RNA, 19 nt, Artificial Sequence
  Description of Artificial Sequence: Synthetic oligonucleotide
  Antisense strand to SEQ ID NO: 2008536
uucucaagcauuuauguag

SEQ ID NO: 2008538 - RNA, 19 nt, Artificial Sequence
  Description of Artificial Sequence: Synthetic oligonucleotide
  Sense strand starting at position 2686 of SEQ ID NO: 1880977
caacguuugcaugaucaaa

SEQ ID NO: 2008539 - RNA, 19 nt, Artificial Sequence
  Description of Artificial Sequence: Synthetic oligonucleotide
  Antisense strand to SEQ ID NO: 2008538
uuugaucaugcaaacguug

SEQ ID NO: 2008540 - RNA, 19 nt, Artificial Sequence
  Description of Artificial Sequence: Synthetic oligonucleotide
  Sense strand starting at position 2712 of SEQ ID NO: 1880977
uggaguuacuucccacuca

SEQ ID NO: 2008541 - RNA, 19 nt, Artificial Sequence
  Description of Artificial Sequence: Synthetic oligonucleotide
  Antisense strand to SEQ ID NO: 2008540
ugagugggaaguaacucca

SEQ ID NO: 2008542 - RNA, 19 nt, Artificial Sequence
  Description of Artificial Sequence: Synthetic oligonucleotide
  Sense strand starting at position 2856 of SEQ ID NO: 1880977
uugauaauccaagagcucu

SEQ ID NO: 2008543 - RNA, 19 nt, Artificial Sequence
  Description of Artificial Sequence: Synthetic oligonucleotide
  Antisense strand to SEQ ID NO: 2008542
agagcucuuggauuaucaa

SEQ ID NO: 2008544 - RNA, 19 nt, Artificial Sequence
  Description of Artificial Sequence: Synthetic oligonucleotide
  Sense strand starting at position 2936 of SEQ ID NO: 1880977
gcacuaagacacuagcauu

SEQ ID NO: 2008545 - RNA, 19 nt, Artificial Sequence
  Description of Artificial Sequence: Synthetic oligonucleotide
  Antisense strand to SEQ ID NO: 2008544
aaugcuagugucuuagugc

SEQ ID NO: 2008546 - RNA, 19 nt, Artificial Sequence
  Description of Artificial Sequence: Synthetic oligonucleotide
  Sense strand starting at position 2942 of SEQ ID NO: 1880977
agacacuagcauuaaguuu

SEQ ID NO: 2008547 - RNA, 19 nt, Artificial Sequence
  Description of Artificial Sequence: Synthetic oligonucleotide
  Antisense strand to SEQ ID NO: 2008546
aaacuuaaugcuagugucu

SEQ ID NO: 2008548 - RNA, 19 nt, Artificial Sequence
  Description of Artificial Sequence: Synthetic oligonucleotide
  Sense strand starting at position 3066 of SEQ ID NO: 1880977
cuagaaugcuaucuggaaa

SEQ ID NO: 2008549 - RNA, 19 nt, Artificial Sequence
  Description of Artificial Sequence: Synthetic oligonucleotide
  Antisense strand to SEQ ID NO: 2008548
uuuccagauagcauucuag

SEQ ID NO: 2008550 - RNA, 19 nt, Artificial Sequence
  Description of Artificial Sequence: Synthetic oligonucleotide
  Sense strand starting at position 3110 of SEQ ID NO: 1880977
guacaaacuguguaaugca

SEQ ID NO: 2008551 - RNA, 19 nt, Artificial Sequence
  Description of Artificial Sequence: Synthetic oligonucleotide
  Antisense strand to SEQ ID NO: 2008550
ugcauuacacaguuuguac

SEQ ID NO: 2008552 - RNA, 19 nt, Artificial Sequence
  Description of Artificial Sequence: Synthetic oligonucleotide
  Sense strand starting at position 3126 of SEQ ID NO: 1880977
gcaguuucuggaggaauag

SEQ ID NO: 2008553 - RNA, 19 nt, Artificial Sequence
  Description of Artificial Sequence: Synthetic oligonucleotide
  Antisense strand to SEQ ID NO: 2008552
cuauuccuccagaaacugc

SEQ ID NO: 2008554 - RNA, 19 nt, Artificial Sequence
  Description of Artificial Sequence: Synthetic oligonucleotide
  Sense strand starting at position 3151 of SEQ ID NO: 1880977
aguagacucuaauuagcuu

SEQ ID NO: 2008555 - RNA, 19 nt, Artificial Sequence
  Description of Artificial Sequence: Synthetic oligonucleotide
  Antisense strand to SEQ ID NO: 2008554
aagcuaauuagagucuacu

SEQ ID NO: 2008556 - RNA, 19 nt, Artificial Sequence
  Description of Artificial Sequence: Synthetic oligonucleotide
  Sense strand starting at position 3158 of SEQ ID NO: 1880977
ucuaauuagcuuugagacu

SEQ ID NO: 2008557 - RNA, 19 nt, Artificial Sequence
  Description of Artificial Sequence: Synthetic oligonucleotide
  Antisense strand to SEQ ID NO: 2008556
agucucaaagcuaauuaga

SEQ ID NO: 2008558 - RNA, 19 nt, Artificial Sequence
  Description of Artificial Sequence: Synthetic oligonucleotide
  Sense strand starting at position 3293 of SEQ ID NO: 1880977
uuacuaauacugugacuug

SEQ ID NO: 2008559 - RNA, 19 nt, Artificial Sequence
  Description of Artificial Sequence: Synthetic oligonucleotide
  Antisense strand to SEQ ID NO: 2008558
caagucacaguauuaguaa

SEQ ID NO: 2008560 - RNA, 19 nt, Artificial Sequence
  Description of Artificial Sequence: Synthetic oligonucleotide
  Sense strand starting at position 3296 of SEQ ID NO: 1880977
cuaauacugugacuuggaa

SEQ ID NO: 2008561 - RNA, 19 nt, Artificial Sequence
  Description of Artificial Sequence: Synthetic oligonucleotide
  Antisense strand to SEQ ID NO: 2008560
uuccaagucacaguauuag

SEQ ID NO: 2008562 - RNA, 19 nt, Artificial Sequence
  Description of Artificial Sequence: Synthetic oligonucleotide
  Sense strand starting at position 3314 of SEQ ID NO: 1880977
aaaguuauuucugauugag

SEQ ID NO: 2008563 - RNA, 19 nt, Artificial Sequence
  Description of Artificial Sequence: Synthetic oligonucleotide
  Antisense strand to SEQ ID NO: 2008562
cucaaucagaaauaacuuu

SEQ ID NO: 2008564 - RNA, 19 nt, Artificial Sequence
  Description of Artificial Sequence: Synthetic oligonucleotide
  Sense strand starting at position 3332 of SEQ ID NO: 1880977
guuucuuccucauuuguaa

SEQ ID NO: 2008565 - RNA, 19 nt, Artificial Sequence
  Description of Artificial Sequence: Synthetic oligonucleotide
  Antisense strand to SEQ ID NO: 2008564
uuacaaaugaggaagaaac

SEQ ID NO: 2008566 - RNA, 19 nt, Artificial Sequence
  Description of Artificial Sequence: Synthetic oligonucleotide
  Sense strand starting at position 3391 of SEQ ID NO: 1880977
cguagagauuaugcacaua

SEQ ID NO: 2008567 - RNA, 19 nt, Artificial Sequence
  Description of Artificial Sequence: Synthetic oligonucleotide
  Antisense strand to SEQ ID NO: 2008566
uaugugcauaaucucuacg

SEQ ID NO: 2008568 - RNA, 19 nt, Artificial Sequence
  Description of Artificial Sequence: Synthetic oligonucleotide
  Sense strand starting at position 3469 of SEQ ID NO: 1880977
ugcaaauuggaguguagaa

SEQ ID NO: 2008569 - RNA, 19 nt, Artificial Sequence
  Description of Artificial Sequence: Synthetic oligonucleotide
  Antisense strand to SEQ ID NO: 2008568
uucuacacuccaauuugca

SEQ ID NO: 2008570 - RNA, 19 nt, Artificial Sequence
  Description of Artificial Sequence: Synthetic oligonucleotide
  Sense strand starting at position 3588 of SEQ ID NO: 1880977
uuaaauguccacugacuga

SEQ ID NO: 2008571 - RNA, 19 nt, Artificial Sequence
  Description of Artificial Sequence: Synthetic oligonucleotide
  Antisense strand to SEQ ID NO: 2008570
ucagucaguggacauuuaa

SEQ ID NO: 2008572 - RNA, 19 nt, Artificial Sequence
  Description of Artificial Sequence: Synthetic oligonucleotide
  Sense strand starting at position 3660 of SEQ ID NO: 1880977
cuugacuugugacugaauc

SEQ ID NO: 2008573 - RNA, 19 nt, Artificial Sequence
  Description of Artificial Sequence: Synthetic oligonucleotide
  Antisense strand to SEQ ID NO: 2008572
gauucagucacaagucaag

SEQ ID NO: 2008574 - RNA, 19 nt, Artificial Sequence
  Description of Artificial Sequence: Synthetic oligonucleotide
  Sense strand starting at position 3661 of SEQ ID NO: 1880977
uugacuugugacugaauca

SEQ ID NO: 2008575 - RNA, 19 nt, Artificial Sequence
  Description of Artificial Sequence: Synthetic oligonucleotide
  Antisense strand to SEQ ID NO: 2008574
ugauucagucacaagucaa

SEQ ID NO: 2008576 - RNA, 19 nt, Artificial Sequence
  Description of Artificial Sequence: Synthetic oligonucleotide
  Sense strand starting at position 3789 of SEQ ID NO: 1880977
ggauauauguaauugcauu

SEQ ID NO: 2008577 - RNA, 19 nt, Artificial Sequence
  Description of Artificial Sequence: Synthetic oligonucleotide
  Antisense strand to SEQ ID NO: 2008576
aaugcaauuacauauaucc

SEQ ID NO: 2008578 - RNA, 19 nt, Artificial Sequence
  Description of Artificial Sequence: Synthetic oligonucleotide
  Sense strand starting at position 52 of SEQ ID NO: 1880978
ucacauugguaguuugaca

SEQ ID NO: 2008579 - RNA, 19 nt, Artificial Sequence
  Description of Artificial Sequence: Synthetic oligonucleotide
  Antisense strand to SEQ ID NO: 2008578
ugucaaacuaccaauguga

SEQ ID NO: 2008580 - RNA, 19 nt, Artificial Sequence
  Description of Artificial Sequence: Synthetic oligonucleotide
  Sense strand starting at position 66 of SEQ ID NO: 1880978
ugacaucagccaugauaaa

SEQ ID NO: 2008581 - RNA, 19 nt, Artificial Sequence
  Description of Artificial Sequence: Synthetic oligonucleotide
  Antisense strand to SEQ ID NO: 2008580
uuuaucauggcugauguca

SEQ ID NO: 2008582 - RNA, 19 nt, Artificial Sequence
  Description of Artificial Sequence: Synthetic oligonucleotide
  Sense strand starting at position 325 of SEQ ID NO: 1880978
caggaauugcccuaagcug

SEQ ID NO: 2008583 - RNA, 19 nt, Artificial Sequence
  Description of Artificial Sequence: Synthetic oligonucleotide
  Antisense strand to SEQ ID NO: 2008582
cagcuuagggcaauuccug

SEQ ID NO: 2008584 - RNA, 19 nt, Artificial Sequence
  Description of Artificial Sequence: Synthetic oligonucleotide
  Sense strand starting at position 430 of SEQ ID NO: 1880978
aggccagacucaucuuaau

SEQ ID NO: 2008585 - RNA, 19 nt, Artificial Sequence
  Description of Artificial Sequence: Synthetic oligonucleotide
  Antisense strand to SEQ ID NO: 2008584
auuaagaugagucuggccu

SEQ ID NO: 2008586 - RNA, 19 nt, Artificial Sequence
  Description of Artificial Sequence: Synthetic oligonucleotide
  Sense strand starting at position 499 of SEQ ID NO: 1880978
uugcaauugcauuagagag

SEQ ID NO: 2008587 - RNA, 19 nt, Artificial Sequence
  Description of Artificial Sequence: Synthetic oligonucleotide
  Antisense strand to SEQ ID NO: 2008586
cucucuaaugcaauugcaa

SEQ ID NO: 2008588 - RNA, 19 nt, Artificial Sequence
  Description of Artificial Sequence: Synthetic oligonucleotide
  Sense strand starting at position 798 of SEQ ID NO: 1880978
agguucuuucuggaguauu

SEQ ID NO: 2008589 - RNA, 19 nt, Artificial Sequence
  Description of Artificial Sequence: Synthetic oligonucleotide
  Antisense strand to SEQ ID NO: 2008588
aauacuccagaaagaaccu

SEQ ID NO: 2008590 - RNA, 19 nt, Artificial Sequence
  Description of Artificial Sequence: Synthetic oligonucleotide
  Sense strand starting at position 946 of SEQ ID NO: 1880978
aguccuagucacuacgauu

SEQ ID NO: 2008591 - RNA, 19 nt, Artificial Sequence
  Description of Artificial Sequence: Synthetic oligonucleotide
  Antisense strand to SEQ ID NO: 2008590
aaucguagugacuaggacu

SEQ ID NO: 2008592 - RNA, 19 nt, Artificial Sequence
  Description of Artificial Sequence: Synthetic oligonucleotide
  Sense strand starting at position 969 of SEQ ID NO: 1880978
guugcauaucaugaagauu

SEQ ID NO: 2008593 - RNA, 19 nt, Artificial Sequence
  Description of Artificial Sequence: Synthetic oligonucleotide
  Antisense strand to SEQ ID NO: 2008592
aaucuucaugauaugcaac

SEQ ID NO: 2008594 - RNA, 19 nt, Artificial Sequence
  Description of Artificial Sequence: Synthetic oligonucleotide
  Sense strand starting at position 1022 of SEQ ID NO: 1880978
uagguuacauggucugaaa

SEQ ID NO: 2008595 - RNA, 19 nt, Artificial Sequence
  Description of Artificial Sequence: Synthetic oligonucleotide
  Antisense strand to SEQ ID NO: 2008594
uuucagaccauguaaccua

SEQ ID NO: 2008596 - RNA, 19 nt, Artificial Sequence
  Description of Artificial Sequence: Synthetic oligonucleotide
  Sense strand starting at position 1024 of SEQ ID NO: 1880978
gguuacauggucugaaagu

SEQ ID NO: 2008597 - RNA, 19 nt, Artificial Sequence
  Description of Artificial Sequence: Synthetic oligonucleotide
  Antisense strand to SEQ ID NO: 2008596
acuuucagaccauguaacc

SEQ ID NO: 2008598 - RNA, 19 nt, Artificial Sequence
  Description of Artificial Sequence: Synthetic oligonucleotide
  Sense strand starting at position 1238 of SEQ ID NO: 1880978
aggccugaucugcaugaaa

SEQ ID NO: 2008599 - RNA, 19 nt, Artificial Sequence
  Description of Artificial Sequence: Synthetic oligonucleotide
  Antisense strand to SEQ ID NO: 2008598
uuucaugcagaucaggccu

SEQ ID NO: 2008600 - RNA, 19 nt, Artificial Sequence
  Description of Artificial Sequence: Synthetic oligonucleotide
  Sense strand starting at position 1405 of SEQ ID NO: 1880978
ccaauucuugcccaugaug

SEQ ID NO: 2008601 - RNA, 19 nt, Artificial Sequence
  Description of Artificial Sequence: Synthetic oligonucleotide
  Antisense strand to SEQ ID NO: 2008600
caucaugggcaagaauugg

SEQ ID NO: 2008602 - RNA, 19 nt, Artificial Sequence
  Description of Artificial Sequence: Synthetic oligonucleotide
  Sense strand starting at position 1542 of SEQ ID NO: 1880978
ucgagcaucgcuguaaucu

SEQ ID NO: 2008603 - RNA, 19 nt, Artificial Sequence
  Description of Artificial Sequence: Synthetic oligonucleotide
  Antisense strand to SEQ ID NO: 2008602
agauuacagcgaugcucga

SEQ ID NO: 2008604 - RNA, 19 nt, Artificial Sequence
  Description of Artificial Sequence: Synthetic oligonucleotide
  Sense strand starting at position 1587 of SEQ ID NO: 1880978
cuugcuguuguucagggaa

SEQ ID NO: 2008605 - RNA, 19 nt, Artificial Sequence
  Description of Artificial Sequence: Synthetic oligonucleotide
  Antisense strand to SEQ ID NO: 2008604
uucccugaacaacagcaag

SEQ ID NO: 2008606 - RNA, 19 nt, Artificial Sequence
  Description of Artificial Sequence: Synthetic oligonucleotide
  Sense strand starting at position 1616 of SEQ ID NO: 1880978
cggagccucagauaaacuu

SEQ ID NO: 2008607 - RNA, 19 nt, Artificial Sequence
  Description of Artificial Sequence: Synthetic oligonucleotide
  Antisense strand to SEQ ID NO: 2008606
aaguuuaucugaggcuccg

SEQ ID NO: 2008608 - RNA, 19 nt, Artificial Sequence
  Description of Artificial Sequence: Synthetic oligonucleotide
  Sense strand starting at position 1782 of SEQ ID NO: 1880978
auguguuugaagugaugac

SEQ ID NO: 2008609 - RNA, 19 nt, Artificial Sequence
  Description of Artificial Sequence: Synthetic oligonucleotide
  Antisense strand to SEQ ID NO: 2008608
gucaucacuucaaacacau

SEQ ID NO: 2008610 - RNA, 19 nt, Artificial Sequence
  Description of Artificial Sequence: Synthetic oligonucleotide
  Sense strand starting at position 1794 of SEQ ID NO: 1880978
ugaugaccuugauuauauu

SEQ ID NO: 2008611 - RNA, 19 nt, Artificial Sequence
  Description of Artificial Sequence: Synthetic oligonucleotide
  Antisense strand to SEQ ID NO: 2008610
aauauaaucaaggucauca

SEQ ID NO: 2008612 - RNA, 19 nt, Artificial Sequence
  Description of Artificial Sequence: Synthetic oligonucleotide
  Sense strand starting at position 1847 of SEQ ID NO: 1880978
agaaauacuugguuccauu

SEQ ID NO: 2008613 - RNA, 19 nt, Artificial Sequence
  Description of Artificial Sequence: Synthetic oligonucleotide
  Antisense strand to SEQ ID NO: 2008612
aauggaaccaaguauuucu

SEQ ID NO: 2008614 - RNA, 19 nt, Artificial Sequence
  Description of Artificial Sequence: Synthetic oligonucleotide
  Sense strand starting at position 2003 of SEQ ID NO: 1880978
uguccacucagugauacga

SEQ ID NO: 2008615 - RNA, 19 nt, Artificial Sequence
  Description of Artificial Sequence: Synthetic oligonucleotide
  Antisense strand to SEQ ID NO: 2008614
ucguaucacugaguggaca

SEQ ID NO: 2008616 - RNA, 19 nt, Artificial Sequence
  Description of Artificial Sequence: Synthetic oligonucleotide
  Sense strand starting at position 2310 of SEQ ID NO: 1880978
ccguuauuauaggugagaa

SEQ ID NO: 2008617 - RNA, 19 nt, Artificial Sequence
  Description of Artificial Sequence: Synthetic oligonucleotide
  Antisense strand to SEQ ID NO: 2008616
uucucaccuauaauaacgg

SEQ ID NO: 2008618 - RNA, 19 nt, Artificial Sequence
  Description of Artificial Sequence: Synthetic oligonucleotide
  Sense strand starting at position 2311 of SEQ ID NO: 1880978
cguuauuauaggugagaag

SEQ ID NO: 2008619 - RNA, 19 nt, Artificial Sequence
  Description of Artificial Sequence: Synthetic oligonucleotide
  Antisense strand to SEQ ID NO: 2008618
cuucucaccuauaauaacg

SEQ ID NO: 2008620 - RNA, 19 nt, Artificial Sequence
  Description of Artificial Sequence: Synthetic oligonucleotide
  Sense strand starting at position 2312 of SEQ ID NO: 1880978
guuauuauaggugagaagu

SEQ ID NO: 2008621 - RNA, 19 nt, Artificial Sequence
  Description of Artificial Sequence: Synthetic oligonucleotide
  Antisense strand to SEQ ID NO: 2008620
acuucucaccuauaauaac

SEQ ID NO: 2008622 - RNA, 19 nt, Artificial Sequence
  Description of Artificial Sequence: Synthetic oligonucleotide
  Sense strand starting at position 2318 of SEQ ID NO: 1880978
auaggugagaagugugaca

SEQ ID NO: 2008623 - RNA, 19 nt, Artificial Sequence
  Description of Artificial Sequence: Synthetic oligonucleotide
  Antisense strand to SEQ ID NO: 2008622
ugucacacuucucaccuau

SEQ ID NO: 2008624 - RNA, 19 nt, Artificial Sequence
  Description of Artificial Sequence: Synthetic oligonucleotide
  Sense strand starting at position 2320 of SEQ ID NO: 1880978
aggugagaagugugacacu

SEQ ID NO: 2008625 - RNA, 19 nt, Artificial Sequence
  Description of Artificial Sequence: Synthetic oligonucleotide
  Antisense strand to SEQ ID NO: 2008624
agugucacacuucucaccu

SEQ ID NO: 2008626 - RNA, 19 nt, Artificial Sequence
  Description of Artificial Sequence: Synthetic oligonucleotide
  Sense strand starting at position 2376 of SEQ ID NO: 1880978
uuuguauuaaagggugcaa

SEQ ID NO: 2008627 - RNA, 19 nt, Artificial Sequence
  Description of Artificial Sequence: Synthetic oligonucleotide
  Antisense strand to SEQ ID NO: 2008626
uugcacccuuuaauacaaa

SEQ ID NO: 2008628 - RNA, 19 nt, Artificial Sequence
  Description of Artificial Sequence: Synthetic oligonucleotide
  Sense strand starting at position 2430 of SEQ ID NO: 1880978
uuuggauggguuuagguau

SEQ ID NO: 2008629 - RNA, 19 nt, Artificial Sequence
  Description of Artificial Sequence: Synthetic oligonucleotide
  Antisense strand to SEQ ID NO: 2008628
auaccuaaacccauccaaa

SEQ ID NO: 2008630 - RNA, 19 nt, Artificial Sequence
  Description of Artificial Sequence: Synthetic oligonucleotide
  Sense strand starting at position 2582 of SEQ ID NO: 1880978
ccuauuaggucuccuggau

SEQ ID NO: 2008631 - RNA, 19 nt, Artificial Sequence
  Description of Artificial Sequence: Synthetic oligonucleotide
  Antisense strand to SEQ ID NO: 2008630
auccaggagaccuaauagg

SEQ ID NO: 2008632 - RNA, 19 nt, Artificial Sequence
  Description of Artificial Sequence: Synthetic oligonucleotide
  Sense strand starting at position 2654 of SEQ ID NO: 1880978
uucuauauuugggauauuc

SEQ ID NO: 2008633 - RNA, 19 nt, Artificial Sequence
  Description of Artificial Sequence: Synthetic oligonucleotide
  Antisense strand to SEQ ID NO: 2008632
gaauaucccaaauauagaa

SEQ ID NO: 2008634 - RNA, 19 nt, Artificial Sequence
  Description of Artificial Sequence: Synthetic oligonucleotide
  Sense strand starting at position 2774 of SEQ ID NO: 1880978
gggauacugugguugaaug

SEQ ID NO: 2008635 - RNA, 19 nt, Artificial Sequence
  Description of Artificial Sequence: Synthetic oligonucleotide
  Antisense strand to SEQ ID NO: 2008634
cauucaaccacaguauccc

SEQ ID NO: 2008636 - RNA, 19 nt, Artificial Sequence
  Description of Artificial Sequence: Synthetic oligonucleotide
  Sense strand starting at position 2775 of SEQ ID NO: 1880978
ggauacugugguugaaugu

SEQ ID NO: 2008637 - RNA, 19 nt, Artificial Sequence
  Description of Artificial Sequence: Synthetic oligonucleotide
  Antisense strand to SEQ ID NO: 2008636
acauucaaccacaguaucc

SEQ ID NO: 2008638 - RNA, 19 nt, Artificial Sequence
  Description of Artificial Sequence: Synthetic oligonucleotide
  Sense strand starting at position 3011 of SEQ ID NO: 1880978
auuaguguagcuggauaua

SEQ ID NO: 2008639 - RNA, 19 nt, Artificial Sequence
  Description of Artificial Sequence: Synthetic oligonucleotide
  Antisense strand to SEQ ID NO: 2008638
uauauccagcuacacuaau

SEQ ID NO: 2008640 - RNA, 19 nt, Artificial Sequence
  Description of Artificial Sequence: Synthetic oligonucleotide
  Sense strand starting at position 3277 of SEQ ID NO: 1880978
gggccaagauuugaguaga

SEQ ID NO: 2008641 - RNA, 19 nt, Artificial Sequence
  Description of Artificial Sequence: Synthetic oligonucleotide
  Antisense strand to SEQ ID NO: 2008640
ucuacucaaaucuuggccc

SEQ ID NO: 2008642 - RNA, 19 nt, Artificial Sequence
  Description of Artificial Sequence: Synthetic oligonucleotide
  Sense strand starting at position 3399 of SEQ ID NO: 1880978
aacuucugagaugguuuaa

SEQ ID NO: 2008643 - RNA, 19 nt, Artificial Sequence
  Description of Artificial Sequence: Synthetic oligonucleotide
  Antisense strand to SEQ ID NO: 2008642
uuaaaccaucucagaaguu

SEQ ID NO: 2008644 - RNA, 19 nt, Artificial Sequence
  Description of Artificial Sequence: Synthetic oligonucleotide
  Sense strand starting at position 3490 of SEQ ID NO: 1880978
cuuuguucuccacaucuga

SEQ ID NO: 2008645 - RNA, 19 nt, Artificial Sequence
  Description of Artificial Sequence: Synthetic oligonucleotide
  Antisense strand to SEQ ID NO: 2008644
ucagauguggagaacaaag

SEQ ID NO: 2008646 - RNA, 19 nt, Artificial Sequence
  Description of Artificial Sequence: Synthetic oligonucleotide
  Sense strand starting at position 3691 of SEQ ID NO: 1880978
aaauguuggcauggacgaa

SEQ ID NO: 2008647 - RNA, 19 nt, Artificial Sequence
  Description of Artificial Sequence: Synthetic oligonucleotide
  Antisense strand to SEQ ID NO: 2008646
uucguccaugccaacauuu

SEQ ID NO: 2008648 - RNA, 19 nt, Artificial Sequence
  Description of Artificial Sequence: Synthetic oligonucleotide
  Sense strand starting at position 3712 of SEQ ID NO: 1880978
ccaaauuguuaccuguaga

SEQ ID NO: 2008649 - RNA, 19 nt, Artificial Sequence
  Description of Artificial Sequence: Synthetic oligonucleotide
  Antisense strand to SEQ ID NO: 2008648
ucuacagguaacaauuugg

SEQ ID NO: 2008650 - RNA, 19 nt, Artificial Sequence
  Description of Artificial Sequence: Synthetic oligonucleotide
  Sense strand starting at position 3715 of SEQ ID NO: 1880978
aauuguuaccuguagauga

SEQ ID NO: 2008651 - RNA, 19 nt, Artificial Sequence
  Description of Artificial Sequence: Synthetic oligonucleotide
  Antisense strand to SEQ ID NO: 2008650
ucaucuacagguaacaauu

SEQ ID NO: 2008652 - RNA, 19 nt, Artificial Sequence
  Description of Artificial Sequence: Synthetic oligonucleotide
  Sense strand starting at position 3719 of SEQ ID NO: 1880978
guuaccuguagaugaugaa

SEQ ID NO: 2008653 - RNA, 19 nt, Artificial Sequence
  Description of Artificial Sequence: Synthetic oligonucleotide
  Antisense strand to SEQ ID NO: 2008652
uucaucaucuacagguaac

SEQ ID NO: 2008654 - RNA, 19 nt, Artificial Sequence
  Description of Artificial Sequence: Synthetic oligonucleotide
  Sense strand starting at position 3856 of SEQ ID NO: 1880978
auuugacucuuacagguau

SEQ ID NO: 2008655 - RNA, 19 nt, Artificial Sequence
  Description of Artificial Sequence: Synthetic oligonucleotide
  Antisense strand to SEQ ID NO: 2008654
auaccuguaagagucaaau

SEQ ID NO: 2008656 - RNA, 19 nt, Artificial Sequence
  Description of Artificial Sequence: Synthetic oligonucleotide
  Sense strand starting at position 3982 of SEQ ID NO: 1880978
guuaguaaccgguagagaa

SEQ ID NO: 2008657 - RNA, 19 nt, Artificial Sequence
  Description of Artificial Sequence: Synthetic oligonucleotide
  Antisense strand to SEQ ID NO: 2008656
uucucuaccgguuacuaac

SEQ ID NO: 2008658 - RNA, 19 nt, Artificial Sequence
  Description of Artificial Sequence: Synthetic oligonucleotide
  Sense strand starting at position 20 of SEQ ID NO: 1880979
augggugauuucguggcua

SEQ ID NO: 2008659 - RNA, 19 nt, Artificial Sequence
  Description of Artificial Sequence: Synthetic oligonucleotide
  Antisense strand to SEQ ID NO: 2008658
uagccacgaaaucacccau

SEQ ID NO: 2008660 - RNA, 19 nt, Artificial Sequence
  Description of Artificial Sequence: Synthetic oligonucleotide
  Sense strand starting at position 22 of SEQ ID NO: 1880979
gggugauuucguggcuaau

SEQ ID NO: 2008661 - RNA, 19 nt, Artificial Sequence
  Description of Artificial Sequence: Synthetic oligonucleotide
  Antisense strand to SEQ ID NO: 2008660
auuagccacgaaaucaccc

SEQ ID NO: 2008662 - RNA, 19 nt, Artificial Sequence
  Description of Artificial Sequence: Synthetic oligonucleotide
  Sense strand starting at position 24 of SEQ ID NO: 1880979
gugauuucguggcuaauua

SEQ ID NO: 2008663 - RNA, 19 nt, Artificial Sequence
  Description of Artificial Sequence: Synthetic oligonucleotide
  Antisense strand to SEQ ID NO: 2008662
uaauuagccacgaaaucac

SEQ ID NO: 2008664 - RNA, 19 nt, Artificial Sequence
  Description of Artificial Sequence: Synthetic oligonucleotide
  Sense strand starting at position 69 of SEQ ID NO: 1880979
ggcacuuguaaagguaaga

SEQ ID NO: 2008665 - RNA, 19 nt, Artificial Sequence
  Description of Artificial Sequence: Synthetic oligonucleotide
  Antisense strand to SEQ ID NO: 2008664
ucuuaccuuuacaagugcc

SEQ ID NO: 2008666 - RNA, 19 nt, Artificial Sequence
  Description of Artificial Sequence: Synthetic oligonucleotide
  Sense strand starting at position 146 of SEQ ID NO: 1880979
ugcacaagcuauccaaagu

SEQ ID NO: 2008667 - RNA, 19 nt, Artificial Sequence
  Description of Artificial Sequence: Synthetic oligonucleotide
  Antisense strand to SEQ ID NO: 2008666
acuuuggauagcuugugca

SEQ ID NO: 2008668 - RNA, 19 nt, Artificial Sequence
  Description of Artificial Sequence: Synthetic oligonucleotide
  Sense strand starting at position 157 of SEQ ID NO: 1880979
uccaaagucggauguguuu

SEQ ID NO: 2008669 - RNA, 19 nt, Artificial Sequence
  Description of Artificial Sequence: Synthetic oligonucleotide
  Antisense strand to SEQ ID NO: 2008668
aaacacauccgacuuugga

SEQ ID NO: 2008670 - RNA, 19 nt, Artificial Sequence
  Description of Artificial Sequence: Synthetic oligonucleotide
  Sense strand starting at position 343 of SEQ ID NO: 1880979
augugucaagauugaaucu

SEQ ID NO: 2008671 - RNA, 19 nt, Artificial Sequence
  Description of Artificial Sequence: Synthetic oligonucleotide
  Antisense strand to SEQ ID NO: 2008670
agauucaaucuugacacau

SEQ ID NO: 2008672 - RNA, 19 nt, Artificial Sequence
  Description of Artificial Sequence: Synthetic oligonucleotide
  Sense strand starting at position 441 of SEQ ID NO: 1880979
gagaucuauggauggcuuu

SEQ ID NO: 2008673 - RNA, 19 nt, Artificial Sequence
  Description of Artificial Sequence: Synthetic oligonucleotide
  Antisense strand to SEQ ID NO: 2008672
aaagccauccauagaucuc

SEQ ID NO: 2008674 - RNA, 19 nt, Artificial Sequence
  Description of Artificial Sequence: Synthetic oligonucleotide
  Sense strand starting at position 447 of SEQ ID NO: 1880979
uauggauggcuuuguguac

SEQ ID NO: 2008675 - RNA, 19 nt, Artificial Sequence
  Description of Artificial Sequence: Synthetic oligonucleotide
  Antisense strand to SEQ ID NO: 2008674
guacacaaagccauccaua

SEQ ID NO: 2008676 - RNA, 19 nt, Artificial Sequence
  Description of Artificial Sequence: Synthetic oligonucleotide
  Sense strand starting at position 451 of SEQ ID NO: 1880979
gauggcuuuguguacuuau

SEQ ID NO: 2008677 - RNA, 19 nt, Artificial Sequence
  Description of Artificial Sequence: Synthetic oligonucleotide
  Antisense strand to SEQ ID NO: 2008676
auaaguacacaaagccauc

SEQ ID NO: 2008678 - RNA, 19 nt, Artificial Sequence
  Description of Artificial Sequence: Synthetic oligonucleotide
  Sense strand starting at position 648 of SEQ ID NO: 1880979
ugaugauuccgcugaggcu

SEQ ID NO: 2008679 - RNA, 19 nt, Artificial Sequence
  Description of Artificial Sequence: Synthetic oligonucleotide
  Antisense strand to SEQ ID NO: 2008678
agccucagcggaaucauca

SEQ ID NO: 2008680 - RNA, 19 nt, Artificial Sequence
  Description of Artificial Sequence: Synthetic oligonucleotide
  Sense strand starting at position 649 of SEQ ID NO: 1880979
gaugauuccgcugaggcua

SEQ ID NO: 2008681 - RNA, 19 nt, Artificial Sequence
  Description of Artificial Sequence: Synthetic oligonucleotide
  Antisense strand to SEQ ID NO: 2008680
uagccucagcggaaucauc

SEQ ID NO: 2008682 - RNA, 19 nt, Artificial Sequence
  Description of Artificial Sequence: Synthetic oligonucleotide
  Sense strand starting at position 677 of SEQ ID NO: 1880979
ggugaaacuucuccagcca

SEQ ID NO: 2008683 - RNA, 19 nt, Artificial Sequence
  Description of Artificial Sequence: Synthetic oligonucleotide
  Antisense strand to SEQ ID NO: 2008682
uggcuggagaaguuucacc

SEQ ID NO: 2008684 - RNA, 19 nt, Artificial Sequence
  Description of Artificial Sequence: Synthetic oligonucleotide
  Sense strand starting at position 791 of SEQ ID NO: 1880979
gauuucuaauccggaauga

SEQ ID NO: 2008685 - RNA, 19 nt, Artificial Sequence
  Description of Artificial Sequence: Synthetic oligonucleotide
  Antisense strand to SEQ ID NO: 2008684
ucauuccggauuagaaauc

SEQ ID NO: 2008686 - RNA, 19 nt, Artificial Sequence
  Description of Artificial Sequence: Synthetic oligonucleotide
  Sense strand starting at position 965 of SEQ ID NO: 1880979
ucuggucaaaccuguggaa

SEQ ID NO: 2008687 - RNA, 19 nt, Artificial Sequence
  Description of Artificial Sequence: Synthetic oligonucleotide
  Antisense strand to SEQ ID NO: 2008686
uuccacagguuugaccaga

SEQ ID NO: 2008688 - RNA, 19 nt, Artificial Sequence
  Description of Artificial Sequence: Synthetic oligonucleotide
  Sense strand starting at position 967 of SEQ ID NO: 1880979
uggucaaaccuguggaaua

SEQ ID NO: 2008689 - RNA, 19 nt, Artificial Sequence
  Description of Artificial Sequence: Synthetic oligonucleotide
  Antisense strand to SEQ ID NO: 2008688
uauuccacagguuugacca

SEQ ID NO: 2008690 - RNA, 19 nt, Artificial Sequence
  Description of Artificial Sequence: Synthetic oligonucleotide
  Sense strand starting at position 1047 of SEQ ID NO: 1880979
cucauuggucucuacaaag

SEQ ID NO: 2008691 - RNA, 19 nt, Artificial Sequence
  Description of Artificial Sequence: Synthetic oligonucleotide
  Antisense strand to SEQ ID NO: 2008690
cuuuguagagaccaaugag

SEQ ID NO: 2008692 - RNA, 19 nt, Artificial Sequence
  Description of Artificial Sequence: Synthetic oligonucleotide
  Sense strand starting at position 1080 of SEQ ID NO: 1880979
cucgguguucgacaggauu

SEQ ID NO: 2008693 - RNA, 19 nt, Artificial Sequence
  Description of Artificial Sequence: Synthetic oligonucleotide
  Antisense strand to SEQ ID NO: 2008692
aauccugucgaacaccgag

SEQ ID NO: 2008694 - RNA, 19 nt, Artificial Sequence
  Description of Artificial Sequence: Synthetic oligonucleotide
  Sense strand starting at position 1082 of SEQ ID NO: 1880979
cgguguucgacaggauuuc

SEQ ID NO: 2008695 - RNA, 19 nt, Artificial Sequence
  Description of Artificial Sequence: Synthetic oligonucleotide
  Antisense strand to SEQ ID NO: 2008694
gaaauccugucgaacaccg

SEQ ID NO: 2008696 - RNA, 19 nt, Artificial Sequence
  Description of Artificial Sequence: Synthetic oligonucleotide
  Sense strand starting at position 1120 of SEQ ID NO: 1880979
agugguagucauuagccaa

SEQ ID NO: 2008697 - RNA, 19 nt, Artificial Sequence
  Description of Artificial Sequence: Synthetic oligonucleotide
  Antisense strand to SEQ ID NO: 2008696
uuggcuaaugacuaccacu

SEQ ID NO: 2008698 - RNA, 19 nt, Artificial Sequence
  Description of Artificial Sequence: Synthetic oligonucleotide
  Sense strand starting at position 1123 of SEQ ID NO: 1880979
gguagucauuagccaauua

SEQ ID NO: 2008699 - RNA, 19 nt, Artificial Sequence
  Description of Artificial Sequence: Synthetic oligonucleotide
  Antisense strand to SEQ ID NO: 2008698
uaauuggcuaaugacuacc

SEQ ID NO: 2008700 - RNA, 19 nt, Artificial Sequence
  Description of Artificial Sequence: Synthetic oligonucleotide
  Sense strand starting at position 2241 of SEQ ID NO: 1880979
ccaguugugcacgagcaga

SEQ ID NO: 2008701 - RNA, 19 nt, Artificial Sequence
  Description of Artificial Sequence: Synthetic oligonucleotide
  Antisense strand to SEQ ID NO: 2008700
ucugcucgugcacaacugg

SEQ ID NO: 2008702 - RNA, 19 nt, Artificial Sequence
  Description of Artificial Sequence: Synthetic oligonucleotide
  Sense strand starting at position 2339 of SEQ ID NO: 1880979
ggcugagggagguguguuu

SEQ ID NO: 2008703 - RNA, 19 nt, Artificial Sequence
  Description of Artificial Sequence: Synthetic oligonucleotide
  Antisense strand to SEQ ID NO: 2008702
aaacacaccucccucagcc

SEQ ID NO: 2008704 - RNA, 19 nt, Artificial Sequence
  Description of Artificial Sequence: Synthetic oligonucleotide
  Sense strand starting at position 2342 of SEQ ID NO: 1880979
ugagggagguguguuugaa

SEQ ID NO: 2008705 - RNA, 19 nt, Artificial Sequence
  Description of Artificial Sequence: Synthetic oligonucleotide
  Antisense strand to SEQ ID NO: 2008704
uucaaacacaccucccuca

SEQ ID NO: 2008706 - RNA, 19 nt, Artificial Sequence
  Description of Artificial Sequence: Synthetic oligonucleotide
  Sense strand starting at position 2344 of SEQ ID NO: 1880979
agggagguguguuugaagu

SEQ ID NO: 2008707 - RNA, 19 nt, Artificial Sequence
  Description of Artificial Sequence: Synthetic oligonucleotide
  Antisense strand to SEQ ID NO: 2008706
acuucaaacacaccucccu

SEQ ID NO: 2008708 - RNA, 19 nt, Artificial Sequence
  Description of Artificial Sequence: Synthetic oligonucleotide
  Sense strand starting at position 2345 of SEQ ID NO: 1880979
gggagguguguuugaagug

SEQ ID NO: 2008709 - RNA, 19 nt, Artificial Sequence
  Description of Artificial Sequence: Synthetic oligonucleotide
  Antisense strand to SEQ ID NO: 2008708
cacuucaaacacaccuccc

SEQ ID NO: 2008710 - RNA, 19 nt, Artificial Sequence
  Description of Artificial Sequence: Synthetic oligonucleotide
  Sense strand starting at position 2350 of SEQ ID NO: 1880979
guguguuugaagugggaac

SEQ ID NO: 2008711 - RNA, 19 nt, Artificial Sequence
  Description of Artificial Sequence: Synthetic oligonucleotide
  Antisense strand to SEQ ID NO: 2008710
guucccacuucaaacacac

SEQ ID NO: 2008712 - RNA, 19 nt, Artificial Sequence
  Description of Artificial Sequence: Synthetic oligonucleotide
  Sense strand starting at position 2361 of SEQ ID NO: 1880979
gugggaaccaauugucagu

SEQ ID NO: 2008713 - RNA, 19 nt, Artificial Sequence
  Description of Artificial Sequence: Synthetic oligonucleotide
  Antisense strand to SEQ ID NO: 2008712
acugacaauugguucccac

SEQ ID NO: 2008714 - RNA, 19 nt, Artificial Sequence
  Description of Artificial Sequence: Synthetic oligonucleotide
  Sense strand starting at position 2372 of SEQ ID NO: 1880979
uugucaguugauugaguca

SEQ ID NO: 2008715 - RNA, 19 nt, Artificial Sequence
  Description of Artificial Sequence: Synthetic oligonucleotide
  Antisense strand to SEQ ID NO: 2008714
ugacucaaucaacugacaa

SEQ ID NO: 2008716 - RNA, 19 nt, Artificial Sequence
  Description of Artificial Sequence: Synthetic oligonucleotide
  Sense strand starting at position 2375 of SEQ ID NO: 1880979
ucaguugauugagucaaau

SEQ ID NO: 2008717 - RNA, 19 nt, Artificial Sequence
  Description of Artificial Sequence: Synthetic oligonucleotide
  Antisense strand to SEQ ID NO: 2008716
auuugacucaaucaacuga

SEQ ID NO: 2008718 - RNA, 19 nt, Artificial Sequence
  Description of Artificial Sequence: Synthetic oligonucleotide
  Sense strand starting at position 2402 of SEQ ID NO: 1880979
ucgacaguugcaggacaua

SEQ ID NO: 2008719 - RNA, 19 nt, Artificial Sequence
  Description of Artificial Sequence: Synthetic oligonucleotide
  Antisense strand to SEQ ID NO: 2008718
uauguccugcaacugucga

SEQ ID NO: 2008720 - RNA, 19 nt, Artificial Sequence
  Description of Artificial Sequence: Synthetic oligonucleotide
  Sense strand starting at position 3131 of SEQ ID NO: 1880979
gccuuuguucccuuuguuu

SEQ ID NO: 2008721 - RNA, 19 nt, Artificial Sequence
  Description of Artificial Sequence: Synthetic oligonucleotide
  Antisense strand to SEQ ID NO: 2008720
aaacaaagggaacaaaggc

SEQ ID NO: 2008722 - RNA, 19 nt, Artificial Sequence
  Description of Artificial Sequence: Synthetic oligonucleotide
  Sense strand starting at position 3756 of SEQ ID NO: 1880979
uugagcuuuccacaauaga

SEQ ID NO: 2008723 - RNA, 19 nt, Artificial Sequence
  Description of Artificial Sequence: Synthetic oligonucleotide
  Antisense strand to SEQ ID NO: 2008722
ucuauuguggaaagcucaa

SEQ ID NO: 2008724 - RNA, 19 nt, Artificial Sequence
  Description of Artificial Sequence: Synthetic oligonucleotide
  Sense strand starting at position 3882 of SEQ ID NO: 1880979
gacaguggacuuggugaua

SEQ ID NO: 2008725 - RNA, 19 nt, Artificial Sequence
  Description of Artificial Sequence: Synthetic oligonucleotide
  Antisense strand to SEQ ID NO: 2008724
uaucaccaaguccacuguc

SEQ ID NO: 2008726 - RNA, 19 nt, Artificial Sequence
  Description of Artificial Sequence: Synthetic oligonucleotide
  Sense strand starting at position 3891 of SEQ ID NO: 1880979
cuuggugauaguggugauu

SEQ ID NO: 2008727 - RNA, 19 nt, Artificial Sequence
  Description of Artificial Sequence: Synthetic oligonucleotide
  Antisense strand to SEQ ID NO: 2008726
aaucaccacuaucaccaag

SEQ ID NO: 2008728 - RNA, 19 nt, Artificial Sequence
  Description of Artificial Sequence: Synthetic oligonucleotide
  Sense strand starting at position 3894 of SEQ ID NO: 1880979
ggugauaguggugauuaua

SEQ ID NO: 2008729 - RNA, 19 nt, Artificial Sequence
  Description of Artificial Sequence: Synthetic oligonucleotide
  Antisense strand to SEQ ID NO: 2008728
uauaaucaccacuaucacc

SEQ ID NO: 2008730 - RNA, 19 nt, Artificial Sequence
  Description of Artificial Sequence: Synthetic oligonucleotide
  Sense strand starting at position 3897 of SEQ ID NO: 1880979
gauaguggugauuauaucu

SEQ ID NO: 2008731 - RNA, 19 nt, Artificial Sequence
  Description of Artificial Sequence: Synthetic oligonucleotide
  Antisense strand to SEQ ID NO: 2008730
agauauaaucaccacuauc

SEQ ID NO: 2008732 - RNA, 19 nt, Artificial Sequence
  Description of Artificial Sequence: Synthetic oligonucleotide
  Sense strand starting at position 3902 of SEQ ID NO: 1880979
uggugauuauaucuacugu

SEQ ID NO: 2008733 - RNA, 19 nt, Artificial Sequence
  Description of Artificial Sequence: Synthetic oligonucleotide
  Antisense strand to SEQ ID NO: 2008732
acaguagauauaaucacca

SEQ ID NO: 2008734 - RNA, 19 nt, Artificial Sequence
  Description of Artificial Sequence: Synthetic oligonucleotide
  Sense strand starting at position 3908 of SEQ ID NO: 1880979
uuauaucuacuguagaguu

SEQ ID NO: 2008735 - RNA, 19 nt, Artificial Sequence
  Description of Artificial Sequence: Synthetic oligonucleotide
  Antisense strand to SEQ ID NO: 2008734
aacucuacaguagauauaa

SEQ ID NO: 2008736 - RNA, 19 nt, Artificial Sequence
  Description of Artificial Sequence: Synthetic oligonucleotide
  Sense strand starting at position 3971 of SEQ ID NO: 1880979
ccuagcauaggcugagaaa

SEQ ID NO: 2008737 - RNA, 19 nt, Artificial Sequence
  Description of Artificial Sequence: Synthetic oligonucleotide
  Antisense strand to SEQ ID NO: 2008736
uuucucagccuaugcuagg

SEQ ID NO: 2008738 - RNA, 19 nt, Artificial Sequence
  Description of Artificial Sequence: Synthetic oligonucleotide
  Sense strand starting at position 110 of SEQ ID NO: 1880980
gaagaaugcuugcuaggga

SEQ ID NO: 2008739 - RNA, 19 nt, Artificial Sequence
  Description of Artificial Sequence: Synthetic oligonucleotide
  Antisense strand to SEQ ID NO: 2008738
ucccuagcaagcauucuuc

SEQ ID NO: 2008740 - RNA, 19 nt, Artificial Sequence
  Description of Artificial Sequence: Synthetic oligonucleotide
  Sense strand starting at position 337 of SEQ ID NO: 1880980
uuguguuucccugugcagu

SEQ ID NO: 2008741 - RNA, 19 nt, Artificial Sequence
  Description of Artificial Sequence: Synthetic oligonucleotide
  Antisense strand to SEQ ID NO: 2008740
acugcacagggaaacacaa

SEQ ID NO: 2008742 - RNA, 19 nt, Artificial Sequence
  Description of Artificial Sequence: Synthetic oligonucleotide
  Sense strand starting at position 417 of SEQ ID NO: 1880980
gugccuguuaaggaacaaa

SEQ ID NO: 2008743 - RNA, 19 nt, Artificial Sequence
  Description of Artificial Sequence: Synthetic oligonucleotide
  Antisense strand to SEQ ID NO: 2008742
uuuguuccuuaacaggcac

SEQ ID NO: 2008744 - RNA, 19 nt, Artificial Sequence
  Description of Artificial Sequence: Synthetic oligonucleotide
  Sense strand starting at position 546 of SEQ ID NO: 1880980
uuugcucuuggguaucaaa

SEQ ID NO: 2008745 - RNA, 19 nt, Artificial Sequence
  Description of Artificial Sequence: Synthetic oligonucleotide
  Antisense strand to SEQ ID NO: 2008744
uuugauacccaagagcaaa

SEQ ID NO: 2008746 - RNA, 19 nt, Artificial Sequence
  Description of Artificial Sequence: Synthetic oligonucleotide
  Sense strand starting at position 758 of SEQ ID NO: 1880980
ucaagaugauuccuaucug

SEQ ID NO: 2008747 - RNA, 19 nt, Artificial Sequence
  Description of Artificial Sequence: Synthetic oligonucleotide
  Antisense strand to SEQ ID NO: 2008746
cagauaggaaucaucuuga

SEQ ID NO: 2008748 - RNA, 19 nt, Artificial Sequence
  Description of Artificial Sequence: Synthetic oligonucleotide
  Sense strand starting at position 762 of SEQ ID NO: 1880980
gaugauuccuaucuggauu

SEQ ID NO: 2008749 - RNA, 19 nt, Artificial Sequence
  Description of Artificial Sequence: Synthetic oligonucleotide
  Antisense strand to SEQ ID NO: 2008748
aauccagauaggaaucauc

SEQ ID NO: 2008750 - RNA, 19 nt, Artificial Sequence
  Description of Artificial Sequence: Synthetic oligonucleotide
  Sense strand starting at position 776 of SEQ ID NO: 1880980
ggauuaaaguccucaacca

SEQ ID NO: 2008751 - RNA, 19 nt, Artificial Sequence
  Description of Artificial Sequence: Synthetic oligonucleotide
  Antisense strand to SEQ ID NO: 2008750
ugguugaggacuuuaaucc

SEQ ID NO: 2008752 - RNA, 19 nt, Artificial Sequence
  Description of Artificial Sequence: Synthetic oligonucleotide
  Sense strand starting at position 920 of SEQ ID NO: 1880980
agacaagagucgcugagaa

SEQ ID NO: 2008753 - RNA, 19 nt, Artificial Sequence
  Description of Artificial Sequence: Synthetic oligonucleotide
  Antisense strand to SEQ ID NO: 2008752
uucucagcgacucuugucu

SEQ ID NO: 2008754 - RNA, 19 nt, Artificial Sequence
  Description of Artificial Sequence: Synthetic oligonucleotide
  Sense strand starting at position 1373 of SEQ ID NO: 1880980
agaccuauccuaggagucu

SEQ ID NO: 2008755 - RNA, 19 nt, Artificial Sequence
  Description of Artificial Sequence: Synthetic oligonucleotide
  Antisense strand to SEQ ID NO: 2008754
agacuccuaggauaggucu

SEQ ID NO: 2008756 - RNA, 19 nt, Artificial Sequence
  Description of Artificial Sequence: Synthetic oligonucleotide
  Sense strand starting at position 1392 of SEQ ID NO: 1880980
uccaucuugccugauagaa

SEQ ID NO: 2008757 - RNA, 19 nt, Artificial Sequence
  Description of Artificial Sequence: Synthetic oligonucleotide
  Antisense strand to SEQ ID NO: 2008756
uucuaucaggcaagaugga

SEQ ID NO: 2008758 - RNA, 19 nt, Artificial Sequence
  Description of Artificial Sequence: Synthetic oligonucleotide
  Sense strand starting at position 1627 of SEQ ID NO: 1880980
aucauaauuccuggagcuu

SEQ ID NO: 2008759 - RNA, 19 nt, Artificial Sequence
  Description of Artificial Sequence: Synthetic oligonucleotide
  Antisense strand to SEQ ID NO: 2008758
aagcuccaggaauuaugau

SEQ ID NO: 2008760 - RNA, 19 nt, Artificial Sequence
  Description of Artificial Sequence: Synthetic oligonucleotide
  Sense strand starting at position 1628 of SEQ ID NO: 1880980
ucauaauuccuggagcuug

SEQ ID NO: 2008761 - RNA, 19 nt, Artificial Sequence
  Description of Artificial Sequence: Synthetic oligonucleotide
  Antisense strand to SEQ ID NO: 2008760
caagcuccaggaauuauga

SEQ ID NO: 2008762 - RNA, 19 nt, Artificial Sequence
  Description of Artificial Sequence: Synthetic oligonucleotide
  Sense strand starting at position 1675 of SEQ ID NO: 1880980
guugaaaugacucagcuug

SEQ ID NO: 2008763 - RNA, 19 nt, Artificial Sequence
  Description of Artificial Sequence: Synthetic oligonucleotide
  Antisense strand to SEQ ID NO: 2008762
caagcugagucauuucaac

SEQ ID NO: 2008764 - RNA, 19 nt, Artificial Sequence
  Description of Artificial Sequence: Synthetic oligonucleotide
  Sense strand starting at position 1723 of SEQ ID NO: 1880980
aucagauucucagcaggga

SEQ ID NO: 2008765 - RNA, 19 nt, Artificial Sequence
  Description of Artificial Sequence: Synthetic oligonucleotide
  Antisense strand to SEQ ID NO: 2008764
ucccugcugagaaucugau

SEQ ID NO: 2008766 - RNA, 19 nt, Artificial Sequence
  Description of Artificial Sequence: Synthetic oligonucleotide
  Sense strand starting at position 1746 of SEQ ID NO: 1880980
gaaugcaccuugcugagaa

SEQ ID NO: 2008767 - RNA, 19 nt, Artificial Sequence
  Description of Artificial Sequence: Synthetic oligonucleotide
  Antisense strand to SEQ ID NO: 2008766
uucucagcaaggugcauuc

SEQ ID NO: 2008768 - RNA, 19 nt, Artificial Sequence
  Description of Artificial Sequence: Synthetic oligonucleotide
  Sense strand starting at position 1875 of SEQ ID NO: 1880980
acacuuagaagaugugagu

SEQ ID NO: 2008769 - RNA, 19 nt, Artificial Sequence
  Description of Artificial Sequence: Synthetic oligonucleotide
  Antisense strand to SEQ ID NO: 2008768
acucacaucuucuaagugu

SEQ ID NO: 2008770 - RNA, 19 nt, Artificial Sequence
  Description of Artificial Sequence: Synthetic oligonucleotide
  Sense strand starting at position 1928 of SEQ ID NO: 1880980
uauguaguuccaugaggac

SEQ ID NO: 2008771 - RNA, 19 nt, Artificial Sequence
  Description of Artificial Sequence: Synthetic oligonucleotide
  Antisense strand to SEQ ID NO: 2008770
guccucauggaacuacaua

SEQ ID NO: 2008772 - RNA, 19 nt, Artificial Sequence
  Description of Artificial Sequence: Synthetic oligonucleotide
  Sense strand starting at position 2057 of SEQ ID NO: 1880980
uuauuaacuucuguuagag

SEQ ID NO: 2008773 - RNA, 19 nt, Artificial Sequence
  Description of Artificial Sequence: Synthetic oligonucleotide
  Antisense strand to SEQ ID NO: 2008772
cucuaacagaaguuaauaa

SEQ ID NO: 2008774 - RNA, 19 nt, Artificial Sequence
  Description of Artificial Sequence: Synthetic oligonucleotide
  Sense strand starting at position 2144 of SEQ ID NO: 1880980
gagggacuuucccuuugga

SEQ ID NO: 2008775 - RNA, 19 nt, Artificial Sequence
  Description of Artificial Sequence: Synthetic oligonucleotide
  Antisense strand to SEQ ID NO: 2008774
uccaaagggaaagucccuc

SEQ ID NO: 2008776 - RNA, 19 nt, Artificial Sequence
  Description of Artificial Sequence: Synthetic oligonucleotide
  Sense strand starting at position 2147 of SEQ ID NO: 1880980
ggacuuucccuuuggaaau

SEQ ID NO: 2008777 - RNA, 19 nt, Artificial Sequence
  Description of Artificial Sequence: Synthetic oligonucleotide
  Antisense strand to SEQ ID NO: 2008776
auuuccaaagggaaagucc

SEQ ID NO: 2008778 - RNA, 19 nt, Artificial Sequence
  Description of Artificial Sequence: Synthetic oligonucleotide
  Sense strand starting at position 2161 of SEQ ID NO: 1880980
gaaaucuuccagcagaguu

SEQ ID NO: 2008779 - RNA, 19 nt, Artificial Sequence
  Description of Artificial Sequence: Synthetic oligonucleotide
  Antisense strand to SEQ ID NO: 2008778
aacucugcuggaagauuuc

SEQ ID NO: 2008780 - RNA, 19 nt, Artificial Sequence
  Description of Artificial Sequence: Synthetic oligonucleotide
  Sense strand starting at position 2276 of SEQ ID NO: 1880980
cccugcuucccugagaacu

SEQ ID NO: 2008781 - RNA, 19 nt, Artificial Sequence
  Description of Artificial Sequence: Synthetic oligonucleotide
  Antisense strand to SEQ ID NO: 2008780
aguucucagggaagcaggg

SEQ ID NO: 2008782 - RNA, 19 nt, Artificial Sequence
  Description of Artificial Sequence: Synthetic oligonucleotide
  Sense strand starting at position 2287 of SEQ ID NO: 1880980
ugagaacugacuugauguu

SEQ ID NO: 2008783 - RNA, 19 nt, Artificial Sequence
  Description of Artificial Sequence: Synthetic oligonucleotide
  Antisense strand to SEQ ID NO: 2008782
aacaucaagucaguucuca

SEQ ID NO: 2008784 - RNA, 19 nt, Artificial Sequence
  Description of Artificial Sequence: Synthetic oligonucleotide
  Sense strand starting at position 2385 of SEQ ID NO: 1880980
cugaguuccucuuugaaac

SEQ ID NO: 2008785 - RNA, 19 nt, Artificial Sequence
  Description of Artificial Sequence: Synthetic oligonucleotide
  Antisense strand to SEQ ID NO: 2008784
guuucaaagaggaacucag

SEQ ID NO: 2008786 - RNA, 19 nt, Artificial Sequence
  Description of Artificial Sequence: Synthetic oligonucleotide
  Sense strand starting at position 2386 of SEQ ID NO: 1880980
ugaguuccucuuugaaacu

SEQ ID NO: 2008787 - RNA, 19 nt, Artificial Sequence
  Description of Artificial Sequence: Synthetic oligonucleotide
  Antisense strand to SEQ ID NO: 2008786
aguuucaaagaggaacuca

SEQ ID NO: 2008788 - RNA, 19 nt, Artificial Sequence
  Description of Artificial Sequence: Synthetic oligonucleotide
  Sense strand starting at position 2405 of SEQ ID NO: 1880980
gucagaggcucucucaaag

SEQ ID NO: 2008789 - RNA, 19 nt, Artificial Sequence
  Description of Artificial Sequence: Synthetic oligonucleotide
  Antisense strand to SEQ ID NO: 2008788
cuuugagagagccucugac

SEQ ID NO: 2008790 - RNA, 19 nt, Artificial Sequence
  Description of Artificial Sequence: Synthetic oligonucleotide
  Sense strand starting at position 2463 of SEQ ID NO: 1880980
ucaagauggcucugacacu

SEQ ID NO: 2008791 - RNA, 19 nt, Artificial Sequence
  Description of Artificial Sequence: Synthetic oligonucleotide
  Antisense strand to SEQ ID NO: 2008790
agugucagagccaucuuga

SEQ ID NO: 2008792 - RNA, 19 nt, Artificial Sequence
  Description of Artificial Sequence: Synthetic oligonucleotide
  Sense strand starting at position 2486 of SEQ ID NO: 1880980
gggauaguccuguaaaccc

SEQ ID NO: 2008793 - RNA, 19 nt, Artificial Sequence
  Description of Artificial Sequence: Synthetic oligonucleotide
  Antisense strand to SEQ ID NO: 2008792
ggguuuacaggacuauccc

SEQ ID NO: 2008794 - RNA, 19 nt, Artificial Sequence
  Description of Artificial Sequence: Synthetic oligonucleotide
  Sense strand starting at position 2673 of SEQ ID NO: 1880980
agagcuuguagcuaucaag

SEQ ID NO: 2008795 - RNA, 19 nt, Artificial Sequence
  Description of Artificial Sequence: Synthetic oligonucleotide
  Antisense strand to SEQ ID NO: 2008794
cuugauagcuacaagcucu

SEQ ID NO: 2008796 - RNA, 19 nt, Artificial Sequence
  Description of Artificial Sequence: Synthetic oligonucleotide
  Sense strand starting at position 2799 of SEQ ID NO: 1880980
caguuaacucgauggauua

SEQ ID NO: 2008797 - RNA, 19 nt, Artificial Sequence
  Description of Artificial Sequence: Synthetic oligonucleotide
  Antisense strand to SEQ ID NO: 2008796
uaauccaucgaguuaacug

SEQ ID NO: 2008798 - RNA, 19 nt, Artificial Sequence
  Description of Artificial Sequence: Synthetic oligonucleotide
  Sense strand starting at position 2800 of SEQ ID NO: 1880980
aguuaacucgauggauuaa

SEQ ID NO: 2008799 - RNA, 19 nt, Artificial Sequence
  Description of Artificial Sequence: Synthetic oligonucleotide
  Antisense strand to SEQ ID NO: 2008798
uuaauccaucgaguuaacu

SEQ ID NO: 2008800 - RNA, 19 nt, Artificial Sequence
  Description of Artificial Sequence: Synthetic oligonucleotide
  Sense strand starting at position 2968 of SEQ ID NO: 1880980
gcuucuucuggccauaaag

SEQ ID NO: 2008801 - RNA, 19 nt, Artificial Sequence
  Description of Artificial Sequence: Synthetic oligonucleotide
  Antisense strand to SEQ ID NO: 2008800
cuuuauggccagaagaagc

SEQ ID NO: 2008802 - RNA, 19 nt, Artificial Sequence
  Description of Artificial Sequence: Synthetic oligonucleotide
  Sense strand starting at position 2970 of SEQ ID NO: 1880980
uucuucuggccauaaaguu

SEQ ID NO: 2008803 - RNA, 19 nt, Artificial Sequence
  Description of Artificial Sequence: Synthetic oligonucleotide
  Antisense strand to SEQ ID NO: 2008802
aacuuuauggccagaagaa

SEQ ID NO: 2008804 - RNA, 19 nt, Artificial Sequence
  Description of Artificial Sequence: Synthetic oligonucleotide
  Sense strand starting at position 3207 of SEQ ID NO: 1880980
cuuaauauagcagauguuu

SEQ ID NO: 2008805 - RNA, 19 nt, Artificial Sequence
  Description of Artificial Sequence: Synthetic oligonucleotide
  Antisense strand to SEQ ID NO: 2008804
aaacaucugcuauauuaag

SEQ ID NO: 2008806 - RNA, 19 nt, Artificial Sequence
  Description of Artificial Sequence: Synthetic oligonucleotide
  Sense strand starting at position 3260 of SEQ ID NO: 1880980
acacauuggcgucaauaca

SEQ ID NO: 2008807 - RNA, 19 nt, Artificial Sequence
  Description of Artificial Sequence: Synthetic oligonucleotide
  Antisense strand to SEQ ID NO: 2008806
uguauugacgccaaugugu

SEQ ID NO: 2008808 - RNA, 19 nt, Artificial Sequence
  Description of Artificial Sequence: Synthetic oligonucleotide
  Sense strand starting at position 3269 of SEQ ID NO: 1880980
cgucaauacagucagggau

SEQ ID NO: 2008809 - RNA, 19 nt, Artificial Sequence
  Description of Artificial Sequence: Synthetic oligonucleotide
  Antisense strand to SEQ ID NO: 2008808
aucccugacuguauugacg

SEQ ID NO: 2008810 - RNA, 19 nt, Artificial Sequence
  Description of Artificial Sequence: Synthetic oligonucleotide
  Sense strand starting at position 3320 of SEQ ID NO: 1880980
uacagucuugugggagaca

SEQ ID NO: 2008811 - RNA, 19 nt, Artificial Sequence
  Description of Artificial Sequence: Synthetic oligonucleotide
  Antisense strand to SEQ ID NO: 2008810
ugucucccacaagacugua

SEQ ID NO: 2008812 - RNA, 19 nt, Artificial Sequence
  Description of Artificial Sequence: Synthetic oligonucleotide
  Sense strand starting at position 3791 of SEQ ID NO: 1880980
cagcuuuacccagaugagu

SEQ ID NO: 2008813 - RNA, 19 nt, Artificial Sequence
  Description of Artificial Sequence: Synthetic oligonucleotide
  Antisense strand to SEQ ID NO: 2008812
acucaucuggguaaagcug

SEQ ID NO: 2008814 - RNA, 19 nt, Artificial Sequence
  Description of Artificial Sequence: Synthetic oligonucleotide
  Sense strand starting at position 3845 of SEQ ID NO: 1880980
uggccaucuguacaucuua

SEQ ID NO: 2008815 - RNA, 19 nt, Artificial Sequence
  Description of Artificial Sequence: Synthetic oligonucleotide
  Antisense strand to SEQ ID NO: 2008814
uaagauguacagauggcca

SEQ ID NO: 2008816 - RNA, 19 nt, Artificial Sequence
  Description of Artificial Sequence: Synthetic oligonucleotide
  Sense strand starting at position 3955 of SEQ ID NO: 1880980
ugaagagucccagagcauu

SEQ ID NO: 2008817 - RNA, 19 nt, Artificial Sequence
  Description of Artificial Sequence: Synthetic oligonucleotide
  Antisense strand to SEQ ID NO: 2008816
aaugcucugggacucuuca

SEQ ID NO: 2008818 - RNA, 19 nt, Artificial Sequence
  Description of Artificial Sequence: Synthetic oligonucleotide
  Sense strand starting at position 94 of SEQ ID NO: 1880981
cugugccuccuggaaauca

SEQ ID NO: 2008819 - RNA, 19 nt, Artificial Sequence
  Description of Artificial Sequence: Synthetic oligonucleotide
  Antisense strand to SEQ ID NO: 2008818
ugauuuccaggaggcacag

SEQ ID NO: 2008820 - RNA, 19 nt, Artificial Sequence
  Description of Artificial Sequence: Synthetic oligonucleotide
  Sense strand starting at position 212 of SEQ ID NO: 1880981
agaagaagccuugguucca

SEQ ID NO: 2008821 - RNA, 19 nt, Artificial Sequence
  Description of Artificial Sequence: Synthetic oligonucleotide
  Antisense strand to SEQ ID NO: 2008820
uggaaccaaggcuucuucu

SEQ ID NO: 2008822 - RNA, 19 nt, Artificial Sequence
  Description of Artificial Sequence: Synthetic oligonucleotide
  Sense strand starting at position 250 of SEQ ID NO: 1880981
gaacuagcuuuguucugaa

SEQ ID NO: 2008823 - RNA, 19 nt, Artificial Sequence
  Description of Artificial Sequence: Synthetic oligonucleotide
  Antisense strand to SEQ ID NO: 2008822
uucagaacaaagcuaguuc

SEQ ID NO: 2008824 - RNA, 19 nt, Artificial Sequence
  Description of Artificial Sequence: Synthetic oligonucleotide
  Sense strand starting at position 258 of SEQ ID NO: 1880981
uuuguucugaacuagggua

SEQ ID NO: 2008825 - RNA, 19 nt, Artificial Sequence
  Description of Artificial Sequence: Synthetic oligonucleotide
  Antisense strand to SEQ ID NO: 2008824
uacccuaguucagaacaaa

SEQ ID NO: 2008826 - RNA, 19 nt, Artificial Sequence
  Description of Artificial Sequence: Synthetic oligonucleotide
  Sense strand starting at position 339 of SEQ ID NO: 1880981
gaaagagagcaaggcuuau

SEQ ID NO: 2008827 - RNA, 19 nt, Artificial Sequence
  Description of Artificial Sequence: Synthetic oligonucleotide
  Antisense strand to SEQ ID NO: 2008826
auaagccuugcucucuuuc

SEQ ID NO: 2008828 - RNA, 19 nt, Artificial Sequence
  Description of Artificial Sequence: Synthetic oligonucleotide
  Sense strand starting at position 343 of SEQ ID NO: 1880981
gagagcaaggcuuauccuu

SEQ ID NO: 2008829 - RNA, 19 nt, Artificial Sequence
  Description of Artificial Sequence: Synthetic oligonucleotide
  Antisense strand to SEQ ID NO: 2008828
aaggauaagccuugcucuc

SEQ ID NO: 2008830 - RNA, 19 nt, Artificial Sequence
  Description of Artificial Sequence: Synthetic oligonucleotide
  Sense strand starting at position 397 of SEQ ID NO: 1880981
uccagauagcuauguaaag

SEQ ID NO: 2008831 - RNA, 19 nt, Artificial Sequence
  Description of Artificial Sequence: Synthetic oligonucleotide
  Antisense strand to SEQ ID NO: 2008830
cuuuacauagcuaucugga

SEQ ID NO: 2008832 - RNA, 19 nt, Artificial Sequence
  Description of Artificial Sequence: Synthetic oligonucleotide
  Sense strand starting at position 398 of SEQ ID NO: 1880981
ccagauagcuauguaaaga

SEQ ID NO: 2008833 - RNA, 19 nt, Artificial Sequence
  Description of Artificial Sequence: Synthetic oligonucleotide
  Antisense strand to SEQ ID NO: 2008832
ucuuuacauagcuaucugg

SEQ ID NO: 2008834 - RNA, 19 nt, Artificial Sequence
  Description of Artificial Sequence: Synthetic oligonucleotide
  Sense strand starting at position 439 of SEQ ID NO: 1880981
gacauuacgguugaagcua

SEQ ID NO: 2008835 - RNA, 19 nt, Artificial Sequence
  Description of Artificial Sequence: Synthetic oligonucleotide
  Antisense strand to SEQ ID NO: 2008834
uagcuucaaccguaauguc

SEQ ID NO: 2008836 - RNA, 19 nt, Artificial Sequence
  Description of Artificial Sequence: Synthetic oligonucleotide
  Sense strand starting at position 469 of SEQ ID NO: 1880981
gguccuuuguaccugaaua

SEQ ID NO: 2008837 - RNA, 19 nt, Artificial Sequence
  Description of Artificial Sequence: Synthetic oligonucleotide
  Antisense strand to SEQ ID NO: 2008836
uauucagguacaaaggacc

SEQ ID NO: 2008838 - RNA, 19 nt, Artificial Sequence
  Description of Artificial Sequence: Synthetic oligonucleotide
  Sense strand starting at position 1341 of SEQ ID NO: 1880981
cagucccuucuaugggaaa

SEQ ID NO: 2008839 - RNA, 19 nt, Artificial Sequence
  Description of Artificial Sequence: Synthetic oligonucleotide
  Antisense strand to SEQ ID NO: 2008838
uuucccauagaagggacug

SEQ ID NO: 2008840 - RNA, 19 nt, Artificial Sequence
  Description of Artificial Sequence: Synthetic oligonucleotide
  Sense strand starting at position 1352 of SEQ ID NO: 1880981
augggaaauuguccucuca

SEQ ID NO: 2008841 - RNA, 19 nt, Artificial Sequence
  Description of Artificial Sequence: Synthetic oligonucleotide
  Antisense strand to SEQ ID NO: 2008840
ugagaggacaauuucccau

SEQ ID NO: 2008842 - RNA, 19 nt, Artificial Sequence
  Description of Artificial Sequence: Synthetic oligonucleotide
  Sense strand starting at position 1354 of SEQ ID NO: 1880981
gggaaauuguccucucaua

SEQ ID NO: 2008843 - RNA, 19 nt, Artificial Sequence
  Description of Artificial Sequence: Synthetic oligonucleotide
  Antisense strand to SEQ ID NO: 2008842
uaugagaggacaauuuccc

SEQ ID NO: 2008844 - RNA, 19 nt, Artificial Sequence
  Description of Artificial Sequence: Synthetic oligonucleotide
  Sense strand starting at position 1452 of SEQ ID NO: 1880981
ugcugagauagugguugaa

SEQ ID NO: 2008845 - RNA, 19 nt, Artificial Sequence
  Description of Artificial Sequence: Synthetic oligonucleotide
  Antisense strand to SEQ ID NO: 2008844
uucaaccacuaucucagca

SEQ ID NO: 2008846 - RNA, 19 nt, Artificial Sequence
  Description of Artificial Sequence: Synthetic oligonucleotide
  Sense strand starting at position 1454 of SEQ ID NO: 1880981
cugagauagugguugaaac

SEQ ID NO: 2008847 - RNA, 19 nt, Artificial Sequence
  Description of Artificial Sequence: Synthetic oligonucleotide
  Antisense strand to SEQ ID NO: 2008846
guuucaaccacuaucucag

SEQ ID NO: 2008848 - RNA, 19 nt, Artificial Sequence
  Description of Artificial Sequence: Synthetic oligonucleotide
  Sense strand starting at position 1455 of SEQ ID NO: 1880981
ugagauagugguugaaaca

SEQ ID NO: 2008849 - RNA, 19 nt, Artificial Sequence
  Description of Artificial Sequence: Synthetic oligonucleotide
  Antisense strand to SEQ ID NO: 2008848
uguuucaaccacuaucuca

SEQ ID NO: 2008850 - RNA, 19 nt, Artificial Sequence
  Description of Artificial Sequence: Synthetic oligonucleotide
  Sense strand starting at position 1475 of SEQ ID NO: 1880981
auucuaacucucgggaauu

SEQ ID NO: 2008851 - RNA, 19 nt, Artificial Sequence
  Description of Artificial Sequence: Synthetic oligonucleotide
  Antisense strand to SEQ ID NO: 2008850
aauucccgagaguuagaau

SEQ ID NO: 2008852 - RNA, 19 nt, Artificial Sequence
  Description of Artificial Sequence: Synthetic oligonucleotide
  Sense strand starting at position 1520 of SEQ ID NO: 1880981
aggucauaucgagagcuga

SEQ ID NO: 2008853 - RNA, 19 nt, Artificial Sequence
  Description of Artificial Sequence: Synthetic oligonucleotide
  Antisense strand to SEQ ID NO: 2008852
ucagcucucgauaugaccu

SEQ ID NO: 2008854 - RNA, 19 nt, Artificial Sequence
  Description of Artificial Sequence: Synthetic oligonucleotide
  Sense strand starting at position 1611 of SEQ ID NO: 1880981
gacugauacuauguguaaa

SEQ ID NO: 2008855 - RNA, 19 nt, Artificial Sequence
  Description of Artificial Sequence: Synthetic oligonucleotide
  Antisense strand to SEQ ID NO: 2008854
uuuacacauaguaucaguc

SEQ ID NO: 2008856 - RNA, 19 nt, Artificial Sequence
  Description of Artificial Sequence: Synthetic oligonucleotide
  Sense strand starting at position 1613 of SEQ ID NO: 1880981
cugauacuauguguaaaua

SEQ ID NO: 2008857 - RNA, 19 nt, Artificial Sequence
  Description of Artificial Sequence: Synthetic oligonucleotide
  Antisense strand to SEQ ID NO: 2008856
uauuuacacauaguaucag

SEQ ID NO: 2008858 - RNA, 19 nt, Artificial Sequence
  Description of Artificial Sequence: Synthetic oligonucleotide
  Sense strand starting at position 1689 of SEQ ID NO: 1880981
gauaccuacacguggguaa

SEQ ID NO: 2008859 - RNA, 19 nt, Artificial Sequence
  Description of Artificial Sequence: Synthetic oligonucleotide
  Antisense strand to SEQ ID NO: 2008858
uuacccacguguagguauc

SEQ ID NO: 2008860 - RNA, 19 nt, Artificial Sequence
  Description of Artificial Sequence: Synthetic oligonucleotide
  Sense strand starting at position 1716 of SEQ ID NO: 1880981
ucacauauucuggagcaua

SEQ ID NO: 2008861 - RNA, 19 nt, Artificial Sequence
  Description of Artificial Sequence: Synthetic oligonucleotide
  Antisense strand to SEQ ID NO: 2008860
uaugcuccagaauauguga

SEQ ID NO: 2008862 - RNA, 19 nt, Artificial Sequence
  Description of Artificial Sequence: Synthetic oligonucleotide
  Sense strand starting at position 1798 of SEQ ID NO: 1880981
ccuggaguccuggauguac

SEQ ID NO: 2008863 - RNA, 19 nt, Artificial Sequence
  Description of Artificial Sequence: Synthetic oligonucleotide
  Antisense strand to SEQ ID NO: 2008862
guacauccaggacuccagg

SEQ ID NO: 2008864 - RNA, 19 nt, Artificial Sequence
  Description of Artificial Sequence: Synthetic oligonucleotide
  Sense strand starting at position 2032 of SEQ ID NO: 1880981
ggagaugacggccauuauu

SEQ ID NO: 2008865 - RNA, 19 nt, Artificial Sequence
  Description of Artificial Sequence: Synthetic oligonucleotide
  Antisense strand to SEQ ID NO: 2008864
aauaauggccgucaucucc

SEQ ID NO: 2008866 - RNA, 19 nt, Artificial Sequence
  Description of Artificial Sequence: Synthetic oligonucleotide
  Sense strand starting at position 2101 of SEQ ID NO: 1880981
cgggaacuguacuugauau

SEQ ID NO: 2008867 - RNA, 19 nt, Artificial Sequence
  Description of Artificial Sequence: Synthetic oligonucleotide
  Antisense strand to SEQ ID NO: 2008866
auaucaaguacaguucccg

SEQ ID NO: 2008868 - RNA, 19 nt, Artificial Sequence
  Description of Artificial Sequence: Synthetic oligonucleotide
  Sense strand starting at position 2102 of SEQ ID NO: 1880981
gggaacuguacuugauauu

SEQ ID NO: 2008869 - RNA, 19 nt, Artificial Sequence
  Description of Artificial Sequence: Synthetic oligonucleotide
  Antisense strand to SEQ ID NO: 2008868
aauaucaaguacaguuccc

SEQ ID NO: 2008870 - RNA, 19 nt, Artificial Sequence
  Description of Artificial Sequence: Synthetic oligonucleotide
  Sense strand starting at position 2200 of SEQ ID NO: 1880981
uggcucagagagcauaauu

SEQ ID NO: 2008871 - RNA, 19 nt, Artificial Sequence
  Description of Artificial Sequence: Synthetic oligonucleotide
  Antisense strand to SEQ ID NO: 2008870
aauuaugcucucugagcca

SEQ ID NO: 2008872 - RNA, 19 nt, Artificial Sequence
  Description of Artificial Sequence: Synthetic oligonucleotide
  Sense strand starting at position 2739 of SEQ ID NO: 1880981
ggcauuguccuugaaacuc

SEQ ID NO: 2008873 - RNA, 19 nt, Artificial Sequence
  Description of Artificial Sequence: Synthetic oligonucleotide
  Antisense strand to SEQ ID NO: 2008872
gaguuucaaggacaaugcc

SEQ ID NO: 2008874 - RNA, 19 nt, Artificial Sequence
  Description of Artificial Sequence: Synthetic oligonucleotide
  Sense strand starting at position 2994 of SEQ ID NO: 1880981
uccuguacucguuauuuau

SEQ ID NO: 2008875 - RNA, 19 nt, Artificial Sequence
  Description of Artificial Sequence: Synthetic oligonucleotide
  Antisense strand to SEQ ID NO: 2008874
auaaauaacgaguacagga

SEQ ID NO: 2008876 - RNA, 19 nt, Artificial Sequence
  Description of Artificial Sequence: Synthetic oligonucleotide
  Sense strand starting at position 3008 of SEQ ID NO: 1880981
uuuauuguggcagaacaaa

SEQ ID NO: 2008877 - RNA, 19 nt, Artificial Sequence
  Description of Artificial Sequence: Synthetic oligonucleotide
  Antisense strand to SEQ ID NO: 2008876
uuuguucugccacaauaaa

SEQ ID NO: 2008878 - RNA, 19 nt, Artificial Sequence
  Description of Artificial Sequence: Synthetic oligonucleotide
  Sense strand starting at position 3071 of SEQ ID NO: 1880981
uuacaauuucuguguguca

SEQ ID NO: 2008879 - RNA, 19 nt, Artificial Sequence
  Description of Artificial Sequence: Synthetic oligonucleotide
  Antisense strand to SEQ ID NO: 2008878
ugacacacagaaauuguaa

SEQ ID NO: 2008880 - RNA, 19 nt, Artificial Sequence
  Description of Artificial Sequence: Synthetic oligonucleotide
  Sense strand starting at position 3168 of SEQ ID NO: 1880981
ucagguucuacuggaagga

SEQ ID NO: 2008881 - RNA, 19 nt, Artificial Sequence
  Description of Artificial Sequence: Synthetic oligonucleotide
  Antisense strand to SEQ ID NO: 2008880
uccuuccaguagaaccuga

SEQ ID NO: 2008882 - RNA, 19 nt, Artificial Sequence
  Description of Artificial Sequence: Synthetic oligonucleotide
  Sense strand starting at position 3208 of SEQ ID NO: 1880981
augguuguugucaggguuu

SEQ ID NO: 2008883 - RNA, 19 nt, Artificial Sequence
  Description of Artificial Sequence: Synthetic oligonucleotide
  Antisense strand to SEQ ID NO: 2008882
aaacccugacaacaaccau

SEQ ID NO: 2008884 - RNA, 19 nt, Artificial Sequence
  Description of Artificial Sequence: Synthetic oligonucleotide
  Sense strand starting at position 3320 of SEQ ID NO: 1880981
gagugaagucccugagaaa

SEQ ID NO: 2008885 - RNA, 19 nt, Artificial Sequence
  Description of Artificial Sequence: Synthetic oligonucleotide
  Antisense strand to SEQ ID NO: 2008884
uuucucagggacuucacuc

SEQ ID NO: 2008886 - RNA, 19 nt, Artificial Sequence
  Description of Artificial Sequence: Synthetic oligonucleotide
  Sense strand starting at position 3413 of SEQ ID NO: 1880981
gauuguuaaguccagucca

SEQ ID NO: 2008887 - RNA, 19 nt, Artificial Sequence
  Description of Artificial Sequence: Synthetic oligonucleotide
  Antisense strand to SEQ ID NO: 2008886
uggacuggacuuaacaauc

SEQ ID NO: 2008888 - RNA, 19 nt, Artificial Sequence
  Description of Artificial Sequence: Synthetic oligonucleotide
  Sense strand starting at position 3574 of SEQ ID NO: 1880981
gcagcuggacuuuacagau

SEQ ID NO: 2008889 - RNA, 19 nt, Artificial Sequence
  Description of Artificial Sequence: Synthetic oligonucleotide
  Antisense strand to SEQ ID NO: 2008888
aucuguaaaguccagcugc

SEQ ID NO: 2008890 - RNA, 19 nt, Artificial Sequence
  Description of Artificial Sequence: Synthetic oligonucleotide
  Sense strand starting at position 3669 of SEQ ID NO: 1880981
uuuagaggacucggucuaa

SEQ ID NO: 2008891 - RNA, 19 nt, Artificial Sequence
  Description of Artificial Sequence: Synthetic oligonucleotide
  Antisense strand to SEQ ID NO: 2008890
uuagaccgaguccucuaaa

SEQ ID NO: 2008892 - RNA, 19 nt, Artificial Sequence
  Description of Artificial Sequence: Synthetic oligonucleotide
  Sense strand starting at position 3851 of SEQ ID NO: 1880981
gacgcauccuuccuaggaa

SEQ ID NO: 2008893 - RNA, 19 nt, Artificial Sequence
  Description of Artificial Sequence: Synthetic oligonucleotide
  Antisense strand to SEQ ID NO: 2008892
uuccuaggaaggaugcguc

SEQ ID NO: 2008894 - RNA, 19 nt, Artificial Sequence
  Description of Artificial Sequence: Synthetic oligonucleotide
  Sense strand starting at position 3854 of SEQ ID NO: 1880981
gcauccuuccuaggaaaug

SEQ ID NO: 2008895 - RNA, 19 nt, Artificial Sequence
  Description of Artificial Sequence: Synthetic oligonucleotide
  Antisense strand to SEQ ID NO: 2008894
cauuuccuaggaaggaugc

SEQ ID NO: 2008896 - RNA, 19 nt, Artificial Sequence
  Description of Artificial Sequence: Synthetic oligonucleotide
  Sense strand starting at position 3892 of SEQ ID NO: 1880981
agacauguuucucccucau

SEQ ID NO: 2008897 - RNA, 19 nt, Artificial Sequence
  Description of Artificial Sequence: Synthetic oligonucleotide
  Antisense strand to SEQ ID NO: 2008896
augagggagaaacaugucu

SEQ ID NO: 2008898 - RNA, 19 nt, Artificial Sequence
  Description of Artificial Sequence: Synthetic oligonucleotide
  Sense strand starting at position 33 of SEQ ID NO: 1880982
agagaugcauuaucuagau

SEQ ID NO: 2008899 - RNA, 19 nt, Artificial Sequence
  Description of Artificial Sequence: Synthetic oligonucleotide
  Antisense strand to SEQ ID NO: 2008898
aucuagauaaugcaucucu

SEQ ID NO: 2008900 - RNA, 19 nt, Artificial Sequence
  Description of Artificial Sequence: Synthetic oligonucleotide
  Sense strand starting at position 63 of SEQ ID NO: 1880982
uagaaauuagaguguuaga

SEQ ID NO: 2008901 - RNA, 19 nt, Artificial Sequence
  Description of Artificial Sequence: Synthetic oligonucleotide
  Antisense strand to SEQ ID NO: 2008900
ucuaacacucuaauuucua

SEQ ID NO: 2008902 - RNA, 19 nt, Artificial Sequence
  Description of Artificial Sequence: Synthetic oligonucleotide
  Sense strand starting at position 162 of SEQ ID NO: 1880982
uggagccagcucuaaacuu

SEQ ID NO: 2008903 - RNA, 19 nt, Artificial Sequence
  Description of Artificial Sequence: Synthetic oligonucleotide
  Antisense strand to SEQ ID NO: 2008902
aaguuuagagcuggcucca

SEQ ID NO: 2008904 - RNA, 19 nt, Artificial Sequence
  Description of Artificial Sequence: Synthetic oligonucleotide
  Sense strand starting at position 184 of SEQ ID NO: 1880982
accucaauuugggauacga

SEQ ID NO: 2008905 - RNA, 19 nt, Artificial Sequence
  Description of Artificial Sequence: Synthetic oligonucleotide
  Antisense strand to SEQ ID NO: 2008904
ucguaucccaaauugaggu

SEQ ID NO: 2008906 - RNA, 19 nt, Artificial Sequence
  Description of Artificial Sequence: Synthetic oligonucleotide
  Sense strand starting at position 192 of SEQ ID NO: 1880982
uugggauacgaagaguguu

SEQ ID NO: 2008907 - RNA, 19 nt, Artificial Sequence
  Description of Artificial Sequence: Synthetic oligonucleotide
  Antisense strand to SEQ ID NO: 2008906
aacacucuucguaucccaa

SEQ ID NO: 2008908 - RNA, 19 nt, Artificial Sequence
  Description of Artificial Sequence: Synthetic oligonucleotide
  Sense strand starting at position 236 of SEQ ID NO: 1880982
ccacaaaugugguuagauu

SEQ ID NO: 2008909 - RNA, 19 nt, Artificial Sequence
  Description of Artificial Sequence: Synthetic oligonucleotide
  Antisense strand to SEQ ID NO: 2008908
aaucuaaccacauuugugg

SEQ ID NO: 2008910 - RNA, 19 nt, Artificial Sequence
  Description of Artificial Sequence: Synthetic oligonucleotide
  Sense strand starting at position 248 of SEQ ID NO: 1880982
uuagauuucugagaguuaa

SEQ ID NO: 2008911 - RNA, 19 nt, Artificial Sequence
  Description of Artificial Sequence: Synthetic oligonucleotide
  Antisense strand to SEQ ID NO: 2008910
uuaacucucagaaaucuaa

SEQ ID NO: 2008912 - RNA, 19 nt, Artificial Sequence
  Description of Artificial Sequence: Synthetic oligonucleotide
  Sense strand starting at position 418 of SEQ ID NO: 1880982
ggcacuuaucaucauuguu

SEQ ID NO: 2008913 - RNA, 19 nt, Artificial Sequence
  Description of Artificial Sequence: Synthetic oligonucleotide
  Antisense strand to SEQ ID NO: 2008912
aacaaugaugauaagugcc

SEQ ID NO: 2008914 - RNA, 19 nt, Artificial Sequence
  Description of Artificial Sequence: Synthetic oligonucleotide
  Sense strand starting at position 484 of SEQ ID NO: 1880982
agauccuuggcucauggau

SEQ ID NO: 2008915 - RNA, 19 nt, Artificial Sequence
  Description of Artificial Sequence: Synthetic oligonucleotide
  Antisense strand to SEQ ID NO: 2008914
auccaugagccaaggaucu

SEQ ID NO: 2008916 - RNA, 19 nt, Artificial Sequence
  Description of Artificial Sequence: Synthetic oligonucleotide
  Sense strand starting at position 635 of SEQ ID NO: 1880982
gucacuucgcaccaacaga

SEQ ID NO: 2008917 - RNA, 19 nt, Artificial Sequence
  Description of Artificial Sequence: Synthetic oligonucleotide
  Antisense strand to SEQ ID NO: 2008916
ucuguuggugcgaagugac

SEQ ID NO: 2008918 - RNA, 19 nt, Artificial Sequence
  Description of Artificial Sequence: Synthetic oligonucleotide
  Sense strand starting at position 680 of SEQ ID NO: 1880982
ucugauguuacggacauca

SEQ ID NO: 2008919 - RNA, 19 nt, Artificial Sequence
  Description of Artificial Sequence: Synthetic oligonucleotide
  Antisense strand to SEQ ID NO: 2008918
ugauguccguaacaucaga

SEQ ID NO: 2008920 - RNA, 19 nt, Artificial Sequence
  Description of Artificial Sequence: Synthetic oligonucleotide
  Sense strand starting at position 682 of SEQ ID NO: 1880982
ugauguuacggacaucaca

SEQ ID NO: 2008921 - RNA, 19 nt, Artificial Sequence
  Description of Artificial Sequence: Synthetic oligonucleotide
  Antisense strand to SEQ ID NO: 2008920
ugugauguccguaacauca

SEQ ID NO: 2008922 - RNA, 19 nt, Artificial Sequence
  Description of Artificial Sequence: Synthetic oligonucleotide
  Sense strand starting at position 904 of SEQ ID NO: 1880982
acaggauugccauggcaca

SEQ ID NO: 2008923 - RNA, 19 nt, Artificial Sequence
  Description of Artificial Sequence: Synthetic oligonucleotide
  Antisense strand to SEQ ID NO: 2008922
ugugccauggcaauccugu

SEQ ID NO: 2008924 - RNA, 19 nt, Artificial Sequence
  Description of Artificial Sequence: Synthetic oligonucleotide
  Sense strand starting at position 1135 of SEQ ID NO: 1880982
ggcaucuuuccugaauucu

SEQ ID NO: 2008925 - RNA, 19 nt, Artificial Sequence
  Description of Artificial Sequence: Synthetic oligonucleotide
  Antisense strand to SEQ ID NO: 2008924
agaauucaggaaagaugcc

SEQ ID NO: 2008926 - RNA, 19 nt, Artificial Sequence
  Description of Artificial Sequence: Synthetic oligonucleotide
  Sense strand starting at position 1252 of SEQ ID NO: 1880982
gauuaagcugggcagugau

SEQ ID NO: 2008927 - RNA, 19 nt, Artificial Sequence
  Description of Artificial Sequence: Synthetic oligonucleotide
  Antisense strand to SEQ ID NO: 2008926
aucacugcccagcuuaauc

SEQ ID NO: 2008928 - RNA, 19 nt, Artificial Sequence
  Description of Artificial Sequence: Synthetic oligonucleotide
  Sense strand starting at position 1319 of SEQ ID NO: 1880982
gcuuaugagaauugcagau

SEQ ID NO: 2008929 - RNA, 19 nt, Artificial Sequence
  Description of Artificial Sequence: Synthetic oligonucleotide
  Antisense strand to SEQ ID NO: 2008928
aucugcaauucucauaagc

SEQ ID NO: 2008930 - RNA, 19 nt, Artificial Sequence
  Description of Artificial Sequence: Synthetic oligonucleotide
  Sense strand starting at position 1321 of SEQ ID NO: 1880982
uuaugagaauugcagauuu

SEQ ID NO: 2008931 - RNA, 19 nt, Artificial Sequence
  Description of Artificial Sequence: Synthetic oligonucleotide
  Antisense strand to SEQ ID NO: 2008930
aaaucugcaauucucauaa

SEQ ID NO: 2008932 - RNA, 19 nt, Artificial Sequence
  Description of Artificial Sequence: Synthetic oligonucleotide
  Sense strand starting at position 1456 of SEQ ID NO: 1880982
ccguccaauccuggaaaga

SEQ ID NO: 2008933 - RNA, 19 nt, Artificial Sequence
  Description of Artificial Sequence: Synthetic oligonucleotide
  Antisense strand to SEQ ID NO: 2008932
ucuuuccaggauuggacgg

SEQ ID NO: 2008934 - RNA, 19 nt, Artificial Sequence
  Description of Artificial Sequence: Synthetic oligonucleotide
  Sense strand starting at position 1485 of SEQ ID NO: 1880982
ucuccaguauugguugaga

SEQ ID NO: 2008935 - RNA, 19 nt, Artificial Sequence
  Description of Artificial Sequence: Synthetic oligonucleotide
  Antisense strand to SEQ ID NO: 2008934
ucucaaccaauacuggaga

SEQ ID NO: 2008936 - RNA, 19 nt, Artificial Sequence
  Description of Artificial Sequence: Synthetic oligonucleotide
  Sense strand starting at position 1487 of SEQ ID NO: 1880982
uccaguauugguugagacu

SEQ ID NO: 2008937 - RNA, 19 nt, Artificial Sequence
  Description of Artificial Sequence: Synthetic oligonucleotide
  Antisense strand to SEQ ID NO: 2008936
agucucaaccaauacugga

SEQ ID NO: 2008938 - RNA, 19 nt, Artificial Sequence
  Description of Artificial Sequence: Synthetic oligonucleotide
  Sense strand starting at position 1488 of SEQ ID NO: 1880982
ccaguauugguugagacua

SEQ ID NO: 2008939 - RNA, 19 nt, Artificial Sequence
  Description of Artificial Sequence: Synthetic oligonucleotide
  Antisense strand to SEQ ID NO: 2008938
uagucucaaccaauacugg

SEQ ID NO: 2008940 - RNA, 19 nt, Artificial Sequence
  Description of Artificial Sequence: Synthetic oligonucleotide
  Sense strand starting at position 2263 of SEQ ID NO: 1880982
uccaaucuuucgguaagau

SEQ ID NO: 2008941 - RNA, 19 nt, Artificial Sequence
  Description of Artificial Sequence: Synthetic oligonucleotide
  Antisense strand to SEQ ID NO: 2008940
aucuuaccgaaagauugga

SEQ ID NO: 2008942 - RNA, 19 nt, Artificial Sequence
  Description of Artificial Sequence: Synthetic oligonucleotide
  Sense strand starting at position 2264 of SEQ ID NO: 1880982
ccaaucuuucgguaagauc

SEQ ID NO: 2008943 - RNA, 19 nt, Artificial Sequence
  Description of Artificial Sequence: Synthetic oligonucleotide
  Antisense strand to SEQ ID NO: 2008942
gaucuuaccgaaagauugg

SEQ ID NO: 2008944 - RNA, 19 nt, Artificial Sequence
  Description of Artificial Sequence: Synthetic oligonucleotide
  Sense strand starting at position 2671 of SEQ ID NO: 1880982
gggaaagaugcggaugcaa

SEQ ID NO: 2008945 - RNA, 19 nt, Artificial Sequence
  Description of Artificial Sequence: Synthetic oligonucleotide
  Antisense strand to SEQ ID NO: 2008944
uugcauccgcaucuuuccc

SEQ ID NO: 2008946 - RNA, 19 nt, Artificial Sequence
  Description of Artificial Sequence: Synthetic oligonucleotide
  Sense strand starting at position 2732 of SEQ ID NO: 1880982
ugcguagcaauuuguuaaa

SEQ ID NO: 2008947 - RNA, 19 nt, Artificial Sequence
  Description of Artificial Sequence: Synthetic oligonucleotide
  Antisense strand to SEQ ID NO: 2008946
uuuaacaaauugcuacgca

SEQ ID NO: 2008948 - RNA, 19 nt, Artificial Sequence
  Description of Artificial Sequence: Synthetic oligonucleotide
  Sense strand starting at position 2734 of SEQ ID NO: 1880982
cguagcaauuuguuaaauu

SEQ ID NO: 2008949 - RNA, 19 nt, Artificial Sequence
  Description of Artificial Sequence: Synthetic oligonucleotide
  Antisense strand to SEQ ID NO: 2008948
aauuuaacaaauugcuacg

SEQ ID NO: 2008950 - RNA, 19 nt, Artificial Sequence
  Description of Artificial Sequence: Synthetic oligonucleotide
  Sense strand starting at position 2796 of SEQ ID NO: 1880982
cacaguuacgguuaaauga

SEQ ID NO: 2008951 - RNA, 19 nt, Artificial Sequence
  Description of Artificial Sequence: Synthetic oligonucleotide
  Antisense strand to SEQ ID NO: 2008950
ucauuuaaccguaacugug

SEQ ID NO: 2008952 - RNA, 19 nt, Artificial Sequence
  Description of Artificial Sequence: Synthetic oligonucleotide
  Sense strand starting at position 2803 of SEQ ID NO: 1880982
acgguuaaaugauuaaggu

SEQ ID NO: 2008953 - RNA, 19 nt, Artificial Sequence
  Description of Artificial Sequence: Synthetic oligonucleotide
  Antisense strand to SEQ ID NO: 2008952
accuuaaucauuuaaccgu

SEQ ID NO: 2008954 - RNA, 19 nt, Artificial Sequence
  Description of Artificial Sequence: Synthetic oligonucleotide
  Sense strand starting at position 2848 of SEQ ID NO: 1880982
aucagaauguaaucgagau

SEQ ID NO: 2008955 - RNA, 19 nt, Artificial Sequence
  Description of Artificial Sequence: Synthetic oligonucleotide
  Antisense strand to SEQ ID NO: 2008954
aucucgauuacauucugau

SEQ ID NO: 2008956 - RNA, 19 nt, Artificial Sequence
  Description of Artificial Sequence: Synthetic oligonucleotide
  Sense strand starting at position 2849 of SEQ ID NO: 1880982
ucagaauguaaucgagaug

SEQ ID NO: 2008957 - RNA, 19 nt, Artificial Sequence
  Description of Artificial Sequence: Synthetic oligonucleotide
  Antisense strand to SEQ ID NO: 2008956
caucucgauuacauucuga

SEQ ID NO: 2008958 - RNA, 19 nt, Artificial Sequence
  Description of Artificial Sequence: Synthetic oligonucleotide
  Sense strand starting at position 2852 of SEQ ID NO: 1880982
gaauguaaucgagaugacg

SEQ ID NO: 2008959 - RNA, 19 nt, Artificial Sequence
  Description of Artificial Sequence: Synthetic oligonucleotide
  Antisense strand to SEQ ID NO: 2008958
cgucaucucgauuacauuc

SEQ ID NO: 2008960 - RNA, 19 nt, Artificial Sequence
  Description of Artificial Sequence: Synthetic oligonucleotide
  Sense strand starting at position 3092 of SEQ ID NO: 1880982
auugaugacugucuggauu

SEQ ID NO: 2008961 - RNA, 19 nt, Artificial Sequence
  Description of Artificial Sequence: Synthetic oligonucleotide
  Antisense strand to SEQ ID NO: 2008960
aauccagacagucaucaau

SEQ ID NO: 2008962 - RNA, 19 nt, Artificial Sequence
  Description of Artificial Sequence: Synthetic oligonucleotide
  Sense strand starting at position 3127 of SEQ ID NO: 1880982
ucuggaaaguacuucuuaa

SEQ ID NO: 2008963 - RNA, 19 nt, Artificial Sequence
  Description of Artificial Sequence: Synthetic oligonucleotide
  Antisense strand to SEQ ID NO: 2008962
uuaagaaguacuuuccaga

SEQ ID NO: 2008964 - RNA, 19 nt, Artificial Sequence
  Description of Artificial Sequence: Synthetic oligonucleotide
  Sense strand starting at position 3458 of SEQ ID NO: 1880982
ccaagaaaguuguucucau

SEQ ID NO: 2008965 - RNA, 19 nt, Artificial Sequence
  Description of Artificial Sequence: Synthetic oligonucleotide
  Antisense strand to SEQ ID NO: 2008964
augagaacaacuuucuugg

SEQ ID NO: 2008966 - RNA, 19 nt, Artificial Sequence
  Description of Artificial Sequence: Synthetic oligonucleotide
  Sense strand starting at position 3535 of SEQ ID NO: 1880982
agaagauucgcguugcuuu

SEQ ID NO: 2008967 - RNA, 19 nt, Artificial Sequence
  Description of Artificial Sequence: Synthetic oligonucleotide
  Antisense strand to SEQ ID NO: 2008966
aaagcaacgcgaaucuucu

SEQ ID NO: 2008968 - RNA, 19 nt, Artificial Sequence
  Description of Artificial Sequence: Synthetic oligonucleotide
  Sense strand starting at position 3674 of SEQ ID NO: 1880982
ugaucuagcuuacugaaau

SEQ ID NO: 2008969 - RNA, 19 nt, Artificial Sequence
  Description of Artificial Sequence: Synthetic oligonucleotide
  Antisense strand to SEQ ID NO: 2008968
auuucaguaagcuagauca

SEQ ID NO: 2008970 - RNA, 19 nt, Artificial Sequence
  Description of Artificial Sequence: Synthetic oligonucleotide
  Sense strand starting at position 3722 of SEQ ID NO: 1880982
accucauaguaguugacua

SEQ ID NO: 2008971 - RNA, 19 nt, Artificial Sequence
  Description of Artificial Sequence: Synthetic oligonucleotide
  Antisense strand to SEQ ID NO: 2008970
uagucaacuacuaugaggu

SEQ ID NO: 2008972 - RNA, 19 nt, Artificial Sequence
  Description of Artificial Sequence: Synthetic oligonucleotide
  Sense strand starting at position 3724 of SEQ ID NO: 1880982
cucauaguaguugacuaaa

SEQ ID NO: 2008973 - RNA, 19 nt, Artificial Sequence
  Description of Artificial Sequence: Synthetic oligonucleotide
  Antisense strand to SEQ ID NO: 2008972
uuuagucaacuacuaugag

SEQ ID NO: 2008974 - RNA, 19 nt, Artificial Sequence
  Description of Artificial Sequence: Synthetic oligonucleotide
  Sense strand starting at position 3863 of SEQ ID NO: 1880982
uucucuuggaggugaguga

SEQ ID NO: 2008975 - RNA, 19 nt, Artificial Sequence
  Description of Artificial Sequence: Synthetic oligonucleotide
  Antisense strand to SEQ ID NO: 2008974
ucacucaccuccaagagaa

SEQ ID NO: 2008976 - RNA, 19 nt, Artificial Sequence
  Description of Artificial Sequence: Synthetic oligonucleotide
  Sense strand starting at position 3893 of SEQ ID NO: 1880982
auguguaaccuugagauug

SEQ ID NO: 2008977 - RNA, 19 nt, Artificial Sequence
  Description of Artificial Sequence: Synthetic oligonucleotide
  Antisense strand to SEQ ID NO: 2008976
caaucucaagguuacacau

SEQ ID NO: 2008978 - RNA, 19 nt, Artificial Sequence
  Description of Artificial Sequence: Synthetic oligonucleotide
  Sense strand starting at position 580 of SEQ ID NO: 1880983
agaugugaauuccugcuua

SEQ ID NO: 2008979 - RNA, 19 nt, Artificial Sequence
  Description of Artificial Sequence: Synthetic oligonucleotide
  Antisense strand to SEQ ID NO: 2008978
uaagcaggaauucacaucu

SEQ ID NO: 2008980 - RNA, 19 nt, Artificial Sequence
  Description of Artificial Sequence: Synthetic oligonucleotide
  Sense strand starting at position 603 of SEQ ID NO: 1880983
ccauguacccuggaguaaa

SEQ ID NO: 2008981 - RNA, 19 nt, Artificial Sequence
  Description of Artificial Sequence: Synthetic oligonucleotide
  Antisense strand to SEQ ID NO: 2008980
uuuacuccaggguacaugg

SEQ ID NO: 2008982 - RNA, 19 nt, Artificial Sequence
  Description of Artificial Sequence: Synthetic oligonucleotide
  Sense strand starting at position 824 of SEQ ID NO: 1880983
augucagagaacugugaca

SEQ ID NO: 2008983 - RNA, 19 nt, Artificial Sequence
  Description of Artificial Sequence: Synthetic oligonucleotide
  Antisense strand to SEQ ID NO: 2008982
ugucacaguucucugacau

SEQ ID NO: 2008984 - RNA, 19 nt, Artificial Sequence
  Description of Artificial Sequence: Synthetic oligonucleotide
  Sense strand starting at position 826 of SEQ ID NO: 1880983
gucagagaacugugacauc

SEQ ID NO: 2008985 - RNA, 19 nt, Artificial Sequence
  Description of Artificial Sequence: Synthetic oligonucleotide
  Antisense strand to SEQ ID NO: 2008984
gaugucacaguucucugac

SEQ ID NO: 2008986 - RNA, 19 nt, Artificial Sequence
  Description of Artificial Sequence: Synthetic oligonucleotide
  Sense strand starting at position 837 of SEQ ID NO: 1880983
gugacauccuaugugagga

SEQ ID NO: 2008987 - RNA, 19 nt, Artificial Sequence
  Description of Artificial Sequence: Synthetic oligonucleotide
  Antisense strand to SEQ ID NO: 2008986
uccucacauaggaugucac

SEQ ID NO: 2008988 - RNA, 19 nt, Artificial Sequence
  Description of Artificial Sequence: Synthetic oligonucleotide
  Sense strand starting at position 838 of SEQ ID NO: 1880983
ugacauccuaugugaggaa

SEQ ID NO: 2008989 - RNA, 19 nt, Artificial Sequence
  Description of Artificial Sequence: Synthetic oligonucleotide
  Antisense strand to SEQ ID NO: 2008988
uuccucacauaggauguca

SEQ ID NO: 2008990 - RNA, 19 nt, Artificial Sequence
  Description of Artificial Sequence: Synthetic oligonucleotide
  Sense strand starting at position 864 of SEQ ID NO: 1880983
gcaauuauccaugagcucu

SEQ ID NO: 2008991 - RNA, 19 nt, Artificial Sequence
  Description of Artificial Sequence: Synthetic oligonucleotide
  Antisense strand to SEQ ID NO: 2008990
agagcucauggauaauugc

SEQ ID NO: 2008992 - RNA, 19 nt, Artificial Sequence
  Description of Artificial Sequence: Synthetic oligonucleotide
  Sense strand starting at position 982 of SEQ ID NO: 1880983
agauuaccugcagaaaguu

SEQ ID NO: 2008993 - RNA, 19 nt, Artificial Sequence
  Description of Artificial Sequence: Synthetic oligonucleotide
  Antisense strand to SEQ ID NO: 2008992
aacuuucugcagguaaucu

SEQ ID NO: 2008994 - RNA, 19 nt, Artificial Sequence
  Description of Artificial Sequence: Synthetic oligonucleotide
  Sense strand starting at position 1126 of SEQ ID NO: 1880983
uugugagaauagcuaaaug

SEQ ID NO: 2008995 - RNA, 19 nt, Artificial Sequence
  Description of Artificial Sequence: Synthetic oligonucleotide
  Antisense strand to SEQ ID NO: 2008994
cauuuagcuauucucacaa

SEQ ID NO: 2008996 - RNA, 19 nt, Artificial Sequence
  Description of Artificial Sequence: Synthetic oligonucleotide
  Sense strand starting at position 1271 of SEQ ID NO: 1880983
caaugcuauccggauuagu

SEQ ID NO: 2008997 - RNA, 19 nt, Artificial Sequence
  Description of Artificial Sequence: Synthetic oligonucleotide
  Antisense strand to SEQ ID NO: 2008996
acuaauccggauagcauug

SEQ ID NO: 2008998 - RNA, 19 nt, Artificial Sequence
  Description of Artificial Sequence: Synthetic oligonucleotide
  Sense strand starting at position 1274 of SEQ ID NO: 1880983
ugcuauccggauuagucaa

SEQ ID NO: 2008999 - RNA, 19 nt, Artificial Sequence
  Description of Artificial Sequence: Synthetic oligonucleotide
  Antisense strand to SEQ ID NO: 2008998
uugacuaauccggauagca

SEQ ID NO: 2009000 - RNA, 19 nt, Artificial Sequence
  Description of Artificial Sequence: Synthetic oligonucleotide
  Sense strand starting at position 1401 of SEQ ID NO: 1880983
uggacuaguucaucgggaa

SEQ ID NO: 2009001 - RNA, 19 nt, Artificial Sequence
  Description of Artificial Sequence: Synthetic oligonucleotide
  Antisense strand to SEQ ID NO: 2009000
uucccgaugaacuagucca

SEQ ID NO: 2009002 - RNA, 19 nt, Artificial Sequence
  Description of Artificial Sequence: Synthetic oligonucleotide
  Sense strand starting at position 1402 of SEQ ID NO: 1880983
ggacuaguucaucgggaag

SEQ ID NO: 2009003 - RNA, 19 nt, Artificial Sequence
  Description of Artificial Sequence: Synthetic oligonucleotide
  Antisense strand to SEQ ID NO: 2009002
cuucccgaugaacuagucc

SEQ ID NO: 2009004 - RNA, 19 nt, Artificial Sequence
  Description of Artificial Sequence: Synthetic oligonucleotide
  Sense strand starting at position 2455 of SEQ ID NO: 1880983
gugucaauuugccuagguu

SEQ ID NO: 2009005 - RNA, 19 nt, Artificial Sequence
  Description of Artificial Sequence: Synthetic oligonucleotide
  Antisense strand to SEQ ID NO: 2009004
aaccuaggcaaauugacac

SEQ ID NO: 2009006 - RNA, 19 nt, Artificial Sequence
  Description of Artificial Sequence: Synthetic oligonucleotide
  Sense strand starting at position 2581 of SEQ ID NO: 1880983
gaaucaaauuaggugaugu

SEQ ID NO: 2009007 - RNA, 19 nt, Artificial Sequence
  Description of Artificial Sequence: Synthetic oligonucleotide
  Antisense strand to SEQ ID NO: 2009006
acaucaccuaauuugauuc

SEQ ID NO: 2009008 - RNA, 19 nt, Artificial Sequence
  Description of Artificial Sequence: Synthetic oligonucleotide
  Sense strand starting at position 2600 of SEQ ID NO: 1880983
cuguaagucccuuagcaca

SEQ ID NO: 2009009 - RNA, 19 nt, Artificial Sequence
  Description of Artificial Sequence: Synthetic oligonucleotide
  Antisense strand to SEQ ID NO: 2009008
ugugcuaagggacuuacag

SEQ ID NO: 2009010 - RNA, 19 nt, Artificial Sequence
  Description of Artificial Sequence: Synthetic oligonucleotide
  Sense strand starting at position 2716 of SEQ ID NO: 1880983
cacccuuccguugagaaga

SEQ ID NO: 2009011 - RNA, 19 nt, Artificial Sequence
  Description of Artificial Sequence: Synthetic oligonucleotide
  Antisense strand to SEQ ID NO: 2009010
ucuucucaacggaagggug

SEQ ID NO: 2009012 - RNA, 19 nt, Artificial Sequence
  Description of Artificial Sequence: Synthetic oligonucleotide
  Sense strand starting at position 2750 of SEQ ID NO: 1880983
cagcguuuagucuuuguaa

SEQ ID NO: 2009013 - RNA, 19 nt, Artificial Sequence
  Description of Artificial Sequence: Synthetic oligonucleotide
  Antisense strand to SEQ ID NO: 2009012
uuacaaagacuaaacgcug

SEQ ID NO: 2009014 - RNA, 19 nt, Artificial Sequence
  Description of Artificial Sequence: Synthetic oligonucleotide
  Sense strand starting at position 2835 of SEQ ID NO: 1880983
gggacugucagcugagaug

SEQ ID NO: 2009015 - RNA, 19 nt, Artificial Sequence
  Description of Artificial Sequence: Synthetic oligonucleotide
  Antisense strand to SEQ ID NO: 2009014
caucucagcugacaguccc

SEQ ID NO: 2009016 - RNA, 19 nt, Artificial Sequence
  Description of Artificial Sequence: Synthetic oligonucleotide
  Sense strand starting at position 2865 of SEQ ID NO: 1880983
agcgcuuugcagucuguaa

SEQ ID NO: 2009017 - RNA, 19 nt, Artificial Sequence
  Description of Artificial Sequence: Synthetic oligonucleotide
  Antisense strand to SEQ ID NO: 2009016
uuacagacugcaaagcgcu

SEQ ID NO: 2009018 - RNA, 19 nt, Artificial Sequence
  Description of Artificial Sequence: Synthetic oligonucleotide
  Sense strand starting at position 2866 of SEQ ID NO: 1880983
gcgcuuugcagucuguaaa

SEQ ID NO: 2009019 - RNA, 19 nt, Artificial Sequence
  Description of Artificial Sequence: Synthetic oligonucleotide
  Antisense strand to SEQ ID NO: 2009018
uuuacagacugcaaagcgc

SEQ ID NO: 2009020 - RNA, 19 nt, Artificial Sequence
  Description of Artificial Sequence: Synthetic oligonucleotide
  Sense strand starting at position 2887 of SEQ ID NO: 1880983
ugccauuagagauguaagg

SEQ ID NO: 2009021 - RNA, 19 nt, Artificial Sequence
  Description of Artificial Sequence: Synthetic oligonucleotide
  Antisense strand to SEQ ID NO: 2009020
ccuuacaucucuaauggca

SEQ ID NO: 2009022 - RNA, 19 nt, Artificial Sequence
  Description of Artificial Sequence: Synthetic oligonucleotide
  Sense strand starting at position 3318 of SEQ ID NO: 1880983
agaugauuauaggugguua

SEQ ID NO: 2009023 - RNA, 19 nt, Artificial Sequence
  Description of Artificial Sequence: Synthetic oligonucleotide
  Antisense strand to SEQ ID NO: 2009022
uaaccaccuauaaucaucu

SEQ ID NO: 2009024 - RNA, 19 nt, Artificial Sequence
  Description of Artificial Sequence: Synthetic oligonucleotide
  Sense strand starting at position 3319 of SEQ ID NO: 1880983
gaugauuauaggugguuau

SEQ ID NO: 2009025 - RNA, 19 nt, Artificial Sequence
  Description of Artificial Sequence: Synthetic oligonucleotide
  Antisense strand to SEQ ID NO: 2009024
auaaccaccuauaaucauc

SEQ ID NO: 2009026 - RNA, 19 nt, Artificial Sequence
  Description of Artificial Sequence: Synthetic oligonucleotide
  Sense strand starting at position 3322 of SEQ ID NO: 1880983
gauuauaggugguuaucua

SEQ ID NO: 2009027 - RNA, 19 nt, Artificial Sequence
  Description of Artificial Sequence: Synthetic oligonucleotide
  Antisense strand to SEQ ID NO: 2009026
uagauaaccaccuauaauc

SEQ ID NO: 2009028 - RNA, 19 nt, Artificial Sequence
  Description of Artificial Sequence: Synthetic oligonucleotide
  Sense strand starting at position 3326 of SEQ ID NO: 1880983
auaggugguuaucuagaca

SEQ ID NO: 2009029 - RNA, 19 nt, Artificial Sequence
  Description of Artificial Sequence: Synthetic oligonucleotide
  Antisense strand to SEQ ID NO: 2009028
ugucuagauaaccaccuau

SEQ ID NO: 2009030 - RNA, 19 nt, Artificial Sequence
  Description of Artificial Sequence: Synthetic oligonucleotide
  Sense strand starting at position 3329 of SEQ ID NO: 1880983
ggugguuaucuagacaugu

SEQ ID NO: 2009031 - RNA, 19 nt, Artificial Sequence
  Description of Artificial Sequence: Synthetic oligonucleotide
  Antisense strand to SEQ ID NO: 2009030
acaugucuagauaaccacc

SEQ ID NO: 2009032 - RNA, 19 nt, Artificial Sequence
  Description of Artificial Sequence: Synthetic oligonucleotide
  Sense strand starting at position 3331 of SEQ ID NO: 1880983
ugguuaucuagacauguag

SEQ ID NO: 2009033 - RNA, 19 nt, Artificial Sequence
  Description of Artificial Sequence: Synthetic oligonucleotide
  Antisense strand to SEQ ID NO: 2009032
cuacaugucuagauaacca

SEQ ID NO: 2009034 - RNA, 19 nt, Artificial Sequence
  Description of Artificial Sequence: Synthetic oligonucleotide
  Sense strand starting at position 3472 of SEQ ID NO: 1880983
gucaguucugauuacuuuc

SEQ ID NO: 2009035 - RNA, 19 nt, Artificial Sequence
  Description of Artificial Sequence: Synthetic oligonucleotide
  Antisense strand to SEQ ID NO: 2009034
gaaaguaaucagaacugac

SEQ ID NO: 2009036 - RNA, 19 nt, Artificial Sequence
  Description of Artificial Sequence: Synthetic oligonucleotide
  Sense strand starting at position 3563 of SEQ ID NO: 1880983
gagaguaagccucaggcua

SEQ ID NO: 2009037 - RNA, 19 nt, Artificial Sequence
  Description of Artificial Sequence: Synthetic oligonucleotide
  Antisense strand to SEQ ID NO: 2009036
uagccugaggcuuacucuc

SEQ ID NO: 2009038 - RNA, 19 nt, Artificial Sequence
  Description of Artificial Sequence: Synthetic oligonucleotide
  Sense strand starting at position 3595 of SEQ ID NO: 1880983
gguaacagugucuaguuaa

SEQ ID NO: 2009039 - RNA, 19 nt, Artificial Sequence
  Description of Artificial Sequence: Synthetic oligonucleotide
  Antisense strand to SEQ ID NO: 2009038
uuaacuagacacuguuacc

SEQ ID NO: 2009040 - RNA, 19 nt, Artificial Sequence
  Description of Artificial Sequence: Synthetic oligonucleotide
  Sense strand starting at position 3631 of SEQ ID NO: 1880983
uuguuucuacuguacuuaa

SEQ ID NO: 2009041 - RNA, 19 nt, Artificial Sequence
  Description of Artificial Sequence: Synthetic oligonucleotide
  Antisense strand to SEQ ID NO: 2009040
uuaaguacaguagaaacaa

SEQ ID NO: 2009042 - RNA, 19 nt, Artificial Sequence
  Description of Artificial Sequence: Synthetic oligonucleotide
  Sense strand starting at position 3679 of SEQ ID NO: 1880983
uuuccauuugcugguaauu

SEQ ID NO: 2009043 - RNA, 19 nt, Artificial Sequence
  Description of Artificial Sequence: Synthetic oligonucleotide
  Antisense strand to SEQ ID NO: 2009042
aauuaccagcaaauggaaa

SEQ ID NO: 2009044 - RNA, 19 nt, Artificial Sequence
  Description of Artificial Sequence: Synthetic oligonucleotide
  Sense strand starting at position 3681 of SEQ ID NO: 1880983
uccauuugcugguaauuua

SEQ ID NO: 2009045 - RNA, 19 nt, Artificial Sequence
  Description of Artificial Sequence: Synthetic oligonucleotide
  Antisense strand to SEQ ID NO: 2009044
uaaauuaccagcaaaugga

SEQ ID NO: 2009046 - RNA, 19 nt, Artificial Sequence
  Description of Artificial Sequence: Synthetic oligonucleotide
  Sense strand starting at position 3764 of SEQ ID NO: 1880983
ugauacaagcguuggacaa

SEQ ID NO: 2009047 - RNA, 19 nt, Artificial Sequence
  Description of Artificial Sequence: Synthetic oligonucleotide
  Antisense strand to SEQ ID NO: 2009046
uuguccaacgcuuguauca

SEQ ID NO: 2009048 - RNA, 19 nt, Artificial Sequence
  Description of Artificial Sequence: Synthetic oligonucleotide
  Sense strand starting at position 3765 of SEQ ID NO: 1880983
gauacaagcguuggacaaa

SEQ ID NO: 2009049 - RNA, 19 nt, Artificial Sequence
  Description of Artificial Sequence: Synthetic oligonucleotide
  Antisense strand to SEQ ID NO: 2009048
uuuguccaacgcuuguauc

SEQ ID NO: 2009050 - RNA, 19 nt, Artificial Sequence
  Description of Artificial Sequence: Synthetic oligonucleotide
  Sense strand starting at position 3787 of SEQ ID NO: 1880983
ucuaacauggcaugagagu

SEQ ID NO: 2009051 - RNA, 19 nt, Artificial Sequence
  Description of Artificial Sequence: Synthetic oligonucleotide
  Antisense strand to SEQ ID NO: 2009050
acucucaugccauguuaga

SEQ ID NO: 2009052 - RNA, 19 nt, Artificial Sequence
  Description of Artificial Sequence: Synthetic oligonucleotide
  Sense strand starting at position 3796 of SEQ ID NO: 1880983
gcaugagagugacugaagu

SEQ ID NO: 2009053 - RNA, 19 nt, Artificial Sequence
  Description of Artificial Sequence: Synthetic oligonucleotide
  Antisense strand to SEQ ID NO: 2009052
acuucagucacucucaugc

SEQ ID NO: 2009054 - RNA, 19 nt, Artificial Sequence
  Description of Artificial Sequence: Synthetic oligonucleotide
  Sense strand starting at position 3940 of SEQ ID NO: 1880983
aaagcaacucuaugaggua

SEQ ID NO: 2009055 - RNA, 19 nt, Artificial Sequence
  Description of Artificial Sequence: Synthetic oligonucleotide
  Antisense strand to SEQ ID NO: 2009054
uaccucauagaguugcuuu

SEQ ID NO: 2009056 - RNA, 19 nt, Artificial Sequence
  Description of Artificial Sequence: Synthetic oligonucleotide
  Sense strand starting at position 3954 of SEQ ID NO: 1880983
agguacauauugucucauu

SEQ ID NO: 2009057 - RNA, 19 nt, Artificial Sequence
  Description of Artificial Sequence: Synthetic oligonucleotide
  Antisense strand to SEQ ID NO: 2009056
aaugagacaauauguaccu

SEQ ID NO: 2009058 - RNA, 19 nt, Artificial Sequence
  Description of Artificial Sequence: Synthetic oligonucleotide
  Sense strand starting at position 158 of SEQ ID NO: 1880984
uggaguguuggacaaacuu

SEQ ID NO: 2009059 - RNA, 19 nt, Artificial Sequence
  Description of Artificial Sequence: Synthetic oligonucleotide
  Antisense strand to SEQ ID NO: 2009058
aaguuuguccaacacucca

SEQ ID NO: 2009060 - RNA, 19 nt, Artificial Sequence
  Description of Artificial Sequence: Synthetic oligonucleotide
  Sense strand starting at position 173 of SEQ ID NO: 1880984
acuuguacuacugaggagu

SEQ ID NO: 2009061 - RNA, 19 nt, Artificial Sequence
  Description of Artificial Sequence: Synthetic oligonucleotide
  Antisense strand to SEQ ID NO: 2009060
acuccucaguaguacaagu

SEQ ID NO: 2009062 - RNA, 19 nt, Artificial Sequence
  Description of Artificial Sequence: Synthetic oligonucleotide
  Sense strand starting at position 231 of SEQ ID NO: 1880984
cuaucagccucuuugggaa

SEQ ID NO: 2009063 - RNA, 19 nt, Artificial Sequence
  Description of Artificial Sequence: Synthetic oligonucleotide
  Antisense strand to SEQ ID NO: 2009062
uucccaaagaggcugauag

SEQ ID NO: 2009064 - RNA, 19 nt, Artificial Sequence
  Description of Artificial Sequence: Synthetic oligonucleotide
  Sense strand starting at position 270 of SEQ ID NO: 1880984
aucacugaauugcuaagau

SEQ ID NO: 2009065 - RNA, 19 nt, Artificial Sequence
  Description of Artificial Sequence: Synthetic oligonucleotide
  Antisense strand to SEQ ID NO: 2009064
aucuuagcaauucagugau

SEQ ID NO: 2009066 - RNA, 19 nt, Artificial Sequence
  Description of Artificial Sequence: Synthetic oligonucleotide
  Sense strand starting at position 430 of SEQ ID NO: 1880984
uugauauaaugcucagaau

SEQ ID NO: 2009067 - RNA, 19 nt, Artificial Sequence
  Description of Artificial Sequence: Synthetic oligonucleotide
  Antisense strand to SEQ ID NO: 2009066
auucugagcauuauaucaa

SEQ ID NO: 2009068 - RNA, 19 nt, Artificial Sequence
  Description of Artificial Sequence: Synthetic oligonucleotide
  Sense strand starting at position 489 of SEQ ID NO: 1880984
aauacaagcucaguugaga

SEQ ID NO: 2009069 - RNA, 19 nt, Artificial Sequence
  Description of Artificial Sequence: Synthetic oligonucleotide
  Antisense strand to SEQ ID NO: 2009068
ucucaacugagcuuguauu

SEQ ID NO: 2009070 - RNA, 19 nt, Artificial Sequence
  Description of Artificial Sequence: Synthetic oligonucleotide
  Sense strand starting at position 596 of SEQ ID NO: 1880984
ggacaugcuuaaucuuuag

SEQ ID NO: 2009071 - RNA, 19 nt, Artificial Sequence
  Description of Artificial Sequence: Synthetic oligonucleotide
  Antisense strand to SEQ ID NO: 2009070
cuaaagauuaagcaugucc

SEQ ID NO: 2009072 - RNA, 19 nt, Artificial Sequence
  Description of Artificial Sequence: Synthetic oligonucleotide
  Sense strand starting at position 662 of SEQ ID NO: 1880984
cugagaaacuuuguuccua

SEQ ID NO: 2009073 - RNA, 19 nt, Artificial Sequence
  Description of Artificial Sequence: Synthetic oligonucleotide
  Antisense strand to SEQ ID NO: 2009072
uaggaacaaaguuucucag

SEQ ID NO: 2009074 - RNA, 19 nt, Artificial Sequence
  Description of Artificial Sequence: Synthetic oligonucleotide
  Sense strand starting at position 663 of SEQ ID NO: 1880984
ugagaaacuuuguuccuaa

SEQ ID NO: 2009075 - RNA, 19 nt, Artificial Sequence
  Description of Artificial Sequence: Synthetic oligonucleotide
  Antisense strand to SEQ ID NO: 2009074
uuaggaacaaaguuucuca

SEQ ID NO: 2009076 - RNA, 19 nt, Artificial Sequence
  Description of Artificial Sequence: Synthetic oligonucleotide
  Sense strand starting at position 732 of SEQ ID NO: 1880984
aaauaucuugcuuggagga

SEQ ID NO: 2009077 - RNA, 19 nt, Artificial Sequence
  Description of Artificial Sequence: Synthetic oligonucleotide
  Antisense strand to SEQ ID NO: 2009076
uccuccaagcaagauauuu

SEQ ID NO: 2009078 - RNA, 19 nt, Artificial Sequence
  Description of Artificial Sequence: Synthetic oligonucleotide
  Sense strand starting at position 748 of SEQ ID NO: 1880984
ggaccuaagucacuuuaac

SEQ ID NO: 2009079 - RNA, 19 nt, Artificial Sequence
  Description of Artificial Sequence: Synthetic oligonucleotide
  Antisense strand to SEQ ID NO: 2009078
guuaaagugacuuaggucc

SEQ ID NO: 2009080 - RNA, 19 nt, Artificial Sequence
  Description of Artificial Sequence: Synthetic oligonucleotide
  Sense strand starting at position 1001 of SEQ ID NO: 1880984
ggugucucuggugugcaau

SEQ ID NO: 2009081 - RNA, 19 nt, Artificial Sequence
  Description of Artificial Sequence: Synthetic oligonucleotide
  Antisense strand to SEQ ID NO: 2009080
auugcacaccagagacacc

SEQ ID NO: 2009082 - RNA, 19 nt, Artificial Sequence
  Description of Artificial Sequence: Synthetic oligonucleotide
  Sense strand starting at position 1122 of SEQ ID NO: 1880984
gguuccuaagauugcaaau

SEQ ID NO: 2009083 - RNA, 19 nt, Artificial Sequence
  Description of Artificial Sequence: Synthetic oligonucleotide
  Antisense strand to SEQ ID NO: 2009082
auuugcaaucuuaggaacc

SEQ ID NO: 2009084 - RNA, 19 nt, Artificial Sequence
  Description of Artificial Sequence: Synthetic oligonucleotide
  Sense strand starting at position 1252 of SEQ ID NO: 1880984
uuaggucacuucucuggaa

SEQ ID NO: 2009085 - RNA, 19 nt, Artificial Sequence
  Description of Artificial Sequence: Synthetic oligonucleotide
  Antisense strand to SEQ ID NO: 2009084
uuccagagaagugaccuaa

SEQ ID NO: 2009086 - RNA, 19 nt, Artificial Sequence
  Description of Artificial Sequence: Synthetic oligonucleotide
  Sense strand starting at position 1256 of SEQ ID NO: 1880984
gucacuucucuggaagguu

SEQ ID NO: 2009087 - RNA, 19 nt, Artificial Sequence
  Description of Artificial Sequence: Synthetic oligonucleotide
  Antisense strand to SEQ ID NO: 2009086
aaccuuccagagaagugac

SEQ ID NO: 2009088 - RNA, 19 nt, Artificial Sequence
  Description of Artificial Sequence: Synthetic oligonucleotide
  Sense strand starting at position 1264 of SEQ ID NO: 1880984
ucuggaagguuaguuauua

SEQ ID NO: 2009089 - RNA, 19 nt, Artificial Sequence
  Description of Artificial Sequence: Synthetic oligonucleotide
  Antisense strand to SEQ ID NO: 2009088
uaauaacuaaccuuccaga

SEQ ID NO: 2009090 - RNA, 19 nt, Artificial Sequence
  Description of Artificial Sequence: Synthetic oligonucleotide
  Sense strand starting at position 1265 of SEQ ID NO: 1880984
cuggaagguuaguuauuaa

SEQ ID NO: 2009091 - RNA, 19 nt, Artificial Sequence
  Description of Artificial Sequence: Synthetic oligonucleotide
  Antisense strand to SEQ ID NO: 2009090
uuaauaacuaaccuuccag

SEQ ID NO: 2009092 - RNA, 19 nt, Artificial Sequence
  Description of Artificial Sequence: Synthetic oligonucleotide
  Sense strand starting at position 1268 of SEQ ID NO: 1880984
gaagguuaguuauuaagaa

SEQ ID NO: 2009093 - RNA, 19 nt, Artificial Sequence
  Description of Artificial Sequence: Synthetic oligonucleotide
  Antisense strand to SEQ ID NO: 2009092
uucuuaauaacuaaccuuc

SEQ ID NO: 2009094 - RNA, 19 nt, Artificial Sequence
  Description of Artificial Sequence: Synthetic oligonucleotide
  Sense strand starting at position 1428 of SEQ ID NO: 1880984
agacauaucuagucagcug

SEQ ID NO: 2009095 - RNA, 19 nt, Artificial Sequence
  Description of Artificial Sequence: Synthetic oligonucleotide
  Antisense strand to SEQ ID NO: 2009094
cagcugacuagauaugucu

SEQ ID NO: 2009096 - RNA, 19 nt, Artificial Sequence
  Description of Artificial Sequence: Synthetic oligonucleotide
  Sense strand starting at position 1440 of SEQ ID NO: 1880984
ucagcugaagcugacaaau

SEQ ID NO: 2009097 - RNA, 19 nt, Artificial Sequence
  Description of Artificial Sequence: Synthetic oligonucleotide
  Antisense strand to SEQ ID NO: 2009096
auuugucagcuucagcuga

SEQ ID NO: 2009098 - RNA, 19 nt, Artificial Sequence
  Description of Artificial Sequence: Synthetic oligonucleotide
  Sense strand starting at position 1892 of SEQ ID NO: 1880984
uccucucugugauugagga

SEQ ID NO: 2009099 - RNA, 19 nt, Artificial Sequence
  Description of Artificial Sequence: Synthetic oligonucleotide
  Antisense strand to SEQ ID NO: 2009098
uccucaaucacagagagga

SEQ ID NO: 2009100 - RNA, 19 nt, Artificial Sequence
  Description of Artificial Sequence: Synthetic oligonucleotide
  Sense strand starting at position 1893 of SEQ ID NO: 1880984
ccucucugugauugaggaa

SEQ ID NO: 2009101 - RNA, 19 nt, Artificial Sequence
  Description of Artificial Sequence: Synthetic oligonucleotide
  Antisense strand to SEQ ID NO: 2009100
uuccucaaucacagagagg

SEQ ID NO: 2009102 - RNA, 19 nt, Artificial Sequence
  Description of Artificial Sequence: Synthetic oligonucleotide
  Sense strand starting at position 2167 of SEQ ID NO: 1880984
cgaccuuccgaaggaaaca

SEQ ID NO: 2009103 - RNA, 19 nt, Artificial Sequence
  Description of Artificial Sequence: Synthetic oligonucleotide
  Antisense strand to SEQ ID NO: 2009102
uguuuccuucggaaggucg

SEQ ID NO: 2009104 - RNA, 19 nt, Artificial Sequence
  Description of Artificial Sequence: Synthetic oligonucleotide
  Sense strand starting at position 2203 of SEQ ID NO: 1880984
guugccuugccaguauagu

SEQ ID NO: 2009105 - RNA, 19 nt, Artificial Sequence
  Description of Artificial Sequence: Synthetic oligonucleotide
  Antisense strand to SEQ ID NO: 2009104
acuauacuggcaaggcaac

SEQ ID NO: 2009106 - RNA, 19 nt, Artificial Sequence
  Description of Artificial Sequence: Synthetic oligonucleotide
  Sense strand starting at position 2221 of SEQ ID NO: 1880984
uggagcuugguagaaacuu

SEQ ID NO: 2009107 - RNA, 19 nt, Artificial Sequence
  Description of Artificial Sequence: Synthetic oligonucleotide
  Antisense strand to SEQ ID NO: 2009106
aaguuucuaccaagcucca

SEQ ID NO: 2009108 - RNA, 19 nt, Artificial Sequence
  Description of Artificial Sequence: Synthetic oligonucleotide
  Sense strand starting at position 2310 of SEQ ID NO: 1880984
gggcucaagcugcaugaaa

SEQ ID NO: 2009109 - RNA, 19 nt, Artificial Sequence
  Description of Artificial Sequence: Synthetic oligonucleotide
  Antisense strand to SEQ ID NO: 2009108
uuucaugcagcuugagccc

SEQ ID NO: 2009110 - RNA, 19 nt, Artificial Sequence
  Description of Artificial Sequence: Synthetic oligonucleotide
  Sense strand starting at position 2384 of SEQ ID NO: 1880984
gguguuugggaguaagauu

SEQ ID NO: 2009111 - RNA, 19 nt, Artificial Sequence
  Description of Artificial Sequence: Synthetic oligonucleotide
  Antisense strand to SEQ ID NO: 2009110
aaucuuacucccaaacacc

SEQ ID NO: 2009112 - RNA, 19 nt, Artificial Sequence
  Description of Artificial Sequence: Synthetic oligonucleotide
  Sense strand starting at position 2433 of SEQ ID NO: 1880984
uuuggacuauauccuguaa

SEQ ID NO: 2009113 - RNA, 19 nt, Artificial Sequence
  Description of Artificial Sequence: Synthetic oligonucleotide
  Antisense strand to SEQ ID NO: 2009112
uuacaggauauaguccaaa

SEQ ID NO: 2009114 - RNA, 19 nt, Artificial Sequence
  Description of Artificial Sequence: Synthetic oligonucleotide
  Sense strand starting at position 2577 of SEQ ID NO: 1880984
guguguuugagagcuuguu

SEQ ID NO: 2009115 - RNA, 19 nt, Artificial Sequence
  Description of Artificial Sequence: Synthetic oligonucleotide
  Antisense strand to SEQ ID NO: 2009114
aacaagcucucaaacacac

SEQ ID NO: 2009116 - RNA, 19 nt, Artificial Sequence
  Description of Artificial Sequence: Synthetic oligonucleotide
  Sense strand starting at position 2710 of SEQ ID NO: 1880984
acgcauaaaccauauggau

SEQ ID NO: 2009117 - RNA, 19 nt, Artificial Sequence
  Description of Artificial Sequence: Synthetic oligonucleotide
  Antisense strand to SEQ ID NO: 2009116
auccauaugguuuaugcgu

SEQ ID NO: 2009118 - RNA, 19 nt, Artificial Sequence
  Description of Artificial Sequence: Synthetic oligonucleotide
  Sense strand starting at position 2910 of SEQ ID NO: 1880984
cguaguuaacaccagauga

SEQ ID NO: 2009119 - RNA, 19 nt, Artificial Sequence
  Description of Artificial Sequence: Synthetic oligonucleotide
  Antisense strand to SEQ ID NO: 2009118
ucaucugguguuaacuacg

SEQ ID NO: 2009120 - RNA, 19 nt, Artificial Sequence
  Description of Artificial Sequence: Synthetic oligonucleotide
  Sense strand starting at position 3081 of SEQ ID NO: 1880984
ugugucagcuuauuuguua

SEQ ID NO: 2009121 - RNA, 19 nt, Artificial Sequence
  Description of Artificial Sequence: Synthetic oligonucleotide
  Antisense strand to SEQ ID NO: 2009120
uaacaaauaagcugacaca

SEQ ID NO: 2009122 - RNA, 19 nt, Artificial Sequence
  Description of Artificial Sequence: Synthetic oligonucleotide
  Sense strand starting at position 3088 of SEQ ID NO: 1880984
gcuuauuuguuaguguuau

SEQ ID NO: 2009123 - RNA, 19 nt, Artificial Sequence
  Description of Artificial Sequence: Synthetic oligonucleotide
  Antisense strand to SEQ ID NO: 2009122
auaacacuaacaaauaagc

SEQ ID NO: 2009124 - RNA, 19 nt, Artificial Sequence
  Description of Artificial Sequence: Synthetic oligonucleotide
  Sense strand starting at position 3470 of SEQ ID NO: 1880984
uugugauaacucugaggga

SEQ ID NO: 2009125 - RNA, 19 nt, Artificial Sequence
  Description of Artificial Sequence: Synthetic oligonucleotide
  Antisense strand to SEQ ID NO: 2009124
ucccucagaguuaucacaa

SEQ ID NO: 2009126 - RNA, 19 nt, Artificial Sequence
  Description of Artificial Sequence: Synthetic oligonucleotide
  Sense strand starting at position 3610 of SEQ ID NO: 1880984
gaguauuaacaauggguag

SEQ ID NO: 2009127 - RNA, 19 nt, Artificial Sequence
  Description of Artificial Sequence: Synthetic oligonucleotide
  Antisense strand to SEQ ID NO: 2009126
cuacccauuguuaauacuc

SEQ ID NO: 2009128 - RNA, 19 nt, Artificial Sequence
  Description of Artificial Sequence: Synthetic oligonucleotide
  Sense strand starting at position 3611 of SEQ ID NO: 1880984
aguauuaacaauggguaga

SEQ ID NO: 2009129 - RNA, 19 nt, Artificial Sequence
  Description of Artificial Sequence: Synthetic oligonucleotide
  Antisense strand to SEQ ID NO: 2009128
ucuacccauuguuaauacu

SEQ ID NO: 2009130 - RNA, 19 nt, Artificial Sequence
  Description of Artificial Sequence: Synthetic oligonucleotide
  Sense strand starting at position 3737 of SEQ ID NO: 1880984
gguguaucuggguauuaaa

SEQ ID NO: 2009131 - RNA, 19 nt, Artificial Sequence
  Description of Artificial Sequence: Synthetic oligonucleotide
  Antisense strand to SEQ ID NO: 2009130
uuuaauacccagauacacc

SEQ ID NO: 2009132 - RNA, 19 nt, Artificial Sequence
  Description of Artificial Sequence: Synthetic oligonucleotide
  Sense strand starting at position 3835 of SEQ ID NO: 1880984
gaaauaaugugaucugauu

SEQ ID NO: 2009133 - RNA, 19 nt, Artificial Sequence
  Description of Artificial Sequence: Synthetic oligonucleotide
  Antisense strand to SEQ ID NO: 2009132
aaucagaucacauuauuuc

SEQ ID NO: 2009134 - RNA, 19 nt, Artificial Sequence
  Description of Artificial Sequence: Synthetic oligonucleotide
  Sense strand starting at position 3936 of SEQ ID NO: 1880984
ggaagauaugcuggcauag

SEQ ID NO: 2009135 - RNA, 19 nt, Artificial Sequence
  Description of Artificial Sequence: Synthetic oligonucleotide
  Antisense strand to SEQ ID NO: 2009134
cuaugccagcauaucuucc

SEQ ID NO: 2009136 - RNA, 19 nt, Artificial Sequence
  Description of Artificial Sequence: Synthetic oligonucleotide
  Sense strand starting at position 3947 of SEQ ID NO: 1880984
uggcauagagcuuagagga

SEQ ID NO: 2009137 - RNA, 19 nt, Artificial Sequence
  Description of Artificial Sequence: Synthetic oligonucleotide
  Antisense strand to SEQ ID NO: 2009136
uccucuaagcucuaugcca

SEQ ID NO: 2009138 - RNA, 19 nt, Artificial Sequence
  Description of Artificial Sequence: Synthetic oligonucleotide
  Sense strand starting at position 63 of SEQ ID NO: 1880985
ucagaagcuucugugaugu

SEQ ID NO: 2009139 - RNA, 19 nt, Artificial Sequence
  Description of Artificial Sequence: Synthetic oligonucleotide
  Antisense strand to SEQ ID NO: 2009138
acaucacagaagcuucuga

SEQ ID NO: 2009140 - RNA, 19 nt, Artificial Sequence
  Description of Artificial Sequence: Synthetic oligonucleotide
  Sense strand starting at position 204 of SEQ ID NO: 1880985
ugauaacucucagccagaa

SEQ ID NO: 2009141 - RNA, 19 nt, Artificial Sequence
  Description of Artificial Sequence: Synthetic oligonucleotide
  Antisense strand to SEQ ID NO: 2009140
uucuggcugagaguuauca

SEQ ID NO: 2009142 - RNA, 19 nt, Artificial Sequence
  Description of Artificial Sequence: Synthetic oligonucleotide
  Sense strand starting at position 438 of SEQ ID NO: 1880985
caguaaucccacuggcuga

SEQ ID NO: 2009143 - RNA, 19 nt, Artificial Sequence
  Description of Artificial Sequence: Synthetic oligonucleotide
  Antisense strand to SEQ ID NO: 2009142
ucagccagugggauuacug

SEQ ID NO: 2009144 - RNA, 19 nt, Artificial Sequence
  Description of Artificial Sequence: Synthetic oligonucleotide
  Sense strand starting at position 521 of SEQ ID NO: 1880985
cguccuucccgguaauaaa

SEQ ID NO: 2009145 - RNA, 19 nt, Artificial Sequence
  Description of Artificial Sequence: Synthetic oligonucleotide
  Antisense strand to SEQ ID NO: 2009144
uuuauuaccgggaaggacg

SEQ ID NO: 2009146 - RNA, 19 nt, Artificial Sequence
  Description of Artificial Sequence: Synthetic oligonucleotide
  Sense strand starting at position 530 of SEQ ID NO: 1880985
cgguaauaaagucauuguu

SEQ ID NO: 2009147 - RNA, 19 nt, Artificial Sequence
  Description of Artificial Sequence: Synthetic oligonucleotide
  Antisense strand to SEQ ID NO: 2009146
aacaaugacuuuauuaccg

SEQ ID NO: 2009148 - RNA, 19 nt, Artificial Sequence
  Description of Artificial Sequence: Synthetic oligonucleotide
  Sense strand starting at position 556 of SEQ ID NO: 1880985
agcccugaccuuugguuau

SEQ ID NO: 2009149 - RNA, 19 nt, Artificial Sequence
  Description of Artificial Sequence: Synthetic oligonucleotide
  Antisense strand to SEQ ID NO: 2009148
auaaccaaaggucagggcu

SEQ ID NO: 2009150 - RNA, 19 nt, Artificial Sequence
  Description of Artificial Sequence: Synthetic oligonucleotide
  Sense strand starting at position 560 of SEQ ID NO: 1880985
cugaccuuugguuauccaa

SEQ ID NO: 2009151 - RNA, 19 nt, Artificial Sequence
  Description of Artificial Sequence: Synthetic oligonucleotide
  Antisense strand to SEQ ID NO: 2009150
uuggauaaccaaaggucag

SEQ ID NO: 2009152 - RNA, 19 nt, Artificial Sequence
  Description of Artificial Sequence: Synthetic oligonucleotide
  Sense strand starting at position 562 of SEQ ID NO: 1880985
gaccuuugguuauccaagu

SEQ ID NO: 2009153 - RNA, 19 nt, Artificial Sequence
  Description of Artificial Sequence: Synthetic oligonucleotide
  Antisense strand to SEQ ID NO: 2009152
acuuggauaaccaaagguc

SEQ ID NO: 2009154 - RNA, 19 nt, Artificial Sequence
  Description of Artificial Sequence: Synthetic oligonucleotide
  Sense strand starting at position 594 of SEQ ID NO: 1880985
gugagcucuggccaucacu

SEQ ID NO: 2009155 - RNA, 19 nt, Artificial Sequence
  Description of Artificial Sequence: Synthetic oligonucleotide
  Antisense strand to SEQ ID NO: 2009154
agugauggccagagcucac

SEQ ID NO: 2009156 - RNA, 19 nt, Artificial Sequence
  Description of Artificial Sequence: Synthetic oligonucleotide
  Sense strand starting at position 597 of SEQ ID NO: 1880985
agcucuggccaucacuaaa

SEQ ID NO: 2009157 - RNA, 19 nt, Artificial Sequence
  Description of Artificial Sequence: Synthetic oligonucleotide
  Antisense strand to SEQ ID NO: 2009156
uuuagugauggccagagcu

SEQ ID NO: 2009158 - RNA, 19 nt, Artificial Sequence
  Description of Artificial Sequence: Synthetic oligonucleotide
  Sense strand starting at position 618 of SEQ ID NO: 1880985
caccgaucaguggagaagu

SEQ ID NO: 2009159 - RNA, 19 nt, Artificial Sequence
  Description of Artificial Sequence: Synthetic oligonucleotide
  Antisense strand to SEQ ID NO: 2009158
acuucuccacugaucggug

SEQ ID NO: 2009160 - RNA, 19 nt, Artificial Sequence
  Description of Artificial Sequence: Synthetic oligonucleotide
  Sense strand starting at position 620 of SEQ ID NO: 1880985
ccgaucaguggagaaguaa

SEQ ID NO: 2009161 - RNA, 19 nt, Artificial Sequence
  Description of Artificial Sequence: Synthetic oligonucleotide
  Antisense strand to SEQ ID NO: 2009160
uuacuucuccacugaucgg

SEQ ID NO: 2009162 - RNA, 19 nt, Artificial Sequence
  Description of Artificial Sequence: Synthetic oligonucleotide
  Sense strand starting at position 631 of SEQ ID NO: 1880985
agaaguaacgcuuaggcga

SEQ ID NO: 2009163 - RNA, 19 nt, Artificial Sequence
  Description of Artificial Sequence: Synthetic oligonucleotide
  Antisense strand to SEQ ID NO: 2009162
ucgccuaagcguuacuucu

SEQ ID NO: 2009164 - RNA, 19 nt, Artificial Sequence
  Description of Artificial Sequence: Synthetic oligonucleotide
  Sense strand starting at position 878 of SEQ ID NO: 1880985
agaaacccuugauucgauu

SEQ ID NO: 2009165 - RNA, 19 nt, Artificial Sequence
  Description of Artificial Sequence: Synthetic oligonucleotide
  Antisense strand to SEQ ID NO: 2009164
aaucgaaucaaggguuucu

SEQ ID NO: 2009166 - RNA, 19 nt, Artificial Sequence
  Description of Artificial Sequence: Synthetic oligonucleotide
  Sense strand starting at position 924 of SEQ ID NO: 1880985
agggaaacaucugaaagau

SEQ ID NO: 2009167 - RNA, 19 nt, Artificial Sequence
  Description of Artificial Sequence: Synthetic oligonucleotide
  Antisense strand to SEQ ID NO: 2009166
aucuuucagauguuucccu

SEQ ID NO: 2009168 - RNA, 19 nt, Artificial Sequence
  Description of Artificial Sequence: Synthetic oligonucleotide
  Sense strand starting at position 1044 of SEQ ID NO: 1880985
uggaaaguucaacacguga

SEQ ID NO: 2009169 - RNA, 19 nt, Artificial Sequence
  Description of Artificial Sequence: Synthetic oligonucleotide
  Antisense strand to SEQ ID NO: 2009168
ucacguguugaacuuucca

SEQ ID NO: 2009170 - RNA, 19 nt, Artificial Sequence
  Description of Artificial Sequence: Synthetic oligonucleotide
  Sense strand starting at position 1739 of SEQ ID NO: 1880985
agaggagggagucgucaua

SEQ ID NO: 2009171 - RNA, 19 nt, Artificial Sequence
  Description of Artificial Sequence: Synthetic oligonucleotide
  Antisense strand to SEQ ID NO: 2009170
uaugacgacucccuccucu

SEQ ID NO: 2009172 - RNA, 19 nt, Artificial Sequence
  Description of Artificial Sequence: Synthetic oligonucleotide
  Sense strand starting at position 2133 of SEQ ID NO: 1880985
gagcguuaaagcgcucaga

SEQ ID NO: 2009173 - RNA, 19 nt, Artificial Sequence
  Description of Artificial Sequence: Synthetic oligonucleotide
  Antisense strand to SEQ ID NO: 2009172
ucugagcgcuuuaacgcuc

SEQ ID NO: 2009174 - RNA, 19 nt, Artificial Sequence
  Description of Artificial Sequence: Synthetic oligonucleotide
  Sense strand starting at position 2136 of SEQ ID NO: 1880985
cguuaaagcgcucagagga

SEQ ID NO: 2009175 - RNA, 19 nt, Artificial Sequence
  Description of Artificial Sequence: Synthetic oligonucleotide
  Antisense strand to SEQ ID NO: 2009174
uccucugagcgcuuuaacg

SEQ ID NO: 2009176 - RNA, 19 nt, Artificial Sequence
  Description of Artificial Sequence: Synthetic oligonucleotide
  Sense strand starting at position 2240 of SEQ ID NO: 1880985
gcagaaguugccgcccuaa

SEQ ID NO: 2009177 - RNA, 19 nt, Artificial Sequence
  Description of Artificial Sequence: Synthetic oligonucleotide
  Antisense strand to SEQ ID NO: 2009176
uuagggcggcaacuucugc

SEQ ID NO: 2009178 - RNA, 19 nt, Artificial Sequence
  Description of Artificial Sequence: Synthetic oligonucleotide
  Sense strand starting at position 2289 of SEQ ID NO: 1880985
ccgaauacacuuugugaug

SEQ ID NO: 2009179 - RNA, 19 nt, Artificial Sequence
  Description of Artificial Sequence: Synthetic oligonucleotide
  Antisense strand to SEQ ID NO: 2009178
caucacaaaguguauucgg

SEQ ID NO: 2009180 - RNA, 19 nt, Artificial Sequence
  Description of Artificial Sequence: Synthetic oligonucleotide
  Sense strand starting at position 2298 of SEQ ID NO: 1880985
cuuugugauggugaggaua

SEQ ID NO: 2009181 - RNA, 19 nt, Artificial Sequence
  Description of Artificial Sequence: Synthetic oligonucleotide
  Antisense strand to SEQ ID NO: 2009180
uauccucaccaucacaaag

SEQ ID NO: 2009182 - RNA, 19 nt, Artificial Sequence
  Description of Artificial Sequence: Synthetic oligonucleotide
  Sense strand starting at position 2361 of SEQ ID NO: 1880985
uccguaaacucaucaaguu

SEQ ID NO: 2009183 - RNA, 19 nt, Artificial Sequence
  Description of Artificial Sequence: Synthetic oligonucleotide
  Antisense strand to SEQ ID NO: 2009182
aacuugaugaguuuacgga

SEQ ID NO: 2009184 - RNA, 19 nt, Artificial Sequence
  Description of Artificial Sequence: Synthetic oligonucleotide
  Sense strand starting at position 2362 of SEQ ID NO: 1880985
ccguaaacucaucaaguuc

SEQ ID NO: 2009185 - RNA, 19 nt, Artificial Sequence
  Description of Artificial Sequence: Synthetic oligonucleotide
  Antisense strand to SEQ ID NO: 2009184
gaacuugaugaguuuacgg

SEQ ID NO: 2009186 - RNA, 19 nt, Artificial Sequence
  Description of Artificial Sequence: Synthetic oligonucleotide
  Sense strand starting at position 2384 of SEQ ID NO: 1880985
ugcuacucuguggaguuua

SEQ ID NO: 2009187 - RNA, 19 nt, Artificial Sequence
  Description of Artificial Sequence: Synthetic oligonucleotide
  Antisense strand to SEQ ID NO: 2009186
uaaacuccacagaguagca

SEQ ID NO: 2009188 - RNA, 19 nt, Artificial Sequence
  Description of Artificial Sequence: Synthetic oligonucleotide
  Sense strand starting at position 2512 of SEQ ID NO: 1880985
cacaguagaguugaucauu

SEQ ID NO: 2009189 - RNA, 19 nt, Artificial Sequence
  Description of Artificial Sequence: Synthetic oligonucleotide
  Antisense strand to SEQ ID NO: 2009188
aaugaucaacucuacugug

SEQ ID NO: 2009190 - RNA, 19 nt, Artificial Sequence
  Description of Artificial Sequence: Synthetic oligonucleotide
  Sense strand starting at position 2692 of SEQ ID NO: 1880985
guuuaagaauuguuacaag

SEQ ID NO: 2009191 - RNA, 19 nt, Artificial Sequence
  Description of Artificial Sequence: Synthetic oligonucleotide
  Antisense strand to SEQ ID NO: 2009190
cuuguaacaauucuuaaac

SEQ ID NO: 2009192 - RNA, 19 nt, Artificial Sequence
  Description of Artificial Sequence: Synthetic oligonucleotide
  Sense strand starting at position 2711 of SEQ ID NO: 1880985
uuccauuagugaccugcua

SEQ ID NO: 2009193 - RNA, 19 nt, Artificial Sequence
  Description of Artificial Sequence: Synthetic oligonucleotide
  Antisense strand to SEQ ID NO: 2009192
uagcaggucacuaauggaa

SEQ ID NO: 2009194 - RNA, 19 nt, Artificial Sequence
  Description of Artificial Sequence: Synthetic oligonucleotide
  Sense strand starting at position 2871 of SEQ ID NO: 1880985
ugucaagaggcaugugaac

SEQ ID NO: 2009195 - RNA, 19 nt, Artificial Sequence
  Description of Artificial Sequence: Synthetic oligonucleotide
  Antisense strand to SEQ ID NO: 2009194
guucacaugccucuugaca

SEQ ID NO: 2009196 - RNA, 19 nt, Artificial Sequence
  Description of Artificial Sequence: Synthetic oligonucleotide
  Sense strand starting at position 2973 of SEQ ID NO: 1880985
uaagucgcagaaugagaua

SEQ ID NO: 2009197 - RNA, 19 nt, Artificial Sequence
  Description of Artificial Sequence: Synthetic oligonucleotide
  Antisense strand to SEQ ID NO: 2009196
uaucucauucugcgacuua

SEQ ID NO: 2009198 - RNA, 19 nt, Artificial Sequence
  Description of Artificial Sequence: Synthetic oligonucleotide
  Sense strand starting at position 3045 of SEQ ID NO: 1880985
aguaaauaagccggcuaaa

SEQ ID NO: 2009199 - RNA, 19 nt, Artificial Sequence
  Description of Artificial Sequence: Synthetic oligonucleotide
  Antisense strand to SEQ ID NO: 2009198
uuuagccggcuuauuuacu

SEQ ID NO: 2009200 - RNA, 19 nt, Artificial Sequence
  Description of Artificial Sequence: Synthetic oligonucleotide
  Sense strand starting at position 3088 of SEQ ID NO: 1880985
gaaagagaccucugguagu

SEQ ID NO: 2009201 - RNA, 19 nt, Artificial Sequence
  Description of Artificial Sequence: Synthetic oligonucleotide
  Antisense strand to SEQ ID NO: 2009200
acuaccagaggucucuuuc

SEQ ID NO: 2009202 - RNA, 19 nt, Artificial Sequence
  Description of Artificial Sequence: Synthetic oligonucleotide
  Sense strand starting at position 3098 of SEQ ID NO: 1880985
ucugguaguccuuacuacu

SEQ ID NO: 2009203 - RNA, 19 nt, Artificial Sequence
  Description of Artificial Sequence: Synthetic oligonucleotide
  Antisense strand to SEQ ID NO: 2009202
aguaguaaggacuaccaga

SEQ ID NO: 2009204 - RNA, 19 nt, Artificial Sequence
  Description of Artificial Sequence: Synthetic oligonucleotide
  Sense strand starting at position 3724 of SEQ ID NO: 1880985
guaugacaugugcauggua

SEQ ID NO: 2009205 - RNA, 19 nt, Artificial Sequence
  Description of Artificial Sequence: Synthetic oligonucleotide
  Antisense strand to SEQ ID NO: 2009204
uaccaugcacaugucauac

SEQ ID NO: 2009206 - RNA, 19 nt, Artificial Sequence
  Description of Artificial Sequence: Synthetic oligonucleotide
  Sense strand starting at position 3726 of SEQ ID NO: 1880985
augacaugugcaugguacu

SEQ ID NO: 2009207 - RNA, 19 nt, Artificial Sequence
  Description of Artificial Sequence: Synthetic oligonucleotide
  Antisense strand to SEQ ID NO: 2009206
aguaccaugcacaugucau

SEQ ID NO: 2009208 - RNA, 19 nt, Artificial Sequence
  Description of Artificial Sequence: Synthetic oligonucleotide
  Sense strand starting at position 3727 of SEQ ID NO: 1880985
ugacaugugcaugguacua

SEQ ID NO: 2009209 - RNA, 19 nt, Artificial Sequence
  Description of Artificial Sequence: Synthetic oligonucleotide
  Antisense strand to SEQ ID NO: 2009208
uaguaccaugcacauguca

SEQ ID NO: 2009210 - RNA, 19 nt, Artificial Sequence
  Description of Artificial Sequence: Synthetic oligonucleotide
  Sense strand starting at position 3904 of SEQ ID NO: 1880985
cuacauauugaauggucau

SEQ ID NO: 2009211 - RNA, 19 nt, Artificial Sequence
  Description of Artificial Sequence: Synthetic oligonucleotide
  Antisense strand to SEQ ID NO: 2009210
augaccauucaauauguag

SEQ ID NO: 2009212 - RNA, 19 nt, Artificial Sequence
  Description of Artificial Sequence: Synthetic oligonucleotide
  Sense strand starting at position 3955 of SEQ ID NO: 1880985
ugaacaugagauugagucu

SEQ ID NO: 2009213 - RNA, 19 nt, Artificial Sequence
  Description of Artificial Sequence: Synthetic oligonucleotide
  Antisense strand to SEQ ID NO: 2009212
agacucaaucucauguuca

SEQ ID NO: 2009214 - RNA, 19 nt, Artificial Sequence
  Description of Artificial Sequence: Synthetic oligonucleotide
  Sense strand starting at position 3962 of SEQ ID NO: 1880985
gagauugagucucucuuac

SEQ ID NO: 2009215 - RNA, 19 nt, Artificial Sequence
  Description of Artificial Sequence: Synthetic oligonucleotide
  Antisense strand to SEQ ID NO: 2009214
guaagagagacucaaucuc

SEQ ID NO: 2009216 - RNA, 19 nt, Artificial Sequence
  Description of Artificial Sequence: Synthetic oligonucleotide
  Sense strand starting at position 3964 of SEQ ID NO: 1880985
gauugagucucucuuacug

SEQ ID NO: 2009217 - RNA, 19 nt, Artificial Sequence
  Description of Artificial Sequence: Synthetic oligonucleotide
  Antisense strand to SEQ ID NO: 2009216
caguaagagagacucaauc

SEQ ID NO: 2009218 - RNA, 19 nt, Artificial Sequence
  Description of Artificial Sequence: Synthetic oligonucleotide
  Sense strand starting at position 323 of SEQ ID NO: 1880986
uuucuuucccuguaaagug

SEQ ID NO: 2009219 - RNA, 19 nt, Artificial Sequence
  Description of Artificial Sequence: Synthetic oligonucleotide
  Antisense strand to SEQ ID NO: 2009218
cacuuuacagggaaagaaa

SEQ ID NO: 2009220 - RNA, 19 nt, Artificial Sequence
  Description of Artificial Sequence: Synthetic oligonucleotide
  Sense strand starting at position 330 of SEQ ID NO: 1880986
cccuguaaaguguagauaa

SEQ ID NO: 2009221 - RNA, 19 nt, Artificial Sequence
  Description of Artificial Sequence: Synthetic oligonucleotide
  Antisense strand to SEQ ID NO: 2009220
uuaucuacacuuuacaggg

SEQ ID NO: 2009222 - RNA, 19 nt, Artificial Sequence
  Description of Artificial Sequence: Synthetic oligonucleotide
  Sense strand starting at position 332 of SEQ ID NO: 1880986
cuguaaaguguagauaaca

SEQ ID NO: 2009223 - RNA, 19 nt, Artificial Sequence
  Description of Artificial Sequence: Synthetic oligonucleotide
  Antisense strand to SEQ ID NO: 2009222
uguuaucuacacuuuacag

SEQ ID NO: 2009224 - RNA, 19 nt, Artificial Sequence
  Description of Artificial Sequence: Synthetic oligonucleotide
  Sense strand starting at position 358 of SEQ ID NO: 1880986
auuaaaggaugugcucaaa

SEQ ID NO: 2009225 - RNA, 19 nt, Artificial Sequence
  Description of Artificial Sequence: Synthetic oligonucleotide
  Antisense strand to SEQ ID NO: 2009224
uuugagcacauccuuuaau

SEQ ID NO: 2009226 - RNA, 19 nt, Artificial Sequence
  Description of Artificial Sequence: Synthetic oligonucleotide
  Sense strand starting at position 366 of SEQ ID NO: 1880986
augugcucaaagggugaaa

SEQ ID NO: 2009227 - RNA, 19 nt, Artificial Sequence
  Description of Artificial Sequence: Synthetic oligonucleotide
  Antisense strand to SEQ ID NO: 2009226
uuucacccuuugagcacau

SEQ ID NO: 2009228 - RNA, 19 nt, Artificial Sequence
  Description of Artificial Sequence: Synthetic oligonucleotide
  Sense strand starting at position 558 of SEQ ID NO: 1880986
cucaauaagggaugcaauu

SEQ ID NO: 2009229 - RNA, 19 nt, Artificial Sequence
  Description of Artificial Sequence: Synthetic oligonucleotide
  Antisense strand to SEQ ID NO: 2009228
aauugcaucccuuauugag

SEQ ID NO: 2009230 - RNA, 19 nt, Artificial Sequence
  Description of Artificial Sequence: Synthetic oligonucleotide
  Sense strand starting at position 613 of SEQ ID NO: 1880986
ggcauuuauuaguucuugu

SEQ ID NO: 2009231 - RNA, 19 nt, Artificial Sequence
  Description of Artificial Sequence: Synthetic oligonucleotide
  Antisense strand to SEQ ID NO: 2009230
acaagaacuaauaaaugcc

SEQ ID NO: 2009232 - RNA, 19 nt, Artificial Sequence
  Description of Artificial Sequence: Synthetic oligonucleotide
  Sense strand starting at position 668 of SEQ ID NO: 1880986
aggugaauucgggaucuua

SEQ ID NO: 2009233 - RNA, 19 nt, Artificial Sequence
  Description of Artificial Sequence: Synthetic oligonucleotide
  Antisense strand to SEQ ID NO: 2009232
uaagaucccgaauucaccu

SEQ ID NO: 2009234 - RNA, 19 nt, Artificial Sequence
  Description of Artificial Sequence: Synthetic oligonucleotide
  Sense strand starting at position 889 of SEQ ID NO: 1880986
aacugagacucauuggucu

SEQ ID NO: 2009235 - RNA, 19 nt, Artificial Sequence
  Description of Artificial Sequence: Synthetic oligonucleotide
  Antisense strand to SEQ ID NO: 2009234
agaccaaugagucucaguu

SEQ ID NO: 2009236 - RNA, 19 nt, Artificial Sequence
  Description of Artificial Sequence: Synthetic oligonucleotide
  Sense strand starting at position 891 of SEQ ID NO: 1880986
cugagacucauuggucuag

SEQ ID NO: 2009237 - RNA, 19 nt, Artificial Sequence
  Description of Artificial Sequence: Synthetic oligonucleotide
  Antisense strand to SEQ ID NO: 2009236
cuagaccaaugagucucag

SEQ ID NO: 2009238 - RNA, 19 nt, Artificial Sequence
  Description of Artificial Sequence: Synthetic oligonucleotide
  Sense strand starting at position 893 of SEQ ID NO: 1880986
gagacucauuggucuaguu

SEQ ID NO: 2009239 - RNA, 19 nt, Artificial Sequence
  Description of Artificial Sequence: Synthetic oligonucleotide
  Antisense strand to SEQ ID NO: 2009238
aacuagaccaaugagucuc

SEQ ID NO: 2009240 - RNA, 19 nt, Artificial Sequence
  Description of Artificial Sequence: Synthetic oligonucleotide
  Sense strand starting at position 895 of SEQ ID NO: 1880986
gacucauuggucuaguuug

SEQ ID NO: 2009241 - RNA, 19 nt, Artificial Sequence
  Description of Artificial Sequence: Synthetic oligonucleotide
  Antisense strand to SEQ ID NO: 2009240
caaacuagaccaaugaguc

SEQ ID NO: 2009242 - RNA, 19 nt, Artificial Sequence
  Description of Artificial Sequence: Synthetic oligonucleotide
  Sense strand starting at position 1028 of SEQ ID NO: 1880986
gacauagugcugggugaag

SEQ ID NO: 2009243 - RNA, 19 nt, Artificial Sequence
  Description of Artificial Sequence: Synthetic oligonucleotide
  Antisense strand to SEQ ID NO: 2009242
cuucacccagcacuauguc

SEQ ID NO: 2009244 - RNA, 19 nt, Artificial Sequence
  Description of Artificial Sequence: Synthetic oligonucleotide
  Sense strand starting at position 1044 of SEQ ID NO: 1880986
aaggguaacugucccagaa

SEQ ID NO: 2009245 - RNA, 19 nt, Artificial Sequence
  Description of Artificial Sequence: Synthetic oligonucleotide
  Antisense strand to SEQ ID NO: 2009244
uucugggacaguuacccuu

SEQ ID NO: 2009246 - RNA, 19 nt, Artificial Sequence
  Description of Artificial Sequence: Synthetic oligonucleotide
  Sense strand starting at position 1188 of SEQ ID NO: 1880986
ugcacacuugcucaugaau

SEQ ID NO: 2009247 - RNA, 19 nt, Artificial Sequence
  Description of Artificial Sequence: Synthetic oligonucleotide
  Antisense strand to SEQ ID NO: 2009246
auucaugagcaagugugca

SEQ ID NO: 2009248 - RNA, 19 nt, Artificial Sequence
  Description of Artificial Sequence: Synthetic oligonucleotide
  Sense strand starting at position 1266 of SEQ ID NO: 1880986
aagugaaucugaguaguuc

SEQ ID NO: 2009249 - RNA, 19 nt, Artificial Sequence
  Description of Artificial Sequence: Synthetic oligonucleotide
  Antisense strand to SEQ ID NO: 2009248
gaacuacucagauucacuu

SEQ ID NO: 2009250 - RNA, 19 nt, Artificial Sequence
  Description of Artificial Sequence: Synthetic oligonucleotide
  Sense strand starting at position 1267 of SEQ ID NO: 1880986
agugaaucugaguaguucu

SEQ ID NO: 2009251 - RNA, 19 nt, Artificial Sequence
  Description of Artificial Sequence: Synthetic oligonucleotide
  Antisense strand to SEQ ID NO: 2009250
agaacuacucagauucacu

SEQ ID NO: 2009252 - RNA, 19 nt, Artificial Sequence
  Description of Artificial Sequence: Synthetic oligonucleotide
  Sense strand starting at position 1315 of SEQ ID NO: 1880986
agccacagauguuuaacua

SEQ ID NO: 2009253 - RNA, 19 nt, Artificial Sequence
  Description of Artificial Sequence: Synthetic oligonucleotide
  Antisense strand to SEQ ID NO: 2009252
uaguuaaacaucuguggcu

SEQ ID NO: 2009254 - RNA, 19 nt, Artificial Sequence
  Description of Artificial Sequence: Synthetic oligonucleotide
  Sense strand starting at position 1316 of SEQ ID NO: 1880986
gccacagauguuuaacuaa

SEQ ID NO: 2009255 - RNA, 19 nt, Artificial Sequence
  Description of Artificial Sequence: Synthetic oligonucleotide
  Antisense strand to SEQ ID NO: 2009254
uuaguuaaacaucuguggc

SEQ ID NO: 2009256 - RNA, 19 nt, Artificial Sequence
  Description of Artificial Sequence: Synthetic oligonucleotide
  Sense strand starting at position 1319 of SEQ ID NO: 1880986
acagauguuuaacuaagca

SEQ ID NO: 2009257 - RNA, 19 nt, Artificial Sequence
  Description of Artificial Sequence: Synthetic oligonucleotide
  Antisense strand to SEQ ID NO: 2009256
ugcuuaguuaaacaucugu

SEQ ID NO: 2009258 - RNA, 19 nt, Artificial Sequence
  Description of Artificial Sequence: Synthetic oligonucleotide
  Sense strand starting at position 1431 of SEQ ID NO: 1880986
gacaccugucaagauguca

SEQ ID NO: 2009259 - RNA, 19 nt, Artificial Sequence
  Description of Artificial Sequence: Synthetic oligonucleotide
  Antisense strand to SEQ ID NO: 2009258
ugacaucuugacagguguc

SEQ ID NO: 2009260 - RNA, 19 nt, Artificial Sequence
  Description of Artificial Sequence: Synthetic oligonucleotide
  Sense strand starting at position 1694 of SEQ ID NO: 1880986
cucugaaaucccugagaug

SEQ ID NO: 2009261 - RNA, 19 nt, Artificial Sequence
  Description of Artificial Sequence: Synthetic oligonucleotide
  Antisense strand to SEQ ID NO: 2009260
caucucagggauuucagag

SEQ ID NO: 2009262 - RNA, 19 nt, Artificial Sequence
  Description of Artificial Sequence: Synthetic oligonucleotide
  Sense strand starting at position 1706 of SEQ ID NO: 1880986
ugagaugccuauccucaga

SEQ ID NO: 2009263 - RNA, 19 nt, Artificial Sequence
  Description of Artificial Sequence: Synthetic oligonucleotide
  Antisense strand to SEQ ID NO: 2009262
ucugaggauaggcaucuca

SEQ ID NO: 2009264 - RNA, 19 nt, Artificial Sequence
  Description of Artificial Sequence: Synthetic oligonucleotide
  Sense strand starting at position 1848 of SEQ ID NO: 1880986
ccugucagcccagaauaau

SEQ ID NO: 2009265 - RNA, 19 nt, Artificial Sequence
  Description of Artificial Sequence: Synthetic oligonucleotide
  Antisense strand to SEQ ID NO: 2009264
auuauucugggcugacagg

SEQ ID NO: 2009266 - RNA, 19 nt, Artificial Sequence
  Description of Artificial Sequence: Synthetic oligonucleotide
  Sense strand starting at position 1851 of SEQ ID NO: 1880986
gucagcccagaauaauauu

SEQ ID NO: 2009267 - RNA, 19 nt, Artificial Sequence
  Description of Artificial Sequence: Synthetic oligonucleotide
  Antisense strand to SEQ ID NO: 2009266
aauauuauucugggcugac

SEQ ID NO: 2009268 - RNA, 19 nt, Artificial Sequence
  Description of Artificial Sequence: Synthetic oligonucleotide
  Sense strand starting at position 1965 of SEQ ID NO: 1880986
cucagauagcucuggaauc

SEQ ID NO: 2009269 - RNA, 19 nt, Artificial Sequence
  Description of Artificial Sequence: Synthetic oligonucleotide
  Antisense strand to SEQ ID NO: 2009268
gauuccagagcuaucugag

SEQ ID NO: 2009270 - RNA, 19 nt, Artificial Sequence
  Description of Artificial Sequence: Synthetic oligonucleotide
  Sense strand starting at position 2260 of SEQ ID NO: 1880986
uccuauacuccagauguau

SEQ ID NO: 2009271 - RNA, 19 nt, Artificial Sequence
  Description of Artificial Sequence: Synthetic oligonucleotide
  Antisense strand to SEQ ID NO: 2009270
auacaucuggaguauagga

SEQ ID NO: 2009272 - RNA, 19 nt, Artificial Sequence
  Description of Artificial Sequence: Synthetic oligonucleotide
  Sense strand starting at position 2552 of SEQ ID NO: 1880986
cuggaagaucuaugaguau

SEQ ID NO: 2009273 - RNA, 19 nt, Artificial Sequence
  Description of Artificial Sequence: Synthetic oligonucleotide
  Antisense strand to SEQ ID NO: 2009272
auacucauagaucuuccag

SEQ ID NO: 2009274 - RNA, 19 nt, Artificial Sequence
  Description of Artificial Sequence: Synthetic oligonucleotide
  Sense strand starting at position 2558 of SEQ ID NO: 1880986
gaucuaugaguauggaacu

SEQ ID NO: 2009275 - RNA, 19 nt, Artificial Sequence
  Description of Artificial Sequence: Synthetic oligonucleotide
  Antisense strand to SEQ ID NO: 2009274
aguuccauacucauagauc

SEQ ID NO: 2009276 - RNA, 19 nt, Artificial Sequence
  Description of Artificial Sequence: Synthetic oligonucleotide
  Sense strand starting at position 2646 of SEQ ID NO: 1880986
uuuguuaaaugucugaaca

SEQ ID NO: 2009277 - RNA, 19 nt, Artificial Sequence
  Description of Artificial Sequence: Synthetic oligonucleotide
  Antisense strand to SEQ ID NO: 2009276
uguucagacauuuaacaaa

SEQ ID NO: 2009278 - RNA, 19 nt, Artificial Sequence
  Description of Artificial Sequence: Synthetic oligonucleotide
  Sense strand starting at position 2647 of SEQ ID NO: 1880986
uuguuaaaugucugaacaa

SEQ ID NO: 2009279 - RNA, 19 nt, Artificial Sequence
  Description of Artificial Sequence: Synthetic oligonucleotide
  Antisense strand to SEQ ID NO: 2009278
uuguucagacauuuaacaa

SEQ ID NO: 2009280 - RNA, 19 nt, Artificial Sequence
  Description of Artificial Sequence: Synthetic oligonucleotide
  Sense strand starting at position 2654 of SEQ ID NO: 1880986
augucugaacaaugugaau

SEQ ID NO: 2009281 - RNA, 19 nt, Artificial Sequence
  Description of Artificial Sequence: Synthetic oligonucleotide
  Antisense strand to SEQ ID NO: 2009280
auucacauuguucagacau

SEQ ID NO: 2009282 - RNA, 19 nt, Artificial Sequence
  Description of Artificial Sequence: Synthetic oligonucleotide
  Sense strand starting at position 2682 of SEQ ID NO: 1880986
cagacuuuccauuggcuga

SEQ ID NO: 2009283 - RNA, 19 nt, Artificial Sequence
  Description of Artificial Sequence: Synthetic oligonucleotide
  Antisense strand to SEQ ID NO: 2009282
ucagccaauggaaagucug

SEQ ID NO: 2009284 - RNA, 19 nt, Artificial Sequence
  Description of Artificial Sequence: Synthetic oligonucleotide
  Sense strand starting at position 2899 of SEQ ID NO: 1880986
gggcacaaucuuugacaca

SEQ ID NO: 2009285 - RNA, 19 nt, Artificial Sequence
  Description of Artificial Sequence: Synthetic oligonucleotide
  Antisense strand to SEQ ID NO: 2009284
ugugucaaagauugugccc

SEQ ID NO: 2009286 - RNA, 19 nt, Artificial Sequence
  Description of Artificial Sequence: Synthetic oligonucleotide
  Sense strand starting at position 3086 of SEQ ID NO: 1880986
guauuccaagggcauuaaa

SEQ ID NO: 2009287 - RNA, 19 nt, Artificial Sequence
  Description of Artificial Sequence: Synthetic oligonucleotide
  Antisense strand to SEQ ID NO: 2009286
uuuaaugcccuuggaauac

SEQ ID NO: 2009288 - RNA, 19 nt, Artificial Sequence
  Description of Artificial Sequence: Synthetic oligonucleotide
  Sense strand starting at position 3155 of SEQ ID NO: 1880986
uuagcaggaguuuaaauau

SEQ ID NO: 2009289 - RNA, 19 nt, Artificial Sequence
  Description of Artificial Sequence: Synthetic oligonucleotide
  Antisense strand to SEQ ID NO: 2009288
auauuuaaacuccugcuaa

SEQ ID NO: 2009290 - RNA, 19 nt, Artificial Sequence
  Description of Artificial Sequence: Synthetic oligonucleotide
  Sense strand starting at position 3219 of SEQ ID NO: 1880986
ggucguggugcacugugaa

SEQ ID NO: 2009291 - RNA, 19 nt, Artificial Sequence
  Description of Artificial Sequence: Synthetic oligonucleotide
  Antisense strand to SEQ ID NO: 2009290
uucacagugcaccacgacc

SEQ ID NO: 2009292 - RNA, 19 nt, Artificial Sequence
  Description of Artificial Sequence: Synthetic oligonucleotide
  Sense strand starting at position 3232 of SEQ ID NO: 1880986
ugugaaguacagcacuuau

SEQ ID NO: 2009293 - RNA, 19 nt, Artificial Sequence
  Description of Artificial Sequence: Synthetic oligonucleotide
  Antisense strand to SEQ ID NO: 2009292
auaagugcuguacuucaca

SEQ ID NO: 2009294 - RNA, 19 nt, Artificial Sequence
  Description of Artificial Sequence: Synthetic oligonucleotide
  Sense strand starting at position 3307 of SEQ ID NO: 1880986
auuaauaagccaugugaca

SEQ ID NO: 2009295 - RNA, 19 nt, Artificial Sequence
  Description of Artificial Sequence: Synthetic oligonucleotide
  Antisense strand to SEQ ID NO: 2009294
ugucacauggcuuauuaau

SEQ ID NO: 2009296 - RNA, 19 nt, Artificial Sequence
  Description of Artificial Sequence: Synthetic oligonucleotide
  Sense strand starting at position 3607 of SEQ ID NO: 1880986
gguucaacucgucugugca

SEQ ID NO: 2009297 - RNA, 19 nt, Artificial Sequence
  Description of Artificial Sequence: Synthetic oligonucleotide
  Antisense strand to SEQ ID NO: 2009296
ugcacagacgaguugaacc

SEQ ID NO: 2009298 - RNA, 19 nt, Artificial Sequence
  Description of Artificial Sequence: Synthetic oligonucleotide
  Sense strand starting at position 44 of SEQ ID NO: 1880988
gucuuaaauagagggucua

SEQ ID NO: 2009299 - RNA, 19 nt, Artificial Sequence
  Description of Artificial Sequence: Synthetic oligonucleotide
  Antisense strand to SEQ ID NO: 2009298
uagacccucuauuuaagac

SEQ ID NO: 2009300 - RNA, 19 nt, Artificial Sequence
  Description of Artificial Sequence: Synthetic oligonucleotide
  Sense strand starting at position 45 of SEQ ID NO: 1880988
ucuuaaauagagggucuaa

SEQ ID NO: 2009301 - RNA, 19 nt, Artificial Sequence
  Description of Artificial Sequence: Synthetic oligonucleotide
  Antisense strand to SEQ ID NO: 2009300
uuagacccucuauuuaaga

SEQ ID NO: 2009302 - RNA, 19 nt, Artificial Sequence
  Description of Artificial Sequence: Synthetic oligonucleotide
  Sense strand starting at position 231 of SEQ ID NO: 1880988
ugaggacccugguugaauu

SEQ ID NO: 2009303 - RNA, 19 nt, Artificial Sequence
  Description of Artificial Sequence: Synthetic oligonucleotide
  Antisense strand to SEQ ID NO: 2009302
aauucaaccaggguccuca

SEQ ID NO: 2009304 - RNA, 19 nt, Artificial Sequence
  Description of Artificial Sequence: Synthetic oligonucleotide
  Sense strand starting at position 274 of SEQ ID NO: 1880988
gcaucaaacuguuaguauu

SEQ ID NO: 2009305 - RNA, 19 nt, Artificial Sequence
  Description of Artificial Sequence: Synthetic oligonucleotide
  Antisense strand to SEQ ID NO: 2009304
aauacuaacaguuugaugc

SEQ ID NO: 2009306 - RNA, 19 nt, Artificial Sequence
  Description of Artificial Sequence: Synthetic oligonucleotide
  Sense strand starting at position 282 of SEQ ID NO: 1880988
cuguuaguauuguccagaa

SEQ ID NO: 2009307 - RNA, 19 nt, Artificial Sequence
  Description of Artificial Sequence: Synthetic oligonucleotide
  Antisense strand to SEQ ID NO: 2009306
uucuggacaauacuaacag

SEQ ID NO: 2009308 - RNA, 19 nt, Artificial Sequence
  Description of Artificial Sequence: Synthetic oligonucleotide
  Sense strand starting at position 474 of SEQ ID NO: 1880988
ucagaugucuccucucauc

SEQ ID NO: 2009309 - RNA, 19 nt, Artificial Sequence
  Description of Artificial Sequence: Synthetic oligonucleotide
  Antisense strand to SEQ ID NO: 2009308
gaugagaggagacaucuga

SEQ ID NO: 2009310 - RNA, 19 nt, Artificial Sequence
  Description of Artificial Sequence: Synthetic oligonucleotide
  Sense strand starting at position 503 of SEQ ID NO: 1880988
gcuccuuuagccugcaaga

SEQ ID NO: 2009311 - RNA, 19 nt, Artificial Sequence
  Description of Artificial Sequence: Synthetic oligonucleotide
  Antisense strand to SEQ ID NO: 2009310
ucuugcaggcuaaaggagc

SEQ ID NO: 2009312 - RNA, 19 nt, Artificial Sequence
  Description of Artificial Sequence: Synthetic oligonucleotide
  Sense strand starting at position 621 of SEQ ID NO: 1880988
gagcuugagaccgagaguu

SEQ ID NO: 2009313 - RNA, 19 nt, Artificial Sequence
  Description of Artificial Sequence: Synthetic oligonucleotide
  Antisense strand to SEQ ID NO: 2009312
aacucucggucucaagcuc

SEQ ID NO: 2009314 - RNA, 19 nt, Artificial Sequence
  Description of Artificial Sequence: Synthetic oligonucleotide
  Sense strand starting at position 623 of SEQ ID NO: 1880988
gcuugagaccgagaguuug

SEQ ID NO: 2009315 - RNA, 19 nt, Artificial Sequence
  Description of Artificial Sequence: Synthetic oligonucleotide
  Antisense strand to SEQ ID NO: 2009314
caaacucucggucucaagc

SEQ ID NO: 2009316 - RNA, 19 nt, Artificial Sequence
  Description of Artificial Sequence: Synthetic oligonucleotide
  Sense strand starting at position 1307 of SEQ ID NO: 1880988
gugacauccugucucucaa

SEQ ID NO: 2009317 - RNA, 19 nt, Artificial Sequence
  Description of Artificial Sequence: Synthetic oligonucleotide
  Antisense strand to SEQ ID NO: 2009316
uugagagacaggaugucac

SEQ ID NO: 2009318 - RNA, 19 nt, Artificial Sequence
  Description of Artificial Sequence: Synthetic oligonucleotide
  Sense strand starting at position 1506 of SEQ ID NO: 1880988
gucgccaaucaagauuaau

SEQ ID NO: 2009319 - RNA, 19 nt, Artificial Sequence
  Description of Artificial Sequence: Synthetic oligonucleotide
  Antisense strand to SEQ ID NO: 2009318
auuaaucuugauuggcgac

SEQ ID NO: 2009320 - RNA, 19 nt, Artificial Sequence
  Description of Artificial Sequence: Synthetic oligonucleotide
  Sense strand starting at position 1675 of SEQ ID NO: 1880988
gcaagcaucugucuacuca

SEQ ID NO: 2009321 - RNA, 19 nt, Artificial Sequence
  Description of Artificial Sequence: Synthetic oligonucleotide
  Antisense strand to SEQ ID NO: 2009320
ugaguagacagaugcuugc

SEQ ID NO: 2009322 - RNA, 19 nt, Artificial Sequence
  Description of Artificial Sequence: Synthetic oligonucleotide
  Sense strand starting at position 1734 of SEQ ID NO: 1880988
guguguccgucgcuagaag

SEQ ID NO: 2009323 - RNA, 19 nt, Artificial Sequence
  Description of Artificial Sequence: Synthetic oligonucleotide
  Antisense strand to SEQ ID NO: 2009322
cuucuagcgacggacacac

SEQ ID NO: 2009324 - RNA, 19 nt, Artificial Sequence
  Description of Artificial Sequence: Synthetic oligonucleotide
  Sense strand starting at position 2043 of SEQ ID NO: 1880988
caaagagcuggcuguaauc

SEQ ID NO: 2009325 - RNA, 19 nt, Artificial Sequence
  Description of Artificial Sequence: Synthetic oligonucleotide
  Antisense strand to SEQ ID NO: 2009324
gauuacagccagcucuuug

SEQ ID NO: 2009326 - RNA, 19 nt, Artificial Sequence
  Description of Artificial Sequence: Synthetic oligonucleotide
  Sense strand starting at position 2284 of SEQ ID NO: 1880988
cccugagacguucagcgaa

SEQ ID NO: 2009327 - RNA, 19 nt, Artificial Sequence
  Description of Artificial Sequence: Synthetic oligonucleotide
  Antisense strand to SEQ ID NO: 2009326
uucgcugaacgucucaggg

SEQ ID NO: 2009328 - RNA, 19 nt, Artificial Sequence
  Description of Artificial Sequence: Synthetic oligonucleotide
  Sense strand starting at position 2286 of SEQ ID NO: 1880988
cugagacguucagcgaaga

SEQ ID NO: 2009329 - RNA, 19 nt, Artificial Sequence
  Description of Artificial Sequence: Synthetic oligonucleotide
  Antisense strand to SEQ ID NO: 2009328
ucuucgcugaacgucucag

SEQ ID NO: 2009330 - RNA, 19 nt, Artificial Sequence
  Description of Artificial Sequence: Synthetic oligonucleotide
  Sense strand starting at position 2301 of SEQ ID NO: 1880988
aagaguaccucuggaaggu

SEQ ID NO: 2009331 - RNA, 19 nt, Artificial Sequence
  Description of Artificial Sequence: Synthetic oligonucleotide
  Antisense strand to SEQ ID NO: 2009330
accuuccagagguacucuu

SEQ ID NO: 2009332 - RNA, 19 nt, Artificial Sequence
  Description of Artificial Sequence: Synthetic oligonucleotide
  Sense strand starting at position 2508 of SEQ ID NO: 1880988
gaggguuucucgucuccag

SEQ ID NO: 2009333 - RNA, 19 nt, Artificial Sequence
  Description of Artificial Sequence: Synthetic oligonucleotide
  Antisense strand to SEQ ID NO: 2009332
cuggagacgagaaacccuc

SEQ ID NO: 2009334 - RNA, 19 nt, Artificial Sequence
  Description of Artificial Sequence: Synthetic oligonucleotide
  Sense strand starting at position 2575 of SEQ ID NO: 1880988
cgucgugccugauuucuaa

SEQ ID NO: 2009335 - RNA, 19 nt, Artificial Sequence
  Description of Artificial Sequence: Synthetic oligonucleotide
  Antisense strand to SEQ ID NO: 2009334
uuagaaaucaggcacgacg

SEQ ID NO: 2009336 - RNA, 19 nt, Artificial Sequence
  Description of Artificial Sequence: Synthetic oligonucleotide
  Sense strand starting at position 2578 of SEQ ID NO: 1880988
cgugccugauuucuaaaug

SEQ ID NO: 2009337 - RNA, 19 nt, Artificial Sequence
  Description of Artificial Sequence: Synthetic oligonucleotide
  Antisense strand to SEQ ID NO: 2009336
cauuuagaaaucaggcacg

SEQ ID NO: 2009338 - RNA, 19 nt, Artificial Sequence
  Description of Artificial Sequence: Synthetic oligonucleotide
  Sense strand starting at position 2674 of SEQ ID NO: 1880988
aggcacgauuuaggauaua

SEQ ID NO: 2009339 - RNA, 19 nt, Artificial Sequence
  Description of Artificial Sequence: Synthetic oligonucleotide
  Antisense strand to SEQ ID NO: 2009338
uauauccuaaaucgugccu

SEQ ID NO: 2009340 - RNA, 19 nt, Artificial Sequence
  Description of Artificial Sequence: Synthetic oligonucleotide
  Sense strand starting at position 2683 of SEQ ID NO: 1880988
uuaggauauaggcgaaaca

SEQ ID NO: 2009341 - RNA, 19 nt, Artificial Sequence
  Description of Artificial Sequence: Synthetic oligonucleotide
  Antisense strand to SEQ ID NO: 2009340
uguuucgccuauauccuaa

SEQ ID NO: 2009342 - RNA, 19 nt, Artificial Sequence
  Description of Artificial Sequence: Synthetic oligonucleotide
  Sense strand starting at position 2875 of SEQ ID NO: 1880988
cagcuaaucuggcgucuca

SEQ ID NO: 2009343 - RNA, 19 nt, Artificial Sequence
  Description of Artificial Sequence: Synthetic oligonucleotide
  Antisense strand to SEQ ID NO: 2009342
ugagacgccagauuagcug

SEQ ID NO: 2009344 - RNA, 19 nt, Artificial Sequence
  Description of Artificial Sequence: Synthetic oligonucleotide
  Sense strand starting at position 2877 of SEQ ID NO: 1880988
gcuaaucuggcgucucacu

SEQ ID NO: 2009345 - RNA, 19 nt, Artificial Sequence
  Description of Artificial Sequence: Synthetic oligonucleotide
  Antisense strand to SEQ ID NO: 2009344
agugagacgccagauuagc

SEQ ID NO: 2009346 - RNA, 19 nt, Artificial Sequence
  Description of Artificial Sequence: Synthetic oligonucleotide
  Sense strand starting at position 3100 of SEQ ID NO: 1880988
agagaagugccuuaagggu

SEQ ID NO: 2009347 - RNA, 19 nt, Artificial Sequence
  Description of Artificial Sequence: Synthetic oligonucleotide
  Antisense strand to SEQ ID NO: 2009346
acccuuaaggcacuucucu

SEQ ID NO: 2009348 - RNA, 19 nt, Artificial Sequence
  Description of Artificial Sequence: Synthetic oligonucleotide
  Sense strand starting at position 3109 of SEQ ID NO: 1880988
ccuuaagggugcuguacua

SEQ ID NO: 2009349 - RNA, 19 nt, Artificial Sequence
  Description of Artificial Sequence: Synthetic oligonucleotide
  Antisense strand to SEQ ID NO: 2009348
uaguacagcacccuuaagg

SEQ ID NO: 2009350 - RNA, 19 nt, Artificial Sequence
  Description of Artificial Sequence: Synthetic oligonucleotide
  Sense strand starting at position 3221 of SEQ ID NO: 1880988
agagaagucuucuagagua

SEQ ID NO: 2009351 - RNA, 19 nt, Artificial Sequence
  Description of Artificial Sequence: Synthetic oligonucleotide
  Antisense strand to SEQ ID NO: 2009350
uacucuagaagacuucucu

SEQ ID NO: 2009352 - RNA, 19 nt, Artificial Sequence
  Description of Artificial Sequence: Synthetic oligonucleotide
  Sense strand starting at position 3226 of SEQ ID NO: 1880988
agucuucuagaguaggcuu

SEQ ID NO: 2009353 - RNA, 19 nt, Artificial Sequence
  Description of Artificial Sequence: Synthetic oligonucleotide
  Antisense strand to SEQ ID NO: 2009352
aagccuacucuagaagacu

SEQ ID NO: 2009354 - RNA, 19 nt, Artificial Sequence
  Description of Artificial Sequence: Synthetic oligonucleotide
  Sense strand starting at position 3234 of SEQ ID NO: 1880988
agaguaggcuucucaagcu

SEQ ID NO: 2009355 - RNA, 19 nt, Artificial Sequence
  Description of Artificial Sequence: Synthetic oligonucleotide
  Antisense strand to SEQ ID NO: 2009354
agcuugagaagccuacucu

SEQ ID NO: 2009356 - RNA, 19 nt, Artificial Sequence
  Description of Artificial Sequence: Synthetic oligonucleotide
  Sense strand starting at position 3248 of SEQ ID NO: 1880988
aagcucuaguguugacauu

SEQ ID NO: 2009357 - RNA, 19 nt, Artificial Sequence
  Description of Artificial Sequence: Synthetic oligonucleotide
  Antisense strand to SEQ ID NO: 2009356
aaugucaacacuagagcuu

SEQ ID NO: 2009358 - RNA, 19 nt, Artificial Sequence
  Description of Artificial Sequence: Synthetic oligonucleotide
  Sense strand starting at position 3307 of SEQ ID NO: 1880988
uccugugaauuacaggaua

SEQ ID NO: 2009359 - RNA, 19 nt, Artificial Sequence
  Description of Artificial Sequence: Synthetic oligonucleotide
  Antisense strand to SEQ ID NO: 2009358
uauccuguaauucacagga

SEQ ID NO: 2009360 - RNA, 19 nt, Artificial Sequence
  Description of Artificial Sequence: Synthetic oligonucleotide
  Sense strand starting at position 3368 of SEQ ID NO: 1880988
cacacauccuugcgaugau

SEQ ID NO: 2009361 - RNA, 19 nt, Artificial Sequence
  Description of Artificial Sequence: Synthetic oligonucleotide
  Antisense strand to SEQ ID NO: 2009360
aucaucgcaaggaugugug

SEQ ID NO: 2009362 - RNA, 19 nt, Artificial Sequence
  Description of Artificial Sequence: Synthetic oligonucleotide
  Sense strand starting at position 3371 of SEQ ID NO: 1880988
acauccuugcgaugaucaa

SEQ ID NO: 2009363 - RNA, 19 nt, Artificial Sequence
  Description of Artificial Sequence: Synthetic oligonucleotide
  Antisense strand to SEQ ID NO: 2009362
uugaucaucgcaaggaugu

SEQ ID NO: 2009364 - RNA, 19 nt, Artificial Sequence
  Description of Artificial Sequence: Synthetic oligonucleotide
  Sense strand starting at position 3711 of SEQ ID NO: 1880988
cagacauugccauguguuc

SEQ ID NO: 2009365 - RNA, 19 nt, Artificial Sequence
  Description of Artificial Sequence: Synthetic oligonucleotide
  Antisense strand to SEQ ID NO: 2009364
gaacacauggcaaugucug

SEQ ID NO: 2009366 - RNA, 19 nt, Artificial Sequence
  Description of Artificial Sequence: Synthetic oligonucleotide
  Sense strand starting at position 3827 of SEQ ID NO: 1880988
aaagacaugucugaaauga

SEQ ID NO: 2009367 - RNA, 19 nt, Artificial Sequence
  Description of Artificial Sequence: Synthetic oligonucleotide
  Antisense strand to SEQ ID NO: 2009366
ucauuucagacaugucuuu

SEQ ID NO: 2009368 - RNA, 19 nt, Artificial Sequence
  Description of Artificial Sequence: Synthetic oligonucleotide
  Sense strand starting at position 3911 of SEQ ID NO: 1880988
ggauaaacauguuaggaag

SEQ ID NO: 2009369 - RNA, 19 nt, Artificial Sequence
  Description of Artificial Sequence: Synthetic oligonucleotide
  Antisense strand to SEQ ID NO: 2009368
cuuccuaacauguuuaucc

SEQ ID NO: 2009370 - RNA, 19 nt, Artificial Sequence
  Description of Artificial Sequence: Synthetic oligonucleotide
  Sense strand starting at position 3913 of SEQ ID NO: 1880988
auaaacauguuaggaagua

SEQ ID NO: 2009371 - RNA, 19 nt, Artificial Sequence
  Description of Artificial Sequence: Synthetic oligonucleotide
  Antisense strand to SEQ ID NO: 2009370
uacuuccuaacauguuuau

SEQ ID NO: 2009372 - RNA, 19 nt, Artificial Sequence
  Description of Artificial Sequence: Synthetic oligonucleotide
  Sense strand starting at position 3918 of SEQ ID NO: 1880988
cauguuaggaaguagagua

SEQ ID NO: 2009373 - RNA, 19 nt, Artificial Sequence
  Description of Artificial Sequence: Synthetic oligonucleotide
  Antisense strand to SEQ ID NO: 2009372
uacucuacuuccuaacaug

SEQ ID NO: 2009374 - RNA, 19 nt, Artificial Sequence
  Description of Artificial Sequence: Synthetic oligonucleotide
  Sense strand starting at position 63 of SEQ ID NO: 1880987
ucagaugucuccucucauc

SEQ ID NO: 2009375 - RNA, 19 nt, Artificial Sequence
  Description of Artificial Sequence: Synthetic oligonucleotide
  Antisense strand to SEQ ID NO: 2009374
gaugagaggagacaucuga

SEQ ID NO: 2009376 - RNA, 19 nt, Artificial Sequence
  Description of Artificial Sequence: Synthetic oligonucleotide
  Sense strand starting at position 92 of SEQ ID NO: 1880987
gcuccuuuagccugcaaga

SEQ ID NO: 2009377 - RNA, 19 nt, Artificial Sequence
  Description of Artificial Sequence: Synthetic oligonucleotide
  Antisense strand to SEQ ID NO: 2009376
ucuugcaggcuaaaggagc

SEQ ID NO: 2009378 - RNA, 19 nt, Artificial Sequence
  Description of Artificial Sequence: Synthetic oligonucleotide
  Sense strand starting at position 210 of SEQ ID NO: 1880987
gagcuugagaccgagaguu

SEQ ID NO: 2009379 - RNA, 19 nt, Artificial Sequence
  Description of Artificial Sequence: Synthetic oligonucleotide
  Antisense strand to SEQ ID NO: 2009378
aacucucggucucaagcuc

SEQ ID NO: 2009380 - RNA, 19 nt, Artificial Sequence
  Description of Artificial Sequence: Synthetic oligonucleotide
  Sense strand starting at position 212 of SEQ ID NO: 1880987
gcuugagaccgagaguuug

SEQ ID NO: 2009381 - RNA, 19 nt, Artificial Sequence
  Description of Artificial Sequence: Synthetic oligonucleotide
  Antisense strand to SEQ ID NO: 2009380
caaacucucggucucaagc

SEQ ID NO: 2009382 - RNA, 19 nt, Artificial Sequence
  Description of Artificial Sequence: Synthetic oligonucleotide
  Sense strand starting at position 896 of SEQ ID NO: 1880987
gugacauccugucucucaa

SEQ ID NO: 2009383 - RNA, 19 nt, Artificial Sequence
  Description of Artificial Sequence: Synthetic oligonucleotide
  Antisense strand to SEQ ID NO: 2009382
uugagagacaggaugucac

SEQ ID NO: 2009384 - RNA, 19 nt, Artificial Sequence
  Description of Artificial Sequence: Synthetic oligonucleotide
  Sense strand starting at position 1095 of SEQ ID NO: 1880987
gucgccaaucaagauuaau

SEQ ID NO: 2009385 - RNA, 19 nt, Artificial Sequence
  Description of Artificial Sequence: Synthetic oligonucleotide
  Antisense strand to SEQ ID NO: 2009384
auuaaucuugauuggcgac

SEQ ID NO: 2009386 - RNA, 19 nt, Artificial Sequence
  Description of Artificial Sequence: Synthetic oligonucleotide
  Sense strand starting at position 1264 of SEQ ID NO: 1880987
gcaagcaucugucuacuca

SEQ ID NO: 2009387 - RNA, 19 nt, Artificial Sequence
  Description of Artificial Sequence: Synthetic oligonucleotide
  Antisense strand to SEQ ID NO: 2009386
ugaguagacagaugcuugc

SEQ ID NO: 2009388 - RNA, 19 nt, Artificial Sequence
  Description of Artificial Sequence: Synthetic oligonucleotide
  Sense strand starting at position 1632 of SEQ ID NO: 1880987
caaagagcuggcuguaauc

SEQ ID NO: 2009389 - RNA, 19 nt, Artificial Sequence
  Description of Artificial Sequence: Synthetic oligonucleotide
  Antisense strand to SEQ ID NO: 2009388
gauuacagccagcucuuug

SEQ ID NO: 2009390 - RNA, 19 nt, Artificial Sequence
  Description of Artificial Sequence: Synthetic oligonucleotide
  Sense strand starting at position 1873 of SEQ ID NO: 1880987
cccugagacguucagcgaa

SEQ ID NO: 2009391 - RNA, 19 nt, Artificial Sequence
  Description of Artificial Sequence: Synthetic oligonucleotide
  Antisense strand to SEQ ID NO: 2009390
uucgcugaacgucucaggg

SEQ ID NO: 2009392 - RNA, 19 nt, Artificial Sequence
  Description of Artificial Sequence: Synthetic oligonucleotide
  Sense strand starting at position 1875 of SEQ ID NO: 1880987
cugagacguucagcgaaga

SEQ ID NO: 2009393 - RNA, 19 nt, Artificial Sequence
  Description of Artificial Sequence: Synthetic oligonucleotide
  Antisense strand to SEQ ID NO: 2009392
ucuucgcugaacgucucag

SEQ ID NO: 2009394 - RNA, 19 nt, Artificial Sequence
  Description of Artificial Sequence: Synthetic oligonucleotide
  Sense strand starting at position 2097 of SEQ ID NO: 1880987
gaggguuucucgucuccag

SEQ ID NO: 2009395 - RNA, 19 nt, Artificial Sequence
  Description of Artificial Sequence: Synthetic oligonucleotide
  Antisense strand to SEQ ID NO: 2009394
cuggagacgagaaacccuc

SEQ ID NO: 2009396 - RNA, 19 nt, Artificial Sequence
  Description of Artificial Sequence: Synthetic oligonucleotide
  Sense strand starting at position 2164 of SEQ ID NO: 1880987
cgucgugccugauuucuaa

SEQ ID NO: 2009397 - RNA, 19 nt, Artificial Sequence
  Description of Artificial Sequence: Synthetic oligonucleotide
  Antisense strand to SEQ ID NO: 2009396
uuagaaaucaggcacgacg

SEQ ID NO: 2009398 - RNA, 19 nt, Artificial Sequence
  Description of Artificial Sequence: Synthetic oligonucleotide
  Sense strand starting at position 2167 of SEQ ID NO: 1880987
cgugccugauuucuaaaug

SEQ ID NO: 2009399 - RNA, 19 nt, Artificial Sequence
  Description of Artificial Sequence: Synthetic oligonucleotide
  Antisense strand to SEQ ID NO: 2009398
cauuuagaaaucaggcacg

SEQ ID NO: 2009400 - RNA, 19 nt, Artificial Sequence
  Description of Artificial Sequence: Synthetic oligonucleotide
  Sense strand starting at position 2263 of SEQ ID NO: 1880987
aggcacgauuuaggauaua

SEQ ID NO: 2009401 - RNA, 19 nt, Artificial Sequence
  Description of Artificial Sequence: Synthetic oligonucleotide
  Antisense strand to SEQ ID NO: 2009400
uauauccuaaaucgugccu

SEQ ID NO: 2009402 - RNA, 19 nt, Artificial Sequence
  Description of Artificial Sequence: Synthetic oligonucleotide
  Sense strand starting at position 2272 of SEQ ID NO: 1880987
uuaggauauaggcgaaaca

SEQ ID NO: 2009403 - RNA, 19 nt, Artificial Sequence
  Description of Artificial Sequence: Synthetic oligonucleotide
  Antisense strand to SEQ ID NO: 2009402
uguuucgccuauauccuaa

SEQ ID NO: 2009404 - RNA, 19 nt, Artificial Sequence
  Description of Artificial Sequence: Synthetic oligonucleotide
  Sense strand starting at position 2466 of SEQ ID NO: 1880987
gcuaaucuggcgucucacu

SEQ ID NO: 2009405 - RNA, 19 nt, Artificial Sequence
  Description of Artificial Sequence: Synthetic oligonucleotide
  Antisense strand to SEQ ID NO: 2009404
agugagacgccagauuagc

SEQ ID NO: 2009406 - RNA, 19 nt, Artificial Sequence
  Description of Artificial Sequence: Synthetic oligonucleotide
  Sense strand starting at position 2689 of SEQ ID NO: 1880987
agagaagugccuuaagggu

SEQ ID NO: 2009407 - RNA, 19 nt, Artificial Sequence
  Description of Artificial Sequence: Synthetic oligonucleotide
  Antisense strand to SEQ ID NO: 2009406
acccuuaaggcacuucucu

SEQ ID NO: 2009408 - RNA, 19 nt, Artificial Sequence
  Description of Artificial Sequence: Synthetic oligonucleotide
  Sense strand starting at position 2815 of SEQ ID NO: 1880987
agucuucuagaguaggcuu

SEQ ID NO: 2009409 - RNA, 19 nt, Artificial Sequence
  Description of Artificial Sequence: Synthetic oligonucleotide
  Antisense strand to SEQ ID NO: 2009408
aagccuacucuagaagacu

SEQ ID NO: 2009410 - RNA, 19 nt, Artificial Sequence
  Description of Artificial Sequence: Synthetic oligonucleotide
  Sense strand starting at position 2823 of SEQ ID NO: 1880987
agaguaggcuucucaagcu

SEQ ID NO: 2009411 - RNA, 19 nt, Artificial Sequence
  Description of Artificial Sequence: Synthetic oligonucleotide
  Antisense strand to SEQ ID NO: 2009410
agcuugagaagccuacucu

SEQ ID NO: 2009412 - RNA, 19 nt, Artificial Sequence
  Description of Artificial Sequence: Synthetic oligonucleotide
  Sense strand starting at position 2896 of SEQ ID NO: 1880987
uccugugaauuacaggaua

SEQ ID NO: 2009413 - RNA, 19 nt, Artificial Sequence
  Description of Artificial Sequence: Synthetic oligonucleotide
  Antisense strand to SEQ ID NO: 2009412
uauccuguaauucacagga

SEQ ID NO: 2009414 - RNA, 19 nt, Artificial Sequence
  Description of Artificial Sequence: Synthetic oligonucleotide
  Sense strand starting at position 2960 of SEQ ID NO: 1880987
acauccuugcgaugaucaa

SEQ ID NO: 2009415 - RNA, 19 nt, Artificial Sequence
  Description of Artificial Sequence: Synthetic oligonucleotide
  Antisense strand to SEQ ID NO: 2009414
uugaucaucgcaaggaugu

SEQ ID NO: 2009416 - RNA, 19 nt, Artificial Sequence
  Description of Artificial Sequence: Synthetic oligonucleotide
  Sense strand starting at position 3300 of SEQ ID NO: 1880987
cagacauugccauguguuc

SEQ ID NO: 2009417 - RNA, 19 nt, Artificial Sequence
  Description of Artificial Sequence: Synthetic oligonucleotide
  Antisense strand to SEQ ID NO: 2009416
gaacacauggcaaugucug

SEQ ID NO: 2009418 - RNA, 19 nt, Artificial Sequence
  Description of Artificial Sequence: Synthetic oligonucleotide
  Sense strand starting at position 3416 of SEQ ID NO: 1880987
aaagacaugucugaaauga

SEQ ID NO: 2009419 - RNA, 19 nt, Artificial Sequence
  Description of Artificial Sequence: Synthetic oligonucleotide
  Antisense strand to SEQ ID NO: 2009418
ucauuucagacaugucuuu

SEQ ID NO: 2009420 - RNA, 19 nt, Artificial Sequence
  Description of Artificial Sequence: Synthetic oligonucleotide
  Sense strand starting at position 3500 of SEQ ID NO: 1880987
ggauaaacauguuaggaag

SEQ ID NO: 2009421 - RNA, 19 nt, Artificial Sequence
  Description of Artificial Sequence: Synthetic oligonucleotide
  Antisense strand to SEQ ID NO: 2009420
cuuccuaacauguuuaucc

SEQ ID NO: 2009422 - RNA, 19 nt, Artificial Sequence
  Description of Artificial Sequence: Synthetic oligonucleotide
  Sense strand starting at position 3507 of SEQ ID NO: 1880987
cauguuaggaaguagagua

SEQ ID NO: 2009423 - RNA, 19 nt, Artificial Sequence
  Description of Artificial Sequence: Synthetic oligonucleotide
  Antisense strand to SEQ ID NO: 2009422
uacucuacuuccuaacaug

SEQ ID NO: 2009424 - RNA, 19 nt, Artificial Sequence
  Description of Artificial Sequence: Synthetic oligonucleotide
  Sense strand starting at position 3602 of SEQ ID NO: 1880987
agauaaagguucccacuua

SEQ ID NO: 2009425 - RNA, 19 nt, Artificial Sequence
  Description of Artificial Sequence: Synthetic oligonucleotide
  Antisense strand to SEQ ID NO: 2009424
uaagugggaaccuuuaucu

SEQ ID NO: 2009426 - RNA, 19 nt, Artificial Sequence
  Description of Artificial Sequence: Synthetic oligonucleotide
  Sense strand starting at position 3631 of SEQ ID NO: 1880987
auuaccuagcucuagagau

SEQ ID NO: 2009427 - RNA, 19 nt, Artificial Sequence
  Description of Artificial Sequence: Synthetic oligonucleotide
  Antisense strand to SEQ ID NO: 2009426
aucucuagagcuagguaau

SEQ ID NO: 2009428 - RNA, 19 nt, Artificial Sequence
  Description of Artificial Sequence: Synthetic oligonucleotide
  Sense strand starting at position 3690 of SEQ ID NO: 1880987
auaugccaugugugcaauu

SEQ ID NO: 2009429 - RNA, 19 nt, Artificial Sequence
  Description of Artificial Sequence: Synthetic oligonucleotide
  Antisense strand to SEQ ID NO: 2009428
aauugcacacauggcauau

SEQ ID NO: 2009430 - RNA, 19 nt, Artificial Sequence
  Description of Artificial Sequence: Synthetic oligonucleotide
  Sense strand starting at position 3702 of SEQ ID NO: 1880987
ugcaauuguaagugcuuga

SEQ ID NO: 2009431 - RNA, 19 nt, Artificial Sequence
  Description of Artificial Sequence: Synthetic oligonucleotide
  Antisense strand to SEQ ID NO: 2009430
ucaagcacuuacaauugca

SEQ ID NO: 2009432 - RNA, 19 nt, Artificial Sequence
  Description of Artificial Sequence: Synthetic oligonucleotide
  Sense strand starting at position 3705 of SEQ ID NO: 1880987
aauuguaagugcuugagaa

SEQ ID NO: 2009433 - RNA, 19 nt, Artificial Sequence
  Description of Artificial Sequence: Synthetic oligonucleotide
  Antisense strand to SEQ ID NO: 2009432
uucucaagcacuuacaauu

SEQ ID NO: 2009434 - RNA, 19 nt, Artificial Sequence
  Description of Artificial Sequence: Synthetic oligonucleotide
  Sense strand starting at position 3706 of SEQ ID NO: 1880987
auuguaagugcuugagaau

SEQ ID NO: 2009435 - RNA, 19 nt, Artificial Sequence
  Description of Artificial Sequence: Synthetic oligonucleotide
  Antisense strand to SEQ ID NO: 2009434
auucucaagcacuuacaau

SEQ ID NO: 2009436 - RNA, 19 nt, Artificial Sequence
  Description of Artificial Sequence: Synthetic oligonucleotide
  Sense strand starting at position 3707 of SEQ ID NO: 1880987
uuguaagugcuugagaauu

SEQ ID NO: 2009437 - RNA, 19 nt, Artificial Sequence
  Description of Artificial Sequence: Synthetic oligonucleotide
  Antisense strand to SEQ ID NO: 2009436
aauucucaagcacuuacaa

SEQ ID NO: 2009438 - RNA, 19 nt, Artificial Sequence
  Description of Artificial Sequence: Synthetic oligonucleotide
  Sense strand starting at position 3856 of SEQ ID NO: 1880987
gcacuuuaacuauaguaag

SEQ ID NO: 2009439 - RNA, 19 nt, Artificial Sequence
  Description of Artificial Sequence: Synthetic oligonucleotide
  Antisense strand to SEQ ID NO: 2009438
cuuacuauaguuaaagugc

SEQ ID NO: 2009440 - RNA, 19 nt, Artificial Sequence
  Description of Artificial Sequence: Synthetic oligonucleotide
  Sense strand starting at position 3859 of SEQ ID NO: 1880987
cuuuaacuauaguaagaag

SEQ ID NO: 2009441 - RNA, 19 nt, Artificial Sequence
  Description of Artificial Sequence: Synthetic oligonucleotide
  Antisense strand to SEQ ID NO: 2009440
cuucuuacuauaguuaaag

SEQ ID NO: 2009442 - RNA, 19 nt, Artificial Sequence
  Description of Artificial Sequence: Synthetic oligonucleotide
  Sense strand starting at position 3870 of SEQ ID NO: 1880987
guaagaagauaccagugaa

SEQ ID NO: 2009443 - RNA, 19 nt, Artificial Sequence
  Description of Artificial Sequence: Synthetic oligonucleotide
  Antisense strand to SEQ ID NO: 2009442
uucacugguaucuucuuac

SEQ ID NO: 2009444 - RNA, 19 nt, Artificial Sequence
  Description of Artificial Sequence: Synthetic oligonucleotide
  Sense strand starting at position 3895 of SEQ ID NO: 1880987
ucuggaacaucuuuguaaa

SEQ ID NO: 2009445 - RNA, 19 nt, Artificial Sequence
  Description of Artificial Sequence: Synthetic oligonucleotide
  Antisense strand to SEQ ID NO: 2009444
uuuacaaagauguuccaga

SEQ ID NO: 2009446 - RNA, 19 nt, Artificial Sequence
  Description of Artificial Sequence: Synthetic oligonucleotide
  Sense strand starting at position 3896 of SEQ ID NO: 1880987
cuggaacaucuuuguaaau

SEQ ID NO: 2009447 - RNA, 19 nt, Artificial Sequence
  Description of Artificial Sequence: Synthetic oligonucleotide
  Antisense strand to SEQ ID NO: 2009446
auuuacaaagauguuccag

SEQ ID NO: 2009448 - RNA, 19 nt, Artificial Sequence
  Description of Artificial Sequence: Synthetic oligonucleotide
  Sense strand starting at position 3897 of SEQ ID NO: 1880987
uggaacaucuuuguaaaua

SEQ ID NO: 2009449 - RNA, 19 nt, Artificial Sequence
  Description of Artificial Sequence: Synthetic oligonucleotide
  Antisense strand to SEQ ID NO: 2009448
uauuuacaaagauguucca

SEQ ID NO: 2009450 - RNA, 19 nt, Artificial Sequence
  Description of Artificial Sequence: Synthetic oligonucleotide
  Sense strand starting at position 3898 of SEQ ID NO: 1880987
ggaacaucuuuguaaauau

SEQ ID NO: 2009451 - RNA, 19 nt, Artificial Sequence
  Description of Artificial Sequence: Synthetic oligonucleotide
  Antisense strand to SEQ ID NO: 2009450
auauuuacaaagauguucc

SEQ ID NO: 2009452 - RNA, 19 nt, Artificial Sequence
  Description of Artificial Sequence: Synthetic oligonucleotide
  Sense strand starting at position 3939 of SEQ ID NO: 1880987
cugagucaaugaucuugaa

SEQ ID NO: 2009453 - RNA, 19 nt, Artificial Sequence
  Description of Artificial Sequence: Synthetic oligonucleotide
  Antisense strand to SEQ ID NO: 2009452
uucaagaucauugacucag

SEQ ID NO: 2009454 - RNA, 19 nt, Artificial Sequence
  Description of Artificial Sequence: Synthetic oligonucleotide
  Sense strand starting at position 101 of SEQ ID NO: 1880989
ggagguucuggagaaacgu

SEQ ID NO: 2009455 - RNA, 19 nt, Artificial Sequence
  Description of Artificial Sequence: Synthetic oligonucleotide
  Antisense strand to SEQ ID NO: 2009454
acguuucuccagaaccucc

SEQ ID NO: 2009456 - RNA, 19 nt, Artificial Sequence
  Description of Artificial Sequence: Synthetic oligonucleotide
  Sense strand starting at position 1050 of SEQ ID NO: 1880989
aagaauacaugcuaaggga

SEQ ID NO: 2009457 - RNA, 19 nt, Artificial Sequence
  Description of Artificial Sequence: Synthetic oligonucleotide
  Antisense strand to SEQ ID NO: 2009456
ucccuuagcauguauucuu

SEQ ID NO: 2009458 - RNA, 19 nt, Artificial Sequence
  Description of Artificial Sequence: Synthetic oligonucleotide
  Sense strand starting at position 1491 of SEQ ID NO: 1880989
cguggucugaaacgugaaa

SEQ ID NO: 2009459 - RNA, 19 nt, Artificial Sequence
  Description of Artificial Sequence: Synthetic oligonucleotide
  Antisense strand to SEQ ID NO: 2009458
uuucacguuucagaccacg

SEQ ID NO: 2009460 - RNA, 19 nt, Artificial Sequence
  Description of Artificial Sequence: Synthetic oligonucleotide
  Sense strand starting at position 1493 of SEQ ID NO: 1880989
uggucugaaacgugaaauc

SEQ ID NO: 2009461 - RNA, 19 nt, Artificial Sequence
  Description of Artificial Sequence: Synthetic oligonucleotide
  Antisense strand to SEQ ID NO: 2009460
gauuucacguuucagacca

SEQ ID NO: 2009462 - RNA, 19 nt, Artificial Sequence
  Description of Artificial Sequence: Synthetic oligonucleotide
  Sense strand starting at position 2443 of SEQ ID NO: 1880989
augaauacacuuugcagau

SEQ ID NO: 2009463 - RNA, 19 nt, Artificial Sequence
  Description of Artificial Sequence: Synthetic oligonucleotide
  Antisense strand to SEQ ID NO: 2009462
aucugcaaaguguauucau

SEQ ID NO: 2009464 - RNA, 19 nt, Artificial Sequence
  Description of Artificial Sequence: Synthetic oligonucleotide
  Sense strand starting at position 2444 of SEQ ID NO: 1880989
ugaauacacuuugcagauu

SEQ ID NO: 2009465 - RNA, 19 nt, Artificial Sequence
  Description of Artificial Sequence: Synthetic oligonucleotide
  Antisense strand to SEQ ID NO: 2009464
aaucugcaaaguguauuca

SEQ ID NO: 2009466 - RNA, 19 nt, Artificial Sequence
  Description of Artificial Sequence: Synthetic oligonucleotide
  Sense strand starting at position 2479 of SEQ ID NO: 1880989
uuacuuacugaagguugaa

SEQ ID NO: 2009467 - RNA, 19 nt, Artificial Sequence
  Description of Artificial Sequence: Synthetic oligonucleotide
  Antisense strand to SEQ ID NO: 2009466
uucaaccuucaguaaguaa

SEQ ID NO: 2009468 - RNA, 19 nt, Artificial Sequence
  Description of Artificial Sequence: Synthetic oligonucleotide
  Sense strand starting at position 2482 of SEQ ID NO: 1880989
cuuacugaagguugaagau

SEQ ID NO: 2009469 - RNA, 19 nt, Artificial Sequence
  Description of Artificial Sequence: Synthetic oligonucleotide
  Antisense strand to SEQ ID NO: 2009468
aucuucaaccuucaguaag

SEQ ID NO: 2009470 - RNA, 19 nt, Artificial Sequence
  Description of Artificial Sequence: Synthetic oligonucleotide
  Sense strand starting at position 2549 of SEQ ID NO: 1880989
uuuaaaggacaugguauua

SEQ ID NO: 2009471 - RNA, 19 nt, Artificial Sequence
  Description of Artificial Sequence: Synthetic oligonucleotide
  Antisense strand to SEQ ID NO: 2009470
uaauaccauguccuuuaaa

SEQ ID NO: 2009472 - RNA, 19 nt, Artificial Sequence
  Description of Artificial Sequence: Synthetic oligonucleotide
  Sense strand starting at position 2627 of SEQ ID NO: 1880989
aggacauucugcucuggca

SEQ ID NO: 2009473 - RNA, 19 nt, Artificial Sequence
  Description of Artificial Sequence: Synthetic oligonucleotide
  Antisense strand to SEQ ID NO: 2009472
ugccagagcagaauguccu

SEQ ID NO: 2009474 - RNA, 19 nt, Artificial Sequence
  Description of Artificial Sequence: Synthetic oligonucleotide
  Sense strand starting at position 2704 of SEQ ID NO: 1880989
uuacauaaagcugaaaguu

SEQ ID NO: 2009475 - RNA, 19 nt, Artificial Sequence
  Description of Artificial Sequence: Synthetic oligonucleotide
  Antisense strand to SEQ ID NO: 2009474
aacuuucagcuuuauguaa

SEQ ID NO: 2009476 - RNA, 19 nt, Artificial Sequence
  Description of Artificial Sequence: Synthetic oligonucleotide
  Sense strand starting at position 2720 of SEQ ID NO: 1880989
guugaagaagucuaggguu

SEQ ID NO: 2009477 - RNA, 19 nt, Artificial Sequence
  Description of Artificial Sequence: Synthetic oligonucleotide
  Antisense strand to SEQ ID NO: 2009476
aacccuagacuucuucaac

SEQ ID NO: 2009478 - RNA, 19 nt, Artificial Sequence
  Description of Artificial Sequence: Synthetic oligonucleotide
  Sense strand starting at position 2863 of SEQ ID NO: 1880989
ggcuucucaagugaauugu

SEQ ID NO: 2009479 - RNA, 19 nt, Artificial Sequence
  Description of Artificial Sequence: Synthetic oligonucleotide
  Antisense strand to SEQ ID NO: 2009478
acaauucacuugagaagcc

SEQ ID NO: 2009480 - RNA, 19 nt, Artificial Sequence
  Description of Artificial Sequence: Synthetic oligonucleotide
  Sense strand starting at position 2869 of SEQ ID NO: 1880989
ucaagugaauugucauguu

SEQ ID NO: 2009481 - RNA, 19 nt, Artificial Sequence
  Description of Artificial Sequence: Synthetic oligonucleotide
  Antisense strand to SEQ ID NO: 2009480
aacaugacaauucacuuga

SEQ ID NO: 2009482 - RNA, 19 nt, Artificial Sequence
  Description of Artificial Sequence: Synthetic oligonucleotide
  Sense strand starting at position 2934 of SEQ ID NO: 1880989
ugcugcauucuguacucau

SEQ ID NO: 2009483 - RNA, 19 nt, Artificial Sequence
  Description of Artificial Sequence: Synthetic oligonucleotide
  Antisense strand to SEQ ID NO: 2009482
augaguacagaaugcagca

SEQ ID NO: 2009484 - RNA, 19 nt, Artificial Sequence
  Description of Artificial Sequence: Synthetic oligonucleotide
  Sense strand starting at position 2990 of SEQ ID NO: 1880989
gagauauugucucucaagu

SEQ ID NO: 2009485 - RNA, 19 nt, Artificial Sequence
  Description of Artificial Sequence: Synthetic oligonucleotide
  Antisense strand to SEQ ID NO: 2009484
acuugagagacaauaucuc

SEQ ID NO: 2009486 - RNA, 19 nt, Artificial Sequence
  Description of Artificial Sequence: Synthetic oligonucleotide
  Sense strand starting at position 3007 of SEQ ID NO: 1880989
guagcccauuguuuguaua

SEQ ID NO: 2009487 - RNA, 19 nt, Artificial Sequence
  Description of Artificial Sequence: Synthetic oligonucleotide
  Antisense strand to SEQ ID NO: 2009486
uauacaaacaaugggcuac

SEQ ID NO: 2009488 - RNA, 19 nt, Artificial Sequence
  Description of Artificial Sequence: Synthetic oligonucleotide
  Sense strand starting at position 3009 of SEQ ID NO: 1880989
agcccauuguuuguauaau

SEQ ID NO: 2009489 - RNA, 19 nt, Artificial Sequence
  Description of Artificial Sequence: Synthetic oligonucleotide
  Antisense strand to SEQ ID NO: 2009488
auuauacaaacaaugggcu

SEQ ID NO: 2009490 - RNA, 19 nt, Artificial Sequence
  Description of Artificial Sequence: Synthetic oligonucleotide
  Sense strand starting at position 3018 of SEQ ID NO: 1880989
uuuguauaauguguuccua

SEQ ID NO: 2009491 - RNA, 19 nt, Artificial Sequence
  Description of Artificial Sequence: Synthetic oligonucleotide
  Antisense strand to SEQ ID NO: 2009490
uaggaacacauuauacaaa

SEQ ID NO: 2009492 - RNA, 19 nt, Artificial Sequence
  Description of Artificial Sequence: Synthetic oligonucleotide
  Sense strand starting at position 3020 of SEQ ID NO: 1880989
uguauaauguguuccuaaa

SEQ ID NO: 2009493 - RNA, 19 nt, Artificial Sequence
  Description of Artificial Sequence: Synthetic oligonucleotide
  Antisense strand to SEQ ID NO: 2009492
uuuaggaacacauuauaca

SEQ ID NO: 2009494 - RNA, 19 nt, Artificial Sequence
  Description of Artificial Sequence: Synthetic oligonucleotide
  Sense strand starting at position 3080 of SEQ ID NO: 1880989
caguccauaccugaaggua

SEQ ID NO: 2009495 - RNA, 19 nt, Artificial Sequence
  Description of Artificial Sequence: Synthetic oligonucleotide
  Antisense strand to SEQ ID NO: 2009494
uaccuucagguauggacug

SEQ ID NO: 2009496 - RNA, 19 nt, Artificial Sequence
  Description of Artificial Sequence: Synthetic oligonucleotide
  Sense strand starting at position 3107 of SEQ ID NO: 1880989
ugugcaauccuagacucuu

SEQ ID NO: 2009497 - RNA, 19 nt, Artificial Sequence
  Description of Artificial Sequence: Synthetic oligonucleotide
  Antisense strand to SEQ ID NO: 2009496
aagagucuaggauugcaca

SEQ ID NO: 2009498 - RNA, 19 nt, Artificial Sequence
  Description of Artificial Sequence: Synthetic oligonucleotide
  Sense strand starting at position 3163 of SEQ ID NO: 1880989
ugaucuguauuuggaucua

SEQ ID NO: 2009499 - RNA, 19 nt, Artificial Sequence
  Description of Artificial Sequence: Synthetic oligonucleotide
  Antisense strand to SEQ ID NO: 2009498
uagauccaaauacagauca

SEQ ID NO: 2009500 - RNA, 19 nt, Artificial Sequence
  Description of Artificial Sequence: Synthetic oligonucleotide
  Sense strand starting at position 3199 of SEQ ID NO: 1880989
agccaagcucgaugaagua

SEQ ID NO: 2009501 - RNA, 19 nt, Artificial Sequence
  Description of Artificial Sequence: Synthetic oligonucleotide
  Antisense strand to SEQ ID NO: 2009500
uacuucaucgagcuuggcu

SEQ ID NO: 2009502 - RNA, 19 nt, Artificial Sequence
  Description of Artificial Sequence: Synthetic oligonucleotide
  Sense strand starting at position 3238 of SEQ ID NO: 1880989
gccaaauaugaaugacugu

SEQ ID NO: 2009503 - RNA, 19 nt, Artificial Sequence
  Description of Artificial Sequence: Synthetic oligonucleotide
  Antisense strand to SEQ ID NO: 2009502
acagucauucauauuuggc

SEQ ID NO: 2009504 - RNA, 19 nt, Artificial Sequence
  Description of Artificial Sequence: Synthetic oligonucleotide
  Sense strand starting at position 3285 of SEQ ID NO: 1880989
gagagcauaugccuaaguu

SEQ ID NO: 2009505 - RNA, 19 nt, Artificial Sequence
  Description of Artificial Sequence: Synthetic oligonucleotide
  Antisense strand to SEQ ID NO: 2009504
aacuuaggcauaugcucuc

SEQ ID NO: 2009506 - RNA, 19 nt, Artificial Sequence
  Description of Artificial Sequence: Synthetic oligonucleotide
  Sense strand starting at position 3384 of SEQ ID NO: 1880989
auugguuuagccuggaaag

SEQ ID NO: 2009507 - RNA, 19 nt, Artificial Sequence
  Description of Artificial Sequence: Synthetic oligonucleotide
  Antisense strand to SEQ ID NO: 2009506
cuuuccaggcuaaaccaau

SEQ ID NO: 2009508 - RNA, 19 nt, Artificial Sequence
  Description of Artificial Sequence: Synthetic oligonucleotide
  Sense strand starting at position 3481 of SEQ ID NO: 1880989
agaauuaagcuuugcauga

SEQ ID NO: 2009509 - RNA, 19 nt, Artificial Sequence
  Description of Artificial Sequence: Synthetic oligonucleotide
  Antisense strand to SEQ ID NO: 2009508
ucaugcaaagcuuaauucu

SEQ ID NO: 2009510 - RNA, 19 nt, Artificial Sequence
  Description of Artificial Sequence: Synthetic oligonucleotide
  Sense strand starting at position 3485 of SEQ ID NO: 1880989
uuaagcuuugcaugaagag

SEQ ID NO: 2009511 - RNA, 19 nt, Artificial Sequence
  Description of Artificial Sequence: Synthetic oligonucleotide
  Antisense strand to SEQ ID NO: 2009510
cucuucaugcaaagcuuaa

SEQ ID NO: 2009512 - RNA, 19 nt, Artificial Sequence
  Description of Artificial Sequence: Synthetic oligonucleotide
  Sense strand starting at position 3486 of SEQ ID NO: 1880989
uaagcuuugcaugaagagu

SEQ ID NO: 2009513 - RNA, 19 nt, Artificial Sequence
  Description of Artificial Sequence: Synthetic oligonucleotide
  Antisense strand to SEQ ID NO: 2009512
acucuucaugcaaagcuua

SEQ ID NO: 2009514 - RNA, 19 nt, Artificial Sequence
  Description of Artificial Sequence: Synthetic oligonucleotide
  Sense strand starting at position 3494 of SEQ ID NO: 1880989
gcaugaagaguugaaguca

SEQ ID NO: 2009515 - RNA, 19 nt, Artificial Sequence
  Description of Artificial Sequence: Synthetic oligonucleotide
  Antisense strand to SEQ ID NO: 2009514
ugacuucaacucuucaugc

SEQ ID NO: 2009516 - RNA, 19 nt, Artificial Sequence
  Description of Artificial Sequence: Synthetic oligonucleotide
  Sense strand starting at position 3597 of SEQ ID NO: 1880989
gagaauagauggcaaauau

SEQ ID NO: 2009517 - RNA, 19 nt, Artificial Sequence
  Description of Artificial Sequence: Synthetic oligonucleotide
  Antisense strand to SEQ ID NO: 2009516
auauuugccaucuauucuc

SEQ ID NO: 2009518 - RNA, 19 nt, Artificial Sequence
  Description of Artificial Sequence: Synthetic oligonucleotide
  Sense strand starting at position 3638 of SEQ ID NO: 1880989
gucaaagucuuaguugaau

SEQ ID NO: 2009519 - RNA, 19 nt, Artificial Sequence
  Description of Artificial Sequence: Synthetic oligonucleotide
  Antisense strand to SEQ ID NO: 2009518
auucaacuaagacuuugac

SEQ ID NO: 2009520 - RNA, 19 nt, Artificial Sequence
  Description of Artificial Sequence: Synthetic oligonucleotide
  Sense strand starting at position 3649 of SEQ ID NO: 1880989
aguugaaucucuccuggau

SEQ ID NO: 2009521 - RNA, 19 nt, Artificial Sequence
  Description of Artificial Sequence: Synthetic oligonucleotide
  Antisense strand to SEQ ID NO: 2009520
auccaggagagauucaacu

SEQ ID NO: 2009522 - RNA, 19 nt, Artificial Sequence
  Description of Artificial Sequence: Synthetic oligonucleotide
  Sense strand starting at position 3688 of SEQ ID NO: 1880989
gaaggaaauucucuagcga

SEQ ID NO: 2009523 - RNA, 19 nt, Artificial Sequence
  Description of Artificial Sequence: Synthetic oligonucleotide
  Antisense strand to SEQ ID NO: 2009522
ucgcuagagaauuuccuuc

SEQ ID NO: 2009524 - RNA, 19 nt, Artificial Sequence
  Description of Artificial Sequence: Synthetic oligonucleotide
  Sense strand starting at position 3696 of SEQ ID NO: 1880989
uucucuagcgaaugcaaau

SEQ ID NO: 2009525 - RNA, 19 nt, Artificial Sequence
  Description of Artificial Sequence: Synthetic oligonucleotide
  Antisense strand to SEQ ID NO: 2009524
auuugcauucgcuagagaa

SEQ ID NO: 2009526 - RNA, 19 nt, Artificial Sequence
  Description of Artificial Sequence: Synthetic oligonucleotide
  Sense strand starting at position 3877 of SEQ ID NO: 1880989
cagucuuaugauugugguu

SEQ ID NO: 2009527 - RNA, 19 nt, Artificial Sequence
  Description of Artificial Sequence: Synthetic oligonucleotide
  Antisense strand to SEQ ID NO: 2009526
aaccacaaucauaagacug

SEQ ID NO: 2009528 - RNA, 19 nt, Artificial Sequence
  Description of Artificial Sequence: Synthetic oligonucleotide
  Sense strand starting at position 3898 of SEQ ID NO: 1880989
aacauuagugcugaucagu

SEQ ID NO: 2009529 - RNA, 19 nt, Artificial Sequence
  Description of Artificial Sequence: Synthetic oligonucleotide
  Antisense strand to SEQ ID NO: 2009528
acugaucagcacuaauguu

SEQ ID NO: 2009530 - RNA, 19 nt, Artificial Sequence
  Description of Artificial Sequence: Synthetic oligonucleotide
  Sense strand starting at position 3907 of SEQ ID NO: 1880989
gcugaucaguucucccaaa

SEQ ID NO: 2009531 - RNA, 19 nt, Artificial Sequence
  Description of Artificial Sequence: Synthetic oligonucleotide
  Antisense strand to SEQ ID NO: 2009530
uuugggagaacugaucagc

SEQ ID NO: 2009532 - RNA, 19 nt, Artificial Sequence
  Description of Artificial Sequence: Synthetic oligonucleotide
  Sense strand starting at position 3941 of SEQ ID NO: 1880989
gguauaaccagguaugucu

SEQ ID NO: 2009533 - RNA, 19 nt, Artificial Sequence
  Description of Artificial Sequence: Synthetic oligonucleotide
  Antisense strand to SEQ ID NO: 2009532
agacauaccugguuauacc

SEQ ID NO: 2009534 - RNA, 19 nt, Artificial Sequence
  Description of Artificial Sequence: Synthetic oligonucleotide
  Sense strand starting at position 109 of SEQ ID NO: 1880990
accacuuccuuggcauaga

SEQ ID NO: 2009535 - RNA, 19 nt, Artificial Sequence
  Description of Artificial Sequence: Synthetic oligonucleotide
  Antisense strand to SEQ ID NO: 2009534
ucuaugccaaggaaguggu

SEQ ID NO: 2009536 - RNA, 19 nt, Artificial Sequence
  Description of Artificial Sequence: Synthetic oligonucleotide
  Sense strand starting at position 244 of SEQ ID NO: 1880990
ccaggagcuagauauaugu

SEQ ID NO: 2009537 - RNA, 19 nt, Artificial Sequence
  Description of Artificial Sequence: Synthetic oligonucleotide
  Antisense strand to SEQ ID NO: 2009536
acauauaucuagcuccugg

SEQ ID NO: 2009538 - RNA, 19 nt, Artificial Sequence
  Description of Artificial Sequence: Synthetic oligonucleotide
  Sense strand starting at position 315 of SEQ ID NO: 1880990
aaugaacugccgugggaau

SEQ ID NO: 2009539 - RNA, 19 nt, Artificial Sequence
  Description of Artificial Sequence: Synthetic oligonucleotide
  Antisense strand to SEQ ID NO: 2009538
auucccacggcaguucauu

SEQ ID NO: 2009540 - RNA, 19 nt, Artificial Sequence
  Description of Artificial Sequence: Synthetic oligonucleotide
  Sense strand starting at position 351 of SEQ ID NO: 1880990
aagcucuaaccuugagguu

SEQ ID NO: 2009541 - RNA, 19 nt, Artificial Sequence
  Description of Artificial Sequence: Synthetic oligonucleotide
  Antisense strand to SEQ ID NO: 2009540
aaccucaagguuagagcuu

SEQ ID NO: 2009542 - RNA, 19 nt, Artificial Sequence
  Description of Artificial Sequence: Synthetic oligonucleotide
  Sense strand starting at position 352 of SEQ ID NO: 1880990
agcucuaaccuugagguua

SEQ ID NO: 2009543 - RNA, 19 nt, Artificial Sequence
  Description of Artificial Sequence: Synthetic oligonucleotide
  Antisense strand to SEQ ID NO: 2009542
uaaccucaagguuagagcu

SEQ ID NO: 2009544 - RNA, 19 nt, Artificial Sequence
  Description of Artificial Sequence: Synthetic oligonucleotide
  Sense strand starting at position 438 of SEQ ID NO: 1880990
gagucacuacaucauggua

SEQ ID NO: 2009545 - RNA, 19 nt, Artificial Sequence
  Description of Artificial Sequence: Synthetic oligonucleotide
  Antisense strand to SEQ ID NO: 2009544
uaccaugauguagugacuc

SEQ ID NO: 2009546 - RNA, 19 nt, Artificial Sequence
  Description of Artificial Sequence: Synthetic oligonucleotide
  Sense strand starting at position 503 of SEQ ID NO: 1880990
acgguuauccguaaugugu

SEQ ID NO: 2009547 - RNA, 19 nt, Artificial Sequence
  Description of Artificial Sequence: Synthetic oligonucleotide
  Antisense strand to SEQ ID NO: 2009546
acacauuacggauaaccgu

SEQ ID NO: 2009548 - RNA, 19 nt, Artificial Sequence
  Description of Artificial Sequence: Synthetic oligonucleotide
  Sense strand starting at position 678 of SEQ ID NO: 1880990
guuguuaauccugaauuau

SEQ ID NO: 2009549 - RNA, 19 nt, Artificial Sequence
  Description of Artificial Sequence: Synthetic oligonucleotide
  Antisense strand to SEQ ID NO: 2009548
auaauucaggauuaacaac

SEQ ID NO: 2009550 - RNA, 19 nt, Artificial Sequence
  Description of Artificial Sequence: Synthetic oligonucleotide
  Sense strand starting at position 722 of SEQ ID NO: 1880990
ugacuuuauuauccaggca

SEQ ID NO: 2009551 - RNA, 19 nt, Artificial Sequence
  Description of Artificial Sequence: Synthetic oligonucleotide
  Antisense strand to SEQ ID NO: 2009550
ugccuggauaauaaaguca

SEQ ID NO: 2009552 - RNA, 19 nt, Artificial Sequence
  Description of Artificial Sequence: Synthetic oligonucleotide
  Sense strand starting at position 813 of SEQ ID NO: 1880990
uggacauguccuuaacuca

SEQ ID NO: 2009553 - RNA, 19 nt, Artificial Sequence
  Description of Artificial Sequence: Synthetic oligonucleotide
  Antisense strand to SEQ ID NO: 2009552
ugaguuaaggacaugucca

SEQ ID NO: 2009554 - RNA, 19 nt, Artificial Sequence
  Description of Artificial Sequence: Synthetic oligonucleotide
  Sense strand starting at position 836 of SEQ ID NO: 1880990
gugggacuucaaugauagc

SEQ ID NO: 2009555 - RNA, 19 nt, Artificial Sequence
  Description of Artificial Sequence: Synthetic oligonucleotide
  Antisense strand to SEQ ID NO: 2009554
gcuaucauugaagucccac

SEQ ID NO: 2009556 - RNA, 19 nt, Artificial Sequence
  Description of Artificial Sequence: Synthetic oligonucleotide
  Sense strand starting at position 1131 of SEQ ID NO: 1880990
guuauagcugccuagggau

SEQ ID NO: 2009557 - RNA, 19 nt, Artificial Sequence
  Description of Artificial Sequence: Synthetic oligonucleotide
  Antisense strand to SEQ ID NO: 2009556
aucccuaggcagcuauaac

SEQ ID NO: 2009558 - RNA, 19 nt, Artificial Sequence
  Description of Artificial Sequence: Synthetic oligonucleotide
  Sense strand starting at position 1458 of SEQ ID NO: 1880990
ccuuuauuuguacggcaau

SEQ ID NO: 2009559 - RNA, 19 nt, Artificial Sequence
  Description of Artificial Sequence: Synthetic oligonucleotide
  Antisense strand to SEQ ID NO: 2009558
auugccguacaaauaaagg

SEQ ID NO: 2009560 - RNA, 19 nt, Artificial Sequence
  Description of Artificial Sequence: Synthetic oligonucleotide
  Sense strand starting at position 1605 of SEQ ID NO: 1880990
gcgcgaacgccgaauggau

SEQ ID NO: 2009561 - RNA, 19 nt, Artificial Sequence
  Description of Artificial Sequence: Synthetic oligonucleotide
  Antisense strand to SEQ ID NO: 2009560
auccauucggcguucgcgc

SEQ ID NO: 2009562 - RNA, 19 nt, Artificial Sequence
  Description of Artificial Sequence: Synthetic oligonucleotide
  Sense strand starting at position 1778 of SEQ ID NO: 1880990
agcagaaccguuuaaucac

SEQ ID NO: 2009563 - RNA, 19 nt, Artificial Sequence
  Description of Artificial Sequence: Synthetic oligonucleotide
  Antisense strand to SEQ ID NO: 2009562
gugauuaaacgguucugcu

SEQ ID NO: 2009564 - RNA, 19 nt, Artificial Sequence
  Description of Artificial Sequence: Synthetic oligonucleotide
  Sense strand starting at position 1787 of SEQ ID NO: 1880990
guuuaaucacaagguaaac

SEQ ID NO: 2009565 - RNA, 19 nt, Artificial Sequence
  Description of Artificial Sequence: Synthetic oligonucleotide
  Antisense strand to SEQ ID NO: 2009564
guuuaccuugugauuaaac

SEQ ID NO: 2009566 - RNA, 19 nt, Artificial Sequence
  Description of Artificial Sequence: Synthetic oligonucleotide
  Sense strand starting at position 2617 of SEQ ID NO: 1880990
uagguaguucuugguggga

SEQ ID NO: 2009567 - RNA, 19 nt, Artificial Sequence
  Description of Artificial Sequence: Synthetic oligonucleotide
  Antisense strand to SEQ ID NO: 2009566
ucccaccaagaacuaccua

SEQ ID NO: 2009568 - RNA, 19 nt, Artificial Sequence
  Description of Artificial Sequence: Synthetic oligonucleotide
  Sense strand starting at position 2630 of SEQ ID NO: 1880990
gugggaaggguccgggaau

SEQ ID NO: 2009569 - RNA, 19 nt, Artificial Sequence
  Description of Artificial Sequence: Synthetic oligonucleotide
  Antisense strand to SEQ ID NO: 2009568
auucccggacccuucccac

SEQ ID NO: 2009570 - RNA, 19 nt, Artificial Sequence
  Description of Artificial Sequence: Synthetic oligonucleotide
  Sense strand starting at position 2989 of SEQ ID NO: 1880990
ggauaucugcaaggugaag

SEQ ID NO: 2009571 - RNA, 19 nt, Artificial Sequence
  Description of Artificial Sequence: Synthetic oligonucleotide
  Antisense strand to SEQ ID NO: 2009570
cuucaccuugcagauaucc

SEQ ID NO: 2009572 - RNA, 19 nt, Artificial Sequence
  Description of Artificial Sequence: Synthetic oligonucleotide
  Sense strand starting at position 3045 of SEQ ID NO: 1880990
caaaguauggugcaaguuu

SEQ ID NO: 2009573 - RNA, 19 nt, Artificial Sequence
  Description of Artificial Sequence: Synthetic oligonucleotide
  Antisense strand to SEQ ID NO: 2009572
aaacuugcaccauacuuug

SEQ ID NO: 2009574 - RNA, 19 nt, Artificial Sequence
  Description of Artificial Sequence: Synthetic oligonucleotide
  Sense strand starting at position 3065 of SEQ ID NO: 1880990
aaaggagccguguggauaa

SEQ ID NO: 2009575 - RNA, 19 nt, Artificial Sequence
  Description of Artificial Sequence: Synthetic oligonucleotide
  Antisense strand to SEQ ID NO: 2009574
uuauccacacggcuccuuu

SEQ ID NO: 2009576 - RNA, 19 nt, Artificial Sequence
  Description of Artificial Sequence: Synthetic oligonucleotide
  Sense strand starting at position 3067 of SEQ ID NO: 1880990
aggagccguguggauaaau

SEQ ID NO: 2009577 - RNA, 19 nt, Artificial Sequence
  Description of Artificial Sequence: Synthetic oligonucleotide
  Antisense strand to SEQ ID NO: 2009576
auuuauccacacggcuccu

SEQ ID NO: 2009578 - RNA, 19 nt, Artificial Sequence
  Description of Artificial Sequence: Synthetic oligonucleotide
  Sense strand starting at position 3099 of SEQ ID NO: 1880990
cccaaauuaguugaagcaa

SEQ ID NO: 2009579 - RNA, 19 nt, Artificial Sequence
  Description of Artificial Sequence: Synthetic oligonucleotide
  Antisense strand to SEQ ID NO: 2009578
uugcuucaacuaauuuggg

SEQ ID NO: 2009580 - RNA, 19 nt, Artificial Sequence
  Description of Artificial Sequence: Synthetic oligonucleotide
  Sense strand starting at position 3138 of SEQ ID NO: 1880990
ucugaugacuuuccugaug

SEQ ID NO: 2009581 - RNA, 19 nt, Artificial Sequence
  Description of Artificial Sequence: Synthetic oligonucleotide
  Antisense strand to SEQ ID NO: 2009580
caucaggaaagucaucaga

SEQ ID NO: 2009582 - RNA, 19 nt, Artificial Sequence
  Description of Artificial Sequence: Synthetic oligonucleotide
  Sense strand starting at position 3141 of SEQ ID NO: 1880990
gaugacuuuccugauguuc

SEQ ID NO: 2009583 - RNA, 19 nt, Artificial Sequence
  Description of Artificial Sequence: Synthetic oligonucleotide
  Antisense strand to SEQ ID NO: 2009582
gaacaucaggaaagucauc

SEQ ID NO: 2009584 - RNA, 19 nt, Artificial Sequence
  Description of Artificial Sequence: Synthetic oligonucleotide
  Sense strand starting at position 3194 of SEQ ID NO: 1880990
aaugguauuuaucagauag

SEQ ID NO: 2009585 - RNA, 19 nt, Artificial Sequence
  Description of Artificial Sequence: Synthetic oligonucleotide
  Antisense strand to SEQ ID NO: 2009584
cuaucugauaaauaccauu

SEQ ID NO: 2009586 - RNA, 19 nt, Artificial Sequence
  Description of Artificial Sequence: Synthetic oligonucleotide
  Sense strand starting at position 3265 of SEQ ID NO: 1880990
uugugcuaccuuuagaaca

SEQ ID NO: 2009587 - RNA, 19 nt, Artificial Sequence
  Description of Artificial Sequence: Synthetic oligonucleotide
  Antisense strand to SEQ ID NO: 2009586
uguucuaaagguagcacaa

SEQ ID NO: 2009588 - RNA, 19 nt, Artificial Sequence
  Description of Artificial Sequence: Synthetic oligonucleotide
  Sense strand starting at position 3299 of SEQ ID NO: 1880990
auacuaugcccagagaagu

SEQ ID NO: 2009589 - RNA, 19 nt, Artificial Sequence
  Description of Artificial Sequence: Synthetic oligonucleotide
  Antisense strand to SEQ ID NO: 2009588
acuucucugggcauaguau

SEQ ID NO: 2009590 - RNA, 19 nt, Artificial Sequence
  Description of Artificial Sequence: Synthetic oligonucleotide
  Sense strand starting at position 3309 of SEQ ID NO: 1880990
cagagaaguucccugggca

SEQ ID NO: 2009591 - RNA, 19 nt, Artificial Sequence
  Description of Artificial Sequence: Synthetic oligonucleotide
  Antisense strand to SEQ ID NO: 2009590
ugcccagggaacuucucug

SEQ ID NO: 2009592 - RNA, 19 nt, Artificial Sequence
  Description of Artificial Sequence: Synthetic oligonucleotide
  Sense strand starting at position 3310 of SEQ ID NO: 1880990
agagaaguucccugggcag

SEQ ID NO: 2009593 - RNA, 19 nt, Artificial Sequence
  Description of Artificial Sequence: Synthetic oligonucleotide
  Antisense strand to SEQ ID NO: 2009592
cugcccagggaacuucucu

SEQ ID NO: 2009594 - RNA, 19 nt, Artificial Sequence
  Description of Artificial Sequence: Synthetic oligonucleotide
  Sense strand starting at position 3312 of SEQ ID NO: 1880990
agaaguucccugggcagau

SEQ ID NO: 2009595 - RNA, 19 nt, Artificial Sequence
  Description of Artificial Sequence: Synthetic oligonucleotide
  Antisense strand to SEQ ID NO: 2009594
aucugcccagggaacuucu

SEQ ID NO: 2009596 - RNA, 19 nt, Artificial Sequence
  Description of Artificial Sequence: Synthetic oligonucleotide
  Sense strand starting at position 3355 of SEQ ID NO: 1880990
acagaucauggugguuaga

SEQ ID NO: 2009597 - RNA, 19 nt, Artificial Sequence
  Description of Artificial Sequence: Synthetic oligonucleotide
  Antisense strand to SEQ ID NO: 2009596
ucuaaccaccaugaucugu

SEQ ID NO: 2009598 - RNA, 19 nt, Artificial Sequence
  Description of Artificial Sequence: Synthetic oligonucleotide
  Sense strand starting at position 3364 of SEQ ID NO: 1880990
ggugguuagagcuaugaug

SEQ ID NO: 2009599 - RNA, 19 nt, Artificial Sequence
  Description of Artificial Sequence: Synthetic oligonucleotide
  Antisense strand to SEQ ID NO: 2009598
caucauagcucuaaccacc

SEQ ID NO: 2009600 - RNA, 19 nt, Artificial Sequence
  Description of Artificial Sequence: Synthetic oligonucleotide
  Sense strand starting at position 3408 of SEQ ID NO: 1880990
ugggaggucgucugauaag

SEQ ID NO: 2009601 - RNA, 19 nt, Artificial Sequence
  Description of Artificial Sequence: Synthetic oligonucleotide
  Antisense strand to SEQ ID NO: 2009600
cuuaucagacgaccuccca

SEQ ID NO: 2009602 - RNA, 19 nt, Artificial Sequence
  Description of Artificial Sequence: Synthetic oligonucleotide
  Sense strand starting at position 3498 of SEQ ID NO: 1880990
cuucguagacuggacauua

SEQ ID NO: 2009603 - RNA, 19 nt, Artificial Sequence
  Description of Artificial Sequence: Synthetic oligonucleotide
  Antisense strand to SEQ ID NO: 2009602
uaauguccagucuacgaag

SEQ ID NO: 2009604 - RNA, 19 nt, Artificial Sequence
  Description of Artificial Sequence: Synthetic oligonucleotide
  Sense strand starting at position 3587 of SEQ ID NO: 1880990
uuugccuuccagggaaacu

SEQ ID NO: 2009605 - RNA, 19 nt, Artificial Sequence
  Description of Artificial Sequence: Synthetic oligonucleotide
  Antisense strand to SEQ ID NO: 2009604
aguuucccuggaaggcaaa

SEQ ID NO: 2009606 - RNA, 19 nt, Artificial Sequence
  Description of Artificial Sequence: Synthetic oligonucleotide
  Sense strand starting at position 3734 of SEQ ID NO: 1880990
auaacaugagauugcugau

SEQ ID NO: 2009607 - RNA, 19 nt, Artificial Sequence
  Description of Artificial Sequence: Synthetic oligonucleotide
  Antisense strand to SEQ ID NO: 2009606
aucagcaaucucauguuau

SEQ ID NO: 2009608 - RNA, 19 nt, Artificial Sequence
  Description of Artificial Sequence: Synthetic oligonucleotide
  Sense strand starting at position 3770 of SEQ ID NO: 1880990
cuagaugugcuagagauug

SEQ ID NO: 2009609 - RNA, 19 nt, Artificial Sequence
  Description of Artificial Sequence: Synthetic oligonucleotide
  Antisense strand to SEQ ID NO: 2009608
caaucucuagcacaucuag

SEQ ID NO: 2009610 - RNA, 19 nt, Artificial Sequence
  Description of Artificial Sequence: Synthetic oligonucleotide
  Sense strand starting at position 3778 of SEQ ID NO: 1880990
gcuagagauugcucagaaa

SEQ ID NO: 2009611 - RNA, 19 nt, Artificial Sequence
  Description of Artificial Sequence: Synthetic oligonucleotide
  Antisense strand to SEQ ID NO: 2009610
uuucugagcaaucucuagc

SEQ ID NO: 2009612 - RNA, 19 nt, Artificial Sequence
  Description of Artificial Sequence: Synthetic oligonucleotide
  Sense strand starting at position 3837 of SEQ ID NO: 1880990
ugaggagacugaggauuua

SEQ ID NO: 2009613 - RNA, 19 nt, Artificial Sequence
  Description of Artificial Sequence: Synthetic oligonucleotide
  Antisense strand to SEQ ID NO: 2009612
uaaauccucagucuccuca

SEQ ID NO: 2009614 - RNA, 19 nt, Artificial Sequence
  Description of Artificial Sequence: Synthetic oligonucleotide
  Sense strand starting at position 110 of SEQ ID NO: 1880991
ugcuauuaggccuaaggca

SEQ ID NO: 2009615 - RNA, 19 nt, Artificial Sequence
  Description of Artificial Sequence: Synthetic oligonucleotide
  Antisense strand to SEQ ID NO: 2009614
ugccuuaggccuaauagca

SEQ ID NO: 2009616 - RNA, 19 nt, Artificial Sequence
  Description of Artificial Sequence: Synthetic oligonucleotide
  Sense strand starting at position 478 of SEQ ID NO: 1880991
ucaauaagcuggucuaaga

SEQ ID NO: 2009617 - RNA, 19 nt, Artificial Sequence
  Description of Artificial Sequence: Synthetic oligonucleotide
  Antisense strand to SEQ ID NO: 2009616
ucuuagaccagcuuauuga

SEQ ID NO: 2009618 - RNA, 19 nt, Artificial Sequence
  Description of Artificial Sequence: Synthetic oligonucleotide
  Sense strand starting at position 547 of SEQ ID NO: 1880991
cgcaacagguacuuuauaa

SEQ ID NO: 2009619 - RNA, 19 nt, Artificial Sequence
  Description of Artificial Sequence: Synthetic oligonucleotide
  Antisense strand to SEQ ID NO: 2009618
uuauaaaguaccuguugcg

SEQ ID NO: 2009620 - RNA, 19 nt, Artificial Sequence
  Description of Artificial Sequence: Synthetic oligonucleotide
  Sense strand starting at position 634 of SEQ ID NO: 1880991
cuagucuuugcugaucuca

SEQ ID NO: 2009621 - RNA, 19 nt, Artificial Sequence
  Description of Artificial Sequence: Synthetic oligonucleotide
  Antisense strand to SEQ ID NO: 2009620
ugagaucagcaaagacuag

SEQ ID NO: 2009622 - RNA, 19 nt, Artificial Sequence
  Description of Artificial Sequence: Synthetic oligonucleotide
  Sense strand starting at position 643 of SEQ ID NO: 1880991
gcugaucucagguguuauu

SEQ ID NO: 2009623 - RNA, 19 nt, Artificial Sequence
  Description of Artificial Sequence: Synthetic oligonucleotide
  Antisense strand to SEQ ID NO: 2009622
aauaacaccugagaucagc

SEQ ID NO: 2009624 - RNA, 19 nt, Artificial Sequence
  Description of Artificial Sequence: Synthetic oligonucleotide
  Sense strand starting at position 890 of SEQ ID NO: 1880991
ugccuaggcugguuugaaa

SEQ ID NO: 2009625 - RNA, 19 nt, Artificial Sequence
  Description of Artificial Sequence: Synthetic oligonucleotide
  Antisense strand to SEQ ID NO: 2009624
uuucaaaccagccuaggca

SEQ ID NO: 2009626 - RNA, 19 nt, Artificial Sequence
  Description of Artificial Sequence: Synthetic oligonucleotide
  Sense strand starting at position 1031 of SEQ ID NO: 1880991
guaaauaauugacagacuu

SEQ ID NO: 2009627 - RNA, 19 nt, Artificial Sequence
  Description of Artificial Sequence: Synthetic oligonucleotide
  Antisense strand to SEQ ID NO: 2009626
aagucugucaauuauuuac

SEQ ID NO: 2009628 - RNA, 19 nt, Artificial Sequence
  Description of Artificial Sequence: Synthetic oligonucleotide
  Sense strand starting at position 1442 of SEQ ID NO: 1880991
caucgaggccguggugaaa

SEQ ID NO: 2009629 - RNA, 19 nt, Artificial Sequence
  Description of Artificial Sequence: Synthetic oligonucleotide
  Antisense strand to SEQ ID NO: 2009628
uuucaccacggccucgaug

SEQ ID NO: 2009630 - RNA, 19 nt, Artificial Sequence
  Description of Artificial Sequence: Synthetic oligonucleotide
  Sense strand starting at position 1457 of SEQ ID NO: 1880991
gaaacaaucuaaugggaug

SEQ ID NO: 2009631 - RNA, 19 nt, Artificial Sequence
  Description of Artificial Sequence: Synthetic oligonucleotide
  Antisense strand to SEQ ID NO: 2009630
caucccauuagauuguuuc

SEQ ID NO: 2009632 - RNA, 19 nt, Artificial Sequence
  Description of Artificial Sequence: Synthetic oligonucleotide
  Sense strand starting at position 1462 of SEQ ID NO: 1880991
aaucuaaugggaugucaca

SEQ ID NO: 2009633 - RNA, 19 nt, Artificial Sequence
  Description of Artificial Sequence: Synthetic oligonucleotide
  Antisense strand to SEQ ID NO: 2009632
ugugacaucccauuagauu

SEQ ID NO: 2009634 - RNA, 19 nt, Artificial Sequence
  Description of Artificial Sequence: Synthetic oligonucleotide
  Sense strand starting at position 1501 of SEQ ID NO: 1880991
uggugauguuuguugacuu

SEQ ID NO: 2009635 - RNA, 19 nt, Artificial Sequence
  Description of Artificial Sequence: Synthetic oligonucleotide
  Antisense strand to SEQ ID NO: 2009634
aagucaacaaacaucacca

SEQ ID NO: 2009636 - RNA, 19 nt, Artificial Sequence
  Description of Artificial Sequence: Synthetic oligonucleotide
  Sense strand starting at position 1513 of SEQ ID NO: 1880991
uugacuucuuguuuccaga

SEQ ID NO: 2009637 - RNA, 19 nt, Artificial Sequence
  Description of Artificial Sequence: Synthetic oligonucleotide
  Antisense strand to SEQ ID NO: 2009636
ucuggaaacaagaagucaa

SEQ ID NO: 2009638 - RNA, 19 nt, Artificial Sequence
  Description of Artificial Sequence: Synthetic oligonucleotide
  Sense strand starting at position 1553 of SEQ ID NO: 1880991
aguugcuacucaguccuaa

SEQ ID NO: 2009639 - RNA, 19 nt, Artificial Sequence
  Description of Artificial Sequence: Synthetic oligonucleotide
  Antisense strand to SEQ ID NO: 2009638
uuaggacugaguagcaacu

SEQ ID NO: 2009640 - RNA, 19 nt, Artificial Sequence
  Description of Artificial Sequence: Synthetic oligonucleotide
  Sense strand starting at position 1638 of SEQ ID NO: 1880991
aagguuacugggcauacua

SEQ ID NO: 2009641 - RNA, 19 nt, Artificial Sequence
  Description of Artificial Sequence: Synthetic oligonucleotide
  Antisense strand to SEQ ID NO: 2009640
uaguaugcccaguaaccuu

SEQ ID NO: 2009642 - RNA, 19 nt, Artificial Sequence
  Description of Artificial Sequence: Synthetic oligonucleotide
  Sense strand starting at position 2088 of SEQ ID NO: 1880991
aacugagaccugugaaguu

SEQ ID NO: 2009643 - RNA, 19 nt, Artificial Sequence
  Description of Artificial Sequence: Synthetic oligonucleotide
  Antisense strand to SEQ ID NO: 2009642
aacuucacaggucucaguu

SEQ ID NO: 2009644 - RNA, 19 nt, Artificial Sequence
  Description of Artificial Sequence: Synthetic oligonucleotide
  Sense strand starting at position 2245 of SEQ ID NO: 1880991
cuggcuuacucauccaguu

SEQ ID NO: 2009645 - RNA, 19 nt, Artificial Sequence
  Description of Artificial Sequence: Synthetic oligonucleotide
  Antisense strand to SEQ ID NO: 2009644
aacuggaugaguaagccag

SEQ ID NO: 2009646 - RNA, 19 nt, Artificial Sequence
  Description of Artificial Sequence: Synthetic oligonucleotide
  Sense strand starting at position 2262 of SEQ ID NO: 1880991
uuacaugauccgggucuua

SEQ ID NO: 2009647 - RNA, 19 nt, Artificial Sequence
  Description of Artificial Sequence: Synthetic oligonucleotide
  Antisense strand to SEQ ID NO: 2009646
uaagacccggaucauguaa

SEQ ID NO: 2009648 - RNA, 19 nt, Artificial Sequence
  Description of Artificial Sequence: Synthetic oligonucleotide
  Sense strand starting at position 2317 of SEQ ID NO: 1880991
cuggcuuacucaucuaguu

SEQ ID NO: 2009649 - RNA, 19 nt, Artificial Sequence
  Description of Artificial Sequence: Synthetic oligonucleotide
  Antisense strand to SEQ ID NO: 2009648
aacuagaugaguaagccag

SEQ ID NO: 2009650 - RNA, 19 nt, Artificial Sequence
  Description of Artificial Sequence: Synthetic oligonucleotide
  Sense strand starting at position 2322 of SEQ ID NO: 1880991
uuacucaucuaguuacaug

SEQ ID NO: 2009651 - RNA, 19 nt, Artificial Sequence
  Description of Artificial Sequence: Synthetic oligonucleotide
  Antisense strand to SEQ ID NO: 2009650
cauguaacuagaugaguaa

SEQ ID NO: 2009652 - RNA, 19 nt, Artificial Sequence
  Description of Artificial Sequence: Synthetic oligonucleotide
  Sense strand starting at position 2334 of SEQ ID NO: 1880991
uuacaugaucugggucuua

SEQ ID NO: 2009653 - RNA, 19 nt, Artificial Sequence
  Description of Artificial Sequence: Synthetic oligonucleotide
  Antisense strand to SEQ ID NO: 2009652
uaagacccagaucauguaa

SEQ ID NO: 2009654 - RNA, 19 nt, Artificial Sequence
  Description of Artificial Sequence: Synthetic oligonucleotide
  Sense strand starting at position 2411 of SEQ ID NO: 1880991
uggucuacuuugcugucaa

SEQ ID NO: 2009655 - RNA, 19 nt, Artificial Sequence
  Description of Artificial Sequence: Synthetic oligonucleotide
  Antisense strand to SEQ ID NO: 2009654
uugacagcaaaguagacca

SEQ ID NO: 2009656 - RNA, 19 nt, Artificial Sequence
  Description of Artificial Sequence: Synthetic oligonucleotide
  Sense strand starting at position 2423 of SEQ ID NO: 1880991
cugucaauuugugaaggaa

SEQ ID NO: 2009657 - RNA, 19 nt, Artificial Sequence
  Description of Artificial Sequence: Synthetic oligonucleotide
  Antisense strand to SEQ ID NO: 2009656
uuccuucacaaauugacag

SEQ ID NO: 2009658 - RNA, 19 nt, Artificial Sequence
  Description of Artificial Sequence: Synthetic oligonucleotide
  Sense strand starting at position 2474 of SEQ ID NO: 1880991
gcccacagccuggaauauu

SEQ ID NO: 2009659 - RNA, 19 nt, Artificial Sequence
  Description of Artificial Sequence: Synthetic oligonucleotide
  Antisense strand to SEQ ID NO: 2009658
aauauuccaggcugugggc

SEQ ID NO: 2009660 - RNA, 19 nt, Artificial Sequence
  Description of Artificial Sequence: Synthetic oligonucleotide
  Sense strand starting at position 2568 of SEQ ID NO: 1880991
cuuugagcagucuaucuga

SEQ ID NO: 2009661 - RNA, 19 nt, Artificial Sequence
  Description of Artificial Sequence: Synthetic oligonucleotide
  Antisense strand to SEQ ID NO: 2009660
ucagauagacugcucaaag

SEQ ID NO: 2009662 - RNA, 19 nt, Artificial Sequence
  Description of Artificial Sequence: Synthetic oligonucleotide
  Sense strand starting at position 2571 of SEQ ID NO: 1880991
ugagcagucuaucugaaag

SEQ ID NO: 2009663 - RNA, 19 nt, Artificial Sequence
  Description of Artificial Sequence: Synthetic oligonucleotide
  Antisense strand to SEQ ID NO: 2009662
cuuucagauagacugcuca

SEQ ID NO: 2009664 - RNA, 19 nt, Artificial Sequence
  Description of Artificial Sequence: Synthetic oligonucleotide
  Sense strand starting at position 2673 of SEQ ID NO: 1880991
auguaaguucuaugacagc

SEQ ID NO: 2009665 - RNA, 19 nt, Artificial Sequence
  Description of Artificial Sequence: Synthetic oligonucleotide
  Antisense strand to SEQ ID NO: 2009664
gcugucauagaacuuacau

SEQ ID NO: 2009666 - RNA, 19 nt, Artificial Sequence
  Description of Artificial Sequence: Synthetic oligonucleotide
  Sense strand starting at position 2725 of SEQ ID NO: 1880991
ucucuaguucuuggaauag

SEQ ID NO: 2009667 - RNA, 19 nt, Artificial Sequence
  Description of Artificial Sequence: Synthetic oligonucleotide
  Antisense strand to SEQ ID NO: 2009666
cuauuccaagaacuagaga

SEQ ID NO: 2009668 - RNA, 19 nt, Artificial Sequence
  Description of Artificial Sequence: Synthetic oligonucleotide
  Sense strand starting at position 3136 of SEQ ID NO: 1880991
ccucaugaguucuuaguug

SEQ ID NO: 2009669 - RNA, 19 nt, Artificial Sequence
  Description of Artificial Sequence: Synthetic oligonucleotide
  Antisense strand to SEQ ID NO: 2009668
caacuaagaacucaugagg

SEQ ID NO: 2009670 - RNA, 19 nt, Artificial Sequence
  Description of Artificial Sequence: Synthetic oligonucleotide
  Sense strand starting at position 3140 of SEQ ID NO: 1880991
augaguucuuaguuggaau

SEQ ID NO: 2009671 - RNA, 19 nt, Artificial Sequence
  Description of Artificial Sequence: Synthetic oligonucleotide
  Antisense strand to SEQ ID NO: 2009670
auuccaacuaagaacucau

SEQ ID NO: 2009672 - RNA, 19 nt, Artificial Sequence
  Description of Artificial Sequence: Synthetic oligonucleotide
  Sense strand starting at position 3207 of SEQ ID NO: 1880991
cgcauaucaccuuagagaa

SEQ ID NO: 2009673 - RNA, 19 nt, Artificial Sequence
  Description of Artificial Sequence: Synthetic oligonucleotide
  Antisense strand to SEQ ID NO: 2009672
uucucuaaggugauaugcg

SEQ ID NO: 2009674 - RNA, 19 nt, Artificial Sequence
  Description of Artificial Sequence: Synthetic oligonucleotide
  Sense strand starting at position 3254 of SEQ ID NO: 1880991
ggcuuacaacucuggcuua

SEQ ID NO: 2009675 - RNA, 19 nt, Artificial Sequence
  Description of Artificial Sequence: Synthetic oligonucleotide
  Antisense strand to SEQ ID NO: 2009674
uaagccagaguuguaagcc

SEQ ID NO: 2009676 - RNA, 19 nt, Artificial Sequence
  Description of Artificial Sequence: Synthetic oligonucleotide
  Sense strand starting at position 3259 of SEQ ID NO: 1880991
acaacucuggcuuauguaa

SEQ ID NO: 2009677 - RNA, 19 nt, Artificial Sequence
  Description of Artificial Sequence: Synthetic oligonucleotide
  Antisense strand to SEQ ID NO: 2009676
uuacauaagccagaguugu

SEQ ID NO: 2009678 - RNA, 19 nt, Artificial Sequence
  Description of Artificial Sequence: Synthetic oligonucleotide
  Sense strand starting at position 3266 of SEQ ID NO: 1880991
uggcuuauguaaguaucuu

SEQ ID NO: 2009679 - RNA, 19 nt, Artificial Sequence
  Description of Artificial Sequence: Synthetic oligonucleotide
  Antisense strand to SEQ ID NO: 2009678
aagauacuuacauaagcca

SEQ ID NO: 2009680 - RNA, 19 nt, Artificial Sequence
  Description of Artificial Sequence: Synthetic oligonucleotide
  Sense strand starting at position 3337 of SEQ ID NO: 1880991
uaggcuuccaagggugaga

SEQ ID NO: 2009681 - RNA, 19 nt, Artificial Sequence
  Description of Artificial Sequence: Synthetic oligonucleotide
  Antisense strand to SEQ ID NO: 2009680
ucucacccuuggaagccua

SEQ ID NO: 2009682 - RNA, 19 nt, Artificial Sequence
  Description of Artificial Sequence: Synthetic oligonucleotide
  Sense strand starting at position 3339 of SEQ ID NO: 1880991
ggcuuccaagggugagaaa

SEQ ID NO: 2009683 - RNA, 19 nt, Artificial Sequence
  Description of Artificial Sequence: Synthetic oligonucleotide
  Antisense strand to SEQ ID NO: 2009682
uuucucacccuuggaagcc

SEQ ID NO: 2009684 - RNA, 19 nt, Artificial Sequence
  Description of Artificial Sequence: Synthetic oligonucleotide
  Sense strand starting at position 3351 of SEQ ID NO: 1880991
ugagaaacugugggaaugu

SEQ ID NO: 2009685 - RNA, 19 nt, Artificial Sequence
  Description of Artificial Sequence: Synthetic oligonucleotide
  Antisense strand to SEQ ID NO: 2009684
acauucccacaguuucuca

SEQ ID NO: 2009686 - RNA, 19 nt, Artificial Sequence
  Description of Artificial Sequence: Synthetic oligonucleotide
  Sense strand starting at position 3392 of SEQ ID NO: 1880991
acaguaagguuuguuugca

SEQ ID NO: 2009687 - RNA, 19 nt, Artificial Sequence
  Description of Artificial Sequence: Synthetic oligonucleotide
  Antisense strand to SEQ ID NO: 2009686
ugcaaacaaaccuuacugu

SEQ ID NO: 2009688 - RNA, 19 nt, Artificial Sequence
  Description of Artificial Sequence: Synthetic oligonucleotide
  Sense strand starting at position 3423 of SEQ ID NO: 1880991
gcuuucugggcugguaaga

SEQ ID NO: 2009689 - RNA, 19 nt, Artificial Sequence
  Description of Artificial Sequence: Synthetic oligonucleotide
  Antisense strand to SEQ ID NO: 2009688
ucuuaccagcccagaaagc

SEQ ID NO: 2009690 - RNA, 19 nt, Artificial Sequence
  Description of Artificial Sequence: Synthetic oligonucleotide
  Sense strand starting at position 3823 of SEQ ID NO: 1880991
aaacucagucuccgggaaa

SEQ ID NO: 2009691 - RNA, 19 nt, Artificial Sequence
  Description of Artificial Sequence: Synthetic oligonucleotide
  Antisense strand to SEQ ID NO: 2009690
uuucccggagacugaguuu

SEQ ID NO: 2009692 - RNA, 19 nt, Artificial Sequence
  Description of Artificial Sequence: Synthetic oligonucleotide
  Sense strand starting at position 3865 of SEQ ID NO: 1880991
gugacauucugguuuccuu

SEQ ID NO: 2009693 - RNA, 19 nt, Artificial Sequence
  Description of Artificial Sequence: Synthetic oligonucleotide
  Antisense strand to SEQ ID NO: 2009692
aaggaaaccagaaugucac

SEQ ID NO: 2009694 - RNA, 19 nt, Artificial Sequence
  Description of Artificial Sequence: Synthetic oligonucleotide
  Sense strand starting at position 77 of SEQ ID NO: 1880992
aucugaguuuaaguagaaa

SEQ ID NO: 2009695 - RNA, 19 nt, Artificial Sequence
  Description of Artificial Sequence: Synthetic oligonucleotide
  Antisense strand to SEQ ID NO: 2009694
uuucuacuuaaacucagau

SEQ ID NO: 2009696 - RNA, 19 nt, Artificial Sequence
  Description of Artificial Sequence: Synthetic oligonucleotide
  Sense strand starting at position 94 of SEQ ID NO: 1880992
aaugcagaaugugcucaua

SEQ ID NO: 2009697 - RNA, 19 nt, Artificial Sequence
  Description of Artificial Sequence: Synthetic oligonucleotide
  Antisense strand to SEQ ID NO: 2009696
uaugagcacauucugcauu

SEQ ID NO: 2009698 - RNA, 19 nt, Artificial Sequence
  Description of Artificial Sequence: Synthetic oligonucleotide
  Sense strand starting at position 97 of SEQ ID NO: 1880992
gcagaaugugcucauacca

SEQ ID NO: 2009699 - RNA, 19 nt, Artificial Sequence
  Description of Artificial Sequence: Synthetic oligonucleotide
  Antisense strand to SEQ ID NO: 2009698
ugguaugagcacauucugc

SEQ ID NO: 2009700 - RNA, 19 nt, Artificial Sequence
  Description of Artificial Sequence: Synthetic oligonucleotide
  Sense strand starting at position 162 of SEQ ID NO: 1880992
agcuuuggcuccugaguua

SEQ ID NO: 2009701 - RNA, 19 nt, Artificial Sequence
  Description of Artificial Sequence: Synthetic oligonucleotide
  Antisense strand to SEQ ID NO: 2009700
uaacucaggagccaaagcu

SEQ ID NO: 2009702 - RNA, 19 nt, Artificial Sequence
  Description of Artificial Sequence: Synthetic oligonucleotide
  Sense strand starting at position 183 of SEQ ID NO: 1880992
caaacugucucggcuggua

SEQ ID NO: 2009703 - RNA, 19 nt, Artificial Sequence
  Description of Artificial Sequence: Synthetic oligonucleotide
  Antisense strand to SEQ ID NO: 2009702
uaccagccgagacaguuug

SEQ ID NO: 2009704 - RNA, 19 nt, Artificial Sequence
  Description of Artificial Sequence: Synthetic oligonucleotide
  Sense strand starting at position 1046 of SEQ ID NO: 1880992
ugggcaugugaacaacuau

SEQ ID NO: 2009705 - RNA, 19 nt, Artificial Sequence
  Description of Artificial Sequence: Synthetic oligonucleotide
  Antisense strand to SEQ ID NO: 2009704
auaguuguucacaugccca

SEQ ID NO: 2009706 - RNA, 19 nt, Artificial Sequence
  Description of Artificial Sequence: Synthetic oligonucleotide
  Sense strand starting at position 1148 of SEQ ID NO: 1880992
auugaucucugagugcuaa

SEQ ID NO: 2009707 - RNA, 19 nt, Artificial Sequence
  Description of Artificial Sequence: Synthetic oligonucleotide
  Antisense strand to SEQ ID NO: 2009706
uuagcacucagagaucaau

SEQ ID NO: 2009708 - RNA, 19 nt, Artificial Sequence
  Description of Artificial Sequence: Synthetic oligonucleotide
  Sense strand starting at position 1149 of SEQ ID NO: 1880992
uugaucucugagugcuaaa

SEQ ID NO: 2009709 - RNA, 19 nt, Artificial Sequence
  Description of Artificial Sequence: Synthetic oligonucleotide
  Antisense strand to SEQ ID NO: 2009708
uuuagcacucagagaucaa

SEQ ID NO: 2009710 - RNA, 19 nt, Artificial Sequence
  Description of Artificial Sequence: Synthetic oligonucleotide
  Sense strand starting at position 1345 of SEQ ID NO: 1880992
aggcgccugugcugagaau

SEQ ID NO: 2009711 - RNA, 19 nt, Artificial Sequence
  Description of Artificial Sequence: Synthetic oligonucleotide
  Antisense strand to SEQ ID NO: 2009710
auucucagcacaggcgccu

SEQ ID NO: 2009712 - RNA, 19 nt, Artificial Sequence
  Description of Artificial Sequence: Synthetic oligonucleotide
  Sense strand starting at position 3341 of SEQ ID NO: 1880992
agcgauaucugccacaaag

SEQ ID NO: 2009713 - RNA, 19 nt, Artificial Sequence
  Description of Artificial Sequence: Synthetic oligonucleotide
  Antisense strand to SEQ ID NO: 2009712
cuuuguggcagauaucgcu

SEQ ID NO: 2009714 - RNA, 19 nt, Artificial Sequence
  Description of Artificial Sequence: Synthetic oligonucleotide
  Sense strand starting at position 3343 of SEQ ID NO: 1880992
cgauaucugccacaaagau

SEQ ID NO: 2009715 - RNA, 19 nt, Artificial Sequence
  Description of Artificial Sequence: Synthetic oligonucleotide
  Antisense strand to SEQ ID NO: 2009714
aucuuuguggcagauaucg

SEQ ID NO: 2009716 - RNA, 19 nt, Artificial Sequence
  Description of Artificial Sequence: Synthetic oligonucleotide
  Sense strand starting at position 3649 of SEQ ID NO: 1880992
ggaagagucucgagagcua

SEQ ID NO: 2009717 - RNA, 19 nt, Artificial Sequence
  Description of Artificial Sequence: Synthetic oligonucleotide
  Antisense strand to SEQ ID NO: 2009716
uagcucucgagacucuucc

SEQ ID NO: 2009718 - RNA, 19 nt, Artificial Sequence
  Description of Artificial Sequence: Synthetic oligonucleotide
  Sense strand starting at position 3775 of SEQ ID NO: 1880992
gggaauuaauucgaauuga

SEQ ID NO: 2009719 - RNA, 19 nt, Artificial Sequence
  Description of Artificial Sequence: Synthetic oligonucleotide
  Antisense strand to SEQ ID NO: 2009718
ucaauucgaauuaauuccc

SEQ ID NO: 2009720 - RNA, 19 nt, Artificial Sequence
  Description of Artificial Sequence: Synthetic oligonucleotide
  Sense strand starting at position 778 of SEQ ID NO: 1880993
augcauuugccaugagcca

SEQ ID NO: 2009721 - RNA, 19 nt, Artificial Sequence
  Description of Artificial Sequence: Synthetic oligonucleotide
  Antisense strand to SEQ ID NO: 2009720
uggcucauggcaaaugcau

SEQ ID NO: 2009722 - RNA, 19 nt, Artificial Sequence
  Description of Artificial Sequence: Synthetic oligonucleotide
  Sense strand starting at position 2235 of SEQ ID NO: 1880993
caggaugagcgucaugaga

SEQ ID NO: 2009723 - RNA, 19 nt, Artificial Sequence
  Description of Artificial Sequence: Synthetic oligonucleotide
  Antisense strand to SEQ ID NO: 2009722
ucucaugacgcucauccug

SEQ ID NO: 2009724 - RNA, 19 nt, Artificial Sequence
  Description of Artificial Sequence: Synthetic oligonucleotide
  Sense strand starting at position 2290 of SEQ ID NO: 1880993
gggcagguccuggguagau

SEQ ID NO: 2009725 - RNA, 19 nt, Artificial Sequence
  Description of Artificial Sequence: Synthetic oligonucleotide
  Antisense strand to SEQ ID NO: 2009724
aucuacccaggaccugccc

SEQ ID NO: 2009726 - RNA, 19 nt, Artificial Sequence
  Description of Artificial Sequence: Synthetic oligonucleotide
  Sense strand starting at position 2566 of SEQ ID NO: 1880993
gggcguugacuaugucuua

SEQ ID NO: 2009727 - RNA, 19 nt, Artificial Sequence
  Description of Artificial Sequence: Synthetic oligonucleotide
  Antisense strand to SEQ ID NO: 2009726
uaagacauagucaacgccc

SEQ ID NO: 2009728 - RNA, 19 nt, Artificial Sequence
  Description of Artificial Sequence: Synthetic oligonucleotide
  Sense strand starting at position 2569 of SEQ ID NO: 1880993
cguugacuaugucuuagca

SEQ ID NO: 2009729 - RNA, 19 nt, Artificial Sequence
  Description of Artificial Sequence: Synthetic oligonucleotide
  Antisense strand to SEQ ID NO: 2009728
ugcuaagacauagucaacg

SEQ ID NO: 2009730 - RNA, 19 nt, Artificial Sequence
  Description of Artificial Sequence: Synthetic oligonucleotide
  Sense strand starting at position 2571 of SEQ ID NO: 1880993
uugacuaugucuuagcaca

SEQ ID NO: 2009731 - RNA, 19 nt, Artificial Sequence
  Description of Artificial Sequence: Synthetic oligonucleotide
  Antisense strand to SEQ ID NO: 2009730
ugugcuaagacauagucaa

SEQ ID NO: 2009732 - RNA, 19 nt, Artificial Sequence
  Description of Artificial Sequence: Synthetic oligonucleotide
  Sense strand starting at position 2573 of SEQ ID NO: 1880993
gacuaugucuuagcacaug

SEQ ID NO: 2009733 - RNA, 19 nt, Artificial Sequence
  Description of Artificial Sequence: Synthetic oligonucleotide
  Antisense strand to SEQ ID NO: 2009732
caugugcuaagacauaguc

SEQ ID NO: 2009734 - RNA, 19 nt, Artificial Sequence
  Description of Artificial Sequence: Synthetic oligonucleotide
  Sense strand starting at position 3280 of SEQ ID NO: 1880993
cuuauuaagugccugacaa

SEQ ID NO: 2009735 - RNA, 19 nt, Artificial Sequence
  Description of Artificial Sequence: Synthetic oligonucleotide
  Antisense strand to SEQ ID NO: 2009734
uugucaggcacuuaauaag

SEQ ID NO: 2009736 - RNA, 19 nt, Artificial Sequence
  Description of Artificial Sequence: Synthetic oligonucleotide
  Sense strand starting at position 3281 of SEQ ID NO: 1880993
uuauuaagugccugacaac

SEQ ID NO: 2009737 - RNA, 19 nt, Artificial Sequence
  Description of Artificial Sequence: Synthetic oligonucleotide
  Antisense strand to SEQ ID NO: 2009736
guugucaggcacuuaauaa

SEQ ID NO: 2009738 - RNA, 19 nt, Artificial Sequence
  Description of Artificial Sequence: Synthetic oligonucleotide
  Sense strand starting at position 3416 of SEQ ID NO: 1880993
gcauaucugccacgaaggu

SEQ ID NO: 2009739 - RNA, 19 nt, Artificial Sequence
  Description of Artificial Sequence: Synthetic oligonucleotide
  Antisense strand to SEQ ID NO: 2009738
accuucguggcagauaugc

SEQ ID NO: 2009740 - RNA, 19 nt, Artificial Sequence
  Description of Artificial Sequence: Synthetic oligonucleotide
  Sense strand starting at position 3642 of SEQ ID NO: 1880993
ucaguacugucccugaaau

SEQ ID NO: 2009741 - RNA, 19 nt, Artificial Sequence
  Description of Artificial Sequence: Synthetic oligonucleotide
  Antisense strand to SEQ ID NO: 2009740
auuucagggacaguacuga

SEQ ID NO: 2009742 - RNA, 19 nt, Artificial Sequence
  Description of Artificial Sequence: Synthetic oligonucleotide
  Sense strand starting at position 3644 of SEQ ID NO: 1880993
aguacugucccugaaaucu

SEQ ID NO: 2009743 - RNA, 19 nt, Artificial Sequence
  Description of Artificial Sequence: Synthetic oligonucleotide
  Antisense strand to SEQ ID NO: 2009742
agauuucagggacaguacu

SEQ ID NO: 2009744 - RNA, 19 nt, Artificial Sequence
  Description of Artificial Sequence: Synthetic oligonucleotide
  Sense strand starting at position 3743 of SEQ ID NO: 1880993
uguuaaguauacuugcaga

SEQ ID NO: 2009745 - RNA, 19 nt, Artificial Sequence
  Description of Artificial Sequence: Synthetic oligonucleotide
  Antisense strand to SEQ ID NO: 2009744
ucugcaaguauacuuaaca

SEQ ID NO: 2009746 - RNA, 19 nt, Artificial Sequence
  Description of Artificial Sequence: Synthetic oligonucleotide
  Sense strand starting at position 11 of SEQ ID NO: 1880994
cuggucagccaggaauuaa

SEQ ID NO: 2009747 - RNA, 19 nt, Artificial Sequence
  Description of Artificial Sequence: Synthetic oligonucleotide
  Antisense strand to SEQ ID NO: 2009746
uuaauuccuggcugaccag

SEQ ID NO: 2009748 - RNA, 19 nt, Artificial Sequence
  Description of Artificial Sequence: Synthetic oligonucleotide
  Sense strand starting at position 110 of SEQ ID NO: 1880994
ggguuacauuguccucuca

SEQ ID NO: 2009749 - RNA, 19 nt, Artificial Sequence
  Description of Artificial Sequence: Synthetic oligonucleotide
  Antisense strand to SEQ ID NO: 2009748
ugagaggacaauguaaccc

SEQ ID NO: 2009750 - RNA, 19 nt, Artificial Sequence
  Description of Artificial Sequence: Synthetic oligonucleotide
  Sense strand starting at position 112 of SEQ ID NO: 1880994
guuacauuguccucucaca

SEQ ID NO: 2009751 - RNA, 19 nt, Artificial Sequence
  Description of Artificial Sequence: Synthetic oligonucleotide
  Antisense strand to SEQ ID NO: 2009750
ugugagaggacaauguaac

SEQ ID NO: 2009752 - RNA, 19 nt, Artificial Sequence
  Description of Artificial Sequence: Synthetic oligonucleotide
  Sense strand starting at position 152 of SEQ ID NO: 1880994
aacuuuggcucccgaguua

SEQ ID NO: 2009753 - RNA, 19 nt, Artificial Sequence
  Description of Artificial Sequence: Synthetic oligonucleotide
  Antisense strand to SEQ ID NO: 2009752
uaacucgggagccaaaguu

SEQ ID NO: 2009754 - RNA, 19 nt, Artificial Sequence
  Description of Artificial Sequence: Synthetic oligonucleotide
  Sense strand starting at position 173 of SEQ ID NO: 1880994
cagacugucucagcuggua

SEQ ID NO: 2009755 - RNA, 19 nt, Artificial Sequence
  Description of Artificial Sequence: Synthetic oligonucleotide
  Antisense strand to SEQ ID NO: 2009754
uaccagcugagacagucug

SEQ ID NO: 2009756 - RNA, 19 nt, Artificial Sequence
  Description of Artificial Sequence: Synthetic oligonucleotide
  Sense strand starting at position 178 of SEQ ID NO: 1880994
ugucucagcugguauguga

SEQ ID NO: 2009757 - RNA, 19 nt, Artificial Sequence
  Description of Artificial Sequence: Synthetic oligonucleotide
  Antisense strand to SEQ ID NO: 2009756
ucacauaccagcugagaca

SEQ ID NO: 2009758 - RNA, 19 nt, Artificial Sequence
  Description of Artificial Sequence: Synthetic oligonucleotide
  Sense strand starting at position 1325 of SEQ ID NO: 1880994
ccaugugccugugcugaga

SEQ ID NO: 2009759 - RNA, 19 nt, Artificial Sequence
  Description of Artificial Sequence: Synthetic oligonucleotide
  Antisense strand to SEQ ID NO: 2009758
ucucagcacaggcacaugg

SEQ ID NO: 2009760 - RNA, 19 nt, Artificial Sequence
  Description of Artificial Sequence: Synthetic oligonucleotide
  Sense strand starting at position 1390 of SEQ ID NO: 1880994
uuccaucacaggugugaga

SEQ ID NO: 2009761 - RNA, 19 nt, Artificial Sequence
  Description of Artificial Sequence: Synthetic oligonucleotide
  Antisense strand to SEQ ID NO: 2009760
ucucacaccugugauggaa

SEQ ID NO: 2009762 - RNA, 19 nt, Artificial Sequence
  Description of Artificial Sequence: Synthetic oligonucleotide
  Sense strand starting at position 1430 of SEQ ID NO: 1880994
cugugcaguucucaacaua

SEQ ID NO: 2009763 - RNA, 19 nt, Artificial Sequence
  Description of Artificial Sequence: Synthetic oligonucleotide
  Antisense strand to SEQ ID NO: 2009762
uauguugagaacugcacag

SEQ ID NO: 2009764 - RNA, 19 nt, Artificial Sequence
  Description of Artificial Sequence: Synthetic oligonucleotide
  Sense strand starting at position 1613 of SEQ ID NO: 1880994
gaucgugaacuguauccca

SEQ ID NO: 2009765 - RNA, 19 nt, Artificial Sequence
  Description of Artificial Sequence: Synthetic oligonucleotide
  Antisense strand to SEQ ID NO: 2009764
ugggauacaguucacgauc

SEQ ID NO: 2009766 - RNA, 19 nt, Artificial Sequence
  Description of Artificial Sequence: Synthetic oligonucleotide
  Sense strand starting at position 1616 of SEQ ID NO: 1880994
cgugaacuguaucccacaa

SEQ ID NO: 2009767 - RNA, 19 nt, Artificial Sequence
  Description of Artificial Sequence: Synthetic oligonucleotide
  Antisense strand to SEQ ID NO: 2009766
uugugggauacaguucacg

SEQ ID NO: 2009768 - RNA, 19 nt, Artificial Sequence
  Description of Artificial Sequence: Synthetic oligonucleotide
  Sense strand starting at position 3340 of SEQ ID NO: 1880994
cacaaaugagcaugaaagu

SEQ ID NO: 2009769 - RNA, 19 nt, Artificial Sequence
  Description of Artificial Sequence: Synthetic oligonucleotide
  Antisense strand to SEQ ID NO: 2009768
acuuucaugcucauuugug

SEQ ID NO: 2009770 - RNA, 19 nt, Artificial Sequence
  Description of Artificial Sequence: Synthetic oligonucleotide
  Sense strand starting at position 3771 of SEQ ID NO: 1880994
ccugcucagccgugagaau

SEQ ID NO: 2009771 - RNA, 19 nt, Artificial Sequence
  Description of Artificial Sequence: Synthetic oligonucleotide
  Antisense strand to SEQ ID NO: 2009770
auucucacggcugagcagg

SEQ ID NO: 2009772 - RNA, 19 nt, Artificial Sequence
  Description of Artificial Sequence: Synthetic oligonucleotide
  Sense strand starting at position 3772 of SEQ ID NO: 1880994
cugcucagccgugagaaua

SEQ ID NO: 2009773 - RNA, 19 nt, Artificial Sequence
  Description of Artificial Sequence: Synthetic oligonucleotide
  Antisense strand to SEQ ID NO: 2009772
uauucucacggcugagcag

SEQ ID NO: 2009774 - RNA, 19 nt, Artificial Sequence
  Description of Artificial Sequence: Synthetic oligonucleotide
  Sense strand starting at position 3974 of SEQ ID NO: 1880994
aguuucugggucugagaua

SEQ ID NO: 2009775 - RNA, 19 nt, Artificial Sequence
  Description of Artificial Sequence: Synthetic oligonucleotide
  Antisense strand to SEQ ID NO: 2009774
uaucucagacccagaaacu

SEQ ID NO: 2009776 - RNA, 19 nt, Artificial Sequence
  Description of Artificial Sequence: Synthetic oligonucleotide
  Sense strand starting at position 40 of SEQ ID NO: 1880997
ggaaauagcuguguuuaaa

SEQ ID NO: 2009777 - RNA, 19 nt, Artificial Sequence
  Description of Artificial Sequence: Synthetic oligonucleotide
  Antisense strand to SEQ ID NO: 2009776
uuuaaacacagcuauuucc

SEQ ID NO: 2009778 - RNA, 19 nt, Artificial Sequence
  Description of Artificial Sequence: Synthetic oligonucleotide
  Sense strand starting at position 104 of SEQ ID NO: 1880997
auacuaaauguuggaguca

SEQ ID NO: 2009779 - RNA, 19 nt, Artificial Sequence
  Description of Artificial Sequence: Synthetic oligonucleotide
  Antisense strand to SEQ ID NO: 2009778
ugacuccaacauuuaguau

SEQ ID NO: 2009780 - RNA, 19 nt, Artificial Sequence
  Description of Artificial Sequence: Synthetic oligonucleotide
  Sense strand starting at position 139 of SEQ ID NO: 1880997
aauggauacugugugggaa

SEQ ID NO: 2009781 - RNA, 19 nt, Artificial Sequence
  Description of Artificial Sequence: Synthetic oligonucleotide
  Antisense strand to SEQ ID NO: 2009780
uucccacacaguauccauu

SEQ ID NO: 2009782 - RNA, 19 nt, Artificial Sequence
  Description of Artificial Sequence: Synthetic oligonucleotide
  Sense strand starting at position 140 of SEQ ID NO: 1880997
auggauacugugugggaaa

SEQ ID NO: 2009783 - RNA, 19 nt, Artificial Sequence
  Description of Artificial Sequence: Synthetic oligonucleotide
  Antisense strand to SEQ ID NO: 2009782
uuucccacacaguauccau

SEQ ID NO: 2009784 - RNA, 19 nt, Artificial Sequence
  Description of Artificial Sequence: Synthetic oligonucleotide
  Sense strand starting at position 263 of SEQ ID NO: 1880997
cagggcauuuaggauaaau

SEQ ID NO: 2009785 - RNA, 19 nt, Artificial Sequence
  Description of Artificial Sequence: Synthetic oligonucleotide
  Antisense strand to SEQ ID NO: 2009784
auuuauccuaaaugcccug

SEQ ID NO: 2009786 - RNA, 19 nt, Artificial Sequence
  Description of Artificial Sequence: Synthetic oligonucleotide
  Sense strand starting at position 347 of SEQ ID NO: 1880997
ccuacagcccaagaguuua

SEQ ID NO: 2009787 - RNA, 19 nt, Artificial Sequence
  Description of Artificial Sequence: Synthetic oligonucleotide
  Antisense strand to SEQ ID NO: 2009786
uaaacucuugggcuguagg

SEQ ID NO: 2009788 - RNA, 19 nt, Artificial Sequence
  Description of Artificial Sequence: Synthetic oligonucleotide
  Sense strand starting at position 495 of SEQ ID NO: 1880997
aucguauguuuacuaagaa

SEQ ID NO: 2009789 - RNA, 19 nt, Artificial Sequence
  Description of Artificial Sequence: Synthetic oligonucleotide
  Antisense strand to SEQ ID NO: 2009788
uucuuaguaaacauacgau

SEQ ID NO: 2009790 - RNA, 19 nt, Artificial Sequence
  Description of Artificial Sequence: Synthetic oligonucleotide
  Sense strand starting at position 722 of SEQ ID NO: 1880997
ggcuucuuccaacaacaga

SEQ ID NO: 2009791 - RNA, 19 nt, Artificial Sequence
  Description of Artificial Sequence: Synthetic oligonucleotide
  Antisense strand to SEQ ID NO: 2009790
ucuguuguuggaagaagcc

SEQ ID NO: 2009792 - RNA, 19 nt, Artificial Sequence
  Description of Artificial Sequence: Synthetic oligonucleotide
  Sense strand starting at position 2067 of SEQ ID NO: 1880997
ggaagagggugguccuuau

SEQ ID NO: 2009793 - RNA, 19 nt, Artificial Sequence
  Description of Artificial Sequence: Synthetic oligonucleotide
  Antisense strand to SEQ ID NO: 2009792
auaaggaccacccucuucc

SEQ ID NO: 2009794 - RNA, 19 nt, Artificial Sequence
  Description of Artificial Sequence: Synthetic oligonucleotide
  Sense strand starting at position 2613 of SEQ ID NO: 1880997
agcacaauucgggagugau

SEQ ID NO: 2009795 - RNA, 19 nt, Artificial Sequence
  Description of Artificial Sequence: Synthetic oligonucleotide
  Antisense strand to SEQ ID NO: 2009794
aucacucccgaauugugcu

SEQ ID NO: 2009796 - RNA, 19 nt, Artificial Sequence
  Description of Artificial Sequence: Synthetic oligonucleotide
  Sense strand starting at position 2616 of SEQ ID NO: 1880997
acaauucgggagugauucu

SEQ ID NO: 2009797 - RNA, 19 nt, Artificial Sequence
  Description of Artificial Sequence: Synthetic oligonucleotide
  Antisense strand to SEQ ID NO: 2009796
agaaucacucccgaauugu

SEQ ID NO: 2009798 - RNA, 19 nt, Artificial Sequence
  Description of Artificial Sequence: Synthetic oligonucleotide
  Sense strand starting at position 2623 of SEQ ID NO: 1880997
gggagugauucucuucuca

SEQ ID NO: 2009799 - RNA, 19 nt, Artificial Sequence
  Description of Artificial Sequence: Synthetic oligonucleotide
  Antisense strand to SEQ ID NO: 2009798
ugagaagagaaucacuccc

SEQ ID NO: 2009800 - RNA, 19 nt, Artificial Sequence
  Description of Artificial Sequence: Synthetic oligonucleotide
  Sense strand starting at position 2772 of SEQ ID NO: 1880997
gucauaaguucugugaaag

SEQ ID NO: 2009801 - RNA, 19 nt, Artificial Sequence
  Description of Artificial Sequence: Synthetic oligonucleotide
  Antisense strand to SEQ ID NO: 2009800
cuuucacagaacuuaugac

SEQ ID NO: 2009802 - RNA, 19 nt, Artificial Sequence
  Description of Artificial Sequence: Synthetic oligonucleotide
  Sense strand starting at position 2773 of SEQ ID NO: 1880997
ucauaaguucugugaaaga

SEQ ID NO: 2009803 - RNA, 19 nt, Artificial Sequence
  Description of Artificial Sequence: Synthetic oligonucleotide
  Antisense strand to SEQ ID NO: 2009802
ucuuucacagaacuuauga

SEQ ID NO: 2009804 - RNA, 19 nt, Artificial Sequence
  Description of Artificial Sequence: Synthetic oligonucleotide
  Sense strand starting at position 2855 of SEQ ID NO: 1880997
ggccucucugaguaaguga

SEQ ID NO: 2009805 - RNA, 19 nt, Artificial Sequence
  Description of Artificial Sequence: Synthetic oligonucleotide
  Antisense strand to SEQ ID NO: 2009804
ucacuuacucagagaggcc

SEQ ID NO: 2009806 - RNA, 19 nt, Artificial Sequence
  Description of Artificial Sequence: Synthetic oligonucleotide
  Sense strand starting at position 2860 of SEQ ID NO: 1880997
cucugaguaagugauguuu

SEQ ID NO: 2009807 - RNA, 19 nt, Artificial Sequence
  Description of Artificial Sequence: Synthetic oligonucleotide
  Antisense strand to SEQ ID NO: 2009806
aaacaucacuuacucagag

SEQ ID NO: 2009808 - RNA, 19 nt, Artificial Sequence
  Description of Artificial Sequence: Synthetic oligonucleotide
  Sense strand starting at position 2866 of SEQ ID NO: 1880997
guaagugauguuugaacag

SEQ ID NO: 2009809 - RNA, 19 nt, Artificial Sequence
  Description of Artificial Sequence: Synthetic oligonucleotide
  Antisense strand to SEQ ID NO: 2009808
cuguucaaacaucacuuac

SEQ ID NO: 2009810 - RNA, 19 nt, Artificial Sequence
  Description of Artificial Sequence: Synthetic oligonucleotide
  Sense strand starting at position 2942 of SEQ ID NO: 1880997
ggaagagcauuugauguga

SEQ ID NO: 2009811 - RNA, 19 nt, Artificial Sequence
  Description of Artificial Sequence: Synthetic oligonucleotide
  Antisense strand to SEQ ID NO: 2009810
ucacaucaaaugcucuucc

SEQ ID NO: 2009812 - RNA, 19 nt, Artificial Sequence
  Description of Artificial Sequence: Synthetic oligonucleotide
  Sense strand starting at position 2951 of SEQ ID NO: 1880997
uuugaugugaucgagaacu

SEQ ID NO: 2009813 - RNA, 19 nt, Artificial Sequence
  Description of Artificial Sequence: Synthetic oligonucleotide
  Antisense strand to SEQ ID NO: 2009812
aguucucgaucacaucaaa

SEQ ID NO: 2009814 - RNA, 19 nt, Artificial Sequence
  Description of Artificial Sequence: Synthetic oligonucleotide
  Sense strand starting at position 2981 of SEQ ID NO: 1880997
gcuggagaguugguuggaa

SEQ ID NO: 2009815 - RNA, 19 nt, Artificial Sequence
  Description of Artificial Sequence: Synthetic oligonucleotide
  Antisense strand to SEQ ID NO: 2009814
uuccaaccaacucuccagc

SEQ ID NO: 2009816 - RNA, 19 nt, Artificial Sequence
  Description of Artificial Sequence: Synthetic oligonucleotide
  Sense strand starting at position 2983 of SEQ ID NO: 1880997
uggagaguugguuggaacu

SEQ ID NO: 2009817 - RNA, 19 nt, Artificial Sequence
  Description of Artificial Sequence: Synthetic oligonucleotide
  Antisense strand to SEQ ID NO: 2009816
aguuccaaccaacucucca

SEQ ID NO: 2009818 - RNA, 19 nt, Artificial Sequence
  Description of Artificial Sequence: Synthetic oligonucleotide
  Sense strand starting at position 2989 of SEQ ID NO: 1880997
guugguuggaacuaguaau

SEQ ID NO: 2009819 - RNA, 19 nt, Artificial Sequence
  Description of Artificial Sequence: Synthetic oligonucleotide
  Antisense strand to SEQ ID NO: 2009818
auuacuaguuccaaccaac

SEQ ID NO: 2009820 - RNA, 19 nt, Artificial Sequence
  Description of Artificial Sequence: Synthetic oligonucleotide
  Sense strand starting at position 2999 of SEQ ID NO: 1880997
acuaguaauuguccauuau

SEQ ID NO: 2009821 - RNA, 19 nt, Artificial Sequence
  Description of Artificial Sequence: Synthetic oligonucleotide
  Antisense strand to SEQ ID NO: 2009820
auaauggacaauuacuagu

SEQ ID NO: 2009822 - RNA, 19 nt, Artificial Sequence
  Description of Artificial Sequence: Synthetic oligonucleotide
  Sense strand starting at position 3000 of SEQ ID NO: 1880997
cuaguaauuguccauuauc

SEQ ID NO: 2009823 - RNA, 19 nt, Artificial Sequence
  Description of Artificial Sequence: Synthetic oligonucleotide
  Antisense strand to SEQ ID NO: 2009822
gauaauggacaauuacuag

SEQ ID NO: 2009824 - RNA, 19 nt, Artificial Sequence
  Description of Artificial Sequence: Synthetic oligonucleotide
  Sense strand starting at position 3003 of SEQ ID NO: 1880997
guaauuguccauuauccca

SEQ ID NO: 2009825 - RNA, 19 nt, Artificial Sequence
  Description of Artificial Sequence: Synthetic oligonucleotide
  Antisense strand to SEQ ID NO: 2009824
ugggauaauggacaauuac

SEQ ID NO: 2009826 - RNA, 19 nt, Artificial Sequence
  Description of Artificial Sequence: Synthetic oligonucleotide
  Sense strand starting at position 3033 of SEQ ID NO: 1880997
agccaaaggcugugaaaua

SEQ ID NO: 2009827 - RNA, 19 nt, Artificial Sequence
  Description of Artificial Sequence: Synthetic oligonucleotide
  Antisense strand to SEQ ID NO: 2009826
uauuucacagccuuuggcu

SEQ ID NO: 2009828 - RNA, 19 nt, Artificial Sequence
  Description of Artificial Sequence: Synthetic oligonucleotide
  Sense strand starting at position 3223 of SEQ ID NO: 1880997
aguauuuccugagugcuac

SEQ ID NO: 2009829 - RNA, 19 nt, Artificial Sequence
  Description of Artificial Sequence: Synthetic oligonucleotide
  Antisense strand to SEQ ID NO: 2009828
guagcacucaggaaauacu

SEQ ID NO: 2009830 - RNA, 19 nt, Artificial Sequence
  Description of Artificial Sequence: Synthetic oligonucleotide
  Sense strand starting at position 3240 of SEQ ID NO: 1880997
acgaauacuccaggcacua

SEQ ID NO: 2009831 - RNA, 19 nt, Artificial Sequence
  Description of Artificial Sequence: Synthetic oligonucleotide
  Antisense strand to SEQ ID NO: 2009830
uagugccuggaguauucgu

SEQ ID NO: 2009832 - RNA, 19 nt, Artificial Sequence
  Description of Artificial Sequence: Synthetic oligonucleotide
  Sense strand starting at position 3284 of SEQ ID NO: 1880997
guaagacacugguccucaa

SEQ ID NO: 2009833 - RNA, 19 nt, Artificial Sequence
  Description of Artificial Sequence: Synthetic oligonucleotide
  Antisense strand to SEQ ID NO: 2009832
uugaggaccagugucuuac

SEQ ID NO: 2009834 - RNA, 19 nt, Artificial Sequence
  Description of Artificial Sequence: Synthetic oligonucleotide
  Sense strand starting at position 3287 of SEQ ID NO: 1880997
agacacugguccucaaaca

SEQ ID NO: 2009835 - RNA, 19 nt, Artificial Sequence
  Description of Artificial Sequence: Synthetic oligonucleotide
  Antisense strand to SEQ ID NO: 2009834
uguuugaggaccagugucu

SEQ ID NO: 2009836 - RNA, 19 nt, Artificial Sequence
  Description of Artificial Sequence: Synthetic oligonucleotide
  Sense strand starting at position 3367 of SEQ ID NO: 1880997
ccaggcuggaguugaauau

SEQ ID NO: 2009837 - RNA, 19 nt, Artificial Sequence
  Description of Artificial Sequence: Synthetic oligonucleotide
  Antisense strand to SEQ ID NO: 2009836
auauucaacuccagccugg

SEQ ID NO: 2009838 - RNA, 19 nt, Artificial Sequence
  Description of Artificial Sequence: Synthetic oligonucleotide
  Sense strand starting at position 3371 of SEQ ID NO: 1880997
gcuggaguugaauauaauu

SEQ ID NO: 2009839 - RNA, 19 nt, Artificial Sequence
  Description of Artificial Sequence: Synthetic oligonucleotide
  Antisense strand to SEQ ID NO: 2009838
aauuauauucaacuccagc

SEQ ID NO: 2009840 - RNA, 19 nt, Artificial Sequence
  Description of Artificial Sequence: Synthetic oligonucleotide
  Sense strand starting at position 3542 of SEQ ID NO: 1880997
uguccucaucuggacaaua

SEQ ID NO: 2009841 - RNA, 19 nt, Artificial Sequence
  Description of Artificial Sequence: Synthetic oligonucleotide
  Antisense strand to SEQ ID NO: 2009840
uauuguccagaugaggaca

SEQ ID NO: 2009842 - RNA, 19 nt, Artificial Sequence
  Description of Artificial Sequence: Synthetic oligonucleotide
  Sense strand starting at position 3637 of SEQ ID NO: 1880997
agcaaauacuguguaaaua

SEQ ID NO: 2009843 - RNA, 19 nt, Artificial Sequence
  Description of Artificial Sequence: Synthetic oligonucleotide
  Antisense strand to SEQ ID NO: 2009842
uauuuacacaguauuugcu

SEQ ID NO: 2009844 - RNA, 19 nt, Artificial Sequence
  Description of Artificial Sequence: Synthetic oligonucleotide
  Sense strand starting at position 3638 of SEQ ID NO: 1880997
gcaaauacuguguaaauag

SEQ ID NO: 2009845 - RNA, 19 nt, Artificial Sequence
  Description of Artificial Sequence: Synthetic oligonucleotide
  Antisense strand to SEQ ID NO: 2009844
cuauuuacacaguauuugc

SEQ ID NO: 2009846 - RNA, 19 nt, Artificial Sequence
  Description of Artificial Sequence: Synthetic oligonucleotide
  Sense strand starting at position 3682 of SEQ ID NO: 1880997
ugguauagacauuggacua

SEQ ID NO: 2009847 - RNA, 19 nt, Artificial Sequence
  Description of Artificial Sequence: Synthetic oligonucleotide
  Antisense strand to SEQ ID NO: 2009846
uaguccaaugucuauacca

SEQ ID NO: 2009848 - RNA, 19 nt, Artificial Sequence
  Description of Artificial Sequence: Synthetic oligonucleotide
  Sense strand starting at position 3694 of SEQ ID NO: 1880997
uggacuaauuaagugauau

SEQ ID NO: 2009849 - RNA, 19 nt, Artificial Sequence
  Description of Artificial Sequence: Synthetic oligonucleotide
  Antisense strand to SEQ ID NO: 2009848
auaucacuuaauuagucca

SEQ ID NO: 2009850 - RNA, 19 nt, Artificial Sequence
  Description of Artificial Sequence: Synthetic oligonucleotide
  Sense strand starting at position 3758 of SEQ ID NO: 1880997
agauucgaacaccgagauu

SEQ ID NO: 2009851 - RNA, 19 nt, Artificial Sequence
  Description of Artificial Sequence: Synthetic oligonucleotide
  Antisense strand to SEQ ID NO: 2009850
aaucucgguguucgaaucu

SEQ ID NO: 2009852 - RNA, 19 nt, Artificial Sequence
  Description of Artificial Sequence: Synthetic oligonucleotide
  Sense strand starting at position 3761 of SEQ ID NO: 1880997
uucgaacaccgagauucua

SEQ ID NO: 2009853 - RNA, 19 nt, Artificial Sequence
  Description of Artificial Sequence: Synthetic oligonucleotide
  Antisense strand to SEQ ID NO: 2009852
uagaaucucgguguucgaa

SEQ ID NO: 2009854 - RNA, 19 nt, Artificial Sequence
  Description of Artificial Sequence: Synthetic oligonucleotide
  Sense strand starting at position 3789 of SEQ ID NO: 1880997
cugugcuugcagcuaguua

SEQ ID NO: 2009855 - RNA, 19 nt, Artificial Sequence
  Description of Artificial Sequence: Synthetic oligonucleotide
  Antisense strand to SEQ ID NO: 2009854
uaacuagcugcaagcacag

SEQ ID NO: 2009856 - RNA, 19 nt, Artificial Sequence
  Description of Artificial Sequence: Synthetic oligonucleotide
  Sense strand starting at position 222 of SEQ ID NO: 1880995
uguuguugcguagcauaaa

SEQ ID NO: 2009857 - RNA, 19 nt, Artificial Sequence
  Description of Artificial Sequence: Synthetic oligonucleotide
  Antisense strand to SEQ ID NO: 2009856
uuuaugcuacgcaacaaca

SEQ ID NO: 2009858 - RNA, 19 nt, Artificial Sequence
  Description of Artificial Sequence: Synthetic oligonucleotide
  Sense strand starting at position 317 of SEQ ID NO: 1880995
uuuccaauuugcuucgaau

SEQ ID NO: 2009859 - RNA, 19 nt, Artificial Sequence
  Description of Artificial Sequence: Synthetic oligonucleotide
  Antisense strand to SEQ ID NO: 2009858
auucgaagcaaauuggaaa

SEQ ID NO: 2009860 - RNA, 19 nt, Artificial Sequence
  Description of Artificial Sequence: Synthetic oligonucleotide
  Sense strand starting at position 323 of SEQ ID NO: 1880995
auuugcuucgaaugcugaa

SEQ ID NO: 2009861 - RNA, 19 nt, Artificial Sequence
  Description of Artificial Sequence: Synthetic oligonucleotide
  Antisense strand to SEQ ID NO: 2009860
uucagcauucgaagcaaau

SEQ ID NO: 2009862 - RNA, 19 nt, Artificial Sequence
  Description of Artificial Sequence: Synthetic oligonucleotide
  Sense strand starting at position 343 of SEQ ID NO: 1880995
gacccuaaugaccguagaa

SEQ ID NO: 2009863 - RNA, 19 nt, Artificial Sequence
  Description of Artificial Sequence: Synthetic oligonucleotide
  Antisense strand to SEQ ID NO: 2009862
uucuacggucauuaggguc

SEQ ID NO: 2009864 - RNA, 19 nt, Artificial Sequence
  Description of Artificial Sequence: Synthetic oligonucleotide
  Sense strand starting at position 345 of SEQ ID NO: 1880995
cccuaaugaccguagaaua

SEQ ID NO: 2009865 - RNA, 19 nt, Artificial Sequence
  Description of Artificial Sequence: Synthetic oligonucleotide
  Antisense strand to SEQ ID NO: 2009864
uauucuacggucauuaggg

SEQ ID NO: 2009866 - RNA, 19 nt, Artificial Sequence
  Description of Artificial Sequence: Synthetic oligonucleotide
  Sense strand starting at position 371 of SEQ ID NO: 1880995
cugaguucuucuguaauuu

SEQ ID NO: 2009867 - RNA, 19 nt, Artificial Sequence
  Description of Artificial Sequence: Synthetic oligonucleotide
  Antisense strand to SEQ ID NO: 2009866
aaauuacagaagaacucag

SEQ ID NO: 2009868 - RNA, 19 nt, Artificial Sequence
  Description of Artificial Sequence: Synthetic oligonucleotide
  Sense strand starting at position 531 of SEQ ID NO: 1880995
ccaaauguguuacugaugu

SEQ ID NO: 2009869 - RNA, 19 nt, Artificial Sequence
  Description of Artificial Sequence: Synthetic oligonucleotide
  Antisense strand to SEQ ID NO: 2009868
acaucaguaacacauuugg

SEQ ID NO: 2009870 - RNA, 19 nt, Artificial Sequence
  Description of Artificial Sequence: Synthetic oligonucleotide
  Sense strand starting at position 558 of SEQ ID NO: 1880995
gucuucgcugcuuuaugaa

SEQ ID NO: 2009871 - RNA, 19 nt, Artificial Sequence
  Description of Artificial Sequence: Synthetic oligonucleotide
  Antisense strand to SEQ ID NO: 2009870
uucauaaagcagcgaagac

SEQ ID NO: 2009872 - RNA, 19 nt, Artificial Sequence
  Description of Artificial Sequence: Synthetic oligonucleotide
  Sense strand starting at position 907 of SEQ ID NO: 1880995
ugugcuuuaccaugacaaa

SEQ ID NO: 2009873 - RNA, 19 nt, Artificial Sequence
  Description of Artificial Sequence: Synthetic oligonucleotide
  Antisense strand to SEQ ID NO: 2009872
uuugucaugguaaagcaca

SEQ ID NO: 2009874 - RNA, 19 nt, Artificial Sequence
  Description of Artificial Sequence: Synthetic oligonucleotide
  Sense strand starting at position 975 of SEQ ID NO: 1880995
gggaaauagcuguguuuaa

SEQ ID NO: 2009875 - RNA, 19 nt, Artificial Sequence
  Description of Artificial Sequence: Synthetic oligonucleotide
  Antisense strand to SEQ ID NO: 2009874
uuaaacacagcuauuuccc

SEQ ID NO: 2009876 - RNA, 19 nt, Artificial Sequence
  Description of Artificial Sequence: Synthetic oligonucleotide
  Sense strand starting at position 976 of SEQ ID NO: 1880995
ggaaauagcuguguuuaaa

SEQ ID NO: 2009877 - RNA, 19 nt, Artificial Sequence
  Description of Artificial Sequence: Synthetic oligonucleotide
  Antisense strand to SEQ ID NO: 2009876
uuuaaacacagcuauuucc

SEQ ID NO: 2009878 - RNA, 19 nt, Artificial Sequence
  Description of Artificial Sequence: Synthetic oligonucleotide
  Sense strand starting at position 1040 of SEQ ID NO: 1880995
auacuaaauguuggaguca

SEQ ID NO: 2009879 - RNA, 19 nt, Artificial Sequence
  Description of Artificial Sequence: Synthetic oligonucleotide
  Antisense strand to SEQ ID NO: 2009878
ugacuccaacauuuaguau

SEQ ID NO: 2009880 - RNA, 19 nt, Artificial Sequence
  Description of Artificial Sequence: Synthetic oligonucleotide
  Sense strand starting at position 1075 of SEQ ID NO: 1880995
aauggauacugugugggaa

SEQ ID NO: 2009881 - RNA, 19 nt, Artificial Sequence
  Description of Artificial Sequence: Synthetic oligonucleotide
  Antisense strand to SEQ ID NO: 2009880
uucccacacaguauccauu

SEQ ID NO: 2009882 - RNA, 19 nt, Artificial Sequence
  Description of Artificial Sequence: Synthetic oligonucleotide
  Sense strand starting at position 1076 of SEQ ID NO: 1880995
auggauacugugugggaaa

SEQ ID NO: 2009883 - RNA, 19 nt, Artificial Sequence
  Description of Artificial Sequence: Synthetic oligonucleotide
  Antisense strand to SEQ ID NO: 2009882
uuucccacacaguauccau

SEQ ID NO: 2009884 - RNA, 19 nt, Artificial Sequence
  Description of Artificial Sequence: Synthetic oligonucleotide
  Sense strand starting at position 1199 of SEQ ID NO: 1880995
cagggcauuuaggauaaau

SEQ ID NO: 2009885 - RNA, 19 nt, Artificial Sequence
  Description of Artificial Sequence: Synthetic oligonucleotide
  Antisense strand to SEQ ID NO: 2009884
auuuauccuaaaugcccug

SEQ ID NO: 2009886 - RNA, 19 nt, Artificial Sequence
  Description of Artificial Sequence: Synthetic oligonucleotide
  Sense strand starting at position 1283 of SEQ ID NO: 1880995
ccuacagcccaagaguuua

SEQ ID NO: 2009887 - RNA, 19 nt, Artificial Sequence
  Description of Artificial Sequence: Synthetic oligonucleotide
  Antisense strand to SEQ ID NO: 2009886
uaaacucuugggcuguagg

SEQ ID NO: 2009888 - RNA, 19 nt, Artificial Sequence
  Description of Artificial Sequence: Synthetic oligonucleotide
  Sense strand starting at position 1428 of SEQ ID NO: 1880995
uggaucguauguuuacuaa

SEQ ID NO: 2009889 - RNA, 19 nt, Artificial Sequence
  Description of Artificial Sequence: Synthetic oligonucleotide
  Antisense strand to SEQ ID NO: 2009888
uuaguaaacauacgaucca

SEQ ID NO: 2009890 - RNA, 19 nt, Artificial Sequence
  Description of Artificial Sequence: Synthetic oligonucleotide
  Sense strand starting at position 1431 of SEQ ID NO: 1880995
aucguauguuuacuaagaa

SEQ ID NO: 2009891 - RNA, 19 nt, Artificial Sequence
  Description of Artificial Sequence: Synthetic oligonucleotide
  Antisense strand to SEQ ID NO: 2009890
uucuuaguaaacauacgau

SEQ ID NO: 2009892 - RNA, 19 nt, Artificial Sequence
  Description of Artificial Sequence: Synthetic oligonucleotide
  Sense strand starting at position 1658 of SEQ ID NO: 1880995
ggcuucuuccaacaacaga

SEQ ID NO: 2009893 - RNA, 19 nt, Artificial Sequence
  Description of Artificial Sequence: Synthetic oligonucleotide
  Antisense strand to SEQ ID NO: 2009892
ucuguuguuggaagaagcc

SEQ ID NO: 2009894 - RNA, 19 nt, Artificial Sequence
  Description of Artificial Sequence: Synthetic oligonucleotide
  Sense strand starting at position 2917 of SEQ ID NO: 1880995
gacggaugggcuggcuaau

SEQ ID NO: 2009895 - RNA, 19 nt, Artificial Sequence
  Description of Artificial Sequence: Synthetic oligonucleotide
  Antisense strand to SEQ ID NO: 2009894
auuagccagcccauccguc

SEQ ID NO: 2009896 - RNA, 19 nt, Artificial Sequence
  Description of Artificial Sequence: Synthetic oligonucleotide
  Sense strand starting at position 3003 of SEQ ID NO: 1880995
ggaagagggugguccuuau

SEQ ID NO: 2009897 - RNA, 19 nt, Artificial Sequence
  Description of Artificial Sequence: Synthetic oligonucleotide
  Antisense strand to SEQ ID NO: 2009896
auaaggaccacccucuucc

SEQ ID NO: 2009898 - RNA, 19 nt, Artificial Sequence
  Description of Artificial Sequence: Synthetic oligonucleotide
  Sense strand starting at position 3549 of SEQ ID NO: 1880995
agcacaauucgggagugau

SEQ ID NO: 2009899 - RNA, 19 nt, Artificial Sequence
  Description of Artificial Sequence: Synthetic oligonucleotide
  Antisense strand to SEQ ID NO: 2009898
aucacucccgaauugugcu

SEQ ID NO: 2009900 - RNA, 19 nt, Artificial Sequence
  Description of Artificial Sequence: Synthetic oligonucleotide
  Sense strand starting at position 3552 of SEQ ID NO: 1880995
acaauucgggagugauucu

SEQ ID NO: 2009901 - RNA, 19 nt, Artificial Sequence
  Description of Artificial Sequence: Synthetic oligonucleotide
  Antisense strand to SEQ ID NO: 2009900
agaaucacucccgaauugu

SEQ ID NO: 2009902 - RNA, 19 nt, Artificial Sequence
  Description of Artificial Sequence: Synthetic oligonucleotide
  Sense strand starting at position 3559 of SEQ ID NO: 1880995
gggagugauucucuucuca

SEQ ID NO: 2009903 - RNA, 19 nt, Artificial Sequence
  Description of Artificial Sequence: Synthetic oligonucleotide
  Antisense strand to SEQ ID NO: 2009902
ugagaagagaaucacuccc

SEQ ID NO: 2009904 - RNA, 19 nt, Artificial Sequence
  Description of Artificial Sequence: Synthetic oligonucleotide
  Sense strand starting at position 3708 of SEQ ID NO: 1880995
gucauaaguucugugaaag

SEQ ID NO: 2009905 - RNA, 19 nt, Artificial Sequence
  Description of Artificial Sequence: Synthetic oligonucleotide
  Antisense strand to SEQ ID NO: 2009904
cuuucacagaacuuaugac

SEQ ID NO: 2009906 - RNA, 19 nt, Artificial Sequence
  Description of Artificial Sequence: Synthetic oligonucleotide
  Sense strand starting at position 3709 of SEQ ID NO: 1880995
ucauaaguucugugaaaga

SEQ ID NO: 2009907 - RNA, 19 nt, Artificial Sequence
  Description of Artificial Sequence: Synthetic oligonucleotide
  Antisense strand to SEQ ID NO: 2009906
ucuuucacagaacuuauga

SEQ ID NO: 2009908 - RNA, 19 nt, Artificial Sequence
  Description of Artificial Sequence: Synthetic oligonucleotide
  Sense strand starting at position 3752 of SEQ ID NO: 1880995
gaagaccugaggcguuaau

SEQ ID NO: 2009909 - RNA, 19 nt, Artificial Sequence
  Description of Artificial Sequence: Synthetic oligonucleotide
  Antisense strand to SEQ ID NO: 2009908
auuaacgccucaggucuuc

SEQ ID NO: 2009910 - RNA, 19 nt, Artificial Sequence
  Description of Artificial Sequence: Synthetic oligonucleotide
  Sense strand starting at position 3791 of SEQ ID NO: 1880995
ggccucucugaguaaguga

SEQ ID NO: 2009911 - RNA, 19 nt, Artificial Sequence
  Description of Artificial Sequence: Synthetic oligonucleotide
  Antisense strand to SEQ ID NO: 2009910
ucacuuacucagagaggcc

SEQ ID NO: 2009912 - RNA, 19 nt, Artificial Sequence
  Description of Artificial Sequence: Synthetic oligonucleotide
  Sense strand starting at position 3796 of SEQ ID NO: 1880995
cucugaguaagugauguuu

SEQ ID NO: 2009913 - RNA, 19 nt, Artificial Sequence
  Description of Artificial Sequence: Synthetic oligonucleotide
  Antisense strand to SEQ ID NO: 2009912
aaacaucacuuacucagag

SEQ ID NO: 2009914 - RNA, 19 nt, Artificial Sequence
  Description of Artificial Sequence: Synthetic oligonucleotide
  Sense strand starting at position 3802 of SEQ ID NO: 1880995
guaagugauguuugaacag

SEQ ID NO: 2009915 - RNA, 19 nt, Artificial Sequence
  Description of Artificial Sequence: Synthetic oligonucleotide
  Antisense strand to SEQ ID NO: 2009914
cuguucaaacaucacuuac

SEQ ID NO: 2009916 - RNA, 19 nt, Artificial Sequence
  Description of Artificial Sequence: Synthetic oligonucleotide
  Sense strand starting at position 3878 of SEQ ID NO: 1880995
ggaagagcauuugauguga

SEQ ID NO: 2009917 - RNA, 19 nt, Artificial Sequence
  Description of Artificial Sequence: Synthetic oligonucleotide
  Antisense strand to SEQ ID NO: 2009916
ucacaucaaaugcucuucc

SEQ ID NO: 2009918 - RNA, 19 nt, Artificial Sequence
  Description of Artificial Sequence: Synthetic oligonucleotide
  Sense strand starting at position 3887 of SEQ ID NO: 1880995
uuugaugugaucgagaacu

SEQ ID NO: 2009919 - RNA, 19 nt, Artificial Sequence
  Description of Artificial Sequence: Synthetic oligonucleotide
  Antisense strand to SEQ ID NO: 2009918
aguucucgaucacaucaaa

SEQ ID NO: 2009920 - RNA, 19 nt, Artificial Sequence
  Description of Artificial Sequence: Synthetic oligonucleotide
  Sense strand starting at position 3917 of SEQ ID NO: 1880995
gcuggagaguugguuggaa

SEQ ID NO: 2009921 - RNA, 19 nt, Artificial Sequence
  Description of Artificial Sequence: Synthetic oligonucleotide
  Antisense strand to SEQ ID NO: 2009920
uuccaaccaacucuccagc

SEQ ID NO: 2009922 - RNA, 19 nt, Artificial Sequence
  Description of Artificial Sequence: Synthetic oligonucleotide
  Sense strand starting at position 3919 of SEQ ID NO: 1880995
uggagaguugguuggaacu

SEQ ID NO: 2009923 - RNA, 19 nt, Artificial Sequence
  Description of Artificial Sequence: Synthetic oligonucleotide
  Antisense strand to SEQ ID NO: 2009922
aguuccaaccaacucucca

SEQ ID NO: 2009924 - RNA, 19 nt, Artificial Sequence
  Description of Artificial Sequence: Synthetic oligonucleotide
  Sense strand starting at position 3925 of SEQ ID NO: 1880995
guugguuggaacuaguaau

SEQ ID NO: 2009925 - RNA, 19 nt, Artificial Sequence
  Description of Artificial Sequence: Synthetic oligonucleotide
  Antisense strand to SEQ ID NO: 2009924
auuacuaguuccaaccaac

SEQ ID NO: 2009926 - RNA, 19 nt, Artificial Sequence
  Description of Artificial Sequence: Synthetic oligonucleotide
  Sense strand starting at position 3935 of SEQ ID NO: 1880995
acuaguaauuguccauuau

SEQ ID NO: 2009927 - RNA, 19 nt, Artificial Sequence
  Description of Artificial Sequence: Synthetic oligonucleotide
  Antisense strand to SEQ ID NO: 2009926
auaauggacaauuacuagu

SEQ ID NO: 2009928 - RNA, 19 nt, Artificial Sequence
  Description of Artificial Sequence: Synthetic oligonucleotide
  Sense strand starting at position 3936 of SEQ ID NO: 1880995
cuaguaauuguccauuauc

SEQ ID NO: 2009929 - RNA, 19 nt, Artificial Sequence
  Description of Artificial Sequence: Synthetic oligonucleotide
  Antisense strand to SEQ ID NO: 2009928
gauaauggacaauuacuag

SEQ ID NO: 2009930 - RNA, 19 nt, Artificial Sequence
  Description of Artificial Sequence: Synthetic oligonucleotide
  Sense strand starting at position 3939 of SEQ ID NO: 1880995
guaauuguccauuauccca

SEQ ID NO: 2009931 - RNA, 19 nt, Artificial Sequence
  Description of Artificial Sequence: Synthetic oligonucleotide
  Antisense strand to SEQ ID NO: 2009930
ugggauaauggacaauuac

SEQ ID NO: 2009932 - RNA, 19 nt, Artificial Sequence
  Description of Artificial Sequence: Synthetic oligonucleotide
  Sense strand starting at position 3969 of SEQ ID NO: 1880995
agccaaaggcugugaaaua

SEQ ID NO: 2009933 - RNA, 19 nt, Artificial Sequence
  Description of Artificial Sequence: Synthetic oligonucleotide
  Antisense strand to SEQ ID NO: 2009932
uauuucacagccuuuggcu

SEQ ID NO: 2009934 - RNA, 19 nt, Artificial Sequence
  Description of Artificial Sequence: Synthetic oligonucleotide
  Sense strand starting at position 3982 of SEQ ID NO: 1880995
gaaauauagcaacgguagu

SEQ ID NO: 2009935 - RNA, 19 nt, Artificial Sequence
  Description of Artificial Sequence: Synthetic oligonucleotide
  Antisense strand to SEQ ID NO: 2009934
acuaccguugcuauauuuc

SEQ ID NO: 2009936 - RNA, 19 nt, Artificial Sequence
  Description of Artificial Sequence: Synthetic oligonucleotide
  Sense strand starting at position 143 of SEQ ID NO: 1880996
ccaaauguguuacugaugu

SEQ ID NO: 2009937 - RNA, 19 nt, Artificial Sequence
  Description of Artificial Sequence: Synthetic oligonucleotide
  Antisense strand to SEQ ID NO: 2009936
acaucaguaacacauuugg

SEQ ID NO: 2009938 - RNA, 19 nt, Artificial Sequence
  Description of Artificial Sequence: Synthetic oligonucleotide
  Sense strand starting at position 170 of SEQ ID NO: 1880996
gucuucgcugcuuuaugaa

SEQ ID NO: 2009939 - RNA, 19 nt, Artificial Sequence
  Description of Artificial Sequence: Synthetic oligonucleotide
  Antisense strand to SEQ ID NO: 2009938
uucauaaagcagcgaagac

SEQ ID NO: 2009940 - RNA, 19 nt, Artificial Sequence
  Description of Artificial Sequence: Synthetic oligonucleotide
  Sense strand starting at position 519 of SEQ ID NO: 1880996
ugugcuuuaccaugacaaa

SEQ ID NO: 2009941 - RNA, 19 nt, Artificial Sequence
  Description of Artificial Sequence: Synthetic oligonucleotide
  Antisense strand to SEQ ID NO: 2009940
uuugucaugguaaagcaca

SEQ ID NO: 2009942 - RNA, 19 nt, Artificial Sequence
  Description of Artificial Sequence: Synthetic oligonucleotide
  Sense strand starting at position 587 of SEQ ID NO: 1880996
gggaaauagcuguguuuaa

SEQ ID NO: 2009943 - RNA, 19 nt, Artificial Sequence
  Description of Artificial Sequence: Synthetic oligonucleotide
  Antisense strand to SEQ ID NO: 2009942
uuaaacacagcuauuuccc

SEQ ID NO: 2009944 - RNA, 19 nt, Artificial Sequence
  Description of Artificial Sequence: Synthetic oligonucleotide
  Sense strand starting at position 588 of SEQ ID NO: 1880996
ggaaauagcuguguuuaaa

SEQ ID NO: 2009945 - RNA, 19 nt, Artificial Sequence
  Description of Artificial Sequence: Synthetic oligonucleotide
  Antisense strand to SEQ ID NO: 2009944
uuuaaacacagcuauuucc

SEQ ID NO: 2009946 - RNA, 19 nt, Artificial Sequence
  Description of Artificial Sequence: Synthetic oligonucleotide
  Sense strand starting at position 652 of SEQ ID NO: 1880996
auacuaaauguuggaguca

SEQ ID NO: 2009947 - RNA, 19 nt, Artificial Sequence
  Description of Artificial Sequence: Synthetic oligonucleotide
  Antisense strand to SEQ ID NO: 2009946
ugacuccaacauuuaguau

SEQ ID NO: 2009948 - RNA, 19 nt, Artificial Sequence
  Description of Artificial Sequence: Synthetic oligonucleotide
  Sense strand starting at position 687 of SEQ ID NO: 1880996
aauggauacugugugggaa

SEQ ID NO: 2009949 - RNA, 19 nt, Artificial Sequence
  Description of Artificial Sequence: Synthetic oligonucleotide
  Antisense strand to SEQ ID NO: 2009948
uucccacacaguauccauu

SEQ ID NO: 2009950 - RNA, 19 nt, Artificial Sequence
  Description of Artificial Sequence: Synthetic oligonucleotide
  Sense strand starting at position 688 of SEQ ID NO: 1880996
auggauacugugugggaaa

SEQ ID NO: 2009951 - RNA, 19 nt, Artificial Sequence
  Description of Artificial Sequence: Synthetic oligonucleotide
  Antisense strand to SEQ ID NO: 2009950
uuucccacacaguauccau

SEQ ID NO: 2009952 - RNA, 19 nt, Artificial Sequence
  Description of Artificial Sequence: Synthetic oligonucleotide
  Sense strand starting at position 811 of SEQ ID NO: 1880996
cagggcauuuaggauaaau

SEQ ID NO: 2009953 - RNA, 19 nt, Artificial Sequence
  Description of Artificial Sequence: Synthetic oligonucleotide
  Antisense strand to SEQ ID NO: 2009952
auuuauccuaaaugcccug

SEQ ID NO: 2009954 - RNA, 19 nt, Artificial Sequence
  Description of Artificial Sequence: Synthetic oligonucleotide
  Sense strand starting at position 895 of SEQ ID NO: 1880996
ccuacagcccaagaguuua

SEQ ID NO: 2009955 - RNA, 19 nt, Artificial Sequence
  Description of Artificial Sequence: Synthetic oligonucleotide
  Antisense strand to SEQ ID NO: 2009954
uaaacucuugggcuguagg

SEQ ID NO: 2009956 - RNA, 19 nt, Artificial Sequence
  Description of Artificial Sequence: Synthetic oligonucleotide
  Sense strand starting at position 1043 of SEQ ID NO: 1880996
aucguauguuuacuaagaa

SEQ ID NO: 2009957 - RNA, 19 nt, Artificial Sequence
  Description of Artificial Sequence: Synthetic oligonucleotide
  Antisense strand to SEQ ID NO: 2009956
uucuuaguaaacauacgau

SEQ ID NO: 2009958 - RNA, 19 nt, Artificial Sequence
  Description of Artificial Sequence: Synthetic oligonucleotide
  Sense strand starting at position 1270 of SEQ ID NO: 1880996
ggcuucuuccaacaacaga

SEQ ID NO: 2009959 - RNA, 19 nt, Artificial Sequence
  Description of Artificial Sequence: Synthetic oligonucleotide
  Antisense strand to SEQ ID NO: 2009958
ucuguuguuggaagaagcc

SEQ ID NO: 2009960 - RNA, 19 nt, Artificial Sequence
  Description of Artificial Sequence: Synthetic oligonucleotide
  Sense strand starting at position 2615 of SEQ ID NO: 1880996
ggaagagggugguccuuau

SEQ ID NO: 2009961 - RNA, 19 nt, Artificial Sequence
  Description of Artificial Sequence: Synthetic oligonucleotide
  Antisense strand to SEQ ID NO: 2009960
auaaggaccacccucuucc

SEQ ID NO: 2009962 - RNA, 19 nt, Artificial Sequence
  Description of Artificial Sequence: Synthetic oligonucleotide
  Sense strand starting at position 3161 of SEQ ID NO: 1880996
agcacaauucgggagugau

SEQ ID NO: 2009963 - RNA, 19 nt, Artificial Sequence
  Description of Artificial Sequence: Synthetic oligonucleotide
  Antisense strand to SEQ ID NO: 2009962
aucacucccgaauugugcu

SEQ ID NO: 2009964 - RNA, 19 nt, Artificial Sequence
  Description of Artificial Sequence: Synthetic oligonucleotide
  Sense strand starting at position 3164 of SEQ ID NO: 1880996
acaauucgggagugauucu

SEQ ID NO: 2009965 - RNA, 19 nt, Artificial Sequence
  Description of Artificial Sequence: Synthetic oligonucleotide
  Antisense strand to SEQ ID NO: 2009964
agaaucacucccgaauugu

SEQ ID NO: 2009966 - RNA, 19 nt, Artificial Sequence
  Description of Artificial Sequence: Synthetic oligonucleotide
  Sense strand starting at position 3171 of SEQ ID NO: 1880996
gggagugauucucuucuca

SEQ ID NO: 2009967 - RNA, 19 nt, Artificial Sequence
  Description of Artificial Sequence: Synthetic oligonucleotide
  Antisense strand to SEQ ID NO: 2009966
ugagaagagaaucacuccc

SEQ ID NO: 2009968 - RNA, 19 nt, Artificial Sequence
  Description of Artificial Sequence: Synthetic oligonucleotide
  Sense strand starting at position 3320 of SEQ ID NO: 1880996
gucauaaguucugugaaag

SEQ ID NO: 2009969 - RNA, 19 nt, Artificial Sequence
  Description of Artificial Sequence: Synthetic oligonucleotide
  Antisense strand to SEQ ID NO: 2009968
cuuucacagaacuuaugac

SEQ ID NO: 2009970 - RNA, 19 nt, Artificial Sequence
  Description of Artificial Sequence: Synthetic oligonucleotide
  Sense strand starting at position 3321 of SEQ ID NO: 1880996
ucauaaguucugugaaaga

SEQ ID NO: 2009971 - RNA, 19 nt, Artificial Sequence
  Description of Artificial Sequence: Synthetic oligonucleotide
  Antisense strand to SEQ ID NO: 2009970
ucuuucacagaacuuauga

SEQ ID NO: 2009972 - RNA, 19 nt, Artificial Sequence
  Description of Artificial Sequence: Synthetic oligonucleotide
  Sense strand starting at position 3364 of SEQ ID NO: 1880996
gaagaccugaggcguuaau

SEQ ID NO: 2009973 - RNA, 19 nt, Artificial Sequence
  Description of Artificial Sequence: Synthetic oligonucleotide
  Antisense strand to SEQ ID NO: 2009972
auuaacgccucaggucuuc

SEQ ID NO: 2009974 - RNA, 19 nt, Artificial Sequence
  Description of Artificial Sequence: Synthetic oligonucleotide
  Sense strand starting at position 3403 of SEQ ID NO: 1880996
ggccucucugaguaaguga

SEQ ID NO: 2009975 - RNA, 19 nt, Artificial Sequence
  Description of Artificial Sequence: Synthetic oligonucleotide
  Antisense strand to SEQ ID NO: 2009974
ucacuuacucagagaggcc

SEQ ID NO: 2009976 - RNA, 19 nt, Artificial Sequence
  Description of Artificial Sequence: Synthetic oligonucleotide
  Sense strand starting at position 3408 of SEQ ID NO: 1880996
cucugaguaagugauguuu

SEQ ID NO: 2009977 - RNA, 19 nt, Artificial Sequence
  Description of Artificial Sequence: Synthetic oligonucleotide
  Antisense strand to SEQ ID NO: 2009976
aaacaucacuuacucagag

SEQ ID NO: 2009978 - RNA, 19 nt, Artificial Sequence
  Description of Artificial Sequence: Synthetic oligonucleotide
  Sense strand starting at position 3414 of SEQ ID NO: 1880996
guaagugauguuugaacag

SEQ ID NO: 2009979 - RNA, 19 nt, Artificial Sequence
  Description of Artificial Sequence: Synthetic oligonucleotide
  Antisense strand to SEQ ID NO: 2009978
cuguucaaacaucacuuac

SEQ ID NO: 2009980 - RNA, 19 nt, Artificial Sequence
  Description of Artificial Sequence: Synthetic oligonucleotide
  Sense strand starting at position 3490 of SEQ ID NO: 1880996
ggaagagcauuugauguga

SEQ ID NO: 2009981 - RNA, 19 nt, Artificial Sequence
  Description of Artificial Sequence: Synthetic oligonucleotide
  Antisense strand to SEQ ID NO: 2009980
ucacaucaaaugcucuucc

SEQ ID NO: 2009982 - RNA, 19 nt, Artificial Sequence
  Description of Artificial Sequence: Synthetic oligonucleotide
  Sense strand starting at position 3499 of SEQ ID NO: 1880996
uuugaugugaucgagaacu

SEQ ID NO: 2009983 - RNA, 19 nt, Artificial Sequence
  Description of Artificial Sequence: Synthetic oligonucleotide
  Antisense strand to SEQ ID NO: 2009982
aguucucgaucacaucaaa

SEQ ID NO: 2009984 - RNA, 19 nt, Artificial Sequence
  Description of Artificial Sequence: Synthetic oligonucleotide
  Sense strand starting at position 3529 of SEQ ID NO: 1880996
gcuggagaguugguuggaa

SEQ ID NO: 2009985 - RNA, 19 nt, Artificial Sequence
  Description of Artificial Sequence: Synthetic oligonucleotide
  Antisense strand to SEQ ID NO: 2009984
uuccaaccaacucuccagc

SEQ ID NO: 2009986 - RNA, 19 nt, Artificial Sequence
  Description of Artificial Sequence: Synthetic oligonucleotide
  Sense strand starting at position 3531 of SEQ ID NO: 1880996
uggagaguugguuggaacu

SEQ ID NO: 2009987 - RNA, 19 nt, Artificial Sequence
  Description of Artificial Sequence: Synthetic oligonucleotide
  Antisense strand to SEQ ID NO: 2009986
aguuccaaccaacucucca

SEQ ID NO: 2009988 - RNA, 19 nt, Artificial Sequence
  Description of Artificial Sequence: Synthetic oligonucleotide
  Sense strand starting at position 3537 of SEQ ID NO: 1880996
guugguuggaacuaguaau

SEQ ID NO: 2009989 - RNA, 19 nt, Artificial Sequence
  Description of Artificial Sequence: Synthetic oligonucleotide
  Antisense strand to SEQ ID NO: 2009988
auuacuaguuccaaccaac

SEQ ID NO: 2009990 - RNA, 19 nt, Artificial Sequence
  Description of Artificial Sequence: Synthetic oligonucleotide
  Sense strand starting at position 3547 of SEQ ID NO: 1880996
acuaguaauuguccauuau

SEQ ID NO: 2009991 - RNA, 19 nt, Artificial Sequence
  Description of Artificial Sequence: Synthetic oligonucleotide
  Antisense strand to SEQ ID NO: 2009990
auaauggacaauuacuagu

SEQ ID NO: 2009992 - RNA, 19 nt, Artificial Sequence
  Description of Artificial Sequence: Synthetic oligonucleotide
  Sense strand starting at position 3548 of SEQ ID NO: 1880996
cuaguaauuguccauuauc

SEQ ID NO: 2009993 - RNA, 19 nt, Artificial Sequence
  Description of Artificial Sequence: Synthetic oligonucleotide
  Antisense strand to SEQ ID NO: 2009992
gauaauggacaauuacuag

SEQ ID NO: 2009994 - RNA, 19 nt, Artificial Sequence
  Description of Artificial Sequence: Synthetic oligonucleotide
  Sense strand starting at position 3551 of SEQ ID NO: 1880996
guaauuguccauuauccca

SEQ ID NO: 2009995 - RNA, 19 nt, Artificial Sequence
  Description of Artificial Sequence: Synthetic oligonucleotide
  Antisense strand to SEQ ID NO: 2009994
ugggauaauggacaauuac

SEQ ID NO: 2009996 - RNA, 19 nt, Artificial Sequence
  Description of Artificial Sequence: Synthetic oligonucleotide
  Sense strand starting at position 3581 of SEQ ID NO: 1880996
agccaaaggcugugaaaua

SEQ ID NO: 2009997 - RNA, 19 nt, Artificial Sequence
  Description of Artificial Sequence: Synthetic oligonucleotide
  Antisense strand to SEQ ID NO: 2009996
uauuucacagccuuuggcu

SEQ ID NO: 2009998 - RNA, 19 nt, Artificial Sequence
  Description of Artificial Sequence: Synthetic oligonucleotide
  Sense strand starting at position 3594 of SEQ ID NO: 1880996
gaaauauagcaacgguagu

SEQ ID NO: 2009999 - RNA, 19 nt, Artificial Sequence
  Description of Artificial Sequence: Synthetic oligonucleotide
  Antisense strand to SEQ ID NO: 2009998
acuaccguugcuauauuuc

SEQ ID NO: 2010000 - RNA, 19 nt, Artificial Sequence
  Description of Artificial Sequence: Synthetic oligonucleotide
  Sense strand starting at position 3771 of SEQ ID NO: 1880996
aguauuuccugagugcuac

SEQ ID NO: 2010001 - RNA, 19 nt, Artificial Sequence
  Description of Artificial Sequence: Synthetic oligonucleotide
  Antisense strand to SEQ ID NO: 2010000
guagcacucaggaaauacu

SEQ ID NO: 2010002 - RNA, 19 nt, Artificial Sequence
  Description of Artificial Sequence: Synthetic oligonucleotide
  Sense strand starting at position 3788 of SEQ ID NO: 1880996
acgaauacuccaggcacua

SEQ ID NO: 2010003 - RNA, 19 nt, Artificial Sequence
  Description of Artificial Sequence: Synthetic oligonucleotide
  Antisense strand to SEQ ID NO: 2010002
uagugccuggaguauucgu

SEQ ID NO: 2010004 - RNA, 19 nt, Artificial Sequence
  Description of Artificial Sequence: Synthetic oligonucleotide
  Sense strand starting at position 3806 of SEQ ID NO: 1880996
augugcuaggcugggaaua

SEQ ID NO: 2010005 - RNA, 19 nt, Artificial Sequence
  Description of Artificial Sequence: Synthetic oligonucleotide
  Antisense strand to SEQ ID NO: 2010004
uauucccagccuagcacau

SEQ ID NO: 2010006 - RNA, 19 nt, Artificial Sequence
  Description of Artificial Sequence: Synthetic oligonucleotide
  Sense strand starting at position 3832 of SEQ ID NO: 1880996
guaagacacugguccucaa

SEQ ID NO: 2010007 - RNA, 19 nt, Artificial Sequence
  Description of Artificial Sequence: Synthetic oligonucleotide
  Antisense strand to SEQ ID NO: 2010006
uugaggaccagugucuuac

SEQ ID NO: 2010008 - RNA, 19 nt, Artificial Sequence
  Description of Artificial Sequence: Synthetic oligonucleotide
  Sense strand starting at position 3835 of SEQ ID NO: 1880996
agacacugguccucaaaca

SEQ ID NO: 2010009 - RNA, 19 nt, Artificial Sequence
  Description of Artificial Sequence: Synthetic oligonucleotide
  Antisense strand to SEQ ID NO: 2010008
uguuugaggaccagugucu

SEQ ID NO: 2010010 - RNA, 19 nt, Artificial Sequence
  Description of Artificial Sequence: Synthetic oligonucleotide
  Sense strand starting at position 3915 of SEQ ID NO: 1880996
ccaggcuggaguugaauau

SEQ ID NO: 2010011 - RNA, 19 nt, Artificial Sequence
  Description of Artificial Sequence: Synthetic oligonucleotide
  Antisense strand to SEQ ID NO: 2010010
auauucaacuccagccugg

SEQ ID NO: 2010012 - RNA, 19 nt, Artificial Sequence
  Description of Artificial Sequence: Synthetic oligonucleotide
  Sense strand starting at position 3919 of SEQ ID NO: 1880996
gcuggaguugaauauaauu

SEQ ID NO: 2010013 - RNA, 19 nt, Artificial Sequence
  Description of Artificial Sequence: Synthetic oligonucleotide
  Antisense strand to SEQ ID NO: 2010012
aauuauauucaacuccagc

SEQ ID NO: 2010014 - RNA, 19 nt, Artificial Sequence
  Description of Artificial Sequence: Synthetic oligonucleotide
  Sense strand starting at position 3927 of SEQ ID NO: 1880996
ugaauauaauucucugugu

SEQ ID NO: 2010015 - RNA, 19 nt, Artificial Sequence
  Description of Artificial Sequence: Synthetic oligonucleotide
  Antisense strand to SEQ ID NO: 2010014
acacagagaauuauauuca

SEQ ID NO: 2010016 - RNA, 19 nt, Artificial Sequence
  Description of Artificial Sequence: Synthetic oligonucleotide
  Sense strand starting at position 1011 of SEQ ID NO: 1880998
gauaguuccguccguccau

SEQ ID NO: 2010017 - RNA, 19 nt, Artificial Sequence
  Description of Artificial Sequence: Synthetic oligonucleotide
  Antisense strand to SEQ ID NO: 2010016
auggacggacggaacuauc

SEQ ID NO: 2010018 - RNA, 19 nt, Artificial Sequence
  Description of Artificial Sequence: Synthetic oligonucleotide
  Sense strand starting at position 1391 of SEQ ID NO: 1880998
gucuccuagggucaagaga

SEQ ID NO: 2010019 - RNA, 19 nt, Artificial Sequence
  Description of Artificial Sequence: Synthetic oligonucleotide
  Antisense strand to SEQ ID NO: 2010018
ucucuugacccuaggagac

SEQ ID NO: 2010020 - RNA, 19 nt, Artificial Sequence
  Description of Artificial Sequence: Synthetic oligonucleotide
  Sense strand starting at position 1422 of SEQ ID NO: 1880998
cugagaacucaccguugag

SEQ ID NO: 2010021 - RNA, 19 nt, Artificial Sequence
  Description of Artificial Sequence: Synthetic oligonucleotide
  Antisense strand to SEQ ID NO: 2010020
cucaacggugaguucucag

SEQ ID NO: 2010022 - RNA, 19 nt, Artificial Sequence
  Description of Artificial Sequence: Synthetic oligonucleotide
  Sense strand starting at position 1425 of SEQ ID NO: 1880998
agaacucaccguugaguua

SEQ ID NO: 2010023 - RNA, 19 nt, Artificial Sequence
  Description of Artificial Sequence: Synthetic oligonucleotide
  Antisense strand to SEQ ID NO: 2010022
uaacucaacggugaguucu

SEQ ID NO: 2010024 - RNA, 19 nt, Artificial Sequence
  Description of Artificial Sequence: Synthetic oligonucleotide
  Sense strand starting at position 2276 of SEQ ID NO: 1880998
gcucgugagguuugaggga

SEQ ID NO: 2010025 - RNA, 19 nt, Artificial Sequence
  Description of Artificial Sequence: Synthetic oligonucleotide
  Antisense strand to SEQ ID NO: 2010024
ucccucaaaccucacgagc

SEQ ID NO: 2010026 - RNA, 19 nt, Artificial Sequence
  Description of Artificial Sequence: Synthetic oligonucleotide
  Sense strand starting at position 2665 of SEQ ID NO: 1880998
aggugacauugguaaggga

SEQ ID NO: 2010027 - RNA, 19 nt, Artificial Sequence
  Description of Artificial Sequence: Synthetic oligonucleotide
  Antisense strand to SEQ ID NO: 2010026
ucccuuaccaaugucaccu

SEQ ID NO: 2010028 - RNA, 19 nt, Artificial Sequence
  Description of Artificial Sequence: Synthetic oligonucleotide
  Sense strand starting at position 2695 of SEQ ID NO: 1880998
ugaggagccuuuccugauc

SEQ ID NO: 2010029 - RNA, 19 nt, Artificial Sequence
  Description of Artificial Sequence: Synthetic oligonucleotide
  Antisense strand to SEQ ID NO: 2010028
gaucaggaaaggcuccuca

SEQ ID NO: 2010030 - RNA, 19 nt, Artificial Sequence
  Description of Artificial Sequence: Synthetic oligonucleotide
  Sense strand starting at position 2755 of SEQ ID NO: 1880998
ggugcucggcuacauagau

SEQ ID NO: 2010031 - RNA, 19 nt, Artificial Sequence
  Description of Artificial Sequence: Synthetic oligonucleotide
  Antisense strand to SEQ ID NO: 2010030
aucuauguagccgagcacc

SEQ ID NO: 2010032 - RNA, 19 nt, Artificial Sequence
  Description of Artificial Sequence: Synthetic oligonucleotide
  Sense strand starting at position 3005 of SEQ ID NO: 1880998
ggaggaguguccagggcuu

SEQ ID NO: 2010033 - RNA, 19 nt, Artificial Sequence
  Description of Artificial Sequence: Synthetic oligonucleotide
  Antisense strand to SEQ ID NO: 2010032
aagcccuggacacuccucc

SEQ ID NO: 2010034 - RNA, 19 nt, Artificial Sequence
  Description of Artificial Sequence: Synthetic oligonucleotide
  Sense strand starting at position 3017 of SEQ ID NO: 1880998
agggcuuuggcuuggcaga

SEQ ID NO: 2010035 - RNA, 19 nt, Artificial Sequence
  Description of Artificial Sequence: Synthetic oligonucleotide
  Antisense strand to SEQ ID NO: 2010034
ucugccaagccaaagcccu

SEQ ID NO: 2010036 - RNA, 19 nt, Artificial Sequence
  Description of Artificial Sequence: Synthetic oligonucleotide
  Sense strand starting at position 3208 of SEQ ID NO: 1880998
uagacaggcucuugauaua

SEQ ID NO: 2010037 - RNA, 19 nt, Artificial Sequence
  Description of Artificial Sequence: Synthetic oligonucleotide
  Antisense strand to SEQ ID NO: 2010036
uauaucaagagccugucua

SEQ ID NO: 2010038 - RNA, 19 nt, Artificial Sequence
  Description of Artificial Sequence: Synthetic oligonucleotide
  Sense strand starting at position 3211 of SEQ ID NO: 1880998
acaggcucuugauauauuu

SEQ ID NO: 2010039 - RNA, 19 nt, Artificial Sequence
  Description of Artificial Sequence: Synthetic oligonucleotide
  Antisense strand to SEQ ID NO: 2010038
aaauauaucaagagccugu

SEQ ID NO: 2010040 - RNA, 19 nt, Artificial Sequence
  Description of Artificial Sequence: Synthetic oligonucleotide
  Sense strand starting at position 3404 of SEQ ID NO: 1880998
ggaggucgaaaggguaauu

SEQ ID NO: 2010041 - RNA, 19 nt, Artificial Sequence
  Description of Artificial Sequence: Synthetic oligonucleotide
  Antisense strand to SEQ ID NO: 2010040
aauuacccuuucgaccucc

SEQ ID NO: 2010042 - RNA, 19 nt, Artificial Sequence
  Description of Artificial Sequence: Synthetic oligonucleotide
  Sense strand starting at position 3415 of SEQ ID NO: 1880998
ggguaauugacguaguugu

SEQ ID NO: 2010043 - RNA, 19 nt, Artificial Sequence
  Description of Artificial Sequence: Synthetic oligonucleotide
  Antisense strand to SEQ ID NO: 2010042
acaacuacgucaauuaccc

SEQ ID NO: 2010044 - RNA, 19 nt, Artificial Sequence
  Description of Artificial Sequence: Synthetic oligonucleotide
  Sense strand starting at position 3419 of SEQ ID NO: 1880998
aauugacguaguuguggaa

SEQ ID NO: 2010045 - RNA, 19 nt, Artificial Sequence
  Description of Artificial Sequence: Synthetic oligonucleotide
  Antisense strand to SEQ ID NO: 2010044
uuccacaacuacgucaauu

SEQ ID NO: 2010046 - RNA, 19 nt, Artificial Sequence
  Description of Artificial Sequence: Synthetic oligonucleotide
  Sense strand starting at position 3459 of SEQ ID NO: 1880998
auaguauauucgguggaag

SEQ ID NO: 2010047 - RNA, 19 nt, Artificial Sequence
  Description of Artificial Sequence: Synthetic oligonucleotide
  Antisense strand to SEQ ID NO: 2010046
cuuccaccgaauauacuau

SEQ ID NO: 2010048 - RNA, 19 nt, Artificial Sequence
  Description of Artificial Sequence: Synthetic oligonucleotide
  Sense strand starting at position 3460 of SEQ ID NO: 1880998
uaguauauucgguggaaga

SEQ ID NO: 2010049 - RNA, 19 nt, Artificial Sequence
  Description of Artificial Sequence: Synthetic oligonucleotide
  Antisense strand to SEQ ID NO: 2010048
ucuuccaccgaauauacua

SEQ ID NO: 2010050 - RNA, 19 nt, Artificial Sequence
  Description of Artificial Sequence: Synthetic oligonucleotide
  Sense strand starting at position 3461 of SEQ ID NO: 1880998
aguauauucgguggaagaa

SEQ ID NO: 2010051 - RNA, 19 nt, Artificial Sequence
  Description of Artificial Sequence: Synthetic oligonucleotide
  Antisense strand to SEQ ID NO: 2010050
uucuuccaccgaauauacu

SEQ ID NO: 2010052 - RNA, 19 nt, Artificial Sequence
  Description of Artificial Sequence: Synthetic oligonucleotide
  Sense strand starting at position 3462 of SEQ ID NO: 1880998
guauauucgguggaagaac

SEQ ID NO: 2010053 - RNA, 19 nt, Artificial Sequence
  Description of Artificial Sequence: Synthetic oligonucleotide
  Antisense strand to SEQ ID NO: 2010052
guucuuccaccgaauauac

SEQ ID NO: 2010054 - RNA, 19 nt, Artificial Sequence
  Description of Artificial Sequence: Synthetic oligonucleotide
  Sense strand starting at position 3503 of SEQ ID NO: 1880998
ugauguagacaugguggaa

SEQ ID NO: 2010055 - RNA, 19 nt, Artificial Sequence
  Description of Artificial Sequence: Synthetic oligonucleotide
  Antisense strand to SEQ ID NO: 2010054
uuccaccaugucuacauca

SEQ ID NO: 2010056 - RNA, 19 nt, Artificial Sequence
  Description of Artificial Sequence: Synthetic oligonucleotide
  Sense strand starting at position 3562 of SEQ ID NO: 1880998
uggaguggauugaguugau

SEQ ID NO: 2010057 - RNA, 19 nt, Artificial Sequence
  Description of Artificial Sequence: Synthetic oligonucleotide
  Antisense strand to SEQ ID NO: 2010056
aucaacucaauccacucca

SEQ ID NO: 2010058 - RNA, 19 nt, Artificial Sequence
  Description of Artificial Sequence: Synthetic oligonucleotide
  Sense strand starting at position 3565 of SEQ ID NO: 1880998
aguggauugaguugaugga

SEQ ID NO: 2010059 - RNA, 19 nt, Artificial Sequence
  Description of Artificial Sequence: Synthetic oligonucleotide
  Antisense strand to SEQ ID NO: 2010058
uccaucaacucaauccacu

SEQ ID NO: 2010060 - RNA, 19 nt, Artificial Sequence
  Description of Artificial Sequence: Synthetic oligonucleotide
  Sense strand starting at position 3574 of SEQ ID NO: 1880998
aguugauggaggugguaua

SEQ ID NO: 2010061 - RNA, 19 nt, Artificial Sequence
  Description of Artificial Sequence: Synthetic oligonucleotide
  Antisense strand to SEQ ID NO: 2010060
uauaccaccuccaucaacu

SEQ ID NO: 2010062 - RNA, 19 nt, Artificial Sequence
  Description of Artificial Sequence: Synthetic oligonucleotide
  Sense strand starting at position 3613 of SEQ ID NO: 1880998
ugauggaggugguagagau

SEQ ID NO: 2010063 - RNA, 19 nt, Artificial Sequence
  Description of Artificial Sequence: Synthetic oligonucleotide
  Antisense strand to SEQ ID NO: 2010062
aucucuaccaccuccauca

SEQ ID NO: 2010064 - RNA, 19 nt, Artificial Sequence
  Description of Artificial Sequence: Synthetic oligonucleotide
  Sense strand starting at position 3681 of SEQ ID NO: 1880998
gaggcagucgagugaugga

SEQ ID NO: 2010065 - RNA, 19 nt, Artificial Sequence
  Description of Artificial Sequence: Synthetic oligonucleotide
  Antisense strand to SEQ ID NO: 2010064
uccaucacucgacugccuc

SEQ ID NO: 2010066 - RNA, 19 nt, Artificial Sequence
  Description of Artificial Sequence: Synthetic oligonucleotide
  Sense strand starting at position 3708 of SEQ ID NO: 1880998
aagugauggaguggauuaa

SEQ ID NO: 2010067 - RNA, 19 nt, Artificial Sequence
  Description of Artificial Sequence: Synthetic oligonucleotide
  Antisense strand to SEQ ID NO: 2010066
uuaauccacuccaucacuu

SEQ ID NO: 2010068 - RNA, 19 nt, Artificial Sequence
  Description of Artificial Sequence: Synthetic oligonucleotide
  Sense strand starting at position 3717 of SEQ ID NO: 1880998
aguggauuaaguugaugga

SEQ ID NO: 2010069 - RNA, 19 nt, Artificial Sequence
  Description of Artificial Sequence: Synthetic oligonucleotide
  Antisense strand to SEQ ID NO: 2010068
uccaucaacuuaauccacu

SEQ ID NO: 2010070 - RNA, 19 nt, Artificial Sequence
  Description of Artificial Sequence: Synthetic oligonucleotide
  Sense strand starting at position 3720 of SEQ ID NO: 1880998
ggauuaaguugauggaggu

SEQ ID NO: 2010071 - RNA, 19 nt, Artificial Sequence
  Description of Artificial Sequence: Synthetic oligonucleotide
  Antisense strand to SEQ ID NO: 2010070
accuccaucaacuuaaucc

SEQ ID NO: 2010072 - RNA, 19 nt, Artificial Sequence
  Description of Artificial Sequence: Synthetic oligonucleotide
  Sense strand starting at position 3721 of SEQ ID NO: 1880998
gauuaaguugauggaggua

SEQ ID NO: 2010073 - RNA, 19 nt, Artificial Sequence
  Description of Artificial Sequence: Synthetic oligonucleotide
  Antisense strand to SEQ ID NO: 2010072
uaccuccaucaacuuaauc

SEQ ID NO: 2010074 - RNA, 19 nt, Artificial Sequence
  Description of Artificial Sequence: Synthetic oligonucleotide
  Sense strand starting at position 3726 of SEQ ID NO: 1880998
aguugauggagguaguaua

SEQ ID NO: 2010075 - RNA, 19 nt, Artificial Sequence
  Description of Artificial Sequence: Synthetic oligonucleotide
  Antisense strand to SEQ ID NO: 2010074
uauacuaccuccaucaacu

SEQ ID NO: 2010076 - RNA, 19 nt, Artificial Sequence
  Description of Artificial Sequence: Synthetic oligonucleotide
  Sense strand starting at position 3780 of SEQ ID NO: 1880998
aguugauggagguagugua

SEQ ID NO: 2010077 - RNA, 19 nt, Artificial Sequence
  Description of Artificial Sequence: Synthetic oligonucleotide
  Antisense strand to SEQ ID NO: 2010076
uacacuaccuccaucaacu

SEQ ID NO: 2010078 - RNA, 19 nt, Artificial Sequence
  Description of Artificial Sequence: Synthetic oligonucleotide
  Sense strand starting at position 3826 of SEQ ID NO: 1880998
ggucauggagcagguauau

SEQ ID NO: 2010079 - RNA, 19 nt, Artificial Sequence
  Description of Artificial Sequence: Synthetic oligonucleotide
  Antisense strand to SEQ ID NO: 2010078
auauaccugcuccaugacc

SEQ ID NO: 2010080 - RNA, 19 nt, Artificial Sequence
  Description of Artificial Sequence: Synthetic oligonucleotide
  Sense strand starting at position 3837 of SEQ ID NO: 1880998
agguauaucuguguuuaac

SEQ ID NO: 2010081 - RNA, 19 nt, Artificial Sequence
  Description of Artificial Sequence: Synthetic oligonucleotide
  Antisense strand to SEQ ID NO: 2010080
guuaaacacagauauaccu

SEQ ID NO: 2010082 - RNA, 19 nt, Artificial Sequence
  Description of Artificial Sequence: Synthetic oligonucleotide
  Sense strand starting at position 3839 of SEQ ID NO: 1880998
guauaucuguguuuaacug

SEQ ID NO: 2010083 - RNA, 19 nt, Artificial Sequence
  Description of Artificial Sequence: Synthetic oligonucleotide
  Antisense strand to SEQ ID NO: 2010082
caguuaaacacagauauac

SEQ ID NO: 2010084 - RNA, 19 nt, Artificial Sequence
  Description of Artificial Sequence: Synthetic oligonucleotide
  Sense strand starting at position 3846 of SEQ ID NO: 1880998
uguguuuaacuguggguac

SEQ ID NO: 2010085 - RNA, 19 nt, Artificial Sequence
  Description of Artificial Sequence: Synthetic oligonucleotide
  Antisense strand to SEQ ID NO: 2010084
guacccacaguuaaacaca

SEQ ID NO: 2010086 - RNA, 19 nt, Artificial Sequence
  Description of Artificial Sequence: Synthetic oligonucleotide
  Sense strand starting at position 3848 of SEQ ID NO: 1880998
uguuuaacuguggguacaa

SEQ ID NO: 2010087 - RNA, 19 nt, Artificial Sequence
  Description of Artificial Sequence: Synthetic oligonucleotide
  Antisense strand to SEQ ID NO: 2010086
uuguacccacaguuaaaca

SEQ ID NO: 2010088 - RNA, 19 nt, Artificial Sequence
  Description of Artificial Sequence: Synthetic oligonucleotide
  Sense strand starting at position 3849 of SEQ ID NO: 1880998
guuuaacuguggguacaaa

SEQ ID NO: 2010089 - RNA, 19 nt, Artificial Sequence
  Description of Artificial Sequence: Synthetic oligonucleotide
  Antisense strand to SEQ ID NO: 2010088
uuuguacccacaguuaaac

SEQ ID NO: 2010090 - RNA, 19 nt, Artificial Sequence
  Description of Artificial Sequence: Synthetic oligonucleotide
  Sense strand starting at position 3850 of SEQ ID NO: 1880998
uuuaacuguggguacaaau

SEQ ID NO: 2010091 - RNA, 19 nt, Artificial Sequence
  Description of Artificial Sequence: Synthetic oligonucleotide
  Antisense strand to SEQ ID NO: 2010090
auuuguacccacaguuaaa

SEQ ID NO: 2010092 - RNA, 19 nt, Artificial Sequence
  Description of Artificial Sequence: Synthetic oligonucleotide
  Sense strand starting at position 3859 of SEQ ID NO: 1880998
ggguacaaaugagugagua

SEQ ID NO: 2010093 - RNA, 19 nt, Artificial Sequence
  Description of Artificial Sequence: Synthetic oligonucleotide
  Antisense strand to SEQ ID NO: 2010092
uacucacucauuuguaccc

SEQ ID NO: 2010094 - RNA, 19 nt, Artificial Sequence
  Description of Artificial Sequence: Synthetic oligonucleotide
  Sense strand starting at position 3927 of SEQ ID NO: 1880998
uugagcuuguuucugagau

SEQ ID NO: 2010095 - RNA, 19 nt, Artificial Sequence
  Description of Artificial Sequence: Synthetic oligonucleotide
  Antisense strand to SEQ ID NO: 2010094
aucucagaaacaagcucaa

SEQ ID NO: 2010096 - RNA, 19 nt, Artificial Sequence
  Description of Artificial Sequence: Synthetic oligonucleotide
  Sense strand starting at position 13 of SEQ ID NO: 1880999
ugagauaaucacugugcac

SEQ ID NO: 2010097 - RNA, 19 nt, Artificial Sequence
  Description of Artificial Sequence: Synthetic oligonucleotide
  Antisense strand to SEQ ID NO: 2010096
gugcacagugauuaucuca

SEQ ID NO: 2010098 - RNA, 19 nt, Artificial Sequence
  Description of Artificial Sequence: Synthetic oligonucleotide
  Sense strand starting at position 15 of SEQ ID NO: 1880999
agauaaucacugugcacua

SEQ ID NO: 2010099 - RNA, 19 nt, Artificial Sequence
  Description of Artificial Sequence: Synthetic oligonucleotide
  Antisense strand to SEQ ID NO: 2010098
uagugcacagugauuaucu

SEQ ID NO: 2010100 - RNA, 19 nt, Artificial Sequence
  Description of Artificial Sequence: Synthetic oligonucleotide
  Sense strand starting at position 27 of SEQ ID NO: 1880999
ugcacuaggucaucuauuu

SEQ ID NO: 2010101 - RNA, 19 nt, Artificial Sequence
  Description of Artificial Sequence: Synthetic oligonucleotide
  Antisense strand to SEQ ID NO: 2010100
aaauagaugaccuagugca

SEQ ID NO: 2010102 - RNA, 19 nt, Artificial Sequence
  Description of Artificial Sequence: Synthetic oligonucleotide
  Sense strand starting at position 166 of SEQ ID NO: 1880999
cuuauuguagcagauaaac

SEQ ID NO: 2010103 - RNA, 19 nt, Artificial Sequence
  Description of Artificial Sequence: Synthetic oligonucleotide
  Antisense strand to SEQ ID NO: 2010102
guuuaucugcuacaauaag

SEQ ID NO: 2010104 - RNA, 19 nt, Artificial Sequence
  Description of Artificial Sequence: Synthetic oligonucleotide
  Sense strand starting at position 370 of SEQ ID NO: 1880999
ccagaaagcucuccaguau

SEQ ID NO: 2010105 - RNA, 19 nt, Artificial Sequence
  Description of Artificial Sequence: Synthetic oligonucleotide
  Antisense strand to SEQ ID NO: 2010104
auacuggagagcuuucugg

SEQ ID NO: 2010106 - RNA, 19 nt, Artificial Sequence
  Description of Artificial Sequence: Synthetic oligonucleotide
  Sense strand starting at position 405 of SEQ ID NO: 1880999
ggaucuaucagucaucgug

SEQ ID NO: 2010107 - RNA, 19 nt, Artificial Sequence
  Description of Artificial Sequence: Synthetic oligonucleotide
  Antisense strand to SEQ ID NO: 2010106
cacgaugacugauagaucc

SEQ ID NO: 2010108 - RNA, 19 nt, Artificial Sequence
  Description of Artificial Sequence: Synthetic oligonucleotide
  Sense strand starting at position 422 of SEQ ID NO: 1880999
ugugguguugaauaacaaa

SEQ ID NO: 2010109 - RNA, 19 nt, Artificial Sequence
  Description of Artificial Sequence: Synthetic oligonucleotide
  Antisense strand to SEQ ID NO: 2010108
uuuguuauucaacaccaca

SEQ ID NO: 2010110 - RNA, 19 nt, Artificial Sequence
  Description of Artificial Sequence: Synthetic oligonucleotide
  Sense strand starting at position 599 of SEQ ID NO: 1880999
aggucauaucuuggacuuu

SEQ ID NO: 2010111 - RNA, 19 nt, Artificial Sequence
  Description of Artificial Sequence: Synthetic oligonucleotide
  Antisense strand to SEQ ID NO: 2010110
aaaguccaagauaugaccu

SEQ ID NO: 2010112 - RNA, 19 nt, Artificial Sequence
  Description of Artificial Sequence: Synthetic oligonucleotide
  Sense strand starting at position 656 of SEQ ID NO: 1880999
acccauagugucuaauaca

SEQ ID NO: 2010113 - RNA, 19 nt, Artificial Sequence
  Description of Artificial Sequence: Synthetic oligonucleotide
  Antisense strand to SEQ ID NO: 2010112
uguauuagacacuaugggu

SEQ ID NO: 2010114 - RNA, 19 nt, Artificial Sequence
  Description of Artificial Sequence: Synthetic oligonucleotide
  Sense strand starting at position 740 of SEQ ID NO: 1880999
accuuaaacuuaguuguga

SEQ ID NO: 2010115 - RNA, 19 nt, Artificial Sequence
  Description of Artificial Sequence: Synthetic oligonucleotide
  Antisense strand to SEQ ID NO: 2010114
ucacaacuaaguuuaaggu

SEQ ID NO: 2010116 - RNA, 19 nt, Artificial Sequence
  Description of Artificial Sequence: Synthetic oligonucleotide
  Sense strand starting at position 777 of SEQ ID NO: 1880999
caggauuaguagucuauca

SEQ ID NO: 2010117 - RNA, 19 nt, Artificial Sequence
  Description of Artificial Sequence: Synthetic oligonucleotide
  Antisense strand to SEQ ID NO: 2010116
ugauagacuacuaauccug

SEQ ID NO: 2010118 - RNA, 19 nt, Artificial Sequence
  Description of Artificial Sequence: Synthetic oligonucleotide
  Sense strand starting at position 779 of SEQ ID NO: 1880999
ggauuaguagucuaucaca

SEQ ID NO: 2010119 - RNA, 19 nt, Artificial Sequence
  Description of Artificial Sequence: Synthetic oligonucleotide
  Antisense strand to SEQ ID NO: 2010118
ugugauagacuacuaaucc

SEQ ID NO: 2010120 - RNA, 19 nt, Artificial Sequence
  Description of Artificial Sequence: Synthetic oligonucleotide
  Sense strand starting at position 870 of SEQ ID NO: 1880999
uggagaugguuuccagaug

SEQ ID NO: 2010121 - RNA, 19 nt, Artificial Sequence
  Description of Artificial Sequence: Synthetic oligonucleotide
  Antisense strand to SEQ ID NO: 2010120
caucuggaaaccaucucca

SEQ ID NO: 2010122 - RNA, 19 nt, Artificial Sequence
  Description of Artificial Sequence: Synthetic oligonucleotide
  Sense strand starting at position 917 of SEQ ID NO: 1880999
uugguuagauucucaccaa

SEQ ID NO: 2010123 - RNA, 19 nt, Artificial Sequence
  Description of Artificial Sequence: Synthetic oligonucleotide
  Antisense strand to SEQ ID NO: 2010122
uuggugagaaucuaaccaa

SEQ ID NO: 2010124 - RNA, 19 nt, Artificial Sequence
  Description of Artificial Sequence: Synthetic oligonucleotide
  Sense strand starting at position 920 of SEQ ID NO: 1880999
guuagauucucaccaacag

SEQ ID NO: 2010125 - RNA, 19 nt, Artificial Sequence
  Description of Artificial Sequence: Synthetic oligonucleotide
  Antisense strand to SEQ ID NO: 2010124
cuguuggugagaaucuaac

SEQ ID NO: 2010126 - RNA, 19 nt, Artificial Sequence
  Description of Artificial Sequence: Synthetic oligonucleotide
  Sense strand starting at position 1316 of SEQ ID NO: 1880999
ucaguaguucuggaaacau

SEQ ID NO: 2010127 - RNA, 19 nt, Artificial Sequence
  Description of Artificial Sequence: Synthetic oligonucleotide
  Antisense strand to SEQ ID NO: 2010126
auguuuccagaacuacuga

SEQ ID NO: 2010128 - RNA, 19 nt, Artificial Sequence
  Description of Artificial Sequence: Synthetic oligonucleotide
  Sense strand starting at position 1458 of SEQ ID NO: 1880999
uuauguauccugcagauau

SEQ ID NO: 2010129 - RNA, 19 nt, Artificial Sequence
  Description of Artificial Sequence: Synthetic oligonucleotide
  Antisense strand to SEQ ID NO: 2010128
auaucugcaggauacauaa

SEQ ID NO: 2010130 - RNA, 19 nt, Artificial Sequence
  Description of Artificial Sequence: Synthetic oligonucleotide
  Sense strand starting at position 1506 of SEQ ID NO: 1880999
uguacacuucuacauguua

SEQ ID NO: 2010131 - RNA, 19 nt, Artificial Sequence
  Description of Artificial Sequence: Synthetic oligonucleotide
  Antisense strand to SEQ ID NO: 2010130
uaacauguagaaguguaca

SEQ ID NO: 2010132 - RNA, 19 nt, Artificial Sequence
  Description of Artificial Sequence: Synthetic oligonucleotide
  Sense strand starting at position 1594 of SEQ ID NO: 1880999
gugggauuggaauguuaac

SEQ ID NO: 2010133 - RNA, 19 nt, Artificial Sequence
  Description of Artificial Sequence: Synthetic oligonucleotide
  Antisense strand to SEQ ID NO: 2010132
guuaacauuccaaucccac

SEQ ID NO: 2010134 - RNA, 19 nt, Artificial Sequence
  Description of Artificial Sequence: Synthetic oligonucleotide
  Sense strand starting at position 1600 of SEQ ID NO: 1880999
uuggaauguuaaccuguau

SEQ ID NO: 2010135 - RNA, 19 nt, Artificial Sequence
  Description of Artificial Sequence: Synthetic oligonucleotide
  Antisense strand to SEQ ID NO: 2010134
auacagguuaacauuccaa

SEQ ID NO: 2010136 - RNA, 19 nt, Artificial Sequence
  Description of Artificial Sequence: Synthetic oligonucleotide
  Sense strand starting at position 1649 of SEQ ID NO: 1880999
cuggucuacuuuccaagau

SEQ ID NO: 2010137 - RNA, 19 nt, Artificial Sequence
  Description of Artificial Sequence: Synthetic oligonucleotide
  Antisense strand to SEQ ID NO: 2010136
aucuuggaaaguagaccag

SEQ ID NO: 2010138 - RNA, 19 nt, Artificial Sequence
  Description of Artificial Sequence: Synthetic oligonucleotide
  Sense strand starting at position 1653 of SEQ ID NO: 1880999
ucuacuuuccaagaugagu

SEQ ID NO: 2010139 - RNA, 19 nt, Artificial Sequence
  Description of Artificial Sequence: Synthetic oligonucleotide
  Antisense strand to SEQ ID NO: 2010138
acucaucuuggaaaguaga

SEQ ID NO: 2010140 - RNA, 19 nt, Artificial Sequence
  Description of Artificial Sequence: Synthetic oligonucleotide
  Sense strand starting at position 1694 of SEQ ID NO: 1880999
cccaucacauuugggagaa

SEQ ID NO: 2010141 - RNA, 19 nt, Artificial Sequence
  Description of Artificial Sequence: Synthetic oligonucleotide
  Antisense strand to SEQ ID NO: 2010140
uucucccaaaugugauggg

SEQ ID NO: 2010142 - RNA, 19 nt, Artificial Sequence
  Description of Artificial Sequence: Synthetic oligonucleotide
  Sense strand starting at position 1695 of SEQ ID NO: 1880999
ccaucacauuugggagaau

SEQ ID NO: 2010143 - RNA, 19 nt, Artificial Sequence
  Description of Artificial Sequence: Synthetic oligonucleotide
  Antisense strand to SEQ ID NO: 2010142
auucucccaaaugugaugg

SEQ ID NO: 2010144 - RNA, 19 nt, Artificial Sequence
  Description of Artificial Sequence: Synthetic oligonucleotide
  Sense strand starting at position 1765 of SEQ ID NO: 1880999
cauugauaggccuagcacu

SEQ ID NO: 2010145 - RNA, 19 nt, Artificial Sequence
  Description of Artificial Sequence: Synthetic oligonucleotide
  Antisense strand to SEQ ID NO: 2010144
agugcuaggccuaucaaug

SEQ ID NO: 2010146 - RNA, 19 nt, Artificial Sequence
  Description of Artificial Sequence: Synthetic oligonucleotide
  Sense strand starting at position 1784 of SEQ ID NO: 1880999
guccaaagauugccauuga

SEQ ID NO: 2010147 - RNA, 19 nt, Artificial Sequence
  Description of Artificial Sequence: Synthetic oligonucleotide
  Antisense strand to SEQ ID NO: 2010146
ucaauggcaaucuuuggac

SEQ ID NO: 2010148 - RNA, 19 nt, Artificial Sequence
  Description of Artificial Sequence: Synthetic oligonucleotide
  Sense strand starting at position 1799 of SEQ ID NO: 1880999
uugauaaugugcuccagga

SEQ ID NO: 2010149 - RNA, 19 nt, Artificial Sequence
  Description of Artificial Sequence: Synthetic oligonucleotide
  Antisense strand to SEQ ID NO: 2010148
uccuggagcacauuaucaa

SEQ ID NO: 2010150 - RNA, 19 nt, Artificial Sequence
  Description of Artificial Sequence: Synthetic oligonucleotide
  Sense strand starting at position 1803 of SEQ ID NO: 1880999
uaaugugcuccaggaggau

SEQ ID NO: 2010151 - RNA, 19 nt, Artificial Sequence
  Description of Artificial Sequence: Synthetic oligonucleotide
  Antisense strand to SEQ ID NO: 2010150
auccuccuggagcacauua

SEQ ID NO: 2010152 - RNA, 19 nt, Artificial Sequence
  Description of Artificial Sequence: Synthetic oligonucleotide
  Sense strand starting at position 2037 of SEQ ID NO: 1880999
agucuuucugcuuaagaaa

SEQ ID NO: 2010153 - RNA, 19 nt, Artificial Sequence
  Description of Artificial Sequence: Synthetic oligonucleotide
  Antisense strand to SEQ ID NO: 2010152
uuucuuaagcagaaagacu

SEQ ID NO: 2010154 - RNA, 19 nt, Artificial Sequence
  Description of Artificial Sequence: Synthetic oligonucleotide
  Sense strand starting at position 2700 of SEQ ID NO: 1880999
gugcaagaacucuaaugau

SEQ ID NO: 2010155 - RNA, 19 nt, Artificial Sequence
  Description of Artificial Sequence: Synthetic oligonucleotide
  Antisense strand to SEQ ID NO: 2010154
aucauuagaguucuugcac

SEQ ID NO: 2010156 - RNA, 19 nt, Artificial Sequence
  Description of Artificial Sequence: Synthetic oligonucleotide
  Sense strand starting at position 2735 of SEQ ID NO: 1880999
ucuucuugagucuaaauga

SEQ ID NO: 2010157 - RNA, 19 nt, Artificial Sequence
  Description of Artificial Sequence: Synthetic oligonucleotide
  Antisense strand to SEQ ID NO: 2010156
ucauuuagacucaagaaga

SEQ ID NO: 2010158 - RNA, 19 nt, Artificial Sequence
  Description of Artificial Sequence: Synthetic oligonucleotide
  Sense strand starting at position 2888 of SEQ ID NO: 1880999
ggugaaacaguccaagagu

SEQ ID NO: 2010159 - RNA, 19 nt, Artificial Sequence
  Description of Artificial Sequence: Synthetic oligonucleotide
  Antisense strand to SEQ ID NO: 2010158
acucuuggacuguuucacc

SEQ ID NO: 2010160 - RNA, 19 nt, Artificial Sequence
  Description of Artificial Sequence: Synthetic oligonucleotide
  Sense strand starting at position 3037 of SEQ ID NO: 1880999
ucagaacucgaagacuguu

SEQ ID NO: 2010161 - RNA, 19 nt, Artificial Sequence
  Description of Artificial Sequence: Synthetic oligonucleotide
  Antisense strand to SEQ ID NO: 2010160
aacagucuucgaguucuga

SEQ ID NO: 2010162 - RNA, 19 nt, Artificial Sequence
  Description of Artificial Sequence: Synthetic oligonucleotide
  Sense strand starting at position 3158 of SEQ ID NO: 1880999
guugucauuccugaaagag

SEQ ID NO: 2010163 - RNA, 19 nt, Artificial Sequence
  Description of Artificial Sequence: Synthetic oligonucleotide
  Antisense strand to SEQ ID NO: 2010162
cucuuucaggaaugacaac

SEQ ID NO: 2010164 - RNA, 19 nt, Artificial Sequence
  Description of Artificial Sequence: Synthetic oligonucleotide
  Sense strand starting at position 3210 of SEQ ID NO: 1880999
uugagaauauuggucauga

SEQ ID NO: 2010165 - RNA, 19 nt, Artificial Sequence
  Description of Artificial Sequence: Synthetic oligonucleotide
  Antisense strand to SEQ ID NO: 2010164
ucaugaccaauauucucaa

SEQ ID NO: 2010166 - RNA, 19 nt, Artificial Sequence
  Description of Artificial Sequence: Synthetic oligonucleotide
  Sense strand starting at position 3237 of SEQ ID NO: 1880999
ccaaccuugcuggagugau

SEQ ID NO: 2010167 - RNA, 19 nt, Artificial Sequence
  Description of Artificial Sequence: Synthetic oligonucleotide
  Antisense strand to SEQ ID NO: 2010166
aucacuccagcaagguugg

SEQ ID NO: 2010168 - RNA, 19 nt, Artificial Sequence
  Description of Artificial Sequence: Synthetic oligonucleotide
  Sense strand starting at position 3329 of SEQ ID NO: 1880999
gucaucagauucuucgaaa

SEQ ID NO: 2010169 - RNA, 19 nt, Artificial Sequence
  Description of Artificial Sequence: Synthetic oligonucleotide
  Antisense strand to SEQ ID NO: 2010168
uuucgaagaaucugaugac

SEQ ID NO: 2010170 - RNA, 19 nt, Artificial Sequence
  Description of Artificial Sequence: Synthetic oligonucleotide
  Sense strand starting at position 3330 of SEQ ID NO: 1880999
ucaucagauucuucgaaac

SEQ ID NO: 2010171 - RNA, 19 nt, Artificial Sequence
  Description of Artificial Sequence: Synthetic oligonucleotide
  Antisense strand to SEQ ID NO: 2010170
guuucgaagaaucugauga

SEQ ID NO: 2010172 - RNA, 19 nt, Artificial Sequence
  Description of Artificial Sequence: Synthetic oligonucleotide
  Sense strand starting at position 3340 of SEQ ID NO: 1880999
cuucgaaaccaauguggaa

SEQ ID NO: 2010173 - RNA, 19 nt, Artificial Sequence
  Description of Artificial Sequence: Synthetic oligonucleotide
  Antisense strand to SEQ ID NO: 2010172
uuccacauugguuucgaag

SEQ ID NO: 2010174 - RNA, 19 nt, Artificial Sequence
  Description of Artificial Sequence: Synthetic oligonucleotide
  Sense strand starting at position 3603 of SEQ ID NO: 1880999
ccagacuugccuuauaaga

SEQ ID NO: 2010175 - RNA, 19 nt, Artificial Sequence
  Description of Artificial Sequence: Synthetic oligonucleotide
  Antisense strand to SEQ ID NO: 2010174
ucuuauaaggcaagucugg

SEQ ID NO: 2010176 - RNA, 19 nt, Artificial Sequence
  Description of Artificial Sequence: Synthetic oligonucleotide
  Sense strand starting at position 207 of SEQ ID NO: 1881000
agaugaauaggcuguauuc

SEQ ID NO: 2010177 - RNA, 19 nt, Artificial Sequence
  Description of Artificial Sequence: Synthetic oligonucleotide
  Antisense strand to SEQ ID NO: 2010176
gaauacagccuauucaucu

SEQ ID NO: 2010178 - RNA, 19 nt, Artificial Sequence
  Description of Artificial Sequence: Synthetic oligonucleotide
  Sense strand starting at position 209 of SEQ ID NO: 1881000
augaauaggcuguauucuu

SEQ ID NO: 2010179 - RNA, 19 nt, Artificial Sequence
  Description of Artificial Sequence: Synthetic oligonucleotide
  Antisense strand to SEQ ID NO: 2010178
aagaauacagccuauucau

SEQ ID NO: 2010180 - RNA, 19 nt, Artificial Sequence
  Description of Artificial Sequence: Synthetic oligonucleotide
  Sense strand starting at position 316 of SEQ ID NO: 1881000
cuaaaccaguuauuguaau

SEQ ID NO: 2010181 - RNA, 19 nt, Artificial Sequence
  Description of Artificial Sequence: Synthetic oligonucleotide
  Antisense strand to SEQ ID NO: 2010180
auuacaauaacugguuuag

SEQ ID NO: 2010182 - RNA, 19 nt, Artificial Sequence
  Description of Artificial Sequence: Synthetic oligonucleotide
  Sense strand starting at position 396 of SEQ ID NO: 1881000
cugagaucugaagggcuaa

SEQ ID NO: 2010183 - RNA, 19 nt, Artificial Sequence
  Description of Artificial Sequence: Synthetic oligonucleotide
  Antisense strand to SEQ ID NO: 2010182
uuagcccuucagaucucag

SEQ ID NO: 2010184 - RNA, 19 nt, Artificial Sequence
  Description of Artificial Sequence: Synthetic oligonucleotide
  Sense strand starting at position 397 of SEQ ID NO: 1881000
ugagaucugaagggcuaau

SEQ ID NO: 2010185 - RNA, 19 nt, Artificial Sequence
  Description of Artificial Sequence: Synthetic oligonucleotide
  Antisense strand to SEQ ID NO: 2010184
auuagcccuucagaucuca

SEQ ID NO: 2010186 - RNA, 19 nt, Artificial Sequence
  Description of Artificial Sequence: Synthetic oligonucleotide
  Sense strand starting at position 529 of SEQ ID NO: 1881000
uugucuuuauagguagaca

SEQ ID NO: 2010187 - RNA, 19 nt, Artificial Sequence
  Description of Artificial Sequence: Synthetic oligonucleotide
  Antisense strand to SEQ ID NO: 2010186
ugucuaccuauaaagacaa

SEQ ID NO: 2010188 - RNA, 19 nt, Artificial Sequence
  Description of Artificial Sequence: Synthetic oligonucleotide
  Sense strand starting at position 558 of SEQ ID NO: 1881000
ucaguuggaguugaaguaa

SEQ ID NO: 2010189 - RNA, 19 nt, Artificial Sequence
  Description of Artificial Sequence: Synthetic oligonucleotide
  Antisense strand to SEQ ID NO: 2010188
uuacuucaacuccaacuga

SEQ ID NO: 2010190 - RNA, 19 nt, Artificial Sequence
  Description of Artificial Sequence: Synthetic oligonucleotide
  Sense strand starting at position 592 of SEQ ID NO: 1881000
uuaagaaagucuuugaagc

SEQ ID NO: 2010191 - RNA, 19 nt, Artificial Sequence
  Description of Artificial Sequence: Synthetic oligonucleotide
  Antisense strand to SEQ ID NO: 2010190
gcuucaaagacuuucuuaa

SEQ ID NO: 2010192 - RNA, 19 nt, Artificial Sequence
  Description of Artificial Sequence: Synthetic oligonucleotide
  Sense strand starting at position 772 of SEQ ID NO: 1881000
cauuacacuggugaguuau

SEQ ID NO: 2010193 - RNA, 19 nt, Artificial Sequence
  Description of Artificial Sequence: Synthetic oligonucleotide
  Antisense strand to SEQ ID NO: 2010192
auaacucaccaguguaaug

SEQ ID NO: 2010194 - RNA, 19 nt, Artificial Sequence
  Description of Artificial Sequence: Synthetic oligonucleotide
  Sense strand starting at position 774 of SEQ ID NO: 1881000
uuacacuggugaguuauaa

SEQ ID NO: 2010195 - RNA, 19 nt, Artificial Sequence
  Description of Artificial Sequence: Synthetic oligonucleotide
  Antisense strand to SEQ ID NO: 2010194
uuauaacucaccaguguaa

SEQ ID NO: 2010196 - RNA, 19 nt, Artificial Sequence
  Description of Artificial Sequence: Synthetic oligonucleotide
  Sense strand starting at position 810 of SEQ ID NO: 1881000
auuacaaugugcucugaga

SEQ ID NO: 2010197 - RNA, 19 nt, Artificial Sequence
  Description of Artificial Sequence: Synthetic oligonucleotide
  Antisense strand to SEQ ID NO: 2010196
ucucagagcacauuguaau

SEQ ID NO: 2010198 - RNA, 19 nt, Artificial Sequence
  Description of Artificial Sequence: Synthetic oligonucleotide
  Sense strand starting at position 812 of SEQ ID NO: 1881000
uacaaugugcucugagaca

SEQ ID NO: 2010199 - RNA, 19 nt, Artificial Sequence
  Description of Artificial Sequence: Synthetic oligonucleotide
  Antisense strand to SEQ ID NO: 2010198
ugucucagagcacauugua

SEQ ID NO: 2010200 - RNA, 19 nt, Artificial Sequence
  Description of Artificial Sequence: Synthetic oligonucleotide
  Sense strand starting at position 898 of SEQ ID NO: 1881000
auaugcuuugguuauaacu

SEQ ID NO: 2010201 - RNA, 19 nt, Artificial Sequence
  Description of Artificial Sequence: Synthetic oligonucleotide
  Antisense strand to SEQ ID NO: 2010200
aguuauaaccaaagcauau

SEQ ID NO: 2010202 - RNA, 19 nt, Artificial Sequence
  Description of Artificial Sequence: Synthetic oligonucleotide
  Sense strand starting at position 907 of SEQ ID NO: 1881000
gguuauaacugcuuaauaa

SEQ ID NO: 2010203 - RNA, 19 nt, Artificial Sequence
  Description of Artificial Sequence: Synthetic oligonucleotide
  Antisense strand to SEQ ID NO: 2010202
uuauuaagcaguuauaacc

SEQ ID NO: 2010204 - RNA, 19 nt, Artificial Sequence
  Description of Artificial Sequence: Synthetic oligonucleotide
  Sense strand starting at position 1025 of SEQ ID NO: 1881000
uuaggaauugaaggcuuau

SEQ ID NO: 2010205 - RNA, 19 nt, Artificial Sequence
  Description of Artificial Sequence: Synthetic oligonucleotide
  Antisense strand to SEQ ID NO: 2010204
auaagccuucaauuccuaa

SEQ ID NO: 2010206 - RNA, 19 nt, Artificial Sequence
  Description of Artificial Sequence: Synthetic oligonucleotide
  Sense strand starting at position 1320 of SEQ ID NO: 1881000
gauagaagccacugaguua

SEQ ID NO: 2010207 - RNA, 19 nt, Artificial Sequence
  Description of Artificial Sequence: Synthetic oligonucleotide
  Antisense strand to SEQ ID NO: 2010206
uaacucaguggcuucuauc

SEQ ID NO: 2010208 - RNA, 19 nt, Artificial Sequence
  Description of Artificial Sequence: Synthetic oligonucleotide
  Sense strand starting at position 1383 of SEQ ID NO: 1881000
uugaucugccuuuaaagca

SEQ ID NO: 2010209 - RNA, 19 nt, Artificial Sequence
  Description of Artificial Sequence: Synthetic oligonucleotide
  Antisense strand to SEQ ID NO: 2010208
ugcuuuaaaggcagaucaa

SEQ ID NO: 2010210 - RNA, 19 nt, Artificial Sequence
  Description of Artificial Sequence: Synthetic oligonucleotide
  Sense strand starting at position 1420 of SEQ ID NO: 1881000
ugcccuaaagguuaauaaa

SEQ ID NO: 2010211 - RNA, 19 nt, Artificial Sequence
  Description of Artificial Sequence: Synthetic oligonucleotide
  Antisense strand to SEQ ID NO: 2010210
uuuauuaaccuuuagggca

SEQ ID NO: 2010212 - RNA, 19 nt, Artificial Sequence
  Description of Artificial Sequence: Synthetic oligonucleotide
  Sense strand starting at position 1769 of SEQ ID NO: 1881000
accugauggcuguaggaga

SEQ ID NO: 2010213 - RNA, 19 nt, Artificial Sequence
  Description of Artificial Sequence: Synthetic oligonucleotide
  Antisense strand to SEQ ID NO: 2010212
ucuccuacagccaucaggu

SEQ ID NO: 2010214 - RNA, 19 nt, Artificial Sequence
  Description of Artificial Sequence: Synthetic oligonucleotide
  Sense strand starting at position 2079 of SEQ ID NO: 1881000
guucuuauguggguaauuu

SEQ ID NO: 2010215 - RNA, 19 nt, Artificial Sequence
  Description of Artificial Sequence: Synthetic oligonucleotide
  Antisense strand to SEQ ID NO: 2010214
aaauuacccacauaagaac

SEQ ID NO: 2010216 - RNA, 19 nt, Artificial Sequence
  Description of Artificial Sequence: Synthetic oligonucleotide
  Sense strand starting at position 2413 of SEQ ID NO: 1881000
gugauauaucuauaccgug

SEQ ID NO: 2010217 - RNA, 19 nt, Artificial Sequence
  Description of Artificial Sequence: Synthetic oligonucleotide
  Antisense strand to SEQ ID NO: 2010216
cacgguauagauauaucac

SEQ ID NO: 2010218 - RNA, 19 nt, Artificial Sequence
  Description of Artificial Sequence: Synthetic oligonucleotide
  Sense strand starting at position 2418 of SEQ ID NO: 1881000
auaucuauaccguggauua

SEQ ID NO: 2010219 - RNA, 19 nt, Artificial Sequence
  Description of Artificial Sequence: Synthetic oligonucleotide
  Antisense strand to SEQ ID NO: 2010218
uaauccacgguauagauau

SEQ ID NO: 2010220 - RNA, 19 nt, Artificial Sequence
  Description of Artificial Sequence: Synthetic oligonucleotide
  Sense strand starting at position 2420 of SEQ ID NO: 1881000
aucuauaccguggauuacu

SEQ ID NO: 2010221 - RNA, 19 nt, Artificial Sequence
  Description of Artificial Sequence: Synthetic oligonucleotide
  Antisense strand to SEQ ID NO: 2010220
aguaauccacgguauagau

SEQ ID NO: 2010222 - RNA, 19 nt, Artificial Sequence
  Description of Artificial Sequence: Synthetic oligonucleotide
  Sense strand starting at position 2973 of SEQ ID NO: 1881000
uuaugcaaucuguaaugaa

SEQ ID NO: 2010223 - RNA, 19 nt, Artificial Sequence
  Description of Artificial Sequence: Synthetic oligonucleotide
  Antisense strand to SEQ ID NO: 2010222
uucauuacagauugcauaa

SEQ ID NO: 2010224 - RNA, 19 nt, Artificial Sequence
  Description of Artificial Sequence: Synthetic oligonucleotide
  Sense strand starting at position 2981 of SEQ ID NO: 1881000
ucuguaaugaauugguaug

SEQ ID NO: 2010225 - RNA, 19 nt, Artificial Sequence
  Description of Artificial Sequence: Synthetic oligonucleotide
  Antisense strand to SEQ ID NO: 2010224
cauaccaauucauuacaga

SEQ ID NO: 2010226 - RNA, 19 nt, Artificial Sequence
  Description of Artificial Sequence: Synthetic oligonucleotide
  Sense strand starting at position 2983 of SEQ ID NO: 1881000
uguaaugaauugguaugga

SEQ ID NO: 2010227 - RNA, 19 nt, Artificial Sequence
  Description of Artificial Sequence: Synthetic oligonucleotide
  Antisense strand to SEQ ID NO: 2010226
uccauaccaauucauuaca

SEQ ID NO: 2010228 - RNA, 19 nt, Artificial Sequence
  Description of Artificial Sequence: Synthetic oligonucleotide
  Sense strand starting at position 2986 of SEQ ID NO: 1881000
aaugaauugguauggaucu

SEQ ID NO: 2010229 - RNA, 19 nt, Artificial Sequence
  Description of Artificial Sequence: Synthetic oligonucleotide
  Antisense strand to SEQ ID NO: 2010228
agauccauaccaauucauu

SEQ ID NO: 2010230 - RNA, 19 nt, Artificial Sequence
  Description of Artificial Sequence: Synthetic oligonucleotide
  Sense strand starting at position 3029 of SEQ ID NO: 1881000
guugaugacuaucuuuaaa

SEQ ID NO: 2010231 - RNA, 19 nt, Artificial Sequence
  Description of Artificial Sequence: Synthetic oligonucleotide
  Antisense strand to SEQ ID NO: 2010230
uuuaaagauagucaucaac

SEQ ID NO: 2010232 - RNA, 19 nt, Artificial Sequence
  Description of Artificial Sequence: Synthetic oligonucleotide
  Sense strand starting at position 3049 of SEQ ID NO: 1881000
uguaaaggguguuuagaaa

SEQ ID NO: 2010233 - RNA, 19 nt, Artificial Sequence
  Description of Artificial Sequence: Synthetic oligonucleotide
  Antisense strand to SEQ ID NO: 2010232
uuucuaaacacccuuuaca

SEQ ID NO: 2010234 - RNA, 19 nt, Artificial Sequence
  Description of Artificial Sequence: Synthetic oligonucleotide
  Sense strand starting at position 3064 of SEQ ID NO: 1881000
gaaaccuaccugggaguua

SEQ ID NO: 2010235 - RNA, 19 nt, Artificial Sequence
  Description of Artificial Sequence: Synthetic oligonucleotide
  Antisense strand to SEQ ID NO: 2010234
uaacucccagguagguuuc

SEQ ID NO: 2010236 - RNA, 19 nt, Artificial Sequence
  Description of Artificial Sequence: Synthetic oligonucleotide
  Sense strand starting at position 3216 of SEQ ID NO: 1881000
ucuguaagucuccauuauu

SEQ ID NO: 2010237 - RNA, 19 nt, Artificial Sequence
  Description of Artificial Sequence: Synthetic oligonucleotide
  Antisense strand to SEQ ID NO: 2010236
aauaauggagacuuacaga

SEQ ID NO: 2010238 - RNA, 19 nt, Artificial Sequence
  Description of Artificial Sequence: Synthetic oligonucleotide
  Sense strand starting at position 3684 of SEQ ID NO: 1881000
aacuuauaggccuaaagug

SEQ ID NO: 2010239 - RNA, 19 nt, Artificial Sequence
  Description of Artificial Sequence: Synthetic oligonucleotide
  Antisense strand to SEQ ID NO: 2010238
cacuuuaggccuauaaguu

SEQ ID NO: 2010240 - RNA, 19 nt, Artificial Sequence
  Description of Artificial Sequence: Synthetic oligonucleotide
  Sense strand starting at position 3698 of SEQ ID NO: 1881000
aagugaaguuugucuggag

SEQ ID NO: 2010241 - RNA, 19 nt, Artificial Sequence
  Description of Artificial Sequence: Synthetic oligonucleotide
  Antisense strand to SEQ ID NO: 2010240
cuccagacaaacuucacuu

SEQ ID NO: 2010242 - RNA, 19 nt, Artificial Sequence
  Description of Artificial Sequence: Synthetic oligonucleotide
  Sense strand starting at position 3763 of SEQ ID NO: 1881000
cucucaaugggucaucagu

SEQ ID NO: 2010243 - RNA, 19 nt, Artificial Sequence
  Description of Artificial Sequence: Synthetic oligonucleotide
  Antisense strand to SEQ ID NO: 2010242
acugaugacccauugagag

SEQ ID NO: 2010244 - RNA, 19 nt, Artificial Sequence
  Description of Artificial Sequence: Synthetic oligonucleotide
  Sense strand starting at position 3765 of SEQ ID NO: 1881000
cucaaugggucaucaguca

SEQ ID NO: 2010245 - RNA, 19 nt, Artificial Sequence
  Description of Artificial Sequence: Synthetic oligonucleotide
  Antisense strand to SEQ ID NO: 2010244
ugacugaugacccauugag

SEQ ID NO: 2010246 - RNA, 19 nt, Artificial Sequence
  Description of Artificial Sequence: Synthetic oligonucleotide
  Sense strand starting at position 3867 of SEQ ID NO: 1881000
acagcaauucuauggagac

SEQ ID NO: 2010247 - RNA, 19 nt, Artificial Sequence
  Description of Artificial Sequence: Synthetic oligonucleotide
  Antisense strand to SEQ ID NO: 2010246
gucuccauagaauugcugu

SEQ ID NO: 2010248 - RNA, 19 nt, Artificial Sequence
  Description of Artificial Sequence: Synthetic oligonucleotide
  Sense strand starting at position 3881 of SEQ ID NO: 1881000
gagacaguauuaucaaguu

SEQ ID NO: 2010249 - RNA, 19 nt, Artificial Sequence
  Description of Artificial Sequence: Synthetic oligonucleotide
  Antisense strand to SEQ ID NO: 2010248
aacuugauaauacugucuc

SEQ ID NO: 2010250 - RNA, 19 nt, Artificial Sequence
  Description of Artificial Sequence: Synthetic oligonucleotide
  Sense strand starting at position 3903 of SEQ ID NO: 1881000
uaauuuguccaaggugugu

SEQ ID NO: 2010251 - RNA, 19 nt, Artificial Sequence
  Description of Artificial Sequence: Synthetic oligonucleotide
  Antisense strand to SEQ ID NO: 2010250
acacaccuuggacaaauua

SEQ ID NO: 2010252 - RNA, 19 nt, Artificial Sequence
  Description of Artificial Sequence: Synthetic oligonucleotide
  Sense strand starting at position 3933 of SEQ ID NO: 1881000
aggguaaagcuuuacagca

SEQ ID NO: 2010253 - RNA, 19 nt, Artificial Sequence
  Description of Artificial Sequence: Synthetic oligonucleotide
  Antisense strand to SEQ ID NO: 2010252
ugcuguaaagcuuuacccu

SEQ ID NO: 2010254 - RNA, 19 nt, Artificial Sequence
  Description of Artificial Sequence: Synthetic oligonucleotide
  Sense strand starting at position 3938 of SEQ ID NO: 1881000
aaagcuuuacagcagaagu

SEQ ID NO: 2010255 - RNA, 19 nt, Artificial Sequence
  Description of Artificial Sequence: Synthetic oligonucleotide
  Antisense strand to SEQ ID NO: 2010254
acuucugcuguaaagcuuu

SEQ ID NO: 2010256 - RNA, 19 nt, Artificial Sequence
  Description of Artificial Sequence: Synthetic oligonucleotide
  Sense strand starting at position 2030 of SEQ ID NO: 1881001
agacaaacauugggagaau

SEQ ID NO: 2010257 - RNA, 19 nt, Artificial Sequence
  Description of Artificial Sequence: Synthetic oligonucleotide
  Antisense strand to SEQ ID NO: 2010256
auucucccaauguuugucu

SEQ ID NO: 2010258 - RNA, 19 nt, Artificial Sequence
  Description of Artificial Sequence: Synthetic oligonucleotide
  Sense strand starting at position 2053 of SEQ ID NO: 1881001
acguauccucuugaguugu

SEQ ID NO: 2010259 - RNA, 19 nt, Artificial Sequence
  Description of Artificial Sequence: Synthetic oligonucleotide
  Antisense strand to SEQ ID NO: 2010258
acaacucaagaggauacgu

SEQ ID NO: 2010260 - RNA, 19 nt, Artificial Sequence
  Description of Artificial Sequence: Synthetic oligonucleotide
  Sense strand starting at position 2064 of SEQ ID NO: 1881001
ugaguugugaugugaacaa

SEQ ID NO: 2010261 - RNA, 19 nt, Artificial Sequence
  Description of Artificial Sequence: Synthetic oligonucleotide
  Antisense strand to SEQ ID NO: 2010260
uuguucacaucacaacuca

SEQ ID NO: 2010262 - RNA, 19 nt, Artificial Sequence
  Description of Artificial Sequence: Synthetic oligonucleotide
  Sense strand starting at position 2123 of SEQ ID NO: 1881001
ccagcauggugcuuagagu

SEQ ID NO: 2010263 - RNA, 19 nt, Artificial Sequence
  Description of Artificial Sequence: Synthetic oligonucleotide
  Antisense strand to SEQ ID NO: 2010262
acucuaagcaccaugcugg

SEQ ID NO: 2010264 - RNA, 19 nt, Artificial Sequence
  Description of Artificial Sequence: Synthetic oligonucleotide
  Sense strand starting at position 2124 of SEQ ID NO: 1881001
cagcauggugcuuagagua

SEQ ID NO: 2010265 - RNA, 19 nt, Artificial Sequence
  Description of Artificial Sequence: Synthetic oligonucleotide
  Antisense strand to SEQ ID NO: 2010264
uacucuaagcaccaugcug

SEQ ID NO: 2010266 - RNA, 19 nt, Artificial Sequence
  Description of Artificial Sequence: Synthetic oligonucleotide
  Sense strand starting at position 2136 of SEQ ID NO: 1881001
uagaguagucccugggcaa

SEQ ID NO: 2010267 - RNA, 19 nt, Artificial Sequence
  Description of Artificial Sequence: Synthetic oligonucleotide
  Antisense strand to SEQ ID NO: 2010266
uugcccagggacuacucua

SEQ ID NO: 2010268 - RNA, 19 nt, Artificial Sequence
  Description of Artificial Sequence: Synthetic oligonucleotide
  Sense strand starting at position 2137 of SEQ ID NO: 1881001
agaguagucccugggcaac

SEQ ID NO: 2010269 - RNA, 19 nt, Artificial Sequence
  Description of Artificial Sequence: Synthetic oligonucleotide
  Antisense strand to SEQ ID NO: 2010268
guugcccagggacuacucu

SEQ ID NO: 2010270 - RNA, 19 nt, Artificial Sequence
  Description of Artificial Sequence: Synthetic oligonucleotide
  Sense strand starting at position 2346 of SEQ ID NO: 1881001
cugugaaauuggcugauuc

SEQ ID NO: 2010271 - RNA, 19 nt, Artificial Sequence
  Description of Artificial Sequence: Synthetic oligonucleotide
  Antisense strand to SEQ ID NO: 2010270
gaaucagccaauuucacag

SEQ ID NO: 2010272 - RNA, 19 nt, Artificial Sequence
  Description of Artificial Sequence: Synthetic oligonucleotide
  Sense strand starting at position 2579 of SEQ ID NO: 1881001
uggaauuggccagggcuua

SEQ ID NO: 2010273 - RNA, 19 nt, Artificial Sequence
  Description of Artificial Sequence: Synthetic oligonucleotide
  Antisense strand to SEQ ID NO: 2010272
uaagcccuggccaauucca

SEQ ID NO: 2010274 - RNA, 19 nt, Artificial Sequence
  Description of Artificial Sequence: Synthetic oligonucleotide
  Sense strand starting at position 2755 of SEQ ID NO: 1881001
uuugguguuucccuguaau

SEQ ID NO: 2010275 - RNA, 19 nt, Artificial Sequence
  Description of Artificial Sequence: Synthetic oligonucleotide
  Antisense strand to SEQ ID NO: 2010274
auuacagggaaacaccaaa

SEQ ID NO: 2010276 - RNA, 19 nt, Artificial Sequence
  Description of Artificial Sequence: Synthetic oligonucleotide
  Sense strand starting at position 2758 of SEQ ID NO: 1881001
gguguuucccuguaauaaa

SEQ ID NO: 2010277 - RNA, 19 nt, Artificial Sequence
  Description of Artificial Sequence: Synthetic oligonucleotide
  Antisense strand to SEQ ID NO: 2010276
uuuauuacagggaaacacc

SEQ ID NO: 2010278 - RNA, 19 nt, Artificial Sequence
  Description of Artificial Sequence: Synthetic oligonucleotide
  Sense strand starting at position 2814 of SEQ ID NO: 1881001
agugccuuccuccagacaa

SEQ ID NO: 2010279 - RNA, 19 nt, Artificial Sequence
  Description of Artificial Sequence: Synthetic oligonucleotide
  Antisense strand to SEQ ID NO: 2010278
uugucuggaggaaggcacu

SEQ ID NO: 2010280 - RNA, 19 nt, Artificial Sequence
  Description of Artificial Sequence: Synthetic oligonucleotide
  Sense strand starting at position 2816 of SEQ ID NO: 1881001
ugccuuccuccagacaagu

SEQ ID NO: 2010281 - RNA, 19 nt, Artificial Sequence
  Description of Artificial Sequence: Synthetic oligonucleotide
  Antisense strand to SEQ ID NO: 2010280
acuugucuggaggaaggca

SEQ ID NO: 2010282 - RNA, 19 nt, Artificial Sequence
  Description of Artificial Sequence: Synthetic oligonucleotide
  Sense strand starting at position 2851 of SEQ ID NO: 1881001
cagucagaauagguaacau

SEQ ID NO: 2010283 - RNA, 19 nt, Artificial Sequence
  Description of Artificial Sequence: Synthetic oligonucleotide
  Antisense strand to SEQ ID NO: 2010282
auguuaccuauucugacug

SEQ ID NO: 2010284 - RNA, 19 nt, Artificial Sequence
  Description of Artificial Sequence: Synthetic oligonucleotide
  Sense strand starting at position 2861 of SEQ ID NO: 1881001
agguaacaucagcauaauu

SEQ ID NO: 2010285 - RNA, 19 nt, Artificial Sequence
  Description of Artificial Sequence: Synthetic oligonucleotide
  Antisense strand to SEQ ID NO: 2010284
aauuaugcugauguuaccu

SEQ ID NO: 2010286 - RNA, 19 nt, Artificial Sequence
  Description of Artificial Sequence: Synthetic oligonucleotide
  Sense strand starting at position 3038 of SEQ ID NO: 1881001
agugucuuugccgcuaaau

SEQ ID NO: 2010287 - RNA, 19 nt, Artificial Sequence
  Description of Artificial Sequence: Synthetic oligonucleotide
  Antisense strand to SEQ ID NO: 2010286
auuuagcggcaaagacacu

SEQ ID NO: 2010288 - RNA, 19 nt, Artificial Sequence
  Description of Artificial Sequence: Synthetic oligonucleotide
  Sense strand starting at position 3039 of SEQ ID NO: 1881001
gugucuuugccgcuaaaua

SEQ ID NO: 2010289 - RNA, 19 nt, Artificial Sequence
  Description of Artificial Sequence: Synthetic oligonucleotide
  Antisense strand to SEQ ID NO: 2010288
uauuuagcggcaaagacac

SEQ ID NO: 2010290 - RNA, 19 nt, Artificial Sequence
  Description of Artificial Sequence: Synthetic oligonucleotide
  Sense strand starting at position 3040 of SEQ ID NO: 1881001
ugucuuugccgcuaaauaa

SEQ ID NO: 2010291 - RNA, 19 nt, Artificial Sequence
  Description of Artificial Sequence: Synthetic oligonucleotide
  Antisense strand to SEQ ID NO: 2010290
uuauuuagcggcaaagaca

SEQ ID NO: 2010292 - RNA, 19 nt, Artificial Sequence
  Description of Artificial Sequence: Synthetic oligonucleotide
  Sense strand starting at position 3060 of SEQ ID NO: 1881001
ggcagaaaucaagguggca

SEQ ID NO: 2010293 - RNA, 19 nt, Artificial Sequence
  Description of Artificial Sequence: Synthetic oligonucleotide
  Antisense strand to SEQ ID NO: 2010292
ugccaccuugauuucugcc

SEQ ID NO: 2010294 - RNA, 19 nt, Artificial Sequence
  Description of Artificial Sequence: Synthetic oligonucleotide
  Sense strand starting at position 3182 of SEQ ID NO: 1881001
gccaucacccuggacagau

SEQ ID NO: 2010295 - RNA, 19 nt, Artificial Sequence
  Description of Artificial Sequence: Synthetic oligonucleotide
  Antisense strand to SEQ ID NO: 2010294
aucuguccagggugauggc

SEQ ID NO: 2010296 - RNA, 19 nt, Artificial Sequence
  Description of Artificial Sequence: Synthetic oligonucleotide
  Sense strand starting at position 3431 of SEQ ID NO: 1881001
ccaggucucucccucagau

SEQ ID NO: 2010297 - RNA, 19 nt, Artificial Sequence
  Description of Artificial Sequence: Synthetic oligonucleotide
  Antisense strand to SEQ ID NO: 2010296
aucugagggagagaccugg

SEQ ID NO: 2010298 - RNA, 19 nt, Artificial Sequence
  Description of Artificial Sequence: Synthetic oligonucleotide
  Sense strand starting at position 3474 of SEQ ID NO: 1881001
gccaucuccuaagcagauu

SEQ ID NO: 2010299 - RNA, 19 nt, Artificial Sequence
  Description of Artificial Sequence: Synthetic oligonucleotide
  Antisense strand to SEQ ID NO: 2010298
aaucugcuuaggagauggc

SEQ ID NO: 2010300 - RNA, 19 nt, Artificial Sequence
  Description of Artificial Sequence: Synthetic oligonucleotide
  Sense strand starting at position 3537 of SEQ ID NO: 1881001
uuuccuguugcuuaagcua

SEQ ID NO: 2010301 - RNA, 19 nt, Artificial Sequence
  Description of Artificial Sequence: Synthetic oligonucleotide
  Antisense strand to SEQ ID NO: 2010300
uagcuuaagcaacaggaaa

SEQ ID NO: 2010302 - RNA, 19 nt, Artificial Sequence
  Description of Artificial Sequence: Synthetic oligonucleotide
  Sense strand starting at position 3545 of SEQ ID NO: 1881001
ugcuuaagcuaagucuauu

SEQ ID NO: 2010303 - RNA, 19 nt, Artificial Sequence
  Description of Artificial Sequence: Synthetic oligonucleotide
  Antisense strand to SEQ ID NO: 2010302
aauagacuuagcuuaagca

SEQ ID NO: 2010304 - RNA, 19 nt, Artificial Sequence
  Description of Artificial Sequence: Synthetic oligonucleotide
  Sense strand starting at position 3585 of SEQ ID NO: 1881001
gcaggugacuuguucaaga

SEQ ID NO: 2010305 - RNA, 19 nt, Artificial Sequence
  Description of Artificial Sequence: Synthetic oligonucleotide
  Antisense strand to SEQ ID NO: 2010304
ucuugaacaagucaccugc

SEQ ID NO: 2010306 - RNA, 19 nt, Artificial Sequence
  Description of Artificial Sequence: Synthetic oligonucleotide
  Sense strand starting at position 3608 of SEQ ID NO: 1881001
acagccauuuaguggcaaa

SEQ ID NO: 2010307 - RNA, 19 nt, Artificial Sequence
  Description of Artificial Sequence: Synthetic oligonucleotide
  Antisense strand to SEQ ID NO: 2010306
uuugccacuaaauggcugu

SEQ ID NO: 2010308 - RNA, 19 nt, Artificial Sequence
  Description of Artificial Sequence: Synthetic oligonucleotide
  Sense strand starting at position 3733 of SEQ ID NO: 1881001
gggugcagaccacaucuua

SEQ ID NO: 2010309 - RNA, 19 nt, Artificial Sequence
  Description of Artificial Sequence: Synthetic oligonucleotide
  Antisense strand to SEQ ID NO: 2010308
uaagauguggucugcaccc

SEQ ID NO: 2010310 - RNA, 19 nt, Artificial Sequence
  Description of Artificial Sequence: Synthetic oligonucleotide
  Sense strand starting at position 3757 of SEQ ID NO: 1881001
uuuaguaauguguacacua

SEQ ID NO: 2010311 - RNA, 19 nt, Artificial Sequence
  Description of Artificial Sequence: Synthetic oligonucleotide
  Antisense strand to SEQ ID NO: 2010310
uaguguacacauuacuaaa

SEQ ID NO: 2010312 - RNA, 19 nt, Artificial Sequence
  Description of Artificial Sequence: Synthetic oligonucleotide
  Sense strand starting at position 3771 of SEQ ID NO: 1881001
cacuaagggccagguauau

SEQ ID NO: 2010313 - RNA, 19 nt, Artificial Sequence
  Description of Artificial Sequence: Synthetic oligonucleotide
  Antisense strand to SEQ ID NO: 2010312
auauaccuggcccuuagug

SEQ ID NO: 2010314 - RNA, 19 nt, Artificial Sequence
  Description of Artificial Sequence: Synthetic oligonucleotide
  Sense strand starting at position 3802 of SEQ ID NO: 1881001
cuugcaguccuaggaggua

SEQ ID NO: 2010315 - RNA, 19 nt, Artificial Sequence
  Description of Artificial Sequence: Synthetic oligonucleotide
  Antisense strand to SEQ ID NO: 2010314
uaccuccuaggacugcaag

SEQ ID NO: 2010316 - RNA, 19 nt, Artificial Sequence
  Description of Artificial Sequence: Synthetic oligonucleotide
  Sense strand starting at position 3807 of SEQ ID NO: 1881001
aguccuaggagguaugacu

SEQ ID NO: 2010317 - RNA, 19 nt, Artificial Sequence
  Description of Artificial Sequence: Synthetic oligonucleotide
  Antisense strand to SEQ ID NO: 2010316
agucauaccuccuaggacu

SEQ ID NO: 2010318 - RNA, 19 nt, Artificial Sequence
  Description of Artificial Sequence: Synthetic oligonucleotide
  Sense strand starting at position 3816 of SEQ ID NO: 1881001
agguaugacugucuuuguu

SEQ ID NO: 2010319 - RNA, 19 nt, Artificial Sequence
  Description of Artificial Sequence: Synthetic oligonucleotide
  Antisense strand to SEQ ID NO: 2010318
aacaaagacagucauaccu

SEQ ID NO: 2010320 - RNA, 19 nt, Artificial Sequence
  Description of Artificial Sequence: Synthetic oligonucleotide
  Sense strand starting at position 3820 of SEQ ID NO: 1881001
augacugucuuuguuuaca

SEQ ID NO: 2010321 - RNA, 19 nt, Artificial Sequence
  Description of Artificial Sequence: Synthetic oligonucleotide
  Antisense strand to SEQ ID NO: 2010320
uguaaacaaagacagucau

SEQ ID NO: 2010322 - RNA, 19 nt, Artificial Sequence
  Description of Artificial Sequence: Synthetic oligonucleotide
  Sense strand starting at position 3822 of SEQ ID NO: 1881001
gacugucuuuguuuacaga

SEQ ID NO: 2010323 - RNA, 19 nt, Artificial Sequence
  Description of Artificial Sequence: Synthetic oligonucleotide
  Antisense strand to SEQ ID NO: 2010322
ucuguaaacaaagacaguc

SEQ ID NO: 2010324 - RNA, 19 nt, Artificial Sequence
  Description of Artificial Sequence: Synthetic oligonucleotide
  Sense strand starting at position 3856 of SEQ ID NO: 1881001
agacuacugcacugcuaua

SEQ ID NO: 2010325 - RNA, 19 nt, Artificial Sequence
  Description of Artificial Sequence: Synthetic oligonucleotide
  Antisense strand to SEQ ID NO: 2010324
uauagcagugcaguagucu

SEQ ID NO: 2010326 - RNA, 19 nt, Artificial Sequence
  Description of Artificial Sequence: Synthetic oligonucleotide
  Sense strand starting at position 3867 of SEQ ID NO: 1881001
cugcuauaccacuagucua

SEQ ID NO: 2010327 - RNA, 19 nt, Artificial Sequence
  Description of Artificial Sequence: Synthetic oligonucleotide
  Antisense strand to SEQ ID NO: 2010326
uagacuagugguauagcag

SEQ ID NO: 2010328 - RNA, 19 nt, Artificial Sequence
  Description of Artificial Sequence: Synthetic oligonucleotide
  Sense strand starting at position 3905 of SEQ ID NO: 1881001
agcacuggucaauaaaugu

SEQ ID NO: 2010329 - RNA, 19 nt, Artificial Sequence
  Description of Artificial Sequence: Synthetic oligonucleotide
  Antisense strand to SEQ ID NO: 2010328
acauuuauugaccagugcu

SEQ ID NO: 2010330 - RNA, 19 nt, Artificial Sequence
  Description of Artificial Sequence: Synthetic oligonucleotide
  Sense strand starting at position 3911 of SEQ ID NO: 1881001
ggucaauaaauguggguua

SEQ ID NO: 2010331 - RNA, 19 nt, Artificial Sequence
  Description of Artificial Sequence: Synthetic oligonucleotide
  Antisense strand to SEQ ID NO: 2010330
uaacccacauuuauugacc

SEQ ID NO: 2010332 - RNA, 19 nt, Artificial Sequence
  Description of Artificial Sequence: Synthetic oligonucleotide
  Sense strand starting at position 3913 of SEQ ID NO: 1881001
ucaauaaauguggguuaac

SEQ ID NO: 2010333 - RNA, 19 nt, Artificial Sequence
  Description of Artificial Sequence: Synthetic oligonucleotide
  Antisense strand to SEQ ID NO: 2010332
guuaacccacauuuauuga

SEQ ID NO: 2010334 - RNA, 19 nt, Artificial Sequence
  Description of Artificial Sequence: Synthetic oligonucleotide
  Sense strand starting at position 3914 of SEQ ID NO: 1881001
caauaaauguggguuaacu

SEQ ID NO: 2010335 - RNA, 19 nt, Artificial Sequence
  Description of Artificial Sequence: Synthetic oligonucleotide
  Antisense strand to SEQ ID NO: 2010334
aguuaacccacauuuauug

SEQ ID NO: 2010336 - RNA, 19 nt, Artificial Sequence
  Description of Artificial Sequence: Synthetic oligonucleotide
  Sense strand starting at position 215 of SEQ ID NO: 1881002
gaguuagaaugaucucuga

SEQ ID NO: 2010337 - RNA, 19 nt, Artificial Sequence
  Description of Artificial Sequence: Synthetic oligonucleotide
  Antisense strand to SEQ ID NO: 2010336
ucagagaucauucuaacuc

SEQ ID NO: 2010338 - RNA, 19 nt, Artificial Sequence
  Description of Artificial Sequence: Synthetic oligonucleotide
  Sense strand starting at position 307 of SEQ ID NO: 1881002
guaugugguacaggaaaua

SEQ ID NO: 2010339 - RNA, 19 nt, Artificial Sequence
  Description of Artificial Sequence: Synthetic oligonucleotide
  Antisense strand to SEQ ID NO: 2010338
uauuuccuguaccacauac

SEQ ID NO: 2010340 - RNA, 19 nt, Artificial Sequence
  Description of Artificial Sequence: Synthetic oligonucleotide
  Sense strand starting at position 379 of SEQ ID NO: 1881002
caucaaucugugggaccaa

SEQ ID NO: 2010341 - RNA, 19 nt, Artificial Sequence
  Description of Artificial Sequence: Synthetic oligonucleotide
  Antisense strand to SEQ ID NO: 2010340
uuggucccacagauugaug

SEQ ID NO: 2010342 - RNA, 19 nt, Artificial Sequence
  Description of Artificial Sequence: Synthetic oligonucleotide
  Sense strand starting at position 488 of SEQ ID NO: 1881002
ccaucuuuaggguagaguu

SEQ ID NO: 2010343 - RNA, 19 nt, Artificial Sequence
  Description of Artificial Sequence: Synthetic oligonucleotide
  Antisense strand to SEQ ID NO: 2010342
aacucuacccuaaagaugg

SEQ ID NO: 2010344 - RNA, 19 nt, Artificial Sequence
  Description of Artificial Sequence: Synthetic oligonucleotide
  Sense strand starting at position 646 of SEQ ID NO: 1881002
uuauuagacuuggcuacua

SEQ ID NO: 2010345 - RNA, 19 nt, Artificial Sequence
  Description of Artificial Sequence: Synthetic oligonucleotide
  Antisense strand to SEQ ID NO: 2010344
uaguagccaagucuaauaa

SEQ ID NO: 2010346 - RNA, 19 nt, Artificial Sequence
  Description of Artificial Sequence: Synthetic oligonucleotide
  Sense strand starting at position 648 of SEQ ID NO: 1881002
auuagacuuggcuacuaau

SEQ ID NO: 2010347 - RNA, 19 nt, Artificial Sequence
  Description of Artificial Sequence: Synthetic oligonucleotide
  Antisense strand to SEQ ID NO: 2010346
auuaguagccaagucuaau

SEQ ID NO: 2010348 - RNA, 19 nt, Artificial Sequence
  Description of Artificial Sequence: Synthetic oligonucleotide
  Sense strand starting at position 686 of SEQ ID NO: 1881002
gacuacugguuaucaggaa

SEQ ID NO: 2010349 - RNA, 19 nt, Artificial Sequence
  Description of Artificial Sequence: Synthetic oligonucleotide
  Antisense strand to SEQ ID NO: 2010348
uuccugauaaccaguaguc

SEQ ID NO: 2010350 - RNA, 19 nt, Artificial Sequence
  Description of Artificial Sequence: Synthetic oligonucleotide
  Sense strand starting at position 736 of SEQ ID NO: 1881002
aucuauaaccagggcagaa

SEQ ID NO: 2010351 - RNA, 19 nt, Artificial Sequence
  Description of Artificial Sequence: Synthetic oligonucleotide
  Antisense strand to SEQ ID NO: 2010350
uucugcccugguuauagau

SEQ ID NO: 2010352 - RNA, 19 nt, Artificial Sequence
  Description of Artificial Sequence: Synthetic oligonucleotide
  Sense strand starting at position 828 of SEQ ID NO: 1881002
ugaauuugauagcagauau

SEQ ID NO: 2010353 - RNA, 19 nt, Artificial Sequence
  Description of Artificial Sequence: Synthetic oligonucleotide
  Antisense strand to SEQ ID NO: 2010352
auaucugcuaucaaauuca

SEQ ID NO: 2010354 - RNA, 19 nt, Artificial Sequence
  Description of Artificial Sequence: Synthetic oligonucleotide
  Sense strand starting at position 925 of SEQ ID NO: 1881002
ucuuauguugucuaagaaa

SEQ ID NO: 2010355 - RNA, 19 nt, Artificial Sequence
  Description of Artificial Sequence: Synthetic oligonucleotide
  Antisense strand to SEQ ID NO: 2010354
uuucuuagacaacauaaga

SEQ ID NO: 2010356 - RNA, 19 nt, Artificial Sequence
  Description of Artificial Sequence: Synthetic oligonucleotide
  Sense strand starting at position 1110 of SEQ ID NO: 1881002
agaagaaauuauccuuguu

SEQ ID NO: 2010357 - RNA, 19 nt, Artificial Sequence
  Description of Artificial Sequence: Synthetic oligonucleotide
  Antisense strand to SEQ ID NO: 2010356
aacaaggauaauuucuucu

SEQ ID NO: 2010358 - RNA, 19 nt, Artificial Sequence
  Description of Artificial Sequence: Synthetic oligonucleotide
  Sense strand starting at position 1120 of SEQ ID NO: 1881002
auccuuguucgacaaguaa

SEQ ID NO: 2010359 - RNA, 19 nt, Artificial Sequence
  Description of Artificial Sequence: Synthetic oligonucleotide
  Antisense strand to SEQ ID NO: 2010358
uuacuugucgaacaaggau

SEQ ID NO: 2010360 - RNA, 19 nt, Artificial Sequence
  Description of Artificial Sequence: Synthetic oligonucleotide
  Sense strand starting at position 1160 of SEQ ID NO: 1881002
ucaggaugccuagggauga

SEQ ID NO: 2010361 - RNA, 19 nt, Artificial Sequence
  Description of Artificial Sequence: Synthetic oligonucleotide
  Antisense strand to SEQ ID NO: 2010360
ucaucccuaggcauccuga

SEQ ID NO: 2010362 - RNA, 19 nt, Artificial Sequence
  Description of Artificial Sequence: Synthetic oligonucleotide
  Sense strand starting at position 1436 of SEQ ID NO: 1881002
ccuugaagauagucuuaca

SEQ ID NO: 2010363 - RNA, 19 nt, Artificial Sequence
  Description of Artificial Sequence: Synthetic oligonucleotide
  Antisense strand to SEQ ID NO: 2010362
uguaagacuaucuucaagg

SEQ ID NO: 2010364 - RNA, 19 nt, Artificial Sequence
  Description of Artificial Sequence: Synthetic oligonucleotide
  Sense strand starting at position 1452 of SEQ ID NO: 1881002
acaguuguaccucacaaga

SEQ ID NO: 2010365 - RNA, 19 nt, Artificial Sequence
  Description of Artificial Sequence: Synthetic oligonucleotide
  Antisense strand to SEQ ID NO: 2010364
ucuugugagguacaacugu

SEQ ID NO: 2010366 - RNA, 19 nt, Artificial Sequence
  Description of Artificial Sequence: Synthetic oligonucleotide
  Sense strand starting at position 1489 of SEQ ID NO: 1881002
guaauaugucuccaaaugg

SEQ ID NO: 2010367 - RNA, 19 nt, Artificial Sequence
  Description of Artificial Sequence: Synthetic oligonucleotide
  Antisense strand to SEQ ID NO: 2010366
ccauuuggagacauauuac

SEQ ID NO: 2010368 - RNA, 19 nt, Artificial Sequence
  Description of Artificial Sequence: Synthetic oligonucleotide
  Sense strand starting at position 1503 of SEQ ID NO: 1881002
aauggaaugguauggcuau

SEQ ID NO: 2010369 - RNA, 19 nt, Artificial Sequence
  Description of Artificial Sequence: Synthetic oligonucleotide
  Antisense strand to SEQ ID NO: 2010368
auagccauaccauuccauu

SEQ ID NO: 2010370 - RNA, 19 nt, Artificial Sequence
  Description of Artificial Sequence: Synthetic oligonucleotide
  Sense strand starting at position 1715 of SEQ ID NO: 1881002
uagauauggugucugauau

SEQ ID NO: 2010371 - RNA, 19 nt, Artificial Sequence
  Description of Artificial Sequence: Synthetic oligonucleotide
  Antisense strand to SEQ ID NO: 2010370
auaucagacaccauaucua

SEQ ID NO: 2010372 - RNA, 19 nt, Artificial Sequence
  Description of Artificial Sequence: Synthetic oligonucleotide
  Sense strand starting at position 1716 of SEQ ID NO: 1881002
agauauggugucugauauc

SEQ ID NO: 2010373 - RNA, 19 nt, Artificial Sequence
  Description of Artificial Sequence: Synthetic oligonucleotide
  Antisense strand to SEQ ID NO: 2010372
gauaucagacaccauaucu

SEQ ID NO: 2010374 - RNA, 19 nt, Artificial Sequence
  Description of Artificial Sequence: Synthetic oligonucleotide
  Sense strand starting at position 1801 of SEQ ID NO: 1881002
agcaaacaaucugcugaaa

SEQ ID NO: 2010375 - RNA, 19 nt, Artificial Sequence
  Description of Artificial Sequence: Synthetic oligonucleotide
  Antisense strand to SEQ ID NO: 2010374
uuucagcagauuguuugcu

SEQ ID NO: 2010376 - RNA, 19 nt, Artificial Sequence
  Description of Artificial Sequence: Synthetic oligonucleotide
  Sense strand starting at position 1883 of SEQ ID NO: 1881002
gggagaugguguucaggua

SEQ ID NO: 2010377 - RNA, 19 nt, Artificial Sequence
  Description of Artificial Sequence: Synthetic oligonucleotide
  Antisense strand to SEQ ID NO: 2010376
uaccugaacaccaucuccc

SEQ ID NO: 2010378 - RNA, 19 nt, Artificial Sequence
  Description of Artificial Sequence: Synthetic oligonucleotide
  Sense strand starting at position 1902 of SEQ ID NO: 1881002
gugaguauuuggcugguga

SEQ ID NO: 2010379 - RNA, 19 nt, Artificial Sequence
  Description of Artificial Sequence: Synthetic oligonucleotide
  Antisense strand to SEQ ID NO: 2010378
ucaccagccaaauacucac

SEQ ID NO: 2010380 - RNA, 19 nt, Artificial Sequence
  Description of Artificial Sequence: Synthetic oligonucleotide
  Sense strand starting at position 1994 of SEQ ID NO: 1881002
gcuucuccucaagagacaa

SEQ ID NO: 2010381 - RNA, 19 nt, Artificial Sequence
  Description of Artificial Sequence: Synthetic oligonucleotide
  Antisense strand to SEQ ID NO: 2010380
uugucucuugaggagaagc

SEQ ID NO: 2010382 - RNA, 19 nt, Artificial Sequence
  Description of Artificial Sequence: Synthetic oligonucleotide
  Sense strand starting at position 2232 of SEQ ID NO: 1881002
cugcucuauguagaaauua

SEQ ID NO: 2010383 - RNA, 19 nt, Artificial Sequence
  Description of Artificial Sequence: Synthetic oligonucleotide
  Antisense strand to SEQ ID NO: 2010382
uaauuucuacauagagcag

SEQ ID NO: 2010384 - RNA, 19 nt, Artificial Sequence
  Description of Artificial Sequence: Synthetic oligonucleotide
  Sense strand starting at position 2716 of SEQ ID NO: 1881002
guuuaugaacaauauagca

SEQ ID NO: 2010385 - RNA, 19 nt, Artificial Sequence
  Description of Artificial Sequence: Synthetic oligonucleotide
  Antisense strand to SEQ ID NO: 2010384
ugcuauauuguucauaaac

SEQ ID NO: 2010386 - RNA, 19 nt, Artificial Sequence
  Description of Artificial Sequence: Synthetic oligonucleotide
  Sense strand starting at position 2829 of SEQ ID NO: 1881002
aaguguuugccagugcuac

SEQ ID NO: 2010387 - RNA, 19 nt, Artificial Sequence
  Description of Artificial Sequence: Synthetic oligonucleotide
  Antisense strand to SEQ ID NO: 2010386
guagcacuggcaaacacuu

SEQ ID NO: 2010388 - RNA, 19 nt, Artificial Sequence
  Description of Artificial Sequence: Synthetic oligonucleotide
  Sense strand starting at position 2831 of SEQ ID NO: 1881002
guguuugccagugcuacau

SEQ ID NO: 2010389 - RNA, 19 nt, Artificial Sequence
  Description of Artificial Sequence: Synthetic oligonucleotide
  Antisense strand to SEQ ID NO: 2010388
auguagcacuggcaaacac

SEQ ID NO: 2010390 - RNA, 19 nt, Artificial Sequence
  Description of Artificial Sequence: Synthetic oligonucleotide
  Sense strand starting at position 2858 of SEQ ID NO: 1881002
aguuguuaccacuagauua

SEQ ID NO: 2010391 - RNA, 19 nt, Artificial Sequence
  Description of Artificial Sequence: Synthetic oligonucleotide
  Antisense strand to SEQ ID NO: 2010390
uaaucuagugguaacaacu

SEQ ID NO: 2010392 - RNA, 19 nt, Artificial Sequence
  Description of Artificial Sequence: Synthetic oligonucleotide
  Sense strand starting at position 3031 of SEQ ID NO: 1881002
ugagcagccaaugauugua

SEQ ID NO: 2010393 - RNA, 19 nt, Artificial Sequence
  Description of Artificial Sequence: Synthetic oligonucleotide
  Antisense strand to SEQ ID NO: 2010392
uacaaucauuggcugcuca

SEQ ID NO: 2010394 - RNA, 19 nt, Artificial Sequence
  Description of Artificial Sequence: Synthetic oligonucleotide
  Sense strand starting at position 3128 of SEQ ID NO: 1881002
acaacuugcuuagucagaa

SEQ ID NO: 2010395 - RNA, 19 nt, Artificial Sequence
  Description of Artificial Sequence: Synthetic oligonucleotide
  Antisense strand to SEQ ID NO: 2010394
uucugacuaagcaaguugu

SEQ ID NO: 2010396 - RNA, 19 nt, Artificial Sequence
  Description of Artificial Sequence: Synthetic oligonucleotide
  Sense strand starting at position 3150 of SEQ ID NO: 1881002
ggccuaaacagaugguaga

SEQ ID NO: 2010397 - RNA, 19 nt, Artificial Sequence
  Description of Artificial Sequence: Synthetic oligonucleotide
  Antisense strand to SEQ ID NO: 2010396
ucuaccaucuguuuaggcc

SEQ ID NO: 2010398 - RNA, 19 nt, Artificial Sequence
  Description of Artificial Sequence: Synthetic oligonucleotide
  Sense strand starting at position 3151 of SEQ ID NO: 1881002
gccuaaacagaugguagaa

SEQ ID NO: 2010399 - RNA, 19 nt, Artificial Sequence
  Description of Artificial Sequence: Synthetic oligonucleotide
  Antisense strand to SEQ ID NO: 2010398
uucuaccaucuguuuaggc

SEQ ID NO: 2010400 - RNA, 19 nt, Artificial Sequence
  Description of Artificial Sequence: Synthetic oligonucleotide
  Sense strand starting at position 3357 of SEQ ID NO: 1881002
uucucaggucucgguauuu

SEQ ID NO: 2010401 - RNA, 19 nt, Artificial Sequence
  Description of Artificial Sequence: Synthetic oligonucleotide
  Antisense strand to SEQ ID NO: 2010400
aaauaccgagaccugagaa

SEQ ID NO: 2010402 - RNA, 19 nt, Artificial Sequence
  Description of Artificial Sequence: Synthetic oligonucleotide
  Sense strand starting at position 3467 of SEQ ID NO: 1881002
caguauuuccugcgggagu

SEQ ID NO: 2010403 - RNA, 19 nt, Artificial Sequence
  Description of Artificial Sequence: Synthetic oligonucleotide
  Antisense strand to SEQ ID NO: 2010402
acucccgcaggaaauacug

SEQ ID NO: 2010404 - RNA, 19 nt, Artificial Sequence
  Description of Artificial Sequence: Synthetic oligonucleotide
  Sense strand starting at position 3550 of SEQ ID NO: 1881002
acucuugauucugugagga

SEQ ID NO: 2010405 - RNA, 19 nt, Artificial Sequence
  Description of Artificial Sequence: Synthetic oligonucleotide
  Antisense strand to SEQ ID NO: 2010404
uccucacagaaucaagagu

SEQ ID NO: 2010406 - RNA, 19 nt, Artificial Sequence
  Description of Artificial Sequence: Synthetic oligonucleotide
  Sense strand starting at position 3642 of SEQ ID NO: 1881002
aagucauccaggugggaca

SEQ ID NO: 2010407 - RNA, 19 nt, Artificial Sequence
  Description of Artificial Sequence: Synthetic oligonucleotide
  Antisense strand to SEQ ID NO: 2010406
ugucccaccuggaugacuu

SEQ ID NO: 2010408 - RNA, 19 nt, Artificial Sequence
  Description of Artificial Sequence: Synthetic oligonucleotide
  Sense strand starting at position 3672 of SEQ ID NO: 1881002
agaaccuauguaugaggua

SEQ ID NO: 2010409 - RNA, 19 nt, Artificial Sequence
  Description of Artificial Sequence: Synthetic oligonucleotide
  Antisense strand to SEQ ID NO: 2010408
uaccucauacauagguucu

SEQ ID NO: 2010410 - RNA, 19 nt, Artificial Sequence
  Description of Artificial Sequence: Synthetic oligonucleotide
  Sense strand starting at position 3677 of SEQ ID NO: 1881002
cuauguaugagguagauug

SEQ ID NO: 2010411 - RNA, 19 nt, Artificial Sequence
  Description of Artificial Sequence: Synthetic oligonucleotide
  Antisense strand to SEQ ID NO: 2010410
caaucuaccucauacauag

SEQ ID NO: 2010412 - RNA, 19 nt, Artificial Sequence
  Description of Artificial Sequence: Synthetic oligonucleotide
  Sense strand starting at position 3733 of SEQ ID NO: 1881002
aaugcuguccuccaugaga

SEQ ID NO: 2010413 - RNA, 19 nt, Artificial Sequence
  Description of Artificial Sequence: Synthetic oligonucleotide
  Antisense strand to SEQ ID NO: 2010412
ucucauggaggacagcauu

SEQ ID NO: 2010414 - RNA, 19 nt, Artificial Sequence
  Description of Artificial Sequence: Synthetic oligonucleotide
  Sense strand starting at position 3736 of SEQ ID NO: 1881002
gcuguccuccaugagaaca

SEQ ID NO: 2010415 - RNA, 19 nt, Artificial Sequence
  Description of Artificial Sequence: Synthetic oligonucleotide
  Antisense strand to SEQ ID NO: 2010414
uguucucauggaggacagc

SEQ ID NO: 2010416 - RNA, 19 nt, Artificial Sequence
  Description of Artificial Sequence: Synthetic oligonucleotide
  Sense strand starting at position 313 of SEQ ID NO: 1881003
augugauuagcccaaacuu

SEQ ID NO: 2010417 - RNA, 19 nt, Artificial Sequence
  Description of Artificial Sequence: Synthetic oligonucleotide
  Antisense strand to SEQ ID NO: 2010416
aaguuugggcuaaucacau

SEQ ID NO: 2010418 - RNA, 19 nt, Artificial Sequence
  Description of Artificial Sequence: Synthetic oligonucleotide
  Sense strand starting at position 421 of SEQ ID NO: 1881003
acauguugaaaugaucguu

SEQ ID NO: 2010419 - RNA, 19 nt, Artificial Sequence
  Description of Artificial Sequence: Synthetic oligonucleotide
  Antisense strand to SEQ ID NO: 2010418
aacgaucauuucaacaugu

SEQ ID NO: 2010420 - RNA, 19 nt, Artificial Sequence
  Description of Artificial Sequence: Synthetic oligonucleotide
  Sense strand starting at position 441 of SEQ ID NO: 1881003
uggauacauuagguuaaau

SEQ ID NO: 2010421 - RNA, 19 nt, Artificial Sequence
  Description of Artificial Sequence: Synthetic oligonucleotide
  Antisense strand to SEQ ID NO: 2010420
auuuaaccuaauguaucca

SEQ ID NO: 2010422 - RNA, 19 nt, Artificial Sequence
  Description of Artificial Sequence: Synthetic oligonucleotide
  Sense strand starting at position 765 of SEQ ID NO: 1881003
agagauguagccuauucua

SEQ ID NO: 2010423 - RNA, 19 nt, Artificial Sequence
  Description of Artificial Sequence: Synthetic oligonucleotide
  Antisense strand to SEQ ID NO: 2010422
uagaauaggcuacaucucu

SEQ ID NO: 2010424 - RNA, 19 nt, Artificial Sequence
  Description of Artificial Sequence: Synthetic oligonucleotide
  Sense strand starting at position 816 of SEQ ID NO: 1881003
guguccuuaagggaagagu

SEQ ID NO: 2010425 - RNA, 19 nt, Artificial Sequence
  Description of Artificial Sequence: Synthetic oligonucleotide
  Antisense strand to SEQ ID NO: 2010424
acucuucccuuaaggacac

SEQ ID NO: 2010426 - RNA, 19 nt, Artificial Sequence
  Description of Artificial Sequence: Synthetic oligonucleotide
  Sense strand starting at position 829 of SEQ ID NO: 1881003
aagaguacagguugaguau

SEQ ID NO: 2010427 - RNA, 19 nt, Artificial Sequence
  Description of Artificial Sequence: Synthetic oligonucleotide
  Antisense strand to SEQ ID NO: 2010426
auacucaaccuguacucuu

SEQ ID NO: 2010428 - RNA, 19 nt, Artificial Sequence
  Description of Artificial Sequence: Synthetic oligonucleotide
  Sense strand starting at position 878 of SEQ ID NO: 1881003
auuucugauuugggaucuu

SEQ ID NO: 2010429 - RNA, 19 nt, Artificial Sequence
  Description of Artificial Sequence: Synthetic oligonucleotide
  Antisense strand to SEQ ID NO: 2010428
aagaucccaaaucagaaau

SEQ ID NO: 2010430 - RNA, 19 nt, Artificial Sequence
  Description of Artificial Sequence: Synthetic oligonucleotide
  Sense strand starting at position 974 of SEQ ID NO: 1881003
auuuccuuugaguguugua

SEQ ID NO: 2010431 - RNA, 19 nt, Artificial Sequence
  Description of Artificial Sequence: Synthetic oligonucleotide
  Antisense strand to SEQ ID NO: 2010430
uacaacacucaaaggaaau

SEQ ID NO: 2010432 - RNA, 19 nt, Artificial Sequence
  Description of Artificial Sequence: Synthetic oligonucleotide
  Sense strand starting at position 1218 of SEQ ID NO: 1881003
auagacuuuggguggauga

SEQ ID NO: 2010433 - RNA, 19 nt, Artificial Sequence
  Description of Artificial Sequence: Synthetic oligonucleotide
  Antisense strand to SEQ ID NO: 2010432
ucauccacccaaagucuau

SEQ ID NO: 2010434 - RNA, 19 nt, Artificial Sequence
  Description of Artificial Sequence: Synthetic oligonucleotide
  Sense strand starting at position 1279 of SEQ ID NO: 1881003
cccagugagauaugaugau

SEQ ID NO: 2010435 - RNA, 19 nt, Artificial Sequence
  Description of Artificial Sequence: Synthetic oligonucleotide
  Antisense strand to SEQ ID NO: 2010434
aucaucauaucucacuggg

SEQ ID NO: 2010436 - RNA, 19 nt, Artificial Sequence
  Description of Artificial Sequence: Synthetic oligonucleotide
  Sense strand starting at position 1438 of SEQ ID NO: 1881003
ucuugaaugacgggauaua

SEQ ID NO: 2010437 - RNA, 19 nt, Artificial Sequence
  Description of Artificial Sequence: Synthetic oligonucleotide
  Antisense strand to SEQ ID NO: 2010436
uauaucccgucauucaaga

SEQ ID NO: 2010438 - RNA, 19 nt, Artificial Sequence
  Description of Artificial Sequence: Synthetic oligonucleotide
  Sense strand starting at position 1477 of SEQ ID NO: 1881003
gauugcuuaugggcagaaa

SEQ ID NO: 2010439 - RNA, 19 nt, Artificial Sequence
  Description of Artificial Sequence: Synthetic oligonucleotide
  Antisense strand to SEQ ID NO: 2010438
uuucugcccauaagcaauc

SEQ ID NO: 2010440 - RNA, 19 nt, Artificial Sequence
  Description of Artificial Sequence: Synthetic oligonucleotide
  Sense strand starting at position 1546 of SEQ ID NO: 1881003
uggugcucccaucacuaaa

SEQ ID NO: 2010441 - RNA, 19 nt, Artificial Sequence
  Description of Artificial Sequence: Synthetic oligonucleotide
  Antisense strand to SEQ ID NO: 2010440
uuuagugaugggagcacca

SEQ ID NO: 2010442 - RNA, 19 nt, Artificial Sequence
  Description of Artificial Sequence: Synthetic oligonucleotide
  Sense strand starting at position 1629 of SEQ ID NO: 1881003
uguaguuguagauauggga

SEQ ID NO: 2010443 - RNA, 19 nt, Artificial Sequence
  Description of Artificial Sequence: Synthetic oligonucleotide
  Antisense strand to SEQ ID NO: 2010442
ucccauaucuacaacuaca

SEQ ID NO: 2010444 - RNA, 19 nt, Artificial Sequence
  Description of Artificial Sequence: Synthetic oligonucleotide
  Sense strand starting at position 1636 of SEQ ID NO: 1881003
guagauaugggagguuuga

SEQ ID NO: 2010445 - RNA, 19 nt, Artificial Sequence
  Description of Artificial Sequence: Synthetic oligonucleotide
  Antisense strand to SEQ ID NO: 2010444
ucaaaccucccauaucuac

SEQ ID NO: 2010446 - RNA, 19 nt, Artificial Sequence
  Description of Artificial Sequence: Synthetic oligonucleotide
  Sense strand starting at position 1684 of SEQ ID NO: 1881003
ggcauuuggauauguaguc

SEQ ID NO: 2010447 - RNA, 19 nt, Artificial Sequence
  Description of Artificial Sequence: Synthetic oligonucleotide
  Antisense strand to SEQ ID NO: 2010446
gacuacauauccaaaugcc

SEQ ID NO: 2010448 - RNA, 19 nt, Artificial Sequence
  Description of Artificial Sequence: Synthetic oligonucleotide
  Sense strand starting at position 1693 of SEQ ID NO: 1881003
auauguaguccuggaaaug

SEQ ID NO: 2010449 - RNA, 19 nt, Artificial Sequence
  Description of Artificial Sequence: Synthetic oligonucleotide
  Antisense strand to SEQ ID NO: 2010448
cauuuccaggacuacauau

SEQ ID NO: 2010450 - RNA, 19 nt, Artificial Sequence
  Description of Artificial Sequence: Synthetic oligonucleotide
  Sense strand starting at position 1694 of SEQ ID NO: 1881003
uauguaguccuggaaaugu

SEQ ID NO: 2010451 - RNA, 19 nt, Artificial Sequence
  Description of Artificial Sequence: Synthetic oligonucleotide
  Antisense strand to SEQ ID NO: 2010450
acauuuccaggacuacaua

SEQ ID NO: 2010452 - RNA, 19 nt, Artificial Sequence
  Description of Artificial Sequence: Synthetic oligonucleotide
  Sense strand starting at position 1713 of SEQ ID NO: 1881003
ccuagcuuggucuauaaau

SEQ ID NO: 2010453 - RNA, 19 nt, Artificial Sequence
  Description of Artificial Sequence: Synthetic oligonucleotide
  Antisense strand to SEQ ID NO: 2010452
auuuauagaccaagcuagg

SEQ ID NO: 2010454 - RNA, 19 nt, Artificial Sequence
  Description of Artificial Sequence: Synthetic oligonucleotide
  Sense strand starting at position 1766 of SEQ ID NO: 1881003
gcauaaacuugacugaacu

SEQ ID NO: 2010455 - RNA, 19 nt, Artificial Sequence
  Description of Artificial Sequence: Synthetic oligonucleotide
  Antisense strand to SEQ ID NO: 2010454
aguucagucaaguuuaugc

SEQ ID NO: 2010456 - RNA, 19 nt, Artificial Sequence
  Description of Artificial Sequence: Synthetic oligonucleotide
  Sense strand starting at position 2200 of SEQ ID NO: 1881003
accagaaagucaucaaggu

SEQ ID NO: 2010457 - RNA, 19 nt, Artificial Sequence
  Description of Artificial Sequence: Synthetic oligonucleotide
  Antisense strand to SEQ ID NO: 2010456
accuugaugacuuucuggu

SEQ ID NO: 2010458 - RNA, 19 nt, Artificial Sequence
  Description of Artificial Sequence: Synthetic oligonucleotide
  Sense strand starting at position 2204 of SEQ ID NO: 1881003
gaaagucaucaagguaagu

SEQ ID NO: 2010459 - RNA, 19 nt, Artificial Sequence
  Description of Artificial Sequence: Synthetic oligonucleotide
  Antisense strand to SEQ ID NO: 2010458
acuuaccuugaugacuuuc

SEQ ID NO: 2010460 - RNA, 19 nt, Artificial Sequence
  Description of Artificial Sequence: Synthetic oligonucleotide
  Sense strand starting at position 2214 of SEQ ID NO: 1881003
aagguaaguguuuaaagua

SEQ ID NO: 2010461 - RNA, 19 nt, Artificial Sequence
  Description of Artificial Sequence: Synthetic oligonucleotide
  Antisense strand to SEQ ID NO: 2010460
uacuuuaaacacuuaccuu

SEQ ID NO: 2010462 - RNA, 19 nt, Artificial Sequence
  Description of Artificial Sequence: Synthetic oligonucleotide
  Sense strand starting at position 2221 of SEQ ID NO: 1881003
guguuuaaaguaggaaaca

SEQ ID NO: 2010463 - RNA, 19 nt, Artificial Sequence
  Description of Artificial Sequence: Synthetic oligonucleotide
  Antisense strand to SEQ ID NO: 2010462
uguuuccuacuuuaaacac

SEQ ID NO: 2010464 - RNA, 19 nt, Artificial Sequence
  Description of Artificial Sequence: Synthetic oligonucleotide
  Sense strand starting at position 2390 of SEQ ID NO: 1881003
ugacucugucucuagauaa

SEQ ID NO: 2010465 - RNA, 19 nt, Artificial Sequence
  Description of Artificial Sequence: Synthetic oligonucleotide
  Antisense strand to SEQ ID NO: 2010464
uuaucuagagacagaguca

SEQ ID NO: 2010466 - RNA, 19 nt, Artificial Sequence
  Description of Artificial Sequence: Synthetic oligonucleotide
  Sense strand starting at position 2744 of SEQ ID NO: 1881003
agaguugugagccauauca

SEQ ID NO: 2010467 - RNA, 19 nt, Artificial Sequence
  Description of Artificial Sequence: Synthetic oligonucleotide
  Antisense strand to SEQ ID NO: 2010466
ugauauggcucacaacucu

SEQ ID NO: 2010468 - RNA, 19 nt, Artificial Sequence
  Description of Artificial Sequence: Synthetic oligonucleotide
  Sense strand starting at position 2746 of SEQ ID NO: 1881003
aguugugagccauaucaaa

SEQ ID NO: 2010469 - RNA, 19 nt, Artificial Sequence
  Description of Artificial Sequence: Synthetic oligonucleotide
  Antisense strand to SEQ ID NO: 2010468
uuugauauggcucacaacu

SEQ ID NO: 2010470 - RNA, 19 nt, Artificial Sequence
  Description of Artificial Sequence: Synthetic oligonucleotide
  Sense strand starting at position 2821 of SEQ ID NO: 1881003
uauggaagucauugaugac

SEQ ID NO: 2010471 - RNA, 19 nt, Artificial Sequence
  Description of Artificial Sequence: Synthetic oligonucleotide
  Antisense strand to SEQ ID NO: 2010470
gucaucaaugacuuccaua

SEQ ID NO: 2010472 - RNA, 19 nt, Artificial Sequence
  Description of Artificial Sequence: Synthetic oligonucleotide
  Sense strand starting at position 3023 of SEQ ID NO: 1881003
ugaaguuugggucauagua

SEQ ID NO: 2010473 - RNA, 19 nt, Artificial Sequence
  Description of Artificial Sequence: Synthetic oligonucleotide
  Antisense strand to SEQ ID NO: 2010472
uacuaugacccaaacuuca

SEQ ID NO: 2010474 - RNA, 19 nt, Artificial Sequence
  Description of Artificial Sequence: Synthetic oligonucleotide
  Sense strand starting at position 3144 of SEQ ID NO: 1881003
aggaaagugggauguguuu

SEQ ID NO: 2010475 - RNA, 19 nt, Artificial Sequence
  Description of Artificial Sequence: Synthetic oligonucleotide
  Antisense strand to SEQ ID NO: 2010474
aaacacaucccacuuuccu

SEQ ID NO: 2010476 - RNA, 19 nt, Artificial Sequence
  Description of Artificial Sequence: Synthetic oligonucleotide
  Sense strand starting at position 3171 of SEQ ID NO: 1881003
aacuuagaauaugucgauu

SEQ ID NO: 2010477 - RNA, 19 nt, Artificial Sequence
  Description of Artificial Sequence: Synthetic oligonucleotide
  Antisense strand to SEQ ID NO: 2010476
aaucgacauauucuaaguu

SEQ ID NO: 2010478 - RNA, 19 nt, Artificial Sequence
  Description of Artificial Sequence: Synthetic oligonucleotide
  Sense strand starting at position 3174 of SEQ ID NO: 1881003
uuagaauaugucgauugua

SEQ ID NO: 2010479 - RNA, 19 nt, Artificial Sequence
  Description of Artificial Sequence: Synthetic oligonucleotide
  Antisense strand to SEQ ID NO: 2010478
uacaaucgacauauucuaa

SEQ ID NO: 2010480 - RNA, 19 nt, Artificial Sequence
  Description of Artificial Sequence: Synthetic oligonucleotide
  Sense strand starting at position 3183 of SEQ ID NO: 1881003
gucgauuguaaucaucuga

SEQ ID NO: 2010481 - RNA, 19 nt, Artificial Sequence
  Description of Artificial Sequence: Synthetic oligonucleotide
  Antisense strand to SEQ ID NO: 2010480
ucagaugauuacaaucgac

SEQ ID NO: 2010482 - RNA, 19 nt, Artificial Sequence
  Description of Artificial Sequence: Synthetic oligonucleotide
  Sense strand starting at position 3298 of SEQ ID NO: 1881003
uaauauagguagucuuuga

SEQ ID NO: 2010483 - RNA, 19 nt, Artificial Sequence
  Description of Artificial Sequence: Synthetic oligonucleotide
  Antisense strand to SEQ ID NO: 2010482
ucaaagacuaccuauauua

SEQ ID NO: 2010484 - RNA, 19 nt, Artificial Sequence
  Description of Artificial Sequence: Synthetic oligonucleotide
  Sense strand starting at position 3436 of SEQ ID NO: 1881003
caggaaaugguagguuaau

SEQ ID NO: 2010485 - RNA, 19 nt, Artificial Sequence
  Description of Artificial Sequence: Synthetic oligonucleotide
  Antisense strand to SEQ ID NO: 2010484
auuaaccuaccauuuccug

SEQ ID NO: 2010486 - RNA, 19 nt, Artificial Sequence
  Description of Artificial Sequence: Synthetic oligonucleotide
  Sense strand starting at position 3437 of SEQ ID NO: 1881003
aggaaaugguagguuaauu

SEQ ID NO: 2010487 - RNA, 19 nt, Artificial Sequence
  Description of Artificial Sequence: Synthetic oligonucleotide
  Antisense strand to SEQ ID NO: 2010486
aauuaaccuaccauuuccu

SEQ ID NO: 2010488 - RNA, 19 nt, Artificial Sequence
  Description of Artificial Sequence: Synthetic oligonucleotide
  Sense strand starting at position 3442 of SEQ ID NO: 1881003
augguagguuaauuacaaa

SEQ ID NO: 2010489 - RNA, 19 nt, Artificial Sequence
  Description of Artificial Sequence: Synthetic oligonucleotide
  Antisense strand to SEQ ID NO: 2010488
uuuguaauuaaccuaccau

SEQ ID NO: 2010490 - RNA, 19 nt, Artificial Sequence
  Description of Artificial Sequence: Synthetic oligonucleotide
  Sense strand starting at position 3497 of SEQ ID NO: 1881003
uaagaugguguuggaugaa

SEQ ID NO: 2010491 - RNA, 19 nt, Artificial Sequence
  Description of Artificial Sequence: Synthetic oligonucleotide
  Antisense strand to SEQ ID NO: 2010490
uucauccaacaccaucuua

SEQ ID NO: 2010492 - RNA, 19 nt, Artificial Sequence
  Description of Artificial Sequence: Synthetic oligonucleotide
  Sense strand starting at position 3500 of SEQ ID NO: 1881003
gaugguguuggaugaagga

SEQ ID NO: 2010493 - RNA, 19 nt, Artificial Sequence
  Description of Artificial Sequence: Synthetic oligonucleotide
  Antisense strand to SEQ ID NO: 2010492
uccuucauccaacaccauc

SEQ ID NO: 2010494 - RNA, 19 nt, Artificial Sequence
  Description of Artificial Sequence: Synthetic oligonucleotide
  Sense strand starting at position 3526 of SEQ ID NO: 1881003
uuucucuuuguggauaauu

SEQ ID NO: 2010495 - RNA, 19 nt, Artificial Sequence
  Description of Artificial Sequence: Synthetic oligonucleotide
  Antisense strand to SEQ ID NO: 2010494
aauuauccacaaagagaaa

SEQ ID NO: 2010496 - RNA, 19 nt, Artificial Sequence
  Description of Artificial Sequence: Synthetic oligonucleotide
  Sense strand starting at position 45 of SEQ ID NO: 1881004
acugucaccuuucuacaga

SEQ ID NO: 2010497 - RNA, 19 nt, Artificial Sequence
  Description of Artificial Sequence: Synthetic oligonucleotide
  Antisense strand to SEQ ID NO: 2010496
ucuguagaaaggugacagu

SEQ ID NO: 2010498 - RNA, 19 nt, Artificial Sequence
  Description of Artificial Sequence: Synthetic oligonucleotide
  Sense strand starting at position 48 of SEQ ID NO: 1881004
gucaccuuucuacagauga

SEQ ID NO: 2010499 - RNA, 19 nt, Artificial Sequence
  Description of Artificial Sequence: Synthetic oligonucleotide
  Antisense strand to SEQ ID NO: 2010498
ucaucuguagaaaggugac

SEQ ID NO: 2010500 - RNA, 19 nt, Artificial Sequence
  Description of Artificial Sequence: Synthetic oligonucleotide
  Sense strand starting at position 89 of SEQ ID NO: 1881004
acgguuacaugguuacaaa

SEQ ID NO: 2010501 - RNA, 19 nt, Artificial Sequence
  Description of Artificial Sequence: Synthetic oligonucleotide
  Antisense strand to SEQ ID NO: 2010500
uuuguaaccauguaaccgu

SEQ ID NO: 2010502 - RNA, 19 nt, Artificial Sequence
  Description of Artificial Sequence: Synthetic oligonucleotide
  Sense strand starting at position 156 of SEQ ID NO: 1881004
gcugucaaucacuaggagu

SEQ ID NO: 2010503 - RNA, 19 nt, Artificial Sequence
  Description of Artificial Sequence: Synthetic oligonucleotide
  Antisense strand to SEQ ID NO: 2010502
acuccuagugauugacagc

SEQ ID NO: 2010504 - RNA, 19 nt, Artificial Sequence
  Description of Artificial Sequence: Synthetic oligonucleotide
  Sense strand starting at position 581 of SEQ ID NO: 1881004
gcucuccaucgcuagaauc

SEQ ID NO: 2010505 - RNA, 19 nt, Artificial Sequence
  Description of Artificial Sequence: Synthetic oligonucleotide
  Antisense strand to SEQ ID NO: 2010504
gauucuagcgauggagagc

SEQ ID NO: 2010506 - RNA, 19 nt, Artificial Sequence
  Description of Artificial Sequence: Synthetic oligonucleotide
  Sense strand starting at position 589 of SEQ ID NO: 1881004
ucgcuagaauccucacaga

SEQ ID NO: 2010507 - RNA, 19 nt, Artificial Sequence
  Description of Artificial Sequence: Synthetic oligonucleotide
  Antisense strand to SEQ ID NO: 2010506
ucugugaggauucuagcga

SEQ ID NO: 2010508 - RNA, 19 nt, Artificial Sequence
  Description of Artificial Sequence: Synthetic oligonucleotide
  Sense strand starting at position 695 of SEQ ID NO: 1881004
acauuauuuguuggccuua

SEQ ID NO: 2010509 - RNA, 19 nt, Artificial Sequence
  Description of Artificial Sequence: Synthetic oligonucleotide
  Antisense strand to SEQ ID NO: 2010508
uaaggccaacaaauaaugu

SEQ ID NO: 2010510 - RNA, 19 nt, Artificial Sequence
  Description of Artificial Sequence: Synthetic oligonucleotide
  Sense strand starting at position 847 of SEQ ID NO: 1881004
ucaugucuuagcugggauu

SEQ ID NO: 2010511 - RNA, 19 nt, Artificial Sequence
  Description of Artificial Sequence: Synthetic oligonucleotide
  Antisense strand to SEQ ID NO: 2010510
aaucccagcuaagacauga

SEQ ID NO: 2010512 - RNA, 19 nt, Artificial Sequence
  Description of Artificial Sequence: Synthetic oligonucleotide
  Sense strand starting at position 848 of SEQ ID NO: 1881004
caugucuuagcugggauua

SEQ ID NO: 2010513 - RNA, 19 nt, Artificial Sequence
  Description of Artificial Sequence: Synthetic oligonucleotide
  Antisense strand to SEQ ID NO: 2010512
uaaucccagcuaagacaug

SEQ ID NO: 2010514 - RNA, 19 nt, Artificial Sequence
  Description of Artificial Sequence: Synthetic oligonucleotide
  Sense strand starting at position 1104 of SEQ ID NO: 1881004
uucugaucauuugcuuagu

SEQ ID NO: 2010515 - RNA, 19 nt, Artificial Sequence
  Description of Artificial Sequence: Synthetic oligonucleotide
  Antisense strand to SEQ ID NO: 2010514
acuaagcaaaugaucagaa

SEQ ID NO: 2010516 - RNA, 19 nt, Artificial Sequence
  Description of Artificial Sequence: Synthetic oligonucleotide
  Sense strand starting at position 1139 of SEQ ID NO: 1881004
gacuguggcaaucguagaa

SEQ ID NO: 2010517 - RNA, 19 nt, Artificial Sequence
  Description of Artificial Sequence: Synthetic oligonucleotide
  Antisense strand to SEQ ID NO: 2010516
uucuacgauugccacaguc

SEQ ID NO: 2010518 - RNA, 19 nt, Artificial Sequence
  Description of Artificial Sequence: Synthetic oligonucleotide
  Sense strand starting at position 1143 of SEQ ID NO: 1881004
guggcaaucguagaaauca

SEQ ID NO: 2010519 - RNA, 19 nt, Artificial Sequence
  Description of Artificial Sequence: Synthetic oligonucleotide
  Antisense strand to SEQ ID NO: 2010518
ugauuucuacgauugccac

SEQ ID NO: 2010520 - RNA, 19 nt, Artificial Sequence
  Description of Artificial Sequence: Synthetic oligonucleotide
  Sense strand starting at position 1308 of SEQ ID NO: 1881004
ggaauccacuagucaggua

SEQ ID NO: 2010521 - RNA, 19 nt, Artificial Sequence
  Description of Artificial Sequence: Synthetic oligonucleotide
  Antisense strand to SEQ ID NO: 2010520
uaccugacuaguggauucc

SEQ ID NO: 2010522 - RNA, 19 nt, Artificial Sequence
  Description of Artificial Sequence: Synthetic oligonucleotide
  Sense strand starting at position 1462 of SEQ ID NO: 1881004
uagugucagggcuggauuu

SEQ ID NO: 2010523 - RNA, 19 nt, Artificial Sequence
  Description of Artificial Sequence: Synthetic oligonucleotide
  Antisense strand to SEQ ID NO: 2010522
aaauccagcccugacacua

SEQ ID NO: 2010524 - RNA, 19 nt, Artificial Sequence
  Description of Artificial Sequence: Synthetic oligonucleotide
  Sense strand starting at position 2686 of SEQ ID NO: 1881004
cguugugagcaguucgacu

SEQ ID NO: 2010525 - RNA, 19 nt, Artificial Sequence
  Description of Artificial Sequence: Synthetic oligonucleotide
  Antisense strand to SEQ ID NO: 2010524
agucgaacugcucacaacg

SEQ ID NO: 2010526 - RNA, 19 nt, Artificial Sequence
  Description of Artificial Sequence: Synthetic oligonucleotide
  Sense strand starting at position 3025 of SEQ ID NO: 1881004
aacguuucccgugucugua

SEQ ID NO: 2010527 - RNA, 19 nt, Artificial Sequence
  Description of Artificial Sequence: Synthetic oligonucleotide
  Antisense strand to SEQ ID NO: 2010526
uacagacacgggaaacguu

SEQ ID NO: 2010528 - RNA, 19 nt, Artificial Sequence
  Description of Artificial Sequence: Synthetic oligonucleotide
  Sense strand starting at position 3037 of SEQ ID NO: 1881004
gucuguaccuucucucaau

SEQ ID NO: 2010529 - RNA, 19 nt, Artificial Sequence
  Description of Artificial Sequence: Synthetic oligonucleotide
  Antisense strand to SEQ ID NO: 2010528
auugagagaagguacagac

SEQ ID NO: 2010530 - RNA, 19 nt, Artificial Sequence
  Description of Artificial Sequence: Synthetic oligonucleotide
  Sense strand starting at position 3180 of SEQ ID NO: 1881004
gauagaaggguucguuuac

SEQ ID NO: 2010531 - RNA, 19 nt, Artificial Sequence
  Description of Artificial Sequence: Synthetic oligonucleotide
  Antisense strand to SEQ ID NO: 2010530
guaaacgaacccuucuauc

SEQ ID NO: 2010532 - RNA, 19 nt, Artificial Sequence
  Description of Artificial Sequence: Synthetic oligonucleotide
  Sense strand starting at position 3181 of SEQ ID NO: 1881004
auagaaggguucguuuacu

SEQ ID NO: 2010533 - RNA, 19 nt, Artificial Sequence
  Description of Artificial Sequence: Synthetic oligonucleotide
  Antisense strand to SEQ ID NO: 2010532
aguaaacgaacccuucuau

SEQ ID NO: 2010534 - RNA, 19 nt, Artificial Sequence
  Description of Artificial Sequence: Synthetic oligonucleotide
  Sense strand starting at position 3201 of SEQ ID NO: 1881004
uuuaaucaucccuacggga

SEQ ID NO: 2010535 - RNA, 19 nt, Artificial Sequence
  Description of Artificial Sequence: Synthetic oligonucleotide
  Antisense strand to SEQ ID NO: 2010534
ucccguagggaugauuaaa

SEQ ID NO: 2010536 - RNA, 19 nt, Artificial Sequence
  Description of Artificial Sequence: Synthetic oligonucleotide
  Sense strand starting at position 3238 of SEQ ID NO: 1881004
ugaauuccugcaugauaac

SEQ ID NO: 2010537 - RNA, 19 nt, Artificial Sequence
  Description of Artificial Sequence: Synthetic oligonucleotide
  Antisense strand to SEQ ID NO: 2010536
guuaucaugcaggaauuca

SEQ ID NO: 2010538 - RNA, 19 nt, Artificial Sequence
  Description of Artificial Sequence: Synthetic oligonucleotide
  Sense strand starting at position 3314 of SEQ ID NO: 1881004
ugaaguaacugcguuuaug

SEQ ID NO: 2010539 - RNA, 19 nt, Artificial Sequence
  Description of Artificial Sequence: Synthetic oligonucleotide
  Antisense strand to SEQ ID NO: 2010538
cauaaacgcaguuacuuca

SEQ ID NO: 2010540 - RNA, 19 nt, Artificial Sequence
  Description of Artificial Sequence: Synthetic oligonucleotide
  Sense strand starting at position 3325 of SEQ ID NO: 1881004
cguuuauguggaagcguuu

SEQ ID NO: 2010541 - RNA, 19 nt, Artificial Sequence
  Description of Artificial Sequence: Synthetic oligonucleotide
  Antisense strand to SEQ ID NO: 2010540
aaacgcuuccacauaaacg

SEQ ID NO: 2010542 - RNA, 19 nt, Artificial Sequence
  Description of Artificial Sequence: Synthetic oligonucleotide
  Sense strand starting at position 3331 of SEQ ID NO: 1881004
uguggaagcguuuagguua

SEQ ID NO: 2010543 - RNA, 19 nt, Artificial Sequence
  Description of Artificial Sequence: Synthetic oligonucleotide
  Antisense strand to SEQ ID NO: 2010542
uaaccuaaacgcuuccaca

SEQ ID NO: 2010544 - RNA, 19 nt, Artificial Sequence
  Description of Artificial Sequence: Synthetic oligonucleotide
  Sense strand starting at position 3334 of SEQ ID NO: 1881004
ggaagcguuuagguuauau

SEQ ID NO: 2010545 - RNA, 19 nt, Artificial Sequence
  Description of Artificial Sequence: Synthetic oligonucleotide
  Antisense strand to SEQ ID NO: 2010544
auauaaccuaaacgcuucc

SEQ ID NO: 2010546 - RNA, 19 nt, Artificial Sequence
  Description of Artificial Sequence: Synthetic oligonucleotide
  Sense strand starting at position 3336 of SEQ ID NO: 1881004
aagcguuuagguuauauca

SEQ ID NO: 2010547 - RNA, 19 nt, Artificial Sequence
  Description of Artificial Sequence: Synthetic oligonucleotide
  Antisense strand to SEQ ID NO: 2010546
ugauauaaccuaaacgcuu

SEQ ID NO: 2010548 - RNA, 19 nt, Artificial Sequence
  Description of Artificial Sequence: Synthetic oligonucleotide
  Sense strand starting at position 3377 of SEQ ID NO: 1881004
cucggauauuuacaucuaa

SEQ ID NO: 2010549 - RNA, 19 nt, Artificial Sequence
  Description of Artificial Sequence: Synthetic oligonucleotide
  Antisense strand to SEQ ID NO: 2010548
uuagauguaaauauccgag

SEQ ID NO: 2010550 - RNA, 19 nt, Artificial Sequence
  Description of Artificial Sequence: Synthetic oligonucleotide
  Sense strand starting at position 3423 of SEQ ID NO: 1881004
cuagaaaucucugucgccu

SEQ ID NO: 2010551 - RNA, 19 nt, Artificial Sequence
  Description of Artificial Sequence: Synthetic oligonucleotide
  Antisense strand to SEQ ID NO: 2010550
aggcgacagagauuucuag

SEQ ID NO: 2010552 - RNA, 19 nt, Artificial Sequence
  Description of Artificial Sequence: Synthetic oligonucleotide
  Sense strand starting at position 3471 of SEQ ID NO: 1881004
auuccuuuagcauggaaac

SEQ ID NO: 2010553 - RNA, 19 nt, Artificial Sequence
  Description of Artificial Sequence: Synthetic oligonucleotide
  Antisense strand to SEQ ID NO: 2010552
guuuccaugcuaaaggaau

SEQ ID NO: 2010554 - RNA, 19 nt, Artificial Sequence
  Description of Artificial Sequence: Synthetic oligonucleotide
  Sense strand starting at position 3506 of SEQ ID NO: 1881004
acaguagccuuugcuuaau

SEQ ID NO: 2010555 - RNA, 19 nt, Artificial Sequence
  Description of Artificial Sequence: Synthetic oligonucleotide
  Antisense strand to SEQ ID NO: 2010554
auuaagcaaaggcuacugu

SEQ ID NO: 2010556 - RNA, 19 nt, Artificial Sequence
  Description of Artificial Sequence: Synthetic oligonucleotide
  Sense strand starting at position 3508 of SEQ ID NO: 1881004
aguagccuuugcuuaauuu

SEQ ID NO: 2010557 - RNA, 19 nt, Artificial Sequence
  Description of Artificial Sequence: Synthetic oligonucleotide
  Antisense strand to SEQ ID NO: 2010556
aaauuaagcaaaggcuacu

SEQ ID NO: 2010558 - RNA, 19 nt, Artificial Sequence
  Description of Artificial Sequence: Synthetic oligonucleotide
  Sense strand starting at position 3509 of SEQ ID NO: 1881004
guagccuuugcuuaauuua

SEQ ID NO: 2010559 - RNA, 19 nt, Artificial Sequence
  Description of Artificial Sequence: Synthetic oligonucleotide
  Antisense strand to SEQ ID NO: 2010558
uaaauuaagcaaaggcuac

SEQ ID NO: 2010560 - RNA, 19 nt, Artificial Sequence
  Description of Artificial Sequence: Synthetic oligonucleotide
  Sense strand starting at position 3516 of SEQ ID NO: 1881004
uugcuuaauuuagucaugu

SEQ ID NO: 2010561 - RNA, 19 nt, Artificial Sequence
  Description of Artificial Sequence: Synthetic oligonucleotide
  Antisense strand to SEQ ID NO: 2010560
acaugacuaaauuaagcaa

SEQ ID NO: 2010562 - RNA, 19 nt, Artificial Sequence
  Description of Artificial Sequence: Synthetic oligonucleotide
  Sense strand starting at position 3517 of SEQ ID NO: 1881004
ugcuuaauuuagucauguc

SEQ ID NO: 2010563 - RNA, 19 nt, Artificial Sequence
  Description of Artificial Sequence: Synthetic oligonucleotide
  Antisense strand to SEQ ID NO: 2010562
gacaugacuaaauuaagca

SEQ ID NO: 2010564 - RNA, 19 nt, Artificial Sequence
  Description of Artificial Sequence: Synthetic oligonucleotide
  Sense strand starting at position 3538 of SEQ ID NO: 1881004
aaugucauguggcuuccaa

SEQ ID NO: 2010565 - RNA, 19 nt, Artificial Sequence
  Description of Artificial Sequence: Synthetic oligonucleotide
  Antisense strand to SEQ ID NO: 2010564
uuggaagccacaugacauu

SEQ ID NO: 2010566 - RNA, 19 nt, Artificial Sequence
  Description of Artificial Sequence: Synthetic oligonucleotide
  Sense strand starting at position 3734 of SEQ ID NO: 1881004
augugaacguuuccuguau

SEQ ID NO: 2010567 - RNA, 19 nt, Artificial Sequence
  Description of Artificial Sequence: Synthetic oligonucleotide
  Antisense strand to SEQ ID NO: 2010566
auacaggaaacguucacau

SEQ ID NO: 2010568 - RNA, 19 nt, Artificial Sequence
  Description of Artificial Sequence: Synthetic oligonucleotide
  Sense strand starting at position 3735 of SEQ ID NO: 1881004
ugugaacguuuccuguaua

SEQ ID NO: 2010569 - RNA, 19 nt, Artificial Sequence
  Description of Artificial Sequence: Synthetic oligonucleotide
  Antisense strand to SEQ ID NO: 2010568
uauacaggaaacguucaca

SEQ ID NO: 2010570 - RNA, 19 nt, Artificial Sequence
  Description of Artificial Sequence: Synthetic oligonucleotide
  Sense strand starting at position 3738 of SEQ ID NO: 1881004
gaacguuuccuguauaugu

SEQ ID NO: 2010571 - RNA, 19 nt, Artificial Sequence
  Description of Artificial Sequence: Synthetic oligonucleotide
  Antisense strand to SEQ ID NO: 2010570
acauauacaggaaacguuc

SEQ ID NO: 2010572 - RNA, 19 nt, Artificial Sequence
  Description of Artificial Sequence: Synthetic oligonucleotide
  Sense strand starting at position 3749 of SEQ ID NO: 1881004
guauauguagcauggauaa

SEQ ID NO: 2010573 - RNA, 19 nt, Artificial Sequence
  Description of Artificial Sequence: Synthetic oligonucleotide
  Antisense strand to SEQ ID NO: 2010572
uuauccaugcuacauauac

SEQ ID NO: 2010574 - RNA, 19 nt, Artificial Sequence
  Description of Artificial Sequence: Synthetic oligonucleotide
  Sense strand starting at position 3949 of SEQ ID NO: 1881004
auaacaauauaggaagagu

SEQ ID NO: 2010575 - RNA, 19 nt, Artificial Sequence
  Description of Artificial Sequence: Synthetic oligonucleotide
  Antisense strand to SEQ ID NO: 2010574
acucuuccuauauuguuau

SEQ ID NO: 2010576 - RNA, 19 nt, Artificial Sequence
  Description of Artificial Sequence: Synthetic oligonucleotide
  Sense strand starting at position 7 of SEQ ID NO: 1881005
gccgaaauccuggcguuuc

SEQ ID NO: 2010577 - RNA, 19 nt, Artificial Sequence
  Description of Artificial Sequence: Synthetic oligonucleotide
  Antisense strand to SEQ ID NO: 2010576
gaaacgccaggauuucggc

SEQ ID NO: 2010578 - RNA, 19 nt, Artificial Sequence
  Description of Artificial Sequence: Synthetic oligonucleotide
  Sense strand starting at position 93 of SEQ ID NO: 1881005
ugaggcauuuaacaucaga

SEQ ID NO: 2010579 - RNA, 19 nt, Artificial Sequence
  Description of Artificial Sequence: Synthetic oligonucleotide
  Antisense strand to SEQ ID NO: 2010578
ucugauguuaaaugccuca

SEQ ID NO: 2010580 - RNA, 19 nt, Artificial Sequence
  Description of Artificial Sequence: Synthetic oligonucleotide
  Sense strand starting at position 292 of SEQ ID NO: 1881005
aagucuacucuauggauga

SEQ ID NO: 2010581 - RNA, 19 nt, Artificial Sequence
  Description of Artificial Sequence: Synthetic oligonucleotide
  Antisense strand to SEQ ID NO: 2010580
ucauccauagaguagacuu

SEQ ID NO: 2010582 - RNA, 19 nt, Artificial Sequence
  Description of Artificial Sequence: Synthetic oligonucleotide
  Sense strand starting at position 371 of SEQ ID NO: 1881005
cguaauaagcuauaugaaa

SEQ ID NO: 2010583 - RNA, 19 nt, Artificial Sequence
  Description of Artificial Sequence: Synthetic oligonucleotide
  Antisense strand to SEQ ID NO: 2010582
uuucauauagcuuauuacg

SEQ ID NO: 2010584 - RNA, 19 nt, Artificial Sequence
  Description of Artificial Sequence: Synthetic oligonucleotide
  Sense strand starting at position 442 of SEQ ID NO: 1881005
aauugcuaugacgaagacu

SEQ ID NO: 2010585 - RNA, 19 nt, Artificial Sequence
  Description of Artificial Sequence: Synthetic oligonucleotide
  Antisense strand to SEQ ID NO: 2010584
agucuucgucauagcaauu

SEQ ID NO: 2010586 - RNA, 19 nt, Artificial Sequence
  Description of Artificial Sequence: Synthetic oligonucleotide
  Sense strand starting at position 450 of SEQ ID NO: 1881005
ugacgaagacugggaaagu

SEQ ID NO: 2010587 - RNA, 19 nt, Artificial Sequence
  Description of Artificial Sequence: Synthetic oligonucleotide
  Antisense strand to SEQ ID NO: 2010586
acuuucccagucuucguca

SEQ ID NO: 2010588 - RNA, 19 nt, Artificial Sequence
  Description of Artificial Sequence: Synthetic oligonucleotide
  Sense strand starting at position 459 of SEQ ID NO: 1881005
cugggaaagugguuaaaug

SEQ ID NO: 2010589 - RNA, 19 nt, Artificial Sequence
  Description of Artificial Sequence: Synthetic oligonucleotide
  Antisense strand to SEQ ID NO: 2010588
cauuuaaccacuuucccag

SEQ ID NO: 2010590 - RNA, 19 nt, Artificial Sequence
  Description of Artificial Sequence: Synthetic oligonucleotide
  Sense strand starting at position 571 of SEQ ID NO: 1881005
aggaaucaguaaucuagua

SEQ ID NO: 2010591 - RNA, 19 nt, Artificial Sequence
  Description of Artificial Sequence: Synthetic oligonucleotide
  Antisense strand to SEQ ID NO: 2010590
uacuagauuacugauuccu

SEQ ID NO: 2010592 - RNA, 19 nt, Artificial Sequence
  Description of Artificial Sequence: Synthetic oligonucleotide
  Sense strand starting at position 686 of SEQ ID NO: 1881005
auacauauuuaggauguga

SEQ ID NO: 2010593 - RNA, 19 nt, Artificial Sequence
  Description of Artificial Sequence: Synthetic oligonucleotide
  Antisense strand to SEQ ID NO: 2010592
ucacauccuaaauauguau

SEQ ID NO: 2010594 - RNA, 19 nt, Artificial Sequence
  Description of Artificial Sequence: Synthetic oligonucleotide
  Sense strand starting at position 704 of SEQ ID NO: 1881005
agagcaaucuagcuuaaac

SEQ ID NO: 2010595 - RNA, 19 nt, Artificial Sequence
  Description of Artificial Sequence: Synthetic oligonucleotide
  Antisense strand to SEQ ID NO: 2010594
guuuaagcuagauugcucu

SEQ ID NO: 2010596 - RNA, 19 nt, Artificial Sequence
  Description of Artificial Sequence: Synthetic oligonucleotide
  Sense strand starting at position 742 of SEQ ID NO: 1881005
gccaguguugaccagauga

SEQ ID NO: 2010597 - RNA, 19 nt, Artificial Sequence
  Description of Artificial Sequence: Synthetic oligonucleotide
  Antisense strand to SEQ ID NO: 2010596
ucaucuggucaacacuggc

SEQ ID NO: 2010598 - RNA, 19 nt, Artificial Sequence
  Description of Artificial Sequence: Synthetic oligonucleotide
  Sense strand starting at position 865 of SEQ ID NO: 1881005
uggguaguagggugacaaa

SEQ ID NO: 2010599 - RNA, 19 nt, Artificial Sequence
  Description of Artificial Sequence: Synthetic oligonucleotide
  Antisense strand to SEQ ID NO: 2010598
uuugucacccuacuaccca

SEQ ID NO: 2010600 - RNA, 19 nt, Artificial Sequence
  Description of Artificial Sequence: Synthetic oligonucleotide
  Sense strand starting at position 875 of SEQ ID NO: 1881005
ggugacaaaucauuccagu

SEQ ID NO: 2010601 - RNA, 19 nt, Artificial Sequence
  Description of Artificial Sequence: Synthetic oligonucleotide
  Antisense strand to SEQ ID NO: 2010600
acuggaaugauuugucacc

SEQ ID NO: 2010602 - RNA, 19 nt, Artificial Sequence
  Description of Artificial Sequence: Synthetic oligonucleotide
  Sense strand starting at position 951 of SEQ ID NO: 1881005
ggcaaauugguguauaaag

SEQ ID NO: 2010603 - RNA, 19 nt, Artificial Sequence
  Description of Artificial Sequence: Synthetic oligonucleotide
  Antisense strand to SEQ ID NO: 2010602
cuuuauacaccaauuugcc

SEQ ID NO: 2010604 - RNA, 19 nt, Artificial Sequence
  Description of Artificial Sequence: Synthetic oligonucleotide
  Sense strand starting at position 1044 of SEQ ID NO: 1881005
uaaugaugaugucuugaua

SEQ ID NO: 2010605 - RNA, 19 nt, Artificial Sequence
  Description of Artificial Sequence: Synthetic oligonucleotide
  Antisense strand to SEQ ID NO: 2010604
uaucaagacaucaucauua

SEQ ID NO: 2010606 - RNA, 19 nt, Artificial Sequence
  Description of Artificial Sequence: Synthetic oligonucleotide
  Sense strand starting at position 1047 of SEQ ID NO: 1881005
ugaugaugucuugauauuc

SEQ ID NO: 2010607 - RNA, 19 nt, Artificial Sequence
  Description of Artificial Sequence: Synthetic oligonucleotide
  Antisense strand to SEQ ID NO: 2010606
gaauaucaagacaucauca

SEQ ID NO: 2010608 - RNA, 19 nt, Artificial Sequence
  Description of Artificial Sequence: Synthetic oligonucleotide
  Sense strand starting at position 1180 of SEQ ID NO: 1881005
gaaguuggugcuuagacua

SEQ ID NO: 2010609 - RNA, 19 nt, Artificial Sequence
  Description of Artificial Sequence: Synthetic oligonucleotide
  Antisense strand to SEQ ID NO: 2010608
uagucuaagcaccaacuuc

SEQ ID NO: 2010610 - RNA, 19 nt, Artificial Sequence
  Description of Artificial Sequence: Synthetic oligonucleotide
  Sense strand starting at position 1388 of SEQ ID NO: 1881005
augucaaacagaggugauu

SEQ ID NO: 2010611 - RNA, 19 nt, Artificial Sequence
  Description of Artificial Sequence: Synthetic oligonucleotide
  Antisense strand to SEQ ID NO: 2010610
aaucaccucuguuugacau

SEQ ID NO: 2010612 - RNA, 19 nt, Artificial Sequence
  Description of Artificial Sequence: Synthetic oligonucleotide
  Sense strand starting at position 1455 of SEQ ID NO: 1881005
augugcuaccauuaaagau

SEQ ID NO: 2010613 - RNA, 19 nt, Artificial Sequence
  Description of Artificial Sequence: Synthetic oligonucleotide
  Antisense strand to SEQ ID NO: 2010612
aucuuuaaugguagcacau

SEQ ID NO: 2010614 - RNA, 19 nt, Artificial Sequence
  Description of Artificial Sequence: Synthetic oligonucleotide
  Sense strand starting at position 1635 of SEQ ID NO: 1881005
auaugauccagauguaggu

SEQ ID NO: 2010615 - RNA, 19 nt, Artificial Sequence
  Description of Artificial Sequence: Synthetic oligonucleotide
  Antisense strand to SEQ ID NO: 2010614
accuacaucuggaucauau

SEQ ID NO: 2010616 - RNA, 19 nt, Artificial Sequence
  Description of Artificial Sequence: Synthetic oligonucleotide
  Sense strand starting at position 1641 of SEQ ID NO: 1881005
uccagauguaggugaagga

SEQ ID NO: 2010617 - RNA, 19 nt, Artificial Sequence
  Description of Artificial Sequence: Synthetic oligonucleotide
  Antisense strand to SEQ ID NO: 2010616
uccuucaccuacaucugga

SEQ ID NO: 2010618 - RNA, 19 nt, Artificial Sequence
  Description of Artificial Sequence: Synthetic oligonucleotide
  Sense strand starting at position 1874 of SEQ ID NO: 1881005
gcaaauaucuaccuggauc

SEQ ID NO: 2010619 - RNA, 19 nt, Artificial Sequence
  Description of Artificial Sequence: Synthetic oligonucleotide
  Antisense strand to SEQ ID NO: 2010618
gauccagguagauauuugc

SEQ ID NO: 2010620 - RNA, 19 nt, Artificial Sequence
  Description of Artificial Sequence: Synthetic oligonucleotide
  Sense strand starting at position 2033 of SEQ ID NO: 1881005
aagugagguuaagcauuaa

SEQ ID NO: 2010621 - RNA, 19 nt, Artificial Sequence
  Description of Artificial Sequence: Synthetic oligonucleotide
  Antisense strand to SEQ ID NO: 2010620
uuaaugcuuaaccucacuu

SEQ ID NO: 2010622 - RNA, 19 nt, Artificial Sequence
  Description of Artificial Sequence: Synthetic oligonucleotide
  Sense strand starting at position 2037 of SEQ ID NO: 1881005
gagguuaagcauuaauccu

SEQ ID NO: 2010623 - RNA, 19 nt, Artificial Sequence
  Description of Artificial Sequence: Synthetic oligonucleotide
  Antisense strand to SEQ ID NO: 2010622
aggauuaaugcuuaaccuc

SEQ ID NO: 2010624 - RNA, 19 nt, Artificial Sequence
  Description of Artificial Sequence: Synthetic oligonucleotide
  Sense strand starting at position 2144 of SEQ ID NO: 1881005
uaauuacacguuugaagac

SEQ ID NO: 2010625 - RNA, 19 nt, Artificial Sequence
  Description of Artificial Sequence: Synthetic oligonucleotide
  Antisense strand to SEQ ID NO: 2010624
gucuucaaacguguaauua

SEQ ID NO: 2010626 - RNA, 19 nt, Artificial Sequence
  Description of Artificial Sequence: Synthetic oligonucleotide
  Sense strand starting at position 2230 of SEQ ID NO: 1881005
cugccuuagcaugaauaca

SEQ ID NO: 2010627 - RNA, 19 nt, Artificial Sequence
  Description of Artificial Sequence: Synthetic oligonucleotide
  Antisense strand to SEQ ID NO: 2010626
uguauucaugcuaaggcag

SEQ ID NO: 2010628 - RNA, 19 nt, Artificial Sequence
  Description of Artificial Sequence: Synthetic oligonucleotide
  Sense strand starting at position 2502 of SEQ ID NO: 1881005
ccaauaaauggucauguca

SEQ ID NO: 2010629 - RNA, 19 nt, Artificial Sequence
  Description of Artificial Sequence: Synthetic oligonucleotide
  Antisense strand to SEQ ID NO: 2010628
ugacaugaccauuuauugg

SEQ ID NO: 2010630 - RNA, 19 nt, Artificial Sequence
  Description of Artificial Sequence: Synthetic oligonucleotide
  Sense strand starting at position 2509 of SEQ ID NO: 1881005
auggucaugucauugaaau

SEQ ID NO: 2010631 - RNA, 19 nt, Artificial Sequence
  Description of Artificial Sequence: Synthetic oligonucleotide
  Antisense strand to SEQ ID NO: 2010630
auuucaaugacaugaccau

SEQ ID NO: 2010632 - RNA, 19 nt, Artificial Sequence
  Description of Artificial Sequence: Synthetic oligonucleotide
  Sense strand starting at position 2627 of SEQ ID NO: 1881005
aguguugugagagaaauuc

SEQ ID NO: 2010633 - RNA, 19 nt, Artificial Sequence
  Description of Artificial Sequence: Synthetic oligonucleotide
  Antisense strand to SEQ ID NO: 2010632
gaauuucucucacaacacu

SEQ ID NO: 2010634 - RNA, 19 nt, Artificial Sequence
  Description of Artificial Sequence: Synthetic oligonucleotide
  Sense strand starting at position 2858 of SEQ ID NO: 1881005
ucuucuuaggcucgauuua

SEQ ID NO: 2010635 - RNA, 19 nt, Artificial Sequence
  Description of Artificial Sequence: Synthetic oligonucleotide
  Antisense strand to SEQ ID NO: 2010634
uaaaucgagccuaagaaga

SEQ ID NO: 2010636 - RNA, 19 nt, Artificial Sequence
  Description of Artificial Sequence: Synthetic oligonucleotide
  Sense strand starting at position 2865 of SEQ ID NO: 1881005
aggcucgauuuaguguuua

SEQ ID NO: 2010637 - RNA, 19 nt, Artificial Sequence
  Description of Artificial Sequence: Synthetic oligonucleotide
  Antisense strand to SEQ ID NO: 2010636
uaaacacuaaaucgagccu

SEQ ID NO: 2010638 - RNA, 19 nt, Artificial Sequence
  Description of Artificial Sequence: Synthetic oligonucleotide
  Sense strand starting at position 3014 of SEQ ID NO: 1881005
ucaacuuaaugcuuaggga

SEQ ID NO: 2010639 - RNA, 19 nt, Artificial Sequence
  Description of Artificial Sequence: Synthetic oligonucleotide
  Antisense strand to SEQ ID NO: 2010638
ucccuaagcauuaaguuga

SEQ ID NO: 2010640 - RNA, 19 nt, Artificial Sequence
  Description of Artificial Sequence: Synthetic oligonucleotide
  Sense strand starting at position 3435 of SEQ ID NO: 1881005
uucuguaauguuuagaaac

SEQ ID NO: 2010641 - RNA, 19 nt, Artificial Sequence
  Description of Artificial Sequence: Synthetic oligonucleotide
  Antisense strand to SEQ ID NO: 2010640
guuucuaaacauuacagaa

SEQ ID NO: 2010642 - RNA, 19 nt, Artificial Sequence
  Description of Artificial Sequence: Synthetic oligonucleotide
  Sense strand starting at position 3445 of SEQ ID NO: 1881005
uuuagaaacguugaagcau

SEQ ID NO: 2010643 - RNA, 19 nt, Artificial Sequence
  Description of Artificial Sequence: Synthetic oligonucleotide
  Antisense strand to SEQ ID NO: 2010642
augcuucaacguuucuaaa

SEQ ID NO: 2010644 - RNA, 19 nt, Artificial Sequence
  Description of Artificial Sequence: Synthetic oligonucleotide
  Sense strand starting at position 3491 of SEQ ID NO: 1881005
gccuucuuugaagagccaa

SEQ ID NO: 2010645 - RNA, 19 nt, Artificial Sequence
  Description of Artificial Sequence: Synthetic oligonucleotide
  Antisense strand to SEQ ID NO: 2010644
uuggcucuucaaagaaggc

SEQ ID NO: 2010646 - RNA, 19 nt, Artificial Sequence
  Description of Artificial Sequence: Synthetic oligonucleotide
  Sense strand starting at position 3714 of SEQ ID NO: 1881005
aguauuucuuggcuacacu

SEQ ID NO: 2010647 - RNA, 19 nt, Artificial Sequence
  Description of Artificial Sequence: Synthetic oligonucleotide
  Antisense strand to SEQ ID NO: 2010646
aguguagccaagaaauacu

SEQ ID NO: 2010648 - RNA, 19 nt, Artificial Sequence
  Description of Artificial Sequence: Synthetic oligonucleotide
  Sense strand starting at position 3773 of SEQ ID NO: 1881005
ugggaaacauuauacauuu

SEQ ID NO: 2010649 - RNA, 19 nt, Artificial Sequence
  Description of Artificial Sequence: Synthetic oligonucleotide
  Antisense strand to SEQ ID NO: 2010648
aaauguauaauguuuccca

SEQ ID NO: 2010650 - RNA, 19 nt, Artificial Sequence
  Description of Artificial Sequence: Synthetic oligonucleotide
  Sense strand starting at position 3868 of SEQ ID NO: 1881005
ucuggauaucuauauggcu

SEQ ID NO: 2010651 - RNA, 19 nt, Artificial Sequence
  Description of Artificial Sequence: Synthetic oligonucleotide
  Antisense strand to SEQ ID NO: 2010650
agccauauagauauccaga

SEQ ID NO: 2010652 - RNA, 19 nt, Artificial Sequence
  Description of Artificial Sequence: Synthetic oligonucleotide
  Sense strand starting at position 3922 of SEQ ID NO: 1881005
ucaucuauugaaugaagua

SEQ ID NO: 2010653 - RNA, 19 nt, Artificial Sequence
  Description of Artificial Sequence: Synthetic oligonucleotide
  Antisense strand to SEQ ID NO: 2010652
uacuucauucaauagauga

SEQ ID NO: 2010654 - RNA, 19 nt, Artificial Sequence
  Description of Artificial Sequence: Synthetic oligonucleotide
  Sense strand starting at position 3934 of SEQ ID NO: 1881005
ugaaguauacccugaccac

SEQ ID NO: 2010655 - RNA, 19 nt, Artificial Sequence
  Description of Artificial Sequence: Synthetic oligonucleotide
  Antisense strand to SEQ ID NO: 2010654
guggucaggguauacuuca

SEQ ID NO: 2010656 - RNA, 19 nt, Artificial Sequence
  Description of Artificial Sequence: Synthetic oligonucleotide
  Sense strand starting at position 50 of SEQ ID NO: 1881006
uuaguagaggccugagaag

SEQ ID NO: 2010657 - RNA, 19 nt, Artificial Sequence
  Description of Artificial Sequence: Synthetic oligonucleotide
  Antisense strand to SEQ ID NO: 2010656
cuucucaggccucuacuaa

SEQ ID NO: 2010658 - RNA, 19 nt, Artificial Sequence
  Description of Artificial Sequence: Synthetic oligonucleotide
  Sense strand starting at position 149 of SEQ ID NO: 1881006
cugugaguucucgggccaa

SEQ ID NO: 2010659 - RNA, 19 nt, Artificial Sequence
  Description of Artificial Sequence: Synthetic oligonucleotide
  Antisense strand to SEQ ID NO: 2010658
uuggcccgagaacucacag

SEQ ID NO: 2010660 - RNA, 19 nt, Artificial Sequence
  Description of Artificial Sequence: Synthetic oligonucleotide
  Sense strand starting at position 202 of SEQ ID NO: 1881006
cuucuccaguccucagaga

SEQ ID NO: 2010661 - RNA, 19 nt, Artificial Sequence
  Description of Artificial Sequence: Synthetic oligonucleotide
  Antisense strand to SEQ ID NO: 2010660
ucucugaggacuggagaag

SEQ ID NO: 2010662 - RNA, 19 nt, Artificial Sequence
  Description of Artificial Sequence: Synthetic oligonucleotide
  Sense strand starting at position 203 of SEQ ID NO: 1881006
uucuccaguccucagagaa

SEQ ID NO: 2010663 - RNA, 19 nt, Artificial Sequence
  Description of Artificial Sequence: Synthetic oligonucleotide
  Antisense strand to SEQ ID NO: 2010662
uucucugaggacuggagaa

SEQ ID NO: 2010664 - RNA, 19 nt, Artificial Sequence
  Description of Artificial Sequence: Synthetic oligonucleotide
  Sense strand starting at position 216 of SEQ ID NO: 1881006
agagaaaucuuguucccaa

SEQ ID NO: 2010665 - RNA, 19 nt, Artificial Sequence
  Description of Artificial Sequence: Synthetic oligonucleotide
  Antisense strand to SEQ ID NO: 2010664
uugggaacaagauuucucu

SEQ ID NO: 2010666 - RNA, 19 nt, Artificial Sequence
  Description of Artificial Sequence: Synthetic oligonucleotide
  Sense strand starting at position 217 of SEQ ID NO: 1881006
gagaaaucuuguucccaag

SEQ ID NO: 2010667 - RNA, 19 nt, Artificial Sequence
  Description of Artificial Sequence: Synthetic oligonucleotide
  Antisense strand to SEQ ID NO: 2010666
cuugggaacaagauuucuc

SEQ ID NO: 2010668 - RNA, 19 nt, Artificial Sequence
  Description of Artificial Sequence: Synthetic oligonucleotide
  Sense strand starting at position 243 of SEQ ID NO: 1881006
agugacagcuucuuaaugu

SEQ ID NO: 2010669 - RNA, 19 nt, Artificial Sequence
  Description of Artificial Sequence: Synthetic oligonucleotide
  Antisense strand to SEQ ID NO: 2010668
acauuaagaagcugucacu

SEQ ID NO: 2010670 - RNA, 19 nt, Artificial Sequence
  Description of Artificial Sequence: Synthetic oligonucleotide
  Sense strand starting at position 244 of SEQ ID NO: 1881006
gugacagcuucuuaaugug

SEQ ID NO: 2010671 - RNA, 19 nt, Artificial Sequence
  Description of Artificial Sequence: Synthetic oligonucleotide
  Antisense strand to SEQ ID NO: 2010670
cacauuaagaagcugucac

SEQ ID NO: 2010672 - RNA, 19 nt, Artificial Sequence
  Description of Artificial Sequence: Synthetic oligonucleotide
  Sense strand starting at position 247 of SEQ ID NO: 1881006
acagcuucuuaaugugauc

SEQ ID NO: 2010673 - RNA, 19 nt, Artificial Sequence
  Description of Artificial Sequence: Synthetic oligonucleotide
  Antisense strand to SEQ ID NO: 2010672
gaucacauuaagaagcugu

SEQ ID NO: 2010674 - RNA, 19 nt, Artificial Sequence
  Description of Artificial Sequence: Synthetic oligonucleotide
  Sense strand starting at position 250 of SEQ ID NO: 1881006
gcuucuuaaugugaucaaa

SEQ ID NO: 2010675 - RNA, 19 nt, Artificial Sequence
  Description of Artificial Sequence: Synthetic oligonucleotide
  Antisense strand to SEQ ID NO: 2010674
uuugaucacauuaagaagc

SEQ ID NO: 2010676 - RNA, 19 nt, Artificial Sequence
  Description of Artificial Sequence: Synthetic oligonucleotide
  Sense strand starting at position 252 of SEQ ID NO: 1881006
uucuuaaugugaucaaagg

SEQ ID NO: 2010677 - RNA, 19 nt, Artificial Sequence
  Description of Artificial Sequence: Synthetic oligonucleotide
  Antisense strand to SEQ ID NO: 2010676
ccuuugaucacauuaagaa

SEQ ID NO: 2010678 - RNA, 19 nt, Artificial Sequence
  Description of Artificial Sequence: Synthetic oligonucleotide
  Sense strand starting at position 321 of SEQ ID NO: 1881006
gggaacgcgucccucuaaa

SEQ ID NO: 2010679 - RNA, 19 nt, Artificial Sequence
  Description of Artificial Sequence: Synthetic oligonucleotide
  Antisense strand to SEQ ID NO: 2010678
uuuagagggacgcguuccc

SEQ ID NO: 2010680 - RNA, 19 nt, Artificial Sequence
  Description of Artificial Sequence: Synthetic oligonucleotide
  Sense strand starting at position 366 of SEQ ID NO: 1881006
gcccauaaauuggaguaaa

SEQ ID NO: 2010681 - RNA, 19 nt, Artificial Sequence
  Description of Artificial Sequence: Synthetic oligonucleotide
  Antisense strand to SEQ ID NO: 2010680
uuuacuccaauuuaugggc

SEQ ID NO: 2010682 - RNA, 19 nt, Artificial Sequence
  Description of Artificial Sequence: Synthetic oligonucleotide
  Sense strand starting at position 376 of SEQ ID NO: 1881006
uggaguaaaucugcucuca

SEQ ID NO: 2010683 - RNA, 19 nt, Artificial Sequence
  Description of Artificial Sequence: Synthetic oligonucleotide
  Antisense strand to SEQ ID NO: 2010682
ugagagcagauuuacucca

SEQ ID NO: 2010684 - RNA, 19 nt, Artificial Sequence
  Description of Artificial Sequence: Synthetic oligonucleotide
  Sense strand starting at position 484 of SEQ ID NO: 1881006
ggaccaugucuucggccua

SEQ ID NO: 2010685 - RNA, 19 nt, Artificial Sequence
  Description of Artificial Sequence: Synthetic oligonucleotide
  Antisense strand to SEQ ID NO: 2010684
uaggccgaagacauggucc

SEQ ID NO: 2010686 - RNA, 19 nt, Artificial Sequence
  Description of Artificial Sequence: Synthetic oligonucleotide
  Sense strand starting at position 485 of SEQ ID NO: 1881006
gaccaugucuucggccuaa

SEQ ID NO: 2010687 - RNA, 19 nt, Artificial Sequence
  Description of Artificial Sequence: Synthetic oligonucleotide
  Antisense strand to SEQ ID NO: 2010686
uuaggccgaagacaugguc

SEQ ID NO: 2010688 - RNA, 19 nt, Artificial Sequence
  Description of Artificial Sequence: Synthetic oligonucleotide
  Sense strand starting at position 631 of SEQ ID NO: 1881006
guucguuuccgccagagaa

SEQ ID NO: 2010689 - RNA, 19 nt, Artificial Sequence
  Description of Artificial Sequence: Synthetic oligonucleotide
  Antisense strand to SEQ ID NO: 2010688
uucucuggcggaaacgaac

SEQ ID NO: 2010690 - RNA, 19 nt, Artificial Sequence
  Description of Artificial Sequence: Synthetic oligonucleotide
  Sense strand starting at position 633 of SEQ ID NO: 1881006
ucguuuccgccagagaaug

SEQ ID NO: 2010691 - RNA, 19 nt, Artificial Sequence
  Description of Artificial Sequence: Synthetic oligonucleotide
  Antisense strand to SEQ ID NO: 2010690
cauucucuggcggaaacga

SEQ ID NO: 2010692 - RNA, 19 nt, Artificial Sequence
  Description of Artificial Sequence: Synthetic oligonucleotide
  Sense strand starting at position 1055 of SEQ ID NO: 1881006
cgcugaaacugggaauaca

SEQ ID NO: 2010693 - RNA, 19 nt, Artificial Sequence
  Description of Artificial Sequence: Synthetic oligonucleotide
  Antisense strand to SEQ ID NO: 2010692
uguauucccaguuucagcg

SEQ ID NO: 2010694 - RNA, 19 nt, Artificial Sequence
  Description of Artificial Sequence: Synthetic oligonucleotide
  Sense strand starting at position 1413 of SEQ ID NO: 1881006
gaagaaucguaagcuaaag

SEQ ID NO: 2010695 - RNA, 19 nt, Artificial Sequence
  Description of Artificial Sequence: Synthetic oligonucleotide
  Antisense strand to SEQ ID NO: 2010694
cuuuagcuuacgauucuuc

SEQ ID NO: 2010696 - RNA, 19 nt, Artificial Sequence
  Description of Artificial Sequence: Synthetic oligonucleotide
  Sense strand starting at position 2077 of SEQ ID NO: 1881006
ccaauuaccgacugucaau

SEQ ID NO: 2010697 - RNA, 19 nt, Artificial Sequence
  Description of Artificial Sequence: Synthetic oligonucleotide
  Antisense strand to SEQ ID NO: 2010696
auugacagucgguaauugg

SEQ ID NO: 2010698 - RNA, 19 nt, Artificial Sequence
  Description of Artificial Sequence: Synthetic oligonucleotide
  Sense strand starting at position 2389 of SEQ ID NO: 1881006
agccgaucuccgggcuaga

SEQ ID NO: 2010699 - RNA, 19 nt, Artificial Sequence
  Description of Artificial Sequence: Synthetic oligonucleotide
  Antisense strand to SEQ ID NO: 2010698
ucuagcccggagaucggcu

SEQ ID NO: 2010700 - RNA, 19 nt, Artificial Sequence
  Description of Artificial Sequence: Synthetic oligonucleotide
  Sense strand starting at position 2392 of SEQ ID NO: 1881006
cgaucuccgggcuagaagu

SEQ ID NO: 2010701 - RNA, 19 nt, Artificial Sequence
  Description of Artificial Sequence: Synthetic oligonucleotide
  Antisense strand to SEQ ID NO: 2010700
acuucuagcccggagaucg

SEQ ID NO: 2010702 - RNA, 19 nt, Artificial Sequence
  Description of Artificial Sequence: Synthetic oligonucleotide
  Sense strand starting at position 2417 of SEQ ID NO: 1881006
ggagcacuuccaggugacu

SEQ ID NO: 2010703 - RNA, 19 nt, Artificial Sequence
  Description of Artificial Sequence: Synthetic oligonucleotide
  Antisense strand to SEQ ID NO: 2010702
agucaccuggaagugcucc

SEQ ID NO: 2010704 - RNA, 19 nt, Artificial Sequence
  Description of Artificial Sequence: Synthetic oligonucleotide
  Sense strand starting at position 2723 of SEQ ID NO: 1881006
ccucuagagcccuguaguu

SEQ ID NO: 2010705 - RNA, 19 nt, Artificial Sequence
  Description of Artificial Sequence: Synthetic oligonucleotide
  Antisense strand to SEQ ID NO: 2010704
aacuacagggcucuagagg

SEQ ID NO: 2010706 - RNA, 19 nt, Artificial Sequence
  Description of Artificial Sequence: Synthetic oligonucleotide
  Sense strand starting at position 2964 of SEQ ID NO: 1881006
ggcaguuggugguuaguua

SEQ ID NO: 2010707 - RNA, 19 nt, Artificial Sequence
  Description of Artificial Sequence: Synthetic oligonucleotide
  Antisense strand to SEQ ID NO: 2010706
uaacuaaccaccaacugcc

SEQ ID NO: 2010708 - RNA, 19 nt, Artificial Sequence
  Description of Artificial Sequence: Synthetic oligonucleotide
  Sense strand starting at position 3005 of SEQ ID NO: 1881006
cgagggaucccggaguguu

SEQ ID NO: 2010709 - RNA, 19 nt, Artificial Sequence
  Description of Artificial Sequence: Synthetic oligonucleotide
  Antisense strand to SEQ ID NO: 2010708
aacacuccgggaucccucg

SEQ ID NO: 2010710 - RNA, 19 nt, Artificial Sequence
  Description of Artificial Sequence: Synthetic oligonucleotide
  Sense strand starting at position 3013 of SEQ ID NO: 1881006
cccggaguguucgcaagag

SEQ ID NO: 2010711 - RNA, 19 nt, Artificial Sequence
  Description of Artificial Sequence: Synthetic oligonucleotide
  Antisense strand to SEQ ID NO: 2010710
cucuugcgaacacuccggg

SEQ ID NO: 2010712 - RNA, 19 nt, Artificial Sequence
  Description of Artificial Sequence: Synthetic oligonucleotide
  Sense strand starting at position 3266 of SEQ ID NO: 1881006
gcuucaugucugugcagga

SEQ ID NO: 2010713 - RNA, 19 nt, Artificial Sequence
  Description of Artificial Sequence: Synthetic oligonucleotide
  Antisense strand to SEQ ID NO: 2010712
uccugcacagacaugaagc

SEQ ID NO: 2010714 - RNA, 19 nt, Artificial Sequence
  Description of Artificial Sequence: Synthetic oligonucleotide
  Sense strand starting at position 3598 of SEQ ID NO: 1881006
uggugugcuuuguugagag

SEQ ID NO: 2010715 - RNA, 19 nt, Artificial Sequence
  Description of Artificial Sequence: Synthetic oligonucleotide
  Antisense strand to SEQ ID NO: 2010714
cucucaacaaagcacacca

SEQ ID NO: 2010716 - RNA, 19 nt, Artificial Sequence
  Description of Artificial Sequence: Synthetic oligonucleotide
  Sense strand starting at position 3600 of SEQ ID NO: 1881006
gugugcuuuguugagaggu

SEQ ID NO: 2010717 - RNA, 19 nt, Artificial Sequence
  Description of Artificial Sequence: Synthetic oligonucleotide
  Antisense strand to SEQ ID NO: 2010716
accucucaacaaagcacac

SEQ ID NO: 2010718 - RNA, 19 nt, Artificial Sequence
  Description of Artificial Sequence: Synthetic oligonucleotide
  Sense strand starting at position 3610 of SEQ ID NO: 1881006
uugagagguccugauugug

SEQ ID NO: 2010719 - RNA, 19 nt, Artificial Sequence
  Description of Artificial Sequence: Synthetic oligonucleotide
  Antisense strand to SEQ ID NO: 2010718
cacaaucaggaccucucaa

SEQ ID NO: 2010720 - RNA, 19 nt, Artificial Sequence
  Description of Artificial Sequence: Synthetic oligonucleotide
  Sense strand starting at position 3619 of SEQ ID NO: 1881006
ccugauugugccgcuuagu

SEQ ID NO: 2010721 - RNA, 19 nt, Artificial Sequence
  Description of Artificial Sequence: Synthetic oligonucleotide
  Antisense strand to SEQ ID NO: 2010720
acuaagcggcacaaucagg

SEQ ID NO: 2010722 - RNA, 19 nt, Artificial Sequence
  Description of Artificial Sequence: Synthetic oligonucleotide
  Sense strand starting at position 3620 of SEQ ID NO: 1881006
cugauugugccgcuuagua

SEQ ID NO: 2010723 - RNA, 19 nt, Artificial Sequence
  Description of Artificial Sequence: Synthetic oligonucleotide
  Antisense strand to SEQ ID NO: 2010722
uacuaagcggcacaaucag

SEQ ID NO: 2010724 - RNA, 19 nt, Artificial Sequence
  Description of Artificial Sequence: Synthetic oligonucleotide
  Sense strand starting at position 3622 of SEQ ID NO: 1881006
gauugugccgcuuaguacu

SEQ ID NO: 2010725 - RNA, 19 nt, Artificial Sequence
  Description of Artificial Sequence: Synthetic oligonucleotide
  Antisense strand to SEQ ID NO: 2010724
aguacuaagcggcacaauc

SEQ ID NO: 2010726 - RNA, 19 nt, Artificial Sequence
  Description of Artificial Sequence: Synthetic oligonucleotide
  Sense strand starting at position 3673 of SEQ ID NO: 1881006
gguugagaucaguaugugu

SEQ ID NO: 2010727 - RNA, 19 nt, Artificial Sequence
  Description of Artificial Sequence: Synthetic oligonucleotide
  Antisense strand to SEQ ID NO: 2010726
acacauacugaucucaacc

SEQ ID NO: 2010728 - RNA, 19 nt, Artificial Sequence
  Description of Artificial Sequence: Synthetic oligonucleotide
  Sense strand starting at position 3675 of SEQ ID NO: 1881006
uugagaucaguauguguau

SEQ ID NO: 2010729 - RNA, 19 nt, Artificial Sequence
  Description of Artificial Sequence: Synthetic oligonucleotide
  Antisense strand to SEQ ID NO: 2010728
auacacauacugaucucaa

SEQ ID NO: 2010730 - RNA, 19 nt, Artificial Sequence
  Description of Artificial Sequence: Synthetic oligonucleotide
  Sense strand starting at position 3715 of SEQ ID NO: 1881006
ugcgugucgcugggaucaa

SEQ ID NO: 2010731 - RNA, 19 nt, Artificial Sequence
  Description of Artificial Sequence: Synthetic oligonucleotide
  Antisense strand to SEQ ID NO: 2010730
uugaucccagcgacacgca

SEQ ID NO: 2010732 - RNA, 19 nt, Artificial Sequence
  Description of Artificial Sequence: Synthetic oligonucleotide
  Sense strand starting at position 3815 of SEQ ID NO: 1881006
gugugagugucugacugaa

SEQ ID NO: 2010733 - RNA, 19 nt, Artificial Sequence
  Description of Artificial Sequence: Synthetic oligonucleotide
  Antisense strand to SEQ ID NO: 2010732
uucagucagacacucacac

SEQ ID NO: 2010734 - RNA, 19 nt, Artificial Sequence
  Description of Artificial Sequence: Synthetic oligonucleotide
  Sense strand starting at position 3817 of SEQ ID NO: 1881006
gugagugucugacugaagu

SEQ ID NO: 2010735 - RNA, 19 nt, Artificial Sequence
  Description of Artificial Sequence: Synthetic oligonucleotide
  Antisense strand to SEQ ID NO: 2010734
acuucagucagacacucac

SEQ ID NO: 2010736 - RNA, 19 nt, Artificial Sequence
  Description of Artificial Sequence: Synthetic oligonucleotide
  Sense strand starting at position 97 of SEQ ID NO: 1881007
ugcugugugaccuuagcuu

SEQ ID NO: 2010737 - RNA, 19 nt, Artificial Sequence
  Description of Artificial Sequence: Synthetic oligonucleotide
  Antisense strand to SEQ ID NO: 2010736
aagcuaaggucacacagca

SEQ ID NO: 2010738 - RNA, 19 nt, Artificial Sequence
  Description of Artificial Sequence: Synthetic oligonucleotide
  Sense strand starting at position 121 of SEQ ID NO: 1881007
cccuuucucccuggguaaa

SEQ ID NO: 2010739 - RNA, 19 nt, Artificial Sequence
  Description of Artificial Sequence: Synthetic oligonucleotide
  Antisense strand to SEQ ID NO: 2010738
uuuacccagggagaaaggg

SEQ ID NO: 2010740 - RNA, 19 nt, Artificial Sequence
  Description of Artificial Sequence: Synthetic oligonucleotide
  Sense strand starting at position 144 of SEQ ID NO: 1881007
ggcugucaucacuaggaga

SEQ ID NO: 2010741 - RNA, 19 nt, Artificial Sequence
  Description of Artificial Sequence: Synthetic oligonucleotide
  Antisense strand to SEQ ID NO: 2010740
ucuccuagugaugacagcc

SEQ ID NO: 2010742 - RNA, 19 nt, Artificial Sequence
  Description of Artificial Sequence: Synthetic oligonucleotide
  Sense strand starting at position 301 of SEQ ID NO: 1881007
ugagcagacugcuccugau

SEQ ID NO: 2010743 - RNA, 19 nt, Artificial Sequence
  Description of Artificial Sequence: Synthetic oligonucleotide
  Antisense strand to SEQ ID NO: 2010742
aucaggagcagucugcuca

SEQ ID NO: 2010744 - RNA, 19 nt, Artificial Sequence
  Description of Artificial Sequence: Synthetic oligonucleotide
  Sense strand starting at position 316 of SEQ ID NO: 1881007
ugaucauccucuccagaga

SEQ ID NO: 2010745 - RNA, 19 nt, Artificial Sequence
  Description of Artificial Sequence: Synthetic oligonucleotide
  Antisense strand to SEQ ID NO: 2010744
ucucuggagaggaugauca

SEQ ID NO: 2010746 - RNA, 19 nt, Artificial Sequence
  Description of Artificial Sequence: Synthetic oligonucleotide
  Sense strand starting at position 344 of SEQ ID NO: 1881007
gggauaacuucagccagug

SEQ ID NO: 2010747 - RNA, 19 nt, Artificial Sequence
  Description of Artificial Sequence: Synthetic oligonucleotide
  Antisense strand to SEQ ID NO: 2010746
cacuggcugaaguuauccc

SEQ ID NO: 2010748 - RNA, 19 nt, Artificial Sequence
  Description of Artificial Sequence: Synthetic oligonucleotide
  Sense strand starting at position 375 of SEQ ID NO: 1881007
ucauuucugccagguguga

SEQ ID NO: 2010749 - RNA, 19 nt, Artificial Sequence
  Description of Artificial Sequence: Synthetic oligonucleotide
  Antisense strand to SEQ ID NO: 2010748
ucacaccuggcagaaauga

SEQ ID NO: 2010750 - RNA, 19 nt, Artificial Sequence
  Description of Artificial Sequence: Synthetic oligonucleotide
  Sense strand starting at position 377 of SEQ ID NO: 1881007
auuucugccaggugugaca

SEQ ID NO: 2010751 - RNA, 19 nt, Artificial Sequence
  Description of Artificial Sequence: Synthetic oligonucleotide
  Antisense strand to SEQ ID NO: 2010750
ugucacaccuggcagaaau

SEQ ID NO: 2010752 - RNA, 19 nt, Artificial Sequence
  Description of Artificial Sequence: Synthetic oligonucleotide
  Sense strand starting at position 593 of SEQ ID NO: 1881007
agagucuuugagggugaaa

SEQ ID NO: 2010753 - RNA, 19 nt, Artificial Sequence
  Description of Artificial Sequence: Synthetic oligonucleotide
  Antisense strand to SEQ ID NO: 2010752
uuucacccucaaagacucu

SEQ ID NO: 2010754 - RNA, 19 nt, Artificial Sequence
  Description of Artificial Sequence: Synthetic oligonucleotide
  Sense strand starting at position 633 of SEQ ID NO: 1881007
gcuucuaaccugugaaaca

SEQ ID NO: 2010755 - RNA, 19 nt, Artificial Sequence
  Description of Artificial Sequence: Synthetic oligonucleotide
  Antisense strand to SEQ ID NO: 2010754
uguuucacagguuagaagc

SEQ ID NO: 2010756 - RNA, 19 nt, Artificial Sequence
  Description of Artificial Sequence: Synthetic oligonucleotide
  Sense strand starting at position 643 of SEQ ID NO: 1881007
ugugaaacacccugcagau

SEQ ID NO: 2010757 - RNA, 19 nt, Artificial Sequence
  Description of Artificial Sequence: Synthetic oligonucleotide
  Antisense strand to SEQ ID NO: 2010756
aucugcaggguguuucaca

SEQ ID NO: 2010758 - RNA, 19 nt, Artificial Sequence
  Description of Artificial Sequence: Synthetic oligonucleotide
  Sense strand starting at position 800 of SEQ ID NO: 1881007
caaugaguugucugcagag

SEQ ID NO: 2010759 - RNA, 19 nt, Artificial Sequence
  Description of Artificial Sequence: Synthetic oligonucleotide
  Antisense strand to SEQ ID NO: 2010758
cucugcagacaacucauug

SEQ ID NO: 2010760 - RNA, 19 nt, Artificial Sequence
  Description of Artificial Sequence: Synthetic oligonucleotide
  Sense strand starting at position 802 of SEQ ID NO: 1881007
augaguugucugcagagaa

SEQ ID NO: 2010761 - RNA, 19 nt, Artificial Sequence
  Description of Artificial Sequence: Synthetic oligonucleotide
  Antisense strand to SEQ ID NO: 2010760
uucucugcagacaacucau

SEQ ID NO: 2010762 - RNA, 19 nt, Artificial Sequence
  Description of Artificial Sequence: Synthetic oligonucleotide
  Sense strand starting at position 892 of SEQ ID NO: 1881007
gaaagaggccuguggugaa

SEQ ID NO: 2010763 - RNA, 19 nt, Artificial Sequence
  Description of Artificial Sequence: Synthetic oligonucleotide
  Antisense strand to SEQ ID NO: 2010762
uucaccacaggccucuuuc

SEQ ID NO: 2010764 - RNA, 19 nt, Artificial Sequence
  Description of Artificial Sequence: Synthetic oligonucleotide
  Sense strand starting at position 934 of SEQ ID NO: 1881007
gggcuuugcggcaagcaga

SEQ ID NO: 2010765 - RNA, 19 nt, Artificial Sequence
  Description of Artificial Sequence: Synthetic oligonucleotide
  Antisense strand to SEQ ID NO: 2010764
ucugcuugccgcaaagccc

SEQ ID NO: 2010766 - RNA, 19 nt, Artificial Sequence
  Description of Artificial Sequence: Synthetic oligonucleotide
  Sense strand starting at position 1070 of SEQ ID NO: 1881007
gauggaugccuugggaacu

SEQ ID NO: 2010767 - RNA, 19 nt, Artificial Sequence
  Description of Artificial Sequence: Synthetic oligonucleotide
  Antisense strand to SEQ ID NO: 2010766
aguucccaaggcauccauc

SEQ ID NO: 2010768 - RNA, 19 nt, Artificial Sequence
  Description of Artificial Sequence: Synthetic oligonucleotide
  Sense strand starting at position 1087 of SEQ ID NO: 1881007
cugcuagcccaagaaguuu

SEQ ID NO: 2010769 - RNA, 19 nt, Artificial Sequence
  Description of Artificial Sequence: Synthetic oligonucleotide
  Antisense strand to SEQ ID NO: 2010768
aaacuucuugggcuagcag

SEQ ID NO: 2010770 - RNA, 19 nt, Artificial Sequence
  Description of Artificial Sequence: Synthetic oligonucleotide
  Sense strand starting at position 2498 of SEQ ID NO: 1881007
acugauaauuaguugguuu

SEQ ID NO: 2010771 - RNA, 19 nt, Artificial Sequence
  Description of Artificial Sequence: Synthetic oligonucleotide
  Antisense strand to SEQ ID NO: 2010770
aaaccaacuaauuaucagu

SEQ ID NO: 2010772 - RNA, 19 nt, Artificial Sequence
  Description of Artificial Sequence: Synthetic oligonucleotide
  Sense strand starting at position 2500 of SEQ ID NO: 1881007
ugauaauuaguugguuuag

SEQ ID NO: 2010773 - RNA, 19 nt, Artificial Sequence
  Description of Artificial Sequence: Synthetic oligonucleotide
  Antisense strand to SEQ ID NO: 2010772
cuaaaccaacuaauuauca

SEQ ID NO: 2010774 - RNA, 19 nt, Artificial Sequence
  Description of Artificial Sequence: Synthetic oligonucleotide
  Sense strand starting at position 2502 of SEQ ID NO: 1881007
auaauuaguugguuuagca

SEQ ID NO: 2010775 - RNA, 19 nt, Artificial Sequence
  Description of Artificial Sequence: Synthetic oligonucleotide
  Antisense strand to SEQ ID NO: 2010774
ugcuaaaccaacuaauuau

SEQ ID NO: 2010776 - RNA, 19 nt, Artificial Sequence
  Description of Artificial Sequence: Synthetic oligonucleotide
  Sense strand starting at position 2800 of SEQ ID NO: 1881007
cuaagugugcaacagcaua

SEQ ID NO: 2010777 - RNA, 19 nt, Artificial Sequence
  Description of Artificial Sequence: Synthetic oligonucleotide
  Antisense strand to SEQ ID NO: 2010776
uaugcuguugcacacuuag

SEQ ID NO: 2010778 - RNA, 19 nt, Artificial Sequence
  Description of Artificial Sequence: Synthetic oligonucleotide
  Sense strand starting at position 2808 of SEQ ID NO: 1881007
gcaacagcauaugucuaaa

SEQ ID NO: 2010779 - RNA, 19 nt, Artificial Sequence
  Description of Artificial Sequence: Synthetic oligonucleotide
  Antisense strand to SEQ ID NO: 2010778
uuuagacauaugcuguugc

SEQ ID NO: 2010780 - RNA, 19 nt, Artificial Sequence
  Description of Artificial Sequence: Synthetic oligonucleotide
  Sense strand starting at position 2811 of SEQ ID NO: 1881007
acagcauaugucuaaauga

SEQ ID NO: 2010781 - RNA, 19 nt, Artificial Sequence
  Description of Artificial Sequence: Synthetic oligonucleotide
  Antisense strand to SEQ ID NO: 2010780
ucauuuagacauaugcugu

SEQ ID NO: 2010782 - RNA, 19 nt, Artificial Sequence
  Description of Artificial Sequence: Synthetic oligonucleotide
  Sense strand starting at position 3065 of SEQ ID NO: 1881007
aagugaucugccugacuuu

SEQ ID NO: 2010783 - RNA, 19 nt, Artificial Sequence
  Description of Artificial Sequence: Synthetic oligonucleotide
  Antisense strand to SEQ ID NO: 2010782
aaagucaggcagaucacuu

SEQ ID NO: 2010784 - RNA, 19 nt, Artificial Sequence
  Description of Artificial Sequence: Synthetic oligonucleotide
  Sense strand starting at position 3100 of SEQ ID NO: 1881007
ggauuacagauguguaguc

SEQ ID NO: 2010785 - RNA, 19 nt, Artificial Sequence
  Description of Artificial Sequence: Synthetic oligonucleotide
  Antisense strand to SEQ ID NO: 2010784
gacuacacaucuguaaucc

SEQ ID NO: 2010786 - RNA, 19 nt, Artificial Sequence
  Description of Artificial Sequence: Synthetic oligonucleotide
  Sense strand starting at position 3102 of SEQ ID NO: 1881007
auuacagauguguagucuu

SEQ ID NO: 2010787 - RNA, 19 nt, Artificial Sequence
  Description of Artificial Sequence: Synthetic oligonucleotide
  Antisense strand to SEQ ID NO: 2010786
aagacuacacaucuguaau

SEQ ID NO: 2010788 - RNA, 19 nt, Artificial Sequence
  Description of Artificial Sequence: Synthetic oligonucleotide
  Sense strand starting at position 3105 of SEQ ID NO: 1881007
acagauguguagucuuuga

SEQ ID NO: 2010789 - RNA, 19 nt, Artificial Sequence
  Description of Artificial Sequence: Synthetic oligonucleotide
  Antisense strand to SEQ ID NO: 2010788
ucaaagacuacacaucugu

SEQ ID NO: 2010790 - RNA, 19 nt, Artificial Sequence
  Description of Artificial Sequence: Synthetic oligonucleotide
  Sense strand starting at position 3109 of SEQ ID NO: 1881007
auguguagucuuugaaauc

SEQ ID NO: 2010791 - RNA, 19 nt, Artificial Sequence
  Description of Artificial Sequence: Synthetic oligonucleotide
  Antisense strand to SEQ ID NO: 2010790
gauuucaaagacuacacau

SEQ ID NO: 2010792 - RNA, 19 nt, Artificial Sequence
  Description of Artificial Sequence: Synthetic oligonucleotide
  Sense strand starting at position 3134 of SEQ ID NO: 1881007
guguucuuacagugcauuu

SEQ ID NO: 2010793 - RNA, 19 nt, Artificial Sequence
  Description of Artificial Sequence: Synthetic oligonucleotide
  Antisense strand to SEQ ID NO: 2010792
aaaugcacuguaagaacac

SEQ ID NO: 2010794 - RNA, 19 nt, Artificial Sequence
  Description of Artificial Sequence: Synthetic oligonucleotide
  Sense strand starting at position 3211 of SEQ ID NO: 1881007
ggcggccaucgcucuuaaa

SEQ ID NO: 2010795 - RNA, 19 nt, Artificial Sequence
  Description of Artificial Sequence: Synthetic oligonucleotide
  Antisense strand to SEQ ID NO: 2010794
uuuaagagcgauggccgcc

SEQ ID NO: 2010796 - RNA, 19 nt, Artificial Sequence
  Description of Artificial Sequence: Synthetic oligonucleotide
  Sense strand starting at position 3212 of SEQ ID NO: 1881007
gcggccaucgcucuuaaau

SEQ ID NO: 2010797 - RNA, 19 nt, Artificial Sequence
  Description of Artificial Sequence: Synthetic oligonucleotide
  Antisense strand to SEQ ID NO: 2010796
auuuaagagcgauggccgc

SEQ ID NO: 2010798 - RNA, 19 nt, Artificial Sequence
  Description of Artificial Sequence: Synthetic oligonucleotide
  Sense strand starting at position 3321 of SEQ ID NO: 1881007
gggccaaagcucuaacacu

SEQ ID NO: 2010799 - RNA, 19 nt, Artificial Sequence
  Description of Artificial Sequence: Synthetic oligonucleotide
  Antisense strand to SEQ ID NO: 2010798
aguguuagagcuuuggccc

SEQ ID NO: 2010800 - RNA, 19 nt, Artificial Sequence
  Description of Artificial Sequence: Synthetic oligonucleotide
  Sense strand starting at position 3401 of SEQ ID NO: 1881007
ccagguuccuaauccugaa

SEQ ID NO: 2010801 - RNA, 19 nt, Artificial Sequence
  Description of Artificial Sequence: Synthetic oligonucleotide
  Antisense strand to SEQ ID NO: 2010800
uucaggauuaggaaccugg

SEQ ID NO: 2010802 - RNA, 19 nt, Artificial Sequence
  Description of Artificial Sequence: Synthetic oligonucleotide
  Sense strand starting at position 3751 of SEQ ID NO: 1881007
cuuggauucugauccagua

SEQ ID NO: 2010803 - RNA, 19 nt, Artificial Sequence
  Description of Artificial Sequence: Synthetic oligonucleotide
  Antisense strand to SEQ ID NO: 2010802
uacuggaucagaauccaag

SEQ ID NO: 2010804 - RNA, 19 nt, Artificial Sequence
  Description of Artificial Sequence: Synthetic oligonucleotide
  Sense strand starting at position 3832 of SEQ ID NO: 1881007
ccaaguaucccagguaaau

SEQ ID NO: 2010805 - RNA, 19 nt, Artificial Sequence
  Description of Artificial Sequence: Synthetic oligonucleotide
  Antisense strand to SEQ ID NO: 2010804
auuuaccugggauacuugg

SEQ ID NO: 2010806 - RNA, 19 nt, Artificial Sequence
  Description of Artificial Sequence: Synthetic oligonucleotide
  Sense strand starting at position 3931 of SEQ ID NO: 1881007
guuuccacucgugaauauc

SEQ ID NO: 2010807 - RNA, 19 nt, Artificial Sequence
  Description of Artificial Sequence: Synthetic oligonucleotide
  Antisense strand to SEQ ID NO: 2010806
gauauucacgaguggaaac

SEQ ID NO: 2010808 - RNA, 19 nt, Artificial Sequence
  Description of Artificial Sequence: Synthetic oligonucleotide
  Sense strand starting at position 3934 of SEQ ID NO: 1881007
uccacucgugaauaucuua

SEQ ID NO: 2010809 - RNA, 19 nt, Artificial Sequence
  Description of Artificial Sequence: Synthetic oligonucleotide
  Antisense strand to SEQ ID NO: 2010808
uaagauauucacgagugga

SEQ ID NO: 2010810 - RNA, 19 nt, Artificial Sequence
  Description of Artificial Sequence: Synthetic oligonucleotide
  Sense strand starting at position 3937 of SEQ ID NO: 1881007
acucgugaauaucuuauau

SEQ ID NO: 2010811 - RNA, 19 nt, Artificial Sequence
  Description of Artificial Sequence: Synthetic oligonucleotide
  Antisense strand to SEQ ID NO: 2010810
auauaagauauucacgagu

SEQ ID NO: 2010812 - RNA, 19 nt, Artificial Sequence
  Description of Artificial Sequence: Synthetic oligonucleotide
  Sense strand starting at position 3949 of SEQ ID NO: 1881007
cuuauauaaccguaguaca

SEQ ID NO: 2010813 - RNA, 19 nt, Artificial Sequence
  Description of Artificial Sequence: Synthetic oligonucleotide
  Antisense strand to SEQ ID NO: 2010812
uguacuacgguuauauaag

SEQ ID NO: 2010814 - RNA, 19 nt, Artificial Sequence
  Description of Artificial Sequence: Synthetic oligonucleotide
  Sense strand starting at position 3983 of SEQ ID NO: 1881007
acaccaguguuagcacauu

SEQ ID NO: 2010815 - RNA, 19 nt, Artificial Sequence
  Description of Artificial Sequence: Synthetic oligonucleotide
  Antisense strand to SEQ ID NO: 2010814
aaugugcuaacacuggugu

SEQ ID NO: 2010816 - RNA, 19 nt, Artificial Sequence
  Description of Artificial Sequence: Synthetic oligonucleotide
  Sense strand starting at position 10 of SEQ ID NO: 1881008
auuagccagucaugguauu

SEQ ID NO: 2010817 - RNA, 19 nt, Artificial Sequence
  Description of Artificial Sequence: Synthetic oligonucleotide
  Antisense strand to SEQ ID NO: 2010816
aauaccaugacuggcuaau

SEQ ID NO: 2010818 - RNA, 19 nt, Artificial Sequence
  Description of Artificial Sequence: Synthetic oligonucleotide
  Sense strand starting at position 197 of SEQ ID NO: 1881008
aaaugucacuggcaaauga

SEQ ID NO: 2010819 - RNA, 19 nt, Artificial Sequence
  Description of Artificial Sequence: Synthetic oligonucleotide
  Antisense strand to SEQ ID NO: 2010818
ucauuugccagugacauuu

SEQ ID NO: 2010820 - RNA, 19 nt, Artificial Sequence
  Description of Artificial Sequence: Synthetic oligonucleotide
  Sense strand starting at position 273 of SEQ ID NO: 1881008
gacagaguuugcuucuuua

SEQ ID NO: 2010821 - RNA, 19 nt, Artificial Sequence
  Description of Artificial Sequence: Synthetic oligonucleotide
  Antisense strand to SEQ ID NO: 2010820
uaaagaagcaaacucuguc

SEQ ID NO: 2010822 - RNA, 19 nt, Artificial Sequence
  Description of Artificial Sequence: Synthetic oligonucleotide
  Sense strand starting at position 276 of SEQ ID NO: 1881008
agaguuugcuucuuuaauc

SEQ ID NO: 2010823 - RNA, 19 nt, Artificial Sequence
  Description of Artificial Sequence: Synthetic oligonucleotide
  Antisense strand to SEQ ID NO: 2010822
gauuaaagaagcaaacucu

SEQ ID NO: 2010824 - RNA, 19 nt, Artificial Sequence
  Description of Artificial Sequence: Synthetic oligonucleotide
  Sense strand starting at position 360 of SEQ ID NO: 1881008
gaaagcaaacgaugaguau

SEQ ID NO: 2010825 - RNA, 19 nt, Artificial Sequence
  Description of Artificial Sequence: Synthetic oligonucleotide
  Antisense strand to SEQ ID NO: 2010824
auacucaucguuugcuuuc

SEQ ID NO: 2010826 - RNA, 19 nt, Artificial Sequence
  Description of Artificial Sequence: Synthetic oligonucleotide
  Sense strand starting at position 369 of SEQ ID NO: 1881008
cgaugaguaucggucucaa

SEQ ID NO: 2010827 - RNA, 19 nt, Artificial Sequence
  Description of Artificial Sequence: Synthetic oligonucleotide
  Antisense strand to SEQ ID NO: 2010826
uugagaccgauacucaucg

SEQ ID NO: 2010828 - RNA, 19 nt, Artificial Sequence
  Description of Artificial Sequence: Synthetic oligonucleotide
  Sense strand starting at position 373 of SEQ ID NO: 1881008
gaguaucggucucaagcuu

SEQ ID NO: 2010829 - RNA, 19 nt, Artificial Sequence
  Description of Artificial Sequence: Synthetic oligonucleotide
  Antisense strand to SEQ ID NO: 2010828
aagcuugagaccgauacuc

SEQ ID NO: 2010830 - RNA, 19 nt, Artificial Sequence
  Description of Artificial Sequence: Synthetic oligonucleotide
  Sense strand starting at position 381 of SEQ ID NO: 1881008
gucucaagcuuccuauaga

SEQ ID NO: 2010831 - RNA, 19 nt, Artificial Sequence
  Description of Artificial Sequence: Synthetic oligonucleotide
  Antisense strand to SEQ ID NO: 2010830
ucuauaggaagcuugagac

SEQ ID NO: 2010832 - RNA, 19 nt, Artificial Sequence
  Description of Artificial Sequence: Synthetic oligonucleotide
  Sense strand starting at position 576 of SEQ ID NO: 1881008
ucagcauucuuggaaggaa

SEQ ID NO: 2010833 - RNA, 19 nt, Artificial Sequence
  Description of Artificial Sequence: Synthetic oligonucleotide
  Antisense strand to SEQ ID NO: 2010832
uuccuuccaagaaugcuga

SEQ ID NO: 2010834 - RNA, 19 nt, Artificial Sequence
  Description of Artificial Sequence: Synthetic oligonucleotide
  Sense strand starting at position 805 of SEQ ID NO: 1881008
cagccuugagcuggaaaca

SEQ ID NO: 2010835 - RNA, 19 nt, Artificial Sequence
  Description of Artificial Sequence: Synthetic oligonucleotide
  Antisense strand to SEQ ID NO: 2010834
uguuuccagcucaaggcug

SEQ ID NO: 2010836 - RNA, 19 nt, Artificial Sequence
  Description of Artificial Sequence: Synthetic oligonucleotide
  Sense strand starting at position 806 of SEQ ID NO: 1881008
agccuugagcuggaaacaa

SEQ ID NO: 2010837 - RNA, 19 nt, Artificial Sequence
  Description of Artificial Sequence: Synthetic oligonucleotide
  Antisense strand to SEQ ID NO: 2010836
uuguuuccagcucaaggcu

SEQ ID NO: 2010838 - RNA, 19 nt, Artificial Sequence
  Description of Artificial Sequence: Synthetic oligonucleotide
  Sense strand starting at position 853 of SEQ ID NO: 1881008
guaccuacauaggucagaa

SEQ ID NO: 2010839 - RNA, 19 nt, Artificial Sequence
  Description of Artificial Sequence: Synthetic oligonucleotide
  Antisense strand to SEQ ID NO: 2010838
uucugaccuauguagguac

SEQ ID NO: 2010840 - RNA, 19 nt, Artificial Sequence
  Description of Artificial Sequence: Synthetic oligonucleotide
  Sense strand starting at position 857 of SEQ ID NO: 1881008
cuacauaggucagaaagaa

SEQ ID NO: 2010841 - RNA, 19 nt, Artificial Sequence
  Description of Artificial Sequence: Synthetic oligonucleotide
  Antisense strand to SEQ ID NO: 2010840
uucuuucugaccuauguag

SEQ ID NO: 2010842 - RNA, 19 nt, Artificial Sequence
  Description of Artificial Sequence: Synthetic oligonucleotide
  Sense strand starting at position 881 of SEQ ID NO: 1881008
gcaucugaguucccagaca

SEQ ID NO: 2010843 - RNA, 19 nt, Artificial Sequence
  Description of Artificial Sequence: Synthetic oligonucleotide
  Antisense strand to SEQ ID NO: 2010842
ugucugggaacucagaugc

SEQ ID NO: 2010844 - RNA, 19 nt, Artificial Sequence
  Description of Artificial Sequence: Synthetic oligonucleotide
  Sense strand starting at position 913 of SEQ ID NO: 1881008
acacucuaaggcuguagaa

SEQ ID NO: 2010845 - RNA, 19 nt, Artificial Sequence
  Description of Artificial Sequence: Synthetic oligonucleotide
  Antisense strand to SEQ ID NO: 2010844
uucuacagccuuagagugu

SEQ ID NO: 2010846 - RNA, 19 nt, Artificial Sequence
  Description of Artificial Sequence: Synthetic oligonucleotide
  Sense strand starting at position 915 of SEQ ID NO: 1881008
acucuaaggcuguagaacu

SEQ ID NO: 2010847 - RNA, 19 nt, Artificial Sequence
  Description of Artificial Sequence: Synthetic oligonucleotide
  Antisense strand to SEQ ID NO: 2010846
aguucuacagccuuagagu

SEQ ID NO: 2010848 - RNA, 19 nt, Artificial Sequence
  Description of Artificial Sequence: Synthetic oligonucleotide
  Sense strand starting at position 923 of SEQ ID NO: 1881008
gcuguagaacuuuaagaau

SEQ ID NO: 2010849 - RNA, 19 nt, Artificial Sequence
  Description of Artificial Sequence: Synthetic oligonucleotide
  Antisense strand to SEQ ID NO: 2010848
auucuuaaaguucuacagc

SEQ ID NO: 2010850 - RNA, 19 nt, Artificial Sequence
  Description of Artificial Sequence: Synthetic oligonucleotide
  Sense strand starting at position 926 of SEQ ID NO: 1881008
guagaacuuuaagaauucu

SEQ ID NO: 2010851 - RNA, 19 nt, Artificial Sequence
  Description of Artificial Sequence: Synthetic oligonucleotide
  Antisense strand to SEQ ID NO: 2010850
agaauucuuaaaguucuac

SEQ ID NO: 2010852 - RNA, 19 nt, Artificial Sequence
  Description of Artificial Sequence: Synthetic oligonucleotide
  Sense strand starting at position 1004 of SEQ ID NO: 1881008
gguacagugcugcgaucuu

SEQ ID NO: 2010853 - RNA, 19 nt, Artificial Sequence
  Description of Artificial Sequence: Synthetic oligonucleotide
  Antisense strand to SEQ ID NO: 2010852
aagaucgcagcacuguacc

SEQ ID NO: 2010854 - RNA, 19 nt, Artificial Sequence
  Description of Artificial Sequence: Synthetic oligonucleotide
  Sense strand starting at position 1248 of SEQ ID NO: 1881008
ccggccgaacuuuaagaau

SEQ ID NO: 2010855 - RNA, 19 nt, Artificial Sequence
  Description of Artificial Sequence: Synthetic oligonucleotide
  Antisense strand to SEQ ID NO: 2010854
auucuuaaaguucggccgg

SEQ ID NO: 2010856 - RNA, 19 nt, Artificial Sequence
  Description of Artificial Sequence: Synthetic oligonucleotide
  Sense strand starting at position 1646 of SEQ ID NO: 1881008
ccuggauucuuggguuaca

SEQ ID NO: 2010857 - RNA, 19 nt, Artificial Sequence
  Description of Artificial Sequence: Synthetic oligonucleotide
  Antisense strand to SEQ ID NO: 2010856
uguaacccaagaauccagg

SEQ ID NO: 2010858 - RNA, 19 nt, Artificial Sequence
  Description of Artificial Sequence: Synthetic oligonucleotide
  Sense strand starting at position 1647 of SEQ ID NO: 1881008
cuggauucuuggguuacaa

SEQ ID NO: 2010859 - RNA, 19 nt, Artificial Sequence
  Description of Artificial Sequence: Synthetic oligonucleotide
  Antisense strand to SEQ ID NO: 2010858
uuguaacccaagaauccag

SEQ ID NO: 2010860 - RNA, 19 nt, Artificial Sequence
  Description of Artificial Sequence: Synthetic oligonucleotide
  Sense strand starting at position 1692 of SEQ ID NO: 1881008
cugcaucacucagguaagu

SEQ ID NO: 2010861 - RNA, 19 nt, Artificial Sequence
  Description of Artificial Sequence: Synthetic oligonucleotide
  Antisense strand to SEQ ID NO: 2010860
acuuaccugagugaugcag

SEQ ID NO: 2010862 - RNA, 19 nt, Artificial Sequence
  Description of Artificial Sequence: Synthetic oligonucleotide
  Sense strand starting at position 3753 of SEQ ID NO: 1881008
agaagaagguuccaaacca

SEQ ID NO: 2010863 - RNA, 19 nt, Artificial Sequence
  Description of Artificial Sequence: Synthetic oligonucleotide
  Antisense strand to SEQ ID NO: 2010862
ugguuuggaaccuucuucu

SEQ ID NO: 2010864 - RNA, 19 nt, Artificial Sequence
  Description of Artificial Sequence: Synthetic oligonucleotide
  Sense strand starting at position 3790 of SEQ ID NO: 1881008
aggcuuaaugcucauacua

SEQ ID NO: 2010865 - RNA, 19 nt, Artificial Sequence
  Description of Artificial Sequence: Synthetic oligonucleotide
  Antisense strand to SEQ ID NO: 2010864
uaguaugagcauuaagccu

SEQ ID NO: 2010866 - RNA, 19 nt, Artificial Sequence
  Description of Artificial Sequence: Synthetic oligonucleotide
  Sense strand starting at position 3792 of SEQ ID NO: 1881008
gcuuaaugcucauacuaug

SEQ ID NO: 2010867 - RNA, 19 nt, Artificial Sequence
  Description of Artificial Sequence: Synthetic oligonucleotide
  Antisense strand to SEQ ID NO: 2010866
cauaguaugagcauuaagc

SEQ ID NO: 2010868 - RNA, 19 nt, Artificial Sequence
  Description of Artificial Sequence: Synthetic oligonucleotide
  Sense strand starting at position 3797 of SEQ ID NO: 1881008
augcucauacuauguuuau

SEQ ID NO: 2010869 - RNA, 19 nt, Artificial Sequence
  Description of Artificial Sequence: Synthetic oligonucleotide
  Antisense strand to SEQ ID NO: 2010868
auaaacauaguaugagcau

SEQ ID NO: 2010870 - RNA, 19 nt, Artificial Sequence
  Description of Artificial Sequence: Synthetic oligonucleotide
  Sense strand starting at position 336 of SEQ ID NO: 1881009
gggcaagugcuacaaagaa

SEQ ID NO: 2010871 - RNA, 19 nt, Artificial Sequence
  Description of Artificial Sequence: Synthetic oligonucleotide
  Antisense strand to SEQ ID NO: 2010870
uucuuuguagcacuugccc

SEQ ID NO: 2010872 - RNA, 19 nt, Artificial Sequence
  Description of Artificial Sequence: Synthetic oligonucleotide
  Sense strand starting at position 476 of SEQ ID NO: 1881009
gauguugguacugggaaga

SEQ ID NO: 2010873 - RNA, 19 nt, Artificial Sequence
  Description of Artificial Sequence: Synthetic oligonucleotide
  Antisense strand to SEQ ID NO: 2010872
ucuucccaguaccaacauc

SEQ ID NO: 2010874 - RNA, 19 nt, Artificial Sequence
  Description of Artificial Sequence: Synthetic oligonucleotide
  Sense strand starting at position 890 of SEQ ID NO: 1881009
ucauuaauaugagaacaga

SEQ ID NO: 2010875 - RNA, 19 nt, Artificial Sequence
  Description of Artificial Sequence: Synthetic oligonucleotide
  Antisense strand to SEQ ID NO: 2010874
ucuguucucauauuaauga

SEQ ID NO: 2010876 - RNA, 19 nt, Artificial Sequence
  Description of Artificial Sequence: Synthetic oligonucleotide
  Sense strand starting at position 915 of SEQ ID NO: 1881009
ucaauuuguugguugcuga

SEQ ID NO: 2010877 - RNA, 19 nt, Artificial Sequence
  Description of Artificial Sequence: Synthetic oligonucleotide
  Antisense strand to SEQ ID NO: 2010876
ucagcaaccaacaaauuga

SEQ ID NO: 2010878 - RNA, 19 nt, Artificial Sequence
  Description of Artificial Sequence: Synthetic oligonucleotide
  Sense strand starting at position 922 of SEQ ID NO: 1881009
guugguugcugaccaauau

SEQ ID NO: 2010879 - RNA, 19 nt, Artificial Sequence
  Description of Artificial Sequence: Synthetic oligonucleotide
  Antisense strand to SEQ ID NO: 2010878
auauuggucagcaaccaac

SEQ ID NO: 2010880 - RNA, 19 nt, Artificial Sequence
  Description of Artificial Sequence: Synthetic oligonucleotide
  Sense strand starting at position 923 of SEQ ID NO: 1881009
uugguugcugaccaauauu

SEQ ID NO: 2010881 - RNA, 19 nt, Artificial Sequence
  Description of Artificial Sequence: Synthetic oligonucleotide
  Antisense strand to SEQ ID NO: 2010880
aauauuggucagcaaccaa

SEQ ID NO: 2010882 - RNA, 19 nt, Artificial Sequence
  Description of Artificial Sequence: Synthetic oligonucleotide
  Sense strand starting at position 926 of SEQ ID NO: 1881009
guugcugaccaauauuauc

SEQ ID NO: 2010883 - RNA, 19 nt, Artificial Sequence
  Description of Artificial Sequence: Synthetic oligonucleotide
  Antisense strand to SEQ ID NO: 2010882
gauaauauuggucagcaac

SEQ ID NO: 2010884 - RNA, 19 nt, Artificial Sequence
  Description of Artificial Sequence: Synthetic oligonucleotide
  Sense strand starting at position 1084 of SEQ ID NO: 1881009
cucuaauauccacggcaau

SEQ ID NO: 2010885 - RNA, 19 nt, Artificial Sequence
  Description of Artificial Sequence: Synthetic oligonucleotide
  Antisense strand to SEQ ID NO: 2010884
auugccguggauauuagag

SEQ ID NO: 2010886 - RNA, 19 nt, Artificial Sequence
  Description of Artificial Sequence: Synthetic oligonucleotide
  Sense strand starting at position 1099 of SEQ ID NO: 1881009
caaucaguugcucacguaa

SEQ ID NO: 2010887 - RNA, 19 nt, Artificial Sequence
  Description of Artificial Sequence: Synthetic oligonucleotide
  Antisense strand to SEQ ID NO: 2010886
uuacgugagcaacugauug

SEQ ID NO: 2010888 - RNA, 19 nt, Artificial Sequence
  Description of Artificial Sequence: Synthetic oligonucleotide
  Sense strand starting at position 1276 of SEQ ID NO: 1881009
uaaagauguggugggagau

SEQ ID NO: 2010889 - RNA, 19 nt, Artificial Sequence
  Description of Artificial Sequence: Synthetic oligonucleotide
  Antisense strand to SEQ ID NO: 2010888
aucucccaccacaucuuua

SEQ ID NO: 2010890 - RNA, 19 nt, Artificial Sequence
  Description of Artificial Sequence: Synthetic oligonucleotide
  Sense strand starting at position 1289 of SEQ ID NO: 1881009
ggagaucuaucagggaagu

SEQ ID NO: 2010891 - RNA, 19 nt, Artificial Sequence
  Description of Artificial Sequence: Synthetic oligonucleotide
  Antisense strand to SEQ ID NO: 2010890
acuucccugauagaucucc

SEQ ID NO: 2010892 - RNA, 19 nt, Artificial Sequence
  Description of Artificial Sequence: Synthetic oligonucleotide
  Sense strand starting at position 2517 of SEQ ID NO: 1881009
cuagcuacauuugaagaau

SEQ ID NO: 2010893 - RNA, 19 nt, Artificial Sequence
  Description of Artificial Sequence: Synthetic oligonucleotide
  Antisense strand to SEQ ID NO: 2010892
auucuucaaauguagcuag

SEQ ID NO: 2010894 - RNA, 19 nt, Artificial Sequence
  Description of Artificial Sequence: Synthetic oligonucleotide
  Sense strand starting at position 2526 of SEQ ID NO: 1881009
uuugaagaaucucuguuaa

SEQ ID NO: 2010895 - RNA, 19 nt, Artificial Sequence
  Description of Artificial Sequence: Synthetic oligonucleotide
  Antisense strand to SEQ ID NO: 2010894
uuaacagagauucuucaaa

SEQ ID NO: 2010896 - RNA, 19 nt, Artificial Sequence
  Description of Artificial Sequence: Synthetic oligonucleotide
  Sense strand starting at position 2528 of SEQ ID NO: 1881009
ugaagaaucucuguuaaag

SEQ ID NO: 2010897 - RNA, 19 nt, Artificial Sequence
  Description of Artificial Sequence: Synthetic oligonucleotide
  Antisense strand to SEQ ID NO: 2010896
cuuuaacagagauucuuca

SEQ ID NO: 2010898 - RNA, 19 nt, Artificial Sequence
  Description of Artificial Sequence: Synthetic oligonucleotide
  Sense strand starting at position 2559 of SEQ ID NO: 1881009
cccauaugcuaaucguaag

SEQ ID NO: 2010899 - RNA, 19 nt, Artificial Sequence
  Description of Artificial Sequence: Synthetic oligonucleotide
  Antisense strand to SEQ ID NO: 2010898
cuuacgauuagcauauggg

SEQ ID NO: 2010900 - RNA, 19 nt, Artificial Sequence
  Description of Artificial Sequence: Synthetic oligonucleotide
  Sense strand starting at position 2578 of SEQ ID NO: 1881009
gagagaaguauaggcuagu

SEQ ID NO: 2010901 - RNA, 19 nt, Artificial Sequence
  Description of Artificial Sequence: Synthetic oligonucleotide
  Antisense strand to SEQ ID NO: 2010900
acuagccuauacuucucuc

SEQ ID NO: 2010902 - RNA, 19 nt, Artificial Sequence
  Description of Artificial Sequence: Synthetic oligonucleotide
  Sense strand starting at position 2579 of SEQ ID NO: 1881009
agagaaguauaggcuaguu

SEQ ID NO: 2010903 - RNA, 19 nt, Artificial Sequence
  Description of Artificial Sequence: Synthetic oligonucleotide
  Antisense strand to SEQ ID NO: 2010902
aacuagccuauacuucucu

SEQ ID NO: 2010904 - RNA, 19 nt, Artificial Sequence
  Description of Artificial Sequence: Synthetic oligonucleotide
  Sense strand starting at position 2581 of SEQ ID NO: 1881009
agaaguauaggcuaguuua

SEQ ID NO: 2010905 - RNA, 19 nt, Artificial Sequence
  Description of Artificial Sequence: Synthetic oligonucleotide
  Antisense strand to SEQ ID NO: 2010904
uaaacuagccuauacuucu

SEQ ID NO: 2010906 - RNA, 19 nt, Artificial Sequence
  Description of Artificial Sequence: Synthetic oligonucleotide
  Sense strand starting at position 2584 of SEQ ID NO: 1881009
aguauaggcuaguuuauau

SEQ ID NO: 2010907 - RNA, 19 nt, Artificial Sequence
  Description of Artificial Sequence: Synthetic oligonucleotide
  Antisense strand to SEQ ID NO: 2010906
auauaaacuagccuauacu

SEQ ID NO: 2010908 - RNA, 19 nt, Artificial Sequence
  Description of Artificial Sequence: Synthetic oligonucleotide
  Sense strand starting at position 2614 of SEQ ID NO: 1881009
aaaguuuggaggugccaua

SEQ ID NO: 2010909 - RNA, 19 nt, Artificial Sequence
  Description of Artificial Sequence: Synthetic oligonucleotide
  Antisense strand to SEQ ID NO: 2010908
uauggcaccuccaaacuuu

SEQ ID NO: 2010910 - RNA, 19 nt, Artificial Sequence
  Description of Artificial Sequence: Synthetic oligonucleotide
  Sense strand starting at position 2658 of SEQ ID NO: 1881009
augauuaugacuugagggu

SEQ ID NO: 2010911 - RNA, 19 nt, Artificial Sequence
  Description of Artificial Sequence: Synthetic oligonucleotide
  Antisense strand to SEQ ID NO: 2010910
acccucaagucauaaucau

SEQ ID NO: 2010912 - RNA, 19 nt, Artificial Sequence
  Description of Artificial Sequence: Synthetic oligonucleotide
  Sense strand starting at position 2667 of SEQ ID NO: 1881009
acuugaggguuggagaaau

SEQ ID NO: 2010913 - RNA, 19 nt, Artificial Sequence
  Description of Artificial Sequence: Synthetic oligonucleotide
  Antisense strand to SEQ ID NO: 2010912
auuucuccaacccucaagu

SEQ ID NO: 2010914 - RNA, 19 nt, Artificial Sequence
  Description of Artificial Sequence: Synthetic oligonucleotide
  Sense strand starting at position 2693 of SEQ ID NO: 1881009
ugaguaacuuuggcagacu

SEQ ID NO: 2010915 - RNA, 19 nt, Artificial Sequence
  Description of Artificial Sequence: Synthetic oligonucleotide
  Antisense strand to SEQ ID NO: 2010914
agucugccaaaguuacuca

SEQ ID NO: 2010916 - RNA, 19 nt, Artificial Sequence
  Description of Artificial Sequence: Synthetic oligonucleotide
  Sense strand starting at position 2696 of SEQ ID NO: 1881009
guaacuuuggcagacuaac

SEQ ID NO: 2010917 - RNA, 19 nt, Artificial Sequence
  Description of Artificial Sequence: Synthetic oligonucleotide
  Antisense strand to SEQ ID NO: 2010916
guuagucugccaaaguuac

SEQ ID NO: 2010918 - RNA, 19 nt, Artificial Sequence
  Description of Artificial Sequence: Synthetic oligonucleotide
  Sense strand starting at position 2719 of SEQ ID NO: 1881009
gucugcguucgugcagaau

SEQ ID NO: 2010919 - RNA, 19 nt, Artificial Sequence
  Description of Artificial Sequence: Synthetic oligonucleotide
  Antisense strand to SEQ ID NO: 2010918
auucugcacgaacgcagac

SEQ ID NO: 2010920 - RNA, 19 nt, Artificial Sequence
  Description of Artificial Sequence: Synthetic oligonucleotide
  Sense strand starting at position 2757 of SEQ ID NO: 1881009
uguagaggucacuaccaua

SEQ ID NO: 2010921 - RNA, 19 nt, Artificial Sequence
  Description of Artificial Sequence: Synthetic oligonucleotide
  Antisense strand to SEQ ID NO: 2010920
uaugguagugaccucuaca

SEQ ID NO: 2010922 - RNA, 19 nt, Artificial Sequence
  Description of Artificial Sequence: Synthetic oligonucleotide
  Sense strand starting at position 2760 of SEQ ID NO: 1881009
agaggucacuaccauauau

SEQ ID NO: 2010923 - RNA, 19 nt, Artificial Sequence
  Description of Artificial Sequence: Synthetic oligonucleotide
  Antisense strand to SEQ ID NO: 2010922
auauaugguagugaccucu

SEQ ID NO: 2010924 - RNA, 19 nt, Artificial Sequence
  Description of Artificial Sequence: Synthetic oligonucleotide
  Sense strand starting at position 2833 of SEQ ID NO: 1881009
augcacagccauugaauau

SEQ ID NO: 2010925 - RNA, 19 nt, Artificial Sequence
  Description of Artificial Sequence: Synthetic oligonucleotide
  Antisense strand to SEQ ID NO: 2010924
auauucaauggcugugcau

SEQ ID NO: 2010926 - RNA, 19 nt, Artificial Sequence
  Description of Artificial Sequence: Synthetic oligonucleotide
  Sense strand starting at position 2844 of SEQ ID NO: 1881009
uugaauaugcuagaguuaa

SEQ ID NO: 2010927 - RNA, 19 nt, Artificial Sequence
  Description of Artificial Sequence: Synthetic oligonucleotide
  Antisense strand to SEQ ID NO: 2010926
uuaacucuagcauauucaa

SEQ ID NO: 2010928 - RNA, 19 nt, Artificial Sequence
  Description of Artificial Sequence: Synthetic oligonucleotide
  Sense strand starting at position 2969 of SEQ ID NO: 1881009
cgacuucucuucccagaaa

SEQ ID NO: 2010929 - RNA, 19 nt, Artificial Sequence
  Description of Artificial Sequence: Synthetic oligonucleotide
  Antisense strand to SEQ ID NO: 2010928
uuucugggaagagaagucg

SEQ ID NO: 2010930 - RNA, 19 nt, Artificial Sequence
  Description of Artificial Sequence: Synthetic oligonucleotide
  Sense strand starting at position 3015 of SEQ ID NO: 1881009
agcgguaaauauuugccaa

SEQ ID NO: 2010931 - RNA, 19 nt, Artificial Sequence
  Description of Artificial Sequence: Synthetic oligonucleotide
  Antisense strand to SEQ ID NO: 2010930
uuggcaaauauuuaccgcu

SEQ ID NO: 2010932 - RNA, 19 nt, Artificial Sequence
  Description of Artificial Sequence: Synthetic oligonucleotide
  Sense strand starting at position 3016 of SEQ ID NO: 1881009
gcgguaaauauuugccaaa

SEQ ID NO: 2010933 - RNA, 19 nt, Artificial Sequence
  Description of Artificial Sequence: Synthetic oligonucleotide
  Antisense strand to SEQ ID NO: 2010932
uuuggcaaauauuuaccgc

SEQ ID NO: 2010934 - RNA, 19 nt, Artificial Sequence
  Description of Artificial Sequence: Synthetic oligonucleotide
  Sense strand starting at position 3068 of SEQ ID NO: 1881009
gcccucuagugggaaagaa

SEQ ID NO: 2010935 - RNA, 19 nt, Artificial Sequence
  Description of Artificial Sequence: Synthetic oligonucleotide
  Antisense strand to SEQ ID NO: 2010934
uucuuucccacuagagggc

SEQ ID NO: 2010936 - RNA, 19 nt, Artificial Sequence
  Description of Artificial Sequence: Synthetic oligonucleotide
  Sense strand starting at position 3104 of SEQ ID NO: 1881009
ggcugcuuugaccaucaca

SEQ ID NO: 2010937 - RNA, 19 nt, Artificial Sequence
  Description of Artificial Sequence: Synthetic oligonucleotide
  Antisense strand to SEQ ID NO: 2010936
ugugauggucaaagcagcc

SEQ ID NO: 2010938 - RNA, 19 nt, Artificial Sequence
  Description of Artificial Sequence: Synthetic oligonucleotide
  Sense strand starting at position 3202 of SEQ ID NO: 1881009
ugggcucauccagacacuu

SEQ ID NO: 2010939 - RNA, 19 nt, Artificial Sequence
  Description of Artificial Sequence: Synthetic oligonucleotide
  Antisense strand to SEQ ID NO: 2010938
aagugucuggaugagccca

SEQ ID NO: 2010940 - RNA, 19 nt, Artificial Sequence
  Description of Artificial Sequence: Synthetic oligonucleotide
  Sense strand starting at position 3233 of SEQ ID NO: 1881009
caagguguccuguggaaau

SEQ ID NO: 2010941 - RNA, 19 nt, Artificial Sequence
  Description of Artificial Sequence: Synthetic oligonucleotide
  Antisense strand to SEQ ID NO: 2010940
auuuccacaggacaccuug

SEQ ID NO: 2010942 - RNA, 19 nt, Artificial Sequence
  Description of Artificial Sequence: Synthetic oligonucleotide
  Sense strand starting at position 3243 of SEQ ID NO: 1881009
uguggaaauuucgagauuc

SEQ ID NO: 2010943 - RNA, 19 nt, Artificial Sequence
  Description of Artificial Sequence: Synthetic oligonucleotide
  Antisense strand to SEQ ID NO: 2010942
gaaucucgaaauuuccaca

SEQ ID NO: 2010944 - RNA, 19 nt, Artificial Sequence
  Description of Artificial Sequence: Synthetic oligonucleotide
  Sense strand starting at position 3301 of SEQ ID NO: 1881009
ggguccugaucugcaagua

SEQ ID NO: 2010945 - RNA, 19 nt, Artificial Sequence
  Description of Artificial Sequence: Synthetic oligonucleotide
  Antisense strand to SEQ ID NO: 2010944
uacuugcagaucaggaccc

SEQ ID NO: 2010946 - RNA, 19 nt, Artificial Sequence
  Description of Artificial Sequence: Synthetic oligonucleotide
  Sense strand starting at position 3464 of SEQ ID NO: 1881009
ugccaacugguaugucaau

SEQ ID NO: 2010947 - RNA, 19 nt, Artificial Sequence
  Description of Artificial Sequence: Synthetic oligonucleotide
  Antisense strand to SEQ ID NO: 2010946
auugacauaccaguuggca

SEQ ID NO: 2010948 - RNA, 19 nt, Artificial Sequence
  Description of Artificial Sequence: Synthetic oligonucleotide
  Sense strand starting at position 3465 of SEQ ID NO: 1881009
gccaacugguaugucaauu

SEQ ID NO: 2010949 - RNA, 19 nt, Artificial Sequence
  Description of Artificial Sequence: Synthetic oligonucleotide
  Antisense strand to SEQ ID NO: 2010948
aauugacauaccaguuggc

SEQ ID NO: 2010950 - RNA, 19 nt, Artificial Sequence
  Description of Artificial Sequence: Synthetic oligonucleotide
  Sense strand starting at position 60 of SEQ ID NO: 1881010
cugggaagucagggucuau

SEQ ID NO: 2010951 - RNA, 19 nt, Artificial Sequence
  Description of Artificial Sequence: Synthetic oligonucleotide
  Antisense strand to SEQ ID NO: 2010950
auagacccugacuucccag

SEQ ID NO: 2010952 - RNA, 19 nt, Artificial Sequence
  Description of Artificial Sequence: Synthetic oligonucleotide
  Sense strand starting at position 123 of SEQ ID NO: 1881010
gggcaagcaaucugaggaa

SEQ ID NO: 2010953 - RNA, 19 nt, Artificial Sequence
  Description of Artificial Sequence: Synthetic oligonucleotide
  Antisense strand to SEQ ID NO: 2010952
uuccucagauugcuugccc

SEQ ID NO: 2010954 - RNA, 19 nt, Artificial Sequence
  Description of Artificial Sequence: Synthetic oligonucleotide
  Sense strand starting at position 135 of SEQ ID NO: 1881010
ugaggaaucucaguaugca

SEQ ID NO: 2010955 - RNA, 19 nt, Artificial Sequence
  Description of Artificial Sequence: Synthetic oligonucleotide
  Antisense strand to SEQ ID NO: 2010954
ugcauacugagauuccuca

SEQ ID NO: 2010956 - RNA, 19 nt, Artificial Sequence
  Description of Artificial Sequence: Synthetic oligonucleotide
  Sense strand starting at position 176 of SEQ ID NO: 1881010
agguucaaaucaggaguga

SEQ ID NO: 2010957 - RNA, 19 nt, Artificial Sequence
  Description of Artificial Sequence: Synthetic oligonucleotide
  Antisense strand to SEQ ID NO: 2010956
ucacuccugauuugaaccu

SEQ ID NO: 2010958 - RNA, 19 nt, Artificial Sequence
  Description of Artificial Sequence: Synthetic oligonucleotide
  Sense strand starting at position 540 of SEQ ID NO: 1881010
acagcucaucuguacuaca

SEQ ID NO: 2010959 - RNA, 19 nt, Artificial Sequence
  Description of Artificial Sequence: Synthetic oligonucleotide
  Antisense strand to SEQ ID NO: 2010958
uguaguacagaugagcugu

SEQ ID NO: 2010960 - RNA, 19 nt, Artificial Sequence
  Description of Artificial Sequence: Synthetic oligonucleotide
  Sense strand starting at position 660 of SEQ ID NO: 1881010
agguuccagcucuacuaua

SEQ ID NO: 2010961 - RNA, 19 nt, Artificial Sequence
  Description of Artificial Sequence: Synthetic oligonucleotide
  Antisense strand to SEQ ID NO: 2010960
uauaguagagcuggaaccu

SEQ ID NO: 2010962 - RNA, 19 nt, Artificial Sequence
  Description of Artificial Sequence: Synthetic oligonucleotide
  Sense strand starting at position 838 of SEQ ID NO: 1881010
cccaaauauggugguuacu

SEQ ID NO: 2010963 - RNA, 19 nt, Artificial Sequence
  Description of Artificial Sequence: Synthetic oligonucleotide
  Antisense strand to SEQ ID NO: 2010962
aguaaccaccauauuuggg

SEQ ID NO: 2010964 - RNA, 19 nt, Artificial Sequence
  Description of Artificial Sequence: Synthetic oligonucleotide
  Sense strand starting at position 844 of SEQ ID NO: 1881010
uauggugguuacuucuaga

SEQ ID NO: 2010965 - RNA, 19 nt, Artificial Sequence
  Description of Artificial Sequence: Synthetic oligonucleotide
  Antisense strand to SEQ ID NO: 2010964
ucuagaaguaaccaccaua

SEQ ID NO: 2010966 - RNA, 19 nt, Artificial Sequence
  Description of Artificial Sequence: Synthetic oligonucleotide
  Sense strand starting at position 885 of SEQ ID NO: 1881010
guucucagcucuccgguaa

SEQ ID NO: 2010967 - RNA, 19 nt, Artificial Sequence
  Description of Artificial Sequence: Synthetic oligonucleotide
  Antisense strand to SEQ ID NO: 2010966
uuaccggagagcugagaac

SEQ ID NO: 2010968 - RNA, 19 nt, Artificial Sequence
  Description of Artificial Sequence: Synthetic oligonucleotide
  Sense strand starting at position 889 of SEQ ID NO: 1881010
ucagcucuccgguaagaaa

SEQ ID NO: 2010969 - RNA, 19 nt, Artificial Sequence
  Description of Artificial Sequence: Synthetic oligonucleotide
  Antisense strand to SEQ ID NO: 2010968
uuucuuaccggagagcuga

SEQ ID NO: 2010970 - RNA, 19 nt, Artificial Sequence
  Description of Artificial Sequence: Synthetic oligonucleotide
  Sense strand starting at position 1005 of SEQ ID NO: 1881010
gagcuugcccauuggacuu

SEQ ID NO: 2010971 - RNA, 19 nt, Artificial Sequence
  Description of Artificial Sequence: Synthetic oligonucleotide
  Antisense strand to SEQ ID NO: 2010970
aaguccaaugggcaagcuc

SEQ ID NO: 2010972 - RNA, 19 nt, Artificial Sequence
  Description of Artificial Sequence: Synthetic oligonucleotide
  Sense strand starting at position 1058 of SEQ ID NO: 1881010
gucuuuauagccuggauga

SEQ ID NO: 2010973 - RNA, 19 nt, Artificial Sequence
  Description of Artificial Sequence: Synthetic oligonucleotide
  Antisense strand to SEQ ID NO: 2010972
ucauccaggcuauaaagac

SEQ ID NO: 2010974 - RNA, 19 nt, Artificial Sequence
  Description of Artificial Sequence: Synthetic oligonucleotide
  Sense strand starting at position 1059 of SEQ ID NO: 1881010
ucuuuauagccuggaugaa

SEQ ID NO: 2010975 - RNA, 19 nt, Artificial Sequence
  Description of Artificial Sequence: Synthetic oligonucleotide
  Antisense strand to SEQ ID NO: 2010974
uucauccaggcuauaaaga

SEQ ID NO: 2010976 - RNA, 19 nt, Artificial Sequence
  Description of Artificial Sequence: Synthetic oligonucleotide
  Sense strand starting at position 1071 of SEQ ID NO: 1881010
ggaugaaauuuguaucuau

SEQ ID NO: 2010977 - RNA, 19 nt, Artificial Sequence
  Description of Artificial Sequence: Synthetic oligonucleotide
  Antisense strand to SEQ ID NO: 2010976
auagauacaaauuucaucc

SEQ ID NO: 2010978 - RNA, 19 nt, Artificial Sequence
  Description of Artificial Sequence: Synthetic oligonucleotide
  Sense strand starting at position 1233 of SEQ ID NO: 1881010
aaaguauaaguaugugcau

SEQ ID NO: 2010979 - RNA, 19 nt, Artificial Sequence
  Description of Artificial Sequence: Synthetic oligonucleotide
  Antisense strand to SEQ ID NO: 2010978
augcacauacuuauacuuu

SEQ ID NO: 2010980 - RNA, 19 nt, Artificial Sequence
  Description of Artificial Sequence: Synthetic oligonucleotide
  Sense strand starting at position 1234 of SEQ ID NO: 1881010
aaguauaaguaugugcaua

SEQ ID NO: 2010981 - RNA, 19 nt, Artificial Sequence
  Description of Artificial Sequence: Synthetic oligonucleotide
  Antisense strand to SEQ ID NO: 2010980
uaugcacauacuuauacuu

SEQ ID NO: 2010982 - RNA, 19 nt, Artificial Sequence
  Description of Artificial Sequence: Synthetic oligonucleotide
  Sense strand starting at position 1236 of SEQ ID NO: 1881010
guauaaguaugugcauaca

SEQ ID NO: 2010983 - RNA, 19 nt, Artificial Sequence
  Description of Artificial Sequence: Synthetic oligonucleotide
  Antisense strand to SEQ ID NO: 2010982
uguaugcacauacuuauac

SEQ ID NO: 2010984 - RNA, 19 nt, Artificial Sequence
  Description of Artificial Sequence: Synthetic oligonucleotide
  Sense strand starting at position 1239 of SEQ ID NO: 1881010
uaaguaugugcauacaaug

SEQ ID NO: 2010985 - RNA, 19 nt, Artificial Sequence
  Description of Artificial Sequence: Synthetic oligonucleotide
  Antisense strand to SEQ ID NO: 2010984
cauuguaugcacauacuua

SEQ ID NO: 2010986 - RNA, 19 nt, Artificial Sequence
  Description of Artificial Sequence: Synthetic oligonucleotide
  Sense strand starting at position 1250 of SEQ ID NO: 1881010
auacaauguuuaggacuua

SEQ ID NO: 2010987 - RNA, 19 nt, Artificial Sequence
  Description of Artificial Sequence: Synthetic oligonucleotide
  Antisense strand to SEQ ID NO: 2010986
uaaguccuaaacauuguau

SEQ ID NO: 2010988 - RNA, 19 nt, Artificial Sequence
  Description of Artificial Sequence: Synthetic oligonucleotide
  Sense strand starting at position 1267 of SEQ ID NO: 1881010
uaacaauuauucgucguuu

SEQ ID NO: 2010989 - RNA, 19 nt, Artificial Sequence
  Description of Artificial Sequence: Synthetic oligonucleotide
  Antisense strand to SEQ ID NO: 2010988
aaacgacgaauaauuguua

SEQ ID NO: 2010990 - RNA, 19 nt, Artificial Sequence
  Description of Artificial Sequence: Synthetic oligonucleotide
  Sense strand starting at position 1268 of SEQ ID NO: 1881010
aacaauuauucgucguuua

SEQ ID NO: 2010991 - RNA, 19 nt, Artificial Sequence
  Description of Artificial Sequence: Synthetic oligonucleotide
  Antisense strand to SEQ ID NO: 2010990
uaaacgacgaauaauuguu

SEQ ID NO: 2010992 - RNA, 19 nt, Artificial Sequence
  Description of Artificial Sequence: Synthetic oligonucleotide
  Sense strand starting at position 1269 of SEQ ID NO: 1881010
acaauuauucgucguuuau

SEQ ID NO: 2010993 - RNA, 19 nt, Artificial Sequence
  Description of Artificial Sequence: Synthetic oligonucleotide
  Antisense strand to SEQ ID NO: 2010992
auaaacgacgaauaauugu

SEQ ID NO: 2010994 - RNA, 19 nt, Artificial Sequence
  Description of Artificial Sequence: Synthetic oligonucleotide
  Sense strand starting at position 1273 of SEQ ID NO: 1881010
uuauucgucguuuaucuua

SEQ ID NO: 2010995 - RNA, 19 nt, Artificial Sequence
  Description of Artificial Sequence: Synthetic oligonucleotide
  Antisense strand to SEQ ID NO: 2010994
uaagauaaacgacgaauaa

SEQ ID NO: 2010996 - RNA, 19 nt, Artificial Sequence
  Description of Artificial Sequence: Synthetic oligonucleotide
  Sense strand starting at position 1737 of SEQ ID NO: 1881010
aaagaaggcugguaccauu

SEQ ID NO: 2010997 - RNA, 19 nt, Artificial Sequence
  Description of Artificial Sequence: Synthetic oligonucleotide
  Antisense strand to SEQ ID NO: 2010996
aaugguaccagccuucuuu

SEQ ID NO: 2010998 - RNA, 19 nt, Artificial Sequence
  Description of Artificial Sequence: Synthetic oligonucleotide
  Sense strand starting at position 1758 of SEQ ID NO: 1881010
cggcuuucccuagacagua

SEQ ID NO: 2010999 - RNA, 19 nt, Artificial Sequence
  Description of Artificial Sequence: Synthetic oligonucleotide
  Antisense strand to SEQ ID NO: 2010998
uacugucuagggaaagccg

SEQ ID NO: 2011000 - RNA, 19 nt, Artificial Sequence
  Description of Artificial Sequence: Synthetic oligonucleotide
  Sense strand starting at position 1807 of SEQ ID NO: 1881010
gggccuuagcgagggaaau

SEQ ID NO: 2011001 - RNA, 19 nt, Artificial Sequence
  Description of Artificial Sequence: Synthetic oligonucleotide
  Antisense strand to SEQ ID NO: 2011000
auuucccucgcuaaggccc

SEQ ID NO: 2011002 - RNA, 19 nt, Artificial Sequence
  Description of Artificial Sequence: Synthetic oligonucleotide
  Sense strand starting at position 1808 of SEQ ID NO: 1881010
ggccuuagcgagggaaaug

SEQ ID NO: 2011003 - RNA, 19 nt, Artificial Sequence
  Description of Artificial Sequence: Synthetic oligonucleotide
  Antisense strand to SEQ ID NO: 2011002
cauuucccucgcuaaggcc

SEQ ID NO: 2011004 - RNA, 19 nt, Artificial Sequence
  Description of Artificial Sequence: Synthetic oligonucleotide
  Sense strand starting at position 2082 of SEQ ID NO: 1881010
gggagaguuuagcauauug

SEQ ID NO: 2011005 - RNA, 19 nt, Artificial Sequence
  Description of Artificial Sequence: Synthetic oligonucleotide
  Antisense strand to SEQ ID NO: 2011004
caauaugcuaaacucuccc

SEQ ID NO: 2011006 - RNA, 19 nt, Artificial Sequence
  Description of Artificial Sequence: Synthetic oligonucleotide
  Sense strand starting at position 2161 of SEQ ID NO: 1881010
cucuacauugaggguaaua

SEQ ID NO: 2011007 - RNA, 19 nt, Artificial Sequence
  Description of Artificial Sequence: Synthetic oligonucleotide
  Antisense strand to SEQ ID NO: 2011006
uauuacccucaauguagag

SEQ ID NO: 2011008 - RNA, 19 nt, Artificial Sequence
  Description of Artificial Sequence: Synthetic oligonucleotide
  Sense strand starting at position 2611 of SEQ ID NO: 1881010
gagccagauuaaguaauuc

SEQ ID NO: 2011009 - RNA, 19 nt, Artificial Sequence
  Description of Artificial Sequence: Synthetic oligonucleotide
  Antisense strand to SEQ ID NO: 2011008
gaauuacuuaaucuggcuc

SEQ ID NO: 2011010 - RNA, 19 nt, Artificial Sequence
  Description of Artificial Sequence: Synthetic oligonucleotide
  Sense strand starting at position 2742 of SEQ ID NO: 1881010
gcacauaagcggcauguaa

SEQ ID NO: 2011011 - RNA, 19 nt, Artificial Sequence
  Description of Artificial Sequence: Synthetic oligonucleotide
  Antisense strand to SEQ ID NO: 2011010
uuacaugccgcuuaugugc

SEQ ID NO: 2011012 - RNA, 19 nt, Artificial Sequence
  Description of Artificial Sequence: Synthetic oligonucleotide
  Sense strand starting at position 2750 of SEQ ID NO: 1881010
gcggcauguaaacgcuaau

SEQ ID NO: 2011013 - RNA, 19 nt, Artificial Sequence
  Description of Artificial Sequence: Synthetic oligonucleotide
  Antisense strand to SEQ ID NO: 2011012
auuagcguuuacaugccgc

SEQ ID NO: 2011014 - RNA, 19 nt, Artificial Sequence
  Description of Artificial Sequence: Synthetic oligonucleotide
  Sense strand starting at position 2845 of SEQ ID NO: 1881010
uaagaugaguccugaucag

SEQ ID NO: 2011015 - RNA, 19 nt, Artificial Sequence
  Description of Artificial Sequence: Synthetic oligonucleotide
  Antisense strand to SEQ ID NO: 2011014
cugaucaggacucaucuua

SEQ ID NO: 2011016 - RNA, 19 nt, Artificial Sequence
  Description of Artificial Sequence: Synthetic oligonucleotide
  Sense strand starting at position 2920 of SEQ ID NO: 1881010
aggagagaguugcaucaca

SEQ ID NO: 2011017 - RNA, 19 nt, Artificial Sequence
  Description of Artificial Sequence: Synthetic oligonucleotide
  Antisense strand to SEQ ID NO: 2011016
ugugaugcaacucucuccu

SEQ ID NO: 2011018 - RNA, 19 nt, Artificial Sequence
  Description of Artificial Sequence: Synthetic oligonucleotide
  Sense strand starting at position 2925 of SEQ ID NO: 1881010
agaguugcaucacaaauca

SEQ ID NO: 2011019 - RNA, 19 nt, Artificial Sequence
  Description of Artificial Sequence: Synthetic oligonucleotide
  Antisense strand to SEQ ID NO: 2011018
ugauuugugaugcaacucu

SEQ ID NO: 2011020 - RNA, 19 nt, Artificial Sequence
  Description of Artificial Sequence: Synthetic oligonucleotide
  Sense strand starting at position 2971 of SEQ ID NO: 1881010
gaaacauguuucuuggcag

SEQ ID NO: 2011021 - RNA, 19 nt, Artificial Sequence
  Description of Artificial Sequence: Synthetic oligonucleotide
  Antisense strand to SEQ ID NO: 2011020
cugccaagaaacauguuuc

SEQ ID NO: 2011022 - RNA, 19 nt, Artificial Sequence
  Description of Artificial Sequence: Synthetic oligonucleotide
  Sense strand starting at position 3082 of SEQ ID NO: 1881010
uggcgaaacuuaucucuac

SEQ ID NO: 2011023 - RNA, 19 nt, Artificial Sequence
  Description of Artificial Sequence: Synthetic oligonucleotide
  Antisense strand to SEQ ID NO: 2011022
guagagauaaguuucgcca

SEQ ID NO: 2011024 - RNA, 19 nt, Artificial Sequence
  Description of Artificial Sequence: Synthetic oligonucleotide
  Sense strand starting at position 3578 of SEQ ID NO: 1881010
agggauuacaggcguauaa

SEQ ID NO: 2011025 - RNA, 19 nt, Artificial Sequence
  Description of Artificial Sequence: Synthetic oligonucleotide
  Antisense strand to SEQ ID NO: 2011024
uuauacgccuguaaucccu

SEQ ID NO: 2011026 - RNA, 19 nt, Artificial Sequence
  Description of Artificial Sequence: Synthetic oligonucleotide
  Sense strand starting at position 3580 of SEQ ID NO: 1881010
ggauuacaggcguauaaac

SEQ ID NO: 2011027 - RNA, 19 nt, Artificial Sequence
  Description of Artificial Sequence: Synthetic oligonucleotide
  Antisense strand to SEQ ID NO: 2011026
guuuauacgccuguaaucc

SEQ ID NO: 2011028 - RNA, 19 nt, Artificial Sequence
  Description of Artificial Sequence: Synthetic oligonucleotide
  Sense strand starting at position 3675 of SEQ ID NO: 1881010
gucuguguuucccuggaug

SEQ ID NO: 2011029 - RNA, 19 nt, Artificial Sequence
  Description of Artificial Sequence: Synthetic oligonucleotide
  Antisense strand to SEQ ID NO: 2011028
cauccagggaaacacagac

SEQ ID NO: 2011030 - RNA, 19 nt, Artificial Sequence
  Description of Artificial Sequence: Synthetic oligonucleotide
  Sense strand starting at position 337 of SEQ ID NO: 1881011
guaccagccuucuuugaug

SEQ ID NO: 2011031 - RNA, 19 nt, Artificial Sequence
  Description of Artificial Sequence: Synthetic oligonucleotide
  Antisense strand to SEQ ID NO: 2011030
caucaaagaaggcugguac

SEQ ID NO: 2011032 - RNA, 19 nt, Artificial Sequence
  Description of Artificial Sequence: Synthetic oligonucleotide
  Sense strand starting at position 365 of SEQ ID NO: 1881011
agucaagaccgguagucuu

SEQ ID NO: 2011033 - RNA, 19 nt, Artificial Sequence
  Description of Artificial Sequence: Synthetic oligonucleotide
  Antisense strand to SEQ ID NO: 2011032
aagacuaccggucuugacu

SEQ ID NO: 2011034 - RNA, 19 nt, Artificial Sequence
  Description of Artificial Sequence: Synthetic oligonucleotide
  Sense strand starting at position 425 of SEQ ID NO: 1881011
gagagaccgugucuuggau

SEQ ID NO: 2011035 - RNA, 19 nt, Artificial Sequence
  Description of Artificial Sequence: Synthetic oligonucleotide
  Antisense strand to SEQ ID NO: 2011034
auccaagacacggucucuc

SEQ ID NO: 2011036 - RNA, 19 nt, Artificial Sequence
  Description of Artificial Sequence: Synthetic oligonucleotide
  Sense strand starting at position 431 of SEQ ID NO: 1881011
ccgugucuuggauagaauu

SEQ ID NO: 2011037 - RNA, 19 nt, Artificial Sequence
  Description of Artificial Sequence: Synthetic oligonucleotide
  Antisense strand to SEQ ID NO: 2011036
aauucuauccaagacacgg

SEQ ID NO: 2011038 - RNA, 19 nt, Artificial Sequence
  Description of Artificial Sequence: Synthetic oligonucleotide
  Sense strand starting at position 781 of SEQ ID NO: 1881011
ccaguuaaauuugaguuaa

SEQ ID NO: 2011039 - RNA, 19 nt, Artificial Sequence
  Description of Artificial Sequence: Synthetic oligonucleotide
  Antisense strand to SEQ ID NO: 2011038
uuaacucaaauuuaacugg

SEQ ID NO: 2011040 - RNA, 19 nt, Artificial Sequence
  Description of Artificial Sequence: Synthetic oligonucleotide
  Sense strand starting at position 807 of SEQ ID NO: 1881011
gacgaauaauuguuaaguc

SEQ ID NO: 2011041 - RNA, 19 nt, Artificial Sequence
  Description of Artificial Sequence: Synthetic oligonucleotide
  Antisense strand to SEQ ID NO: 2011040
gacuuaacaauuauucguc

SEQ ID NO: 2011042 - RNA, 19 nt, Artificial Sequence
  Description of Artificial Sequence: Synthetic oligonucleotide
  Sense strand starting at position 983 of SEQ ID NO: 1881011
cuuguccaucugggaaaua

SEQ ID NO: 2011043 - RNA, 19 nt, Artificial Sequence
  Description of Artificial Sequence: Synthetic oligonucleotide
  Antisense strand to SEQ ID NO: 2011042
uauuucccagauggacaag

SEQ ID NO: 2011044 - RNA, 19 nt, Artificial Sequence
  Description of Artificial Sequence: Synthetic oligonucleotide
  Sense strand starting at position 1034 of SEQ ID NO: 1881011
cugucuuaguugcuaagau

SEQ ID NO: 2011045 - RNA, 19 nt, Artificial Sequence
  Description of Artificial Sequence: Synthetic oligonucleotide
  Antisense strand to SEQ ID NO: 2011044
aucuuagcaacuaagacag

SEQ ID NO: 2011046 - RNA, 19 nt, Artificial Sequence
  Description of Artificial Sequence: Synthetic oligonucleotide
  Sense strand starting at position 1181 of SEQ ID NO: 1881011
uuucuuaccggagagcuga

SEQ ID NO: 2011047 - RNA, 19 nt, Artificial Sequence
  Description of Artificial Sequence: Synthetic oligonucleotide
  Antisense strand to SEQ ID NO: 2011046
ucagcucuccgguaagaaa

SEQ ID NO: 2011048 - RNA, 19 nt, Artificial Sequence
  Description of Artificial Sequence: Synthetic oligonucleotide
  Sense strand starting at position 1257 of SEQ ID NO: 1881011
guaaaccgguguuugagau

SEQ ID NO: 2011049 - RNA, 19 nt, Artificial Sequence
  Description of Artificial Sequence: Synthetic oligonucleotide
  Antisense strand to SEQ ID NO: 2011048
aucucaaacaccgguuuac

SEQ ID NO: 2011050 - RNA, 19 nt, Artificial Sequence
  Description of Artificial Sequence: Synthetic oligonucleotide
  Sense strand starting at position 1265 of SEQ ID NO: 1881011
guguuugagaucuguguug

SEQ ID NO: 2011051 - RNA, 19 nt, Artificial Sequence
  Description of Artificial Sequence: Synthetic oligonucleotide
  Antisense strand to SEQ ID NO: 2011050
caacacagaucucaaacac

SEQ ID NO: 2011052 - RNA, 19 nt, Artificial Sequence
  Description of Artificial Sequence: Synthetic oligonucleotide
  Sense strand starting at position 1267 of SEQ ID NO: 1881011
guuugagaucuguguugca

SEQ ID NO: 2011053 - RNA, 19 nt, Artificial Sequence
  Description of Artificial Sequence: Synthetic oligonucleotide
  Antisense strand to SEQ ID NO: 2011052
ugcaacacagaucucaaac

SEQ ID NO: 2011054 - RNA, 19 nt, Artificial Sequence
  Description of Artificial Sequence: Synthetic oligonucleotide
  Sense strand starting at position 1376 of SEQ ID NO: 1881011
gagaaauggagguguccca

SEQ ID NO: 2011055 - RNA, 19 nt, Artificial Sequence
  Description of Artificial Sequence: Synthetic oligonucleotide
  Antisense strand to SEQ ID NO: 2011054
ugggacaccuccauuucuc

SEQ ID NO: 2011056 - RNA, 19 nt, Artificial Sequence
  Description of Artificial Sequence: Synthetic oligonucleotide
  Sense strand starting at position 1455 of SEQ ID NO: 1881011
aguccauacuugcugauga

SEQ ID NO: 2011057 - RNA, 19 nt, Artificial Sequence
  Description of Artificial Sequence: Synthetic oligonucleotide
  Antisense strand to SEQ ID NO: 2011056
ucaucagcaaguauggacu

SEQ ID NO: 2011058 - RNA, 19 nt, Artificial Sequence
  Description of Artificial Sequence: Synthetic oligonucleotide
  Sense strand starting at position 1457 of SEQ ID NO: 1881011
uccauacuugcugaugaag

SEQ ID NO: 2011059 - RNA, 19 nt, Artificial Sequence
  Description of Artificial Sequence: Synthetic oligonucleotide
  Antisense strand to SEQ ID NO: 2011058
cuucaucagcaaguaugga

SEQ ID NO: 2011060 - RNA, 19 nt, Artificial Sequence
  Description of Artificial Sequence: Synthetic oligonucleotide
  Sense strand starting at position 1484 of SEQ ID NO: 1881011
caacauuuaugguaggcau

SEQ ID NO: 2011061 - RNA, 19 nt, Artificial Sequence
  Description of Artificial Sequence: Synthetic oligonucleotide
  Antisense strand to SEQ ID NO: 2011060
augccuaccauaaauguug

SEQ ID NO: 2011062 - RNA, 19 nt, Artificial Sequence
  Description of Artificial Sequence: Synthetic oligonucleotide
  Sense strand starting at position 1495 of SEQ ID NO: 1881011
guaggcauuuauuaaagua

SEQ ID NO: 2011063 - RNA, 19 nt, Artificial Sequence
  Description of Artificial Sequence: Synthetic oligonucleotide
  Antisense strand to SEQ ID NO: 2011062
uacuuuaauaaaugccuac

SEQ ID NO: 2011064 - RNA, 19 nt, Artificial Sequence
  Description of Artificial Sequence: Synthetic oligonucleotide
  Sense strand starting at position 1551 of SEQ ID NO: 1881011
gggucuuuguuguuccuau

SEQ ID NO: 2011065 - RNA, 19 nt, Artificial Sequence
  Description of Artificial Sequence: Synthetic oligonucleotide
  Antisense strand to SEQ ID NO: 2011064
auaggaacaacaaagaccc

SEQ ID NO: 2011066 - RNA, 19 nt, Artificial Sequence
  Description of Artificial Sequence: Synthetic oligonucleotide
  Sense strand starting at position 1638 of SEQ ID NO: 1881011
uggcuaugggcucaguuau

SEQ ID NO: 2011067 - RNA, 19 nt, Artificial Sequence
  Description of Artificial Sequence: Synthetic oligonucleotide
  Antisense strand to SEQ ID NO: 2011066
auaacugagcccauagcca

SEQ ID NO: 2011068 - RNA, 19 nt, Artificial Sequence
  Description of Artificial Sequence: Synthetic oligonucleotide
  Sense strand starting at position 1705 of SEQ ID NO: 1881011
gguggugugaccuaggacu

SEQ ID NO: 2011069 - RNA, 19 nt, Artificial Sequence
  Description of Artificial Sequence: Synthetic oligonucleotide
  Antisense strand to SEQ ID NO: 2011068
aguccuaggucacaccacc

SEQ ID NO: 2011070 - RNA, 19 nt, Artificial Sequence
  Description of Artificial Sequence: Synthetic oligonucleotide
  Sense strand starting at position 1880 of SEQ ID NO: 1881011
gccagacuuugcccucacu

SEQ ID NO: 2011071 - RNA, 19 nt, Artificial Sequence
  Description of Artificial Sequence: Synthetic oligonucleotide
  Antisense strand to SEQ ID NO: 2011070
agugagggcaaagucuggc

SEQ ID NO: 2011072 - RNA, 19 nt, Artificial Sequence
  Description of Artificial Sequence: Synthetic oligonucleotide
  Sense strand starting at position 1954 of SEQ ID NO: 1881011
gauugcuugcccugaggau

SEQ ID NO: 2011073 - RNA, 19 nt, Artificial Sequence
  Description of Artificial Sequence: Synthetic oligonucleotide
  Antisense strand to SEQ ID NO: 2011072
auccucagggcaagcaauc

SEQ ID NO: 2011074 - RNA, 19 nt, Artificial Sequence
  Description of Artificial Sequence: Synthetic oligonucleotide
  Sense strand starting at position 1969 of SEQ ID NO: 1881011
ggauguguucuggguuuga

SEQ ID NO: 2011075 - RNA, 19 nt, Artificial Sequence
  Description of Artificial Sequence: Synthetic oligonucleotide
  Antisense strand to SEQ ID NO: 2011074
ucaaacccagaacacaucc

SEQ ID NO: 2011076 - RNA, 19 nt, Artificial Sequence
  Description of Artificial Sequence: Synthetic oligonucleotide
  Sense strand starting at position 1978 of SEQ ID NO: 1881011
cuggguuugaccugauaaa

SEQ ID NO: 2011077 - RNA, 19 nt, Artificial Sequence
  Description of Artificial Sequence: Synthetic oligonucleotide
  Antisense strand to SEQ ID NO: 2011076
uuuaucaggucaaacccag

SEQ ID NO: 2011078 - RNA, 19 nt, Artificial Sequence
  Description of Artificial Sequence: Synthetic oligonucleotide
  Sense strand starting at position 2039 of SEQ ID NO: 1881011
ccagucucaugagauaaug

SEQ ID NO: 2011079 - RNA, 19 nt, Artificial Sequence
  Description of Artificial Sequence: Synthetic oligonucleotide
  Antisense strand to SEQ ID NO: 2011078
cauuaucucaugagacugg

SEQ ID NO: 2011080 - RNA, 19 nt, Artificial Sequence
  Description of Artificial Sequence: Synthetic oligonucleotide
  Sense strand starting at position 2223 of SEQ ID NO: 1881011
agcccacugguagaaauua

SEQ ID NO: 2011081 - RNA, 19 nt, Artificial Sequence
  Description of Artificial Sequence: Synthetic oligonucleotide
  Antisense strand to SEQ ID NO: 2011080
uaauuucuaccagugggcu

SEQ ID NO: 2011082 - RNA, 19 nt, Artificial Sequence
  Description of Artificial Sequence: Synthetic oligonucleotide
  Sense strand starting at position 2231 of SEQ ID NO: 1881011
gguagaaauuacucccucu

SEQ ID NO: 2011083 - RNA, 19 nt, Artificial Sequence
  Description of Artificial Sequence: Synthetic oligonucleotide
  Antisense strand to SEQ ID NO: 2011082
agagggaguaauuucuacc

SEQ ID NO: 2011084 - RNA, 19 nt, Artificial Sequence
  Description of Artificial Sequence: Synthetic oligonucleotide
  Sense strand starting at position 2340 of SEQ ID NO: 1881011
cggcauguggucugcagaa

SEQ ID NO: 2011085 - RNA, 19 nt, Artificial Sequence
  Description of Artificial Sequence: Synthetic oligonucleotide
  Antisense strand to SEQ ID NO: 2011084
uucugcagaccacaugccg

SEQ ID NO: 2011086 - RNA, 19 nt, Artificial Sequence
  Description of Artificial Sequence: Synthetic oligonucleotide
  Sense strand starting at position 2342 of SEQ ID NO: 1881011
gcauguggucugcagaaga

SEQ ID NO: 2011087 - RNA, 19 nt, Artificial Sequence
  Description of Artificial Sequence: Synthetic oligonucleotide
  Antisense strand to SEQ ID NO: 2011086
ucuucugcagaccacaugc

SEQ ID NO: 2011088 - RNA, 19 nt, Artificial Sequence
  Description of Artificial Sequence: Synthetic oligonucleotide
  Sense strand starting at position 3113 of SEQ ID NO: 1881011
gaugcaugucagugggcau

SEQ ID NO: 2011089 - RNA, 19 nt, Artificial Sequence
  Description of Artificial Sequence: Synthetic oligonucleotide
  Antisense strand to SEQ ID NO: 2011088
augcccacugacaugcauc

SEQ ID NO: 2011090 - RNA, 19 nt, Artificial Sequence
  Description of Artificial Sequence: Synthetic oligonucleotide
  Sense strand starting at position 3153 of SEQ ID NO: 1881011
cuguaaaguugagagauca

SEQ ID NO: 2011091 - RNA, 19 nt, Artificial Sequence
  Description of Artificial Sequence: Synthetic oligonucleotide
  Antisense strand to SEQ ID NO: 2011090
ugaucucucaacuuuacag

SEQ ID NO: 2011092 - RNA, 19 nt, Artificial Sequence
  Description of Artificial Sequence: Synthetic oligonucleotide
  Sense strand starting at position 3368 of SEQ ID NO: 1881011
gcugaucucagguguggua

SEQ ID NO: 2011093 - RNA, 19 nt, Artificial Sequence
  Description of Artificial Sequence: Synthetic oligonucleotide
  Antisense strand to SEQ ID NO: 2011092
uaccacaccugagaucagc

SEQ ID NO: 2011094 - RNA, 19 nt, Artificial Sequence
  Description of Artificial Sequence: Synthetic oligonucleotide
  Sense strand starting at position 3386 of SEQ ID NO: 1881011
accacauuggcccaagacu

SEQ ID NO: 2011095 - RNA, 19 nt, Artificial Sequence
  Description of Artificial Sequence: Synthetic oligonucleotide
  Antisense strand to SEQ ID NO: 2011094
agucuugggccaauguggu

SEQ ID NO: 2011096 - RNA, 19 nt, Artificial Sequence
  Description of Artificial Sequence: Synthetic oligonucleotide
  Sense strand starting at position 3430 of SEQ ID NO: 1881011
cucucaggucuucgagaga

SEQ ID NO: 2011097 - RNA, 19 nt, Artificial Sequence
  Description of Artificial Sequence: Synthetic oligonucleotide
  Antisense strand to SEQ ID NO: 2011096
ucucucgaagaccugagag

SEQ ID NO: 2011098 - RNA, 19 nt, Artificial Sequence
  Description of Artificial Sequence: Synthetic oligonucleotide
  Sense strand starting at position 3433 of SEQ ID NO: 1881011
ucaggucuucgagagauca

SEQ ID NO: 2011099 - RNA, 19 nt, Artificial Sequence
  Description of Artificial Sequence: Synthetic oligonucleotide
  Antisense strand to SEQ ID NO: 2011098
ugaucucucgaagaccuga

SEQ ID NO: 2011100 - RNA, 19 nt, Artificial Sequence
  Description of Artificial Sequence: Synthetic oligonucleotide
  Sense strand starting at position 3643 of SEQ ID NO: 1881011
uccguagaguccuuggaaa

SEQ ID NO: 2011101 - RNA, 19 nt, Artificial Sequence
  Description of Artificial Sequence: Synthetic oligonucleotide
  Antisense strand to SEQ ID NO: 2011100
uuuccaaggacucuacgga

SEQ ID NO: 2011102 - RNA, 19 nt, Artificial Sequence
  Description of Artificial Sequence: Synthetic oligonucleotide
  Sense strand starting at position 3670 of SEQ ID NO: 1881011
gcuauugcugcugucugua

SEQ ID NO: 2011103 - RNA, 19 nt, Artificial Sequence
  Description of Artificial Sequence: Synthetic oligonucleotide
  Antisense strand to SEQ ID NO: 2011102
uacagacagcagcaauagc

SEQ ID NO: 2011104 - RNA, 19 nt, Artificial Sequence
  Description of Artificial Sequence: Synthetic oligonucleotide
  Sense strand starting at position 3675 of SEQ ID NO: 1881011
ugcugcugucuguacuaau

SEQ ID NO: 2011105 - RNA, 19 nt, Artificial Sequence
  Description of Artificial Sequence: Synthetic oligonucleotide
  Antisense strand to SEQ ID NO: 2011104
auuaguacagacagcagca

SEQ ID NO: 2011106 - RNA, 19 nt, Artificial Sequence
  Description of Artificial Sequence: Synthetic oligonucleotide
  Sense strand starting at position 3724 of SEQ ID NO: 1881011
ggaguccucuccuugaucu

SEQ ID NO: 2011107 - RNA, 19 nt, Artificial Sequence
  Description of Artificial Sequence: Synthetic oligonucleotide
  Antisense strand to SEQ ID NO: 2011106
agaucaaggagaggacucc

SEQ ID NO: 2011108 - RNA, 19 nt, Artificial Sequence
  Description of Artificial Sequence: Synthetic oligonucleotide
  Sense strand starting at position 3794 of SEQ ID NO: 1881011
uuaguucuuccggugccua

SEQ ID NO: 2011109 - RNA, 19 nt, Artificial Sequence
  Description of Artificial Sequence: Synthetic oligonucleotide
  Antisense strand to SEQ ID NO: 2011108
uaggcaccggaagaacuaa

SEQ ID NO: 2011110 - RNA, 19 nt, Artificial Sequence
  Description of Artificial Sequence: Synthetic oligonucleotide
  Sense strand starting at position 10 of SEQ ID NO: 1881012
gguccuucugccuggaaua

SEQ ID NO: 2011111 - RNA, 19 nt, Artificial Sequence
  Description of Artificial Sequence: Synthetic oligonucleotide
  Antisense strand to SEQ ID NO: 2011110
uauuccaggcagaaggacc

SEQ ID NO: 2011112 - RNA, 19 nt, Artificial Sequence
  Description of Artificial Sequence: Synthetic oligonucleotide
  Sense strand starting at position 11 of SEQ ID NO: 1881012
guccuucugccuggaauac

SEQ ID NO: 2011113 - RNA, 19 nt, Artificial Sequence
  Description of Artificial Sequence: Synthetic oligonucleotide
  Antisense strand to SEQ ID NO: 2011112
guauuccaggcagaaggac

SEQ ID NO: 2011114 - RNA, 19 nt, Artificial Sequence
  Description of Artificial Sequence: Synthetic oligonucleotide
  Sense strand starting at position 38 of SEQ ID NO: 1881012
cccuaaauaucuguauugu

SEQ ID NO: 2011115 - RNA, 19 nt, Artificial Sequence
  Description of Artificial Sequence: Synthetic oligonucleotide
  Antisense strand to SEQ ID NO: 2011114
acaauacagauauuuaggg

SEQ ID NO: 2011116 - RNA, 19 nt, Artificial Sequence
  Description of Artificial Sequence: Synthetic oligonucleotide
  Sense strand starting at position 39 of SEQ ID NO: 1881012
ccuaaauaucuguauuguc

SEQ ID NO: 2011117 - RNA, 19 nt, Artificial Sequence
  Description of Artificial Sequence: Synthetic oligonucleotide
  Antisense strand to SEQ ID NO: 2011116
gacaauacagauauuuagg

SEQ ID NO: 2011118 - RNA, 19 nt, Artificial Sequence
  Description of Artificial Sequence: Synthetic oligonucleotide
  Sense strand starting at position 73 of SEQ ID NO: 1881012
ucagaagcaucuguucgaa

SEQ ID NO: 2011119 - RNA, 19 nt, Artificial Sequence
  Description of Artificial Sequence: Synthetic oligonucleotide
  Antisense strand to SEQ ID NO: 2011118
uucgaacagaugcuucuga

SEQ ID NO: 2011120 - RNA, 19 nt, Artificial Sequence
  Description of Artificial Sequence: Synthetic oligonucleotide
  Sense strand starting at position 75 of SEQ ID NO: 1881012
agaagcaucuguucgaaug

SEQ ID NO: 2011121 - RNA, 19 nt, Artificial Sequence
  Description of Artificial Sequence: Synthetic oligonucleotide
  Antisense strand to SEQ ID NO: 2011120
cauucgaacagaugcuucu

SEQ ID NO: 2011122 - RNA, 19 nt, Artificial Sequence
  Description of Artificial Sequence: Synthetic oligonucleotide
  Sense strand starting at position 85 of SEQ ID NO: 1881012
guucgaaugugacuugaga

SEQ ID NO: 2011123 - RNA, 19 nt, Artificial Sequence
  Description of Artificial Sequence: Synthetic oligonucleotide
  Antisense strand to SEQ ID NO: 2011122
ucucaagucacauucgaac

SEQ ID NO: 2011124 - RNA, 19 nt, Artificial Sequence
  Description of Artificial Sequence: Synthetic oligonucleotide
  Sense strand starting at position 87 of SEQ ID NO: 1881012
ucgaaugugacuugagaag

SEQ ID NO: 2011125 - RNA, 19 nt, Artificial Sequence
  Description of Artificial Sequence: Synthetic oligonucleotide
  Antisense strand to SEQ ID NO: 2011124
cuucucaagucacauucga

SEQ ID NO: 2011126 - RNA, 19 nt, Artificial Sequence
  Description of Artificial Sequence: Synthetic oligonucleotide
  Sense strand starting at position 285 of SEQ ID NO: 1881012
gcuuuaucucuagagccuu

SEQ ID NO: 2011127 - RNA, 19 nt, Artificial Sequence
  Description of Artificial Sequence: Synthetic oligonucleotide
  Antisense strand to SEQ ID NO: 2011126
aaggcucuagagauaaagc

SEQ ID NO: 2011128 - RNA, 19 nt, Artificial Sequence
  Description of Artificial Sequence: Synthetic oligonucleotide
  Sense strand starting at position 291 of SEQ ID NO: 1881012
ucucuagagccuuagaauu

SEQ ID NO: 2011129 - RNA, 19 nt, Artificial Sequence
  Description of Artificial Sequence: Synthetic oligonucleotide
  Antisense strand to SEQ ID NO: 2011128
aauucuaaggcucuagaga

SEQ ID NO: 2011130 - RNA, 19 nt, Artificial Sequence
  Description of Artificial Sequence: Synthetic oligonucleotide
  Sense strand starting at position 461 of SEQ ID NO: 1881012
ugaguuccuuugccuuuaa

SEQ ID NO: 2011131 - RNA, 19 nt, Artificial Sequence
  Description of Artificial Sequence: Synthetic oligonucleotide
  Antisense strand to SEQ ID NO: 2011130
uuaaaggcaaaggaacuca

SEQ ID NO: 2011132 - RNA, 19 nt, Artificial Sequence
  Description of Artificial Sequence: Synthetic oligonucleotide
  Sense strand starting at position 536 of SEQ ID NO: 1881012
uuuggugucucaccauaag

SEQ ID NO: 2011133 - RNA, 19 nt, Artificial Sequence
  Description of Artificial Sequence: Synthetic oligonucleotide
  Antisense strand to SEQ ID NO: 2011132
cuuauggugagacaccaaa

SEQ ID NO: 2011134 - RNA, 19 nt, Artificial Sequence
  Description of Artificial Sequence: Synthetic oligonucleotide
  Sense strand starting at position 984 of SEQ ID NO: 1881012
aaacgcucuccucgaggau

SEQ ID NO: 2011135 - RNA, 19 nt, Artificial Sequence
  Description of Artificial Sequence: Synthetic oligonucleotide
  Antisense strand to SEQ ID NO: 2011134
auccucgaggagagcguuu

SEQ ID NO: 2011136 - RNA, 19 nt, Artificial Sequence
  Description of Artificial Sequence: Synthetic oligonucleotide
  Sense strand starting at position 985 of SEQ ID NO: 1881012
aacgcucuccucgaggauu

SEQ ID NO: 2011137 - RNA, 19 nt, Artificial Sequence
  Description of Artificial Sequence: Synthetic oligonucleotide
  Antisense strand to SEQ ID NO: 2011136
aauccucgaggagagcguu

SEQ ID NO: 2011138 - RNA, 19 nt, Artificial Sequence
  Description of Artificial Sequence: Synthetic oligonucleotide
  Sense strand starting at position 2605 of SEQ ID NO: 1881012
uucuguuacccuuaggaug

SEQ ID NO: 2011139 - RNA, 19 nt, Artificial Sequence
  Description of Artificial Sequence: Synthetic oligonucleotide
  Antisense strand to SEQ ID NO: 2011138
cauccuaaggguaacagaa

SEQ ID NO: 2011140 - RNA, 19 nt, Artificial Sequence
  Description of Artificial Sequence: Synthetic oligonucleotide
  Sense strand starting at position 2638 of SEQ ID NO: 1881012
ucauauggcccaugaggau

SEQ ID NO: 2011141 - RNA, 19 nt, Artificial Sequence
  Description of Artificial Sequence: Synthetic oligonucleotide
  Antisense strand to SEQ ID NO: 2011140
auccucaugggccauauga

SEQ ID NO: 2011142 - RNA, 19 nt, Artificial Sequence
  Description of Artificial Sequence: Synthetic oligonucleotide
  Sense strand starting at position 2647 of SEQ ID NO: 1881012
ccaugaggauguuuacagu

SEQ ID NO: 2011143 - RNA, 19 nt, Artificial Sequence
  Description of Artificial Sequence: Synthetic oligonucleotide
  Antisense strand to SEQ ID NO: 2011142
acuguaaacauccucaugg

SEQ ID NO: 2011144 - RNA, 19 nt, Artificial Sequence
  Description of Artificial Sequence: Synthetic oligonucleotide
  Sense strand starting at position 2752 of SEQ ID NO: 1881012
guaguuuccaugggcuuaa

SEQ ID NO: 2011145 - RNA, 19 nt, Artificial Sequence
  Description of Artificial Sequence: Synthetic oligonucleotide
  Antisense strand to SEQ ID NO: 2011144
uuaagcccauggaaacuac

SEQ ID NO: 2011146 - RNA, 19 nt, Artificial Sequence
  Description of Artificial Sequence: Synthetic oligonucleotide
  Sense strand starting at position 2769 of SEQ ID NO: 1881012
aagcuuccuuagcugugaa

SEQ ID NO: 2011147 - RNA, 19 nt, Artificial Sequence
  Description of Artificial Sequence: Synthetic oligonucleotide
  Antisense strand to SEQ ID NO: 2011146
uucacagcuaaggaagcuu

SEQ ID NO: 2011148 - RNA, 19 nt, Artificial Sequence
  Description of Artificial Sequence: Synthetic oligonucleotide
  Sense strand starting at position 2772 of SEQ ID NO: 1881012
cuuccuuagcugugaaaga

SEQ ID NO: 2011149 - RNA, 19 nt, Artificial Sequence
  Description of Artificial Sequence: Synthetic oligonucleotide
  Antisense strand to SEQ ID NO: 2011148
ucuuucacagcuaaggaag

SEQ ID NO: 2011150 - RNA, 19 nt, Artificial Sequence
  Description of Artificial Sequence: Synthetic oligonucleotide
  Sense strand starting at position 2906 of SEQ ID NO: 1881012
aagacaaagccuugguuga

SEQ ID NO: 2011151 - RNA, 19 nt, Artificial Sequence
  Description of Artificial Sequence: Synthetic oligonucleotide
  Antisense strand to SEQ ID NO: 2011150
ucaaccaaggcuuugucuu

SEQ ID NO: 2011152 - RNA, 19 nt, Artificial Sequence
  Description of Artificial Sequence: Synthetic oligonucleotide
  Sense strand starting at position 2941 of SEQ ID NO: 1881012
gaaccagaaucuguuggua

SEQ ID NO: 2011153 - RNA, 19 nt, Artificial Sequence
  Description of Artificial Sequence: Synthetic oligonucleotide
  Antisense strand to SEQ ID NO: 2011152
uaccaacagauucugguuc

SEQ ID NO: 2011154 - RNA, 19 nt, Artificial Sequence
  Description of Artificial Sequence: Synthetic oligonucleotide
  Sense strand starting at position 2944 of SEQ ID NO: 1881012
ccagaaucuguugguaauc

SEQ ID NO: 2011155 - RNA, 19 nt, Artificial Sequence
  Description of Artificial Sequence: Synthetic oligonucleotide
  Antisense strand to SEQ ID NO: 2011154
gauuaccaacagauucugg

SEQ ID NO: 2011156 - RNA, 19 nt, Artificial Sequence
  Description of Artificial Sequence: Synthetic oligonucleotide
  Sense strand starting at position 2979 of SEQ ID NO: 1881012
ccaaacucuuuccugggaa

SEQ ID NO: 2011157 - RNA, 19 nt, Artificial Sequence
  Description of Artificial Sequence: Synthetic oligonucleotide
  Antisense strand to SEQ ID NO: 2011156
uucccaggaaagaguuugg

SEQ ID NO: 2011158 - RNA, 19 nt, Artificial Sequence
  Description of Artificial Sequence: Synthetic oligonucleotide
  Sense strand starting at position 3033 of SEQ ID NO: 1881012
caggaugaggccugaaugu

SEQ ID NO: 2011159 - RNA, 19 nt, Artificial Sequence
  Description of Artificial Sequence: Synthetic oligonucleotide
  Antisense strand to SEQ ID NO: 2011158
acauucaggccucauccug

SEQ ID NO: 2011160 - RNA, 19 nt, Artificial Sequence
  Description of Artificial Sequence: Synthetic oligonucleotide
  Sense strand starting at position 3393 of SEQ ID NO: 1881012
cuuguauccuaguuauggu

SEQ ID NO: 2011161 - RNA, 19 nt, Artificial Sequence
  Description of Artificial Sequence: Synthetic oligonucleotide
  Antisense strand to SEQ ID NO: 2011160
accauaacuaggauacaag

SEQ ID NO: 2011162 - RNA, 19 nt, Artificial Sequence
  Description of Artificial Sequence: Synthetic oligonucleotide
  Sense strand starting at position 3439 of SEQ ID NO: 1881012
gcuggauucccacgggaau

SEQ ID NO: 2011163 - RNA, 19 nt, Artificial Sequence
  Description of Artificial Sequence: Synthetic oligonucleotide
  Antisense strand to SEQ ID NO: 2011162
auucccgugggaauccagc

SEQ ID NO: 2011164 - RNA, 19 nt, Artificial Sequence
  Description of Artificial Sequence: Synthetic oligonucleotide
  Sense strand starting at position 3440 of SEQ ID NO: 1881012
cuggauucccacgggaauc

SEQ ID NO: 2011165 - RNA, 19 nt, Artificial Sequence
  Description of Artificial Sequence: Synthetic oligonucleotide
  Antisense strand to SEQ ID NO: 2011164
gauucccgugggaauccag

SEQ ID NO: 2011166 - RNA, 19 nt, Artificial Sequence
  Description of Artificial Sequence: Synthetic oligonucleotide
  Sense strand starting at position 3464 of SEQ ID NO: 1881012
aggccuacguaauccauau

SEQ ID NO: 2011167 - RNA, 19 nt, Artificial Sequence
  Description of Artificial Sequence: Synthetic oligonucleotide
  Antisense strand to SEQ ID NO: 2011166
auauggauuacguaggccu

SEQ ID NO: 2011168 - RNA, 19 nt, Artificial Sequence
  Description of Artificial Sequence: Synthetic oligonucleotide
  Sense strand starting at position 3468 of SEQ ID NO: 1881012
cuacguaauccauaucuag

SEQ ID NO: 2011169 - RNA, 19 nt, Artificial Sequence
  Description of Artificial Sequence: Synthetic oligonucleotide
  Antisense strand to SEQ ID NO: 2011168
cuagauauggauuacguag

SEQ ID NO: 2011170 - RNA, 19 nt, Artificial Sequence
  Description of Artificial Sequence: Synthetic oligonucleotide
  Sense strand starting at position 3475 of SEQ ID NO: 1881012
auccauaucuaguugacuu

SEQ ID NO: 2011171 - RNA, 19 nt, Artificial Sequence
  Description of Artificial Sequence: Synthetic oligonucleotide
  Antisense strand to SEQ ID NO: 2011170
aagucaacuagauauggau

SEQ ID NO: 2011172 - RNA, 19 nt, Artificial Sequence
  Description of Artificial Sequence: Synthetic oligonucleotide
  Sense strand starting at position 3499 of SEQ ID NO: 1881012
accucagagcgcugacuau

SEQ ID NO: 2011173 - RNA, 19 nt, Artificial Sequence
  Description of Artificial Sequence: Synthetic oligonucleotide
  Antisense strand to SEQ ID NO: 2011172
auagucagcgcucugaggu

SEQ ID NO: 2011174 - RNA, 19 nt, Artificial Sequence
  Description of Artificial Sequence: Synthetic oligonucleotide
  Sense strand starting at position 3552 of SEQ ID NO: 1881012
augagugguuggagagaua

SEQ ID NO: 2011175 - RNA, 19 nt, Artificial Sequence
  Description of Artificial Sequence: Synthetic oligonucleotide
  Antisense strand to SEQ ID NO: 2011174
uaucucuccaaccacucau

SEQ ID NO: 2011176 - RNA, 19 nt, Artificial Sequence
  Description of Artificial Sequence: Synthetic oligonucleotide
  Sense strand starting at position 3561 of SEQ ID NO: 1881012
uggagagauagcugcauga

SEQ ID NO: 2011177 - RNA, 19 nt, Artificial Sequence
  Description of Artificial Sequence: Synthetic oligonucleotide
  Antisense strand to SEQ ID NO: 2011176
ucaugcagcuaucucucca

SEQ ID NO: 2011178 - RNA, 19 nt, Artificial Sequence
  Description of Artificial Sequence: Synthetic oligonucleotide
  Sense strand starting at position 3563 of SEQ ID NO: 1881012
gagagauagcugcaugauu

SEQ ID NO: 2011179 - RNA, 19 nt, Artificial Sequence
  Description of Artificial Sequence: Synthetic oligonucleotide
  Antisense strand to SEQ ID NO: 2011178
aaucaugcagcuaucucuc

SEQ ID NO: 2011180 - RNA, 19 nt, Artificial Sequence
  Description of Artificial Sequence: Synthetic oligonucleotide
  Sense strand starting at position 3565 of SEQ ID NO: 1881012
gagauagcugcaugauucu

SEQ ID NO: 2011181 - RNA, 19 nt, Artificial Sequence
  Description of Artificial Sequence: Synthetic oligonucleotide
  Antisense strand to SEQ ID NO: 2011180
agaaucaugcagcuaucuc

SEQ ID NO: 2011182 - RNA, 19 nt, Artificial Sequence
  Description of Artificial Sequence: Synthetic oligonucleotide
  Sense strand starting at position 3571 of SEQ ID NO: 1881012
gcugcaugauucuugaagu

SEQ ID NO: 2011183 - RNA, 19 nt, Artificial Sequence
  Description of Artificial Sequence: Synthetic oligonucleotide
  Antisense strand to SEQ ID NO: 2011182
acuucaagaaucaugcagc

SEQ ID NO: 2011184 - RNA, 19 nt, Artificial Sequence
  Description of Artificial Sequence: Synthetic oligonucleotide
  Sense strand starting at position 3792 of SEQ ID NO: 1881012
aaauguaaucaguggcucu

SEQ ID NO: 2011185 - RNA, 19 nt, Artificial Sequence
  Description of Artificial Sequence: Synthetic oligonucleotide
  Antisense strand to SEQ ID NO: 2011184
agagccacugauuacauuu

SEQ ID NO: 2011186 - RNA, 19 nt, Artificial Sequence
  Description of Artificial Sequence: Synthetic oligonucleotide
  Sense strand starting at position 3810 of SEQ ID NO: 1881012
uugagcaguagcugagaau

SEQ ID NO: 2011187 - RNA, 19 nt, Artificial Sequence
  Description of Artificial Sequence: Synthetic oligonucleotide
  Antisense strand to SEQ ID NO: 2011186
auucucagcuacugcucaa

SEQ ID NO: 2011188 - RNA, 19 nt, Artificial Sequence
  Description of Artificial Sequence: Synthetic oligonucleotide
  Sense strand starting at position 3821 of SEQ ID NO: 1881012
cugagaaugcccugccuga

SEQ ID NO: 2011189 - RNA, 19 nt, Artificial Sequence
  Description of Artificial Sequence: Synthetic oligonucleotide
  Antisense strand to SEQ ID NO: 2011188
ucaggcagggcauucucag

SEQ ID NO: 2011190 - RNA, 19 nt, Artificial Sequence
  Description of Artificial Sequence: Synthetic oligonucleotide
  Sense strand starting at position 212 of SEQ ID NO: 1881013
caguguuuagaggauguua

SEQ ID NO: 2011191 - RNA, 19 nt, Artificial Sequence
  Description of Artificial Sequence: Synthetic oligonucleotide
  Antisense strand to SEQ ID NO: 2011190
uaacauccucuaaacacug

SEQ ID NO: 2011192 - RNA, 19 nt, Artificial Sequence
  Description of Artificial Sequence: Synthetic oligonucleotide
  Sense strand starting at position 471 of SEQ ID NO: 1881013
uuuaauucccacugguaag

SEQ ID NO: 2011193 - RNA, 19 nt, Artificial Sequence
  Description of Artificial Sequence: Synthetic oligonucleotide
  Antisense strand to SEQ ID NO: 2011192
cuuaccagugggaauuaaa

SEQ ID NO: 2011194 - RNA, 19 nt, Artificial Sequence
  Description of Artificial Sequence: Synthetic oligonucleotide
  Sense strand starting at position 1027 of SEQ ID NO: 1881013
gcugaaagugcugaauacu

SEQ ID NO: 2011195 - RNA, 19 nt, Artificial Sequence
  Description of Artificial Sequence: Synthetic oligonucleotide
  Antisense strand to SEQ ID NO: 2011194
aguauucagcacuuucagc

SEQ ID NO: 2011196 - RNA, 19 nt, Artificial Sequence
  Description of Artificial Sequence: Synthetic oligonucleotide
  Sense strand starting at position 1030 of SEQ ID NO: 1881013
gaaagugcugaauacuuua

SEQ ID NO: 2011197 - RNA, 19 nt, Artificial Sequence
  Description of Artificial Sequence: Synthetic oligonucleotide
  Antisense strand to SEQ ID NO: 2011196
uaaaguauucagcacuuuc

SEQ ID NO: 2011198 - RNA, 19 nt, Artificial Sequence
  Description of Artificial Sequence: Synthetic oligonucleotide
  Sense strand starting at position 1140 of SEQ ID NO: 1881013
ugaagaaacuugcccucuu

SEQ ID NO: 2011199 - RNA, 19 nt, Artificial Sequence
  Description of Artificial Sequence: Synthetic oligonucleotide
  Antisense strand to SEQ ID NO: 2011198
aagagggcaaguuucuuca

SEQ ID NO: 2011200 - RNA, 19 nt, Artificial Sequence
  Description of Artificial Sequence: Synthetic oligonucleotide
  Sense strand starting at position 1151 of SEQ ID NO: 1881013
gcccucuuagaauacugua

SEQ ID NO: 2011201 - RNA, 19 nt, Artificial Sequence
  Description of Artificial Sequence: Synthetic oligonucleotide
  Antisense strand to SEQ ID NO: 2011200
uacaguauucuaagagggc

SEQ ID NO: 2011202 - RNA, 19 nt, Artificial Sequence
  Description of Artificial Sequence: Synthetic oligonucleotide
  Sense strand starting at position 1188 of SEQ ID NO: 1881013
augucuggguaauuccaua

SEQ ID NO: 2011203 - RNA, 19 nt, Artificial Sequence
  Description of Artificial Sequence: Synthetic oligonucleotide
  Antisense strand to SEQ ID NO: 2011202
uauggaauuacccagacau

SEQ ID NO: 2011204 - RNA, 19 nt, Artificial Sequence
  Description of Artificial Sequence: Synthetic oligonucleotide
  Sense strand starting at position 1193 of SEQ ID NO: 1881013
uggguaauuccauaucuug

SEQ ID NO: 2011205 - RNA, 19 nt, Artificial Sequence
  Description of Artificial Sequence: Synthetic oligonucleotide
  Antisense strand to SEQ ID NO: 2011204
caagauauggaauuaccca

SEQ ID NO: 2011206 - RNA, 19 nt, Artificial Sequence
  Description of Artificial Sequence: Synthetic oligonucleotide
  Sense strand starting at position 1399 of SEQ ID NO: 1881013
cccuuaauucuauguggaa

SEQ ID NO: 2011207 - RNA, 19 nt, Artificial Sequence
  Description of Artificial Sequence: Synthetic oligonucleotide
  Antisense strand to SEQ ID NO: 2011206
uuccacauagaauuaaggg

SEQ ID NO: 2011208 - RNA, 19 nt, Artificial Sequence
  Description of Artificial Sequence: Synthetic oligonucleotide
  Sense strand starting at position 1400 of SEQ ID NO: 1881013
ccuuaauucuauguggaau

SEQ ID NO: 2011209 - RNA, 19 nt, Artificial Sequence
  Description of Artificial Sequence: Synthetic oligonucleotide
  Antisense strand to SEQ ID NO: 2011208
auuccacauagaauuaagg

SEQ ID NO: 2011210 - RNA, 19 nt, Artificial Sequence
  Description of Artificial Sequence: Synthetic oligonucleotide
  Sense strand starting at position 1450 of SEQ ID NO: 1881013
agaguauauaucuaguugu

SEQ ID NO: 2011211 - RNA, 19 nt, Artificial Sequence
  Description of Artificial Sequence: Synthetic oligonucleotide
  Antisense strand to SEQ ID NO: 2011210
acaacuagauauauacucu

SEQ ID NO: 2011212 - RNA, 19 nt, Artificial Sequence
  Description of Artificial Sequence: Synthetic oligonucleotide
  Sense strand starting at position 1463 of SEQ ID NO: 1881013
aguuguuggcaauaugaca

SEQ ID NO: 2011213 - RNA, 19 nt, Artificial Sequence
  Description of Artificial Sequence: Synthetic oligonucleotide
  Antisense strand to SEQ ID NO: 2011212
ugucauauugccaacaacu

SEQ ID NO: 2011214 - RNA, 19 nt, Artificial Sequence
  Description of Artificial Sequence: Synthetic oligonucleotide
  Sense strand starting at position 1523 of SEQ ID NO: 1881013
gucacagcuggugaaucua

SEQ ID NO: 2011215 - RNA, 19 nt, Artificial Sequence
  Description of Artificial Sequence: Synthetic oligonucleotide
  Antisense strand to SEQ ID NO: 2011214
uagauucaccagcugugac

SEQ ID NO: 2011216 - RNA, 19 nt, Artificial Sequence
  Description of Artificial Sequence: Synthetic oligonucleotide
  Sense strand starting at position 1544 of SEQ ID NO: 1881013
gagaaaucuuuggcaauag

SEQ ID NO: 2011217 - RNA, 19 nt, Artificial Sequence
  Description of Artificial Sequence: Synthetic oligonucleotide
  Antisense strand to SEQ ID NO: 2011216
cuauugccaaagauuucuc

SEQ ID NO: 2011218 - RNA, 19 nt, Artificial Sequence
  Description of Artificial Sequence: Synthetic oligonucleotide
  Sense strand starting at position 1780 of SEQ ID NO: 1881013
ugacuaugcacugacggau

SEQ ID NO: 2011219 - RNA, 19 nt, Artificial Sequence
  Description of Artificial Sequence: Synthetic oligonucleotide
  Antisense strand to SEQ ID NO: 2011218
auccgucagugcauaguca

SEQ ID NO: 2011220 - RNA, 19 nt, Artificial Sequence
  Description of Artificial Sequence: Synthetic oligonucleotide
  Sense strand starting at position 1860 of SEQ ID NO: 1881013
gcauguuuaagggagucuu

SEQ ID NO: 2011221 - RNA, 19 nt, Artificial Sequence
  Description of Artificial Sequence: Synthetic oligonucleotide
  Antisense strand to SEQ ID NO: 2011220
aagacucccuuaaacaugc

SEQ ID NO: 2011222 - RNA, 19 nt, Artificial Sequence
  Description of Artificial Sequence: Synthetic oligonucleotide
  Sense strand starting at position 1910 of SEQ ID NO: 1881013
aacaauuagugucucagga

SEQ ID NO: 2011223 - RNA, 19 nt, Artificial Sequence
  Description of Artificial Sequence: Synthetic oligonucleotide
  Antisense strand to SEQ ID NO: 2011222
uccugagacacuaauuguu

SEQ ID NO: 2011224 - RNA, 19 nt, Artificial Sequence
  Description of Artificial Sequence: Synthetic oligonucleotide
  Sense strand starting at position 2091 of SEQ ID NO: 1881013
gaggauugauugcuuuaau

SEQ ID NO: 2011225 - RNA, 19 nt, Artificial Sequence
  Description of Artificial Sequence: Synthetic oligonucleotide
  Antisense strand to SEQ ID NO: 2011224
auuaaagcaaucaauccuc

SEQ ID NO: 2011226 - RNA, 19 nt, Artificial Sequence
  Description of Artificial Sequence: Synthetic oligonucleotide
  Sense strand starting at position 2092 of SEQ ID NO: 1881013
aggauugauugcuuuaaua

SEQ ID NO: 2011227 - RNA, 19 nt, Artificial Sequence
  Description of Artificial Sequence: Synthetic oligonucleotide
  Antisense strand to SEQ ID NO: 2011226
uauuaaagcaaucaauccu

SEQ ID NO: 2011228 - RNA, 19 nt, Artificial Sequence
  Description of Artificial Sequence: Synthetic oligonucleotide
  Sense strand starting at position 2291 of SEQ ID NO: 1881013
cuuugcaguauugggaaga

SEQ ID NO: 2011229 - RNA, 19 nt, Artificial Sequence
  Description of Artificial Sequence: Synthetic oligonucleotide
  Antisense strand to SEQ ID NO: 2011228
ucuucccaauacugcaaag

SEQ ID NO: 2011230 - RNA, 19 nt, Artificial Sequence
  Description of Artificial Sequence: Synthetic oligonucleotide
  Sense strand starting at position 2431 of SEQ ID NO: 1881013
ccauacaauugugcagaaa

SEQ ID NO: 2011231 - RNA, 19 nt, Artificial Sequence
  Description of Artificial Sequence: Synthetic oligonucleotide
  Antisense strand to SEQ ID NO: 2011230
uuucugcacaauuguaugg

SEQ ID NO: 2011232 - RNA, 19 nt, Artificial Sequence
  Description of Artificial Sequence: Synthetic oligonucleotide
  Sense strand starting at position 2475 of SEQ ID NO: 1881013
aaagauaccguguaaguua

SEQ ID NO: 2011233 - RNA, 19 nt, Artificial Sequence
  Description of Artificial Sequence: Synthetic oligonucleotide
  Antisense strand to SEQ ID NO: 2011232
uaacuuacacgguaucuuu

SEQ ID NO: 2011234 - RNA, 19 nt, Artificial Sequence
  Description of Artificial Sequence: Synthetic oligonucleotide
  Sense strand starting at position 2766 of SEQ ID NO: 1881013
acaagaaugguaggcauau

SEQ ID NO: 2011235 - RNA, 19 nt, Artificial Sequence
  Description of Artificial Sequence: Synthetic oligonucleotide
  Antisense strand to SEQ ID NO: 2011234
auaugccuaccauucuugu

SEQ ID NO: 2011236 - RNA, 19 nt, Artificial Sequence
  Description of Artificial Sequence: Synthetic oligonucleotide
  Sense strand starting at position 2837 of SEQ ID NO: 1881013
gaugaugggcucuggaauc

SEQ ID NO: 2011237 - RNA, 19 nt, Artificial Sequence
  Description of Artificial Sequence: Synthetic oligonucleotide
  Antisense strand to SEQ ID NO: 2011236
gauuccagagcccaucauc

SEQ ID NO: 2011238 - RNA, 19 nt, Artificial Sequence
  Description of Artificial Sequence: Synthetic oligonucleotide
  Sense strand starting at position 2864 of SEQ ID NO: 1881013
gggacuugguuucugaagu

SEQ ID NO: 2011239 - RNA, 19 nt, Artificial Sequence
  Description of Artificial Sequence: Synthetic oligonucleotide
  Antisense strand to SEQ ID NO: 2011238
acuucagaaaccaaguccc

SEQ ID NO: 2011240 - RNA, 19 nt, Artificial Sequence
  Description of Artificial Sequence: Synthetic oligonucleotide
  Sense strand starting at position 2908 of SEQ ID NO: 1881013
uggguuuccgaauaaguuu

SEQ ID NO: 2011241 - RNA, 19 nt, Artificial Sequence
  Description of Artificial Sequence: Synthetic oligonucleotide
  Antisense strand to SEQ ID NO: 2011240
aaacuuauucggaaaccca

SEQ ID NO: 2011242 - RNA, 19 nt, Artificial Sequence
  Description of Artificial Sequence: Synthetic oligonucleotide
  Sense strand starting at position 2914 of SEQ ID NO: 1881013
uccgaauaaguuugagauc

SEQ ID NO: 2011243 - RNA, 19 nt, Artificial Sequence
  Description of Artificial Sequence: Synthetic oligonucleotide
  Antisense strand to SEQ ID NO: 2011242
gaucucaaacuuauucgga

SEQ ID NO: 2011244 - RNA, 19 nt, Artificial Sequence
  Description of Artificial Sequence: Synthetic oligonucleotide
  Sense strand starting at position 2926 of SEQ ID NO: 1881013
ugagaucacuuaucaguuu

SEQ ID NO: 2011245 - RNA, 19 nt, Artificial Sequence
  Description of Artificial Sequence: Synthetic oligonucleotide
  Antisense strand to SEQ ID NO: 2011244
aaacugauaagugaucuca

SEQ ID NO: 2011246 - RNA, 19 nt, Artificial Sequence
  Description of Artificial Sequence: Synthetic oligonucleotide
  Sense strand starting at position 3405 of SEQ ID NO: 1881013
caggcucauuuggcucaua

SEQ ID NO: 2011247 - RNA, 19 nt, Artificial Sequence
  Description of Artificial Sequence: Synthetic oligonucleotide
  Antisense strand to SEQ ID NO: 2011246
uaugagccaaaugagccug

SEQ ID NO: 2011248 - RNA, 19 nt, Artificial Sequence
  Description of Artificial Sequence: Synthetic oligonucleotide
  Sense strand starting at position 3406 of SEQ ID NO: 1881013
aggcucauuuggcucauau

SEQ ID NO: 2011249 - RNA, 19 nt, Artificial Sequence
  Description of Artificial Sequence: Synthetic oligonucleotide
  Antisense strand to SEQ ID NO: 2011248
auaugagccaaaugagccu

SEQ ID NO: 2011250 - RNA, 19 nt, Artificial Sequence
  Description of Artificial Sequence: Synthetic oligonucleotide
  Sense strand starting at position 3438 of SEQ ID NO: 1881013
acagccuugagucagugau

SEQ ID NO: 2011251 - RNA, 19 nt, Artificial Sequence
  Description of Artificial Sequence: Synthetic oligonucleotide
  Antisense strand to SEQ ID NO: 2011250
aucacugacucaaggcugu

SEQ ID NO: 2011252 - RNA, 19 nt, Artificial Sequence
  Description of Artificial Sequence: Synthetic oligonucleotide
  Sense strand starting at position 3442 of SEQ ID NO: 1881013
ccuugagucagugaucuug

SEQ ID NO: 2011253 - RNA, 19 nt, Artificial Sequence
  Description of Artificial Sequence: Synthetic oligonucleotide
  Antisense strand to SEQ ID NO: 2011252
caagaucacugacucaagg

SEQ ID NO: 2011254 - RNA, 19 nt, Artificial Sequence
  Description of Artificial Sequence: Synthetic oligonucleotide
  Sense strand starting at position 3444 of SEQ ID NO: 1881013
uugagucagugaucuugga

SEQ ID NO: 2011255 - RNA, 19 nt, Artificial Sequence
  Description of Artificial Sequence: Synthetic oligonucleotide
  Antisense strand to SEQ ID NO: 2011254
uccaagaucacugacucaa

SEQ ID NO: 2011256 - RNA, 19 nt, Artificial Sequence
  Description of Artificial Sequence: Synthetic oligonucleotide
  Sense strand starting at position 3549 of SEQ ID NO: 1881013
auagaaucauuugacuaug

SEQ ID NO: 2011257 - RNA, 19 nt, Artificial Sequence
  Description of Artificial Sequence: Synthetic oligonucleotide
  Antisense strand to SEQ ID NO: 2011256
cauagucaaaugauucuau

SEQ ID NO: 2011258 - RNA, 19 nt, Artificial Sequence
  Description of Artificial Sequence: Synthetic oligonucleotide
  Sense strand starting at position 3560 of SEQ ID NO: 1881013
ugacuauguuucucccaga

SEQ ID NO: 2011259 - RNA, 19 nt, Artificial Sequence
  Description of Artificial Sequence: Synthetic oligonucleotide
  Antisense strand to SEQ ID NO: 2011258
ucugggagaaacauaguca

SEQ ID NO: 2011260 - RNA, 19 nt, Artificial Sequence
  Description of Artificial Sequence: Synthetic oligonucleotide
  Sense strand starting at position 3589 of SEQ ID NO: 1881013
ucauaaauagugugagaua

SEQ ID NO: 2011261 - RNA, 19 nt, Artificial Sequence
  Description of Artificial Sequence: Synthetic oligonucleotide
  Antisense strand to SEQ ID NO: 2011260
uaucucacacuauuuauga

SEQ ID NO: 2011262 - RNA, 19 nt, Artificial Sequence
  Description of Artificial Sequence: Synthetic oligonucleotide
  Sense strand starting at position 3758 of SEQ ID NO: 1881013
ggcacagaugcuugaggaa

SEQ ID NO: 2011263 - RNA, 19 nt, Artificial Sequence
  Description of Artificial Sequence: Synthetic oligonucleotide
  Antisense strand to SEQ ID NO: 2011262
uuccucaagcaucugugcc

SEQ ID NO: 2011264 - RNA, 19 nt, Artificial Sequence
  Description of Artificial Sequence: Synthetic oligonucleotide
  Sense strand starting at position 3818 of SEQ ID NO: 1881013
aggugaugucuggaggagu

SEQ ID NO: 2011265 - RNA, 19 nt, Artificial Sequence
  Description of Artificial Sequence: Synthetic oligonucleotide
  Antisense strand to SEQ ID NO: 2011264
acuccuccagacaucaccu

SEQ ID NO: 2011266 - RNA, 19 nt, Artificial Sequence
  Description of Artificial Sequence: Synthetic oligonucleotide
  Sense strand starting at position 3865 of SEQ ID NO: 1881013
uguaaacuugagcaugauu

SEQ ID NO: 2011267 - RNA, 19 nt, Artificial Sequence
  Description of Artificial Sequence: Synthetic oligonucleotide
  Antisense strand to SEQ ID NO: 2011266
aaucaugcucaaguuuaca

SEQ ID NO: 2011268 - RNA, 19 nt, Artificial Sequence
  Description of Artificial Sequence: Synthetic oligonucleotide
  Sense strand starting at position 3870 of SEQ ID NO: 1881013
acuugagcaugauuauaca

SEQ ID NO: 2011269 - RNA, 19 nt, Artificial Sequence
  Description of Artificial Sequence: Synthetic oligonucleotide
  Antisense strand to SEQ ID NO: 2011268
uguauaaucaugcucaagu

SEQ ID NO: 2011270 - RNA, 19 nt, Artificial Sequence
  Description of Artificial Sequence: Synthetic oligonucleotide
  Sense strand starting at position 65 of SEQ ID NO: 1881014
agcuauauguuucuagaaa

SEQ ID NO: 2011271 - RNA, 19 nt, Artificial Sequence
  Description of Artificial Sequence: Synthetic oligonucleotide
  Antisense strand to SEQ ID NO: 2011270
uuucuagaaacauauagcu

SEQ ID NO: 2011272 - RNA, 19 nt, Artificial Sequence
  Description of Artificial Sequence: Synthetic oligonucleotide
  Sense strand starting at position 484 of SEQ ID NO: 1881014
ugcauauuuguuggcucau

SEQ ID NO: 2011273 - RNA, 19 nt, Artificial Sequence
  Description of Artificial Sequence: Synthetic oligonucleotide
  Antisense strand to SEQ ID NO: 2011272
augagccaacaaauaugca

SEQ ID NO: 2011274 - RNA, 19 nt, Artificial Sequence
  Description of Artificial Sequence: Synthetic oligonucleotide
  Sense strand starting at position 490 of SEQ ID NO: 1881014
uuuguuggcucauuuauag

SEQ ID NO: 2011275 - RNA, 19 nt, Artificial Sequence
  Description of Artificial Sequence: Synthetic oligonucleotide
  Antisense strand to SEQ ID NO: 2011274
cuauaaaugagccaacaaa

SEQ ID NO: 2011276 - RNA, 19 nt, Artificial Sequence
  Description of Artificial Sequence: Synthetic oligonucleotide
  Sense strand starting at position 545 of SEQ ID NO: 1881014
ugcaguacaucagugauuu

SEQ ID NO: 2011277 - RNA, 19 nt, Artificial Sequence
  Description of Artificial Sequence: Synthetic oligonucleotide
  Antisense strand to SEQ ID NO: 2011276
aaaucacugauguacugca

SEQ ID NO: 2011278 - RNA, 19 nt, Artificial Sequence
  Description of Artificial Sequence: Synthetic oligonucleotide
  Sense strand starting at position 647 of SEQ ID NO: 1881014
aagauacugugagcucuaa

SEQ ID NO: 2011279 - RNA, 19 nt, Artificial Sequence
  Description of Artificial Sequence: Synthetic oligonucleotide
  Antisense strand to SEQ ID NO: 2011278
uuagagcucacaguaucuu

SEQ ID NO: 2011280 - RNA, 19 nt, Artificial Sequence
  Description of Artificial Sequence: Synthetic oligonucleotide
  Sense strand starting at position 777 of SEQ ID NO: 1881014
ggccgaaaugucuaacaga

SEQ ID NO: 2011281 - RNA, 19 nt, Artificial Sequence
  Description of Artificial Sequence: Synthetic oligonucleotide
  Antisense strand to SEQ ID NO: 2011280
ucuguuagacauuucggcc

SEQ ID NO: 2011282 - RNA, 19 nt, Artificial Sequence
  Description of Artificial Sequence: Synthetic oligonucleotide
  Sense strand starting at position 839 of SEQ ID NO: 1881014
gccugaaaugcaggauaaa

SEQ ID NO: 2011283 - RNA, 19 nt, Artificial Sequence
  Description of Artificial Sequence: Synthetic oligonucleotide
  Antisense strand to SEQ ID NO: 2011282
uuuauccugcauuucaggc

SEQ ID NO: 2011284 - RNA, 19 nt, Artificial Sequence
  Description of Artificial Sequence: Synthetic oligonucleotide
  Sense strand starting at position 1037 of SEQ ID NO: 1881014
aauguugaaugguuugaga

SEQ ID NO: 2011285 - RNA, 19 nt, Artificial Sequence
  Description of Artificial Sequence: Synthetic oligonucleotide
  Antisense strand to SEQ ID NO: 2011284
ucucaaaccauucaacauu

SEQ ID NO: 2011286 - RNA, 19 nt, Artificial Sequence
  Description of Artificial Sequence: Synthetic oligonucleotide
  Sense strand starting at position 1039 of SEQ ID NO: 1881014
uguugaaugguuugagaua

SEQ ID NO: 2011287 - RNA, 19 nt, Artificial Sequence
  Description of Artificial Sequence: Synthetic oligonucleotide
  Antisense strand to SEQ ID NO: 2011286
uaucucaaaccauucaaca

SEQ ID NO: 2011288 - RNA, 19 nt, Artificial Sequence
  Description of Artificial Sequence: Synthetic oligonucleotide
  Sense strand starting at position 1115 of SEQ ID NO: 1881014
gggaucugguaagucucua

SEQ ID NO: 2011289 - RNA, 19 nt, Artificial Sequence
  Description of Artificial Sequence: Synthetic oligonucleotide
  Antisense strand to SEQ ID NO: 2011288
uagagacuuaccagauccc

SEQ ID NO: 2011290 - RNA, 19 nt, Artificial Sequence
  Description of Artificial Sequence: Synthetic oligonucleotide
  Sense strand starting at position 1126 of SEQ ID NO: 1881014
agucucuaaguguauaaua

SEQ ID NO: 2011291 - RNA, 19 nt, Artificial Sequence
  Description of Artificial Sequence: Synthetic oligonucleotide
  Antisense strand to SEQ ID NO: 2011290
uauuauacacuuagagacu

SEQ ID NO: 2011292 - RNA, 19 nt, Artificial Sequence
  Description of Artificial Sequence: Synthetic oligonucleotide
  Sense strand starting at position 1348 of SEQ ID NO: 1881014
ggcauauaaagcuguagaa

SEQ ID NO: 2011293 - RNA, 19 nt, Artificial Sequence
  Description of Artificial Sequence: Synthetic oligonucleotide
  Antisense strand to SEQ ID NO: 2011292
uucuacagcuuuauaugcc

SEQ ID NO: 2011294 - RNA, 19 nt, Artificial Sequence
  Description of Artificial Sequence: Synthetic oligonucleotide
  Sense strand starting at position 1495 of SEQ ID NO: 1881014
ugacuuugcacuuagaggu

SEQ ID NO: 2011295 - RNA, 19 nt, Artificial Sequence
  Description of Artificial Sequence: Synthetic oligonucleotide
  Antisense strand to SEQ ID NO: 2011294
accucuaagugcaaaguca

SEQ ID NO: 2011296 - RNA, 19 nt, Artificial Sequence
  Description of Artificial Sequence: Synthetic oligonucleotide
  Sense strand starting at position 1863 of SEQ ID NO: 1881014
cugucuagaucccugacaa

SEQ ID NO: 2011297 - RNA, 19 nt, Artificial Sequence
  Description of Artificial Sequence: Synthetic oligonucleotide
  Antisense strand to SEQ ID NO: 2011296
uugucagggaucuagacag

SEQ ID NO: 2011298 - RNA, 19 nt, Artificial Sequence
  Description of Artificial Sequence: Synthetic oligonucleotide
  Sense strand starting at position 1864 of SEQ ID NO: 1881014
ugucuagaucccugacaau

SEQ ID NO: 2011299 - RNA, 19 nt, Artificial Sequence
  Description of Artificial Sequence: Synthetic oligonucleotide
  Antisense strand to SEQ ID NO: 2011298
auugucagggaucuagaca

SEQ ID NO: 2011300 - RNA, 19 nt, Artificial Sequence
  Description of Artificial Sequence: Synthetic oligonucleotide
  Sense strand starting at position 1889 of SEQ ID NO: 1881014
auuguuuaucacugagaau

SEQ ID NO: 2011301 - RNA, 19 nt, Artificial Sequence
  Description of Artificial Sequence: Synthetic oligonucleotide
  Antisense strand to SEQ ID NO: 2011300
auucucagugauaaacaau

SEQ ID NO: 2011302 - RNA, 19 nt, Artificial Sequence
  Description of Artificial Sequence: Synthetic oligonucleotide
  Sense strand starting at position 2037 of SEQ ID NO: 1881014
uguagauuccaaggauucu

SEQ ID NO: 2011303 - RNA, 19 nt, Artificial Sequence
  Description of Artificial Sequence: Synthetic oligonucleotide
  Antisense strand to SEQ ID NO: 2011302
agaauccuuggaaucuaca

SEQ ID NO: 2011304 - RNA, 19 nt, Artificial Sequence
  Description of Artificial Sequence: Synthetic oligonucleotide
  Sense strand starting at position 2051 of SEQ ID NO: 1881014
auucuaugguaaccagaca

SEQ ID NO: 2011305 - RNA, 19 nt, Artificial Sequence
  Description of Artificial Sequence: Synthetic oligonucleotide
  Antisense strand to SEQ ID NO: 2011304
ugucugguuaccauagaau

SEQ ID NO: 2011306 - RNA, 19 nt, Artificial Sequence
  Description of Artificial Sequence: Synthetic oligonucleotide
  Sense strand starting at position 2065 of SEQ ID NO: 1881014
agacaagaauggcuucuua

SEQ ID NO: 2011307 - RNA, 19 nt, Artificial Sequence
  Description of Artificial Sequence: Synthetic oligonucleotide
  Antisense strand to SEQ ID NO: 2011306
uaagaagccauucuugucu

SEQ ID NO: 2011308 - RNA, 19 nt, Artificial Sequence
  Description of Artificial Sequence: Synthetic oligonucleotide
  Sense strand starting at position 2172 of SEQ ID NO: 1881014
guaccuauagagcauauaa

SEQ ID NO: 2011309 - RNA, 19 nt, Artificial Sequence
  Description of Artificial Sequence: Synthetic oligonucleotide
  Antisense strand to SEQ ID NO: 2011308
uuauaugcucuauagguac

SEQ ID NO: 2011310 - RNA, 19 nt, Artificial Sequence
  Description of Artificial Sequence: Synthetic oligonucleotide
  Sense strand starting at position 2336 of SEQ ID NO: 1881014
gagagcugaguccagagua

SEQ ID NO: 2011311 - RNA, 19 nt, Artificial Sequence
  Description of Artificial Sequence: Synthetic oligonucleotide
  Antisense strand to SEQ ID NO: 2011310
uacucuggacucagcucuc

SEQ ID NO: 2011312 - RNA, 19 nt, Artificial Sequence
  Description of Artificial Sequence: Synthetic oligonucleotide
  Sense strand starting at position 2360 of SEQ ID NO: 1881014
guagaaucaguagguuaaa

SEQ ID NO: 2011313 - RNA, 19 nt, Artificial Sequence
  Description of Artificial Sequence: Synthetic oligonucleotide
  Antisense strand to SEQ ID NO: 2011312
uuuaaccuacugauucuac

SEQ ID NO: 2011314 - RNA, 19 nt, Artificial Sequence
  Description of Artificial Sequence: Synthetic oligonucleotide
  Sense strand starting at position 2361 of SEQ ID NO: 1881014
uagaaucaguagguuaaau

SEQ ID NO: 2011315 - RNA, 19 nt, Artificial Sequence
  Description of Artificial Sequence: Synthetic oligonucleotide
  Antisense strand to SEQ ID NO: 2011314
auuuaaccuacugauucua

SEQ ID NO: 2011316 - RNA, 19 nt, Artificial Sequence
  Description of Artificial Sequence: Synthetic oligonucleotide
  Sense strand starting at position 2877 of SEQ ID NO: 1881014
uagugugggccagaaacua

SEQ ID NO: 2011317 - RNA, 19 nt, Artificial Sequence
  Description of Artificial Sequence: Synthetic oligonucleotide
  Antisense strand to SEQ ID NO: 2011316
uaguuucuggcccacacua

SEQ ID NO: 2011318 - RNA, 19 nt, Artificial Sequence
  Description of Artificial Sequence: Synthetic oligonucleotide
  Sense strand starting at position 2999 of SEQ ID NO: 1881014
gguaaugcugccuaaauca

SEQ ID NO: 2011319 - RNA, 19 nt, Artificial Sequence
  Description of Artificial Sequence: Synthetic oligonucleotide
  Antisense strand to SEQ ID NO: 2011318
ugauuuaggcagcauuacc

SEQ ID NO: 2011320 - RNA, 19 nt, Artificial Sequence
  Description of Artificial Sequence: Synthetic oligonucleotide
  Sense strand starting at position 3030 of SEQ ID NO: 1881014
uugccuacuccugagaauc

SEQ ID NO: 2011321 - RNA, 19 nt, Artificial Sequence
  Description of Artificial Sequence: Synthetic oligonucleotide
  Antisense strand to SEQ ID NO: 2011320
gauucucaggaguaggcaa

SEQ ID NO: 2011322 - RNA, 19 nt, Artificial Sequence
  Description of Artificial Sequence: Synthetic oligonucleotide
  Sense strand starting at position 3119 of SEQ ID NO: 1881014
aguaucucucuuuauaguu

SEQ ID NO: 2011323 - RNA, 19 nt, Artificial Sequence
  Description of Artificial Sequence: Synthetic oligonucleotide
  Antisense strand to SEQ ID NO: 2011322
aacuauaaagagagauacu

SEQ ID NO: 2011324 - RNA, 19 nt, Artificial Sequence
  Description of Artificial Sequence: Synthetic oligonucleotide
  Sense strand starting at position 3188 of SEQ ID NO: 1881014
guuuaaauacauuggaucu

SEQ ID NO: 2011325 - RNA, 19 nt, Artificial Sequence
  Description of Artificial Sequence: Synthetic oligonucleotide
  Antisense strand to SEQ ID NO: 2011324
agauccaauguauuuaaac

SEQ ID NO: 2011326 - RNA, 19 nt, Artificial Sequence
  Description of Artificial Sequence: Synthetic oligonucleotide
  Sense strand starting at position 3363 of SEQ ID NO: 1881014
ucuaguuuaguaugaauga

SEQ ID NO: 2011327 - RNA, 19 nt, Artificial Sequence
  Description of Artificial Sequence: Synthetic oligonucleotide
  Antisense strand to SEQ ID NO: 2011326
ucauucauacuaaacuaga

SEQ ID NO: 2011328 - RNA, 19 nt, Artificial Sequence
  Description of Artificial Sequence: Synthetic oligonucleotide
  Sense strand starting at position 3397 of SEQ ID NO: 1881014
uaugaauagcaggguucua

SEQ ID NO: 2011329 - RNA, 19 nt, Artificial Sequence
  Description of Artificial Sequence: Synthetic oligonucleotide
  Antisense strand to SEQ ID NO: 2011328
uagaacccugcuauucaua

SEQ ID NO: 2011330 - RNA, 19 nt, Artificial Sequence
  Description of Artificial Sequence: Synthetic oligonucleotide
  Sense strand starting at position 3577 of SEQ ID NO: 1881014
acguaauagagccagauau

SEQ ID NO: 2011331 - RNA, 19 nt, Artificial Sequence
  Description of Artificial Sequence: Synthetic oligonucleotide
  Antisense strand to SEQ ID NO: 2011330
auaucuggcucuauuacgu

SEQ ID NO: 2011332 - RNA, 19 nt, Artificial Sequence
  Description of Artificial Sequence: Synthetic oligonucleotide
  Sense strand starting at position 3613 of SEQ ID NO: 1881014
guuacagugccacagacau

SEQ ID NO: 2011333 - RNA, 19 nt, Artificial Sequence
  Description of Artificial Sequence: Synthetic oligonucleotide
  Antisense strand to SEQ ID NO: 2011332
augucuguggcacuguaac

SEQ ID NO: 2011334 - RNA, 19 nt, Artificial Sequence
  Description of Artificial Sequence: Synthetic oligonucleotide
  Sense strand starting at position 3660 of SEQ ID NO: 1881014
aguuccauccuguaucauu

SEQ ID NO: 2011335 - RNA, 19 nt, Artificial Sequence
  Description of Artificial Sequence: Synthetic oligonucleotide
  Antisense strand to SEQ ID NO: 2011334
aaugauacaggauggaacu

SEQ ID NO: 2011336 - RNA, 19 nt, Artificial Sequence
  Description of Artificial Sequence: Synthetic oligonucleotide
  Sense strand starting at position 3707 of SEQ ID NO: 1881014
ucaguauccucuuuggaau

SEQ ID NO: 2011337 - RNA, 19 nt, Artificial Sequence
  Description of Artificial Sequence: Synthetic oligonucleotide
  Antisense strand to SEQ ID NO: 2011336
auuccaaagaggauacuga

SEQ ID NO: 2011338 - RNA, 19 nt, Artificial Sequence
  Description of Artificial Sequence: Synthetic oligonucleotide
  Sense strand starting at position 3708 of SEQ ID NO: 1881014
caguauccucuuuggaaug

SEQ ID NO: 2011339 - RNA, 19 nt, Artificial Sequence
  Description of Artificial Sequence: Synthetic oligonucleotide
  Antisense strand to SEQ ID NO: 2011338
cauuccaaagaggauacug

SEQ ID NO: 2011340 - RNA, 19 nt, Artificial Sequence
  Description of Artificial Sequence: Synthetic oligonucleotide
  Sense strand starting at position 3719 of SEQ ID NO: 1881014
uuggaaugccauuacucau

SEQ ID NO: 2011341 - RNA, 19 nt, Artificial Sequence
  Description of Artificial Sequence: Synthetic oligonucleotide
  Antisense strand to SEQ ID NO: 2011340
augaguaauggcauuccaa

SEQ ID NO: 2011342 - RNA, 19 nt, Artificial Sequence
  Description of Artificial Sequence: Synthetic oligonucleotide
  Sense strand starting at position 3767 of SEQ ID NO: 1881014
uggguaagaugaguguauu

SEQ ID NO: 2011343 - RNA, 19 nt, Artificial Sequence
  Description of Artificial Sequence: Synthetic oligonucleotide
  Antisense strand to SEQ ID NO: 2011342
aauacacucaucuuaccca

SEQ ID NO: 2011344 - RNA, 19 nt, Artificial Sequence
  Description of Artificial Sequence: Synthetic oligonucleotide
  Sense strand starting at position 3768 of SEQ ID NO: 1881014
ggguaagaugaguguauuc

SEQ ID NO: 2011345 - RNA, 19 nt, Artificial Sequence
  Description of Artificial Sequence: Synthetic oligonucleotide
  Antisense strand to SEQ ID NO: 2011344
gaauacacucaucuuaccc

SEQ ID NO: 2011346 - RNA, 19 nt, Artificial Sequence
  Description of Artificial Sequence: Synthetic oligonucleotide
  Sense strand starting at position 3770 of SEQ ID NO: 1881014
guaagaugaguguauucuu

SEQ ID NO: 2011347 - RNA, 19 nt, Artificial Sequence
  Description of Artificial Sequence: Synthetic oligonucleotide
  Antisense strand to SEQ ID NO: 2011346
aagaauacacucaucuuac

SEQ ID NO: 2011348 - RNA, 19 nt, Artificial Sequence
  Description of Artificial Sequence: Synthetic oligonucleotide
  Sense strand starting at position 3959 of SEQ ID NO: 1881014
gaagucucccuugaguauc

SEQ ID NO: 2011349 - RNA, 19 nt, Artificial Sequence
  Description of Artificial Sequence: Synthetic oligonucleotide
  Antisense strand to SEQ ID NO: 2011348
gauacucaagggagacuuc

SEQ ID NO: 2011350 - RNA, 19 nt, Artificial Sequence
  Description of Artificial Sequence: Synthetic oligonucleotide
  Sense strand starting at position 362 of SEQ ID NO: 1881015
aguccuuccugggaaagga

SEQ ID NO: 2011351 - RNA, 19 nt, Artificial Sequence
  Description of Artificial Sequence: Synthetic oligonucleotide
  Antisense strand to SEQ ID NO: 2011350
uccuuucccaggaaggacu

SEQ ID NO: 2011352 - RNA, 19 nt, Artificial Sequence
  Description of Artificial Sequence: Synthetic oligonucleotide
  Sense strand starting at position 520 of SEQ ID NO: 1881015
accguuuccuccuagacau

SEQ ID NO: 2011353 - RNA, 19 nt, Artificial Sequence
  Description of Artificial Sequence: Synthetic oligonucleotide
  Antisense strand to SEQ ID NO: 2011352
augucuaggaggaaacggu

SEQ ID NO: 2011354 - RNA, 19 nt, Artificial Sequence
  Description of Artificial Sequence: Synthetic oligonucleotide
  Sense strand starting at position 522 of SEQ ID NO: 1881015
cguuuccuccuagacauaa

SEQ ID NO: 2011355 - RNA, 19 nt, Artificial Sequence
  Description of Artificial Sequence: Synthetic oligonucleotide
  Antisense strand to SEQ ID NO: 2011354
uuaugucuaggaggaaacg

SEQ ID NO: 2011356 - RNA, 19 nt, Artificial Sequence
  Description of Artificial Sequence: Synthetic oligonucleotide
  Sense strand starting at position 556 of SEQ ID NO: 1881015
gguuuauucccuugacagg

SEQ ID NO: 2011357 - RNA, 19 nt, Artificial Sequence
  Description of Artificial Sequence: Synthetic oligonucleotide
  Antisense strand to SEQ ID NO: 2011356
ccugucaagggaauaaacc

SEQ ID NO: 2011358 - RNA, 19 nt, Artificial Sequence
  Description of Artificial Sequence: Synthetic oligonucleotide
  Sense strand starting at position 2590 of SEQ ID NO: 1881015
ccaagaagguuccgugguu

SEQ ID NO: 2011359 - RNA, 19 nt, Artificial Sequence
  Description of Artificial Sequence: Synthetic oligonucleotide
  Antisense strand to SEQ ID NO: 2011358
aaccacggaaccuucuugg

SEQ ID NO: 2011360 - RNA, 19 nt, Artificial Sequence
  Description of Artificial Sequence: Synthetic oligonucleotide
  Sense strand starting at position 2593 of SEQ ID NO: 1881015
agaagguuccgugguucga

SEQ ID NO: 2011361 - RNA, 19 nt, Artificial Sequence
  Description of Artificial Sequence: Synthetic oligonucleotide
  Antisense strand to SEQ ID NO: 2011360
ucgaaccacggaaccuucu

SEQ ID NO: 2011362 - RNA, 19 nt, Artificial Sequence
  Description of Artificial Sequence: Synthetic oligonucleotide
  Sense strand starting at position 2633 of SEQ ID NO: 1881015
ccucaaguacucgaucaag

SEQ ID NO: 2011363 - RNA, 19 nt, Artificial Sequence
  Description of Artificial Sequence: Synthetic oligonucleotide
  Antisense strand to SEQ ID NO: 2011362
cuugaucgaguacuugagg

SEQ ID NO: 2011364 - RNA, 19 nt, Artificial Sequence
  Description of Artificial Sequence: Synthetic oligonucleotide
  Sense strand starting at position 3190 of SEQ ID NO: 1881015
cguuguuugcuuuagguuu

SEQ ID NO: 2011365 - RNA, 19 nt, Artificial Sequence
  Description of Artificial Sequence: Synthetic oligonucleotide
  Antisense strand to SEQ ID NO: 2011364
aaaccuaaagcaaacaacg

SEQ ID NO: 2011366 - RNA, 19 nt, Artificial Sequence
  Description of Artificial Sequence: Synthetic oligonucleotide
  Sense strand starting at position 3475 of SEQ ID NO: 1881015
ggcacaauaaagcguuuaa

SEQ ID NO: 2011367 - RNA, 19 nt, Artificial Sequence
  Description of Artificial Sequence: Synthetic oligonucleotide
  Antisense strand to SEQ ID NO: 2011366
uuaaacgcuuuauugugcc

SEQ ID NO: 2011368 - RNA, 19 nt, Artificial Sequence
  Description of Artificial Sequence: Synthetic oligonucleotide
  Sense strand starting at position 3508 of SEQ ID NO: 1881015
cucguuuaaucugagugga

SEQ ID NO: 2011369 - RNA, 19 nt, Artificial Sequence
  Description of Artificial Sequence: Synthetic oligonucleotide
  Antisense strand to SEQ ID NO: 2011368
uccacucagauuaaacgag

SEQ ID NO: 2011370 - RNA, 19 nt, Artificial Sequence
  Description of Artificial Sequence: Synthetic oligonucleotide
  Sense strand starting at position 3510 of SEQ ID NO: 1881015
cguuuaaucugaguggaau

SEQ ID NO: 2011371 - RNA, 19 nt, Artificial Sequence
  Description of Artificial Sequence: Synthetic oligonucleotide
  Antisense strand to SEQ ID NO: 2011370
auuccacucagauuaaacg

SEQ ID NO: 2011372 - RNA, 19 nt, Artificial Sequence
  Description of Artificial Sequence: Synthetic oligonucleotide
  Sense strand starting at position 3511 of SEQ ID NO: 1881015
guuuaaucugaguggaaua

SEQ ID NO: 2011373 - RNA, 19 nt, Artificial Sequence
  Description of Artificial Sequence: Synthetic oligonucleotide
  Antisense strand to SEQ ID NO: 2011372
uauuccacucagauuaaac

SEQ ID NO: 2011374 - RNA, 19 nt, Artificial Sequence
  Description of Artificial Sequence: Synthetic oligonucleotide
  Sense strand starting at position 3512 of SEQ ID NO: 1881015
uuuaaucugaguggaauag

SEQ ID NO: 2011375 - RNA, 19 nt, Artificial Sequence
  Description of Artificial Sequence: Synthetic oligonucleotide
  Antisense strand to SEQ ID NO: 2011374
cuauuccacucagauuaaa

SEQ ID NO: 2011376 - RNA, 19 nt, Artificial Sequence
  Description of Artificial Sequence: Synthetic oligonucleotide
  Sense strand starting at position 3589 of SEQ ID NO: 1881015
agaucuguuggccagggua

SEQ ID NO: 2011377 - RNA, 19 nt, Artificial Sequence
  Description of Artificial Sequence: Synthetic oligonucleotide
  Antisense strand to SEQ ID NO: 2011376
uacccuggccaacagaucu

SEQ ID NO: 2011378 - RNA, 19 nt, Artificial Sequence
  Description of Artificial Sequence: Synthetic oligonucleotide
  Sense strand starting at position 3639 of SEQ ID NO: 1881015
gggaauugcuggcuuggga

SEQ ID NO: 2011379 - RNA, 19 nt, Artificial Sequence
  Description of Artificial Sequence: Synthetic oligonucleotide
  Antisense strand to SEQ ID NO: 2011378
ucccaagccagcaauuccc

SEQ ID NO: 2011380 - RNA, 19 nt, Artificial Sequence
  Description of Artificial Sequence: Synthetic oligonucleotide
  Sense strand starting at position 3800 of SEQ ID NO: 1881015
cagaguuaauggucaggga

SEQ ID NO: 2011381 - RNA, 19 nt, Artificial Sequence
  Description of Artificial Sequence: Synthetic oligonucleotide
  Antisense strand to SEQ ID NO: 2011380
ucccugaccauuaacucug

SEQ ID NO: 2011382 - RNA, 19 nt, Artificial Sequence
  Description of Artificial Sequence: Synthetic oligonucleotide
  Sense strand starting at position 3804 of SEQ ID NO: 1881015
guuaauggucagggaccua

SEQ ID NO: 2011383 - RNA, 19 nt, Artificial Sequence
  Description of Artificial Sequence: Synthetic oligonucleotide
  Antisense strand to SEQ ID NO: 2011382
uaggucccugaccauuaac

SEQ ID NO: 2011384 - RNA, 19 nt, Artificial Sequence
  Description of Artificial Sequence: Synthetic oligonucleotide
  Sense strand starting at position 3837 of SEQ ID NO: 1881015
agagguaguucuuacaaag

SEQ ID NO: 2011385 - RNA, 19 nt, Artificial Sequence
  Description of Artificial Sequence: Synthetic oligonucleotide
  Antisense strand to SEQ ID NO: 2011384
cuuuguaagaacuaccucu

SEQ ID NO: 2011386 - RNA, 19 nt, Artificial Sequence
  Description of Artificial Sequence: Synthetic oligonucleotide
  Sense strand starting at position 3862 of SEQ ID NO: 1881015
cagacuggccuguaaacuu

SEQ ID NO: 2011387 - RNA, 19 nt, Artificial Sequence
  Description of Artificial Sequence: Synthetic oligonucleotide
  Antisense strand to SEQ ID NO: 2011386
aaguuuacaggccagucug

SEQ ID NO: 2011388 - RNA, 19 nt, Artificial Sequence
  Description of Artificial Sequence: Synthetic oligonucleotide
  Sense strand starting at position 3871 of SEQ ID NO: 1881015
cuguaaacuuagucauucu

SEQ ID NO: 2011389 - RNA, 19 nt, Artificial Sequence
  Description of Artificial Sequence: Synthetic oligonucleotide
  Antisense strand to SEQ ID NO: 2011388
agaaugacuaaguuuacag

SEQ ID NO: 2011390 - RNA, 19 nt, Artificial Sequence
  Description of Artificial Sequence: Synthetic oligonucleotide
  Sense strand starting at position 3899 of SEQ ID NO: 1881015
gaggguuagagugagaugu

SEQ ID NO: 2011391 - RNA, 19 nt, Artificial Sequence
  Description of Artificial Sequence: Synthetic oligonucleotide
  Antisense strand to SEQ ID NO: 2011390
acaucucacucuaacccuc

SEQ ID NO: 2011392 - RNA, 19 nt, Artificial Sequence
  Description of Artificial Sequence: Synthetic oligonucleotide
  Sense strand starting at position 3901 of SEQ ID NO: 1881015
ggguuagagugagauguga

SEQ ID NO: 2011393 - RNA, 19 nt, Artificial Sequence
  Description of Artificial Sequence: Synthetic oligonucleotide
  Antisense strand to SEQ ID NO: 2011392
ucacaucucacucuaaccc

SEQ ID NO: 2011394 - RNA, 19 nt, Artificial Sequence
  Description of Artificial Sequence: Synthetic oligonucleotide
  Sense strand starting at position 3945 of SEQ ID NO: 1881015
aguggaguuccugaccaca

SEQ ID NO: 2011395 - RNA, 19 nt, Artificial Sequence
  Description of Artificial Sequence: Synthetic oligonucleotide
  Antisense strand to SEQ ID NO: 2011394
uguggucaggaacuccacu

SEQ ID NO: 2011396 - RNA, 19 nt, Artificial Sequence
  Description of Artificial Sequence: Synthetic oligonucleotide
  Sense strand starting at position 3947 of SEQ ID NO: 1881015
uggaguuccugaccacaau

SEQ ID NO: 2011397 - RNA, 19 nt, Artificial Sequence
  Description of Artificial Sequence: Synthetic oligonucleotide
  Antisense strand to SEQ ID NO: 2011396
auuguggucaggaacucca

SEQ ID NO: 2011398 - RNA, 19 nt, Artificial Sequence
  Description of Artificial Sequence: Synthetic oligonucleotide
  Sense strand starting at position 3970 of SEQ ID NO: 1881015
cguguggucucagaagggu

SEQ ID NO: 2011399 - RNA, 19 nt, Artificial Sequence
  Description of Artificial Sequence: Synthetic oligonucleotide
  Antisense strand to SEQ ID NO: 2011398
acccuucugagaccacacg

SEQ ID NO: 2011400 - RNA, 19 nt, Artificial Sequence
  Description of Artificial Sequence: Synthetic oligonucleotide
  Sense strand starting at position 3973 of SEQ ID NO: 1881015
guggucucagaaggguauu

SEQ ID NO: 2011401 - RNA, 19 nt, Artificial Sequence
  Description of Artificial Sequence: Synthetic oligonucleotide
  Antisense strand to SEQ ID NO: 2011400
aauacccuucugagaccac

SEQ ID NO: 2011402 - RNA, 19 nt, Artificial Sequence
  Description of Artificial Sequence: Synthetic oligonucleotide
  Sense strand starting at position 4 of SEQ ID NO: 1881016
aaauguuugcuguaugaag

SEQ ID NO: 2011403 - RNA, 19 nt, Artificial Sequence
  Description of Artificial Sequence: Synthetic oligonucleotide
  Antisense strand to SEQ ID NO: 2011402
cuucauacagcaaacauuu

SEQ ID NO: 2011404 - RNA, 19 nt, Artificial Sequence
  Description of Artificial Sequence: Synthetic oligonucleotide
  Sense strand starting at position 18 of SEQ ID NO: 1881016
ugaagaaaucaguggcaga

SEQ ID NO: 2011405 - RNA, 19 nt, Artificial Sequence
  Description of Artificial Sequence: Synthetic oligonucleotide
  Antisense strand to SEQ ID NO: 2011404
ucugccacugauuucuuca

SEQ ID NO: 2011406 - RNA, 19 nt, Artificial Sequence
  Description of Artificial Sequence: Synthetic oligonucleotide
  Sense strand starting at position 23 of SEQ ID NO: 1881016
aaaucaguggcagauaugu

SEQ ID NO: 2011407 - RNA, 19 nt, Artificial Sequence
  Description of Artificial Sequence: Synthetic oligonucleotide
  Antisense strand to SEQ ID NO: 2011406
acauaucugccacugauuu

SEQ ID NO: 2011408 - RNA, 19 nt, Artificial Sequence
  Description of Artificial Sequence: Synthetic oligonucleotide
  Sense strand starting at position 32 of SEQ ID NO: 1881016
gcagauaugucaucucuac

SEQ ID NO: 2011409 - RNA, 19 nt, Artificial Sequence
  Description of Artificial Sequence: Synthetic oligonucleotide
  Antisense strand to SEQ ID NO: 2011408
guagagaugacauaucugc

SEQ ID NO: 2011410 - RNA, 19 nt, Artificial Sequence
  Description of Artificial Sequence: Synthetic oligonucleotide
  Sense strand starting at position 110 of SEQ ID NO: 1881016
gaaagaacagaauguuguu

SEQ ID NO: 2011411 - RNA, 19 nt, Artificial Sequence
  Description of Artificial Sequence: Synthetic oligonucleotide
  Antisense strand to SEQ ID NO: 2011410
aacaacauucuguucuuuc

SEQ ID NO: 2011412 - RNA, 19 nt, Artificial Sequence
  Description of Artificial Sequence: Synthetic oligonucleotide
  Sense strand starting at position 116 of SEQ ID NO: 1881016
acagaauguuguucuaaca

SEQ ID NO: 2011413 - RNA, 19 nt, Artificial Sequence
  Description of Artificial Sequence: Synthetic oligonucleotide
  Antisense strand to SEQ ID NO: 2011412
uguuagaacaacauucugu

SEQ ID NO: 2011414 - RNA, 19 nt, Artificial Sequence
  Description of Artificial Sequence: Synthetic oligonucleotide
  Sense strand starting at position 213 of SEQ ID NO: 1881016
guagauaaagaaugucauu

SEQ ID NO: 2011415 - RNA, 19 nt, Artificial Sequence
  Description of Artificial Sequence: Synthetic oligonucleotide
  Antisense strand to SEQ ID NO: 2011414
aaugacauucuuuaucuac

SEQ ID NO: 2011416 - RNA, 19 nt, Artificial Sequence
  Description of Artificial Sequence: Synthetic oligonucleotide
  Sense strand starting at position 293 of SEQ ID NO: 1881016
gcaucuacaccacgugaaa

SEQ ID NO: 2011417 - RNA, 19 nt, Artificial Sequence
  Description of Artificial Sequence: Synthetic oligonucleotide
  Antisense strand to SEQ ID NO: 2011416
uuucacgugguguagaugc

SEQ ID NO: 2011418 - RNA, 19 nt, Artificial Sequence
  Description of Artificial Sequence: Synthetic oligonucleotide
  Sense strand starting at position 326 of SEQ ID NO: 1881016
aggcacuguggugauauaa

SEQ ID NO: 2011419 - RNA, 19 nt, Artificial Sequence
  Description of Artificial Sequence: Synthetic oligonucleotide
  Antisense strand to SEQ ID NO: 2011418
uuauaucaccacagugccu

SEQ ID NO: 2011420 - RNA, 19 nt, Artificial Sequence
  Description of Artificial Sequence: Synthetic oligonucleotide
  Sense strand starting at position 416 of SEQ ID NO: 1881016
gcaguuguuugggcaagag

SEQ ID NO: 2011421 - RNA, 19 nt, Artificial Sequence
  Description of Artificial Sequence: Synthetic oligonucleotide
  Antisense strand to SEQ ID NO: 2011420
cucuugcccaaacaacugc

SEQ ID NO: 2011422 - RNA, 19 nt, Artificial Sequence
  Description of Artificial Sequence: Synthetic oligonucleotide
  Sense strand starting at position 468 of SEQ ID NO: 1881016
gaguguaaagcaggaauau

SEQ ID NO: 2011423 - RNA, 19 nt, Artificial Sequence
  Description of Artificial Sequence: Synthetic oligonucleotide
  Antisense strand to SEQ ID NO: 2011422
auauuccugcuuuacacuc

SEQ ID NO: 2011424 - RNA, 19 nt, Artificial Sequence
  Description of Artificial Sequence: Synthetic oligonucleotide
  Sense strand starting at position 469 of SEQ ID NO: 1881016
aguguaaagcaggaauauu

SEQ ID NO: 2011425 - RNA, 19 nt, Artificial Sequence
  Description of Artificial Sequence: Synthetic oligonucleotide
  Antisense strand to SEQ ID NO: 2011424
aauauuccugcuuuacacu

SEQ ID NO: 2011426 - RNA, 19 nt, Artificial Sequence
  Description of Artificial Sequence: Synthetic oligonucleotide
  Sense strand starting at position 500 of SEQ ID NO: 1881016
gacugagaguaugugauau

SEQ ID NO: 2011427 - RNA, 19 nt, Artificial Sequence
  Description of Artificial Sequence: Synthetic oligonucleotide
  Antisense strand to SEQ ID NO: 2011426
auaucacauacucucaguc

SEQ ID NO: 2011428 - RNA, 19 nt, Artificial Sequence
  Description of Artificial Sequence: Synthetic oligonucleotide
  Sense strand starting at position 546 of SEQ ID NO: 1881016
gcccgcacuacugagagaa

SEQ ID NO: 2011429 - RNA, 19 nt, Artificial Sequence
  Description of Artificial Sequence: Synthetic oligonucleotide
  Antisense strand to SEQ ID NO: 2011428
uucucucaguagugcgggc

SEQ ID NO: 2011430 - RNA, 19 nt, Artificial Sequence
  Description of Artificial Sequence: Synthetic oligonucleotide
  Sense strand starting at position 706 of SEQ ID NO: 1881016
cugaguuuccaucaaggca

SEQ ID NO: 2011431 - RNA, 19 nt, Artificial Sequence
  Description of Artificial Sequence: Synthetic oligonucleotide
  Antisense strand to SEQ ID NO: 2011430
ugccuugauggaaacucag

SEQ ID NO: 2011432 - RNA, 19 nt, Artificial Sequence
  Description of Artificial Sequence: Synthetic oligonucleotide
  Sense strand starting at position 787 of SEQ ID NO: 1881016
acucauuuaucccacaggu

SEQ ID NO: 2011433 - RNA, 19 nt, Artificial Sequence
  Description of Artificial Sequence: Synthetic oligonucleotide
  Antisense strand to SEQ ID NO: 2011432
accugugggauaaaugagu

SEQ ID NO: 2011434 - RNA, 19 nt, Artificial Sequence
  Description of Artificial Sequence: Synthetic oligonucleotide
  Sense strand starting at position 800 of SEQ ID NO: 1881016
acagguaaucucugaacac

SEQ ID NO: 2011435 - RNA, 19 nt, Artificial Sequence
  Description of Artificial Sequence: Synthetic oligonucleotide
  Antisense strand to SEQ ID NO: 2011434
guguucagagauuaccugu

SEQ ID NO: 2011436 - RNA, 19 nt, Artificial Sequence
  Description of Artificial Sequence: Synthetic oligonucleotide
  Sense strand starting at position 859 of SEQ ID NO: 1881016
augugucgugaagaaauaa

SEQ ID NO: 2011437 - RNA, 19 nt, Artificial Sequence
  Description of Artificial Sequence: Synthetic oligonucleotide
  Antisense strand to SEQ ID NO: 2011436
uuauuucuucacgacacau

SEQ ID NO: 2011438 - RNA, 19 nt, Artificial Sequence
  Description of Artificial Sequence: Synthetic oligonucleotide
  Sense strand starting at position 892 of SEQ ID NO: 1881016
uggagcuuguagccuaaua

SEQ ID NO: 2011439 - RNA, 19 nt, Artificial Sequence
  Description of Artificial Sequence: Synthetic oligonucleotide
  Antisense strand to SEQ ID NO: 2011438
uauuaggcuacaagcucca

SEQ ID NO: 2011440 - RNA, 19 nt, Artificial Sequence
  Description of Artificial Sequence: Synthetic oligonucleotide
  Sense strand starting at position 987 of SEQ ID NO: 1881016
cccagaauacguggguuca

SEQ ID NO: 2011441 - RNA, 19 nt, Artificial Sequence
  Description of Artificial Sequence: Synthetic oligonucleotide
  Antisense strand to SEQ ID NO: 2011440
ugaacccacguauucuggg

SEQ ID NO: 2011442 - RNA, 19 nt, Artificial Sequence
  Description of Artificial Sequence: Synthetic oligonucleotide
  Sense strand starting at position 988 of SEQ ID NO: 1881016
ccagaauacguggguucaa

SEQ ID NO: 2011443 - RNA, 19 nt, Artificial Sequence
  Description of Artificial Sequence: Synthetic oligonucleotide
  Antisense strand to SEQ ID NO: 2011442
uugaacccacguauucugg

SEQ ID NO: 2011444 - RNA, 19 nt, Artificial Sequence
  Description of Artificial Sequence: Synthetic oligonucleotide
  Sense strand starting at position 1050 of SEQ ID NO: 1881016
uuacuuaaccugugucuuu

SEQ ID NO: 2011445 - RNA, 19 nt, Artificial Sequence
  Description of Artificial Sequence: Synthetic oligonucleotide
  Antisense strand to SEQ ID NO: 2011444
aaagacacagguuaaguaa

SEQ ID NO: 2011446 - RNA, 19 nt, Artificial Sequence
  Description of Artificial Sequence: Synthetic oligonucleotide
  Sense strand starting at position 1073 of SEQ ID NO: 1881016
aucugucaacuugguguaa

SEQ ID NO: 2011447 - RNA, 19 nt, Artificial Sequence
  Description of Artificial Sequence: Synthetic oligonucleotide
  Antisense strand to SEQ ID NO: 2011446
uuacaccaaguugacagau

SEQ ID NO: 2011448 - RNA, 19 nt, Artificial Sequence
  Description of Artificial Sequence: Synthetic oligonucleotide
  Sense strand starting at position 1107 of SEQ ID NO: 1881016
aacagugauugauaugaua

SEQ ID NO: 2011449 - RNA, 19 nt, Artificial Sequence
  Description of Artificial Sequence: Synthetic oligonucleotide
  Antisense strand to SEQ ID NO: 2011448
uaucauaucaaucacuguu

SEQ ID NO: 2011450 - RNA, 19 nt, Artificial Sequence
  Description of Artificial Sequence: Synthetic oligonucleotide
  Sense strand starting at position 1155 of SEQ ID NO: 1881016
cuaucuggguguuugcaau

SEQ ID NO: 2011451 - RNA, 19 nt, Artificial Sequence
  Description of Artificial Sequence: Synthetic oligonucleotide
  Antisense strand to SEQ ID NO: 2011450
auugcaaacacccagauag

SEQ ID NO: 2011452 - RNA, 19 nt, Artificial Sequence
  Description of Artificial Sequence: Synthetic oligonucleotide
  Sense strand starting at position 1194 of SEQ ID NO: 1881016
gaucauucccaguaacgca

SEQ ID NO: 2011453 - RNA, 19 nt, Artificial Sequence
  Description of Artificial Sequence: Synthetic oligonucleotide
  Antisense strand to SEQ ID NO: 2011452
ugcguuacugggaaugauc

SEQ ID NO: 2011454 - RNA, 19 nt, Artificial Sequence
  Description of Artificial Sequence: Synthetic oligonucleotide
  Sense strand starting at position 1243 of SEQ ID NO: 1881016
gcucauuccucaucccgau

SEQ ID NO: 2011455 - RNA, 19 nt, Artificial Sequence
  Description of Artificial Sequence: Synthetic oligonucleotide
  Antisense strand to SEQ ID NO: 2011454
aucgggaugaggaaugagc

SEQ ID NO: 2011456 - RNA, 19 nt, Artificial Sequence
  Description of Artificial Sequence: Synthetic oligonucleotide
  Sense strand starting at position 1249 of SEQ ID NO: 1881016
uccucaucccgauguacuu

SEQ ID NO: 2011457 - RNA, 19 nt, Artificial Sequence
  Description of Artificial Sequence: Synthetic oligonucleotide
  Antisense strand to SEQ ID NO: 2011456
aaguacaucgggaugagga

SEQ ID NO: 2011458 - RNA, 19 nt, Artificial Sequence
  Description of Artificial Sequence: Synthetic oligonucleotide
  Sense strand starting at position 1294 of SEQ ID NO: 1881016
cgauuucggucacugggau

SEQ ID NO: 2011459 - RNA, 19 nt, Artificial Sequence
  Description of Artificial Sequence: Synthetic oligonucleotide
  Antisense strand to SEQ ID NO: 2011458
aucccagugaccgaaaucg

SEQ ID NO: 2011460 - RNA, 19 nt, Artificial Sequence
  Description of Artificial Sequence: Synthetic oligonucleotide
  Sense strand starting at position 1453 of SEQ ID NO: 1881016
ucuacucgucuccaagaca

SEQ ID NO: 2011461 - RNA, 19 nt, Artificial Sequence
  Description of Artificial Sequence: Synthetic oligonucleotide
  Antisense strand to SEQ ID NO: 2011460
ugucuuggagacgaguaga

SEQ ID NO: 2011462 - RNA, 19 nt, Artificial Sequence
  Description of Artificial Sequence: Synthetic oligonucleotide
  Sense strand starting at position 2448 of SEQ ID NO: 1881016
gcaccuugaagguaguaua

SEQ ID NO: 2011463 - RNA, 19 nt, Artificial Sequence
  Description of Artificial Sequence: Synthetic oligonucleotide
  Antisense strand to SEQ ID NO: 2011462
uauacuaccuucaaggugc

SEQ ID NO: 2011464 - RNA, 19 nt, Artificial Sequence
  Description of Artificial Sequence: Synthetic oligonucleotide
  Sense strand starting at position 2624 of SEQ ID NO: 1881016
aucguuugcaaugugcaau

SEQ ID NO: 2011465 - RNA, 19 nt, Artificial Sequence
  Description of Artificial Sequence: Synthetic oligonucleotide
  Antisense strand to SEQ ID NO: 2011464
auugcacauugcaaacgau

SEQ ID NO: 2011466 - RNA, 19 nt, Artificial Sequence
  Description of Artificial Sequence: Synthetic oligonucleotide
  Sense strand starting at position 2630 of SEQ ID NO: 1881016
ugcaaugugcaauaucuga

SEQ ID NO: 2011467 - RNA, 19 nt, Artificial Sequence
  Description of Artificial Sequence: Synthetic oligonucleotide
  Antisense strand to SEQ ID NO: 2011466
ucagauauugcacauugca

SEQ ID NO: 2011468 - RNA, 19 nt, Artificial Sequence
  Description of Artificial Sequence: Synthetic oligonucleotide
  Sense strand starting at position 2654 of SEQ ID NO: 1881016
cugccuuggagucauuaga

SEQ ID NO: 2011469 - RNA, 19 nt, Artificial Sequence
  Description of Artificial Sequence: Synthetic oligonucleotide
  Antisense strand to SEQ ID NO: 2011468
ucuaaugacuccaaggcag

SEQ ID NO: 2011470 - RNA, 19 nt, Artificial Sequence
  Description of Artificial Sequence: Synthetic oligonucleotide
  Sense strand starting at position 2672 of SEQ ID NO: 1881016
acccucugcucagugacaa

SEQ ID NO: 2011471 - RNA, 19 nt, Artificial Sequence
  Description of Artificial Sequence: Synthetic oligonucleotide
  Antisense strand to SEQ ID NO: 2011470
uugucacugagcagagggu

SEQ ID NO: 2011472 - RNA, 19 nt, Artificial Sequence
  Description of Artificial Sequence: Synthetic oligonucleotide
  Sense strand starting at position 2673 of SEQ ID NO: 1881016
cccucugcucagugacaau

SEQ ID NO: 2011473 - RNA, 19 nt, Artificial Sequence
  Description of Artificial Sequence: Synthetic oligonucleotide
  Antisense strand to SEQ ID NO: 2011472
auugucacugagcagaggg

SEQ ID NO: 2011474 - RNA, 19 nt, Artificial Sequence
  Description of Artificial Sequence: Synthetic oligonucleotide
  Sense strand starting at position 2710 of SEQ ID NO: 1881016
uguaauaaacaguggaacu

SEQ ID NO: 2011475 - RNA, 19 nt, Artificial Sequence
  Description of Artificial Sequence: Synthetic oligonucleotide
  Antisense strand to SEQ ID NO: 2011474
aguuccacuguuuauuaca

SEQ ID NO: 2011476 - RNA, 19 nt, Artificial Sequence
  Description of Artificial Sequence: Synthetic oligonucleotide
  Sense strand starting at position 2771 of SEQ ID NO: 1881016
cagugauaaguggacagua

SEQ ID NO: 2011477 - RNA, 19 nt, Artificial Sequence
  Description of Artificial Sequence: Synthetic oligonucleotide
  Antisense strand to SEQ ID NO: 2011476
uacuguccacuuaucacug

SEQ ID NO: 2011478 - RNA, 19 nt, Artificial Sequence
  Description of Artificial Sequence: Synthetic oligonucleotide
  Sense strand starting at position 2806 of SEQ ID NO: 1881016
gugggucauggguagugaa

SEQ ID NO: 2011479 - RNA, 19 nt, Artificial Sequence
  Description of Artificial Sequence: Synthetic oligonucleotide
  Antisense strand to SEQ ID NO: 2011478
uucacuacccaugacccac

SEQ ID NO: 2011480 - RNA, 19 nt, Artificial Sequence
  Description of Artificial Sequence: Synthetic oligonucleotide
  Sense strand starting at position 2814 of SEQ ID NO: 1881016
uggguagugaaaugaguga

SEQ ID NO: 2011481 - RNA, 19 nt, Artificial Sequence
  Description of Artificial Sequence: Synthetic oligonucleotide
  Antisense strand to SEQ ID NO: 2011480
ucacucauuucacuaccca

SEQ ID NO: 2011482 - RNA, 19 nt, Artificial Sequence
  Description of Artificial Sequence: Synthetic oligonucleotide
  Sense strand starting at position 11 of SEQ ID NO: 1881017
cccagugcugugucuuagu

SEQ ID NO: 2011483 - RNA, 19 nt, Artificial Sequence
  Description of Artificial Sequence: Synthetic oligonucleotide
  Antisense strand to SEQ ID NO: 2011482
acuaagacacagcacuggg

SEQ ID NO: 2011484 - RNA, 19 nt, Artificial Sequence
  Description of Artificial Sequence: Synthetic oligonucleotide
  Sense strand starting at position 18 of SEQ ID NO: 1881017
cugugucuuagugagcaga

SEQ ID NO: 2011485 - RNA, 19 nt, Artificial Sequence
  Description of Artificial Sequence: Synthetic oligonucleotide
  Antisense strand to SEQ ID NO: 2011484
ucugcucacuaagacacag

SEQ ID NO: 2011486 - RNA, 19 nt, Artificial Sequence
  Description of Artificial Sequence: Synthetic oligonucleotide
  Sense strand starting at position 20 of SEQ ID NO: 1881017
gugucuuagugagcagaca

SEQ ID NO: 2011487 - RNA, 19 nt, Artificial Sequence
  Description of Artificial Sequence: Synthetic oligonucleotide
  Antisense strand to SEQ ID NO: 2011486
ugucugcucacuaagacac

SEQ ID NO: 2011488 - RNA, 19 nt, Artificial Sequence
  Description of Artificial Sequence: Synthetic oligonucleotide
  Sense strand starting at position 130 of SEQ ID NO: 1881017
ggcuuucauggugguuuga

SEQ ID NO: 2011489 - RNA, 19 nt, Artificial Sequence
  Description of Artificial Sequence: Synthetic oligonucleotide
  Antisense strand to SEQ ID NO: 2011488
ucaaaccaccaugaaagcc

SEQ ID NO: 2011490 - RNA, 19 nt, Artificial Sequence
  Description of Artificial Sequence: Synthetic oligonucleotide
  Sense strand starting at position 132 of SEQ ID NO: 1881017
cuuucauggugguuugaag

SEQ ID NO: 2011491 - RNA, 19 nt, Artificial Sequence
  Description of Artificial Sequence: Synthetic oligonucleotide
  Antisense strand to SEQ ID NO: 2011490
cuucaaaccaccaugaaag

SEQ ID NO: 2011492 - RNA, 19 nt, Artificial Sequence
  Description of Artificial Sequence: Synthetic oligonucleotide
  Sense strand starting at position 143 of SEQ ID NO: 1881017
guuugaagguguucacaag

SEQ ID NO: 2011493 - RNA, 19 nt, Artificial Sequence
  Description of Artificial Sequence: Synthetic oligonucleotide
  Antisense strand to SEQ ID NO: 2011492
cuugugaacaccuucaaac

SEQ ID NO: 2011494 - RNA, 19 nt, Artificial Sequence
  Description of Artificial Sequence: Synthetic oligonucleotide
  Sense strand starting at position 503 of SEQ ID NO: 1881017
ggaagucggucucucacaa

SEQ ID NO: 2011495 - RNA, 19 nt, Artificial Sequence
  Description of Artificial Sequence: Synthetic oligonucleotide
  Antisense strand to SEQ ID NO: 2011494
uugugagagaccgacuucc

SEQ ID NO: 2011496 - RNA, 19 nt, Artificial Sequence
  Description of Artificial Sequence: Synthetic oligonucleotide
  Sense strand starting at position 541 of SEQ ID NO: 1881017
ugcacucugucacuuuaua

SEQ ID NO: 2011497 - RNA, 19 nt, Artificial Sequence
  Description of Artificial Sequence: Synthetic oligonucleotide
  Antisense strand to SEQ ID NO: 2011496
uauaaagugacagagugca

SEQ ID NO: 2011498 - RNA, 19 nt, Artificial Sequence
  Description of Artificial Sequence: Synthetic oligonucleotide
  Sense strand starting at position 569 of SEQ ID NO: 1881017
uuauuccuucugugguuua

SEQ ID NO: 2011499 - RNA, 19 nt, Artificial Sequence
  Description of Artificial Sequence: Synthetic oligonucleotide
  Antisense strand to SEQ ID NO: 2011498
uaaaccacagaaggaauaa

SEQ ID NO: 2011500 - RNA, 19 nt, Artificial Sequence
  Description of Artificial Sequence: Synthetic oligonucleotide
  Sense strand starting at position 572 of SEQ ID NO: 1881017
uuccuucugugguuuacau

SEQ ID NO: 2011501 - RNA, 19 nt, Artificial Sequence
  Description of Artificial Sequence: Synthetic oligonucleotide
  Antisense strand to SEQ ID NO: 2011500
auguaaaccacagaaggaa

SEQ ID NO: 2011502 - RNA, 19 nt, Artificial Sequence
  Description of Artificial Sequence: Synthetic oligonucleotide
  Sense strand starting at position 581 of SEQ ID NO: 1881017
ugguuuacaucugcccaca

SEQ ID NO: 2011503 - RNA, 19 nt, Artificial Sequence
  Description of Artificial Sequence: Synthetic oligonucleotide
  Antisense strand to SEQ ID NO: 2011502
ugugggcagauguaaacca

SEQ ID NO: 2011504 - RNA, 19 nt, Artificial Sequence
  Description of Artificial Sequence: Synthetic oligonucleotide
  Sense strand starting at position 599 of SEQ ID NO: 1881017
aucccugaccuuugaguga

SEQ ID NO: 2011505 - RNA, 19 nt, Artificial Sequence
  Description of Artificial Sequence: Synthetic oligonucleotide
  Antisense strand to SEQ ID NO: 2011504
ucacucaaaggucagggau

SEQ ID NO: 2011506 - RNA, 19 nt, Artificial Sequence
  Description of Artificial Sequence: Synthetic oligonucleotide
  Sense strand starting at position 603 of SEQ ID NO: 1881017
cugaccuuugagugaguua

SEQ ID NO: 2011507 - RNA, 19 nt, Artificial Sequence
  Description of Artificial Sequence: Synthetic oligonucleotide
  Antisense strand to SEQ ID NO: 2011506
uaacucacucaaaggucag

SEQ ID NO: 2011508 - RNA, 19 nt, Artificial Sequence
  Description of Artificial Sequence: Synthetic oligonucleotide
  Sense strand starting at position 606 of SEQ ID NO: 1881017
accuuugagugaguuacuu

SEQ ID NO: 2011509 - RNA, 19 nt, Artificial Sequence
  Description of Artificial Sequence: Synthetic oligonucleotide
  Antisense strand to SEQ ID NO: 2011508
aaguaacucacucaaaggu

SEQ ID NO: 2011510 - RNA, 19 nt, Artificial Sequence
  Description of Artificial Sequence: Synthetic oligonucleotide
  Sense strand starting at position 678 of SEQ ID NO: 1881017
gccuccuaggacugucaga

SEQ ID NO: 2011511 - RNA, 19 nt, Artificial Sequence
  Description of Artificial Sequence: Synthetic oligonucleotide
  Antisense strand to SEQ ID NO: 2011510
ucugacaguccuaggaggc

SEQ ID NO: 2011512 - RNA, 19 nt, Artificial Sequence
  Description of Artificial Sequence: Synthetic oligonucleotide
  Sense strand starting at position 691 of SEQ ID NO: 1881017
gucagaagaguucgacaag

SEQ ID NO: 2011513 - RNA, 19 nt, Artificial Sequence
  Description of Artificial Sequence: Synthetic oligonucleotide
  Antisense strand to SEQ ID NO: 2011512
cuugucgaacucuucugac

SEQ ID NO: 2011514 - RNA, 19 nt, Artificial Sequence
  Description of Artificial Sequence: Synthetic oligonucleotide
  Sense strand starting at position 741 of SEQ ID NO: 1881017
gacagauggucucugaaua

SEQ ID NO: 2011515 - RNA, 19 nt, Artificial Sequence
  Description of Artificial Sequence: Synthetic oligonucleotide
  Antisense strand to SEQ ID NO: 2011514
uauucagagaccaucuguc

SEQ ID NO: 2011516 - RNA, 19 nt, Artificial Sequence
  Description of Artificial Sequence: Synthetic oligonucleotide
  Sense strand starting at position 742 of SEQ ID NO: 1881017
acagauggucucugaauaa

SEQ ID NO: 2011517 - RNA, 19 nt, Artificial Sequence
  Description of Artificial Sequence: Synthetic oligonucleotide
  Antisense strand to SEQ ID NO: 2011516
uuauucagagaccaucugu

SEQ ID NO: 2011518 - RNA, 19 nt, Artificial Sequence
  Description of Artificial Sequence: Synthetic oligonucleotide
  Sense strand starting at position 778 of SEQ ID NO: 1881017
ucuugauucccuggacuug

SEQ ID NO: 2011519 - RNA, 19 nt, Artificial Sequence
  Description of Artificial Sequence: Synthetic oligonucleotide
  Antisense strand to SEQ ID NO: 2011518
caaguccagggaaucaaga

SEQ ID NO: 2011520 - RNA, 19 nt, Artificial Sequence
  Description of Artificial Sequence: Synthetic oligonucleotide
  Sense strand starting at position 787 of SEQ ID NO: 1881017
ccuggacuugcccaugaaa

SEQ ID NO: 2011521 - RNA, 19 nt, Artificial Sequence
  Description of Artificial Sequence: Synthetic oligonucleotide
  Antisense strand to SEQ ID NO: 2011520
uuucaugggcaaguccagg

SEQ ID NO: 2011522 - RNA, 19 nt, Artificial Sequence
  Description of Artificial Sequence: Synthetic oligonucleotide
  Sense strand starting at position 789 of SEQ ID NO: 1881017
uggacuugcccaugaaauc

SEQ ID NO: 2011523 - RNA, 19 nt, Artificial Sequence
  Description of Artificial Sequence: Synthetic oligonucleotide
  Antisense strand to SEQ ID NO: 2011522
gauuucaugggcaagucca

SEQ ID NO: 2011524 - RNA, 19 nt, Artificial Sequence
  Description of Artificial Sequence: Synthetic oligonucleotide
  Sense strand starting at position 1215 of SEQ ID NO: 1881017
ggccgaguuuggguuuaau

SEQ ID NO: 2011525 - RNA, 19 nt, Artificial Sequence
  Description of Artificial Sequence: Synthetic oligonucleotide
  Antisense strand to SEQ ID NO: 2011524
auuaaacccaaacucggcc

SEQ ID NO: 2011526 - RNA, 19 nt, Artificial Sequence
  Description of Artificial Sequence: Synthetic oligonucleotide
  Sense strand starting at position 1218 of SEQ ID NO: 1881017
cgaguuuggguuuaaucca

SEQ ID NO: 2011527 - RNA, 19 nt, Artificial Sequence
  Description of Artificial Sequence: Synthetic oligonucleotide
  Antisense strand to SEQ ID NO: 2011526
uggauuaaacccaaacucg

SEQ ID NO: 2011528 - RNA, 19 nt, Artificial Sequence
  Description of Artificial Sequence: Synthetic oligonucleotide
  Sense strand starting at position 1225 of SEQ ID NO: 1881017
ggguuuaauccaggcccga

SEQ ID NO: 2011529 - RNA, 19 nt, Artificial Sequence
  Description of Artificial Sequence: Synthetic oligonucleotide
  Antisense strand to SEQ ID NO: 2011528
ucgggccuggauuaaaccc

SEQ ID NO: 2011530 - RNA, 19 nt, Artificial Sequence
  Description of Artificial Sequence: Synthetic oligonucleotide
  Sense strand starting at position 1309 of SEQ ID NO: 1881017
cucagaugccaucaugcaa

SEQ ID NO: 2011531 - RNA, 19 nt, Artificial Sequence
  Description of Artificial Sequence: Synthetic oligonucleotide
  Antisense strand to SEQ ID NO: 2011530
uugcaugauggcaucugag

SEQ ID NO: 2011532 - RNA, 19 nt, Artificial Sequence
  Description of Artificial Sequence: Synthetic oligonucleotide
  Sense strand starting at position 1818 of SEQ ID NO: 1881017
guuuaacucgcggaaacaa

SEQ ID NO: 2011533 - RNA, 19 nt, Artificial Sequence
  Description of Artificial Sequence: Synthetic oligonucleotide
  Antisense strand to SEQ ID NO: 2011532
uuguuuccgcgaguuaaac

SEQ ID NO: 2011534 - RNA, 19 nt, Artificial Sequence
  Description of Artificial Sequence: Synthetic oligonucleotide
  Sense strand starting at position 1898 of SEQ ID NO: 1881017
gggaaccugucguuucuaa

SEQ ID NO: 2011535 - RNA, 19 nt, Artificial Sequence
  Description of Artificial Sequence: Synthetic oligonucleotide
  Antisense strand to SEQ ID NO: 2011534
uuagaaacgacagguuccc

SEQ ID NO: 2011536 - RNA, 19 nt, Artificial Sequence
  Description of Artificial Sequence: Synthetic oligonucleotide
  Sense strand starting at position 2050 of SEQ ID NO: 1881017
cgggauuccaccggguauu

SEQ ID NO: 2011537 - RNA, 19 nt, Artificial Sequence
  Description of Artificial Sequence: Synthetic oligonucleotide
  Antisense strand to SEQ ID NO: 2011536
aauacccgguggaaucccg

SEQ ID NO: 2011538 - RNA, 19 nt, Artificial Sequence
  Description of Artificial Sequence: Synthetic oligonucleotide
  Sense strand starting at position 2734 of SEQ ID NO: 1881017
uuggguuucugagugcuua

SEQ ID NO: 2011539 - RNA, 19 nt, Artificial Sequence
  Description of Artificial Sequence: Synthetic oligonucleotide
  Antisense strand to SEQ ID NO: 2011538
uaagcacucagaaacccaa

SEQ ID NO: 2011540 - RNA, 19 nt, Artificial Sequence
  Description of Artificial Sequence: Synthetic oligonucleotide
  Sense strand starting at position 2735 of SEQ ID NO: 1881017
uggguuucugagugcuuac

SEQ ID NO: 2011541 - RNA, 19 nt, Artificial Sequence
  Description of Artificial Sequence: Synthetic oligonucleotide
  Antisense strand to SEQ ID NO: 2011540
guaagcacucagaaaccca

SEQ ID NO: 2011542 - RNA, 19 nt, Artificial Sequence
  Description of Artificial Sequence: Synthetic oligonucleotide
  Sense strand starting at position 3516 of SEQ ID NO: 1881017
auaugaugucccugacuca

SEQ ID NO: 2011543 - RNA, 19 nt, Artificial Sequence
  Description of Artificial Sequence: Synthetic oligonucleotide
  Antisense strand to SEQ ID NO: 2011542
ugagucagggacaucauau

SEQ ID NO: 2011544 - RNA, 19 nt, Artificial Sequence
  Description of Artificial Sequence: Synthetic oligonucleotide
  Sense strand starting at position 3593 of SEQ ID NO: 1881017
guggaaagguagcugauua

SEQ ID NO: 2011545 - RNA, 19 nt, Artificial Sequence
  Description of Artificial Sequence: Synthetic oligonucleotide
  Antisense strand to SEQ ID NO: 2011544
uaaucagcuaccuuuccac

SEQ ID NO: 2011546 - RNA, 19 nt, Artificial Sequence
  Description of Artificial Sequence: Synthetic oligonucleotide
  Sense strand starting at position 3597 of SEQ ID NO: 1881017
aaagguagcugauuacuga

SEQ ID NO: 2011547 - RNA, 19 nt, Artificial Sequence
  Description of Artificial Sequence: Synthetic oligonucleotide
  Antisense strand to SEQ ID NO: 2011546
ucaguaaucagcuaccuuu

SEQ ID NO: 2011548 - RNA, 19 nt, Artificial Sequence
  Description of Artificial Sequence: Synthetic oligonucleotide
  Sense strand starting at position 3643 of SEQ ID NO: 1881017
gaguccauuuccuaagguu

SEQ ID NO: 2011549 - RNA, 19 nt, Artificial Sequence
  Description of Artificial Sequence: Synthetic oligonucleotide
  Antisense strand to SEQ ID NO: 2011548
aaccuuaggaaauggacuc

SEQ ID NO: 2011550 - RNA, 19 nt, Artificial Sequence
  Description of Artificial Sequence: Synthetic oligonucleotide
  Sense strand starting at position 3691 of SEQ ID NO: 1881017
cgcaccucucuugauuaca

SEQ ID NO: 2011551 - RNA, 19 nt, Artificial Sequence
  Description of Artificial Sequence: Synthetic oligonucleotide
  Antisense strand to SEQ ID NO: 2011550
uguaaucaagagaggugcg

SEQ ID NO: 2011552 - RNA, 19 nt, Artificial Sequence
  Description of Artificial Sequence: Synthetic oligonucleotide
  Sense strand starting at position 3715 of SEQ ID NO: 1881017
gggaaauuguguccuagaa

SEQ ID NO: 2011553 - RNA, 19 nt, Artificial Sequence
  Description of Artificial Sequence: Synthetic oligonucleotide
  Antisense strand to SEQ ID NO: 2011552
uucuaggacacaauuuccc

SEQ ID NO: 2011554 - RNA, 19 nt, Artificial Sequence
  Description of Artificial Sequence: Synthetic oligonucleotide
  Sense strand starting at position 3719 of SEQ ID NO: 1881017
aauuguguccuagaaugau

SEQ ID NO: 2011555 - RNA, 19 nt, Artificial Sequence
  Description of Artificial Sequence: Synthetic oligonucleotide
  Antisense strand to SEQ ID NO: 2011554
aucauucuaggacacaauu

SEQ ID NO: 2011556 - RNA, 19 nt, Artificial Sequence
  Description of Artificial Sequence: Synthetic oligonucleotide
  Sense strand starting at position 3728 of SEQ ID NO: 1881017
cuagaaugauuaggaaaca

SEQ ID NO: 2011557 - RNA, 19 nt, Artificial Sequence
  Description of Artificial Sequence: Synthetic oligonucleotide
  Antisense strand to SEQ ID NO: 2011556
uguuuccuaaucauucuag

SEQ ID NO: 2011558 - RNA, 19 nt, Artificial Sequence
  Description of Artificial Sequence: Synthetic oligonucleotide
  Sense strand starting at position 3911 of SEQ ID NO: 1881017
cggcccugauuucuuaaua

SEQ ID NO: 2011559 - RNA, 19 nt, Artificial Sequence
  Description of Artificial Sequence: Synthetic oligonucleotide
  Antisense strand to SEQ ID NO: 2011558
uauuaagaaaucagggccg

SEQ ID NO: 2011560 - RNA, 19 nt, Artificial Sequence
  Description of Artificial Sequence: Synthetic oligonucleotide
  Sense strand starting at position 3916 of SEQ ID NO: 1881017
cugauuucuuaauauggca

SEQ ID NO: 2011561 - RNA, 19 nt, Artificial Sequence
  Description of Artificial Sequence: Synthetic oligonucleotide
  Antisense strand to SEQ ID NO: 2011560
ugccauauuaagaaaucag

SEQ ID NO: 2011562 - RNA, 19 nt, Artificial Sequence
  Description of Artificial Sequence: Synthetic oligonucleotide
  Sense strand starting at position 30 of SEQ ID NO: 1881018
cgaccuauuucccaaguga

SEQ ID NO: 2011563 - RNA, 19 nt, Artificial Sequence
  Description of Artificial Sequence: Synthetic oligonucleotide
  Antisense strand to SEQ ID NO: 2011562
ucacuugggaaauaggucg

SEQ ID NO: 2011564 - RNA, 19 nt, Artificial Sequence
  Description of Artificial Sequence: Synthetic oligonucleotide
  Sense strand starting at position 58 of SEQ ID NO: 1881018
gggcaaacuugauguccca

SEQ ID NO: 2011565 - RNA, 19 nt, Artificial Sequence
  Description of Artificial Sequence: Synthetic oligonucleotide
  Antisense strand to SEQ ID NO: 2011564
ugggacaucaaguuugccc

SEQ ID NO: 2011566 - RNA, 19 nt, Artificial Sequence
  Description of Artificial Sequence: Synthetic oligonucleotide
  Sense strand starting at position 65 of SEQ ID NO: 1881018
cuugaugucccaggaggau

SEQ ID NO: 2011567 - RNA, 19 nt, Artificial Sequence
  Description of Artificial Sequence: Synthetic oligonucleotide
  Antisense strand to SEQ ID NO: 2011566
auccuccugggacaucaag

SEQ ID NO: 2011568 - RNA, 19 nt, Artificial Sequence
  Description of Artificial Sequence: Synthetic oligonucleotide
  Sense strand starting at position 144 of SEQ ID NO: 1881018
gugagaagcucucuguuac

SEQ ID NO: 2011569 - RNA, 19 nt, Artificial Sequence
  Description of Artificial Sequence: Synthetic oligonucleotide
  Antisense strand to SEQ ID NO: 2011568
guaacagagagcuucucac

SEQ ID NO: 2011570 - RNA, 19 nt, Artificial Sequence
  Description of Artificial Sequence: Synthetic oligonucleotide
  Sense strand starting at position 145 of SEQ ID NO: 1881018
ugagaagcucucuguuacu

SEQ ID NO: 2011571 - RNA, 19 nt, Artificial Sequence
  Description of Artificial Sequence: Synthetic oligonucleotide
  Antisense strand to SEQ ID NO: 2011570
aguaacagagagcuucuca

SEQ ID NO: 2011572 - RNA, 19 nt, Artificial Sequence
  Description of Artificial Sequence: Synthetic oligonucleotide
  Sense strand starting at position 233 of SEQ ID NO: 1881018
cuaccaucuuccggccaau

SEQ ID NO: 2011573 - RNA, 19 nt, Artificial Sequence
  Description of Artificial Sequence: Synthetic oligonucleotide
  Antisense strand to SEQ ID NO: 2011572
auuggccggaagaugguag

SEQ ID NO: 2011574 - RNA, 19 nt, Artificial Sequence
  Description of Artificial Sequence: Synthetic oligonucleotide
  Sense strand starting at position 236 of SEQ ID NO: 1881018
ccaucuuccggccaaugua

SEQ ID NO: 2011575 - RNA, 19 nt, Artificial Sequence
  Description of Artificial Sequence: Synthetic oligonucleotide
  Antisense strand to SEQ ID NO: 2011574
uacauuggccggaagaugg

SEQ ID NO: 2011576 - RNA, 19 nt, Artificial Sequence
  Description of Artificial Sequence: Synthetic oligonucleotide
  Sense strand starting at position 871 of SEQ ID NO: 1881018
guguguaugucugggucua

SEQ ID NO: 2011577 - RNA, 19 nt, Artificial Sequence
  Description of Artificial Sequence: Synthetic oligonucleotide
  Antisense strand to SEQ ID NO: 2011576
uagacccagacauacacac

SEQ ID NO: 2011578 - RNA, 19 nt, Artificial Sequence
  Description of Artificial Sequence: Synthetic oligonucleotide
  Sense strand starting at position 962 of SEQ ID NO: 1881018
uguccaucucucugucagu

SEQ ID NO: 2011579 - RNA, 19 nt, Artificial Sequence
  Description of Artificial Sequence: Synthetic oligonucleotide
  Antisense strand to SEQ ID NO: 2011578
acugacagagagauggaca

SEQ ID NO: 2011580 - RNA, 19 nt, Artificial Sequence
  Description of Artificial Sequence: Synthetic oligonucleotide
  Sense strand starting at position 993 of SEQ ID NO: 1881018
cuguguuccugugacugaa

SEQ ID NO: 2011581 - RNA, 19 nt, Artificial Sequence
  Description of Artificial Sequence: Synthetic oligonucleotide
  Antisense strand to SEQ ID NO: 2011580
uucagucacaggaacacag

SEQ ID NO: 2011582 - RNA, 19 nt, Artificial Sequence
  Description of Artificial Sequence: Synthetic oligonucleotide
  Sense strand starting at position 1029 of SEQ ID NO: 1881018
uccagugacuaucugagau

SEQ ID NO: 2011583 - RNA, 19 nt, Artificial Sequence
  Description of Artificial Sequence: Synthetic oligonucleotide
  Antisense strand to SEQ ID NO: 2011582
aucucagauagucacugga

SEQ ID NO: 2011584 - RNA, 19 nt, Artificial Sequence
  Description of Artificial Sequence: Synthetic oligonucleotide
  Sense strand starting at position 1033 of SEQ ID NO: 1881018
gugacuaucugagauggga

SEQ ID NO: 2011585 - RNA, 19 nt, Artificial Sequence
  Description of Artificial Sequence: Synthetic oligonucleotide
  Antisense strand to SEQ ID NO: 2011584
ucccaucucagauagucac

SEQ ID NO: 2011586 - RNA, 19 nt, Artificial Sequence
  Description of Artificial Sequence: Synthetic oligonucleotide
  Sense strand starting at position 1069 of SEQ ID NO: 1881018
gagauccagccguguucua

SEQ ID NO: 2011587 - RNA, 19 nt, Artificial Sequence
  Description of Artificial Sequence: Synthetic oligonucleotide
  Antisense strand to SEQ ID NO: 2011586
uagaacacggcuggaucuc

SEQ ID NO: 2011588 - RNA, 19 nt, Artificial Sequence
  Description of Artificial Sequence: Synthetic oligonucleotide
  Sense strand starting at position 1088 of SEQ ID NO: 1881018
gaaggaguacccuaggucu

SEQ ID NO: 2011589 - RNA, 19 nt, Artificial Sequence
  Description of Artificial Sequence: Synthetic oligonucleotide
  Antisense strand to SEQ ID NO: 2011588
agaccuaggguacuccuuc

SEQ ID NO: 2011590 - RNA, 19 nt, Artificial Sequence
  Description of Artificial Sequence: Synthetic oligonucleotide
  Sense strand starting at position 1110 of SEQ ID NO: 1881018
gccuguaacuuucuggcuu

SEQ ID NO: 2011591 - RNA, 19 nt, Artificial Sequence
  Description of Artificial Sequence: Synthetic oligonucleotide
  Antisense strand to SEQ ID NO: 2011590
aagccagaaaguuacaggc

SEQ ID NO: 2011592 - RNA, 19 nt, Artificial Sequence
  Description of Artificial Sequence: Synthetic oligonucleotide
  Sense strand starting at position 1111 of SEQ ID NO: 1881018
ccuguaacuuucuggcuuu

SEQ ID NO: 2011593 - RNA, 19 nt, Artificial Sequence
  Description of Artificial Sequence: Synthetic oligonucleotide
  Antisense strand to SEQ ID NO: 2011592
aaagccagaaaguuacagg

SEQ ID NO: 2011594 - RNA, 19 nt, Artificial Sequence
  Description of Artificial Sequence: Synthetic oligonucleotide
  Sense strand starting at position 1190 of SEQ ID NO: 1881018
cagccauuaccuugugaag

SEQ ID NO: 2011595 - RNA, 19 nt, Artificial Sequence
  Description of Artificial Sequence: Synthetic oligonucleotide
  Antisense strand to SEQ ID NO: 2011594
cuucacaagguaauggcug

SEQ ID NO: 2011596 - RNA, 19 nt, Artificial Sequence
  Description of Artificial Sequence: Synthetic oligonucleotide
  Sense strand starting at position 1282 of SEQ ID NO: 1881018
cggcaaugcugucuugaug

SEQ ID NO: 2011597 - RNA, 19 nt, Artificial Sequence
  Description of Artificial Sequence: Synthetic oligonucleotide
  Antisense strand to SEQ ID NO: 2011596
caucaagacagcauugccg

SEQ ID NO: 2011598 - RNA, 19 nt, Artificial Sequence
  Description of Artificial Sequence: Synthetic oligonucleotide
  Sense strand starting at position 1944 of SEQ ID NO: 1881018
gccuguguccgugaccaca

SEQ ID NO: 2011599 - RNA, 19 nt, Artificial Sequence
  Description of Artificial Sequence: Synthetic oligonucleotide
  Antisense strand to SEQ ID NO: 2011598
uguggucacggacacaggc

SEQ ID NO: 2011600 - RNA, 19 nt, Artificial Sequence
  Description of Artificial Sequence: Synthetic oligonucleotide
  Sense strand starting at position 1973 of SEQ ID NO: 1881018
cucucagcgcucuguguau

SEQ ID NO: 2011601 - RNA, 19 nt, Artificial Sequence
  Description of Artificial Sequence: Synthetic oligonucleotide
  Antisense strand to SEQ ID NO: 2011600
auacacagagcgcugagag

SEQ ID NO: 2011602 - RNA, 19 nt, Artificial Sequence
  Description of Artificial Sequence: Synthetic oligonucleotide
  Sense strand starting at position 2306 of SEQ ID NO: 1881018
ggaacauguccaggcaacu

SEQ ID NO: 2011603 - RNA, 19 nt, Artificial Sequence
  Description of Artificial Sequence: Synthetic oligonucleotide
  Antisense strand to SEQ ID NO: 2011602
aguugccuggacauguucc

SEQ ID NO: 2011604 - RNA, 19 nt, Artificial Sequence
  Description of Artificial Sequence: Synthetic oligonucleotide
  Sense strand starting at position 2440 of SEQ ID NO: 1881018
acggucuccucguacagau

SEQ ID NO: 2011605 - RNA, 19 nt, Artificial Sequence
  Description of Artificial Sequence: Synthetic oligonucleotide
  Antisense strand to SEQ ID NO: 2011604
aucuguacgaggagaccgu

SEQ ID NO: 2011606 - RNA, 19 nt, Artificial Sequence
  Description of Artificial Sequence: Synthetic oligonucleotide
  Sense strand starting at position 2738 of SEQ ID NO: 1881018
uggugaagagcccgugaaa

SEQ ID NO: 2011607 - RNA, 19 nt, Artificial Sequence
  Description of Artificial Sequence: Synthetic oligonucleotide
  Antisense strand to SEQ ID NO: 2011606
uuucacgggcucuucacca

SEQ ID NO: 2011608 - RNA, 19 nt, Artificial Sequence
  Description of Artificial Sequence: Synthetic oligonucleotide
  Sense strand starting at position 2741 of SEQ ID NO: 1881018
ugaagagcccgugaaauag

SEQ ID NO: 2011609 - RNA, 19 nt, Artificial Sequence
  Description of Artificial Sequence: Synthetic oligonucleotide
  Antisense strand to SEQ ID NO: 2011608
cuauuucacgggcucuuca

SEQ ID NO: 2011610 - RNA, 19 nt, Artificial Sequence
  Description of Artificial Sequence: Synthetic oligonucleotide
  Sense strand starting at position 2751 of SEQ ID NO: 1881018
gugaaauagcuuugucagc

SEQ ID NO: 2011611 - RNA, 19 nt, Artificial Sequence
  Description of Artificial Sequence: Synthetic oligonucleotide
  Antisense strand to SEQ ID NO: 2011610
gcugacaaagcuauuucac

SEQ ID NO: 2011612 - RNA, 19 nt, Artificial Sequence
  Description of Artificial Sequence: Synthetic oligonucleotide
  Sense strand starting at position 2752 of SEQ ID NO: 1881018
ugaaauagcuuugucagcu

SEQ ID NO: 2011613 - RNA, 19 nt, Artificial Sequence
  Description of Artificial Sequence: Synthetic oligonucleotide
  Antisense strand to SEQ ID NO: 2011612
agcugacaaagcuauuuca

SEQ ID NO: 2011614 - RNA, 19 nt, Artificial Sequence
  Description of Artificial Sequence: Synthetic oligonucleotide
  Sense strand starting at position 2753 of SEQ ID NO: 1881018
gaaauagcuuugucagcug

SEQ ID NO: 2011615 - RNA, 19 nt, Artificial Sequence
  Description of Artificial Sequence: Synthetic oligonucleotide
  Antisense strand to SEQ ID NO: 2011614
cagcugacaaagcuauuuc

SEQ ID NO: 2011616 - RNA, 19 nt, Artificial Sequence
  Description of Artificial Sequence: Synthetic oligonucleotide
  Sense strand starting at position 3196 of SEQ ID NO: 1881018
gagguuaugagcggugagu

SEQ ID NO: 2011617 - RNA, 19 nt, Artificial Sequence
  Description of Artificial Sequence: Synthetic oligonucleotide
  Antisense strand to SEQ ID NO: 2011616
acucaccgcucauaaccuc

SEQ ID NO: 2011618 - RNA, 19 nt, Artificial Sequence
  Description of Artificial Sequence: Synthetic oligonucleotide
  Sense strand starting at position 3362 of SEQ ID NO: 1881018
gaggguguccaguagcaua

SEQ ID NO: 2011619 - RNA, 19 nt, Artificial Sequence
  Description of Artificial Sequence: Synthetic oligonucleotide
  Antisense strand to SEQ ID NO: 2011618
uaugcuacuggacacccuc

SEQ ID NO: 2011620 - RNA, 19 nt, Artificial Sequence
  Description of Artificial Sequence: Synthetic oligonucleotide
  Sense strand starting at position 3670 of SEQ ID NO: 1881018
ucauuaugccgugaguccu

SEQ ID NO: 2011621 - RNA, 19 nt, Artificial Sequence
  Description of Artificial Sequence: Synthetic oligonucleotide
  Antisense strand to SEQ ID NO: 2011620
aggacucacggcauaauga

SEQ ID NO: 2011622 - RNA, 19 nt, Artificial Sequence
  Description of Artificial Sequence: Synthetic oligonucleotide
  Sense strand starting at position 3719 of SEQ ID NO: 1881018
gcugacuugccugauggga

SEQ ID NO: 2011623 - RNA, 19 nt, Artificial Sequence
  Description of Artificial Sequence: Synthetic oligonucleotide
  Antisense strand to SEQ ID NO: 2011622
ucccaucaggcaagucagc

SEQ ID NO: 2011624 - RNA, 19 nt, Artificial Sequence
  Description of Artificial Sequence: Synthetic oligonucleotide
  Sense strand starting at position 3797 of SEQ ID NO: 1881018
agggaguguccuggaugga

SEQ ID NO: 2011625 - RNA, 19 nt, Artificial Sequence
  Description of Artificial Sequence: Synthetic oligonucleotide
  Antisense strand to SEQ ID NO: 2011624
uccauccaggacacucccu

SEQ ID NO: 2011626 - RNA, 19 nt, Artificial Sequence
  Description of Artificial Sequence: Synthetic oligonucleotide
  Sense strand starting at position 3867 of SEQ ID NO: 1881018
guauccucucgguggcaga

SEQ ID NO: 2011627 - RNA, 19 nt, Artificial Sequence
  Description of Artificial Sequence: Synthetic oligonucleotide
  Antisense strand to SEQ ID NO: 2011626
ucugccaccgagaggauac

SEQ ID NO: 2011628 - RNA, 19 nt, Artificial Sequence
  Description of Artificial Sequence: Synthetic oligonucleotide
  Sense strand starting at position 3900 of SEQ ID NO: 1881018
gaagacagguguguuccua

SEQ ID NO: 2011629 - RNA, 19 nt, Artificial Sequence
  Description of Artificial Sequence: Synthetic oligonucleotide
  Antisense strand to SEQ ID NO: 2011628
uaggaacacaccugucuuc

SEQ ID NO: 2011630 - RNA, 19 nt, Artificial Sequence
  Description of Artificial Sequence: Synthetic oligonucleotide
  Sense strand starting at position 3904 of SEQ ID NO: 1881018
acagguguguuccuaacca

SEQ ID NO: 2011631 - RNA, 19 nt, Artificial Sequence
  Description of Artificial Sequence: Synthetic oligonucleotide
  Antisense strand to SEQ ID NO: 2011630
ugguuaggaacacaccugu

SEQ ID NO: 2011632 - RNA, 19 nt, Artificial Sequence
  Description of Artificial Sequence: Synthetic oligonucleotide
  Sense strand starting at position 3946 of SEQ ID NO: 1881018
gcccucauucuggaaggga

SEQ ID NO: 2011633 - RNA, 19 nt, Artificial Sequence
  Description of Artificial Sequence: Synthetic oligonucleotide
  Antisense strand to SEQ ID NO: 2011632
ucccuuccagaaugagggc

SEQ ID NO: 2011634 - RNA, 19 nt, Artificial Sequence
  Description of Artificial Sequence: Synthetic oligonucleotide
  Sense strand starting at position 84 of SEQ ID NO: 1881019
cagucuuaagucugaaaga

SEQ ID NO: 2011635 - RNA, 19 nt, Artificial Sequence
  Description of Artificial Sequence: Synthetic oligonucleotide
  Antisense strand to SEQ ID NO: 2011634
ucuuucagacuuaagacug

SEQ ID NO: 2011636 - RNA, 19 nt, Artificial Sequence
  Description of Artificial Sequence: Synthetic oligonucleotide
  Sense strand starting at position 93 of SEQ ID NO: 1881019
gucugaaagagcuauguuc

SEQ ID NO: 2011637 - RNA, 19 nt, Artificial Sequence
  Description of Artificial Sequence: Synthetic oligonucleotide
  Antisense strand to SEQ ID NO: 2011636
gaacauagcucuuucagac

SEQ ID NO: 2011638 - RNA, 19 nt, Artificial Sequence
  Description of Artificial Sequence: Synthetic oligonucleotide
  Sense strand starting at position 95 of SEQ ID NO: 1881019
cugaaagagcuauguucuc

SEQ ID NO: 2011639 - RNA, 19 nt, Artificial Sequence
  Description of Artificial Sequence: Synthetic oligonucleotide
  Antisense strand to SEQ ID NO: 2011638
gagaacauagcucuuucag

SEQ ID NO: 2011640 - RNA, 19 nt, Artificial Sequence
  Description of Artificial Sequence: Synthetic oligonucleotide
  Sense strand starting at position 100 of SEQ ID NO: 1881019
agagcuauguucucauauu

SEQ ID NO: 2011641 - RNA, 19 nt, Artificial Sequence
  Description of Artificial Sequence: Synthetic oligonucleotide
  Antisense strand to SEQ ID NO: 2011640
aauaugagaacauagcucu

SEQ ID NO: 2011642 - RNA, 19 nt, Artificial Sequence
  Description of Artificial Sequence: Synthetic oligonucleotide
  Sense strand starting at position 108 of SEQ ID NO: 1881019
guucucauauuuggaauuu

SEQ ID NO: 2011643 - RNA, 19 nt, Artificial Sequence
  Description of Artificial Sequence: Synthetic oligonucleotide
  Antisense strand to SEQ ID NO: 2011642
aaauuccaaauaugagaac

SEQ ID NO: 2011644 - RNA, 19 nt, Artificial Sequence
  Description of Artificial Sequence: Synthetic oligonucleotide
  Sense strand starting at position 178 of SEQ ID NO: 1881019
agcaauuucuggcauauuu

SEQ ID NO: 2011645 - RNA, 19 nt, Artificial Sequence
  Description of Artificial Sequence: Synthetic oligonucleotide
  Antisense strand to SEQ ID NO: 2011644
aaauaugccagaaauugcu

SEQ ID NO: 2011646 - RNA, 19 nt, Artificial Sequence
  Description of Artificial Sequence: Synthetic oligonucleotide
  Sense strand starting at position 417 of SEQ ID NO: 1881019
gaacaaaugugucuugaaa

SEQ ID NO: 2011647 - RNA, 19 nt, Artificial Sequence
  Description of Artificial Sequence: Synthetic oligonucleotide
  Antisense strand to SEQ ID NO: 2011646
uuucaagacacauuuguuc

SEQ ID NO: 2011648 - RNA, 19 nt, Artificial Sequence
  Description of Artificial Sequence: Synthetic oligonucleotide
  Sense strand starting at position 1191 of SEQ ID NO: 1881019
gguuuccugcaccaagaaa

SEQ ID NO: 2011649 - RNA, 19 nt, Artificial Sequence
  Description of Artificial Sequence: Synthetic oligonucleotide
  Antisense strand to SEQ ID NO: 2011648
uuucuuggugcaggaaacc

SEQ ID NO: 2011650 - RNA, 19 nt, Artificial Sequence
  Description of Artificial Sequence: Synthetic oligonucleotide
  Sense strand starting at position 1280 of SEQ ID NO: 1881019
acucguugugucucaugca

SEQ ID NO: 2011651 - RNA, 19 nt, Artificial Sequence
  Description of Artificial Sequence: Synthetic oligonucleotide
  Antisense strand to SEQ ID NO: 2011650
ugcaugagacacaacgagu

SEQ ID NO: 2011652 - RNA, 19 nt, Artificial Sequence
  Description of Artificial Sequence: Synthetic oligonucleotide
  Sense strand starting at position 1413 of SEQ ID NO: 1881019
aguauaaggcccuauuaug

SEQ ID NO: 2011653 - RNA, 19 nt, Artificial Sequence
  Description of Artificial Sequence: Synthetic oligonucleotide
  Antisense strand to SEQ ID NO: 2011652
cauaauagggccuuauacu

SEQ ID NO: 2011654 - RNA, 19 nt, Artificial Sequence
  Description of Artificial Sequence: Synthetic oligonucleotide
  Sense strand starting at position 1494 of SEQ ID NO: 1881019
agucuuaggacucguagga

SEQ ID NO: 2011655 - RNA, 19 nt, Artificial Sequence
  Description of Artificial Sequence: Synthetic oligonucleotide
  Antisense strand to SEQ ID NO: 2011654
uccuacgaguccuaagacu

SEQ ID NO: 2011656 - RNA, 19 nt, Artificial Sequence
  Description of Artificial Sequence: Synthetic oligonucleotide
  Sense strand starting at position 1498 of SEQ ID NO: 1881019
uuaggacucguaggauaaa

SEQ ID NO: 2011657 - RNA, 19 nt, Artificial Sequence
  Description of Artificial Sequence: Synthetic oligonucleotide
  Antisense strand to SEQ ID NO: 2011656
uuuauccuacgaguccuaa

SEQ ID NO: 2011658 - RNA, 19 nt, Artificial Sequence
  Description of Artificial Sequence: Synthetic oligonucleotide
  Sense strand starting at position 2175 of SEQ ID NO: 1881019
uugucuucgcuggcgagua

SEQ ID NO: 2011659 - RNA, 19 nt, Artificial Sequence
  Description of Artificial Sequence: Synthetic oligonucleotide
  Antisense strand to SEQ ID NO: 2011658
uacucgccagcgaagacaa

SEQ ID NO: 2011660 - RNA, 19 nt, Artificial Sequence
  Description of Artificial Sequence: Synthetic oligonucleotide
  Sense strand starting at position 2206 of SEQ ID NO: 1881019
gcgagucccguguuaggga

SEQ ID NO: 2011661 - RNA, 19 nt, Artificial Sequence
  Description of Artificial Sequence: Synthetic oligonucleotide
  Antisense strand to SEQ ID NO: 2011660
ucccuaacacgggacucgc

SEQ ID NO: 2011662 - RNA, 19 nt, Artificial Sequence
  Description of Artificial Sequence: Synthetic oligonucleotide
  Sense strand starting at position 2215 of SEQ ID NO: 1881019
guguuagggacuugggaaa

SEQ ID NO: 2011663 - RNA, 19 nt, Artificial Sequence
  Description of Artificial Sequence: Synthetic oligonucleotide
  Antisense strand to SEQ ID NO: 2011662
uuucccaagucccuaacac

SEQ ID NO: 2011664 - RNA, 19 nt, Artificial Sequence
  Description of Artificial Sequence: Synthetic oligonucleotide
  Sense strand starting at position 2276 of SEQ ID NO: 1881019
cggccagugcuuuauuuaa

SEQ ID NO: 2011665 - RNA, 19 nt, Artificial Sequence
  Description of Artificial Sequence: Synthetic oligonucleotide
  Antisense strand to SEQ ID NO: 2011664
uuaaauaaagcacuggccg

SEQ ID NO: 2011666 - RNA, 19 nt, Artificial Sequence
  Description of Artificial Sequence: Synthetic oligonucleotide
  Sense strand starting at position 2278 of SEQ ID NO: 1881019
gccagugcuuuauuuaaca

SEQ ID NO: 2011667 - RNA, 19 nt, Artificial Sequence
  Description of Artificial Sequence: Synthetic oligonucleotide
  Antisense strand to SEQ ID NO: 2011666
uguuaaauaaagcacuggc

SEQ ID NO: 2011668 - RNA, 19 nt, Artificial Sequence
  Description of Artificial Sequence: Synthetic oligonucleotide
  Sense strand starting at position 2503 of SEQ ID NO: 1881019
uuugcaaugcuccaguaga

SEQ ID NO: 2011669 - RNA, 19 nt, Artificial Sequence
  Description of Artificial Sequence: Synthetic oligonucleotide
  Antisense strand to SEQ ID NO: 2011668
ucuacuggagcauugcaaa

SEQ ID NO: 2011670 - RNA, 19 nt, Artificial Sequence
  Description of Artificial Sequence: Synthetic oligonucleotide
  Sense strand starting at position 3124 of SEQ ID NO: 1881019
ccauaauuguaguuacaga

SEQ ID NO: 2011671 - RNA, 19 nt, Artificial Sequence
  Description of Artificial Sequence: Synthetic oligonucleotide
  Antisense strand to SEQ ID NO: 2011670
ucuguaacuacaauuaugg

SEQ ID NO: 2011672 - RNA, 19 nt, Artificial Sequence
  Description of Artificial Sequence: Synthetic oligonucleotide
  Sense strand starting at position 3186 of SEQ ID NO: 1881019
guuagugaacucugacuag

SEQ ID NO: 2011673 - RNA, 19 nt, Artificial Sequence
  Description of Artificial Sequence: Synthetic oligonucleotide
  Antisense strand to SEQ ID NO: 2011672
cuagucagaguucacuaac

SEQ ID NO: 2011674 - RNA, 19 nt, Artificial Sequence
  Description of Artificial Sequence: Synthetic oligonucleotide
  Sense strand starting at position 3190 of SEQ ID NO: 1881019
gugaacucugacuaggcuu

SEQ ID NO: 2011675 - RNA, 19 nt, Artificial Sequence
  Description of Artificial Sequence: Synthetic oligonucleotide
  Antisense strand to SEQ ID NO: 2011674
aagccuagucagaguucac

SEQ ID NO: 2011676 - RNA, 19 nt, Artificial Sequence
  Description of Artificial Sequence: Synthetic oligonucleotide
  Sense strand starting at position 3256 of SEQ ID NO: 1881019
cagguagaguuccuagaag

SEQ ID NO: 2011677 - RNA, 19 nt, Artificial Sequence
  Description of Artificial Sequence: Synthetic oligonucleotide
  Antisense strand to SEQ ID NO: 2011676
cuucuaggaacucuaccug

SEQ ID NO: 2011678 - RNA, 19 nt, Artificial Sequence
  Description of Artificial Sequence: Synthetic oligonucleotide
  Sense strand starting at position 3295 of SEQ ID NO: 1881019
uccugcuuuaacgagagua

SEQ ID NO: 2011679 - RNA, 19 nt, Artificial Sequence
  Description of Artificial Sequence: Synthetic oligonucleotide
  Antisense strand to SEQ ID NO: 2011678
uacucucguuaaagcagga

SEQ ID NO: 2011680 - RNA, 19 nt, Artificial Sequence
  Description of Artificial Sequence: Synthetic oligonucleotide
  Sense strand starting at position 3297 of SEQ ID NO: 1881019
cugcuuuaacgagaguaac

SEQ ID NO: 2011681 - RNA, 19 nt, Artificial Sequence
  Description of Artificial Sequence: Synthetic oligonucleotide
  Antisense strand to SEQ ID NO: 2011680
guuacucucguuaaagcag

SEQ ID NO: 2011682 - RNA, 19 nt, Artificial Sequence
  Description of Artificial Sequence: Synthetic oligonucleotide
  Sense strand starting at position 3300 of SEQ ID NO: 1881019
cuuuaacgagaguaacuau

SEQ ID NO: 2011683 - RNA, 19 nt, Artificial Sequence
  Description of Artificial Sequence: Synthetic oligonucleotide
  Antisense strand to SEQ ID NO: 2011682
auaguuacucucguuaaag

SEQ ID NO: 2011684 - RNA, 19 nt, Artificial Sequence
  Description of Artificial Sequence: Synthetic oligonucleotide
  Sense strand starting at position 3380 of SEQ ID NO: 1881019
cucauauggucuuuggaaa

SEQ ID NO: 2011685 - RNA, 19 nt, Artificial Sequence
  Description of Artificial Sequence: Synthetic oligonucleotide
  Antisense strand to SEQ ID NO: 2011684
uuuccaaagaccauaugag

SEQ ID NO: 2011686 - RNA, 19 nt, Artificial Sequence
  Description of Artificial Sequence: Synthetic oligonucleotide
  Sense strand starting at position 3381 of SEQ ID NO: 1881019
ucauauggucuuuggaaau

SEQ ID NO: 2011687 - RNA, 19 nt, Artificial Sequence
  Description of Artificial Sequence: Synthetic oligonucleotide
  Antisense strand to SEQ ID NO: 2011686
auuuccaaagaccauauga

SEQ ID NO: 2011688 - RNA, 19 nt, Artificial Sequence
  Description of Artificial Sequence: Synthetic oligonucleotide
  Sense strand starting at position 3545 of SEQ ID NO: 1881019
auguuaucccuccagauga

SEQ ID NO: 2011689 - RNA, 19 nt, Artificial Sequence
  Description of Artificial Sequence: Synthetic oligonucleotide
  Antisense strand to SEQ ID NO: 2011688
ucaucuggagggauaacau

SEQ ID NO: 2011690 - RNA, 19 nt, Artificial Sequence
  Description of Artificial Sequence: Synthetic oligonucleotide
  Sense strand starting at position 3547 of SEQ ID NO: 1881019
guuaucccuccagaugacu

SEQ ID NO: 2011691 - RNA, 19 nt, Artificial Sequence
  Description of Artificial Sequence: Synthetic oligonucleotide
  Antisense strand to SEQ ID NO: 2011690
agucaucuggagggauaac

SEQ ID NO: 2011692 - RNA, 19 nt, Artificial Sequence
  Description of Artificial Sequence: Synthetic oligonucleotide
  Sense strand starting at position 3560 of SEQ ID NO: 1881019
augacuuucuaacuaguga

SEQ ID NO: 2011693 - RNA, 19 nt, Artificial Sequence
  Description of Artificial Sequence: Synthetic oligonucleotide
  Antisense strand to SEQ ID NO: 2011692
ucacuaguuagaaagucau

SEQ ID NO: 2011694 - RNA, 19 nt, Artificial Sequence
  Description of Artificial Sequence: Synthetic oligonucleotide
  Sense strand starting at position 3604 of SEQ ID NO: 1881019
ggaaguuugagaggucaug

SEQ ID NO: 2011695 - RNA, 19 nt, Artificial Sequence
  Description of Artificial Sequence: Synthetic oligonucleotide
  Antisense strand to SEQ ID NO: 2011694
caugaccucucaaacuucc

SEQ ID NO: 2011696 - RNA, 19 nt, Artificial Sequence
  Description of Artificial Sequence: Synthetic oligonucleotide
  Sense strand starting at position 3615 of SEQ ID NO: 1881019
aggucaugugguuggacua

SEQ ID NO: 2011697 - RNA, 19 nt, Artificial Sequence
  Description of Artificial Sequence: Synthetic oligonucleotide
  Antisense strand to SEQ ID NO: 2011696
uaguccaaccacaugaccu

SEQ ID NO: 2011698 - RNA, 19 nt, Artificial Sequence
  Description of Artificial Sequence: Synthetic oligonucleotide
  Sense strand starting at position 3625 of SEQ ID NO: 1881019
guuggacuacgcuauuaca

SEQ ID NO: 2011699 - RNA, 19 nt, Artificial Sequence
  Description of Artificial Sequence: Synthetic oligonucleotide
  Antisense strand to SEQ ID NO: 2011698
uguaauagcguaguccaac

SEQ ID NO: 2011700 - RNA, 19 nt, Artificial Sequence
  Description of Artificial Sequence: Synthetic oligonucleotide
  Sense strand starting at position 3635 of SEQ ID NO: 1881019
gcuauuacacgggaguagu

SEQ ID NO: 2011701 - RNA, 19 nt, Artificial Sequence
  Description of Artificial Sequence: Synthetic oligonucleotide
  Antisense strand to SEQ ID NO: 2011700
acuacucccguguaauagc

SEQ ID NO: 2011702 - RNA, 19 nt, Artificial Sequence
  Description of Artificial Sequence: Synthetic oligonucleotide
  Sense strand starting at position 3712 of SEQ ID NO: 1881019
agagaauucgcaggugaug

SEQ ID NO: 2011703 - RNA, 19 nt, Artificial Sequence
  Description of Artificial Sequence: Synthetic oligonucleotide
  Antisense strand to SEQ ID NO: 2011702
caucaccugcgaauucucu

SEQ ID NO: 2011704 - RNA, 19 nt, Artificial Sequence
  Description of Artificial Sequence: Synthetic oligonucleotide
  Sense strand starting at position 3762 of SEQ ID NO: 1881019
aguuaaauauuuguacgca

SEQ ID NO: 2011705 - RNA, 19 nt, Artificial Sequence
  Description of Artificial Sequence: Synthetic oligonucleotide
  Antisense strand to SEQ ID NO: 2011704
ugcguacaaauauuuaacu

SEQ ID NO: 2011706 - RNA, 19 nt, Artificial Sequence
  Description of Artificial Sequence: Synthetic oligonucleotide
  Sense strand starting at position 3861 of SEQ ID NO: 1881019
ggccucagugcguuauguu

SEQ ID NO: 2011707 - RNA, 19 nt, Artificial Sequence
  Description of Artificial Sequence: Synthetic oligonucleotide
  Antisense strand to SEQ ID NO: 2011706
aacauaacgcacugaggcc

SEQ ID NO: 2011708 - RNA, 19 nt, Artificial Sequence
  Description of Artificial Sequence: Synthetic oligonucleotide
  Sense strand starting at position 3927 of SEQ ID NO: 1881019
augucaucgauuuguugca

SEQ ID NO: 2011709 - RNA, 19 nt, Artificial Sequence
  Description of Artificial Sequence: Synthetic oligonucleotide
  Antisense strand to SEQ ID NO: 2011708
ugcaacaaaucgaugacau

SEQ ID NO: 2011710 - RNA, 19 nt, Artificial Sequence
  Description of Artificial Sequence: Synthetic oligonucleotide
  Sense strand starting at position 3928 of SEQ ID NO: 1881019
ugucaucgauuuguugcaa

SEQ ID NO: 2011711 - RNA, 19 nt, Artificial Sequence
  Description of Artificial Sequence: Synthetic oligonucleotide
  Antisense strand to SEQ ID NO: 2011710
uugcaacaaaucgaugaca

SEQ ID NO: 2011712 - RNA, 19 nt, Artificial Sequence
  Description of Artificial Sequence: Synthetic oligonucleotide
  Sense strand starting at position 3929 of SEQ ID NO: 1881019
gucaucgauuuguugcaaa

SEQ ID NO: 2011713 - RNA, 19 nt, Artificial Sequence
  Description of Artificial Sequence: Synthetic oligonucleotide
  Antisense strand to SEQ ID NO: 2011712
uuugcaacaaaucgaugac

SEQ ID NO: 2011714 - RNA, 19 nt, Artificial Sequence
  Description of Artificial Sequence: Synthetic oligonucleotide
  Sense strand starting at position 298 of SEQ ID NO: 1881020
ccaguaggcagcuaaguau

SEQ ID NO: 2011715 - RNA, 19 nt, Artificial Sequence
  Description of Artificial Sequence: Synthetic oligonucleotide
  Antisense strand to SEQ ID NO: 2011714
auacuuagcugccuacugg

SEQ ID NO: 2011716 - RNA, 19 nt, Artificial Sequence
  Description of Artificial Sequence: Synthetic oligonucleotide
  Sense strand starting at position 309 of SEQ ID NO: 1881020
cuaaguaugugagucugga

SEQ ID NO: 2011717 - RNA, 19 nt, Artificial Sequence
  Description of Artificial Sequence: Synthetic oligonucleotide
  Antisense strand to SEQ ID NO: 2011716
uccagacucacauacuuag

SEQ ID NO: 2011718 - RNA, 19 nt, Artificial Sequence
  Description of Artificial Sequence: Synthetic oligonucleotide
  Sense strand starting at position 337 of SEQ ID NO: 1881020
ccagauccaggcugagaua

SEQ ID NO: 2011719 - RNA, 19 nt, Artificial Sequence
  Description of Artificial Sequence: Synthetic oligonucleotide
  Antisense strand to SEQ ID NO: 2011718
uaucucagccuggaucugg

SEQ ID NO: 2011720 - RNA, 19 nt, Artificial Sequence
  Description of Artificial Sequence: Synthetic oligonucleotide
  Sense strand starting at position 371 of SEQ ID NO: 1881020
cuggcauacagauagguua

SEQ ID NO: 2011721 - RNA, 19 nt, Artificial Sequence
  Description of Artificial Sequence: Synthetic oligonucleotide
  Antisense strand to SEQ ID NO: 2011720
uaaccuaucuguaugccag

SEQ ID NO: 2011722 - RNA, 19 nt, Artificial Sequence
  Description of Artificial Sequence: Synthetic oligonucleotide
  Sense strand starting at position 373 of SEQ ID NO: 1881020
ggcauacagauagguuauu

SEQ ID NO: 2011723 - RNA, 19 nt, Artificial Sequence
  Description of Artificial Sequence: Synthetic oligonucleotide
  Antisense strand to SEQ ID NO: 2011722
aauaaccuaucuguaugcc

SEQ ID NO: 2011724 - RNA, 19 nt, Artificial Sequence
  Description of Artificial Sequence: Synthetic oligonucleotide
  Sense strand starting at position 407 of SEQ ID NO: 1881020
cuuagcagucuguaacauu

SEQ ID NO: 2011725 - RNA, 19 nt, Artificial Sequence
  Description of Artificial Sequence: Synthetic oligonucleotide
  Antisense strand to SEQ ID NO: 2011724
aauguuacagacugcuaag

SEQ ID NO: 2011726 - RNA, 19 nt, Artificial Sequence
  Description of Artificial Sequence: Synthetic oligonucleotide
  Sense strand starting at position 910 of SEQ ID NO: 1881020
ugcauuuguugagcacuua

SEQ ID NO: 2011727 - RNA, 19 nt, Artificial Sequence
  Description of Artificial Sequence: Synthetic oligonucleotide
  Antisense strand to SEQ ID NO: 2011726
uaagugcucaacaaaugca

SEQ ID NO: 2011728 - RNA, 19 nt, Artificial Sequence
  Description of Artificial Sequence: Synthetic oligonucleotide
  Sense strand starting at position 997 of SEQ ID NO: 1881020
gcgguaguuacuguuguua

SEQ ID NO: 2011729 - RNA, 19 nt, Artificial Sequence
  Description of Artificial Sequence: Synthetic oligonucleotide
  Antisense strand to SEQ ID NO: 2011728
uaacaacaguaacuaccgc

SEQ ID NO: 2011730 - RNA, 19 nt, Artificial Sequence
  Description of Artificial Sequence: Synthetic oligonucleotide
  Sense strand starting at position 1166 of SEQ ID NO: 1881020
ugcuuauauuucgcauucu

SEQ ID NO: 2011731 - RNA, 19 nt, Artificial Sequence
  Description of Artificial Sequence: Synthetic oligonucleotide
  Antisense strand to SEQ ID NO: 2011730
agaaugcgaaauauaagca

SEQ ID NO: 2011732 - RNA, 19 nt, Artificial Sequence
  Description of Artificial Sequence: Synthetic oligonucleotide
  Sense strand starting at position 1224 of SEQ ID NO: 1881020
cuguuaucggcuuaaagag

SEQ ID NO: 2011733 - RNA, 19 nt, Artificial Sequence
  Description of Artificial Sequence: Synthetic oligonucleotide
  Antisense strand to SEQ ID NO: 2011732
cucuuuaagccgauaacag

SEQ ID NO: 2011734 - RNA, 19 nt, Artificial Sequence
  Description of Artificial Sequence: Synthetic oligonucleotide
  Sense strand starting at position 1280 of SEQ ID NO: 1881020
augaaauugugucuauuag

SEQ ID NO: 2011735 - RNA, 19 nt, Artificial Sequence
  Description of Artificial Sequence: Synthetic oligonucleotide
  Antisense strand to SEQ ID NO: 2011734
cuaauagacacaauuucau

SEQ ID NO: 2011736 - RNA, 19 nt, Artificial Sequence
  Description of Artificial Sequence: Synthetic oligonucleotide
  Sense strand starting at position 1281 of SEQ ID NO: 1881020
ugaaauugugucuauuagu

SEQ ID NO: 2011737 - RNA, 19 nt, Artificial Sequence
  Description of Artificial Sequence: Synthetic oligonucleotide
  Antisense strand to SEQ ID NO: 2011736
acuaauagacacaauuuca

SEQ ID NO: 2011738 - RNA, 19 nt, Artificial Sequence
  Description of Artificial Sequence: Synthetic oligonucleotide
  Sense strand starting at position 1469 of SEQ ID NO: 1881020
agggaugucaaauguaaac

SEQ ID NO: 2011739 - RNA, 19 nt, Artificial Sequence
  Description of Artificial Sequence: Synthetic oligonucleotide
  Antisense strand to SEQ ID NO: 2011738
guuuacauuugacaucccu

SEQ ID NO: 2011740 - RNA, 19 nt, Artificial Sequence
  Description of Artificial Sequence: Synthetic oligonucleotide
  Sense strand starting at position 1699 of SEQ ID NO: 1881020
ccuccauuggaguauacau

SEQ ID NO: 2011741 - RNA, 19 nt, Artificial Sequence
  Description of Artificial Sequence: Synthetic oligonucleotide
  Antisense strand to SEQ ID NO: 2011740
auguauacuccaauggagg

SEQ ID NO: 2011742 - RNA, 19 nt, Artificial Sequence
  Description of Artificial Sequence: Synthetic oligonucleotide
  Sense strand starting at position 1848 of SEQ ID NO: 1881020
uggcacauagaaugaaauu

SEQ ID NO: 2011743 - RNA, 19 nt, Artificial Sequence
  Description of Artificial Sequence: Synthetic oligonucleotide
  Antisense strand to SEQ ID NO: 2011742
aauuucauucuaugugcca

SEQ ID NO: 2011744 - RNA, 19 nt, Artificial Sequence
  Description of Artificial Sequence: Synthetic oligonucleotide
  Sense strand starting at position 1987 of SEQ ID NO: 1881020
uuacuuagccguuuguguu

SEQ ID NO: 2011745 - RNA, 19 nt, Artificial Sequence
  Description of Artificial Sequence: Synthetic oligonucleotide
  Antisense strand to SEQ ID NO: 2011744
aacacaaacggcuaaguaa

SEQ ID NO: 2011746 - RNA, 19 nt, Artificial Sequence
  Description of Artificial Sequence: Synthetic oligonucleotide
  Sense strand starting at position 2364 of SEQ ID NO: 1881020
cugucuuaacauuaaguac

SEQ ID NO: 2011747 - RNA, 19 nt, Artificial Sequence
  Description of Artificial Sequence: Synthetic oligonucleotide
  Antisense strand to SEQ ID NO: 2011746
guacuuaauguuaagacag

SEQ ID NO: 2011748 - RNA, 19 nt, Artificial Sequence
  Description of Artificial Sequence: Synthetic oligonucleotide
  Sense strand starting at position 2425 of SEQ ID NO: 1881020
ggcagucuagaguaacuau

SEQ ID NO: 2011749 - RNA, 19 nt, Artificial Sequence
  Description of Artificial Sequence: Synthetic oligonucleotide
  Antisense strand to SEQ ID NO: 2011748
auaguuacucuagacugcc

SEQ ID NO: 2011750 - RNA, 19 nt, Artificial Sequence
  Description of Artificial Sequence: Synthetic oligonucleotide
  Sense strand starting at position 2428 of SEQ ID NO: 1881020
agucuagaguaacuaucua

SEQ ID NO: 2011751 - RNA, 19 nt, Artificial Sequence
  Description of Artificial Sequence: Synthetic oligonucleotide
  Antisense strand to SEQ ID NO: 2011750
uagauaguuacucuagacu

SEQ ID NO: 2011752 - RNA, 19 nt, Artificial Sequence
  Description of Artificial Sequence: Synthetic oligonucleotide
  Sense strand starting at position 2492 of SEQ ID NO: 1881020
uuauaauucucagcagagc

SEQ ID NO: 2011753 - RNA, 19 nt, Artificial Sequence
  Description of Artificial Sequence: Synthetic oligonucleotide
  Antisense strand to SEQ ID NO: 2011752
gcucugcugagaauuauaa

SEQ ID NO: 2011754 - RNA, 19 nt, Artificial Sequence
  Description of Artificial Sequence: Synthetic oligonucleotide
  Sense strand starting at position 2569 of SEQ ID NO: 1881020
cuguaagagcuccauguga

SEQ ID NO: 2011755 - RNA, 19 nt, Artificial Sequence
  Description of Artificial Sequence: Synthetic oligonucleotide
  Antisense strand to SEQ ID NO: 2011754
ucacauggagcucuuacag

SEQ ID NO: 2011756 - RNA, 19 nt, Artificial Sequence
  Description of Artificial Sequence: Synthetic oligonucleotide
  Sense strand starting at position 2617 of SEQ ID NO: 1881020
aguuucagggccuagagua

SEQ ID NO: 2011757 - RNA, 19 nt, Artificial Sequence
  Description of Artificial Sequence: Synthetic oligonucleotide
  Antisense strand to SEQ ID NO: 2011756
uacucuaggcccugaaacu

SEQ ID NO: 2011758 - RNA, 19 nt, Artificial Sequence
  Description of Artificial Sequence: Synthetic oligonucleotide
  Sense strand starting at position 2648 of SEQ ID NO: 1881020
agcgaaggcacucauuaag

SEQ ID NO: 2011759 - RNA, 19 nt, Artificial Sequence
  Description of Artificial Sequence: Synthetic oligonucleotide
  Antisense strand to SEQ ID NO: 2011758
cuuaaugagugccuucgcu

SEQ ID NO: 2011760 - RNA, 19 nt, Artificial Sequence
  Description of Artificial Sequence: Synthetic oligonucleotide
  Sense strand starting at position 2651 of SEQ ID NO: 1881020
gaaggcacucauuaaguau

SEQ ID NO: 2011761 - RNA, 19 nt, Artificial Sequence
  Description of Artificial Sequence: Synthetic oligonucleotide
  Antisense strand to SEQ ID NO: 2011760
auacuuaaugagugccuuc

SEQ ID NO: 2011762 - RNA, 19 nt, Artificial Sequence
  Description of Artificial Sequence: Synthetic oligonucleotide
  Sense strand starting at position 2702 of SEQ ID NO: 1881020
guagucacaccuugaagac

SEQ ID NO: 2011763 - RNA, 19 nt, Artificial Sequence
  Description of Artificial Sequence: Synthetic oligonucleotide
  Antisense strand to SEQ ID NO: 2011762
gucuucaaggugugacuac

SEQ ID NO: 2011764 - RNA, 19 nt, Artificial Sequence
  Description of Artificial Sequence: Synthetic oligonucleotide
  Sense strand starting at position 2873 of SEQ ID NO: 1881020
guaaccauauuuggauuua

SEQ ID NO: 2011765 - RNA, 19 nt, Artificial Sequence
  Description of Artificial Sequence: Synthetic oligonucleotide
  Antisense strand to SEQ ID NO: 2011764
uaaauccaaauaugguuac

SEQ ID NO: 2011766 - RNA, 19 nt, Artificial Sequence
  Description of Artificial Sequence: Synthetic oligonucleotide
  Sense strand starting at position 2897 of SEQ ID NO: 1881020
auaaauuacguuuggaaag

SEQ ID NO: 2011767 - RNA, 19 nt, Artificial Sequence
  Description of Artificial Sequence: Synthetic oligonucleotide
  Antisense strand to SEQ ID NO: 2011766
cuuuccaaacguaauuuau

SEQ ID NO: 2011768 - RNA, 19 nt, Artificial Sequence
  Description of Artificial Sequence: Synthetic oligonucleotide
  Sense strand starting at position 3009 of SEQ ID NO: 1881020
ugaaaugagcuuuguaaau

SEQ ID NO: 2011769 - RNA, 19 nt, Artificial Sequence
  Description of Artificial Sequence: Synthetic oligonucleotide
  Antisense strand to SEQ ID NO: 2011768
auuuacaaagcucauuuca

SEQ ID NO: 2011770 - RNA, 19 nt, Artificial Sequence
  Description of Artificial Sequence: Synthetic oligonucleotide
  Sense strand starting at position 3248 of SEQ ID NO: 1881020
aggcauugucucuacauau

SEQ ID NO: 2011771 - RNA, 19 nt, Artificial Sequence
  Description of Artificial Sequence: Synthetic oligonucleotide
  Antisense strand to SEQ ID NO: 2011770
auauguagagacaaugccu

SEQ ID NO: 2011772 - RNA, 19 nt, Artificial Sequence
  Description of Artificial Sequence: Synthetic oligonucleotide
  Sense strand starting at position 3278 of SEQ ID NO: 1881020
uuggaauauuuguaggaga

SEQ ID NO: 2011773 - RNA, 19 nt, Artificial Sequence
  Description of Artificial Sequence: Synthetic oligonucleotide
  Antisense strand to SEQ ID NO: 2011772
ucuccuacaaauauuccaa

SEQ ID NO: 2011774 - RNA, 19 nt, Artificial Sequence
  Description of Artificial Sequence: Synthetic oligonucleotide
  Sense strand starting at position 3281 of SEQ ID NO: 1881020
gaauauuuguaggagaugu

SEQ ID NO: 2011775 - RNA, 19 nt, Artificial Sequence
  Description of Artificial Sequence: Synthetic oligonucleotide
  Antisense strand to SEQ ID NO: 2011774
acaucuccuacaaauauuc

SEQ ID NO: 2011776 - RNA, 19 nt, Artificial Sequence
  Description of Artificial Sequence: Synthetic oligonucleotide
  Sense strand starting at position 3558 of SEQ ID NO: 1881020
augacuauguuauuaguca

SEQ ID NO: 2011777 - RNA, 19 nt, Artificial Sequence
  Description of Artificial Sequence: Synthetic oligonucleotide
  Antisense strand to SEQ ID NO: 2011776
ugacuaauaacauagucau

SEQ ID NO: 2011778 - RNA, 19 nt, Artificial Sequence
  Description of Artificial Sequence: Synthetic oligonucleotide
  Sense strand starting at position 3573 of SEQ ID NO: 1881020
gucauugcucuacacuuga

SEQ ID NO: 2011779 - RNA, 19 nt, Artificial Sequence
  Description of Artificial Sequence: Synthetic oligonucleotide
  Antisense strand to SEQ ID NO: 2011778
ucaaguguagagcaaugac

SEQ ID NO: 2011780 - RNA, 19 nt, Artificial Sequence
  Description of Artificial Sequence: Synthetic oligonucleotide
  Sense strand starting at position 3584 of SEQ ID NO: 1881020
acacuugaaggcuguaaca

SEQ ID NO: 2011781 - RNA, 19 nt, Artificial Sequence
  Description of Artificial Sequence: Synthetic oligonucleotide
  Antisense strand to SEQ ID NO: 2011780
uguuacagccuucaagugu

SEQ ID NO: 2011782 - RNA, 19 nt, Artificial Sequence
  Description of Artificial Sequence: Synthetic oligonucleotide
  Sense strand starting at position 3672 of SEQ ID NO: 1881020
ugauuaaaugagugguucu

SEQ ID NO: 2011783 - RNA, 19 nt, Artificial Sequence
  Description of Artificial Sequence: Synthetic oligonucleotide
  Antisense strand to SEQ ID NO: 2011782
agaaccacucauuuaauca

SEQ ID NO: 2011784 - RNA, 19 nt, Artificial Sequence
  Description of Artificial Sequence: Synthetic oligonucleotide
  Sense strand starting at position 3675 of SEQ ID NO: 1881020
uuaaaugagugguucuuga

SEQ ID NO: 2011785 - RNA, 19 nt, Artificial Sequence
  Description of Artificial Sequence: Synthetic oligonucleotide
  Antisense strand to SEQ ID NO: 2011784
ucaagaaccacucauuuaa

SEQ ID NO: 2011786 - RNA, 19 nt, Artificial Sequence
  Description of Artificial Sequence: Synthetic oligonucleotide
  Sense strand starting at position 3771 of SEQ ID NO: 1881020
uuugcuaaauguccaugaa

SEQ ID NO: 2011787 - RNA, 19 nt, Artificial Sequence
  Description of Artificial Sequence: Synthetic oligonucleotide
  Antisense strand to SEQ ID NO: 2011786
uucauggacauuuagcaaa

SEQ ID NO: 2011788 - RNA, 19 nt, Artificial Sequence
  Description of Artificial Sequence: Synthetic oligonucleotide
  Sense strand starting at position 3772 of SEQ ID NO: 1881020
uugcuaaauguccaugaau

SEQ ID NO: 2011789 - RNA, 19 nt, Artificial Sequence
  Description of Artificial Sequence: Synthetic oligonucleotide
  Antisense strand to SEQ ID NO: 2011788
auucauggacauuuagcaa

SEQ ID NO: 2011790 - RNA, 19 nt, Artificial Sequence
  Description of Artificial Sequence: Synthetic oligonucleotide
  Sense strand starting at position 3774 of SEQ ID NO: 1881020
gcuaaauguccaugaaucu

SEQ ID NO: 2011791 - RNA, 19 nt, Artificial Sequence
  Description of Artificial Sequence: Synthetic oligonucleotide
  Antisense strand to SEQ ID NO: 2011790
agauucauggacauuuagc

SEQ ID NO: 2011792 - RNA, 19 nt, Artificial Sequence
  Description of Artificial Sequence: Synthetic oligonucleotide
  Sense strand starting at position 3781 of SEQ ID NO: 1881020
guccaugaaucucuugaaa

SEQ ID NO: 2011793 - RNA, 19 nt, Artificial Sequence
  Description of Artificial Sequence: Synthetic oligonucleotide
  Antisense strand to SEQ ID NO: 2011792
uuucaagagauucauggac

SEQ ID NO: 2011794 - RNA, 19 nt, Artificial Sequence
  Description of Artificial Sequence: Synthetic oligonucleotide
  Sense strand starting at position 461 of SEQ ID NO: 1881021
gcagaaagugguuugucgu

SEQ ID NO: 2011795 - RNA, 19 nt, Artificial Sequence
  Description of Artificial Sequence: Synthetic oligonucleotide
  Antisense strand to SEQ ID NO: 2011794
acgacaaaccacuuucugc

SEQ ID NO: 2011796 - RNA, 19 nt, Artificial Sequence
  Description of Artificial Sequence: Synthetic oligonucleotide
  Sense strand starting at position 468 of SEQ ID NO: 1881021
gugguuugucgugucauag

SEQ ID NO: 2011797 - RNA, 19 nt, Artificial Sequence
  Description of Artificial Sequence: Synthetic oligonucleotide
  Antisense strand to SEQ ID NO: 2011796
cuaugacacgacaaaccac

SEQ ID NO: 2011798 - RNA, 19 nt, Artificial Sequence
  Description of Artificial Sequence: Synthetic oligonucleotide
  Sense strand starting at position 474 of SEQ ID NO: 1881021
ugucgugucauagaagauc

SEQ ID NO: 2011799 - RNA, 19 nt, Artificial Sequence
  Description of Artificial Sequence: Synthetic oligonucleotide
  Antisense strand to SEQ ID NO: 2011798
gaucuucuaugacacgaca

SEQ ID NO: 2011800 - RNA, 19 nt, Artificial Sequence
  Description of Artificial Sequence: Synthetic oligonucleotide
  Sense strand starting at position 560 of SEQ ID NO: 1881021
cacgguguugcacauacau

SEQ ID NO: 2011801 - RNA, 19 nt, Artificial Sequence
  Description of Artificial Sequence: Synthetic oligonucleotide
  Antisense strand to SEQ ID NO: 2011800
auguaugugcaacaccgug

SEQ ID NO: 2011802 - RNA, 19 nt, Artificial Sequence
  Description of Artificial Sequence: Synthetic oligonucleotide
  Sense strand starting at position 569 of SEQ ID NO: 1881021
gcacauacaucugugacuu

SEQ ID NO: 2011803 - RNA, 19 nt, Artificial Sequence
  Description of Artificial Sequence: Synthetic oligonucleotide
  Antisense strand to SEQ ID NO: 2011802
aagucacagauguaugugc

SEQ ID NO: 2011804 - RNA, 19 nt, Artificial Sequence
  Description of Artificial Sequence: Synthetic oligonucleotide
  Sense strand starting at position 713 of SEQ ID NO: 1881021
ggcuuagaaagucauaguu

SEQ ID NO: 2011805 - RNA, 19 nt, Artificial Sequence
  Description of Artificial Sequence: Synthetic oligonucleotide
  Antisense strand to SEQ ID NO: 2011804
aacuaugacuuucuaagcc

SEQ ID NO: 2011806 - RNA, 19 nt, Artificial Sequence
  Description of Artificial Sequence: Synthetic oligonucleotide
  Sense strand starting at position 728 of SEQ ID NO: 1881021
aguuguagcagucagggaa

SEQ ID NO: 2011807 - RNA, 19 nt, Artificial Sequence
  Description of Artificial Sequence: Synthetic oligonucleotide
  Antisense strand to SEQ ID NO: 2011806
uucccugacugcuacaacu

SEQ ID NO: 2011808 - RNA, 19 nt, Artificial Sequence
  Description of Artificial Sequence: Synthetic oligonucleotide
  Sense strand starting at position 914 of SEQ ID NO: 1881021
gguaaauguccuugguguc

SEQ ID NO: 2011809 - RNA, 19 nt, Artificial Sequence
  Description of Artificial Sequence: Synthetic oligonucleotide
  Antisense strand to SEQ ID NO: 2011808
gacaccaaggacauuuacc

SEQ ID NO: 2011810 - RNA, 19 nt, Artificial Sequence
  Description of Artificial Sequence: Synthetic oligonucleotide
  Sense strand starting at position 1043 of SEQ ID NO: 1881021
gggcaaucaggcuggcauu

SEQ ID NO: 2011811 - RNA, 19 nt, Artificial Sequence
  Description of Artificial Sequence: Synthetic oligonucleotide
  Antisense strand to SEQ ID NO: 2011810
aaugccagccugauugccc

SEQ ID NO: 2011812 - RNA, 19 nt, Artificial Sequence
  Description of Artificial Sequence: Synthetic oligonucleotide
  Sense strand starting at position 1118 of SEQ ID NO: 1881021
ccagcugggagcuauagaa

SEQ ID NO: 2011813 - RNA, 19 nt, Artificial Sequence
  Description of Artificial Sequence: Synthetic oligonucleotide
  Antisense strand to SEQ ID NO: 2011812
uucuauagcucccagcugg

SEQ ID NO: 2011814 - RNA, 19 nt, Artificial Sequence
  Description of Artificial Sequence: Synthetic oligonucleotide
  Sense strand starting at position 1299 of SEQ ID NO: 1881021
ggccauaucgaguaagguc

SEQ ID NO: 2011815 - RNA, 19 nt, Artificial Sequence
  Description of Artificial Sequence: Synthetic oligonucleotide
  Antisense strand to SEQ ID NO: 2011814
gaccuuacucgauauggcc

SEQ ID NO: 2011816 - RNA, 19 nt, Artificial Sequence
  Description of Artificial Sequence: Synthetic oligonucleotide
  Sense strand starting at position 1360 of SEQ ID NO: 1881021
cgggacuggucgaggacaa

SEQ ID NO: 2011817 - RNA, 19 nt, Artificial Sequence
  Description of Artificial Sequence: Synthetic oligonucleotide
  Antisense strand to SEQ ID NO: 2011816
uuguccucgaccagucccg

SEQ ID NO: 2011818 - RNA, 19 nt, Artificial Sequence
  Description of Artificial Sequence: Synthetic oligonucleotide
  Sense strand starting at position 1452 of SEQ ID NO: 1881021
ugagcccuugcgcauuaau

SEQ ID NO: 2011819 - RNA, 19 nt, Artificial Sequence
  Description of Artificial Sequence: Synthetic oligonucleotide
  Antisense strand to SEQ ID NO: 2011818
auuaaugcgcaagggcuca

SEQ ID NO: 2011820 - RNA, 19 nt, Artificial Sequence
  Description of Artificial Sequence: Synthetic oligonucleotide
  Sense strand starting at position 1455 of SEQ ID NO: 1881021
gcccuugcgcauuaaucca

SEQ ID NO: 2011821 - RNA, 19 nt, Artificial Sequence
  Description of Artificial Sequence: Synthetic oligonucleotide
  Antisense strand to SEQ ID NO: 2011820
uggauuaaugcgcaagggc

SEQ ID NO: 2011822 - RNA, 19 nt, Artificial Sequence
  Description of Artificial Sequence: Synthetic oligonucleotide
  Sense strand starting at position 1476 of SEQ ID NO: 1881021
gcugcucugguuucuguua

SEQ ID NO: 2011823 - RNA, 19 nt, Artificial Sequence
  Description of Artificial Sequence: Synthetic oligonucleotide
  Antisense strand to SEQ ID NO: 2011822
uaacagaaaccagagcagc

SEQ ID NO: 2011824 - RNA, 19 nt, Artificial Sequence
  Description of Artificial Sequence: Synthetic oligonucleotide
  Sense strand starting at position 1605 of SEQ ID NO: 1881021
caggacuugcucuagccua

SEQ ID NO: 2011825 - RNA, 19 nt, Artificial Sequence
  Description of Artificial Sequence: Synthetic oligonucleotide
  Antisense strand to SEQ ID NO: 2011824
uaggcuagagcaaguccug

SEQ ID NO: 2011826 - RNA, 19 nt, Artificial Sequence
  Description of Artificial Sequence: Synthetic oligonucleotide
  Sense strand starting at position 1662 of SEQ ID NO: 1881021
caugacauauguucuggga

SEQ ID NO: 2011827 - RNA, 19 nt, Artificial Sequence
  Description of Artificial Sequence: Synthetic oligonucleotide
  Antisense strand to SEQ ID NO: 2011826
ucccagaacauaugucaug

SEQ ID NO: 2011828 - RNA, 19 nt, Artificial Sequence
  Description of Artificial Sequence: Synthetic oligonucleotide
  Sense strand starting at position 1876 of SEQ ID NO: 1881021
agggccuuauccuccaaau

SEQ ID NO: 2011829 - RNA, 19 nt, Artificial Sequence
  Description of Artificial Sequence: Synthetic oligonucleotide
  Antisense strand to SEQ ID NO: 2011828
auuuggaggauaaggcccu

SEQ ID NO: 2011830 - RNA, 19 nt, Artificial Sequence
  Description of Artificial Sequence: Synthetic oligonucleotide
  Sense strand starting at position 2087 of SEQ ID NO: 1881021
cucugaaucccuggcaaag

SEQ ID NO: 2011831 - RNA, 19 nt, Artificial Sequence
  Description of Artificial Sequence: Synthetic oligonucleotide
  Antisense strand to SEQ ID NO: 2011830
cuuugccagggauucagag

SEQ ID NO: 2011832 - RNA, 19 nt, Artificial Sequence
  Description of Artificial Sequence: Synthetic oligonucleotide
  Sense strand starting at position 2276 of SEQ ID NO: 1881021
gggaguguucuuuguccac

SEQ ID NO: 2011833 - RNA, 19 nt, Artificial Sequence
  Description of Artificial Sequence: Synthetic oligonucleotide
  Antisense strand to SEQ ID NO: 2011832
guggacaaagaacacuccc

SEQ ID NO: 2011834 - RNA, 19 nt, Artificial Sequence
  Description of Artificial Sequence: Synthetic oligonucleotide
  Sense strand starting at position 2739 of SEQ ID NO: 1881021
gcuauagucuuagcacuuu

SEQ ID NO: 2011835 - RNA, 19 nt, Artificial Sequence
  Description of Artificial Sequence: Synthetic oligonucleotide
  Antisense strand to SEQ ID NO: 2011834
aaagugcuaagacuauagc

SEQ ID NO: 2011836 - RNA, 19 nt, Artificial Sequence
  Description of Artificial Sequence: Synthetic oligonucleotide
  Sense strand starting at position 2926 of SEQ ID NO: 1881021
ggaggucaugucuggguua

SEQ ID NO: 2011837 - RNA, 19 nt, Artificial Sequence
  Description of Artificial Sequence: Synthetic oligonucleotide
  Antisense strand to SEQ ID NO: 2011836
uaacccagacaugaccucc

SEQ ID NO: 2011838 - RNA, 19 nt, Artificial Sequence
  Description of Artificial Sequence: Synthetic oligonucleotide
  Sense strand starting at position 2928 of SEQ ID NO: 1881021
aggucaugucuggguuaca

SEQ ID NO: 2011839 - RNA, 19 nt, Artificial Sequence
  Description of Artificial Sequence: Synthetic oligonucleotide
  Antisense strand to SEQ ID NO: 2011838
uguaacccagacaugaccu

SEQ ID NO: 2011840 - RNA, 19 nt, Artificial Sequence
  Description of Artificial Sequence: Synthetic oligonucleotide
  Sense strand starting at position 2929 of SEQ ID NO: 1881021
ggucaugucuggguuacac

SEQ ID NO: 2011841 - RNA, 19 nt, Artificial Sequence
  Description of Artificial Sequence: Synthetic oligonucleotide
  Antisense strand to SEQ ID NO: 2011840
guguaacccagacaugacc

SEQ ID NO: 2011842 - RNA, 19 nt, Artificial Sequence
  Description of Artificial Sequence: Synthetic oligonucleotide
  Sense strand starting at position 2931 of SEQ ID NO: 1881021
ucaugucuggguuacacua

SEQ ID NO: 2011843 - RNA, 19 nt, Artificial Sequence
  Description of Artificial Sequence: Synthetic oligonucleotide
  Antisense strand to SEQ ID NO: 2011842
uaguguaacccagacauga

SEQ ID NO: 2011844 - RNA, 19 nt, Artificial Sequence
  Description of Artificial Sequence: Synthetic oligonucleotide
  Sense strand starting at position 3047 of SEQ ID NO: 1881021
gucuauugugcuuagugga

SEQ ID NO: 2011845 - RNA, 19 nt, Artificial Sequence
  Description of Artificial Sequence: Synthetic oligonucleotide
  Antisense strand to SEQ ID NO: 2011844
uccacuaagcacaauagac

SEQ ID NO: 2011846 - RNA, 19 nt, Artificial Sequence
  Description of Artificial Sequence: Synthetic oligonucleotide
  Sense strand starting at position 3052 of SEQ ID NO: 1881021
uugugcuuaguggauaagu

SEQ ID NO: 2011847 - RNA, 19 nt, Artificial Sequence
  Description of Artificial Sequence: Synthetic oligonucleotide
  Antisense strand to SEQ ID NO: 2011846
acuuauccacuaagcacaa

SEQ ID NO: 2011848 - RNA, 19 nt, Artificial Sequence
  Description of Artificial Sequence: Synthetic oligonucleotide
  Sense strand starting at position 3054 of SEQ ID NO: 1881021
gugcuuaguggauaaguca

SEQ ID NO: 2011849 - RNA, 19 nt, Artificial Sequence
  Description of Artificial Sequence: Synthetic oligonucleotide
  Antisense strand to SEQ ID NO: 2011848
ugacuuauccacuaagcac

SEQ ID NO: 2011850 - RNA, 19 nt, Artificial Sequence
  Description of Artificial Sequence: Synthetic oligonucleotide
  Sense strand starting at position 3061 of SEQ ID NO: 1881021
guggauaagucaucccugu

SEQ ID NO: 2011851 - RNA, 19 nt, Artificial Sequence
  Description of Artificial Sequence: Synthetic oligonucleotide
  Antisense strand to SEQ ID NO: 2011850
acagggaugacuuauccac

SEQ ID NO: 2011852 - RNA, 19 nt, Artificial Sequence
  Description of Artificial Sequence: Synthetic oligonucleotide
  Sense strand starting at position 3065 of SEQ ID NO: 1881021
auaagucaucccuguugua

SEQ ID NO: 2011853 - RNA, 19 nt, Artificial Sequence
  Description of Artificial Sequence: Synthetic oligonucleotide
  Antisense strand to SEQ ID NO: 2011852
uacaacagggaugacuuau

SEQ ID NO: 2011854 - RNA, 19 nt, Artificial Sequence
  Description of Artificial Sequence: Synthetic oligonucleotide
  Sense strand starting at position 3129 of SEQ ID NO: 1881021
gucaucacccuuuguauau

SEQ ID NO: 2011855 - RNA, 19 nt, Artificial Sequence
  Description of Artificial Sequence: Synthetic oligonucleotide
  Antisense strand to SEQ ID NO: 2011854
auauacaaagggugaugac

SEQ ID NO: 2011856 - RNA, 19 nt, Artificial Sequence
  Description of Artificial Sequence: Synthetic oligonucleotide
  Sense strand starting at position 3159 of SEQ ID NO: 1881021
gugacugugucuuugugaa

SEQ ID NO: 2011857 - RNA, 19 nt, Artificial Sequence
  Description of Artificial Sequence: Synthetic oligonucleotide
  Antisense strand to SEQ ID NO: 2011856
uucacaaagacacagucac

SEQ ID NO: 2011858 - RNA, 19 nt, Artificial Sequence
  Description of Artificial Sequence: Synthetic oligonucleotide
  Sense strand starting at position 3224 of SEQ ID NO: 1881021
aguaggugugaguguggaa

SEQ ID NO: 2011859 - RNA, 19 nt, Artificial Sequence
  Description of Artificial Sequence: Synthetic oligonucleotide
  Antisense strand to SEQ ID NO: 2011858
uuccacacucacaccuacu

SEQ ID NO: 2011860 - RNA, 19 nt, Artificial Sequence
  Description of Artificial Sequence: Synthetic oligonucleotide
  Sense strand starting at position 3265 of SEQ ID NO: 1881021
gugugagcccugcugucuu

SEQ ID NO: 2011861 - RNA, 19 nt, Artificial Sequence
  Description of Artificial Sequence: Synthetic oligonucleotide
  Antisense strand to SEQ ID NO: 2011860
aagacagcagggcucacac

SEQ ID NO: 2011862 - RNA, 19 nt, Artificial Sequence
  Description of Artificial Sequence: Synthetic oligonucleotide
  Sense strand starting at position 3277 of SEQ ID NO: 1881021
cugucuugugagcaugaga

SEQ ID NO: 2011863 - RNA, 19 nt, Artificial Sequence
  Description of Artificial Sequence: Synthetic oligonucleotide
  Antisense strand to SEQ ID NO: 2011862
ucucaugcucacaagacag

SEQ ID NO: 2011864 - RNA, 19 nt, Artificial Sequence
  Description of Artificial Sequence: Synthetic oligonucleotide
  Sense strand starting at position 3290 of SEQ ID NO: 1881021
augagauccuguguuugug

SEQ ID NO: 2011865 - RNA, 19 nt, Artificial Sequence
  Description of Artificial Sequence: Synthetic oligonucleotide
  Antisense strand to SEQ ID NO: 2011864
cacaaacacaggaucucau

SEQ ID NO: 2011866 - RNA, 19 nt, Artificial Sequence
  Description of Artificial Sequence: Synthetic oligonucleotide
  Sense strand starting at position 3293 of SEQ ID NO: 1881021
agauccuguguuuguguga

SEQ ID NO: 2011867 - RNA, 19 nt, Artificial Sequence
  Description of Artificial Sequence: Synthetic oligonucleotide
  Antisense strand to SEQ ID NO: 2011866
ucacacaaacacaggaucu

SEQ ID NO: 2011868 - RNA, 19 nt, Artificial Sequence
  Description of Artificial Sequence: Synthetic oligonucleotide
  Sense strand starting at position 3314 of SEQ ID NO: 1881021
augcauaugagcugucagu

SEQ ID NO: 2011869 - RNA, 19 nt, Artificial Sequence
  Description of Artificial Sequence: Synthetic oligonucleotide
  Antisense strand to SEQ ID NO: 2011868
acugacagcucauaugcau

SEQ ID NO: 2011870 - RNA, 19 nt, Artificial Sequence
  Description of Artificial Sequence: Synthetic oligonucleotide
  Sense strand starting at position 3321 of SEQ ID NO: 1881021
ugagcugucagugagcaca

SEQ ID NO: 2011871 - RNA, 19 nt, Artificial Sequence
  Description of Artificial Sequence: Synthetic oligonucleotide
  Antisense strand to SEQ ID NO: 2011870
ugugcucacugacagcuca

SEQ ID NO: 2011872 - RNA, 19 nt, Artificial Sequence
  Description of Artificial Sequence: Synthetic oligonucleotide
  Sense strand starting at position 3621 of SEQ ID NO: 1881021
gagcuuauguacuucuguu

SEQ ID NO: 2011873 - RNA, 19 nt, Artificial Sequence
  Description of Artificial Sequence: Synthetic oligonucleotide
  Antisense strand to SEQ ID NO: 2011872
aacagaaguacauaagcuc

SEQ ID NO: 2011874 - RNA, 19 nt, Artificial Sequence
  Description of Artificial Sequence: Synthetic oligonucleotide
  Sense strand starting at position 56 of SEQ ID NO: 1881022
cuuagaauaucuuucccga

SEQ ID NO: 2011875 - RNA, 19 nt, Artificial Sequence
  Description of Artificial Sequence: Synthetic oligonucleotide
  Antisense strand to SEQ ID NO: 2011874
ucgggaaagauauucuaag

SEQ ID NO: 2011876 - RNA, 19 nt, Artificial Sequence
  Description of Artificial Sequence: Synthetic oligonucleotide
  Sense strand starting at position 101 of SEQ ID NO: 1881022
uggcguauucugccuucca

SEQ ID NO: 2011877 - RNA, 19 nt, Artificial Sequence
  Description of Artificial Sequence: Synthetic oligonucleotide
  Antisense strand to SEQ ID NO: 2011876
uggaaggcagaauacgcca

SEQ ID NO: 2011878 - RNA, 19 nt, Artificial Sequence
  Description of Artificial Sequence: Synthetic oligonucleotide
  Sense strand starting at position 103 of SEQ ID NO: 1881022
gcguauucugccuuccauu

SEQ ID NO: 2011879 - RNA, 19 nt, Artificial Sequence
  Description of Artificial Sequence: Synthetic oligonucleotide
  Antisense strand to SEQ ID NO: 2011878
aauggaaggcagaauacgc

SEQ ID NO: 2011880 - RNA, 19 nt, Artificial Sequence
  Description of Artificial Sequence: Synthetic oligonucleotide
  Sense strand starting at position 328 of SEQ ID NO: 1881022
ugguaagggucuguggaau

SEQ ID NO: 2011881 - RNA, 19 nt, Artificial Sequence
  Description of Artificial Sequence: Synthetic oligonucleotide
  Antisense strand to SEQ ID NO: 2011880
auuccacagacccuuacca

SEQ ID NO: 2011882 - RNA, 19 nt, Artificial Sequence
  Description of Artificial Sequence: Synthetic oligonucleotide
  Sense strand starting at position 334 of SEQ ID NO: 1881022
gggucuguggaauaaguga

SEQ ID NO: 2011883 - RNA, 19 nt, Artificial Sequence
  Description of Artificial Sequence: Synthetic oligonucleotide
  Antisense strand to SEQ ID NO: 2011882
ucacuuauuccacagaccc

SEQ ID NO: 2011884 - RNA, 19 nt, Artificial Sequence
  Description of Artificial Sequence: Synthetic oligonucleotide
  Sense strand starting at position 405 of SEQ ID NO: 1881022
ggaagaauucugugaaguu

SEQ ID NO: 2011885 - RNA, 19 nt, Artificial Sequence
  Description of Artificial Sequence: Synthetic oligonucleotide
  Antisense strand to SEQ ID NO: 2011884
aacuucacagaauucuucc

SEQ ID NO: 2011886 - RNA, 19 nt, Artificial Sequence
  Description of Artificial Sequence: Synthetic oligonucleotide
  Sense strand starting at position 807 of SEQ ID NO: 1881022
aggaguuuaucuuccaaga

SEQ ID NO: 2011887 - RNA, 19 nt, Artificial Sequence
  Description of Artificial Sequence: Synthetic oligonucleotide
  Antisense strand to SEQ ID NO: 2011886
ucuuggaagauaaacuccu

SEQ ID NO: 2011888 - RNA, 19 nt, Artificial Sequence
  Description of Artificial Sequence: Synthetic oligonucleotide
  Sense strand starting at position 820 of SEQ ID NO: 1881022
ccaagauaugcucacacgu

SEQ ID NO: 2011889 - RNA, 19 nt, Artificial Sequence
  Description of Artificial Sequence: Synthetic oligonucleotide
  Antisense strand to SEQ ID NO: 2011888
acgugugagcauaucuugg

SEQ ID NO: 2011890 - RNA, 19 nt, Artificial Sequence
  Description of Artificial Sequence: Synthetic oligonucleotide
  Sense strand starting at position 944 of SEQ ID NO: 1881022
uguguccaucaguagaaga

SEQ ID NO: 2011891 - RNA, 19 nt, Artificial Sequence
  Description of Artificial Sequence: Synthetic oligonucleotide
  Antisense strand to SEQ ID NO: 2011890
ucuucuacugauggacaca

SEQ ID NO: 2011892 - RNA, 19 nt, Artificial Sequence
  Description of Artificial Sequence: Synthetic oligonucleotide
  Sense strand starting at position 1048 of SEQ ID NO: 1881022
gcauauacagagcauuaau

SEQ ID NO: 2011893 - RNA, 19 nt, Artificial Sequence
  Description of Artificial Sequence: Synthetic oligonucleotide
  Antisense strand to SEQ ID NO: 2011892
auuaaugcucuguauaugc

SEQ ID NO: 2011894 - RNA, 19 nt, Artificial Sequence
  Description of Artificial Sequence: Synthetic oligonucleotide
  Sense strand starting at position 1594 of SEQ ID NO: 1881022
auaccaguugagugguaga

SEQ ID NO: 2011895 - RNA, 19 nt, Artificial Sequence
  Description of Artificial Sequence: Synthetic oligonucleotide
  Antisense strand to SEQ ID NO: 2011894
ucuaccacucaacugguau

SEQ ID NO: 2011896 - RNA, 19 nt, Artificial Sequence
  Description of Artificial Sequence: Synthetic oligonucleotide
  Sense strand starting at position 1599 of SEQ ID NO: 1881022
aguugagugguagauauag

SEQ ID NO: 2011897 - RNA, 19 nt, Artificial Sequence
  Description of Artificial Sequence: Synthetic oligonucleotide
  Antisense strand to SEQ ID NO: 2011896
cuauaucuaccacucaacu

SEQ ID NO: 2011898 - RNA, 19 nt, Artificial Sequence
  Description of Artificial Sequence: Synthetic oligonucleotide
  Sense strand starting at position 1640 of SEQ ID NO: 1881022
acagaaucgcaauguuaaa

SEQ ID NO: 2011899 - RNA, 19 nt, Artificial Sequence
  Description of Artificial Sequence: Synthetic oligonucleotide
  Antisense strand to SEQ ID NO: 2011898
uuuaacauugcgauucugu

SEQ ID NO: 2011900 - RNA, 19 nt, Artificial Sequence
  Description of Artificial Sequence: Synthetic oligonucleotide
  Sense strand starting at position 1667 of SEQ ID NO: 1881022
gaaagagcuccaugugaaa

SEQ ID NO: 2011901 - RNA, 19 nt, Artificial Sequence
  Description of Artificial Sequence: Synthetic oligonucleotide
  Antisense strand to SEQ ID NO: 2011900
uuucacauggagcucuuuc

SEQ ID NO: 2011902 - RNA, 19 nt, Artificial Sequence
  Description of Artificial Sequence: Synthetic oligonucleotide
  Sense strand starting at position 1763 of SEQ ID NO: 1881022
accuguuaccuugaccauu

SEQ ID NO: 2011903 - RNA, 19 nt, Artificial Sequence
  Description of Artificial Sequence: Synthetic oligonucleotide
  Antisense strand to SEQ ID NO: 2011902
aauggucaagguaacaggu

SEQ ID NO: 2011904 - RNA, 19 nt, Artificial Sequence
  Description of Artificial Sequence: Synthetic oligonucleotide
  Sense strand starting at position 1996 of SEQ ID NO: 1881022
aucugaguuaugggccaga

SEQ ID NO: 2011905 - RNA, 19 nt, Artificial Sequence
  Description of Artificial Sequence: Synthetic oligonucleotide
  Antisense strand to SEQ ID NO: 2011904
ucuggcccauaacucagau

SEQ ID NO: 2011906 - RNA, 19 nt, Artificial Sequence
  Description of Artificial Sequence: Synthetic oligonucleotide
  Sense strand starting at position 1999 of SEQ ID NO: 1881022
ugaguuaugggccagaguu

SEQ ID NO: 2011907 - RNA, 19 nt, Artificial Sequence
  Description of Artificial Sequence: Synthetic oligonucleotide
  Antisense strand to SEQ ID NO: 2011906
aacucuggcccauaacuca

SEQ ID NO: 2011908 - RNA, 19 nt, Artificial Sequence
  Description of Artificial Sequence: Synthetic oligonucleotide
  Sense strand starting at position 2285 of SEQ ID NO: 1881022
guauccuggcaguaaugaa

SEQ ID NO: 2011909 - RNA, 19 nt, Artificial Sequence
  Description of Artificial Sequence: Synthetic oligonucleotide
  Antisense strand to SEQ ID NO: 2011908
uucauuacugccaggauac

SEQ ID NO: 2011910 - RNA, 19 nt, Artificial Sequence
  Description of Artificial Sequence: Synthetic oligonucleotide
  Sense strand starting at position 2310 of SEQ ID NO: 1881022
agcguaaagcuuccuguuu

SEQ ID NO: 2011911 - RNA, 19 nt, Artificial Sequence
  Description of Artificial Sequence: Synthetic oligonucleotide
  Antisense strand to SEQ ID NO: 2011910
aaacaggaagcuuuacgcu

SEQ ID NO: 2011912 - RNA, 19 nt, Artificial Sequence
  Description of Artificial Sequence: Synthetic oligonucleotide
  Sense strand starting at position 2563 of SEQ ID NO: 1881022
ugggauaccucuucuuucu

SEQ ID NO: 2011913 - RNA, 19 nt, Artificial Sequence
  Description of Artificial Sequence: Synthetic oligonucleotide
  Antisense strand to SEQ ID NO: 2011912
agaaagaagagguauccca

SEQ ID NO: 2011914 - RNA, 19 nt, Artificial Sequence
  Description of Artificial Sequence: Synthetic oligonucleotide
  Sense strand starting at position 2673 of SEQ ID NO: 1881022
aggcauuagagagguugaa

SEQ ID NO: 2011915 - RNA, 19 nt, Artificial Sequence
  Description of Artificial Sequence: Synthetic oligonucleotide
  Antisense strand to SEQ ID NO: 2011914
uucaaccucucuaaugccu

SEQ ID NO: 2011916 - RNA, 19 nt, Artificial Sequence
  Description of Artificial Sequence: Synthetic oligonucleotide
  Sense strand starting at position 2772 of SEQ ID NO: 1881022
cucuauuguguuggaauaa

SEQ ID NO: 2011917 - RNA, 19 nt, Artificial Sequence
  Description of Artificial Sequence: Synthetic oligonucleotide
  Antisense strand to SEQ ID NO: 2011916
uuauuccaacacaauagag

SEQ ID NO: 2011918 - RNA, 19 nt, Artificial Sequence
  Description of Artificial Sequence: Synthetic oligonucleotide
  Sense strand starting at position 2891 of SEQ ID NO: 1881022
gucauuguucccuaggaaa

SEQ ID NO: 2011919 - RNA, 19 nt, Artificial Sequence
  Description of Artificial Sequence: Synthetic oligonucleotide
  Antisense strand to SEQ ID NO: 2011918
uuuccuagggaacaaugac

SEQ ID NO: 2011920 - RNA, 19 nt, Artificial Sequence
  Description of Artificial Sequence: Synthetic oligonucleotide
  Sense strand starting at position 2926 of SEQ ID NO: 1881022
gcuuauagacacuaguaaa

SEQ ID NO: 2011921 - RNA, 19 nt, Artificial Sequence
  Description of Artificial Sequence: Synthetic oligonucleotide
  Antisense strand to SEQ ID NO: 2011920
uuuacuagugucuauaagc

SEQ ID NO: 2011922 - RNA, 19 nt, Artificial Sequence
  Description of Artificial Sequence: Synthetic oligonucleotide
  Sense strand starting at position 3016 of SEQ ID NO: 1881022
aagguauucuuaguaagua

SEQ ID NO: 2011923 - RNA, 19 nt, Artificial Sequence
  Description of Artificial Sequence: Synthetic oligonucleotide
  Antisense strand to SEQ ID NO: 2011922
uacuuacuaagaauaccuu

SEQ ID NO: 2011924 - RNA, 19 nt, Artificial Sequence
  Description of Artificial Sequence: Synthetic oligonucleotide
  Sense strand starting at position 3021 of SEQ ID NO: 1881022
auucuuaguaaguauggua

SEQ ID NO: 2011925 - RNA, 19 nt, Artificial Sequence
  Description of Artificial Sequence: Synthetic oligonucleotide
  Antisense strand to SEQ ID NO: 2011924
uaccauacuuacuaagaau

SEQ ID NO: 2011926 - RNA, 19 nt, Artificial Sequence
  Description of Artificial Sequence: Synthetic oligonucleotide
  Sense strand starting at position 3069 of SEQ ID NO: 1881022
auaaucuguugguuugaca

SEQ ID NO: 2011927 - RNA, 19 nt, Artificial Sequence
  Description of Artificial Sequence: Synthetic oligonucleotide
  Antisense strand to SEQ ID NO: 2011926
ugucaaaccaacagauuau

SEQ ID NO: 2011928 - RNA, 19 nt, Artificial Sequence
  Description of Artificial Sequence: Synthetic oligonucleotide
  Sense strand starting at position 3118 of SEQ ID NO: 1881022
gaacuaggucuuuagcuga

SEQ ID NO: 2011929 - RNA, 19 nt, Artificial Sequence
  Description of Artificial Sequence: Synthetic oligonucleotide
  Antisense strand to SEQ ID NO: 2011928
ucagcuaaagaccuaguuc

SEQ ID NO: 2011930 - RNA, 19 nt, Artificial Sequence
  Description of Artificial Sequence: Synthetic oligonucleotide
  Sense strand starting at position 3123 of SEQ ID NO: 1881022
aggucuuuagcugaaucua

SEQ ID NO: 2011931 - RNA, 19 nt, Artificial Sequence
  Description of Artificial Sequence: Synthetic oligonucleotide
  Antisense strand to SEQ ID NO: 2011930
uagauucagcuaaagaccu

SEQ ID NO: 2011932 - RNA, 19 nt, Artificial Sequence
  Description of Artificial Sequence: Synthetic oligonucleotide
  Sense strand starting at position 3141 of SEQ ID NO: 1881022
acaggugacucuguauaac

SEQ ID NO: 2011933 - RNA, 19 nt, Artificial Sequence
  Description of Artificial Sequence: Synthetic oligonucleotide
  Antisense strand to SEQ ID NO: 2011932
guuauacagagucaccugu

SEQ ID NO: 2011934 - RNA, 19 nt, Artificial Sequence
  Description of Artificial Sequence: Synthetic oligonucleotide
  Sense strand starting at position 3144 of SEQ ID NO: 1881022
ggugacucuguauaacuuu

SEQ ID NO: 2011935 - RNA, 19 nt, Artificial Sequence
  Description of Artificial Sequence: Synthetic oligonucleotide
  Antisense strand to SEQ ID NO: 2011934
aaaguuauacagagucacc

SEQ ID NO: 2011936 - RNA, 19 nt, Artificial Sequence
  Description of Artificial Sequence: Synthetic oligonucleotide
  Sense strand starting at position 3324 of SEQ ID NO: 1881022
uggaguacuuucucauaau

SEQ ID NO: 2011937 - RNA, 19 nt, Artificial Sequence
  Description of Artificial Sequence: Synthetic oligonucleotide
  Antisense strand to SEQ ID NO: 2011936
auuaugagaaaguacucca

SEQ ID NO: 2011938 - RNA, 19 nt, Artificial Sequence
  Description of Artificial Sequence: Synthetic oligonucleotide
  Sense strand starting at position 3696 of SEQ ID NO: 1881022
uggugcugucuugagagga

SEQ ID NO: 2011939 - RNA, 19 nt, Artificial Sequence
  Description of Artificial Sequence: Synthetic oligonucleotide
  Antisense strand to SEQ ID NO: 2011938
uccucucaagacagcacca

SEQ ID NO: 2011940 - RNA, 19 nt, Artificial Sequence
  Description of Artificial Sequence: Synthetic oligonucleotide
  Sense strand starting at position 3820 of SEQ ID NO: 1881022
gaaggaauucuguguuuaa

SEQ ID NO: 2011941 - RNA, 19 nt, Artificial Sequence
  Description of Artificial Sequence: Synthetic oligonucleotide
  Antisense strand to SEQ ID NO: 2011940
uuaaacacagaauuccuuc

SEQ ID NO: 2011942 - RNA, 19 nt, Artificial Sequence
  Description of Artificial Sequence: Synthetic oligonucleotide
  Sense strand starting at position 3821 of SEQ ID NO: 1881022
aaggaauucuguguuuaag

SEQ ID NO: 2011943 - RNA, 19 nt, Artificial Sequence
  Description of Artificial Sequence: Synthetic oligonucleotide
  Antisense strand to SEQ ID NO: 2011942
cuuaaacacagaauuccuu

SEQ ID NO: 2011944 - RNA, 19 nt, Artificial Sequence
  Description of Artificial Sequence: Synthetic oligonucleotide
  Sense strand starting at position 3831 of SEQ ID NO: 1881022
guguuuaagcaccagagau

SEQ ID NO: 2011945 - RNA, 19 nt, Artificial Sequence
  Description of Artificial Sequence: Synthetic oligonucleotide
  Antisense strand to SEQ ID NO: 2011944
aucucuggugcuuaaacac

SEQ ID NO: 2011946 - RNA, 19 nt, Artificial Sequence
  Description of Artificial Sequence: Synthetic oligonucleotide
  Sense strand starting at position 3833 of SEQ ID NO: 1881022
guuuaagcaccagagaugu

SEQ ID NO: 2011947 - RNA, 19 nt, Artificial Sequence
  Description of Artificial Sequence: Synthetic oligonucleotide
  Antisense strand to SEQ ID NO: 2011946
acaucucuggugcuuaaac

SEQ ID NO: 2011948 - RNA, 19 nt, Artificial Sequence
  Description of Artificial Sequence: Synthetic oligonucleotide
  Sense strand starting at position 3846 of SEQ ID NO: 1881022
agauguuaacccugucaug

SEQ ID NO: 2011949 - RNA, 19 nt, Artificial Sequence
  Description of Artificial Sequence: Synthetic oligonucleotide
  Antisense strand to SEQ ID NO: 2011948
caugacaggguuaacaucu

SEQ ID NO: 2011950 - RNA, 19 nt, Artificial Sequence
  Description of Artificial Sequence: Synthetic oligonucleotide
  Sense strand starting at position 3903 of SEQ ID NO: 1881022
acaugucacuagccuagaa

SEQ ID NO: 2011951 - RNA, 19 nt, Artificial Sequence
  Description of Artificial Sequence: Synthetic oligonucleotide
  Antisense strand to SEQ ID NO: 2011950
uucuaggcuagugacaugu

SEQ ID NO: 2011952 - RNA, 19 nt, Artificial Sequence
  Description of Artificial Sequence: Synthetic oligonucleotide
  Sense strand starting at position 3977 of SEQ ID NO: 1881022
ucagaaaucuuggauuucu

SEQ ID NO: 2011953 - RNA, 19 nt, Artificial Sequence
  Description of Artificial Sequence: Synthetic oligonucleotide
  Antisense strand to SEQ ID NO: 2011952
agaaauccaagauuucuga

SEQ ID NO: 2011954 - RNA, 19 nt, Artificial Sequence
  Description of Artificial Sequence: Synthetic oligonucleotide
  Sense strand starting at position 299 of SEQ ID NO: 1881023
gcacauaaguucuugauga

SEQ ID NO: 2011955 - RNA, 19 nt, Artificial Sequence
  Description of Artificial Sequence: Synthetic oligonucleotide
  Antisense strand to SEQ ID NO: 2011954
ucaucaagaacuuaugugc

SEQ ID NO: 2011956 - RNA, 19 nt, Artificial Sequence
  Description of Artificial Sequence: Synthetic oligonucleotide
  Sense strand starting at position 447 of SEQ ID NO: 1881023
aagugucgugacuauauca

SEQ ID NO: 2011957 - RNA, 19 nt, Artificial Sequence
  Description of Artificial Sequence: Synthetic oligonucleotide
  Antisense strand to SEQ ID NO: 2011956
ugauauagucacgacacuu

SEQ ID NO: 2011958 - RNA, 19 nt, Artificial Sequence
  Description of Artificial Sequence: Synthetic oligonucleotide
  Sense strand starting at position 515 of SEQ ID NO: 1881023
ucuggaggucagcagaauu

SEQ ID NO: 2011959 - RNA, 19 nt, Artificial Sequence
  Description of Artificial Sequence: Synthetic oligonucleotide
  Antisense strand to SEQ ID NO: 2011958
aauucugcugaccuccaga

SEQ ID NO: 2011960 - RNA, 19 nt, Artificial Sequence
  Description of Artificial Sequence: Synthetic oligonucleotide
  Sense strand starting at position 672 of SEQ ID NO: 1881023
uguugcugaaccugagaaa

SEQ ID NO: 2011961 - RNA, 19 nt, Artificial Sequence
  Description of Artificial Sequence: Synthetic oligonucleotide
  Antisense strand to SEQ ID NO: 2011960
uuucucagguucagcaaca

SEQ ID NO: 2011962 - RNA, 19 nt, Artificial Sequence
  Description of Artificial Sequence: Synthetic oligonucleotide
  Sense strand starting at position 714 of SEQ ID NO: 1881023
guaagacuggcuggaagaa

SEQ ID NO: 2011963 - RNA, 19 nt, Artificial Sequence
  Description of Artificial Sequence: Synthetic oligonucleotide
  Antisense strand to SEQ ID NO: 2011962
uucuuccagccagucuuac

SEQ ID NO: 2011964 - RNA, 19 nt, Artificial Sequence
  Description of Artificial Sequence: Synthetic oligonucleotide
  Sense strand starting at position 753 of SEQ ID NO: 1881023
cagagccuugaaggucaua

SEQ ID NO: 2011965 - RNA, 19 nt, Artificial Sequence
  Description of Artificial Sequence: Synthetic oligonucleotide
  Antisense strand to SEQ ID NO: 2011964
uaugaccuucaaggcucug

SEQ ID NO: 2011966 - RNA, 19 nt, Artificial Sequence
  Description of Artificial Sequence: Synthetic oligonucleotide
  Sense strand starting at position 912 of SEQ ID NO: 1881023
acugaagaaugcuuuaaac

SEQ ID NO: 2011967 - RNA, 19 nt, Artificial Sequence
  Description of Artificial Sequence: Synthetic oligonucleotide
  Antisense strand to SEQ ID NO: 2011966
guuuaaagcauucuucagu

SEQ ID NO: 2011968 - RNA, 19 nt, Artificial Sequence
  Description of Artificial Sequence: Synthetic oligonucleotide
  Sense strand starting at position 922 of SEQ ID NO: 1881023
gcuuuaaacuaguuagaag

SEQ ID NO: 2011969 - RNA, 19 nt, Artificial Sequence
  Description of Artificial Sequence: Synthetic oligonucleotide
  Antisense strand to SEQ ID NO: 2011968
cuucuaacuaguuuaaagc

SEQ ID NO: 2011970 - RNA, 19 nt, Artificial Sequence
  Description of Artificial Sequence: Synthetic oligonucleotide
  Sense strand starting at position 995 of SEQ ID NO: 1881023
guguuuaauuuggaaagaa

SEQ ID NO: 2011971 - RNA, 19 nt, Artificial Sequence
  Description of Artificial Sequence: Synthetic oligonucleotide
  Antisense strand to SEQ ID NO: 2011970
uucuuuccaaauuaaacac

SEQ ID NO: 2011972 - RNA, 19 nt, Artificial Sequence
  Description of Artificial Sequence: Synthetic oligonucleotide
  Sense strand starting at position 1232 of SEQ ID NO: 1881023
aguggugaaguugagagua

SEQ ID NO: 2011973 - RNA, 19 nt, Artificial Sequence
  Description of Artificial Sequence: Synthetic oligonucleotide
  Antisense strand to SEQ ID NO: 2011972
uacucucaacuucaccacu

SEQ ID NO: 2011974 - RNA, 19 nt, Artificial Sequence
  Description of Artificial Sequence: Synthetic oligonucleotide
  Sense strand starting at position 1369 of SEQ ID NO: 1881023
auagcaucacaaugucaga

SEQ ID NO: 2011975 - RNA, 19 nt, Artificial Sequence
  Description of Artificial Sequence: Synthetic oligonucleotide
  Antisense strand to SEQ ID NO: 2011974
ucugacauugugaugcuau

SEQ ID NO: 2011976 - RNA, 19 nt, Artificial Sequence
  Description of Artificial Sequence: Synthetic oligonucleotide
  Sense strand starting at position 1386 of SEQ ID NO: 1881023
gagaguguucuguauacag

SEQ ID NO: 2011977 - RNA, 19 nt, Artificial Sequence
  Description of Artificial Sequence: Synthetic oligonucleotide
  Antisense strand to SEQ ID NO: 2011976
cuguauacagaacacucuc

SEQ ID NO: 2011978 - RNA, 19 nt, Artificial Sequence
  Description of Artificial Sequence: Synthetic oligonucleotide
  Sense strand starting at position 1388 of SEQ ID NO: 1881023
gaguguucuguauacagga

SEQ ID NO: 2011979 - RNA, 19 nt, Artificial Sequence
  Description of Artificial Sequence: Synthetic oligonucleotide
  Antisense strand to SEQ ID NO: 2011978
uccuguauacagaacacuc

SEQ ID NO: 2011980 - RNA, 19 nt, Artificial Sequence
  Description of Artificial Sequence: Synthetic oligonucleotide
  Sense strand starting at position 1390 of SEQ ID NO: 1881023
guguucuguauacaggaaa

SEQ ID NO: 2011981 - RNA, 19 nt, Artificial Sequence
  Description of Artificial Sequence: Synthetic oligonucleotide
  Antisense strand to SEQ ID NO: 2011980
uuuccuguauacagaacac

SEQ ID NO: 2011982 - RNA, 19 nt, Artificial Sequence
  Description of Artificial Sequence: Synthetic oligonucleotide
  Sense strand starting at position 1540 of SEQ ID NO: 1881023
uggcuagaggguuaucauu

SEQ ID NO: 2011983 - RNA, 19 nt, Artificial Sequence
  Description of Artificial Sequence: Synthetic oligonucleotide
  Antisense strand to SEQ ID NO: 2011982
aaugauaacccucuagcca

SEQ ID NO: 2011984 - RNA, 19 nt, Artificial Sequence
  Description of Artificial Sequence: Synthetic oligonucleotide
  Sense strand starting at position 1693 of SEQ ID NO: 1881023
uuauauaaugcuuagggca

SEQ ID NO: 2011985 - RNA, 19 nt, Artificial Sequence
  Description of Artificial Sequence: Synthetic oligonucleotide
  Antisense strand to SEQ ID NO: 2011984
ugcccuaagcauuauauaa

SEQ ID NO: 2011986 - RNA, 19 nt, Artificial Sequence
  Description of Artificial Sequence: Synthetic oligonucleotide
  Sense strand starting at position 1701 of SEQ ID NO: 1881023
ugcuuagggcauuaagauu

SEQ ID NO: 2011987 - RNA, 19 nt, Artificial Sequence
  Description of Artificial Sequence: Synthetic oligonucleotide
  Antisense strand to SEQ ID NO: 2011986
aaucuuaaugcccuaagca

SEQ ID NO: 2011988 - RNA, 19 nt, Artificial Sequence
  Description of Artificial Sequence: Synthetic oligonucleotide
  Sense strand starting at position 1764 of SEQ ID NO: 1881023
guaagaaaugucuaucugu

SEQ ID NO: 2011989 - RNA, 19 nt, Artificial Sequence
  Description of Artificial Sequence: Synthetic oligonucleotide
  Antisense strand to SEQ ID NO: 2011988
acagauagacauuucuuac

SEQ ID NO: 2011990 - RNA, 19 nt, Artificial Sequence
  Description of Artificial Sequence: Synthetic oligonucleotide
  Sense strand starting at position 1873 of SEQ ID NO: 1881023
ugcugcagucugucuuaca

SEQ ID NO: 2011991 - RNA, 19 nt, Artificial Sequence
  Description of Artificial Sequence: Synthetic oligonucleotide
  Antisense strand to SEQ ID NO: 2011990
uguaagacagacugcagca

SEQ ID NO: 2011992 - RNA, 19 nt, Artificial Sequence
  Description of Artificial Sequence: Synthetic oligonucleotide
  Sense strand starting at position 2115 of SEQ ID NO: 1881023
uccucuugucaaggaacuu

SEQ ID NO: 2011993 - RNA, 19 nt, Artificial Sequence
  Description of Artificial Sequence: Synthetic oligonucleotide
  Antisense strand to SEQ ID NO: 2011992
aaguuccuugacaagagga

SEQ ID NO: 2011994 - RNA, 19 nt, Artificial Sequence
  Description of Artificial Sequence: Synthetic oligonucleotide
  Sense strand starting at position 2293 of SEQ ID NO: 1881023
cugcaaagccgacaagaua

SEQ ID NO: 2011995 - RNA, 19 nt, Artificial Sequence
  Description of Artificial Sequence: Synthetic oligonucleotide
  Antisense strand to SEQ ID NO: 2011994
uaucuugucggcuuugcag

SEQ ID NO: 2011996 - RNA, 19 nt, Artificial Sequence
  Description of Artificial Sequence: Synthetic oligonucleotide
  Sense strand starting at position 2585 of SEQ ID NO: 1881023
cuggcccugacuugaaaga

SEQ ID NO: 2011997 - RNA, 19 nt, Artificial Sequence
  Description of Artificial Sequence: Synthetic oligonucleotide
  Antisense strand to SEQ ID NO: 2011996
ucuuucaagucagggccag

SEQ ID NO: 2011998 - RNA, 19 nt, Artificial Sequence
  Description of Artificial Sequence: Synthetic oligonucleotide
  Sense strand starting at position 2664 of SEQ ID NO: 1881023
cagauagcagcauaagagu

SEQ ID NO: 2011999 - RNA, 19 nt, Artificial Sequence
  Description of Artificial Sequence: Synthetic oligonucleotide
  Antisense strand to SEQ ID NO: 2011998
acucuuaugcugcuaucug

SEQ ID NO: 2012000 - RNA, 19 nt, Artificial Sequence
  Description of Artificial Sequence: Synthetic oligonucleotide
  Sense strand starting at position 2711 of SEQ ID NO: 1881023
gguuaagugccugauauag

SEQ ID NO: 2012001 - RNA, 19 nt, Artificial Sequence
  Description of Artificial Sequence: Synthetic oligonucleotide
  Antisense strand to SEQ ID NO: 2012000
cuauaucaggcacuuaacc

SEQ ID NO: 2012002 - RNA, 19 nt, Artificial Sequence
  Description of Artificial Sequence: Synthetic oligonucleotide
  Sense strand starting at position 2721 of SEQ ID NO: 1881023
cugauauagcacugggaca

SEQ ID NO: 2012003 - RNA, 19 nt, Artificial Sequence
  Description of Artificial Sequence: Synthetic oligonucleotide
  Antisense strand to SEQ ID NO: 2012002
ugucccagugcuauaucag

SEQ ID NO: 2012004 - RNA, 19 nt, Artificial Sequence
  Description of Artificial Sequence: Synthetic oligonucleotide
  Sense strand starting at position 2722 of SEQ ID NO: 1881023
ugauauagcacugggacau

SEQ ID NO: 2012005 - RNA, 19 nt, Artificial Sequence
  Description of Artificial Sequence: Synthetic oligonucleotide
  Antisense strand to SEQ ID NO: 2012004
augucccagugcuauauca

SEQ ID NO: 2012006 - RNA, 19 nt, Artificial Sequence
  Description of Artificial Sequence: Synthetic oligonucleotide
  Sense strand starting at position 2743 of SEQ ID NO: 1881023
uucguaguugcaguaaagu

SEQ ID NO: 2012007 - RNA, 19 nt, Artificial Sequence
  Description of Artificial Sequence: Synthetic oligonucleotide
  Antisense strand to SEQ ID NO: 2012006
acuuuacugcaacuacgaa

SEQ ID NO: 2012008 - RNA, 19 nt, Artificial Sequence
  Description of Artificial Sequence: Synthetic oligonucleotide
  Sense strand starting at position 2822 of SEQ ID NO: 1881023
aguauaguuauggauguuu

SEQ ID NO: 2012009 - RNA, 19 nt, Artificial Sequence
  Description of Artificial Sequence: Synthetic oligonucleotide
  Antisense strand to SEQ ID NO: 2012008
aaacauccauaacuauacu

SEQ ID NO: 2012010 - RNA, 19 nt, Artificial Sequence
  Description of Artificial Sequence: Synthetic oligonucleotide
  Sense strand starting at position 2843 of SEQ ID NO: 1881023
cuggaagauuagcccuuaa

SEQ ID NO: 2012011 - RNA, 19 nt, Artificial Sequence
  Description of Artificial Sequence: Synthetic oligonucleotide
  Antisense strand to SEQ ID NO: 2012010
uuaagggcuaaucuuccag

SEQ ID NO: 2012012 - RNA, 19 nt, Artificial Sequence
  Description of Artificial Sequence: Synthetic oligonucleotide
  Sense strand starting at position 2995 of SEQ ID NO: 1881023
aaaugucucgucuuguguu

SEQ ID NO: 2012013 - RNA, 19 nt, Artificial Sequence
  Description of Artificial Sequence: Synthetic oligonucleotide
  Antisense strand to SEQ ID NO: 2012012
aacacaagacgagacauuu

SEQ ID NO: 2012014 - RNA, 19 nt, Artificial Sequence
  Description of Artificial Sequence: Synthetic oligonucleotide
  Sense strand starting at position 3023 of SEQ ID NO: 1881023
aaccgugauguacacuauu

SEQ ID NO: 2012015 - RNA, 19 nt, Artificial Sequence
  Description of Artificial Sequence: Synthetic oligonucleotide
  Antisense strand to SEQ ID NO: 2012014
aauaguguacaucacgguu

SEQ ID NO: 2012016 - RNA, 19 nt, Artificial Sequence
  Description of Artificial Sequence: Synthetic oligonucleotide
  Sense strand starting at position 3157 of SEQ ID NO: 1881023
uugcuuucuccguagauuu

SEQ ID NO: 2012017 - RNA, 19 nt, Artificial Sequence
  Description of Artificial Sequence: Synthetic oligonucleotide
  Antisense strand to SEQ ID NO: 2012016
aaaucuacggagaaagcaa

SEQ ID NO: 2012018 - RNA, 19 nt, Artificial Sequence
  Description of Artificial Sequence: Synthetic oligonucleotide
  Sense strand starting at position 3264 of SEQ ID NO: 1881023
auaucagaaguuugagguu

SEQ ID NO: 2012019 - RNA, 19 nt, Artificial Sequence
  Description of Artificial Sequence: Synthetic oligonucleotide
  Antisense strand to SEQ ID NO: 2012018
aaccucaaacuucugauau

SEQ ID NO: 2012020 - RNA, 19 nt, Artificial Sequence
  Description of Artificial Sequence: Synthetic oligonucleotide
  Sense strand starting at position 3352 of SEQ ID NO: 1881023
gggcauuugaguugugucu

SEQ ID NO: 2012021 - RNA, 19 nt, Artificial Sequence
  Description of Artificial Sequence: Synthetic oligonucleotide
  Antisense strand to SEQ ID NO: 2012020
agacacaacucaaaugccc

SEQ ID NO: 2012022 - RNA, 19 nt, Artificial Sequence
  Description of Artificial Sequence: Synthetic oligonucleotide
  Sense strand starting at position 3424 of SEQ ID NO: 1881023
ucuguagaucuguaucuuu

SEQ ID NO: 2012023 - RNA, 19 nt, Artificial Sequence
  Description of Artificial Sequence: Synthetic oligonucleotide
  Antisense strand to SEQ ID NO: 2012022
aaagauacagaucuacaga

SEQ ID NO: 2012024 - RNA, 19 nt, Artificial Sequence
  Description of Artificial Sequence: Synthetic oligonucleotide
  Sense strand starting at position 3494 of SEQ ID NO: 1881023
guguacauuuaauucugua

SEQ ID NO: 2012025 - RNA, 19 nt, Artificial Sequence
  Description of Artificial Sequence: Synthetic oligonucleotide
  Antisense strand to SEQ ID NO: 2012024
uacagaauuaaauguacac

SEQ ID NO: 2012026 - RNA, 19 nt, Artificial Sequence
  Description of Artificial Sequence: Synthetic oligonucleotide
  Sense strand starting at position 3567 of SEQ ID NO: 1881023
auguaugagaguuaguugu

SEQ ID NO: 2012027 - RNA, 19 nt, Artificial Sequence
  Description of Artificial Sequence: Synthetic oligonucleotide
  Antisense strand to SEQ ID NO: 2012026
acaacuaacucucauacau

SEQ ID NO: 2012028 - RNA, 19 nt, Artificial Sequence
  Description of Artificial Sequence: Synthetic oligonucleotide
  Sense strand starting at position 3604 of SEQ ID NO: 1881023
cuuagcauugucguguuaa

SEQ ID NO: 2012029 - RNA, 19 nt, Artificial Sequence
  Description of Artificial Sequence: Synthetic oligonucleotide
  Antisense strand to SEQ ID NO: 2012028
uuaacacgacaaugcuaag

SEQ ID NO: 2012030 - RNA, 19 nt, Artificial Sequence
  Description of Artificial Sequence: Synthetic oligonucleotide
  Sense strand starting at position 3672 of SEQ ID NO: 1881023
uucccuguugacuaaugaa

SEQ ID NO: 2012031 - RNA, 19 nt, Artificial Sequence
  Description of Artificial Sequence: Synthetic oligonucleotide
  Antisense strand to SEQ ID NO: 2012030
uucauuagucaacagggaa

SEQ ID NO: 2012032 - RNA, 19 nt, Artificial Sequence
  Description of Artificial Sequence: Synthetic oligonucleotide
  Sense strand starting at position 3729 of SEQ ID NO: 1881023
acuuucuaugcauagugaa

SEQ ID NO: 2012033 - RNA, 19 nt, Artificial Sequence
  Description of Artificial Sequence: Synthetic oligonucleotide
  Antisense strand to SEQ ID NO: 2012032
uucacuaugcauagaaagu

SEQ ID NO: 2012034 - RNA, 19 nt, Artificial Sequence
  Description of Artificial Sequence: Synthetic oligonucleotide
  Sense strand starting at position 209 of SEQ ID NO: 1881024
ccuuuauaucaaugugaga

SEQ ID NO: 2012035 - RNA, 19 nt, Artificial Sequence
  Description of Artificial Sequence: Synthetic oligonucleotide
  Antisense strand to SEQ ID NO: 2012034
ucucacauugauauaaagg

SEQ ID NO: 2012036 - RNA, 19 nt, Artificial Sequence
  Description of Artificial Sequence: Synthetic oligonucleotide
  Sense strand starting at position 643 of SEQ ID NO: 1881024
uuuagaccucgugaaauuc

SEQ ID NO: 2012037 - RNA, 19 nt, Artificial Sequence
  Description of Artificial Sequence: Synthetic oligonucleotide
  Antisense strand to SEQ ID NO: 2012036
gaauuucacgaggucuaaa

SEQ ID NO: 2012038 - RNA, 19 nt, Artificial Sequence
  Description of Artificial Sequence: Synthetic oligonucleotide
  Sense strand starting at position 933 of SEQ ID NO: 1881024
agugcugugccaucauucu

SEQ ID NO: 2012039 - RNA, 19 nt, Artificial Sequence
  Description of Artificial Sequence: Synthetic oligonucleotide
  Antisense strand to SEQ ID NO: 2012038
agaaugauggcacagcacu

SEQ ID NO: 2012040 - RNA, 19 nt, Artificial Sequence
  Description of Artificial Sequence: Synthetic oligonucleotide
  Sense strand starting at position 1177 of SEQ ID NO: 1881024
aucuuaugagaaugucuuu

SEQ ID NO: 2012041 - RNA, 19 nt, Artificial Sequence
  Description of Artificial Sequence: Synthetic oligonucleotide
  Antisense strand to SEQ ID NO: 2012040
aaagacauucucauaagau

SEQ ID NO: 2012042 - RNA, 19 nt, Artificial Sequence
  Description of Artificial Sequence: Synthetic oligonucleotide
  Sense strand starting at position 1182 of SEQ ID NO: 1881024
augagaaugucuuugcaaa

SEQ ID NO: 2012043 - RNA, 19 nt, Artificial Sequence
  Description of Artificial Sequence: Synthetic oligonucleotide
  Antisense strand to SEQ ID NO: 2012042
uuugcaaagacauucucau

SEQ ID NO: 2012044 - RNA, 19 nt, Artificial Sequence
  Description of Artificial Sequence: Synthetic oligonucleotide
  Sense strand starting at position 1250 of SEQ ID NO: 1881024
uuguuaaggaauugagauu

SEQ ID NO: 2012045 - RNA, 19 nt, Artificial Sequence
  Description of Artificial Sequence: Synthetic oligonucleotide
  Antisense strand to SEQ ID NO: 2012044
aaucucaauuccuuaacaa

SEQ ID NO: 2012046 - RNA, 19 nt, Artificial Sequence
  Description of Artificial Sequence: Synthetic oligonucleotide
  Sense strand starting at position 1262 of SEQ ID NO: 1881024
ugagauuaaugaguuguca

SEQ ID NO: 2012047 - RNA, 19 nt, Artificial Sequence
  Description of Artificial Sequence: Synthetic oligonucleotide
  Antisense strand to SEQ ID NO: 2012046
ugacaacucauuaaucuca

SEQ ID NO: 2012048 - RNA, 19 nt, Artificial Sequence
  Description of Artificial Sequence: Synthetic oligonucleotide
  Sense strand starting at position 1480 of SEQ ID NO: 1881024
agggaugguuauguugaga

SEQ ID NO: 2012049 - RNA, 19 nt, Artificial Sequence
  Description of Artificial Sequence: Synthetic oligonucleotide
  Antisense strand to SEQ ID NO: 2012048
ucucaacauaaccaucccu

SEQ ID NO: 2012050 - RNA, 19 nt, Artificial Sequence
  Description of Artificial Sequence: Synthetic oligonucleotide
  Sense strand starting at position 1493 of SEQ ID NO: 1881024
uugagaaaguuugcccaga

SEQ ID NO: 2012051 - RNA, 19 nt, Artificial Sequence
  Description of Artificial Sequence: Synthetic oligonucleotide
  Antisense strand to SEQ ID NO: 2012050
ucugggcaaacuuucucaa

SEQ ID NO: 2012052 - RNA, 19 nt, Artificial Sequence
  Description of Artificial Sequence: Synthetic oligonucleotide
  Sense strand starting at position 1494 of SEQ ID NO: 1881024
ugagaaaguuugcccagau

SEQ ID NO: 2012053 - RNA, 19 nt, Artificial Sequence
  Description of Artificial Sequence: Synthetic oligonucleotide
  Antisense strand to SEQ ID NO: 2012052
aucugggcaaacuuucuca

SEQ ID NO: 2012054 - RNA, 19 nt, Artificial Sequence
  Description of Artificial Sequence: Synthetic oligonucleotide
  Sense strand starting at position 1495 of SEQ ID NO: 1881024
gagaaaguuugcccagauu

SEQ ID NO: 2012055 - RNA, 19 nt, Artificial Sequence
  Description of Artificial Sequence: Synthetic oligonucleotide
  Antisense strand to SEQ ID NO: 2012054
aaucugggcaaacuuucuc

SEQ ID NO: 2012056 - RNA, 19 nt, Artificial Sequence
  Description of Artificial Sequence: Synthetic oligonucleotide
  Sense strand starting at position 1498 of SEQ ID NO: 1881024
aaaguuugcccagauugac

SEQ ID NO: 2012057 - RNA, 19 nt, Artificial Sequence
  Description of Artificial Sequence: Synthetic oligonucleotide
  Antisense strand to SEQ ID NO: 2012056
gucaaucugggcaaacuuu

SEQ ID NO: 2012058 - RNA, 19 nt, Artificial Sequence
  Description of Artificial Sequence: Synthetic oligonucleotide
  Sense strand starting at position 1765 of SEQ ID NO: 1881024
uuggcucuccagugauuuc

SEQ ID NO: 2012059 - RNA, 19 nt, Artificial Sequence
  Description of Artificial Sequence: Synthetic oligonucleotide
  Antisense strand to SEQ ID NO: 2012058
gaaaucacuggagagccaa

SEQ ID NO: 2012060 - RNA, 19 nt, Artificial Sequence
  Description of Artificial Sequence: Synthetic oligonucleotide
  Sense strand starting at position 1768 of SEQ ID NO: 1881024
gcucuccagugauuuccaa

SEQ ID NO: 2012061 - RNA, 19 nt, Artificial Sequence
  Description of Artificial Sequence: Synthetic oligonucleotide
  Antisense strand to SEQ ID NO: 2012060
uuggaaaucacuggagagc

SEQ ID NO: 2012062 - RNA, 19 nt, Artificial Sequence
  Description of Artificial Sequence: Synthetic oligonucleotide
  Sense strand starting at position 1799 of SEQ ID NO: 1881024
agagucuugacagaugugu

SEQ ID NO: 2012063 - RNA, 19 nt, Artificial Sequence
  Description of Artificial Sequence: Synthetic oligonucleotide
  Antisense strand to SEQ ID NO: 2012062
acacaucugucaagacucu

SEQ ID NO: 2012064 - RNA, 19 nt, Artificial Sequence
  Description of Artificial Sequence: Synthetic oligonucleotide
  Sense strand starting at position 1885 of SEQ ID NO: 1881024
ggaauaucuccacauuagc

SEQ ID NO: 2012065 - RNA, 19 nt, Artificial Sequence
  Description of Artificial Sequence: Synthetic oligonucleotide
  Antisense strand to SEQ ID NO: 2012064
gcuaauguggagauauucc

SEQ ID NO: 2012066 - RNA, 19 nt, Artificial Sequence
  Description of Artificial Sequence: Synthetic oligonucleotide
  Sense strand starting at position 1955 of SEQ ID NO: 1881024
gaaagaaagugauucuguu

SEQ ID NO: 2012067 - RNA, 19 nt, Artificial Sequence
  Description of Artificial Sequence: Synthetic oligonucleotide
  Antisense strand to SEQ ID NO: 2012066
aacagaaucacuuucuuuc

SEQ ID NO: 2012068 - RNA, 19 nt, Artificial Sequence
  Description of Artificial Sequence: Synthetic oligonucleotide
  Sense strand starting at position 1959 of SEQ ID NO: 1881024
gaaagugauucuguuauca

SEQ ID NO: 2012069 - RNA, 19 nt, Artificial Sequence
  Description of Artificial Sequence: Synthetic oligonucleotide
  Antisense strand to SEQ ID NO: 2012068
ugauaacagaaucacuuuc

SEQ ID NO: 2012070 - RNA, 19 nt, Artificial Sequence
  Description of Artificial Sequence: Synthetic oligonucleotide
  Sense strand starting at position 2038 of SEQ ID NO: 1881024
uuccauuugugagcucauu

SEQ ID NO: 2012071 - RNA, 19 nt, Artificial Sequence
  Description of Artificial Sequence: Synthetic oligonucleotide
  Antisense strand to SEQ ID NO: 2012070
aaugagcucacaaauggaa

SEQ ID NO: 2012072 - RNA, 19 nt, Artificial Sequence
  Description of Artificial Sequence: Synthetic oligonucleotide
  Sense strand starting at position 2159 of SEQ ID NO: 1881024
gccugauuggaaugggaau

SEQ ID NO: 2012073 - RNA, 19 nt, Artificial Sequence
  Description of Artificial Sequence: Synthetic oligonucleotide
  Antisense strand to SEQ ID NO: 2012072
auucccauuccaaucaggc

SEQ ID NO: 2012074 - RNA, 19 nt, Artificial Sequence
  Description of Artificial Sequence: Synthetic oligonucleotide
  Sense strand starting at position 2165 of SEQ ID NO: 1881024
uuggaaugggaaugcauau

SEQ ID NO: 2012075 - RNA, 19 nt, Artificial Sequence
  Description of Artificial Sequence: Synthetic oligonucleotide
  Antisense strand to SEQ ID NO: 2012074
auaugcauucccauuccaa

SEQ ID NO: 2012076 - RNA, 19 nt, Artificial Sequence
  Description of Artificial Sequence: Synthetic oligonucleotide
  Sense strand starting at position 2291 of SEQ ID NO: 1881024
gcuguuuauuuauugacuu

SEQ ID NO: 2012077 - RNA, 19 nt, Artificial Sequence
  Description of Artificial Sequence: Synthetic oligonucleotide
  Antisense strand to SEQ ID NO: 2012076
aagucaauaaauaaacagc

SEQ ID NO: 2012078 - RNA, 19 nt, Artificial Sequence
  Description of Artificial Sequence: Synthetic oligonucleotide
  Sense strand starting at position 2360 of SEQ ID NO: 1881024
guugaaaguugaccuuaaa

SEQ ID NO: 2012079 - RNA, 19 nt, Artificial Sequence
  Description of Artificial Sequence: Synthetic oligonucleotide
  Antisense strand to SEQ ID NO: 2012078
uuuaaggucaacuuucaac

SEQ ID NO: 2012080 - RNA, 19 nt, Artificial Sequence
  Description of Artificial Sequence: Synthetic oligonucleotide
  Sense strand starting at position 2504 of SEQ ID NO: 1881024
ccgguuacucaacaauaac

SEQ ID NO: 2012081 - RNA, 19 nt, Artificial Sequence
  Description of Artificial Sequence: Synthetic oligonucleotide
  Antisense strand to SEQ ID NO: 2012080
guuauuguugaguaaccgg

SEQ ID NO: 2012082 - RNA, 19 nt, Artificial Sequence
  Description of Artificial Sequence: Synthetic oligonucleotide
  Sense strand starting at position 2630 of SEQ ID NO: 1881024
cuagaaauuagcggaugaa

SEQ ID NO: 2012083 - RNA, 19 nt, Artificial Sequence
  Description of Artificial Sequence: Synthetic oligonucleotide
  Antisense strand to SEQ ID NO: 2012082
uucauccgcuaauuucuag

SEQ ID NO: 2012084 - RNA, 19 nt, Artificial Sequence
  Description of Artificial Sequence: Synthetic oligonucleotide
  Sense strand starting at position 2660 of SEQ ID NO: 1881024
acccaauagcuugaguuau

SEQ ID NO: 2012085 - RNA, 19 nt, Artificial Sequence
  Description of Artificial Sequence: Synthetic oligonucleotide
  Antisense strand to SEQ ID NO: 2012084
auaacucaagcuauugggu

SEQ ID NO: 2012086 - RNA, 19 nt, Artificial Sequence
  Description of Artificial Sequence: Synthetic oligonucleotide
  Sense strand starting at position 2958 of SEQ ID NO: 1881024
uccagaauguaaguaauga

SEQ ID NO: 2012087 - RNA, 19 nt, Artificial Sequence
  Description of Artificial Sequence: Synthetic oligonucleotide
  Antisense strand to SEQ ID NO: 2012086
ucauuacuuacauucugga

SEQ ID NO: 2012088 - RNA, 19 nt, Artificial Sequence
  Description of Artificial Sequence: Synthetic oligonucleotide
  Sense strand starting at position 3032 of SEQ ID NO: 1881024
gcuggaauggcucauaaag

SEQ ID NO: 2012089 - RNA, 19 nt, Artificial Sequence
  Description of Artificial Sequence: Synthetic oligonucleotide
  Antisense strand to SEQ ID NO: 2012088
cuuuaugagccauuccagc

SEQ ID NO: 2012090 - RNA, 19 nt, Artificial Sequence
  Description of Artificial Sequence: Synthetic oligonucleotide
  Sense strand starting at position 3079 of SEQ ID NO: 1881024
gguauauaugcacauguac

SEQ ID NO: 2012091 - RNA, 19 nt, Artificial Sequence
  Description of Artificial Sequence: Synthetic oligonucleotide
  Antisense strand to SEQ ID NO: 2012090
guacaugugcauauauacc

SEQ ID NO: 2012092 - RNA, 19 nt, Artificial Sequence
  Description of Artificial Sequence: Synthetic oligonucleotide
  Sense strand starting at position 3253 of SEQ ID NO: 1881024
gaagcaaggucaucacacu

SEQ ID NO: 2012093 - RNA, 19 nt, Artificial Sequence
  Description of Artificial Sequence: Synthetic oligonucleotide
  Antisense strand to SEQ ID NO: 2012092
agugugaugaccuugcuuc

SEQ ID NO: 2012094 - RNA, 19 nt, Artificial Sequence
  Description of Artificial Sequence: Synthetic oligonucleotide
  Sense strand starting at position 3411 of SEQ ID NO: 1881024
gugauaugcaaccagugaa

SEQ ID NO: 2012095 - RNA, 19 nt, Artificial Sequence
  Description of Artificial Sequence: Synthetic oligonucleotide
  Antisense strand to SEQ ID NO: 2012094
uucacugguugcauaucac

SEQ ID NO: 2012096 - RNA, 19 nt, Artificial Sequence
  Description of Artificial Sequence: Synthetic oligonucleotide
  Sense strand starting at position 3414 of SEQ ID NO: 1881024
auaugcaaccagugaagaa

SEQ ID NO: 2012097 - RNA, 19 nt, Artificial Sequence
  Description of Artificial Sequence: Synthetic oligonucleotide
  Antisense strand to SEQ ID NO: 2012096
uucuucacugguugcauau

SEQ ID NO: 2012098 - RNA, 19 nt, Artificial Sequence
  Description of Artificial Sequence: Synthetic oligonucleotide
  Sense strand starting at position 3444 of SEQ ID NO: 1881024
ugacuucagugauuggaag

SEQ ID NO: 2012099 - RNA, 19 nt, Artificial Sequence
  Description of Artificial Sequence: Synthetic oligonucleotide
  Antisense strand to SEQ ID NO: 2012098
cuuccaaucacugaaguca

SEQ ID NO: 2012100 - RNA, 19 nt, Artificial Sequence
  Description of Artificial Sequence: Synthetic oligonucleotide
  Sense strand starting at position 3450 of SEQ ID NO: 1881024
cagugauuggaaggugaug

SEQ ID NO: 2012101 - RNA, 19 nt, Artificial Sequence
  Description of Artificial Sequence: Synthetic oligonucleotide
  Antisense strand to SEQ ID NO: 2012100
caucaccuuccaaucacug

SEQ ID NO: 2012102 - RNA, 19 nt, Artificial Sequence
  Description of Artificial Sequence: Synthetic oligonucleotide
  Sense strand starting at position 3494 of SEQ ID NO: 1881024
acugcuauugaguaaagug

SEQ ID NO: 2012103 - RNA, 19 nt, Artificial Sequence
  Description of Artificial Sequence: Synthetic oligonucleotide
  Antisense strand to SEQ ID NO: 2012102
cacuuuacucaauagcagu

SEQ ID NO: 2012104 - RNA, 19 nt, Artificial Sequence
  Description of Artificial Sequence: Synthetic oligonucleotide
  Sense strand starting at position 3517 of SEQ ID NO: 1881024
aucuaugagccaugacuua

SEQ ID NO: 2012105 - RNA, 19 nt, Artificial Sequence
  Description of Artificial Sequence: Synthetic oligonucleotide
  Antisense strand to SEQ ID NO: 2012104
uaagucauggcucauagau

SEQ ID NO: 2012106 - RNA, 19 nt, Artificial Sequence
  Description of Artificial Sequence: Synthetic oligonucleotide
  Sense strand starting at position 3586 of SEQ ID NO: 1881024
cuaacuggccuuuagauca

SEQ ID NO: 2012107 - RNA, 19 nt, Artificial Sequence
  Description of Artificial Sequence: Synthetic oligonucleotide
  Antisense strand to SEQ ID NO: 2012106
ugaucuaaaggccaguuag

SEQ ID NO: 2012108 - RNA, 19 nt, Artificial Sequence
  Description of Artificial Sequence: Synthetic oligonucleotide
  Sense strand starting at position 3771 of SEQ ID NO: 1881024
aguggaaaccuuuacaguu

SEQ ID NO: 2012109 - RNA, 19 nt, Artificial Sequence
  Description of Artificial Sequence: Synthetic oligonucleotide
  Antisense strand to SEQ ID NO: 2012108
aacuguaaagguuuccacu

SEQ ID NO: 2012110 - RNA, 19 nt, Artificial Sequence
  Description of Artificial Sequence: Synthetic oligonucleotide
  Sense strand starting at position 3786 of SEQ ID NO: 1881024
aguuuaggaugucucaaag

SEQ ID NO: 2012111 - RNA, 19 nt, Artificial Sequence
  Description of Artificial Sequence: Synthetic oligonucleotide
  Antisense strand to SEQ ID NO: 2012110
cuuugagacauccuaaacu

SEQ ID NO: 2012112 - RNA, 19 nt, Artificial Sequence
  Description of Artificial Sequence: Synthetic oligonucleotide
  Sense strand starting at position 3848 of SEQ ID NO: 1881024
uauauaucugcagagcuga

SEQ ID NO: 2012113 - RNA, 19 nt, Artificial Sequence
  Description of Artificial Sequence: Synthetic oligonucleotide
  Antisense strand to SEQ ID NO: 2012112
ucagcucugcagauauaua

SEQ ID NO: 2012114 - RNA, 19 nt, Artificial Sequence
  Description of Artificial Sequence: Synthetic oligonucleotide
  Sense strand starting at position 4 of SEQ ID NO: 1881025
cauggagggucccauauau

SEQ ID NO: 2012115 - RNA, 19 nt, Artificial Sequence
  Description of Artificial Sequence: Synthetic oligonucleotide
  Antisense strand to SEQ ID NO: 2012114
auauaugggacccuccaug

SEQ ID NO: 2012116 - RNA, 19 nt, Artificial Sequence
  Description of Artificial Sequence: Synthetic oligonucleotide
  Sense strand starting at position 66 of SEQ ID NO: 1881025
accaucaaguguuggcaaa

SEQ ID NO: 2012117 - RNA, 19 nt, Artificial Sequence
  Description of Artificial Sequence: Synthetic oligonucleotide
  Antisense strand to SEQ ID NO: 2012116
uuugccaacacuugauggu

SEQ ID NO: 2012118 - RNA, 19 nt, Artificial Sequence
  Description of Artificial Sequence: Synthetic oligonucleotide
  Sense strand starting at position 156 of SEQ ID NO: 1881025
cuuggugauuucucgcagu

SEQ ID NO: 2012119 - RNA, 19 nt, Artificial Sequence
  Description of Artificial Sequence: Synthetic oligonucleotide
  Antisense strand to SEQ ID NO: 2012118
acugcgagaaaucaccaag

SEQ ID NO: 2012120 - RNA, 19 nt, Artificial Sequence
  Description of Artificial Sequence: Synthetic oligonucleotide
  Sense strand starting at position 159 of SEQ ID NO: 1881025
ggugauuucucgcagucaa

SEQ ID NO: 2012121 - RNA, 19 nt, Artificial Sequence
  Description of Artificial Sequence: Synthetic oligonucleotide
  Antisense strand to SEQ ID NO: 2012120
uugacugcgagaaaucacc

SEQ ID NO: 2012122 - RNA, 19 nt, Artificial Sequence
  Description of Artificial Sequence: Synthetic oligonucleotide
  Sense strand starting at position 339 of SEQ ID NO: 1881025
ggcuguaaugccugguacu

SEQ ID NO: 2012123 - RNA, 19 nt, Artificial Sequence
  Description of Artificial Sequence: Synthetic oligonucleotide
  Antisense strand to SEQ ID NO: 2012122
aguaccaggcauuacagcc

SEQ ID NO: 2012124 - RNA, 19 nt, Artificial Sequence
  Description of Artificial Sequence: Synthetic oligonucleotide
  Sense strand starting at position 340 of SEQ ID NO: 1881025
gcuguaaugccugguacug

SEQ ID NO: 2012125 - RNA, 19 nt, Artificial Sequence
  Description of Artificial Sequence: Synthetic oligonucleotide
  Antisense strand to SEQ ID NO: 2012124
caguaccaggcauuacagc

SEQ ID NO: 2012126 - RNA, 19 nt, Artificial Sequence
  Description of Artificial Sequence: Synthetic oligonucleotide
  Sense strand starting at position 397 of SEQ ID NO: 1881025
agagauaaugcaugugaaa

SEQ ID NO: 2012127 - RNA, 19 nt, Artificial Sequence
  Description of Artificial Sequence: Synthetic oligonucleotide
  Antisense strand to SEQ ID NO: 2012126
uuucacaugcauuaucucu

SEQ ID NO: 2012128 - RNA, 19 nt, Artificial Sequence
  Description of Artificial Sequence: Synthetic oligonucleotide
  Sense strand starting at position 430 of SEQ ID NO: 1881025
uuagguuuagaaggugauu

SEQ ID NO: 2012129 - RNA, 19 nt, Artificial Sequence
  Description of Artificial Sequence: Synthetic oligonucleotide
  Antisense strand to SEQ ID NO: 2012128
aaucaccuucuaaaccuaa

SEQ ID NO: 2012130 - RNA, 19 nt, Artificial Sequence
  Description of Artificial Sequence: Synthetic oligonucleotide
  Sense strand starting at position 432 of SEQ ID NO: 1881025
agguuuagaaggugauuau

SEQ ID NO: 2012131 - RNA, 19 nt, Artificial Sequence
  Description of Artificial Sequence: Synthetic oligonucleotide
  Antisense strand to SEQ ID NO: 2012130
auaaucaccuucuaaaccu

SEQ ID NO: 2012132 - RNA, 19 nt, Artificial Sequence
  Description of Artificial Sequence: Synthetic oligonucleotide
  Sense strand starting at position 433 of SEQ ID NO: 1881025
gguuuagaaggugauuauu

SEQ ID NO: 2012133 - RNA, 19 nt, Artificial Sequence
  Description of Artificial Sequence: Synthetic oligonucleotide
  Antisense strand to SEQ ID NO: 2012132
aauaaucaccuucuaaacc

SEQ ID NO: 2012134 - RNA, 19 nt, Artificial Sequence
  Description of Artificial Sequence: Synthetic oligonucleotide
  Sense strand starting at position 651 of SEQ ID NO: 1881025
ccagguucuccucaccauu

SEQ ID NO: 2012135 - RNA, 19 nt, Artificial Sequence
  Description of Artificial Sequence: Synthetic oligonucleotide
  Antisense strand to SEQ ID NO: 2012134
aauggugaggagaaccugg

SEQ ID NO: 2012136 - RNA, 19 nt, Artificial Sequence
  Description of Artificial Sequence: Synthetic oligonucleotide
  Sense strand starting at position 805 of SEQ ID NO: 1881025
uuggcuuccuucuggaaag

SEQ ID NO: 2012137 - RNA, 19 nt, Artificial Sequence
  Description of Artificial Sequence: Synthetic oligonucleotide
  Antisense strand to SEQ ID NO: 2012136
cuuuccagaaggaagccaa

SEQ ID NO: 2012138 - RNA, 19 nt, Artificial Sequence
  Description of Artificial Sequence: Synthetic oligonucleotide
  Sense strand starting at position 878 of SEQ ID NO: 1881025
gcugguguccuccaggaga

SEQ ID NO: 2012139 - RNA, 19 nt, Artificial Sequence
  Description of Artificial Sequence: Synthetic oligonucleotide
  Antisense strand to SEQ ID NO: 2012138
ucuccuggaggacaccagc

SEQ ID NO: 2012140 - RNA, 19 nt, Artificial Sequence
  Description of Artificial Sequence: Synthetic oligonucleotide
  Sense strand starting at position 880 of SEQ ID NO: 1881025
ugguguccuccaggagaac

SEQ ID NO: 2012141 - RNA, 19 nt, Artificial Sequence
  Description of Artificial Sequence: Synthetic oligonucleotide
  Antisense strand to SEQ ID NO: 2012140
guucuccuggaggacacca

SEQ ID NO: 2012142 - RNA, 19 nt, Artificial Sequence
  Description of Artificial Sequence: Synthetic oligonucleotide
  Sense strand starting at position 881 of SEQ ID NO: 1881025
gguguccuccaggagaaca

SEQ ID NO: 2012143 - RNA, 19 nt, Artificial Sequence
  Description of Artificial Sequence: Synthetic oligonucleotide
  Antisense strand to SEQ ID NO: 2012142
uguucuccuggaggacacc

SEQ ID NO: 2012144 - RNA, 19 nt, Artificial Sequence
  Description of Artificial Sequence: Synthetic oligonucleotide
  Sense strand starting at position 909 of SEQ ID NO: 1881025
ccuagcacugcuugagaga

SEQ ID NO: 2012145 - RNA, 19 nt, Artificial Sequence
  Description of Artificial Sequence: Synthetic oligonucleotide
  Antisense strand to SEQ ID NO: 2012144
ucucucaagcagugcuagg

SEQ ID NO: 2012146 - RNA, 19 nt, Artificial Sequence
  Description of Artificial Sequence: Synthetic oligonucleotide
  Sense strand starting at position 910 of SEQ ID NO: 1881025
cuagcacugcuugagagau

SEQ ID NO: 2012147 - RNA, 19 nt, Artificial Sequence
  Description of Artificial Sequence: Synthetic oligonucleotide
  Antisense strand to SEQ ID NO: 2012146
aucucucaagcagugcuag

SEQ ID NO: 2012148 - RNA, 19 nt, Artificial Sequence
  Description of Artificial Sequence: Synthetic oligonucleotide
  Sense strand starting at position 985 of SEQ ID NO: 1881025
ggaugacuugcucaccaug

SEQ ID NO: 2012149 - RNA, 19 nt, Artificial Sequence
  Description of Artificial Sequence: Synthetic oligonucleotide
  Antisense strand to SEQ ID NO: 2012148
cauggugagcaagucaucc

SEQ ID NO: 2012150 - RNA, 19 nt, Artificial Sequence
  Description of Artificial Sequence: Synthetic oligonucleotide
  Sense strand starting at position 1138 of SEQ ID NO: 1881025
agaguaugucacugucugu

SEQ ID NO: 2012151 - RNA, 19 nt, Artificial Sequence
  Description of Artificial Sequence: Synthetic oligonucleotide
  Antisense strand to SEQ ID NO: 2012150
acagacagugacauacucu

SEQ ID NO: 2012152 - RNA, 19 nt, Artificial Sequence
  Description of Artificial Sequence: Synthetic oligonucleotide
  Sense strand starting at position 1201 of SEQ ID NO: 1881025
uuugguggcaccugacaua

SEQ ID NO: 2012153 - RNA, 19 nt, Artificial Sequence
  Description of Artificial Sequence: Synthetic oligonucleotide
  Antisense strand to SEQ ID NO: 2012152
uaugucaggugccaccaaa

SEQ ID NO: 2012154 - RNA, 19 nt, Artificial Sequence
  Description of Artificial Sequence: Synthetic oligonucleotide
  Sense strand starting at position 1231 of SEQ ID NO: 1881025
aaagaacuuggcuguccua

SEQ ID NO: 2012155 - RNA, 19 nt, Artificial Sequence
  Description of Artificial Sequence: Synthetic oligonucleotide
  Antisense strand to SEQ ID NO: 2012154
uaggacagccaaguucuuu

SEQ ID NO: 2012156 - RNA, 19 nt, Artificial Sequence
  Description of Artificial Sequence: Synthetic oligonucleotide
  Sense strand starting at position 1376 of SEQ ID NO: 1881025
aaaggagagucagaauuug

SEQ ID NO: 2012157 - RNA, 19 nt, Artificial Sequence
  Description of Artificial Sequence: Synthetic oligonucleotide
  Antisense strand to SEQ ID NO: 2012156
caaauucugacucuccuuu

SEQ ID NO: 2012158 - RNA, 19 nt, Artificial Sequence
  Description of Artificial Sequence: Synthetic oligonucleotide
  Sense strand starting at position 1410 of SEQ ID NO: 1881025
ggcacuguucucugccuaa

SEQ ID NO: 2012159 - RNA, 19 nt, Artificial Sequence
  Description of Artificial Sequence: Synthetic oligonucleotide
  Antisense strand to SEQ ID NO: 2012158
uuaggcagagaacagugcc

SEQ ID NO: 2012160 - RNA, 19 nt, Artificial Sequence
  Description of Artificial Sequence: Synthetic oligonucleotide
  Sense strand starting at position 1413 of SEQ ID NO: 1881025
acuguucucugccuaagac

SEQ ID NO: 2012161 - RNA, 19 nt, Artificial Sequence
  Description of Artificial Sequence: Synthetic oligonucleotide
  Antisense strand to SEQ ID NO: 2012160
gucuuaggcagagaacagu

SEQ ID NO: 2012162 - RNA, 19 nt, Artificial Sequence
  Description of Artificial Sequence: Synthetic oligonucleotide
  Sense strand starting at position 2148 of SEQ ID NO: 1881025
augcaucacggcugaguaa

SEQ ID NO: 2012163 - RNA, 19 nt, Artificial Sequence
  Description of Artificial Sequence: Synthetic oligonucleotide
  Antisense strand to SEQ ID NO: 2012162
uuacucagccgugaugcau

SEQ ID NO: 2012164 - RNA, 19 nt, Artificial Sequence
  Description of Artificial Sequence: Synthetic oligonucleotide
  Sense strand starting at position 2279 of SEQ ID NO: 1881025
ucgguaacccuuuguggga

SEQ ID NO: 2012165 - RNA, 19 nt, Artificial Sequence
  Description of Artificial Sequence: Synthetic oligonucleotide
  Antisense strand to SEQ ID NO: 2012164
ucccacaaaggguuaccga

SEQ ID NO: 2012166 - RNA, 19 nt, Artificial Sequence
  Description of Artificial Sequence: Synthetic oligonucleotide
  Sense strand starting at position 2445 of SEQ ID NO: 1881025
cugugugaugauggacaca

SEQ ID NO: 2012167 - RNA, 19 nt, Artificial Sequence
  Description of Artificial Sequence: Synthetic oligonucleotide
  Antisense strand to SEQ ID NO: 2012166
uguguccaucaucacacag

SEQ ID NO: 2012168 - RNA, 19 nt, Artificial Sequence
  Description of Artificial Sequence: Synthetic oligonucleotide
  Sense strand starting at position 2550 of SEQ ID NO: 1881025
ggaggcauugcuuguaaga

SEQ ID NO: 2012169 - RNA, 19 nt, Artificial Sequence
  Description of Artificial Sequence: Synthetic oligonucleotide
  Antisense strand to SEQ ID NO: 2012168
ucuuacaagcaaugccucc

SEQ ID NO: 2012170 - RNA, 19 nt, Artificial Sequence
  Description of Artificial Sequence: Synthetic oligonucleotide
  Sense strand starting at position 2552 of SEQ ID NO: 1881025
aggcauugcuuguaagaau

SEQ ID NO: 2012171 - RNA, 19 nt, Artificial Sequence
  Description of Artificial Sequence: Synthetic oligonucleotide
  Antisense strand to SEQ ID NO: 2012170
auucuuacaagcaaugccu

SEQ ID NO: 2012172 - RNA, 19 nt, Artificial Sequence
  Description of Artificial Sequence: Synthetic oligonucleotide
  Sense strand starting at position 2560 of SEQ ID NO: 1881025
cuuguaagaaugugacgga

SEQ ID NO: 2012173 - RNA, 19 nt, Artificial Sequence
  Description of Artificial Sequence: Synthetic oligonucleotide
  Antisense strand to SEQ ID NO: 2012172
uccgucacauucuuacaag

SEQ ID NO: 2012174 - RNA, 19 nt, Artificial Sequence
  Description of Artificial Sequence: Synthetic oligonucleotide
  Sense strand starting at position 2561 of SEQ ID NO: 1881025
uuguaagaaugugacggau

SEQ ID NO: 2012175 - RNA, 19 nt, Artificial Sequence
  Description of Artificial Sequence: Synthetic oligonucleotide
  Antisense strand to SEQ ID NO: 2012174
auccgucacauucuuacaa

SEQ ID NO: 2012176 - RNA, 19 nt, Artificial Sequence
  Description of Artificial Sequence: Synthetic oligonucleotide
  Sense strand starting at position 2657 of SEQ ID NO: 1881025
agagaagcacacuguguuu

SEQ ID NO: 2012177 - RNA, 19 nt, Artificial Sequence
  Description of Artificial Sequence: Synthetic oligonucleotide
  Antisense strand to SEQ ID NO: 2012176
aaacacagugugcuucucu

SEQ ID NO: 2012178 - RNA, 19 nt, Artificial Sequence
  Description of Artificial Sequence: Synthetic oligonucleotide
  Sense strand starting at position 261 of SEQ ID NO: 1881026
aggugaucaggcugcuuca

SEQ ID NO: 2012179 - RNA, 19 nt, Artificial Sequence
  Description of Artificial Sequence: Synthetic oligonucleotide
  Antisense strand to SEQ ID NO: 2012178
ugaagcagccugaucaccu

SEQ ID NO: 2012180 - RNA, 19 nt, Artificial Sequence
  Description of Artificial Sequence: Synthetic oligonucleotide
  Sense strand starting at position 335 of SEQ ID NO: 1881026
gccaauucuuaagcaaugu

SEQ ID NO: 2012181 - RNA, 19 nt, Artificial Sequence
  Description of Artificial Sequence: Synthetic oligonucleotide
  Antisense strand to SEQ ID NO: 2012180
acauugcuuaagaauuggc

SEQ ID NO: 2012182 - RNA, 19 nt, Artificial Sequence
  Description of Artificial Sequence: Synthetic oligonucleotide
  Sense strand starting at position 411 of SEQ ID NO: 1881026
agaagauccugcucuacaa

SEQ ID NO: 2012183 - RNA, 19 nt, Artificial Sequence
  Description of Artificial Sequence: Synthetic oligonucleotide
  Antisense strand to SEQ ID NO: 2012182
uuguagagcaggaucuucu

SEQ ID NO: 2012184 - RNA, 19 nt, Artificial Sequence
  Description of Artificial Sequence: Synthetic oligonucleotide
  Sense strand starting at position 426 of SEQ ID NO: 1881026
acaaauagaugguaauaac

SEQ ID NO: 2012185 - RNA, 19 nt, Artificial Sequence
  Description of Artificial Sequence: Synthetic oligonucleotide
  Antisense strand to SEQ ID NO: 2012184
guuauuaccaucuauuugu

SEQ ID NO: 2012186 - RNA, 19 nt, Artificial Sequence
  Description of Artificial Sequence: Synthetic oligonucleotide
  Sense strand starting at position 467 of SEQ ID NO: 1881026
ccaagaaucucagcugaaa

SEQ ID NO: 2012187 - RNA, 19 nt, Artificial Sequence
  Description of Artificial Sequence: Synthetic oligonucleotide
  Antisense strand to SEQ ID NO: 2012186
uuucagcugagauucuugg

SEQ ID NO: 2012188 - RNA, 19 nt, Artificial Sequence
  Description of Artificial Sequence: Synthetic oligonucleotide
  Sense strand starting at position 514 of SEQ ID NO: 1881026
auuugugaauaucagucau

SEQ ID NO: 2012189 - RNA, 19 nt, Artificial Sequence
  Description of Artificial Sequence: Synthetic oligonucleotide
  Antisense strand to SEQ ID NO: 2012188
augacugauauucacaaau

SEQ ID NO: 2012190 - RNA, 19 nt, Artificial Sequence
  Description of Artificial Sequence: Synthetic oligonucleotide
  Sense strand starting at position 516 of SEQ ID NO: 1881026
uugugaauaucagucauag

SEQ ID NO: 2012191 - RNA, 19 nt, Artificial Sequence
  Description of Artificial Sequence: Synthetic oligonucleotide
  Antisense strand to SEQ ID NO: 2012190
cuaugacugauauucacaa

SEQ ID NO: 2012192 - RNA, 19 nt, Artificial Sequence
  Description of Artificial Sequence: Synthetic oligonucleotide
  Sense strand starting at position 524 of SEQ ID NO: 1881026
aucagucauagcgugcuau

SEQ ID NO: 2012193 - RNA, 19 nt, Artificial Sequence
  Description of Artificial Sequence: Synthetic oligonucleotide
  Antisense strand to SEQ ID NO: 2012192
auagcacgcuaugacugau

SEQ ID NO: 2012194 - RNA, 19 nt, Artificial Sequence
  Description of Artificial Sequence: Synthetic oligonucleotide
  Sense strand starting at position 579 of SEQ ID NO: 1881026
agacaaauaucuguucuag

SEQ ID NO: 2012195 - RNA, 19 nt, Artificial Sequence
  Description of Artificial Sequence: Synthetic oligonucleotide
  Antisense strand to SEQ ID NO: 2012194
cuagaacagauauuugucu

SEQ ID NO: 2012196 - RNA, 19 nt, Artificial Sequence
  Description of Artificial Sequence: Synthetic oligonucleotide
  Sense strand starting at position 581 of SEQ ID NO: 1881026
acaaauaucuguucuagua

SEQ ID NO: 2012197 - RNA, 19 nt, Artificial Sequence
  Description of Artificial Sequence: Synthetic oligonucleotide
  Antisense strand to SEQ ID NO: 2012196
uacuagaacagauauuugu

SEQ ID NO: 2012198 - RNA, 19 nt, Artificial Sequence
  Description of Artificial Sequence: Synthetic oligonucleotide
  Sense strand starting at position 788 of SEQ ID NO: 1881026
gcagaacuuccugggaaag

SEQ ID NO: 2012199 - RNA, 19 nt, Artificial Sequence
  Description of Artificial Sequence: Synthetic oligonucleotide
  Antisense strand to SEQ ID NO: 2012198
cuuucccaggaaguucugc

SEQ ID NO: 2012200 - RNA, 19 nt, Artificial Sequence
  Description of Artificial Sequence: Synthetic oligonucleotide
  Sense strand starting at position 790 of SEQ ID NO: 1881026
agaacuuccugggaaagau

SEQ ID NO: 2012201 - RNA, 19 nt, Artificial Sequence
  Description of Artificial Sequence: Synthetic oligonucleotide
  Antisense strand to SEQ ID NO: 2012200
aucuuucccaggaaguucu

SEQ ID NO: 2012202 - RNA, 19 nt, Artificial Sequence
  Description of Artificial Sequence: Synthetic oligonucleotide
  Sense strand starting at position 881 of SEQ ID NO: 1881026
cugucacauccuggaagua

SEQ ID NO: 2012203 - RNA, 19 nt, Artificial Sequence
  Description of Artificial Sequence: Synthetic oligonucleotide
  Antisense strand to SEQ ID NO: 2012202
uacuuccaggaugugacag

SEQ ID NO: 2012204 - RNA, 19 nt, Artificial Sequence
  Description of Artificial Sequence: Synthetic oligonucleotide
  Sense strand starting at position 882 of SEQ ID NO: 1881026
ugucacauccuggaaguau

SEQ ID NO: 2012205 - RNA, 19 nt, Artificial Sequence
  Description of Artificial Sequence: Synthetic oligonucleotide
  Antisense strand to SEQ ID NO: 2012204
auacuuccaggaugugaca

SEQ ID NO: 2012206 - RNA, 19 nt, Artificial Sequence
  Description of Artificial Sequence: Synthetic oligonucleotide
  Sense strand starting at position 910 of SEQ ID NO: 1881026
gguuacaggaccugucuaa

SEQ ID NO: 2012207 - RNA, 19 nt, Artificial Sequence
  Description of Artificial Sequence: Synthetic oligonucleotide
  Antisense strand to SEQ ID NO: 2012206
uuagacagguccuguaacc

SEQ ID NO: 2012208 - RNA, 19 nt, Artificial Sequence
  Description of Artificial Sequence: Synthetic oligonucleotide
  Sense strand starting at position 948 of SEQ ID NO: 1881026
uaaagcgggucuguuauaa

SEQ ID NO: 2012209 - RNA, 19 nt, Artificial Sequence
  Description of Artificial Sequence: Synthetic oligonucleotide
  Antisense strand to SEQ ID NO: 2012208
uuauaacagacccgcuuua

SEQ ID NO: 2012210 - RNA, 19 nt, Artificial Sequence
  Description of Artificial Sequence: Synthetic oligonucleotide
  Sense strand starting at position 974 of SEQ ID NO: 1881026
aauuguaguguaugggaaa

SEQ ID NO: 2012211 - RNA, 19 nt, Artificial Sequence
  Description of Artificial Sequence: Synthetic oligonucleotide
  Antisense strand to SEQ ID NO: 2012210
uuucccauacacuacaauu

SEQ ID NO: 2012212 - RNA, 19 nt, Artificial Sequence
  Description of Artificial Sequence: Synthetic oligonucleotide
  Sense strand starting at position 994 of SEQ ID NO: 1881026
ugucuugugaaguagaaca

SEQ ID NO: 2012213 - RNA, 19 nt, Artificial Sequence
  Description of Artificial Sequence: Synthetic oligonucleotide
  Antisense strand to SEQ ID NO: 2012212
uguucuacuucacaagaca

SEQ ID NO: 2012214 - RNA, 19 nt, Artificial Sequence
  Description of Artificial Sequence: Synthetic oligonucleotide
  Sense strand starting at position 1026 of SEQ ID NO: 1881026
gaaggauuauuguuguauu

SEQ ID NO: 2012215 - RNA, 19 nt, Artificial Sequence
  Description of Artificial Sequence: Synthetic oligonucleotide
  Antisense strand to SEQ ID NO: 2012214
aauacaacaauaauccuuc

SEQ ID NO: 2012216 - RNA, 19 nt, Artificial Sequence
  Description of Artificial Sequence: Synthetic oligonucleotide
  Sense strand starting at position 1154 of SEQ ID NO: 1881026
gccuuuaguguacaaucau

SEQ ID NO: 2012217 - RNA, 19 nt, Artificial Sequence
  Description of Artificial Sequence: Synthetic oligonucleotide
  Antisense strand to SEQ ID NO: 2012216
augauuguacacuaaaggc

SEQ ID NO: 2012218 - RNA, 19 nt, Artificial Sequence
  Description of Artificial Sequence: Synthetic oligonucleotide
  Sense strand starting at position 1254 of SEQ ID NO: 1881026
gcagaacugcaaugugaac

SEQ ID NO: 2012219 - RNA, 19 nt, Artificial Sequence
  Description of Artificial Sequence: Synthetic oligonucleotide
  Antisense strand to SEQ ID NO: 2012218
guucacauugcaguucugc

SEQ ID NO: 2012220 - RNA, 19 nt, Artificial Sequence
  Description of Artificial Sequence: Synthetic oligonucleotide
  Sense strand starting at position 1270 of SEQ ID NO: 1881026
aacccaggcuugucaugau

SEQ ID NO: 2012221 - RNA, 19 nt, Artificial Sequence
  Description of Artificial Sequence: Synthetic oligonucleotide
  Antisense strand to SEQ ID NO: 2012220
aucaugacaagccuggguu

SEQ ID NO: 2012222 - RNA, 19 nt, Artificial Sequence
  Description of Artificial Sequence: Synthetic oligonucleotide
  Sense strand starting at position 1274 of SEQ ID NO: 1881026
caggcuugucaugauucca

SEQ ID NO: 2012223 - RNA, 19 nt, Artificial Sequence
  Description of Artificial Sequence: Synthetic oligonucleotide
  Antisense strand to SEQ ID NO: 2012222
uggaaucaugacaagccug

SEQ ID NO: 2012224 - RNA, 19 nt, Artificial Sequence
  Description of Artificial Sequence: Synthetic oligonucleotide
  Sense strand starting at position 1351 of SEQ ID NO: 1881026
gcuugcuaggcaucugcaa

SEQ ID NO: 2012225 - RNA, 19 nt, Artificial Sequence
  Description of Artificial Sequence: Synthetic oligonucleotide
  Antisense strand to SEQ ID NO: 2012224
uugcagaugccuagcaagc

SEQ ID NO: 2012226 - RNA, 19 nt, Artificial Sequence
  Description of Artificial Sequence: Synthetic oligonucleotide
  Sense strand starting at position 1408 of SEQ ID NO: 1881026
gcgacucaccagugaaacu

SEQ ID NO: 2012227 - RNA, 19 nt, Artificial Sequence
  Description of Artificial Sequence: Synthetic oligonucleotide
  Antisense strand to SEQ ID NO: 2012226
aguuucacuggugagucgc

SEQ ID NO: 2012228 - RNA, 19 nt, Artificial Sequence
  Description of Artificial Sequence: Synthetic oligonucleotide
  Sense strand starting at position 1419 of SEQ ID NO: 1881026
gugaaacugucauccugag

SEQ ID NO: 2012229 - RNA, 19 nt, Artificial Sequence
  Description of Artificial Sequence: Synthetic oligonucleotide
  Antisense strand to SEQ ID NO: 2012228
cucaggaugacaguuucac

SEQ ID NO: 2012230 - RNA, 19 nt, Artificial Sequence
  Description of Artificial Sequence: Synthetic oligonucleotide
  Sense strand starting at position 2028 of SEQ ID NO: 1881026
cccgaaagcuccuccuuga

SEQ ID NO: 2012231 - RNA, 19 nt, Artificial Sequence
  Description of Artificial Sequence: Synthetic oligonucleotide
  Antisense strand to SEQ ID NO: 2012230
ucaaggaggagcuuucggg

SEQ ID NO: 2012232 - RNA, 19 nt, Artificial Sequence
  Description of Artificial Sequence: Synthetic oligonucleotide
  Sense strand starting at position 2276 of SEQ ID NO: 1881026
gaacuugugucucccauag

SEQ ID NO: 2012233 - RNA, 19 nt, Artificial Sequence
  Description of Artificial Sequence: Synthetic oligonucleotide
  Antisense strand to SEQ ID NO: 2012232
cuaugggagacacaaguuc

SEQ ID NO: 2012234 - RNA, 19 nt, Artificial Sequence
  Description of Artificial Sequence: Synthetic oligonucleotide
  Sense strand starting at position 2280 of SEQ ID NO: 1881026
uugugucucccauagacau

SEQ ID NO: 2012235 - RNA, 19 nt, Artificial Sequence
  Description of Artificial Sequence: Synthetic oligonucleotide
  Antisense strand to SEQ ID NO: 2012234
augucuaugggagacacaa

SEQ ID NO: 2012236 - RNA, 19 nt, Artificial Sequence
  Description of Artificial Sequence: Synthetic oligonucleotide
  Sense strand starting at position 2318 of SEQ ID NO: 1881026
agagaauuagccgagcucu

SEQ ID NO: 2012237 - RNA, 19 nt, Artificial Sequence
  Description of Artificial Sequence: Synthetic oligonucleotide
  Antisense strand to SEQ ID NO: 2012236
agagcucggcuaauucucu

SEQ ID NO: 2012238 - RNA, 19 nt, Artificial Sequence
  Description of Artificial Sequence: Synthetic oligonucleotide
  Sense strand starting at position 2480 of SEQ ID NO: 1881026
ccgaguucucucuacccau

SEQ ID NO: 2012239 - RNA, 19 nt, Artificial Sequence
  Description of Artificial Sequence: Synthetic oligonucleotide
  Antisense strand to SEQ ID NO: 2012238
auggguagagagaacucgg

SEQ ID NO: 2012240 - RNA, 19 nt, Artificial Sequence
  Description of Artificial Sequence: Synthetic oligonucleotide
  Sense strand starting at position 2687 of SEQ ID NO: 1881026
ggcuccaucuuugugggaa

SEQ ID NO: 2012241 - RNA, 19 nt, Artificial Sequence
  Description of Artificial Sequence: Synthetic oligonucleotide
  Antisense strand to SEQ ID NO: 2012240
uucccacaaagauggagcc

SEQ ID NO: 2012242 - RNA, 19 nt, Artificial Sequence
  Description of Artificial Sequence: Synthetic oligonucleotide
  Sense strand starting at position 3053 of SEQ ID NO: 1881026
cgaacuccugacuauguga

SEQ ID NO: 2012243 - RNA, 19 nt, Artificial Sequence
  Description of Artificial Sequence: Synthetic oligonucleotide
  Antisense strand to SEQ ID NO: 2012242
ucacauagucaggaguucg

SEQ ID NO: 2012244 - RNA, 19 nt, Artificial Sequence
  Description of Artificial Sequence: Synthetic oligonucleotide
  Sense strand starting at position 3135 of SEQ ID NO: 1881026
gcaucuugagauuguuauu

SEQ ID NO: 2012245 - RNA, 19 nt, Artificial Sequence
  Description of Artificial Sequence: Synthetic oligonucleotide
  Antisense strand to SEQ ID NO: 2012244
aauaacaaucucaagaugc

SEQ ID NO: 2012246 - RNA, 19 nt, Artificial Sequence
  Description of Artificial Sequence: Synthetic oligonucleotide
  Sense strand starting at position 3335 of SEQ ID NO: 1881026
caagccuagcaguagauau

SEQ ID NO: 2012247 - RNA, 19 nt, Artificial Sequence
  Description of Artificial Sequence: Synthetic oligonucleotide
  Antisense strand to SEQ ID NO: 2012246
auaucuacugcuaggcuug

SEQ ID NO: 2012248 - RNA, 19 nt, Artificial Sequence
  Description of Artificial Sequence: Synthetic oligonucleotide
  Sense strand starting at position 3337 of SEQ ID NO: 1881026
agccuagcaguagauauua

SEQ ID NO: 2012249 - RNA, 19 nt, Artificial Sequence
  Description of Artificial Sequence: Synthetic oligonucleotide
  Antisense strand to SEQ ID NO: 2012248
uaauaucuacugcuaggcu

SEQ ID NO: 2012250 - RNA, 19 nt, Artificial Sequence
  Description of Artificial Sequence: Synthetic oligonucleotide
  Sense strand starting at position 3463 of SEQ ID NO: 1881026
accugugagacagguaagu

SEQ ID NO: 2012251 - RNA, 19 nt, Artificial Sequence
  Description of Artificial Sequence: Synthetic oligonucleotide
  Antisense strand to SEQ ID NO: 2012250
acuuaccugucucacaggu

SEQ ID NO: 2012252 - RNA, 19 nt, Artificial Sequence
  Description of Artificial Sequence: Synthetic oligonucleotide
  Sense strand starting at position 3465 of SEQ ID NO: 1881026
cugugagacagguaagugu

SEQ ID NO: 2012253 - RNA, 19 nt, Artificial Sequence
  Description of Artificial Sequence: Synthetic oligonucleotide
  Antisense strand to SEQ ID NO: 2012252
acacuuaccugucucacag

SEQ ID NO: 2012254 - RNA, 19 nt, Artificial Sequence
  Description of Artificial Sequence: Synthetic oligonucleotide
  Sense strand starting at position 3469 of SEQ ID NO: 1881026
gagacagguaaguguuaau

SEQ ID NO: 2012255 - RNA, 19 nt, Artificial Sequence
  Description of Artificial Sequence: Synthetic oligonucleotide
  Antisense strand to SEQ ID NO: 2012254
auuaacacuuaccugucuc

SEQ ID NO: 2012256 - RNA, 19 nt, Artificial Sequence
  Description of Artificial Sequence: Synthetic oligonucleotide
  Sense strand starting at position 3525 of SEQ ID NO: 1881026
ggauaaugauuuggacaag

SEQ ID NO: 2012257 - RNA, 19 nt, Artificial Sequence
  Description of Artificial Sequence: Synthetic oligonucleotide
  Antisense strand to SEQ ID NO: 2012256
cuuguccaaaucauuaucc

SEQ ID NO: 2012258 - RNA, 19 nt, Artificial Sequence
  Description of Artificial Sequence: Synthetic oligonucleotide
  Sense strand starting at position 72 of SEQ ID NO: 1881027
cccuguugccuagauacca

SEQ ID NO: 2012259 - RNA, 19 nt, Artificial Sequence
  Description of Artificial Sequence: Synthetic oligonucleotide
  Antisense strand to SEQ ID NO: 2012258
ugguaucuaggcaacaggg

SEQ ID NO: 2012260 - RNA, 19 nt, Artificial Sequence
  Description of Artificial Sequence: Synthetic oligonucleotide
  Sense strand starting at position 80 of SEQ ID NO: 1881027
ccuagauaccagugacauc

SEQ ID NO: 2012261 - RNA, 19 nt, Artificial Sequence
  Description of Artificial Sequence: Synthetic oligonucleotide
  Antisense strand to SEQ ID NO: 2012260
gaugucacugguaucuagg

SEQ ID NO: 2012262 - RNA, 19 nt, Artificial Sequence
  Description of Artificial Sequence: Synthetic oligonucleotide
  Sense strand starting at position 91 of SEQ ID NO: 1881027
gugacaucucaggagcuua

SEQ ID NO: 2012263 - RNA, 19 nt, Artificial Sequence
  Description of Artificial Sequence: Synthetic oligonucleotide
  Antisense strand to SEQ ID NO: 2012262
uaagcuccugagaugucac

SEQ ID NO: 2012264 - RNA, 19 nt, Artificial Sequence
  Description of Artificial Sequence: Synthetic oligonucleotide
  Sense strand starting at position 527 of SEQ ID NO: 1881027
ucuaacaaugccugugaau

SEQ ID NO: 2012265 - RNA, 19 nt, Artificial Sequence
  Description of Artificial Sequence: Synthetic oligonucleotide
  Antisense strand to SEQ ID NO: 2012264
auucacaggcauuguuaga

SEQ ID NO: 2012266 - RNA, 19 nt, Artificial Sequence
  Description of Artificial Sequence: Synthetic oligonucleotide
  Sense strand starting at position 573 of SEQ ID NO: 1881027
ucgaaaugacaaugucaga

SEQ ID NO: 2012267 - RNA, 19 nt, Artificial Sequence
  Description of Artificial Sequence: Synthetic oligonucleotide
  Antisense strand to SEQ ID NO: 2012266
ucugacauugucauuucga

SEQ ID NO: 2012268 - RNA, 19 nt, Artificial Sequence
  Description of Artificial Sequence: Synthetic oligonucleotide
  Sense strand starting at position 718 of SEQ ID NO: 1881027
ggcccuuucuaacucugau

SEQ ID NO: 2012269 - RNA, 19 nt, Artificial Sequence
  Description of Artificial Sequence: Synthetic oligonucleotide
  Antisense strand to SEQ ID NO: 2012268
aucagaguuagaaagggcc

SEQ ID NO: 2012270 - RNA, 19 nt, Artificial Sequence
  Description of Artificial Sequence: Synthetic oligonucleotide
  Sense strand starting at position 731 of SEQ ID NO: 1881027
ucugauaguggcuaaaguu

SEQ ID NO: 2012271 - RNA, 19 nt, Artificial Sequence
  Description of Artificial Sequence: Synthetic oligonucleotide
  Antisense strand to SEQ ID NO: 2012270
aacuuuagccacuaucaga

SEQ ID NO: 2012272 - RNA, 19 nt, Artificial Sequence
  Description of Artificial Sequence: Synthetic oligonucleotide
  Sense strand starting at position 790 of SEQ ID NO: 1881027
caaguuacacgaugcaauu

SEQ ID NO: 2012273 - RNA, 19 nt, Artificial Sequence
  Description of Artificial Sequence: Synthetic oligonucleotide
  Antisense strand to SEQ ID NO: 2012272
aauugcaucguguaacuug

SEQ ID NO: 2012274 - RNA, 19 nt, Artificial Sequence
  Description of Artificial Sequence: Synthetic oligonucleotide
  Sense strand starting at position 925 of SEQ ID NO: 1881027
cuguaaucaugguccucua

SEQ ID NO: 2012275 - RNA, 19 nt, Artificial Sequence
  Description of Artificial Sequence: Synthetic oligonucleotide
  Antisense strand to SEQ ID NO: 2012274
uagaggaccaugauuacag

SEQ ID NO: 2012276 - RNA, 19 nt, Artificial Sequence
  Description of Artificial Sequence: Synthetic oligonucleotide
  Sense strand starting at position 1060 of SEQ ID NO: 1881027
ggaaauguuuaauuccaag

SEQ ID NO: 2012277 - RNA, 19 nt, Artificial Sequence
  Description of Artificial Sequence: Synthetic oligonucleotide
  Antisense strand to SEQ ID NO: 2012276
cuuggaauuaaacauuucc

SEQ ID NO: 2012278 - RNA, 19 nt, Artificial Sequence
  Description of Artificial Sequence: Synthetic oligonucleotide
  Sense strand starting at position 1165 of SEQ ID NO: 1881027
uguagcuuaguugauauau

SEQ ID NO: 2012279 - RNA, 19 nt, Artificial Sequence
  Description of Artificial Sequence: Synthetic oligonucleotide
  Antisense strand to SEQ ID NO: 2012278
auauaucaacuaagcuaca

SEQ ID NO: 2012280 - RNA, 19 nt, Artificial Sequence
  Description of Artificial Sequence: Synthetic oligonucleotide
  Sense strand starting at position 1251 of SEQ ID NO: 1881027
aaacguaaagaguggaaau

SEQ ID NO: 2012281 - RNA, 19 nt, Artificial Sequence
  Description of Artificial Sequence: Synthetic oligonucleotide
  Antisense strand to SEQ ID NO: 2012280
auuuccacucuuuacguuu

SEQ ID NO: 2012282 - RNA, 19 nt, Artificial Sequence
  Description of Artificial Sequence: Synthetic oligonucleotide
  Sense strand starting at position 1274 of SEQ ID NO: 1881027
cuauaaagguguccucuua

SEQ ID NO: 2012283 - RNA, 19 nt, Artificial Sequence
  Description of Artificial Sequence: Synthetic oligonucleotide
  Antisense strand to SEQ ID NO: 2012282
uaagaggacaccuuuauag

SEQ ID NO: 2012284 - RNA, 19 nt, Artificial Sequence
  Description of Artificial Sequence: Synthetic oligonucleotide
  Sense strand starting at position 1281 of SEQ ID NO: 1881027
gguguccucuuauccauuu

SEQ ID NO: 2012285 - RNA, 19 nt, Artificial Sequence
  Description of Artificial Sequence: Synthetic oligonucleotide
  Antisense strand to SEQ ID NO: 2012284
aaauggauaagaggacacc

SEQ ID NO: 2012286 - RNA, 19 nt, Artificial Sequence
  Description of Artificial Sequence: Synthetic oligonucleotide
  Sense strand starting at position 1282 of SEQ ID NO: 1881027
guguccucuuauccauuua

SEQ ID NO: 2012287 - RNA, 19 nt, Artificial Sequence
  Description of Artificial Sequence: Synthetic oligonucleotide
  Antisense strand to SEQ ID NO: 2012286
uaaauggauaagaggacac

SEQ ID NO: 2012288 - RNA, 19 nt, Artificial Sequence
  Description of Artificial Sequence: Synthetic oligonucleotide
  Sense strand starting at position 1313 of SEQ ID NO: 1881027
cuauaauaagguuaagugu

SEQ ID NO: 2012289 - RNA, 19 nt, Artificial Sequence
  Description of Artificial Sequence: Synthetic oligonucleotide
  Antisense strand to SEQ ID NO: 2012288
acacuuaaccuuauuauag

SEQ ID NO: 2012290 - RNA, 19 nt, Artificial Sequence
  Description of Artificial Sequence: Synthetic oligonucleotide
  Sense strand starting at position 1320 of SEQ ID NO: 1881027
aagguuaaguguguagauu

SEQ ID NO: 2012291 - RNA, 19 nt, Artificial Sequence
  Description of Artificial Sequence: Synthetic oligonucleotide
  Antisense strand to SEQ ID NO: 2012290
aaucuacacacuuaaccuu

SEQ ID NO: 2012292 - RNA, 19 nt, Artificial Sequence
  Description of Artificial Sequence: Synthetic oligonucleotide
  Sense strand starting at position 1321 of SEQ ID NO: 1881027
agguuaaguguguagauuc

SEQ ID NO: 2012293 - RNA, 19 nt, Artificial Sequence
  Description of Artificial Sequence: Synthetic oligonucleotide
  Antisense strand to SEQ ID NO: 2012292
gaaucuacacacuuaaccu

SEQ ID NO: 2012294 - RNA, 19 nt, Artificial Sequence
  Description of Artificial Sequence: Synthetic oligonucleotide
  Sense strand starting at position 1331 of SEQ ID NO: 1881027
uguagauucccucaucgaa

SEQ ID NO: 2012295 - RNA, 19 nt, Artificial Sequence
  Description of Artificial Sequence: Synthetic oligonucleotide
  Antisense strand to SEQ ID NO: 2012294
uucgaugagggaaucuaca

SEQ ID NO: 2012296 - RNA, 19 nt, Artificial Sequence
  Description of Artificial Sequence: Synthetic oligonucleotide
  Sense strand starting at position 1522 of SEQ ID NO: 1881027
ccucaaugacaccguagau

SEQ ID NO: 2012297 - RNA, 19 nt, Artificial Sequence
  Description of Artificial Sequence: Synthetic oligonucleotide
  Antisense strand to SEQ ID NO: 2012296
aucuacggugucauugagg

SEQ ID NO: 2012298 - RNA, 19 nt, Artificial Sequence
  Description of Artificial Sequence: Synthetic oligonucleotide
  Sense strand starting at position 1902 of SEQ ID NO: 1881027
ggcguuuccguccuauugu

SEQ ID NO: 2012299 - RNA, 19 nt, Artificial Sequence
  Description of Artificial Sequence: Synthetic oligonucleotide
  Antisense strand to SEQ ID NO: 2012298
acaauaggacggaaacgcc

SEQ ID NO: 2012300 - RNA, 19 nt, Artificial Sequence
  Description of Artificial Sequence: Synthetic oligonucleotide
  Sense strand starting at position 2240 of SEQ ID NO: 1881027
ugguuuguucaguagugag

SEQ ID NO: 2012301 - RNA, 19 nt, Artificial Sequence
  Description of Artificial Sequence: Synthetic oligonucleotide
  Antisense strand to SEQ ID NO: 2012300
cucacuacugaacaaacca

SEQ ID NO: 2012302 - RNA, 19 nt, Artificial Sequence
  Description of Artificial Sequence: Synthetic oligonucleotide
  Sense strand starting at position 2254 of SEQ ID NO: 1881027
gugagcgauuucgcaggau

SEQ ID NO: 2012303 - RNA, 19 nt, Artificial Sequence
  Description of Artificial Sequence: Synthetic oligonucleotide
  Antisense strand to SEQ ID NO: 2012302
auccugcgaaaucgcucac

SEQ ID NO: 2012304 - RNA, 19 nt, Artificial Sequence
  Description of Artificial Sequence: Synthetic oligonucleotide
  Sense strand starting at position 2257 of SEQ ID NO: 1881027
agcgauuucgcaggaugca

SEQ ID NO: 2012305 - RNA, 19 nt, Artificial Sequence
  Description of Artificial Sequence: Synthetic oligonucleotide
  Antisense strand to SEQ ID NO: 2012304
ugcauccugcgaaaucgcu

SEQ ID NO: 2012306 - RNA, 19 nt, Artificial Sequence
  Description of Artificial Sequence: Synthetic oligonucleotide
  Sense strand starting at position 2315 of SEQ ID NO: 1881027
ugggaaguuggucacucua

SEQ ID NO: 2012307 - RNA, 19 nt, Artificial Sequence
  Description of Artificial Sequence: Synthetic oligonucleotide
  Antisense strand to SEQ ID NO: 2012306
uagagugaccaacuuccca

SEQ ID NO: 2012308 - RNA, 19 nt, Artificial Sequence
  Description of Artificial Sequence: Synthetic oligonucleotide
  Sense strand starting at position 2581 of SEQ ID NO: 1881027
agggcucucaccugaguga

SEQ ID NO: 2012309 - RNA, 19 nt, Artificial Sequence
  Description of Artificial Sequence: Synthetic oligonucleotide
  Antisense strand to SEQ ID NO: 2012308
ucacucaggugagagcccu

SEQ ID NO: 2012310 - RNA, 19 nt, Artificial Sequence
  Description of Artificial Sequence: Synthetic oligonucleotide
  Sense strand starting at position 2582 of SEQ ID NO: 1881027
gggcucucaccugagugaa

SEQ ID NO: 2012311 - RNA, 19 nt, Artificial Sequence
  Description of Artificial Sequence: Synthetic oligonucleotide
  Antisense strand to SEQ ID NO: 2012310
uucacucaggugagagccc

SEQ ID NO: 2012312 - RNA, 19 nt, Artificial Sequence
  Description of Artificial Sequence: Synthetic oligonucleotide
  Sense strand starting at position 2584 of SEQ ID NO: 1881027
gcucucaccugagugaaug

SEQ ID NO: 2012313 - RNA, 19 nt, Artificial Sequence
  Description of Artificial Sequence: Synthetic oligonucleotide
  Antisense strand to SEQ ID NO: 2012312
cauucacucaggugagagc

SEQ ID NO: 2012314 - RNA, 19 nt, Artificial Sequence
  Description of Artificial Sequence: Synthetic oligonucleotide
  Sense strand starting at position 2595 of SEQ ID NO: 1881027
agugaaugucagcauagcu

SEQ ID NO: 2012315 - RNA, 19 nt, Artificial Sequence
  Description of Artificial Sequence: Synthetic oligonucleotide
  Antisense strand to SEQ ID NO: 2012314
agcuaugcugacauucacu

SEQ ID NO: 2012316 - RNA, 19 nt, Artificial Sequence
  Description of Artificial Sequence: Synthetic oligonucleotide
  Sense strand starting at position 2633 of SEQ ID NO: 1881027
guuagugccacugagaaug

SEQ ID NO: 2012317 - RNA, 19 nt, Artificial Sequence
  Description of Artificial Sequence: Synthetic oligonucleotide
  Antisense strand to SEQ ID NO: 2012316
cauucucaguggcacuaac

SEQ ID NO: 2012318 - RNA, 19 nt, Artificial Sequence
  Description of Artificial Sequence: Synthetic oligonucleotide
  Sense strand starting at position 2674 of SEQ ID NO: 1881027
cugcucuuucuguaaagga

SEQ ID NO: 2012319 - RNA, 19 nt, Artificial Sequence
  Description of Artificial Sequence: Synthetic oligonucleotide
  Antisense strand to SEQ ID NO: 2012318
uccuuuacagaaagagcag

SEQ ID NO: 2012320 - RNA, 19 nt, Artificial Sequence
  Description of Artificial Sequence: Synthetic oligonucleotide
  Sense strand starting at position 2719 of SEQ ID NO: 1881027
ggcauuugcaaagguguaa

SEQ ID NO: 2012321 - RNA, 19 nt, Artificial Sequence
  Description of Artificial Sequence: Synthetic oligonucleotide
  Antisense strand to SEQ ID NO: 2012320
uuacaccuuugcaaaugcc

SEQ ID NO: 2012322 - RNA, 19 nt, Artificial Sequence
  Description of Artificial Sequence: Synthetic oligonucleotide
  Sense strand starting at position 2784 of SEQ ID NO: 1881027
acacucgguauuggaaaua

SEQ ID NO: 2012323 - RNA, 19 nt, Artificial Sequence
  Description of Artificial Sequence: Synthetic oligonucleotide
  Antisense strand to SEQ ID NO: 2012322
uauuuccaauaccgagugu

SEQ ID NO: 2012324 - RNA, 19 nt, Artificial Sequence
  Description of Artificial Sequence: Synthetic oligonucleotide
  Sense strand starting at position 2861 of SEQ ID NO: 1881027
gagagacuucugugagcag

SEQ ID NO: 2012325 - RNA, 19 nt, Artificial Sequence
  Description of Artificial Sequence: Synthetic oligonucleotide
  Antisense strand to SEQ ID NO: 2012324
cugcucacagaagucucuc

SEQ ID NO: 2012326 - RNA, 19 nt, Artificial Sequence
  Description of Artificial Sequence: Synthetic oligonucleotide
  Sense strand starting at position 3389 of SEQ ID NO: 1881027
gccaccauuucucuugagu

SEQ ID NO: 2012327 - RNA, 19 nt, Artificial Sequence
  Description of Artificial Sequence: Synthetic oligonucleotide
  Antisense strand to SEQ ID NO: 2012326
acucaagagaaaugguggc

SEQ ID NO: 2012328 - RNA, 19 nt, Artificial Sequence
  Description of Artificial Sequence: Synthetic oligonucleotide
  Sense strand starting at position 3482 of SEQ ID NO: 1881027
gugaauacaugagucagau

SEQ ID NO: 2012329 - RNA, 19 nt, Artificial Sequence
  Description of Artificial Sequence: Synthetic oligonucleotide
  Antisense strand to SEQ ID NO: 2012328
aucugacucauguauucac

SEQ ID NO: 2012330 - RNA, 19 nt, Artificial Sequence
  Description of Artificial Sequence: Synthetic oligonucleotide
  Sense strand starting at position 3491 of SEQ ID NO: 1881027
ugagucagauccucccauu

SEQ ID NO: 2012331 - RNA, 19 nt, Artificial Sequence
  Description of Artificial Sequence: Synthetic oligonucleotide
  Antisense strand to SEQ ID NO: 2012330
aaugggaggaucugacuca

SEQ ID NO: 2012332 - RNA, 19 nt, Artificial Sequence
  Description of Artificial Sequence: Synthetic oligonucleotide
  Sense strand starting at position 3513 of SEQ ID NO: 1881027
ugcucagaacccuggagua

SEQ ID NO: 2012333 - RNA, 19 nt, Artificial Sequence
  Description of Artificial Sequence: Synthetic oligonucleotide
  Antisense strand to SEQ ID NO: 2012332
uacuccaggguucugagca

SEQ ID NO: 2012334 - RNA, 19 nt, Artificial Sequence
  Description of Artificial Sequence: Synthetic oligonucleotide
  Sense strand starting at position 3635 of SEQ ID NO: 1881027
cccaguguuccucacacau

SEQ ID NO: 2012335 - RNA, 19 nt, Artificial Sequence
  Description of Artificial Sequence: Synthetic oligonucleotide
  Antisense strand to SEQ ID NO: 2012334
augugugaggaacacuggg

SEQ ID NO: 2012336 - RNA, 19 nt, Artificial Sequence
  Description of Artificial Sequence: Synthetic oligonucleotide
  Sense strand starting at position 3677 of SEQ ID NO: 1881027
caguguaugaguuaugguu

SEQ ID NO: 2012337 - RNA, 19 nt, Artificial Sequence
  Description of Artificial Sequence: Synthetic oligonucleotide
  Antisense strand to SEQ ID NO: 2012336
aaccauaacucauacacug

SEQ ID NO: 2012338 - RNA, 19 nt, Artificial Sequence
  Description of Artificial Sequence: Synthetic oligonucleotide
  Sense strand starting at position 522 of SEQ ID NO: 1881028
ggcccuuuccuguaaaguu

SEQ ID NO: 2012339 - RNA, 19 nt, Artificial Sequence
  Description of Artificial Sequence: Synthetic oligonucleotide
  Antisense strand to SEQ ID NO: 2012338
aacuuuacaggaaagggcc

SEQ ID NO: 2012340 - RNA, 19 nt, Artificial Sequence
  Description of Artificial Sequence: Synthetic oligonucleotide
  Sense strand starting at position 727 of SEQ ID NO: 1881028
gaguaaggacacugugaug

SEQ ID NO: 2012341 - RNA, 19 nt, Artificial Sequence
  Description of Artificial Sequence: Synthetic oligonucleotide
  Antisense strand to SEQ ID NO: 2012340
caucacaguguccuuacuc

SEQ ID NO: 2012342 - RNA, 19 nt, Artificial Sequence
  Description of Artificial Sequence: Synthetic oligonucleotide
  Sense strand starting at position 903 of SEQ ID NO: 1881028
ccugcugucacgucauagu

SEQ ID NO: 2012343 - RNA, 19 nt, Artificial Sequence
  Description of Artificial Sequence: Synthetic oligonucleotide
  Antisense strand to SEQ ID NO: 2012342
acuaugacgugacagcagg

SEQ ID NO: 2012344 - RNA, 19 nt, Artificial Sequence
  Description of Artificial Sequence: Synthetic oligonucleotide
  Sense strand starting at position 912 of SEQ ID NO: 1881028
acgucauaguagucaaagu

SEQ ID NO: 2012345 - RNA, 19 nt, Artificial Sequence
  Description of Artificial Sequence: Synthetic oligonucleotide
  Antisense strand to SEQ ID NO: 2012344
acuuugacuacuaugacgu

SEQ ID NO: 2012346 - RNA, 19 nt, Artificial Sequence
  Description of Artificial Sequence: Synthetic oligonucleotide
  Sense strand starting at position 913 of SEQ ID NO: 1881028
cgucauaguagucaaaguu

SEQ ID NO: 2012347 - RNA, 19 nt, Artificial Sequence
  Description of Artificial Sequence: Synthetic oligonucleotide
  Antisense strand to SEQ ID NO: 2012346
aacuuugacuacuaugacg

SEQ ID NO: 2012348 - RNA, 19 nt, Artificial Sequence
  Description of Artificial Sequence: Synthetic oligonucleotide
  Sense strand starting at position 1383 of SEQ ID NO: 1881028
ucacaaacguuuccuaguu

SEQ ID NO: 2012349 - RNA, 19 nt, Artificial Sequence
  Description of Artificial Sequence: Synthetic oligonucleotide
  Antisense strand to SEQ ID NO: 2012348
aacuaggaaacguuuguga

SEQ ID NO: 2012350 - RNA, 19 nt, Artificial Sequence
  Description of Artificial Sequence: Synthetic oligonucleotide
  Sense strand starting at position 1625 of SEQ ID NO: 1881028
ggccauccuucuguaauca

SEQ ID NO: 2012351 - RNA, 19 nt, Artificial Sequence
  Description of Artificial Sequence: Synthetic oligonucleotide
  Antisense strand to SEQ ID NO: 2012350
ugauuacagaaggauggcc

SEQ ID NO: 2012352 - RNA, 19 nt, Artificial Sequence
  Description of Artificial Sequence: Synthetic oligonucleotide
  Sense strand starting at position 1658 of SEQ ID NO: 1881028
gagguauggauagguaguu

SEQ ID NO: 2012353 - RNA, 19 nt, Artificial Sequence
  Description of Artificial Sequence: Synthetic oligonucleotide
  Antisense strand to SEQ ID NO: 2012352
aacuaccuauccauaccuc

SEQ ID NO: 2012354 - RNA, 19 nt, Artificial Sequence
  Description of Artificial Sequence: Synthetic oligonucleotide
  Sense strand starting at position 1659 of SEQ ID NO: 1881028
agguauggauagguaguua

SEQ ID NO: 2012355 - RNA, 19 nt, Artificial Sequence
  Description of Artificial Sequence: Synthetic oligonucleotide
  Antisense strand to SEQ ID NO: 2012354
uaacuaccuauccauaccu

SEQ ID NO: 2012356 - RNA, 19 nt, Artificial Sequence
  Description of Artificial Sequence: Synthetic oligonucleotide
  Sense strand starting at position 1670 of SEQ ID NO: 1881028
gguaguuauuuguagaacu

SEQ ID NO: 2012357 - RNA, 19 nt, Artificial Sequence
  Description of Artificial Sequence: Synthetic oligonucleotide
  Antisense strand to SEQ ID NO: 2012356
aguucuacaaauaacuacc

SEQ ID NO: 2012358 - RNA, 19 nt, Artificial Sequence
  Description of Artificial Sequence: Synthetic oligonucleotide
  Sense strand starting at position 1727 of SEQ ID NO: 1881028
cuguauugccugcaggaua

SEQ ID NO: 2012359 - RNA, 19 nt, Artificial Sequence
  Description of Artificial Sequence: Synthetic oligonucleotide
  Antisense strand to SEQ ID NO: 2012358
uauccugcaggcaauacag

SEQ ID NO: 2012360 - RNA, 19 nt, Artificial Sequence
  Description of Artificial Sequence: Synthetic oligonucleotide
  Sense strand starting at position 1812 of SEQ ID NO: 1881028
cuugcauccugauuaacug

SEQ ID NO: 2012361 - RNA, 19 nt, Artificial Sequence
  Description of Artificial Sequence: Synthetic oligonucleotide
  Antisense strand to SEQ ID NO: 2012360
caguuaaucaggaugcaag

SEQ ID NO: 2012362 - RNA, 19 nt, Artificial Sequence
  Description of Artificial Sequence: Synthetic oligonucleotide
  Sense strand starting at position 1819 of SEQ ID NO: 1881028
ccugauuaacugugggaau

SEQ ID NO: 2012363 - RNA, 19 nt, Artificial Sequence
  Description of Artificial Sequence: Synthetic oligonucleotide
  Antisense strand to SEQ ID NO: 2012362
auucccacaguuaaucagg

SEQ ID NO: 2012364 - RNA, 19 nt, Artificial Sequence
  Description of Artificial Sequence: Synthetic oligonucleotide
  Sense strand starting at position 1821 of SEQ ID NO: 1881028
ugauuaacugugggaauuc

SEQ ID NO: 2012365 - RNA, 19 nt, Artificial Sequence
  Description of Artificial Sequence: Synthetic oligonucleotide
  Antisense strand to SEQ ID NO: 2012364
gaauucccacaguuaauca

SEQ ID NO: 2012366 - RNA, 19 nt, Artificial Sequence
  Description of Artificial Sequence: Synthetic oligonucleotide
  Sense strand starting at position 1989 of SEQ ID NO: 1881028
gucuguacuucucuagcca

SEQ ID NO: 2012367 - RNA, 19 nt, Artificial Sequence
  Description of Artificial Sequence: Synthetic oligonucleotide
  Antisense strand to SEQ ID NO: 2012366
uggcuagagaaguacagac

SEQ ID NO: 2012368 - RNA, 19 nt, Artificial Sequence
  Description of Artificial Sequence: Synthetic oligonucleotide
  Sense strand starting at position 2074 of SEQ ID NO: 1881028
gcaucagaauggcuuccaa

SEQ ID NO: 2012369 - RNA, 19 nt, Artificial Sequence
  Description of Artificial Sequence: Synthetic oligonucleotide
  Antisense strand to SEQ ID NO: 2012368
uuggaagccauucugaugc

SEQ ID NO: 2012370 - RNA, 19 nt, Artificial Sequence
  Description of Artificial Sequence: Synthetic oligonucleotide
  Sense strand starting at position 2118 of SEQ ID NO: 1881028
guggaacucuuguccauuc

SEQ ID NO: 2012371 - RNA, 19 nt, Artificial Sequence
  Description of Artificial Sequence: Synthetic oligonucleotide
  Antisense strand to SEQ ID NO: 2012370
gaauggacaagaguuccac

SEQ ID NO: 2012372 - RNA, 19 nt, Artificial Sequence
  Description of Artificial Sequence: Synthetic oligonucleotide
  Sense strand starting at position 2142 of SEQ ID NO: 1881028
ugcagacauggccacaauu

SEQ ID NO: 2012373 - RNA, 19 nt, Artificial Sequence
  Description of Artificial Sequence: Synthetic oligonucleotide
  Antisense strand to SEQ ID NO: 2012372
aauuguggccaugucugca

SEQ ID NO: 2012374 - RNA, 19 nt, Artificial Sequence
  Description of Artificial Sequence: Synthetic oligonucleotide
  Sense strand starting at position 2181 of SEQ ID NO: 1881028
uggaaauacuggcuaauua

SEQ ID NO: 2012375 - RNA, 19 nt, Artificial Sequence
  Description of Artificial Sequence: Synthetic oligonucleotide
  Antisense strand to SEQ ID NO: 2012374
uaauuagccaguauuucca

SEQ ID NO: 2012376 - RNA, 19 nt, Artificial Sequence
  Description of Artificial Sequence: Synthetic oligonucleotide
  Sense strand starting at position 2310 of SEQ ID NO: 1881028
ugaaacaauugagccauau

SEQ ID NO: 2012377 - RNA, 19 nt, Artificial Sequence
  Description of Artificial Sequence: Synthetic oligonucleotide
  Antisense strand to SEQ ID NO: 2012376
auauggcucaauuguuuca

SEQ ID NO: 2012378 - RNA, 19 nt, Artificial Sequence
  Description of Artificial Sequence: Synthetic oligonucleotide
  Sense strand starting at position 2325 of SEQ ID NO: 1881028
auauaaggaugagaaagaa

SEQ ID NO: 2012379 - RNA, 19 nt, Artificial Sequence
  Description of Artificial Sequence: Synthetic oligonucleotide
  Antisense strand to SEQ ID NO: 2012378
uucuuucucauccuuauau

SEQ ID NO: 2012380 - RNA, 19 nt, Artificial Sequence
  Description of Artificial Sequence: Synthetic oligonucleotide
  Sense strand starting at position 2494 of SEQ ID NO: 1881028
uggcuaacaugagaaaucu

SEQ ID NO: 2012381 - RNA, 19 nt, Artificial Sequence
  Description of Artificial Sequence: Synthetic oligonucleotide
  Antisense strand to SEQ ID NO: 2012380
agauuucucauguuagcca

SEQ ID NO: 2012382 - RNA, 19 nt, Artificial Sequence
  Description of Artificial Sequence: Synthetic oligonucleotide
  Sense strand starting at position 2503 of SEQ ID NO: 1881028
ugagaaaucugacaguacu

SEQ ID NO: 2012383 - RNA, 19 nt, Artificial Sequence
  Description of Artificial Sequence: Synthetic oligonucleotide
  Antisense strand to SEQ ID NO: 2012382
aguacugucagauuucuca

SEQ ID NO: 2012384 - RNA, 19 nt, Artificial Sequence
  Description of Artificial Sequence: Synthetic oligonucleotide
  Sense strand starting at position 2543 of SEQ ID NO: 1881028
auggguagaucucuuauac

SEQ ID NO: 2012385 - RNA, 19 nt, Artificial Sequence
  Description of Artificial Sequence: Synthetic oligonucleotide
  Antisense strand to SEQ ID NO: 2012384
guauaagagaucuacccau

SEQ ID NO: 2012386 - RNA, 19 nt, Artificial Sequence
  Description of Artificial Sequence: Synthetic oligonucleotide
  Sense strand starting at position 2706 of SEQ ID NO: 1881028
aagacaugugcauggauau

SEQ ID NO: 2012387 - RNA, 19 nt, Artificial Sequence
  Description of Artificial Sequence: Synthetic oligonucleotide
  Antisense strand to SEQ ID NO: 2012386
auauccaugcacaugucuu

SEQ ID NO: 2012388 - RNA, 19 nt, Artificial Sequence
  Description of Artificial Sequence: Synthetic oligonucleotide
  Sense strand starting at position 2707 of SEQ ID NO: 1881028
agacaugugcauggauauu

SEQ ID NO: 2012389 - RNA, 19 nt, Artificial Sequence
  Description of Artificial Sequence: Synthetic oligonucleotide
  Antisense strand to SEQ ID NO: 2012388
aauauccaugcacaugucu

SEQ ID NO: 2012390 - RNA, 19 nt, Artificial Sequence
  Description of Artificial Sequence: Synthetic oligonucleotide
  Sense strand starting at position 2801 of SEQ ID NO: 1881028
cgugacauauuaguauaau

SEQ ID NO: 2012391 - RNA, 19 nt, Artificial Sequence
  Description of Artificial Sequence: Synthetic oligonucleotide
  Antisense strand to SEQ ID NO: 2012390
auuauacuaauaugucacg

SEQ ID NO: 2012392 - RNA, 19 nt, Artificial Sequence
  Description of Artificial Sequence: Synthetic oligonucleotide
  Sense strand starting at position 2866 of SEQ ID NO: 1881028
agaugacucucagaaacuu

SEQ ID NO: 2012393 - RNA, 19 nt, Artificial Sequence
  Description of Artificial Sequence: Synthetic oligonucleotide
  Antisense strand to SEQ ID NO: 2012392
aaguuucugagagucaucu

SEQ ID NO: 2012394 - RNA, 19 nt, Artificial Sequence
  Description of Artificial Sequence: Synthetic oligonucleotide
  Sense strand starting at position 3358 of SEQ ID NO: 1881028
aggaaugugcuauaucuug

SEQ ID NO: 2012395 - RNA, 19 nt, Artificial Sequence
  Description of Artificial Sequence: Synthetic oligonucleotide
  Antisense strand to SEQ ID NO: 2012394
caagauauagcacauuccu

SEQ ID NO: 2012396 - RNA, 19 nt, Artificial Sequence
  Description of Artificial Sequence: Synthetic oligonucleotide
  Sense strand starting at position 3385 of SEQ ID NO: 1881028
ggugguuaccaaggaauac

SEQ ID NO: 2012397 - RNA, 19 nt, Artificial Sequence
  Description of Artificial Sequence: Synthetic oligonucleotide
  Antisense strand to SEQ ID NO: 2012396
guauuccuugguaaccacc

SEQ ID NO: 2012398 - RNA, 19 nt, Artificial Sequence
  Description of Artificial Sequence: Synthetic oligonucleotide
  Sense strand starting at position 3457 of SEQ ID NO: 1881028
uuuguucucucuguacuga

SEQ ID NO: 2012399 - RNA, 19 nt, Artificial Sequence
  Description of Artificial Sequence: Synthetic oligonucleotide
  Antisense strand to SEQ ID NO: 2012398
ucaguacagagagaacaaa

SEQ ID NO: 2012400 - RNA, 19 nt, Artificial Sequence
  Description of Artificial Sequence: Synthetic oligonucleotide
  Sense strand starting at position 3458 of SEQ ID NO: 1881028
uuguucucucuguacugau

SEQ ID NO: 2012401 - RNA, 19 nt, Artificial Sequence
  Description of Artificial Sequence: Synthetic oligonucleotide
  Antisense strand to SEQ ID NO: 2012400
aucaguacagagagaacaa

SEQ ID NO: 2012402 - RNA, 19 nt, Artificial Sequence
  Description of Artificial Sequence: Synthetic oligonucleotide
  Sense strand starting at position 3466 of SEQ ID NO: 1881028
ucuguacugauauggagua

SEQ ID NO: 2012403 - RNA, 19 nt, Artificial Sequence
  Description of Artificial Sequence: Synthetic oligonucleotide
  Antisense strand to SEQ ID NO: 2012402
uacuccauaucaguacaga

SEQ ID NO: 2012404 - RNA, 19 nt, Artificial Sequence
  Description of Artificial Sequence: Synthetic oligonucleotide
  Sense strand starting at position 3591 of SEQ ID NO: 1881028
auuaucuuugaugaggcua

SEQ ID NO: 2012405 - RNA, 19 nt, Artificial Sequence
  Description of Artificial Sequence: Synthetic oligonucleotide
  Antisense strand to SEQ ID NO: 2012404
uagccucaucaaagauaau

SEQ ID NO: 2012406 - RNA, 19 nt, Artificial Sequence
  Description of Artificial Sequence: Synthetic oligonucleotide
  Sense strand starting at position 3596 of SEQ ID NO: 1881028
cuuugaugaggcuaguaga

SEQ ID NO: 2012407 - RNA, 19 nt, Artificial Sequence
  Description of Artificial Sequence: Synthetic oligonucleotide
  Antisense strand to SEQ ID NO: 2012406
ucuacuagccucaucaaag

SEQ ID NO: 2012408 - RNA, 19 nt, Artificial Sequence
  Description of Artificial Sequence: Synthetic oligonucleotide
  Sense strand starting at position 3646 of SEQ ID NO: 1881028
ggcugaacucccugugucu

SEQ ID NO: 2012409 - RNA, 19 nt, Artificial Sequence
  Description of Artificial Sequence: Synthetic oligonucleotide
  Antisense strand to SEQ ID NO: 2012408
agacacagggaguucagcc

SEQ ID NO: 2012410 - RNA, 19 nt, Artificial Sequence
  Description of Artificial Sequence: Synthetic oligonucleotide
  Sense strand starting at position 3747 of SEQ ID NO: 1881028
guacaaaugucuuugacug

SEQ ID NO: 2012411 - RNA, 19 nt, Artificial Sequence
  Description of Artificial Sequence: Synthetic oligonucleotide
  Antisense strand to SEQ ID NO: 2012410
cagucaaagacauuuguac

SEQ ID NO: 2012412 - RNA, 19 nt, Artificial Sequence
  Description of Artificial Sequence: Synthetic oligonucleotide
  Sense strand starting at position 3865 of SEQ ID NO: 1881028
ggucaaugcucagcagaag

SEQ ID NO: 2012413 - RNA, 19 nt, Artificial Sequence
  Description of Artificial Sequence: Synthetic oligonucleotide
  Antisense strand to SEQ ID NO: 2012412
cuucugcugagcauugacc

SEQ ID NO: 2012414 - RNA, 19 nt, Artificial Sequence
  Description of Artificial Sequence: Synthetic oligonucleotide
  Sense strand starting at position 3955 of SEQ ID NO: 1881028
uagaguacauuugaaaugu

SEQ ID NO: 2012415 - RNA, 19 nt, Artificial Sequence
  Description of Artificial Sequence: Synthetic oligonucleotide
  Antisense strand to SEQ ID NO: 2012414
acauuucaaauguacucua

SEQ ID NO: 2012416 - RNA, 19 nt, Artificial Sequence
  Description of Artificial Sequence: Synthetic oligonucleotide
  Sense strand starting at position 3968 of SEQ ID NO: 1881028
aaauguuuaggaugaguac

SEQ ID NO: 2012417 - RNA, 19 nt, Artificial Sequence
  Description of Artificial Sequence: Synthetic oligonucleotide
  Antisense strand to SEQ ID NO: 2012416
guacucauccuaaacauuu

SEQ ID NO: 2012418 - RNA, 19 nt, Artificial Sequence
  Description of Artificial Sequence: Synthetic oligonucleotide
  Sense strand starting at position 1228 of SEQ ID NO: 1881029
cauugaaacucagagguca

SEQ ID NO: 2012419 - RNA, 19 nt, Artificial Sequence
  Description of Artificial Sequence: Synthetic oligonucleotide
  Antisense strand to SEQ ID NO: 2012418
ugaccucugaguuucaaug

SEQ ID NO: 2012420 - RNA, 19 nt, Artificial Sequence
  Description of Artificial Sequence: Synthetic oligonucleotide
  Sense strand starting at position 1796 of SEQ ID NO: 1881029
cuugaaaucucuuugggcu

SEQ ID NO: 2012421 - RNA, 19 nt, Artificial Sequence
  Description of Artificial Sequence: Synthetic oligonucleotide
  Antisense strand to SEQ ID NO: 2012420
agcccaaagagauuucaag

SEQ ID NO: 2012422 - RNA, 19 nt, Artificial Sequence
  Description of Artificial Sequence: Synthetic oligonucleotide
  Sense strand starting at position 1797 of SEQ ID NO: 1881029
uugaaaucucuuugggcuu

SEQ ID NO: 2012423 - RNA, 19 nt, Artificial Sequence
  Description of Artificial Sequence: Synthetic oligonucleotide
  Antisense strand to SEQ ID NO: 2012422
aagcccaaagagauuucaa

SEQ ID NO: 2012424 - RNA, 19 nt, Artificial Sequence
  Description of Artificial Sequence: Synthetic oligonucleotide
  Sense strand starting at position 1798 of SEQ ID NO: 1881029
ugaaaucucuuugggcuua

SEQ ID NO: 2012425 - RNA, 19 nt, Artificial Sequence
  Description of Artificial Sequence: Synthetic oligonucleotide
  Antisense strand to SEQ ID NO: 2012424
uaagcccaaagagauuuca

SEQ ID NO: 2012426 - RNA, 19 nt, Artificial Sequence
  Description of Artificial Sequence: Synthetic oligonucleotide
  Sense strand starting at position 1820 of SEQ ID NO: 1881029
gcuuguaaggugcaacaau

SEQ ID NO: 2012427 - RNA, 19 nt, Artificial Sequence
  Description of Artificial Sequence: Synthetic oligonucleotide
  Antisense strand to SEQ ID NO: 2012426
auuguugcaccuuacaagc

SEQ ID NO: 2012428 - RNA, 19 nt, Artificial Sequence
  Description of Artificial Sequence: Synthetic oligonucleotide
  Sense strand starting at position 1994 of SEQ ID NO: 1881029
uugguuuccauguggagaa

SEQ ID NO: 2012429 - RNA, 19 nt, Artificial Sequence
  Description of Artificial Sequence: Synthetic oligonucleotide
  Antisense strand to SEQ ID NO: 2012428
uucuccacauggaaaccaa

SEQ ID NO: 2012430 - RNA, 19 nt, Artificial Sequence
  Description of Artificial Sequence: Synthetic oligonucleotide
  Sense strand starting at position 2010 of SEQ ID NO: 1881029
gaaggauucugagagccgu

SEQ ID NO: 2012431 - RNA, 19 nt, Artificial Sequence
  Description of Artificial Sequence: Synthetic oligonucleotide
  Antisense strand to SEQ ID NO: 2012430
acggcucucagaauccuuc

SEQ ID NO: 2012432 - RNA, 19 nt, Artificial Sequence
  Description of Artificial Sequence: Synthetic oligonucleotide
  Sense strand starting at position 2014 of SEQ ID NO: 1881029
gauucugagagccgucuga

SEQ ID NO: 2012433 - RNA, 19 nt, Artificial Sequence
  Description of Artificial Sequence: Synthetic oligonucleotide
  Antisense strand to SEQ ID NO: 2012432
ucagacggcucucagaauc

SEQ ID NO: 2012434 - RNA, 19 nt, Artificial Sequence
  Description of Artificial Sequence: Synthetic oligonucleotide
  Sense strand starting at position 2018 of SEQ ID NO: 1881029
cugagagccgucugagaug

SEQ ID NO: 2012435 - RNA, 19 nt, Artificial Sequence
  Description of Artificial Sequence: Synthetic oligonucleotide
  Antisense strand to SEQ ID NO: 2012434
caucucagacggcucucag

SEQ ID NO: 2012436 - RNA, 19 nt, Artificial Sequence
  Description of Artificial Sequence: Synthetic oligonucleotide
  Sense strand starting at position 2021 of SEQ ID NO: 1881029
agagccgucugagaugagu

SEQ ID NO: 2012437 - RNA, 19 nt, Artificial Sequence
  Description of Artificial Sequence: Synthetic oligonucleotide
  Antisense strand to SEQ ID NO: 2012436
acucaucucagacggcucu

SEQ ID NO: 2012438 - RNA, 19 nt, Artificial Sequence
  Description of Artificial Sequence: Synthetic oligonucleotide
  Sense strand starting at position 2034 of SEQ ID NO: 1881029
augaguaggaccugugauu

SEQ ID NO: 2012439 - RNA, 19 nt, Artificial Sequence
  Description of Artificial Sequence: Synthetic oligonucleotide
  Antisense strand to SEQ ID NO: 2012438
aaucacagguccuacucau

SEQ ID NO: 2012440 - RNA, 19 nt, Artificial Sequence
  Description of Artificial Sequence: Synthetic oligonucleotide
  Sense strand starting at position 2039 of SEQ ID NO: 1881029
uaggaccugugauugauua

SEQ ID NO: 2012441 - RNA, 19 nt, Artificial Sequence
  Description of Artificial Sequence: Synthetic oligonucleotide
  Antisense strand to SEQ ID NO: 2012440
uaaucaaucacagguccua

SEQ ID NO: 2012442 - RNA, 19 nt, Artificial Sequence
  Description of Artificial Sequence: Synthetic oligonucleotide
  Sense strand starting at position 2043 of SEQ ID NO: 1881029
accugugauugauuagcaa

SEQ ID NO: 2012443 - RNA, 19 nt, Artificial Sequence
  Description of Artificial Sequence: Synthetic oligonucleotide
  Antisense strand to SEQ ID NO: 2012442
uugcuaaucaaucacaggu

SEQ ID NO: 2012444 - RNA, 19 nt, Artificial Sequence
  Description of Artificial Sequence: Synthetic oligonucleotide
  Sense strand starting at position 2061 of SEQ ID NO: 1881029
augucugccauagguagaa

SEQ ID NO: 2012445 - RNA, 19 nt, Artificial Sequence
  Description of Artificial Sequence: Synthetic oligonucleotide
  Antisense strand to SEQ ID NO: 2012444
uucuaccuauggcagacau

SEQ ID NO: 2012446 - RNA, 19 nt, Artificial Sequence
  Description of Artificial Sequence: Synthetic oligonucleotide
  Sense strand starting at position 2063 of SEQ ID NO: 1881029
gucugccauagguagaaga

SEQ ID NO: 2012447 - RNA, 19 nt, Artificial Sequence
  Description of Artificial Sequence: Synthetic oligonucleotide
  Antisense strand to SEQ ID NO: 2012446
ucuucuaccuauggcagac

SEQ ID NO: 2012448 - RNA, 19 nt, Artificial Sequence
  Description of Artificial Sequence: Synthetic oligonucleotide
  Sense strand starting at position 2065 of SEQ ID NO: 1881029
cugccauagguagaagagu

SEQ ID NO: 2012449 - RNA, 19 nt, Artificial Sequence
  Description of Artificial Sequence: Synthetic oligonucleotide
  Antisense strand to SEQ ID NO: 2012448
acucuucuaccuauggcag

SEQ ID NO: 2012450 - RNA, 19 nt, Artificial Sequence
  Description of Artificial Sequence: Synthetic oligonucleotide
  Sense strand starting at position 2156 of SEQ ID NO: 1881029
cauggaagacugugucauc

SEQ ID NO: 2012451 - RNA, 19 nt, Artificial Sequence
  Description of Artificial Sequence: Synthetic oligonucleotide
  Antisense strand to SEQ ID NO: 2012450
gaugacacagucuuccaug

SEQ ID NO: 2012452 - RNA, 19 nt, Artificial Sequence
  Description of Artificial Sequence: Synthetic oligonucleotide
  Sense strand starting at position 2159 of SEQ ID NO: 1881029
ggaagacugugucauccuu

SEQ ID NO: 2012453 - RNA, 19 nt, Artificial Sequence
  Description of Artificial Sequence: Synthetic oligonucleotide
  Antisense strand to SEQ ID NO: 2012452
aaggaugacacagucuucc

SEQ ID NO: 2012454 - RNA, 19 nt, Artificial Sequence
  Description of Artificial Sequence: Synthetic oligonucleotide
  Sense strand starting at position 2166 of SEQ ID NO: 1881029
ugugucauccuuugcuauu

SEQ ID NO: 2012455 - RNA, 19 nt, Artificial Sequence
  Description of Artificial Sequence: Synthetic oligonucleotide
  Antisense strand to SEQ ID NO: 2012454
aauagcaaaggaugacaca

SEQ ID NO: 2012456 - RNA, 19 nt, Artificial Sequence
  Description of Artificial Sequence: Synthetic oligonucleotide
  Sense strand starting at position 2167 of SEQ ID NO: 1881029
gugucauccuuugcuauuc

SEQ ID NO: 2012457 - RNA, 19 nt, Artificial Sequence
  Description of Artificial Sequence: Synthetic oligonucleotide
  Antisense strand to SEQ ID NO: 2012456
gaauagcaaaggaugacac

SEQ ID NO: 2012458 - RNA, 19 nt, Artificial Sequence
  Description of Artificial Sequence: Synthetic oligonucleotide
  Sense strand starting at position 2449 of SEQ ID NO: 1881029
cuccuaucguggucucuga

SEQ ID NO: 2012459 - RNA, 19 nt, Artificial Sequence
  Description of Artificial Sequence: Synthetic oligonucleotide
  Antisense strand to SEQ ID NO: 2012458
ucagagaccacgauaggag

SEQ ID NO: 2012460 - RNA, 19 nt, Artificial Sequence
  Description of Artificial Sequence: Synthetic oligonucleotide
  Sense strand starting at position 2453 of SEQ ID NO: 1881029
uaucguggucucugacguu

SEQ ID NO: 2012461 - RNA, 19 nt, Artificial Sequence
  Description of Artificial Sequence: Synthetic oligonucleotide
  Antisense strand to SEQ ID NO: 2012460
aacgucagagaccacgaua

SEQ ID NO: 2012462 - RNA, 19 nt, Artificial Sequence
  Description of Artificial Sequence: Synthetic oligonucleotide
  Sense strand starting at position 2777 of SEQ ID NO: 1881029
cgaaguaccuccuaugagu

SEQ ID NO: 2012463 - RNA, 19 nt, Artificial Sequence
  Description of Artificial Sequence: Synthetic oligonucleotide
  Antisense strand to SEQ ID NO: 2012462
acucauaggagguacuucg

SEQ ID NO: 2012464 - RNA, 19 nt, Artificial Sequence
  Description of Artificial Sequence: Synthetic oligonucleotide
  Sense strand starting at position 2779 of SEQ ID NO: 1881029
aaguaccuccuaugaguga

SEQ ID NO: 2012465 - RNA, 19 nt, Artificial Sequence
  Description of Artificial Sequence: Synthetic oligonucleotide
  Antisense strand to SEQ ID NO: 2012464
ucacucauaggagguacuu

SEQ ID NO: 2012466 - RNA, 19 nt, Artificial Sequence
  Description of Artificial Sequence: Synthetic oligonucleotide
  Sense strand starting at position 2780 of SEQ ID NO: 1881029
aguaccuccuaugagugaa

SEQ ID NO: 2012467 - RNA, 19 nt, Artificial Sequence
  Description of Artificial Sequence: Synthetic oligonucleotide
  Antisense strand to SEQ ID NO: 2012466
uucacucauaggagguacu

SEQ ID NO: 2012468 - RNA, 19 nt, Artificial Sequence
  Description of Artificial Sequence: Synthetic oligonucleotide
  Sense strand starting at position 2783 of SEQ ID NO: 1881029
accuccuaugagugaaauc

SEQ ID NO: 2012469 - RNA, 19 nt, Artificial Sequence
  Description of Artificial Sequence: Synthetic oligonucleotide
  Antisense strand to SEQ ID NO: 2012468
gauuucacucauaggaggu

SEQ ID NO: 2012470 - RNA, 19 nt, Artificial Sequence
  Description of Artificial Sequence: Synthetic oligonucleotide
  Sense strand starting at position 2890 of SEQ ID NO: 1881029
ccuuccucaggcugaauaa

SEQ ID NO: 2012471 - RNA, 19 nt, Artificial Sequence
  Description of Artificial Sequence: Synthetic oligonucleotide
  Antisense strand to SEQ ID NO: 2012470
uuauucagccugaggaagg

SEQ ID NO: 2012472 - RNA, 19 nt, Artificial Sequence
  Description of Artificial Sequence: Synthetic oligonucleotide
  Sense strand starting at position 2891 of SEQ ID NO: 1881029
cuuccucaggcugaauaaa

SEQ ID NO: 2012473 - RNA, 19 nt, Artificial Sequence
  Description of Artificial Sequence: Synthetic oligonucleotide
  Antisense strand to SEQ ID NO: 2012472
uuuauucagccugaggaag

SEQ ID NO: 2012474 - RNA, 19 nt, Artificial Sequence
  Description of Artificial Sequence: Synthetic oligonucleotide
  Sense strand starting at position 3020 of SEQ ID NO: 1881029
auaucucuucgagauccua

SEQ ID NO: 2012475 - RNA, 19 nt, Artificial Sequence
  Description of Artificial Sequence: Synthetic oligonucleotide
  Antisense strand to SEQ ID NO: 2012474
uaggaucucgaagagauau

SEQ ID NO: 2012476 - RNA, 19 nt, Artificial Sequence
  Description of Artificial Sequence: Synthetic oligonucleotide
  Sense strand starting at position 3307 of SEQ ID NO: 1881029
cgaaacuuaguguggacaa

SEQ ID NO: 2012477 - RNA, 19 nt, Artificial Sequence
  Description of Artificial Sequence: Synthetic oligonucleotide
  Antisense strand to SEQ ID NO: 2012476
uuguccacacuaaguuucg

SEQ ID NO: 2012478 - RNA, 19 nt, Artificial Sequence
  Description of Artificial Sequence: Synthetic oligonucleotide
  Sense strand starting at position 3308 of SEQ ID NO: 1881029
gaaacuuaguguggacaac

SEQ ID NO: 2012479 - RNA, 19 nt, Artificial Sequence
  Description of Artificial Sequence: Synthetic oligonucleotide
  Antisense strand to SEQ ID NO: 2012478
guuguccacacuaaguuuc

SEQ ID NO: 2012480 - RNA, 19 nt, Artificial Sequence
  Description of Artificial Sequence: Synthetic oligonucleotide
  Sense strand starting at position 3332 of SEQ ID NO: 1881029
agcauagugcacuaccaua

SEQ ID NO: 2012481 - RNA, 19 nt, Artificial Sequence
  Description of Artificial Sequence: Synthetic oligonucleotide
  Antisense strand to SEQ ID NO: 2012480
uaugguagugcacuaugcu

SEQ ID NO: 2012482 - RNA, 19 nt, Artificial Sequence
  Description of Artificial Sequence: Synthetic oligonucleotide
  Sense strand starting at position 3458 of SEQ ID NO: 1881029
caguccuuccaauggguau

SEQ ID NO: 2012483 - RNA, 19 nt, Artificial Sequence
  Description of Artificial Sequence: Synthetic oligonucleotide
  Antisense strand to SEQ ID NO: 2012482
auacccauuggaaggacug

SEQ ID NO: 2012484 - RNA, 19 nt, Artificial Sequence
  Description of Artificial Sequence: Synthetic oligonucleotide
  Sense strand starting at position 3511 of SEQ ID NO: 1881029
ccuaaugauuagcggugaa

SEQ ID NO: 2012485 - RNA, 19 nt, Artificial Sequence
  Description of Artificial Sequence: Synthetic oligonucleotide
  Antisense strand to SEQ ID NO: 2012484
uucaccgcuaaucauuagg

SEQ ID NO: 2012486 - RNA, 19 nt, Artificial Sequence
  Description of Artificial Sequence: Synthetic oligonucleotide
  Sense strand starting at position 3627 of SEQ ID NO: 1881029
cuguuaguguguuguagga

SEQ ID NO: 2012487 - RNA, 19 nt, Artificial Sequence
  Description of Artificial Sequence: Synthetic oligonucleotide
  Antisense strand to SEQ ID NO: 2012486
uccuacaacacacuaacag

SEQ ID NO: 2012488 - RNA, 19 nt, Artificial Sequence
  Description of Artificial Sequence: Synthetic oligonucleotide
  Sense strand starting at position 3629 of SEQ ID NO: 1881029
guuaguguguuguaggauu

SEQ ID NO: 2012489 - RNA, 19 nt, Artificial Sequence
  Description of Artificial Sequence: Synthetic oligonucleotide
  Antisense strand to SEQ ID NO: 2012488
aauccuacaacacacuaac

SEQ ID NO: 2012490 - RNA, 19 nt, Artificial Sequence
  Description of Artificial Sequence: Synthetic oligonucleotide
  Sense strand starting at position 6 of SEQ ID NO: 1881030
uuuaguacuuggguauaca

SEQ ID NO: 2012491 - RNA, 19 nt, Artificial Sequence
  Description of Artificial Sequence: Synthetic oligonucleotide
  Antisense strand to SEQ ID NO: 2012490
uguauacccaaguacuaaa

SEQ ID NO: 2012492 - RNA, 19 nt, Artificial Sequence
  Description of Artificial Sequence: Synthetic oligonucleotide
  Sense strand starting at position 7 of SEQ ID NO: 1881030
uuaguacuuggguauacau

SEQ ID NO: 2012493 - RNA, 19 nt, Artificial Sequence
  Description of Artificial Sequence: Synthetic oligonucleotide
  Antisense strand to SEQ ID NO: 2012492
auguauacccaaguacuaa

SEQ ID NO: 2012494 - RNA, 19 nt, Artificial Sequence
  Description of Artificial Sequence: Synthetic oligonucleotide
  Sense strand starting at position 15 of SEQ ID NO: 1881030
uggguauacaugcaaaguu

SEQ ID NO: 2012495 - RNA, 19 nt, Artificial Sequence
  Description of Artificial Sequence: Synthetic oligonucleotide
  Antisense strand to SEQ ID NO: 2012494
aacuuugcauguauaccca

SEQ ID NO: 2012496 - RNA, 19 nt, Artificial Sequence
  Description of Artificial Sequence: Synthetic oligonucleotide
  Sense strand starting at position 134 of SEQ ID NO: 1881030
gcuguaguuacacaucagu

SEQ ID NO: 2012497 - RNA, 19 nt, Artificial Sequence
  Description of Artificial Sequence: Synthetic oligonucleotide
  Antisense strand to SEQ ID NO: 2012496
acugauguguaacuacagc

SEQ ID NO: 2012498 - RNA, 19 nt, Artificial Sequence
  Description of Artificial Sequence: Synthetic oligonucleotide
  Sense strand starting at position 268 of SEQ ID NO: 1881030
aucuucugguuauugugaa

SEQ ID NO: 2012499 - RNA, 19 nt, Artificial Sequence
  Description of Artificial Sequence: Synthetic oligonucleotide
  Antisense strand to SEQ ID NO: 2012498
uucacaauaaccagaagau

SEQ ID NO: 2012500 - RNA, 19 nt, Artificial Sequence
  Description of Artificial Sequence: Synthetic oligonucleotide
  Sense strand starting at position 275 of SEQ ID NO: 1881030
gguuauugugaagacuaug

SEQ ID NO: 2012501 - RNA, 19 nt, Artificial Sequence
  Description of Artificial Sequence: Synthetic oligonucleotide
  Antisense strand to SEQ ID NO: 2012500
cauagucuucacaauaacc

SEQ ID NO: 2012502 - RNA, 19 nt, Artificial Sequence
  Description of Artificial Sequence: Synthetic oligonucleotide
  Sense strand starting at position 280 of SEQ ID NO: 1881030
uugugaagacuaugaaucu

SEQ ID NO: 2012503 - RNA, 19 nt, Artificial Sequence
  Description of Artificial Sequence: Synthetic oligonucleotide
  Antisense strand to SEQ ID NO: 2012502
agauucauagucuucacaa

SEQ ID NO: 2012504 - RNA, 19 nt, Artificial Sequence
  Description of Artificial Sequence: Synthetic oligonucleotide
  Sense strand starting at position 315 of SEQ ID NO: 1881030
cuuugaaaccaauggugua

SEQ ID NO: 2012505 - RNA, 19 nt, Artificial Sequence
  Description of Artificial Sequence: Synthetic oligonucleotide
  Antisense strand to SEQ ID NO: 2012504
uacaccauugguuucaaag

SEQ ID NO: 2012506 - RNA, 19 nt, Artificial Sequence
  Description of Artificial Sequence: Synthetic oligonucleotide
  Sense strand starting at position 351 of SEQ ID NO: 1881030
guuugcauauuugcauauu

SEQ ID NO: 2012507 - RNA, 19 nt, Artificial Sequence
  Description of Artificial Sequence: Synthetic oligonucleotide
  Antisense strand to SEQ ID NO: 2012506
aauaugcaaauaugcaaac

SEQ ID NO: 2012508 - RNA, 19 nt, Artificial Sequence
  Description of Artificial Sequence: Synthetic oligonucleotide
  Sense strand starting at position 387 of SEQ ID NO: 1881030
cuuccagcuuuccuggaaa

SEQ ID NO: 2012509 - RNA, 19 nt, Artificial Sequence
  Description of Artificial Sequence: Synthetic oligonucleotide
  Antisense strand to SEQ ID NO: 2012508
uuuccaggaaagcuggaag

SEQ ID NO: 2012510 - RNA, 19 nt, Artificial Sequence
  Description of Artificial Sequence: Synthetic oligonucleotide
  Sense strand starting at position 389 of SEQ ID NO: 1881030
uccagcuuuccuggaaaug

SEQ ID NO: 2012511 - RNA, 19 nt, Artificial Sequence
  Description of Artificial Sequence: Synthetic oligonucleotide
  Antisense strand to SEQ ID NO: 2012510
cauuuccaggaaagcugga

SEQ ID NO: 2012512 - RNA, 19 nt, Artificial Sequence
  Description of Artificial Sequence: Synthetic oligonucleotide
  Sense strand starting at position 460 of SEQ ID NO: 1881030
gugucaaagcaaggaugua

SEQ ID NO: 2012513 - RNA, 19 nt, Artificial Sequence
  Description of Artificial Sequence: Synthetic oligonucleotide
  Antisense strand to SEQ ID NO: 2012512
uacauccuugcuuugacac

SEQ ID NO: 2012514 - RNA, 19 nt, Artificial Sequence
  Description of Artificial Sequence: Synthetic oligonucleotide
  Sense strand starting at position 461 of SEQ ID NO: 1881030
ugucaaagcaaggauguau

SEQ ID NO: 2012515 - RNA, 19 nt, Artificial Sequence
  Description of Artificial Sequence: Synthetic oligonucleotide
  Antisense strand to SEQ ID NO: 2012514
auacauccuugcuuugaca

SEQ ID NO: 2012516 - RNA, 19 nt, Artificial Sequence
  Description of Artificial Sequence: Synthetic oligonucleotide
  Sense strand starting at position 570 of SEQ ID NO: 1881030
guugguuuagaauacuguu

SEQ ID NO: 2012517 - RNA, 19 nt, Artificial Sequence
  Description of Artificial Sequence: Synthetic oligonucleotide
  Antisense strand to SEQ ID NO: 2012516
aacaguauucuaaaccaac

SEQ ID NO: 2012518 - RNA, 19 nt, Artificial Sequence
  Description of Artificial Sequence: Synthetic oligonucleotide
  Sense strand starting at position 595 of SEQ ID NO: 1881030
acaguaaguuucccaugaa

SEQ ID NO: 2012519 - RNA, 19 nt, Artificial Sequence
  Description of Artificial Sequence: Synthetic oligonucleotide
  Antisense strand to SEQ ID NO: 2012518
uucaugggaaacuuacugu

SEQ ID NO: 2012520 - RNA, 19 nt, Artificial Sequence
  Description of Artificial Sequence: Synthetic oligonucleotide
  Sense strand starting at position 598 of SEQ ID NO: 1881030
guaaguuucccaugaaauc

SEQ ID NO: 2012521 - RNA, 19 nt, Artificial Sequence
  Description of Artificial Sequence: Synthetic oligonucleotide
  Antisense strand to SEQ ID NO: 2012520
gauuucaugggaaacuuac

SEQ ID NO: 2012522 - RNA, 19 nt, Artificial Sequence
  Description of Artificial Sequence: Synthetic oligonucleotide
  Sense strand starting at position 660 of SEQ ID NO: 1881030
guguauugcagggagucau

SEQ ID NO: 2012523 - RNA, 19 nt, Artificial Sequence
  Description of Artificial Sequence: Synthetic oligonucleotide
  Antisense strand to SEQ ID NO: 2012522
augacucccugcaauacac

SEQ ID NO: 2012524 - RNA, 19 nt, Artificial Sequence
  Description of Artificial Sequence: Synthetic oligonucleotide
  Sense strand starting at position 664 of SEQ ID NO: 1881030
auugcagggagucauagua

SEQ ID NO: 2012525 - RNA, 19 nt, Artificial Sequence
  Description of Artificial Sequence: Synthetic oligonucleotide
  Antisense strand to SEQ ID NO: 2012524
uacuaugacucccugcaau

SEQ ID NO: 2012526 - RNA, 19 nt, Artificial Sequence
  Description of Artificial Sequence: Synthetic oligonucleotide
  Sense strand starting at position 676 of SEQ ID NO: 1881030
cauaguaaaguugguaauu

SEQ ID NO: 2012527 - RNA, 19 nt, Artificial Sequence
  Description of Artificial Sequence: Synthetic oligonucleotide
  Antisense strand to SEQ ID NO: 2012526
aauuaccaacuuuacuaug

SEQ ID NO: 2012528 - RNA, 19 nt, Artificial Sequence
  Description of Artificial Sequence: Synthetic oligonucleotide
  Sense strand starting at position 722 of SEQ ID NO: 1881030
uggguugcaacauaaaguu

SEQ ID NO: 2012529 - RNA, 19 nt, Artificial Sequence
  Description of Artificial Sequence: Synthetic oligonucleotide
  Antisense strand to SEQ ID NO: 2012528
aacuuuauguugcaaccca

SEQ ID NO: 2012530 - RNA, 19 nt, Artificial Sequence
  Description of Artificial Sequence: Synthetic oligonucleotide
  Sense strand starting at position 1218 of SEQ ID NO: 1881030
agugcuugucacuaucuga

SEQ ID NO: 2012531 - RNA, 19 nt, Artificial Sequence
  Description of Artificial Sequence: Synthetic oligonucleotide
  Antisense strand to SEQ ID NO: 2012530
ucagauagugacaagcacu

SEQ ID NO: 2012532 - RNA, 19 nt, Artificial Sequence
  Description of Artificial Sequence: Synthetic oligonucleotide
  Sense strand starting at position 1272 of SEQ ID NO: 1881030
ugaaauguaggcgggaguu

SEQ ID NO: 2012533 - RNA, 19 nt, Artificial Sequence
  Description of Artificial Sequence: Synthetic oligonucleotide
  Antisense strand to SEQ ID NO: 2012532
aacucccgccuacauuuca

SEQ ID NO: 2012534 - RNA, 19 nt, Artificial Sequence
  Description of Artificial Sequence: Synthetic oligonucleotide
  Sense strand starting at position 1282 of SEQ ID NO: 1881030
gcgggaguucuugccuguu

SEQ ID NO: 2012535 - RNA, 19 nt, Artificial Sequence
  Description of Artificial Sequence: Synthetic oligonucleotide
  Antisense strand to SEQ ID NO: 2012534
aacaggcaagaacucccgc

SEQ ID NO: 2012536 - RNA, 19 nt, Artificial Sequence
  Description of Artificial Sequence: Synthetic oligonucleotide
  Sense strand starting at position 1325 of SEQ ID NO: 1881030
ggaacaugccugggaugga

SEQ ID NO: 2012537 - RNA, 19 nt, Artificial Sequence
  Description of Artificial Sequence: Synthetic oligonucleotide
  Antisense strand to SEQ ID NO: 2012536
uccaucccaggcauguucc

SEQ ID NO: 2012538 - RNA, 19 nt, Artificial Sequence
  Description of Artificial Sequence: Synthetic oligonucleotide
  Sense strand starting at position 1340 of SEQ ID NO: 1881030
uggaguagguucucaaaua

SEQ ID NO: 2012539 - RNA, 19 nt, Artificial Sequence
  Description of Artificial Sequence: Synthetic oligonucleotide
  Antisense strand to SEQ ID NO: 2012538
uauuugagaaccuacucca

SEQ ID NO: 2012540 - RNA, 19 nt, Artificial Sequence
  Description of Artificial Sequence: Synthetic oligonucleotide
  Sense strand starting at position 1608 of SEQ ID NO: 1881030
ggguuuccuauugacaagu

SEQ ID NO: 2012541 - RNA, 19 nt, Artificial Sequence
  Description of Artificial Sequence: Synthetic oligonucleotide
  Antisense strand to SEQ ID NO: 2012540
acuugucaauaggaaaccc

SEQ ID NO: 2012542 - RNA, 19 nt, Artificial Sequence
  Description of Artificial Sequence: Synthetic oligonucleotide
  Sense strand starting at position 1929 of SEQ ID NO: 1881030
auguuuaggugggauuuaa

SEQ ID NO: 2012543 - RNA, 19 nt, Artificial Sequence
  Description of Artificial Sequence: Synthetic oligonucleotide
  Antisense strand to SEQ ID NO: 2012542
uuaaaucccaccuaaacau

SEQ ID NO: 2012544 - RNA, 19 nt, Artificial Sequence
  Description of Artificial Sequence: Synthetic oligonucleotide
  Sense strand starting at position 2001 of SEQ ID NO: 1881030
ugguaucuguggaggauga

SEQ ID NO: 2012545 - RNA, 19 nt, Artificial Sequence
  Description of Artificial Sequence: Synthetic oligonucleotide
  Antisense strand to SEQ ID NO: 2012544
ucauccuccacagauacca

SEQ ID NO: 2012546 - RNA, 19 nt, Artificial Sequence
  Description of Artificial Sequence: Synthetic oligonucleotide
  Sense strand starting at position 2027 of SEQ ID NO: 1881030
ggaugcugucaggaacuau

SEQ ID NO: 2012547 - RNA, 19 nt, Artificial Sequence
  Description of Artificial Sequence: Synthetic oligonucleotide
  Antisense strand to SEQ ID NO: 2012546
auaguuccugacagcaucc

SEQ ID NO: 2012548 - RNA, 19 nt, Artificial Sequence
  Description of Artificial Sequence: Synthetic oligonucleotide
  Sense strand starting at position 2327 of SEQ ID NO: 1881030
ggugucagugugcuucuca

SEQ ID NO: 2012549 - RNA, 19 nt, Artificial Sequence
  Description of Artificial Sequence: Synthetic oligonucleotide
  Antisense strand to SEQ ID NO: 2012548
ugagaagcacacugacacc

SEQ ID NO: 2012550 - RNA, 19 nt, Artificial Sequence
  Description of Artificial Sequence: Synthetic oligonucleotide
  Sense strand starting at position 2807 of SEQ ID NO: 1881030
ucuggagacucagccuauu

SEQ ID NO: 2012551 - RNA, 19 nt, Artificial Sequence
  Description of Artificial Sequence: Synthetic oligonucleotide
  Antisense strand to SEQ ID NO: 2012550
aauaggcugagucuccaga

SEQ ID NO: 2012552 - RNA, 19 nt, Artificial Sequence
  Description of Artificial Sequence: Synthetic oligonucleotide
  Sense strand starting at position 3232 of SEQ ID NO: 1881030
uugacauauguauggcaua

SEQ ID NO: 2012553 - RNA, 19 nt, Artificial Sequence
  Description of Artificial Sequence: Synthetic oligonucleotide
  Antisense strand to SEQ ID NO: 2012552
uaugccauacauaugucaa

SEQ ID NO: 2012554 - RNA, 19 nt, Artificial Sequence
  Description of Artificial Sequence: Synthetic oligonucleotide
  Sense strand starting at position 3237 of SEQ ID NO: 1881030
auauguauggcauauguau

SEQ ID NO: 2012555 - RNA, 19 nt, Artificial Sequence
  Description of Artificial Sequence: Synthetic oligonucleotide
  Antisense strand to SEQ ID NO: 2012554
auacauaugccauacauau

SEQ ID NO: 2012556 - RNA, 19 nt, Artificial Sequence
  Description of Artificial Sequence: Synthetic oligonucleotide
  Sense strand starting at position 3350 of SEQ ID NO: 1881030
ccaucuugucccuaggcaa

SEQ ID NO: 2012557 - RNA, 19 nt, Artificial Sequence
  Description of Artificial Sequence: Synthetic oligonucleotide
  Antisense strand to SEQ ID NO: 2012556
uugccuagggacaagaugg

SEQ ID NO: 2012558 - RNA, 19 nt, Artificial Sequence
  Description of Artificial Sequence: Synthetic oligonucleotide
  Sense strand starting at position 3365 of SEQ ID NO: 1881030
gcaaccaacugaucugauu

SEQ ID NO: 2012559 - RNA, 19 nt, Artificial Sequence
  Description of Artificial Sequence: Synthetic oligonucleotide
  Antisense strand to SEQ ID NO: 2012558
aaucagaucaguugguugc

SEQ ID NO: 2012560 - RNA, 19 nt, Artificial Sequence
  Description of Artificial Sequence: Synthetic oligonucleotide
  Sense strand starting at position 3374 of SEQ ID NO: 1881030
ugaucugauuucuauguua

SEQ ID NO: 2012561 - RNA, 19 nt, Artificial Sequence
  Description of Artificial Sequence: Synthetic oligonucleotide
  Antisense strand to SEQ ID NO: 2012560
uaacauagaaaucagauca

SEQ ID NO: 2012562 - RNA, 19 nt, Artificial Sequence
  Description of Artificial Sequence: Synthetic oligonucleotide
  Sense strand starting at position 3426 of SEQ ID NO: 1881030
guggaaucacaguaugugu

SEQ ID NO: 2012563 - RNA, 19 nt, Artificial Sequence
  Description of Artificial Sequence: Synthetic oligonucleotide
  Antisense strand to SEQ ID NO: 2012562
acacauacugugauuccac

SEQ ID NO: 2012564 - RNA, 19 nt, Artificial Sequence
  Description of Artificial Sequence: Synthetic oligonucleotide
  Sense strand starting at position 3524 of SEQ ID NO: 1881030
uuugaacucuugcugagua

SEQ ID NO: 2012565 - RNA, 19 nt, Artificial Sequence
  Description of Artificial Sequence: Synthetic oligonucleotide
  Antisense strand to SEQ ID NO: 2012564
uacucagcaagaguucaaa

SEQ ID NO: 2012566 - RNA, 19 nt, Artificial Sequence
  Description of Artificial Sequence: Synthetic oligonucleotide
  Sense strand starting at position 3526 of SEQ ID NO: 1881030
ugaacucuugcugaguagu

SEQ ID NO: 2012567 - RNA, 19 nt, Artificial Sequence
  Description of Artificial Sequence: Synthetic oligonucleotide
  Antisense strand to SEQ ID NO: 2012566
acuacucagcaagaguuca

SEQ ID NO: 2012568 - RNA, 19 nt, Artificial Sequence
  Description of Artificial Sequence: Synthetic oligonucleotide
  Sense strand starting at position 3623 of SEQ ID NO: 1881030
cauuguuauggacacaugu

SEQ ID NO: 2012569 - RNA, 19 nt, Artificial Sequence
  Description of Artificial Sequence: Synthetic oligonucleotide
  Antisense strand to SEQ ID NO: 2012568
acauguguccauaacaaug

SEQ ID NO: 2012570 - RNA, 19 nt, Artificial Sequence
  Description of Artificial Sequence: Synthetic oligonucleotide
  Sense strand starting at position 8 of SEQ ID NO: 1881031
gggaaaugcuagcugccau

SEQ ID NO: 2012571 - RNA, 19 nt, Artificial Sequence
  Description of Artificial Sequence: Synthetic oligonucleotide
  Antisense strand to SEQ ID NO: 2012570
auggcagcuagcauuuccc

SEQ ID NO: 2012572 - RNA, 19 nt, Artificial Sequence
  Description of Artificial Sequence: Synthetic oligonucleotide
  Sense strand starting at position 32 of SEQ ID NO: 1881031
ccuaauguggucuguauua

SEQ ID NO: 2012573 - RNA, 19 nt, Artificial Sequence
  Description of Artificial Sequence: Synthetic oligonucleotide
  Antisense strand to SEQ ID NO: 2012572
uaauacagaccacauuagg

SEQ ID NO: 2012574 - RNA, 19 nt, Artificial Sequence
  Description of Artificial Sequence: Synthetic oligonucleotide
  Sense strand starting at position 41 of SEQ ID NO: 1881031
gucuguauuagggaguauu

SEQ ID NO: 2012575 - RNA, 19 nt, Artificial Sequence
  Description of Artificial Sequence: Synthetic oligonucleotide
  Antisense strand to SEQ ID NO: 2012574
aauacucccuaauacagac

SEQ ID NO: 2012576 - RNA, 19 nt, Artificial Sequence
  Description of Artificial Sequence: Synthetic oligonucleotide
  Sense strand starting at position 83 of SEQ ID NO: 1881031
ucuguauugggaggauuaa

SEQ ID NO: 2012577 - RNA, 19 nt, Artificial Sequence
  Description of Artificial Sequence: Synthetic oligonucleotide
  Antisense strand to SEQ ID NO: 2012576
uuaauccucccaauacaga

SEQ ID NO: 2012578 - RNA, 19 nt, Artificial Sequence
  Description of Artificial Sequence: Synthetic oligonucleotide
  Sense strand starting at position 137 of SEQ ID NO: 1881031
gggcuugccuuccugacua

SEQ ID NO: 2012579 - RNA, 19 nt, Artificial Sequence
  Description of Artificial Sequence: Synthetic oligonucleotide
  Antisense strand to SEQ ID NO: 2012578
uagucaggaaggcaagccc

SEQ ID NO: 2012580 - RNA, 19 nt, Artificial Sequence
  Description of Artificial Sequence: Synthetic oligonucleotide
  Sense strand starting at position 139 of SEQ ID NO: 1881031
gcuugccuuccugacuaaa

SEQ ID NO: 2012581 - RNA, 19 nt, Artificial Sequence
  Description of Artificial Sequence: Synthetic oligonucleotide
  Antisense strand to SEQ ID NO: 2012580
uuuagucaggaaggcaagc

SEQ ID NO: 2012582 - RNA, 19 nt, Artificial Sequence
  Description of Artificial Sequence: Synthetic oligonucleotide
  Sense strand starting at position 499 of SEQ ID NO: 1881031
gccaaaggcucuuccggaa

SEQ ID NO: 2012583 - RNA, 19 nt, Artificial Sequence
  Description of Artificial Sequence: Synthetic oligonucleotide
  Antisense strand to SEQ ID NO: 2012582
uuccggaagagccuuuggc

SEQ ID NO: 2012584 - RNA, 19 nt, Artificial Sequence
  Description of Artificial Sequence: Synthetic oligonucleotide
  Sense strand starting at position 512 of SEQ ID NO: 1881031
ccggaaguguccuuuaaua

SEQ ID NO: 2012585 - RNA, 19 nt, Artificial Sequence
  Description of Artificial Sequence: Synthetic oligonucleotide
  Antisense strand to SEQ ID NO: 2012584
uauuaaaggacacuuccgg

SEQ ID NO: 2012586 - RNA, 19 nt, Artificial Sequence
  Description of Artificial Sequence: Synthetic oligonucleotide
  Sense strand starting at position 514 of SEQ ID NO: 1881031
ggaaguguccuuuaauacu

SEQ ID NO: 2012587 - RNA, 19 nt, Artificial Sequence
  Description of Artificial Sequence: Synthetic oligonucleotide
  Antisense strand to SEQ ID NO: 2012586
aguauuaaaggacacuucc

SEQ ID NO: 2012588 - RNA, 19 nt, Artificial Sequence
  Description of Artificial Sequence: Synthetic oligonucleotide
  Sense strand starting at position 522 of SEQ ID NO: 1881031
ccuuuaauacuuuggagag

SEQ ID NO: 2012589 - RNA, 19 nt, Artificial Sequence
  Description of Artificial Sequence: Synthetic oligonucleotide
  Antisense strand to SEQ ID NO: 2012588
cucuccaaaguauuaaagg

SEQ ID NO: 2012590 - RNA, 19 nt, Artificial Sequence
  Description of Artificial Sequence: Synthetic oligonucleotide
  Sense strand starting at position 614 of SEQ ID NO: 1881031
gaaagauccuguuuggccu

SEQ ID NO: 2012591 - RNA, 19 nt, Artificial Sequence
  Description of Artificial Sequence: Synthetic oligonucleotide
  Antisense strand to SEQ ID NO: 2012590
aggccaaacaggaucuuuc

SEQ ID NO: 2012592 - RNA, 19 nt, Artificial Sequence
  Description of Artificial Sequence: Synthetic oligonucleotide
  Sense strand starting at position 1159 of SEQ ID NO: 1881031
ggagguugguccuucagga

SEQ ID NO: 2012593 - RNA, 19 nt, Artificial Sequence
  Description of Artificial Sequence: Synthetic oligonucleotide
  Antisense strand to SEQ ID NO: 2012592
uccugaaggaccaaccucc

SEQ ID NO: 2012594 - RNA, 19 nt, Artificial Sequence
  Description of Artificial Sequence: Synthetic oligonucleotide
  Sense strand starting at position 1568 of SEQ ID NO: 1881031
cgccuccucgcgguaaaua

SEQ ID NO: 2012595 - RNA, 19 nt, Artificial Sequence
  Description of Artificial Sequence: Synthetic oligonucleotide
  Antisense strand to SEQ ID NO: 2012594
uauuuaccgcgaggaggcg

SEQ ID NO: 2012596 - RNA, 19 nt, Artificial Sequence
  Description of Artificial Sequence: Synthetic oligonucleotide
  Sense strand starting at position 2844 of SEQ ID NO: 1881031
cgcggacagagugauugua

SEQ ID NO: 2012597 - RNA, 19 nt, Artificial Sequence
  Description of Artificial Sequence: Synthetic oligonucleotide
  Antisense strand to SEQ ID NO: 2012596
uacaaucacucuguccgcg

SEQ ID NO: 2012598 - RNA, 19 nt, Artificial Sequence
  Description of Artificial Sequence: Synthetic oligonucleotide
  Sense strand starting at position 2846 of SEQ ID NO: 1881031
cggacagagugauuguaag

SEQ ID NO: 2012599 - RNA, 19 nt, Artificial Sequence
  Description of Artificial Sequence: Synthetic oligonucleotide
  Antisense strand to SEQ ID NO: 2012598
cuuacaaucacucuguccg

SEQ ID NO: 2012600 - RNA, 19 nt, Artificial Sequence
  Description of Artificial Sequence: Synthetic oligonucleotide
  Sense strand starting at position 2853 of SEQ ID NO: 1881031
agugauuguaaggauaugu

SEQ ID NO: 2012601 - RNA, 19 nt, Artificial Sequence
  Description of Artificial Sequence: Synthetic oligonucleotide
  Antisense strand to SEQ ID NO: 2012600
acauauccuuacaaucacu

SEQ ID NO: 2012602 - RNA, 19 nt, Artificial Sequence
  Description of Artificial Sequence: Synthetic oligonucleotide
  Sense strand starting at position 2863 of SEQ ID NO: 1881031
aggauaugugugcaccuca

SEQ ID NO: 2012603 - RNA, 19 nt, Artificial Sequence
  Description of Artificial Sequence: Synthetic oligonucleotide
  Antisense strand to SEQ ID NO: 2012602
ugaggugcacacauauccu

SEQ ID NO: 2012604 - RNA, 19 nt, Artificial Sequence
  Description of Artificial Sequence: Synthetic oligonucleotide
  Sense strand starting at position 2921 of SEQ ID NO: 1881031
ggagauguugugagugcuu

SEQ ID NO: 2012605 - RNA, 19 nt, Artificial Sequence
  Description of Artificial Sequence: Synthetic oligonucleotide
  Antisense strand to SEQ ID NO: 2012604
aagcacucacaacaucucc

SEQ ID NO: 2012606 - RNA, 19 nt, Artificial Sequence
  Description of Artificial Sequence: Synthetic oligonucleotide
  Sense strand starting at position 2957 of SEQ ID NO: 1881031
ugaguuuguguugugugua

SEQ ID NO: 2012607 - RNA, 19 nt, Artificial Sequence
  Description of Artificial Sequence: Synthetic oligonucleotide
  Antisense strand to SEQ ID NO: 2012606
uacacacaacacaaacuca

SEQ ID NO: 2012608 - RNA, 19 nt, Artificial Sequence
  Description of Artificial Sequence: Synthetic oligonucleotide
  Sense strand starting at position 2962 of SEQ ID NO: 1881031
uuguguuguguguauuaga

SEQ ID NO: 2012609 - RNA, 19 nt, Artificial Sequence
  Description of Artificial Sequence: Synthetic oligonucleotide
  Antisense strand to SEQ ID NO: 2012608
ucuaauacacacaacacaa

SEQ ID NO: 2012610 - RNA, 19 nt, Artificial Sequence
  Description of Artificial Sequence: Synthetic oligonucleotide
  Sense strand starting at position 2963 of SEQ ID NO: 1881031
uguguuguguguauuagag

SEQ ID NO: 2012611 - RNA, 19 nt, Artificial Sequence
  Description of Artificial Sequence: Synthetic oligonucleotide
  Antisense strand to SEQ ID NO: 2012610
cucuaauacacacaacaca

SEQ ID NO: 2012612 - RNA, 19 nt, Artificial Sequence
  Description of Artificial Sequence: Synthetic oligonucleotide
  Sense strand starting at position 2983 of SEQ ID NO: 1881031
uuuguaugggccugacuga

SEQ ID NO: 2012613 - RNA, 19 nt, Artificial Sequence
  Description of Artificial Sequence: Synthetic oligonucleotide
  Antisense strand to SEQ ID NO: 2012612
ucagucaggcccauacaaa

SEQ ID NO: 2012614 - RNA, 19 nt, Artificial Sequence
  Description of Artificial Sequence: Synthetic oligonucleotide
  Sense strand starting at position 3080 of SEQ ID NO: 1881031
guguaugauugugugacua

SEQ ID NO: 2012615 - RNA, 19 nt, Artificial Sequence
  Description of Artificial Sequence: Synthetic oligonucleotide
  Antisense strand to SEQ ID NO: 2012614
uagucacacaaucauacac

SEQ ID NO: 2012616 - RNA, 19 nt, Artificial Sequence
  Description of Artificial Sequence: Synthetic oligonucleotide
  Sense strand starting at position 3113 of SEQ ID NO: 1881031
cggauugaauguguuguau

SEQ ID NO: 2012617 - RNA, 19 nt, Artificial Sequence
  Description of Artificial Sequence: Synthetic oligonucleotide
  Antisense strand to SEQ ID NO: 2012616
auacaacacauucaauccg

SEQ ID NO: 2012618 - RNA, 19 nt, Artificial Sequence
  Description of Artificial Sequence: Synthetic oligonucleotide
  Sense strand starting at position 3119 of SEQ ID NO: 1881031
gaauguguuguauacaucu

SEQ ID NO: 2012619 - RNA, 19 nt, Artificial Sequence
  Description of Artificial Sequence: Synthetic oligonucleotide
  Antisense strand to SEQ ID NO: 2012618
agauguauacaacacauuc

SEQ ID NO: 2012620 - RNA, 19 nt, Artificial Sequence
  Description of Artificial Sequence: Synthetic oligonucleotide
  Sense strand starting at position 3157 of SEQ ID NO: 1881031
guguaaauuguauacaaug

SEQ ID NO: 2012621 - RNA, 19 nt, Artificial Sequence
  Description of Artificial Sequence: Synthetic oligonucleotide
  Antisense strand to SEQ ID NO: 2012620
cauuguauacaauuuacac

SEQ ID NO: 2012622 - RNA, 19 nt, Artificial Sequence
  Description of Artificial Sequence: Synthetic oligonucleotide
  Sense strand starting at position 3201 of SEQ ID NO: 1881031
ccacgaaccuguguguaca

SEQ ID NO: 2012623 - RNA, 19 nt, Artificial Sequence
  Description of Artificial Sequence: Synthetic oligonucleotide
  Antisense strand to SEQ ID NO: 2012622
uguacacacagguucgugg

SEQ ID NO: 2012624 - RNA, 19 nt, Artificial Sequence
  Description of Artificial Sequence: Synthetic oligonucleotide
  Sense strand starting at position 3204 of SEQ ID NO: 1881031
cgaaccuguguguacagau

SEQ ID NO: 2012625 - RNA, 19 nt, Artificial Sequence
  Description of Artificial Sequence: Synthetic oligonucleotide
  Antisense strand to SEQ ID NO: 2012624
aucuguacacacagguucg

SEQ ID NO: 2012626 - RNA, 19 nt, Artificial Sequence
  Description of Artificial Sequence: Synthetic oligonucleotide
  Sense strand starting at position 3228 of SEQ ID NO: 1881031
ugccuuccuguguaucaga

SEQ ID NO: 2012627 - RNA, 19 nt, Artificial Sequence
  Description of Artificial Sequence: Synthetic oligonucleotide
  Antisense strand to SEQ ID NO: 2012626
ucugauacacaggaaggca

SEQ ID NO: 2012628 - RNA, 19 nt, Artificial Sequence
  Description of Artificial Sequence: Synthetic oligonucleotide
  Sense strand starting at position 3509 of SEQ ID NO: 1881031
ugugcuucugugccugauu

SEQ ID NO: 2012629 - RNA, 19 nt, Artificial Sequence
  Description of Artificial Sequence: Synthetic oligonucleotide
  Antisense strand to SEQ ID NO: 2012628
aaucaggcacagaagcaca

SEQ ID NO: 2012630 - RNA, 19 nt, Artificial Sequence
  Description of Artificial Sequence: Synthetic oligonucleotide
  Sense strand starting at position 3510 of SEQ ID NO: 1881031
gugcuucugugccugauuu

SEQ ID NO: 2012631 - RNA, 19 nt, Artificial Sequence
  Description of Artificial Sequence: Synthetic oligonucleotide
  Antisense strand to SEQ ID NO: 2012630
aaaucaggcacagaagcac

SEQ ID NO: 2012632 - RNA, 19 nt, Artificial Sequence
  Description of Artificial Sequence: Synthetic oligonucleotide
  Sense strand starting at position 3512 of SEQ ID NO: 1881031
gcuucugugccugauuuga

SEQ ID NO: 2012633 - RNA, 19 nt, Artificial Sequence
  Description of Artificial Sequence: Synthetic oligonucleotide
  Antisense strand to SEQ ID NO: 2012632
ucaaaucaggcacagaagc

SEQ ID NO: 2012634 - RNA, 19 nt, Artificial Sequence
  Description of Artificial Sequence: Synthetic oligonucleotide
  Sense strand starting at position 3514 of SEQ ID NO: 1881031
uucugugccugauuugauu

SEQ ID NO: 2012635 - RNA, 19 nt, Artificial Sequence
  Description of Artificial Sequence: Synthetic oligonucleotide
  Antisense strand to SEQ ID NO: 2012634
aaucaaaucaggcacagaa

SEQ ID NO: 2012636 - RNA, 19 nt, Artificial Sequence
  Description of Artificial Sequence: Synthetic oligonucleotide
  Sense strand starting at position 3640 of SEQ ID NO: 1881031
ggaacuuucugugccucua

SEQ ID NO: 2012637 - RNA, 19 nt, Artificial Sequence
  Description of Artificial Sequence: Synthetic oligonucleotide
  Antisense strand to SEQ ID NO: 2012636
uagaggcacagaaaguucc

SEQ ID NO: 2012638 - RNA, 19 nt, Artificial Sequence
  Description of Artificial Sequence: Synthetic oligonucleotide
  Sense strand starting at position 3720 of SEQ ID NO: 1881031
gugacuaaagcuugccuca

SEQ ID NO: 2012639 - RNA, 19 nt, Artificial Sequence
  Description of Artificial Sequence: Synthetic oligonucleotide
  Antisense strand to SEQ ID NO: 2012638
ugaggcaagcuuuagucac

SEQ ID NO: 2012640 - RNA, 19 nt, Artificial Sequence
  Description of Artificial Sequence: Synthetic oligonucleotide
  Sense strand starting at position 3913 of SEQ ID NO: 1881031
gcuagaaaucugcguggga

SEQ ID NO: 2012641 - RNA, 19 nt, Artificial Sequence
  Description of Artificial Sequence: Synthetic oligonucleotide
  Antisense strand to SEQ ID NO: 2012640
ucccacgcagauuucuagc

SEQ ID NO: 2012642 - RNA, 19 nt, Artificial Sequence
  Description of Artificial Sequence: Synthetic oligonucleotide
  Sense strand starting at position 3914 of SEQ ID NO: 1881031
cuagaaaucugcgugggag

SEQ ID NO: 2012643 - RNA, 19 nt, Artificial Sequence
  Description of Artificial Sequence: Synthetic oligonucleotide
  Antisense strand to SEQ ID NO: 2012642
cucccacgcagauuucuag

SEQ ID NO: 2012644 - RNA, 19 nt, Artificial Sequence
  Description of Artificial Sequence: Synthetic oligonucleotide
  Sense strand starting at position 3915 of SEQ ID NO: 1881031
uagaaaucugcgugggagu

SEQ ID NO: 2012645 - RNA, 19 nt, Artificial Sequence
  Description of Artificial Sequence: Synthetic oligonucleotide
  Antisense strand to SEQ ID NO: 2012644
acucccacgcagauuucua

SEQ ID NO: 2012646 - RNA, 19 nt, Artificial Sequence
  Description of Artificial Sequence: Synthetic oligonucleotide
  Sense strand starting at position 3917 of SEQ ID NO: 1881031
gaaaucugcgugggaguga

SEQ ID NO: 2012647 - RNA, 19 nt, Artificial Sequence
  Description of Artificial Sequence: Synthetic oligonucleotide
  Antisense strand to SEQ ID NO: 2012646
ucacucccacgcagauuuc

SEQ ID NO: 2012648 - RNA, 19 nt, Artificial Sequence
  Description of Artificial Sequence: Synthetic oligonucleotide
  Sense strand starting at position 3938 of SEQ ID NO: 1881031
ggaauauucugccucuccu

SEQ ID NO: 2012649 - RNA, 19 nt, Artificial Sequence
  Description of Artificial Sequence: Synthetic oligonucleotide
  Antisense strand to SEQ ID NO: 2012648
aggagaggcagaauauucc

SEQ ID NO: 2012650 - RNA, 19 nt, Artificial Sequence
  Description of Artificial Sequence: Synthetic oligonucleotide
  Sense strand starting at position 104 of SEQ ID NO: 1881032
gggccugagcuuggguauu

SEQ ID NO: 2012651 - RNA, 19 nt, Artificial Sequence
  Description of Artificial Sequence: Synthetic oligonucleotide
  Antisense strand to SEQ ID NO: 2012650
aauacccaagcucaggccc

SEQ ID NO: 2012652 - RNA, 19 nt, Artificial Sequence
  Description of Artificial Sequence: Synthetic oligonucleotide
  Sense strand starting at position 188 of SEQ ID NO: 1881032
acgugauuuaguuguguug

SEQ ID NO: 2012653 - RNA, 19 nt, Artificial Sequence
  Description of Artificial Sequence: Synthetic oligonucleotide
  Antisense strand to SEQ ID NO: 2012652
caacacaacuaaaucacgu

SEQ ID NO: 2012654 - RNA, 19 nt, Artificial Sequence
  Description of Artificial Sequence: Synthetic oligonucleotide
  Sense strand starting at position 195 of SEQ ID NO: 1881032
uuaguuguguugucccuga

SEQ ID NO: 2012655 - RNA, 19 nt, Artificial Sequence
  Description of Artificial Sequence: Synthetic oligonucleotide
  Antisense strand to SEQ ID NO: 2012654
ucagggacaacacaacuaa

SEQ ID NO: 2012656 - RNA, 19 nt, Artificial Sequence
  Description of Artificial Sequence: Synthetic oligonucleotide
  Sense strand starting at position 199 of SEQ ID NO: 1881032
uuguguugucccugaaacu

SEQ ID NO: 2012657 - RNA, 19 nt, Artificial Sequence
  Description of Artificial Sequence: Synthetic oligonucleotide
  Antisense strand to SEQ ID NO: 2012656
aguuucagggacaacacaa

SEQ ID NO: 2012658 - RNA, 19 nt, Artificial Sequence
  Description of Artificial Sequence: Synthetic oligonucleotide
  Sense strand starting at position 200 of SEQ ID NO: 1881032
uguguugucccugaaacua

SEQ ID NO: 2012659 - RNA, 19 nt, Artificial Sequence
  Description of Artificial Sequence: Synthetic oligonucleotide
  Antisense strand to SEQ ID NO: 2012658
uaguuucagggacaacaca

SEQ ID NO: 2012660 - RNA, 19 nt, Artificial Sequence
  Description of Artificial Sequence: Synthetic oligonucleotide
  Sense strand starting at position 219 of SEQ ID NO: 1881032
uucccuuucccaggcagaa

SEQ ID NO: 2012661 - RNA, 19 nt, Artificial Sequence
  Description of Artificial Sequence: Synthetic oligonucleotide
  Antisense strand to SEQ ID NO: 2012660
uucugccugggaaagggaa

SEQ ID NO: 2012662 - RNA, 19 nt, Artificial Sequence
  Description of Artificial Sequence: Synthetic oligonucleotide
  Sense strand starting at position 237 of SEQ ID NO: 1881032
aaagguuugucucugagaa

SEQ ID NO: 2012663 - RNA, 19 nt, Artificial Sequence
  Description of Artificial Sequence: Synthetic oligonucleotide
  Antisense strand to SEQ ID NO: 2012662
uucucagagacaaaccuuu

SEQ ID NO: 2012664 - RNA, 19 nt, Artificial Sequence
  Description of Artificial Sequence: Synthetic oligonucleotide
  Sense strand starting at position 238 of SEQ ID NO: 1881032
aagguuugucucugagaag

SEQ ID NO: 2012665 - RNA, 19 nt, Artificial Sequence
  Description of Artificial Sequence: Synthetic oligonucleotide
  Antisense strand to SEQ ID NO: 2012664
cuucucagagacaaaccuu

SEQ ID NO: 2012666 - RNA, 19 nt, Artificial Sequence
  Description of Artificial Sequence: Synthetic oligonucleotide
  Sense strand starting at position 319 of SEQ ID NO: 1881032
gcagauuugcaguaguuuc

SEQ ID NO: 2012667 - RNA, 19 nt, Artificial Sequence
  Description of Artificial Sequence: Synthetic oligonucleotide
  Antisense strand to SEQ ID NO: 2012666
gaaacuacugcaaaucugc

SEQ ID NO: 2012668 - RNA, 19 nt, Artificial Sequence
  Description of Artificial Sequence: Synthetic oligonucleotide
  Sense strand starting at position 347 of SEQ ID NO: 1881032
aguuucuggcauuauuauu

SEQ ID NO: 2012669 - RNA, 19 nt, Artificial Sequence
  Description of Artificial Sequence: Synthetic oligonucleotide
  Antisense strand to SEQ ID NO: 2012668
aauaauaaugccagaaacu

SEQ ID NO: 2012670 - RNA, 19 nt, Artificial Sequence
  Description of Artificial Sequence: Synthetic oligonucleotide
  Sense strand starting at position 621 of SEQ ID NO: 1881032
cugccauuguuauuauacu

SEQ ID NO: 2012671 - RNA, 19 nt, Artificial Sequence
  Description of Artificial Sequence: Synthetic oligonucleotide
  Antisense strand to SEQ ID NO: 2012670
aguauaauaacaauggcag

SEQ ID NO: 2012672 - RNA, 19 nt, Artificial Sequence
  Description of Artificial Sequence: Synthetic oligonucleotide
  Sense strand starting at position 761 of SEQ ID NO: 1881032
gagaguucuggugggcuau

SEQ ID NO: 2012673 - RNA, 19 nt, Artificial Sequence
  Description of Artificial Sequence: Synthetic oligonucleotide
  Antisense strand to SEQ ID NO: 2012672
auagcccaccagaacucuc

SEQ ID NO: 2012674 - RNA, 19 nt, Artificial Sequence
  Description of Artificial Sequence: Synthetic oligonucleotide
  Sense strand starting at position 852 of SEQ ID NO: 1881032
uuagcagugggauggaaau

SEQ ID NO: 2012675 - RNA, 19 nt, Artificial Sequence
  Description of Artificial Sequence: Synthetic oligonucleotide
  Antisense strand to SEQ ID NO: 2012674
auuuccaucccacugcuaa

SEQ ID NO: 2012676 - RNA, 19 nt, Artificial Sequence
  Description of Artificial Sequence: Synthetic oligonucleotide
  Sense strand starting at position 930 of SEQ ID NO: 1881032
ggccaauuguagcucugau

SEQ ID NO: 2012677 - RNA, 19 nt, Artificial Sequence
  Description of Artificial Sequence: Synthetic oligonucleotide
  Antisense strand to SEQ ID NO: 2012676
aucagagcuacaauuggcc

SEQ ID NO: 2012678 - RNA, 19 nt, Artificial Sequence
  Description of Artificial Sequence: Synthetic oligonucleotide
  Sense strand starting at position 1033 of SEQ ID NO: 1881032
ccaagaauguggucuuugu

SEQ ID NO: 2012679 - RNA, 19 nt, Artificial Sequence
  Description of Artificial Sequence: Synthetic oligonucleotide
  Antisense strand to SEQ ID NO: 2012678
acaaagaccacauucuugg

SEQ ID NO: 2012680 - RNA, 19 nt, Artificial Sequence
  Description of Artificial Sequence: Synthetic oligonucleotide
  Sense strand starting at position 1037 of SEQ ID NO: 1881032
gaauguggucuuugucauu

SEQ ID NO: 2012681 - RNA, 19 nt, Artificial Sequence
  Description of Artificial Sequence: Synthetic oligonucleotide
  Antisense strand to SEQ ID NO: 2012680
aaugacaaagaccacauuc

SEQ ID NO: 2012682 - RNA, 19 nt, Artificial Sequence
  Description of Artificial Sequence: Synthetic oligonucleotide
  Sense strand starting at position 1042 of SEQ ID NO: 1881032
uggucuuugucauugacaa

SEQ ID NO: 2012683 - RNA, 19 nt, Artificial Sequence
  Description of Artificial Sequence: Synthetic oligonucleotide
  Antisense strand to SEQ ID NO: 2012682
uugucaaugacaaagacca

SEQ ID NO: 2012684 - RNA, 19 nt, Artificial Sequence
  Description of Artificial Sequence: Synthetic oligonucleotide
  Sense strand starting at position 1043 of SEQ ID NO: 1881032
ggucuuugucauugacaag

SEQ ID NO: 2012685 - RNA, 19 nt, Artificial Sequence
  Description of Artificial Sequence: Synthetic oligonucleotide
  Antisense strand to SEQ ID NO: 2012684
cuugucaaugacaaagacc

SEQ ID NO: 2012686 - RNA, 19 nt, Artificial Sequence
  Description of Artificial Sequence: Synthetic oligonucleotide
  Sense strand starting at position 2010 of SEQ ID NO: 1881032
ucgguuucgacgucagcua

SEQ ID NO: 2012687 - RNA, 19 nt, Artificial Sequence
  Description of Artificial Sequence: Synthetic oligonucleotide
  Antisense strand to SEQ ID NO: 2012686
uagcugacgucgaaaccga

SEQ ID NO: 2012688 - RNA, 19 nt, Artificial Sequence
  Description of Artificial Sequence: Synthetic oligonucleotide
  Sense strand starting at position 2024 of SEQ ID NO: 1881032
agcuaugccuuccuggaga

SEQ ID NO: 2012689 - RNA, 19 nt, Artificial Sequence
  Description of Artificial Sequence: Synthetic oligonucleotide
  Antisense strand to SEQ ID NO: 2012688
ucuccaggaaggcauagcu

SEQ ID NO: 2012690 - RNA, 19 nt, Artificial Sequence
  Description of Artificial Sequence: Synthetic oligonucleotide
  Sense strand starting at position 2026 of SEQ ID NO: 1881032
cuaugccuuccuggagaag

SEQ ID NO: 2012691 - RNA, 19 nt, Artificial Sequence
  Description of Artificial Sequence: Synthetic oligonucleotide
  Antisense strand to SEQ ID NO: 2012690
cuucuccaggaaggcauag

SEQ ID NO: 2012692 - RNA, 19 nt, Artificial Sequence
  Description of Artificial Sequence: Synthetic oligonucleotide
  Sense strand starting at position 2141 of SEQ ID NO: 1881032
cagagaagugggcagucau

SEQ ID NO: 2012693 - RNA, 19 nt, Artificial Sequence
  Description of Artificial Sequence: Synthetic oligonucleotide
  Antisense strand to SEQ ID NO: 2012692
augacugcccacuucucug

SEQ ID NO: 2012694 - RNA, 19 nt, Artificial Sequence
  Description of Artificial Sequence: Synthetic oligonucleotide
  Sense strand starting at position 2194 of SEQ ID NO: 1881032
ggacuucuaccaggaagug

SEQ ID NO: 2012695 - RNA, 19 nt, Artificial Sequence
  Description of Artificial Sequence: Synthetic oligonucleotide
  Antisense strand to SEQ ID NO: 2012694
cacuuccugguagaagucc

SEQ ID NO: 2012696 - RNA, 19 nt, Artificial Sequence
  Description of Artificial Sequence: Synthetic oligonucleotide
  Sense strand starting at position 2234 of SEQ ID NO: 1881032
gugaccuucgaguacccaa

SEQ ID NO: 2012697 - RNA, 19 nt, Artificial Sequence
  Description of Artificial Sequence: Synthetic oligonucleotide
  Antisense strand to SEQ ID NO: 2012696
uuggguacucgaaggucac

SEQ ID NO: 2012698 - RNA, 19 nt, Artificial Sequence
  Description of Artificial Sequence: Synthetic oligonucleotide
  Sense strand starting at position 2534 of SEQ ID NO: 1881032
uggagugauucucaugaga

SEQ ID NO: 2012699 - RNA, 19 nt, Artificial Sequence
  Description of Artificial Sequence: Synthetic oligonucleotide
  Antisense strand to SEQ ID NO: 2012698
ucucaugagaaucacucca

SEQ ID NO: 2012700 - RNA, 19 nt, Artificial Sequence
  Description of Artificial Sequence: Synthetic oligonucleotide
  Sense strand starting at position 2611 of SEQ ID NO: 1881032
gggauuccucccuaguugu

SEQ ID NO: 2012701 - RNA, 19 nt, Artificial Sequence
  Description of Artificial Sequence: Synthetic oligonucleotide
  Antisense strand to SEQ ID NO: 2012700
acaacuagggaggaauccc

SEQ ID NO: 2012702 - RNA, 19 nt, Artificial Sequence
  Description of Artificial Sequence: Synthetic oligonucleotide
  Sense strand starting at position 2984 of SEQ ID NO: 1881032
ggaucuaacccuggacuca

SEQ ID NO: 2012703 - RNA, 19 nt, Artificial Sequence
  Description of Artificial Sequence: Synthetic oligonucleotide
  Antisense strand to SEQ ID NO: 2012702
ugaguccaggguuagaucc

SEQ ID NO: 2012704 - RNA, 19 nt, Artificial Sequence
  Description of Artificial Sequence: Synthetic oligonucleotide
  Sense strand starting at position 3330 of SEQ ID NO: 1881032
aguuuccuccuauguaaac

SEQ ID NO: 2012705 - RNA, 19 nt, Artificial Sequence
  Description of Artificial Sequence: Synthetic oligonucleotide
  Antisense strand to SEQ ID NO: 2012704
guuuacauaggaggaaacu

SEQ ID NO: 2012706 - RNA, 19 nt, Artificial Sequence
  Description of Artificial Sequence: Synthetic oligonucleotide
  Sense strand starting at position 3331 of SEQ ID NO: 1881032
guuuccuccuauguaaaca

SEQ ID NO: 2012707 - RNA, 19 nt, Artificial Sequence
  Description of Artificial Sequence: Synthetic oligonucleotide
  Antisense strand to SEQ ID NO: 2012706
uguuuacauaggaggaaac

SEQ ID NO: 2012708 - RNA, 19 nt, Artificial Sequence
  Description of Artificial Sequence: Synthetic oligonucleotide
  Sense strand starting at position 3372 of SEQ ID NO: 1881032
cucauaaagucacugugau

SEQ ID NO: 2012709 - RNA, 19 nt, Artificial Sequence
  Description of Artificial Sequence: Synthetic oligonucleotide
  Antisense strand to SEQ ID NO: 2012708
aucacagugacuuuaugag

SEQ ID NO: 2012710 - RNA, 19 nt, Artificial Sequence
  Description of Artificial Sequence: Synthetic oligonucleotide
  Sense strand starting at position 3373 of SEQ ID NO: 1881032
ucauaaagucacugugauu

SEQ ID NO: 2012711 - RNA, 19 nt, Artificial Sequence
  Description of Artificial Sequence: Synthetic oligonucleotide
  Antisense strand to SEQ ID NO: 2012710
aaucacagugacuuuauga

SEQ ID NO: 2012712 - RNA, 19 nt, Artificial Sequence
  Description of Artificial Sequence: Synthetic oligonucleotide
  Sense strand starting at position 3378 of SEQ ID NO: 1881032
aagucacugugauugaugu

SEQ ID NO: 2012713 - RNA, 19 nt, Artificial Sequence
  Description of Artificial Sequence: Synthetic oligonucleotide
  Antisense strand to SEQ ID NO: 2012712
acaucaaucacagugacuu

SEQ ID NO: 2012714 - RNA, 19 nt, Artificial Sequence
  Description of Artificial Sequence: Synthetic oligonucleotide
  Sense strand starting at position 3385 of SEQ ID NO: 1881032
ugugauugauguccaguga

SEQ ID NO: 2012715 - RNA, 19 nt, Artificial Sequence
  Description of Artificial Sequence: Synthetic oligonucleotide
  Antisense strand to SEQ ID NO: 2012714
ucacuggacaucaaucaca

SEQ ID NO: 2012716 - RNA, 19 nt, Artificial Sequence
  Description of Artificial Sequence: Synthetic oligonucleotide
  Sense strand starting at position 3386 of SEQ ID NO: 1881032
gugauugauguccagugau

SEQ ID NO: 2012717 - RNA, 19 nt, Artificial Sequence
  Description of Artificial Sequence: Synthetic oligonucleotide
  Antisense strand to SEQ ID NO: 2012716
aucacuggacaucaaucac

SEQ ID NO: 2012718 - RNA, 19 nt, Artificial Sequence
  Description of Artificial Sequence: Synthetic oligonucleotide
  Sense strand starting at position 3389 of SEQ ID NO: 1881032
auugauguccagugauaag

SEQ ID NO: 2012719 - RNA, 19 nt, Artificial Sequence
  Description of Artificial Sequence: Synthetic oligonucleotide
  Antisense strand to SEQ ID NO: 2012718
cuuaucacuggacaucaau

SEQ ID NO: 2012720 - RNA, 19 nt, Artificial Sequence
  Description of Artificial Sequence: Synthetic oligonucleotide
  Sense strand starting at position 3424 of SEQ ID NO: 1881032
gcaggugauuuagcuugga

SEQ ID NO: 2012721 - RNA, 19 nt, Artificial Sequence
  Description of Artificial Sequence: Synthetic oligonucleotide
  Antisense strand to SEQ ID NO: 2012720
uccaagcuaaaucaccugc

SEQ ID NO: 2012722 - RNA, 19 nt, Artificial Sequence
  Description of Artificial Sequence: Synthetic oligonucleotide
  Sense strand starting at position 3865 of SEQ ID NO: 1881032
gcaccuggcccagaucuaa

SEQ ID NO: 2012723 - RNA, 19 nt, Artificial Sequence
  Description of Artificial Sequence: Synthetic oligonucleotide
  Antisense strand to SEQ ID NO: 2012722
uuagaucugggccaggugc

SEQ ID NO: 2012724 - RNA, 19 nt, Artificial Sequence
  Description of Artificial Sequence: Synthetic oligonucleotide
  Sense strand starting at position 3912 of SEQ ID NO: 1881032
auuguuagcuuacuuaaag

SEQ ID NO: 2012725 - RNA, 19 nt, Artificial Sequence
  Description of Artificial Sequence: Synthetic oligonucleotide
  Antisense strand to SEQ ID NO: 2012724
cuuuaaguaagcuaacaau

SEQ ID NO: 2012726 - RNA, 19 nt, Artificial Sequence
  Description of Artificial Sequence: Synthetic oligonucleotide
  Sense strand starting at position 3913 of SEQ ID NO: 1881032
uuguuagcuuacuuaaagu

SEQ ID NO: 2012727 - RNA, 19 nt, Artificial Sequence
  Description of Artificial Sequence: Synthetic oligonucleotide
  Antisense strand to SEQ ID NO: 2012726
acuuuaaguaagcuaacaa

SEQ ID NO: 2012728 - RNA, 19 nt, Artificial Sequence
  Description of Artificial Sequence: Synthetic oligonucleotide
  Sense strand starting at position 3952 of SEQ ID NO: 1881032
auuaaauagcuguaugugu

SEQ ID NO: 2012729 - RNA, 19 nt, Artificial Sequence
  Description of Artificial Sequence: Synthetic oligonucleotide
  Antisense strand to SEQ ID NO: 2012728
acacauacagcuauuuaau

SEQ ID NO: 2012730 - RNA, 19 nt, Artificial Sequence
  Description of Artificial Sequence: Synthetic oligonucleotide
  Sense strand starting at position 36 of SEQ ID NO: 1881033
agccgaagauccuuugaaa

SEQ ID NO: 2012731 - RNA, 19 nt, Artificial Sequence
  Description of Artificial Sequence: Synthetic oligonucleotide
  Antisense strand to SEQ ID NO: 2012730
uuucaaaggaucuucggcu

SEQ ID NO: 2012732 - RNA, 19 nt, Artificial Sequence
  Description of Artificial Sequence: Synthetic oligonucleotide
  Sense strand starting at position 146 of SEQ ID NO: 1881033
ggagaagcagcuuaacgua

SEQ ID NO: 2012733 - RNA, 19 nt, Artificial Sequence
  Description of Artificial Sequence: Synthetic oligonucleotide
  Antisense strand to SEQ ID NO: 2012732
uacguuaagcugcuucucc

SEQ ID NO: 2012734 - RNA, 19 nt, Artificial Sequence
  Description of Artificial Sequence: Synthetic oligonucleotide
  Sense strand starting at position 228 of SEQ ID NO: 1881033
agugaauaucgugaacaca

SEQ ID NO: 2012735 - RNA, 19 nt, Artificial Sequence
  Description of Artificial Sequence: Synthetic oligonucleotide
  Antisense strand to SEQ ID NO: 2012734
uguguucacgauauucacu

SEQ ID NO: 2012736 - RNA, 19 nt, Artificial Sequence
  Description of Artificial Sequence: Synthetic oligonucleotide
  Sense strand starting at position 295 of SEQ ID NO: 1881033
ugcuuaucugagcaggcaa

SEQ ID NO: 2012737 - RNA, 19 nt, Artificial Sequence
  Description of Artificial Sequence: Synthetic oligonucleotide
  Antisense strand to SEQ ID NO: 2012736
uugccugcucagauaagca

SEQ ID NO: 2012738 - RNA, 19 nt, Artificial Sequence
  Description of Artificial Sequence: Synthetic oligonucleotide
  Sense strand starting at position 297 of SEQ ID NO: 1881033
cuuaucugagcaggcaaau

SEQ ID NO: 2012739 - RNA, 19 nt, Artificial Sequence
  Description of Artificial Sequence: Synthetic oligonucleotide
  Antisense strand to SEQ ID NO: 2012738
auuugccugcucagauaag

SEQ ID NO: 2012740 - RNA, 19 nt, Artificial Sequence
  Description of Artificial Sequence: Synthetic oligonucleotide
  Sense strand starting at position 347 of SEQ ID NO: 1881033
ggagacuaguaguuuagga

SEQ ID NO: 2012741 - RNA, 19 nt, Artificial Sequence
  Description of Artificial Sequence: Synthetic oligonucleotide
  Antisense strand to SEQ ID NO: 2012740
uccuaaacuacuagucucc

SEQ ID NO: 2012742 - RNA, 19 nt, Artificial Sequence
  Description of Artificial Sequence: Synthetic oligonucleotide
  Sense strand starting at position 380 of SEQ ID NO: 1881033
ucagcuauuugugugacuu

SEQ ID NO: 2012743 - RNA, 19 nt, Artificial Sequence
  Description of Artificial Sequence: Synthetic oligonucleotide
  Antisense strand to SEQ ID NO: 2012742
aagucacacaaauagcuga

SEQ ID NO: 2012744 - RNA, 19 nt, Artificial Sequence
  Description of Artificial Sequence: Synthetic oligonucleotide
  Sense strand starting at position 381 of SEQ ID NO: 1881033
cagcuauuugugugacuuu

SEQ ID NO: 2012745 - RNA, 19 nt, Artificial Sequence
  Description of Artificial Sequence: Synthetic oligonucleotide
  Antisense strand to SEQ ID NO: 2012744
aaagucacacaaauagcug

SEQ ID NO: 2012746 - RNA, 19 nt, Artificial Sequence
  Description of Artificial Sequence: Synthetic oligonucleotide
  Sense strand starting at position 391 of SEQ ID NO: 1881033
ugugacuuuggaggaagua

SEQ ID NO: 2012747 - RNA, 19 nt, Artificial Sequence
  Description of Artificial Sequence: Synthetic oligonucleotide
  Antisense strand to SEQ ID NO: 2012746
uacuuccuccaaagucaca

SEQ ID NO: 2012748 - RNA, 19 nt, Artificial Sequence
  Description of Artificial Sequence: Synthetic oligonucleotide
  Sense strand starting at position 407 of SEQ ID NO: 1881033
guaauuuaaucgcuuugug

SEQ ID NO: 2012749 - RNA, 19 nt, Artificial Sequence
  Description of Artificial Sequence: Synthetic oligonucleotide
  Antisense strand to SEQ ID NO: 2012748
cacaaagcgauuaaauuac

SEQ ID NO: 2012750 - RNA, 19 nt, Artificial Sequence
  Description of Artificial Sequence: Synthetic oligonucleotide
  Sense strand starting at position 455 of SEQ ID NO: 1881033
auggcuuaauaggauuuaa

SEQ ID NO: 2012751 - RNA, 19 nt, Artificial Sequence
  Description of Artificial Sequence: Synthetic oligonucleotide
  Antisense strand to SEQ ID NO: 2012750
uuaaauccuauuaagccau

SEQ ID NO: 2012752 - RNA, 19 nt, Artificial Sequence
  Description of Artificial Sequence: Synthetic oligonucleotide
  Sense strand starting at position 493 of SEQ ID NO: 1881033
aguuuagaccaaugccuga

SEQ ID NO: 2012753 - RNA, 19 nt, Artificial Sequence
  Description of Artificial Sequence: Synthetic oligonucleotide
  Antisense strand to SEQ ID NO: 2012752
ucaggcauuggucuaaacu

SEQ ID NO: 2012754 - RNA, 19 nt, Artificial Sequence
  Description of Artificial Sequence: Synthetic oligonucleotide
  Sense strand starting at position 977 of SEQ ID NO: 1881033
guggucugggcucaauaaa

SEQ ID NO: 2012755 - RNA, 19 nt, Artificial Sequence
  Description of Artificial Sequence: Synthetic oligonucleotide
  Antisense strand to SEQ ID NO: 2012754
uuuauugagcccagaccac

SEQ ID NO: 2012756 - RNA, 19 nt, Artificial Sequence
  Description of Artificial Sequence: Synthetic oligonucleotide
  Sense strand starting at position 1137 of SEQ ID NO: 1881033
ucaggaaacguuugaggaa

SEQ ID NO: 2012757 - RNA, 19 nt, Artificial Sequence
  Description of Artificial Sequence: Synthetic oligonucleotide
  Antisense strand to SEQ ID NO: 2012756
uuccucaaacguuuccuga

SEQ ID NO: 2012758 - RNA, 19 nt, Artificial Sequence
  Description of Artificial Sequence: Synthetic oligonucleotide
  Sense strand starting at position 1144 of SEQ ID NO: 1881033
acguuugaggaaugaauau

SEQ ID NO: 2012759 - RNA, 19 nt, Artificial Sequence
  Description of Artificial Sequence: Synthetic oligonucleotide
  Antisense strand to SEQ ID NO: 2012758
auauucauuccucaaacgu

SEQ ID NO: 2012760 - RNA, 19 nt, Artificial Sequence
  Description of Artificial Sequence: Synthetic oligonucleotide
  Sense strand starting at position 1390 of SEQ ID NO: 1881033
cgguuuauuuacuuaagca

SEQ ID NO: 2012761 - RNA, 19 nt, Artificial Sequence
  Description of Artificial Sequence: Synthetic oligonucleotide
  Antisense strand to SEQ ID NO: 2012760
ugcuuaaguaaauaaaccg

SEQ ID NO: 2012762 - RNA, 19 nt, Artificial Sequence
  Description of Artificial Sequence: Synthetic oligonucleotide
  Sense strand starting at position 1455 of SEQ ID NO: 1881033
cugaggucgcgguuuguau

SEQ ID NO: 2012763 - RNA, 19 nt, Artificial Sequence
  Description of Artificial Sequence: Synthetic oligonucleotide
  Antisense strand to SEQ ID NO: 2012762
auacaaaccgcgaccucag

SEQ ID NO: 2012764 - RNA, 19 nt, Artificial Sequence
  Description of Artificial Sequence: Synthetic oligonucleotide
  Sense strand starting at position 1456 of SEQ ID NO: 1881033
ugaggucgcgguuuguauu

SEQ ID NO: 2012765 - RNA, 19 nt, Artificial Sequence
  Description of Artificial Sequence: Synthetic oligonucleotide
  Antisense strand to SEQ ID NO: 2012764
aauacaaaccgcgaccuca

SEQ ID NO: 2012766 - RNA, 19 nt, Artificial Sequence
  Description of Artificial Sequence: Synthetic oligonucleotide
  Sense strand starting at position 1683 of SEQ ID NO: 1881033
ggcggagcagauuaaauaa

SEQ ID NO: 2012767 - RNA, 19 nt, Artificial Sequence
  Description of Artificial Sequence: Synthetic oligonucleotide
  Antisense strand to SEQ ID NO: 2012766
uuauuuaaucugcuccgcc

SEQ ID NO: 2012768 - RNA, 19 nt, Artificial Sequence
  Description of Artificial Sequence: Synthetic oligonucleotide
  Sense strand starting at position 1714 of SEQ ID NO: 1881033
ccuuuaauccuugaccgca

SEQ ID NO: 2012769 - RNA, 19 nt, Artificial Sequence
  Description of Artificial Sequence: Synthetic oligonucleotide
  Antisense strand to SEQ ID NO: 2012768
ugcggucaaggauuaaagg

SEQ ID NO: 2012770 - RNA, 19 nt, Artificial Sequence
  Description of Artificial Sequence: Synthetic oligonucleotide
  Sense strand starting at position 1716 of SEQ ID NO: 1881033
uuuaauccuugaccgcaaa

SEQ ID NO: 2012771 - RNA, 19 nt, Artificial Sequence
  Description of Artificial Sequence: Synthetic oligonucleotide
  Antisense strand to SEQ ID NO: 2012770
uuugcggucaaggauuaaa

SEQ ID NO: 2012772 - RNA, 19 nt, Artificial Sequence
  Description of Artificial Sequence: Synthetic oligonucleotide
  Sense strand starting at position 2166 of SEQ ID NO: 1881033
cccggagccgcuuuaaagu

SEQ ID NO: 2012773 - RNA, 19 nt, Artificial Sequence
  Description of Artificial Sequence: Synthetic oligonucleotide
  Antisense strand to SEQ ID NO: 2012772
acuuuaaagcggcuccggg

SEQ ID NO: 2012774 - RNA, 19 nt, Artificial Sequence
  Description of Artificial Sequence: Synthetic oligonucleotide
  Sense strand starting at position 2525 of SEQ ID NO: 1881033
gaucuugauggaugugcau

SEQ ID NO: 2012775 - RNA, 19 nt, Artificial Sequence
  Description of Artificial Sequence: Synthetic oligonucleotide
  Antisense strand to SEQ ID NO: 2012774
augcacauccaucaagauc

SEQ ID NO: 2012776 - RNA, 19 nt, Artificial Sequence
  Description of Artificial Sequence: Synthetic oligonucleotide
  Sense strand starting at position 2767 of SEQ ID NO: 1881033
augugagucugcucaagga

SEQ ID NO: 2012777 - RNA, 19 nt, Artificial Sequence
  Description of Artificial Sequence: Synthetic oligonucleotide
  Antisense strand to SEQ ID NO: 2012776
uccuugagcagacucacau

SEQ ID NO: 2012778 - RNA, 19 nt, Artificial Sequence
  Description of Artificial Sequence: Synthetic oligonucleotide
  Sense strand starting at position 2771 of SEQ ID NO: 1881033
gagucugcucaaggaaaua

SEQ ID NO: 2012779 - RNA, 19 nt, Artificial Sequence
  Description of Artificial Sequence: Synthetic oligonucleotide
  Antisense strand to SEQ ID NO: 2012778
uauuuccuugagcagacuc

SEQ ID NO: 2012780 - RNA, 19 nt, Artificial Sequence
  Description of Artificial Sequence: Synthetic oligonucleotide
  Sense strand starting at position 2830 of SEQ ID NO: 1881033
gggagaauaaugcaugugu

SEQ ID NO: 2012781 - RNA, 19 nt, Artificial Sequence
  Description of Artificial Sequence: Synthetic oligonucleotide
  Antisense strand to SEQ ID NO: 2012780
acacaugcauuauucuccc

SEQ ID NO: 2012782 - RNA, 19 nt, Artificial Sequence
  Description of Artificial Sequence: Synthetic oligonucleotide
  Sense strand starting at position 2832 of SEQ ID NO: 1881033
gagaauaaugcauguguag

SEQ ID NO: 2012783 - RNA, 19 nt, Artificial Sequence
  Description of Artificial Sequence: Synthetic oligonucleotide
  Antisense strand to SEQ ID NO: 2012782
cuacacaugcauuauucuc

SEQ ID NO: 2012784 - RNA, 19 nt, Artificial Sequence
  Description of Artificial Sequence: Synthetic oligonucleotide
  Sense strand starting at position 2973 of SEQ ID NO: 1881033
ggaaacaagugcuuuggga

SEQ ID NO: 2012785 - RNA, 19 nt, Artificial Sequence
  Description of Artificial Sequence: Synthetic oligonucleotide
  Antisense strand to SEQ ID NO: 2012784
ucccaaagcacuuguuucc

SEQ ID NO: 2012786 - RNA, 19 nt, Artificial Sequence
  Description of Artificial Sequence: Synthetic oligonucleotide
  Sense strand starting at position 2975 of SEQ ID NO: 1881033
aaacaagugcuuugggauc

SEQ ID NO: 2012787 - RNA, 19 nt, Artificial Sequence
  Description of Artificial Sequence: Synthetic oligonucleotide
  Antisense strand to SEQ ID NO: 2012786
gaucccaaagcacuuguuu

SEQ ID NO: 2012788 - RNA, 19 nt, Artificial Sequence
  Description of Artificial Sequence: Synthetic oligonucleotide
  Sense strand starting at position 3052 of SEQ ID NO: 1881033
ucucaauugucaguuacau

SEQ ID NO: 2012789 - RNA, 19 nt, Artificial Sequence
  Description of Artificial Sequence: Synthetic oligonucleotide
  Antisense strand to SEQ ID NO: 2012788
auguaacugacaauugaga

SEQ ID NO: 2012790 - RNA, 19 nt, Artificial Sequence
  Description of Artificial Sequence: Synthetic oligonucleotide
  Sense strand starting at position 3087 of SEQ ID NO: 1881033
cguaguuaccuggaaucuu

SEQ ID NO: 2012791 - RNA, 19 nt, Artificial Sequence
  Description of Artificial Sequence: Synthetic oligonucleotide
  Antisense strand to SEQ ID NO: 2012790
aagauuccagguaacuacg

SEQ ID NO: 2012792 - RNA, 19 nt, Artificial Sequence
  Description of Artificial Sequence: Synthetic oligonucleotide
  Sense strand starting at position 3182 of SEQ ID NO: 1881033
gguggaaacuuguaauuug

SEQ ID NO: 2012793 - RNA, 19 nt, Artificial Sequence
  Description of Artificial Sequence: Synthetic oligonucleotide
  Antisense strand to SEQ ID NO: 2012792
caaauuacaaguuuccacc

SEQ ID NO: 2012794 - RNA, 19 nt, Artificial Sequence
  Description of Artificial Sequence: Synthetic oligonucleotide
  Sense strand starting at position 3256 of SEQ ID NO: 1881033
cuaaauauuuaggagcuga

SEQ ID NO: 2012795 - RNA, 19 nt, Artificial Sequence
  Description of Artificial Sequence: Synthetic oligonucleotide
  Antisense strand to SEQ ID NO: 2012794
ucagcuccuaaauauuuag

SEQ ID NO: 2012796 - RNA, 19 nt, Artificial Sequence
  Description of Artificial Sequence: Synthetic oligonucleotide
  Sense strand starting at position 3363 of SEQ ID NO: 1881033
ugcuguagucaauaaugag

SEQ ID NO: 2012797 - RNA, 19 nt, Artificial Sequence
  Description of Artificial Sequence: Synthetic oligonucleotide
  Antisense strand to SEQ ID NO: 2012796
cucauuauugacuacagca

SEQ ID NO: 2012798 - RNA, 19 nt, Artificial Sequence
  Description of Artificial Sequence: Synthetic oligonucleotide
  Sense strand starting at position 3533 of SEQ ID NO: 1881033
cuuggaaguagcugagaau

SEQ ID NO: 2012799 - RNA, 19 nt, Artificial Sequence
  Description of Artificial Sequence: Synthetic oligonucleotide
  Antisense strand to SEQ ID NO: 2012798
auucucagcuacuuccaag

SEQ ID NO: 2012800 - RNA, 19 nt, Artificial Sequence
  Description of Artificial Sequence: Synthetic oligonucleotide
  Sense strand starting at position 3540 of SEQ ID NO: 1881033
guagcugagaauugaagga

SEQ ID NO: 2012801 - RNA, 19 nt, Artificial Sequence
  Description of Artificial Sequence: Synthetic oligonucleotide
  Antisense strand to SEQ ID NO: 2012800
uccuucaauucucagcuac

SEQ ID NO: 2012802 - RNA, 19 nt, Artificial Sequence
  Description of Artificial Sequence: Synthetic oligonucleotide
  Sense strand starting at position 3550 of SEQ ID NO: 1881033
auugaaggagccugaaagu

SEQ ID NO: 2012803 - RNA, 19 nt, Artificial Sequence
  Description of Artificial Sequence: Synthetic oligonucleotide
  Antisense strand to SEQ ID NO: 2012802
acuuucaggcuccuucaau

SEQ ID NO: 2012804 - RNA, 19 nt, Artificial Sequence
  Description of Artificial Sequence: Synthetic oligonucleotide
  Sense strand starting at position 3647 of SEQ ID NO: 1881033
ugauuuaaauucugaagga

SEQ ID NO: 2012805 - RNA, 19 nt, Artificial Sequence
  Description of Artificial Sequence: Synthetic oligonucleotide
  Antisense strand to SEQ ID NO: 2012804
uccuucagaauuuaaauca

SEQ ID NO: 2012806 - RNA, 19 nt, Artificial Sequence
  Description of Artificial Sequence: Synthetic oligonucleotide
  Sense strand starting at position 3689 of SEQ ID NO: 1881033
auguguaagcaguauuaac

SEQ ID NO: 2012807 - RNA, 19 nt, Artificial Sequence
  Description of Artificial Sequence: Synthetic oligonucleotide
  Antisense strand to SEQ ID NO: 2012806
guuaauacugcuuacacau

SEQ ID NO: 2012808 - RNA, 19 nt, Artificial Sequence
  Description of Artificial Sequence: Synthetic oligonucleotide
  Sense strand starting at position 3757 of SEQ ID NO: 1881033
gcuuaaucagaguagguug

SEQ ID NO: 2012809 - RNA, 19 nt, Artificial Sequence
  Description of Artificial Sequence: Synthetic oligonucleotide
  Antisense strand to SEQ ID NO: 2012808
caaccuacucugauuaagc

SEQ ID NO: 2012810 - RNA, 19 nt, Artificial Sequence
  Description of Artificial Sequence: Synthetic oligonucleotide
  Sense strand starting at position 78 of SEQ ID NO: 1881034
agaacuugagccuaaguuu

SEQ ID NO: 2012811 - RNA, 19 nt, Artificial Sequence
  Description of Artificial Sequence: Synthetic oligonucleotide
  Antisense strand to SEQ ID NO: 2012810
aaacuuaggcucaaguucu

SEQ ID NO: 2012812 - RNA, 19 nt, Artificial Sequence
  Description of Artificial Sequence: Synthetic oligonucleotide
  Sense strand starting at position 203 of SEQ ID NO: 1881034
gugaaucuuguuuaaauuc

SEQ ID NO: 2012813 - RNA, 19 nt, Artificial Sequence
  Description of Artificial Sequence: Synthetic oligonucleotide
  Antisense strand to SEQ ID NO: 2012812
gaauuuaaacaagauucac

SEQ ID NO: 2012814 - RNA, 19 nt, Artificial Sequence
  Description of Artificial Sequence: Synthetic oligonucleotide
  Sense strand starting at position 227 of SEQ ID NO: 1881034
aguauaaauugucucuaag

SEQ ID NO: 2012815 - RNA, 19 nt, Artificial Sequence
  Description of Artificial Sequence: Synthetic oligonucleotide
  Antisense strand to SEQ ID NO: 2012814
cuuagagacaauuuauacu

SEQ ID NO: 2012816 - RNA, 19 nt, Artificial Sequence
  Description of Artificial Sequence: Synthetic oligonucleotide
  Sense strand starting at position 314 of SEQ ID NO: 1881034
ccaggauguuuguuggaga

SEQ ID NO: 2012817 - RNA, 19 nt, Artificial Sequence
  Description of Artificial Sequence: Synthetic oligonucleotide
  Antisense strand to SEQ ID NO: 2012816
ucuccaacaaacauccugg

SEQ ID NO: 2012818 - RNA, 19 nt, Artificial Sequence
  Description of Artificial Sequence: Synthetic oligonucleotide
  Sense strand starting at position 322 of SEQ ID NO: 1881034
uuuguuggagagugagaau

SEQ ID NO: 2012819 - RNA, 19 nt, Artificial Sequence
  Description of Artificial Sequence: Synthetic oligonucleotide
  Antisense strand to SEQ ID NO: 2012818
auucucacucuccaacaaa

SEQ ID NO: 2012820 - RNA, 19 nt, Artificial Sequence
  Description of Artificial Sequence: Synthetic oligonucleotide
  Sense strand starting at position 336 of SEQ ID NO: 1881034
agaauuaacugccuuggua

SEQ ID NO: 2012821 - RNA, 19 nt, Artificial Sequence
  Description of Artificial Sequence: Synthetic oligonucleotide
  Antisense strand to SEQ ID NO: 2012820
uaccaaggcaguuaauucu

SEQ ID NO: 2012822 - RNA, 19 nt, Artificial Sequence
  Description of Artificial Sequence: Synthetic oligonucleotide
  Sense strand starting at position 340 of SEQ ID NO: 1881034
uuaacugccuugguaauga

SEQ ID NO: 2012823 - RNA, 19 nt, Artificial Sequence
  Description of Artificial Sequence: Synthetic oligonucleotide
  Antisense strand to SEQ ID NO: 2012822
ucauuaccaaggcaguuaa

SEQ ID NO: 2012824 - RNA, 19 nt, Artificial Sequence
  Description of Artificial Sequence: Synthetic oligonucleotide
  Sense strand starting at position 391 of SEQ ID NO: 1881034
caugcacugggauaaguau

SEQ ID NO: 2012825 - RNA, 19 nt, Artificial Sequence
  Description of Artificial Sequence: Synthetic oligonucleotide
  Antisense strand to SEQ ID NO: 2012824
auacuuaucccagugcaug

SEQ ID NO: 2012826 - RNA, 19 nt, Artificial Sequence
  Description of Artificial Sequence: Synthetic oligonucleotide
  Sense strand starting at position 877 of SEQ ID NO: 1881034
ucaggaguuugaucucauu

SEQ ID NO: 2012827 - RNA, 19 nt, Artificial Sequence
  Description of Artificial Sequence: Synthetic oligonucleotide
  Antisense strand to SEQ ID NO: 2012826
aaugagaucaaacuccuga

SEQ ID NO: 2012828 - RNA, 19 nt, Artificial Sequence
  Description of Artificial Sequence: Synthetic oligonucleotide
  Sense strand starting at position 1025 of SEQ ID NO: 1881034
agaagacuuuaauugcauu

SEQ ID NO: 2012829 - RNA, 19 nt, Artificial Sequence
  Description of Artificial Sequence: Synthetic oligonucleotide
  Antisense strand to SEQ ID NO: 2012828
aaugcaauuaaagucuucu

SEQ ID NO: 2012830 - RNA, 19 nt, Artificial Sequence
  Description of Artificial Sequence: Synthetic oligonucleotide
  Sense strand starting at position 1070 of SEQ ID NO: 1881034
agauuaaccugagaaauaa

SEQ ID NO: 2012831 - RNA, 19 nt, Artificial Sequence
  Description of Artificial Sequence: Synthetic oligonucleotide
  Antisense strand to SEQ ID NO: 2012830
uuauuucucagguuaaucu

SEQ ID NO: 2012832 - RNA, 19 nt, Artificial Sequence
  Description of Artificial Sequence: Synthetic oligonucleotide
  Sense strand starting at position 1134 of SEQ ID NO: 1881034
gcuguaucuguagauaauc

SEQ ID NO: 2012833 - RNA, 19 nt, Artificial Sequence
  Description of Artificial Sequence: Synthetic oligonucleotide
  Antisense strand to SEQ ID NO: 2012832
gauuaucuacagauacagc

SEQ ID NO: 2012834 - RNA, 19 nt, Artificial Sequence
  Description of Artificial Sequence: Synthetic oligonucleotide
  Sense strand starting at position 1162 of SEQ ID NO: 1881034
agcuauccucaggauaggu

SEQ ID NO: 2012835 - RNA, 19 nt, Artificial Sequence
  Description of Artificial Sequence: Synthetic oligonucleotide
  Antisense strand to SEQ ID NO: 2012834
accuauccugaggauagcu

SEQ ID NO: 2012836 - RNA, 19 nt, Artificial Sequence
  Description of Artificial Sequence: Synthetic oligonucleotide
  Sense strand starting at position 1243 of SEQ ID NO: 1881034
cugugugcaccauauauga

SEQ ID NO: 2012837 - RNA, 19 nt, Artificial Sequence
  Description of Artificial Sequence: Synthetic oligonucleotide
  Antisense strand to SEQ ID NO: 2012836
ucauauauggugcacacag

SEQ ID NO: 2012838 - RNA, 19 nt, Artificial Sequence
  Description of Artificial Sequence: Synthetic oligonucleotide
  Sense strand starting at position 1401 of SEQ ID NO: 1881034
gagacuugagccugagucu

SEQ ID NO: 2012839 - RNA, 19 nt, Artificial Sequence
  Description of Artificial Sequence: Synthetic oligonucleotide
  Antisense strand to SEQ ID NO: 2012838
agacucaggcucaagucuc

SEQ ID NO: 2012840 - RNA, 19 nt, Artificial Sequence
  Description of Artificial Sequence: Synthetic oligonucleotide
  Sense strand starting at position 1430 of SEQ ID NO: 1881034
agcuucuuacugcaggaau

SEQ ID NO: 2012841 - RNA, 19 nt, Artificial Sequence
  Description of Artificial Sequence: Synthetic oligonucleotide
  Antisense strand to SEQ ID NO: 2012840
auuccugcaguaagaagcu

SEQ ID NO: 2012842 - RNA, 19 nt, Artificial Sequence
  Description of Artificial Sequence: Synthetic oligonucleotide
  Sense strand starting at position 1432 of SEQ ID NO: 1881034
cuucuuacugcaggaauca

SEQ ID NO: 2012843 - RNA, 19 nt, Artificial Sequence
  Description of Artificial Sequence: Synthetic oligonucleotide
  Antisense strand to SEQ ID NO: 2012842
ugauuccugcaguaagaag

SEQ ID NO: 2012844 - RNA, 19 nt, Artificial Sequence
  Description of Artificial Sequence: Synthetic oligonucleotide
  Sense strand starting at position 1433 of SEQ ID NO: 1881034
uucuuacugcaggaaucau

SEQ ID NO: 2012845 - RNA, 19 nt, Artificial Sequence
  Description of Artificial Sequence: Synthetic oligonucleotide
  Antisense strand to SEQ ID NO: 2012844
augauuccugcaguaagaa

SEQ ID NO: 2012846 - RNA, 19 nt, Artificial Sequence
  Description of Artificial Sequence: Synthetic oligonucleotide
  Sense strand starting at position 1525 of SEQ ID NO: 1881034
gaguacugagcuugaugaa

SEQ ID NO: 2012847 - RNA, 19 nt, Artificial Sequence
  Description of Artificial Sequence: Synthetic oligonucleotide
  Antisense strand to SEQ ID NO: 2012846
uucaucaagcucaguacuc

SEQ ID NO: 2012848 - RNA, 19 nt, Artificial Sequence
  Description of Artificial Sequence: Synthetic oligonucleotide
  Sense strand starting at position 1746 of SEQ ID NO: 1881034
augucucuauguguauuua

SEQ ID NO: 2012849 - RNA, 19 nt, Artificial Sequence
  Description of Artificial Sequence: Synthetic oligonucleotide
  Antisense strand to SEQ ID NO: 2012848
uaaauacacauagagacau

SEQ ID NO: 2012850 - RNA, 19 nt, Artificial Sequence
  Description of Artificial Sequence: Synthetic oligonucleotide
  Sense strand starting at position 2182 of SEQ ID NO: 1881034
ugcaguggucuugagaaug

SEQ ID NO: 2012851 - RNA, 19 nt, Artificial Sequence
  Description of Artificial Sequence: Synthetic oligonucleotide
  Antisense strand to SEQ ID NO: 2012850
cauucucaagaccacugca

SEQ ID NO: 2012852 - RNA, 19 nt, Artificial Sequence
  Description of Artificial Sequence: Synthetic oligonucleotide
  Sense strand starting at position 2212 of SEQ ID NO: 1881034
ucaaguccaugucuuaaau

SEQ ID NO: 2012853 - RNA, 19 nt, Artificial Sequence
  Description of Artificial Sequence: Synthetic oligonucleotide
  Antisense strand to SEQ ID NO: 2012852
auuuaagacauggacuuga

SEQ ID NO: 2012854 - RNA, 19 nt, Artificial Sequence
  Description of Artificial Sequence: Synthetic oligonucleotide
  Sense strand starting at position 2286 of SEQ ID NO: 1881034
uggcuccuccaauagaaua

SEQ ID NO: 2012855 - RNA, 19 nt, Artificial Sequence
  Description of Artificial Sequence: Synthetic oligonucleotide
  Antisense strand to SEQ ID NO: 2012854
uauucuauuggaggagcca

SEQ ID NO: 2012856 - RNA, 19 nt, Artificial Sequence
  Description of Artificial Sequence: Synthetic oligonucleotide
  Sense strand starting at position 2316 of SEQ ID NO: 1881034
gccagaagcucggccauuu

SEQ ID NO: 2012857 - RNA, 19 nt, Artificial Sequence
  Description of Artificial Sequence: Synthetic oligonucleotide
  Antisense strand to SEQ ID NO: 2012856
aaauggccgagcuucuggc

SEQ ID NO: 2012858 - RNA, 19 nt, Artificial Sequence
  Description of Artificial Sequence: Synthetic oligonucleotide
  Sense strand starting at position 2476 of SEQ ID NO: 1881034
cauggaaccuuuguuauag

SEQ ID NO: 2012859 - RNA, 19 nt, Artificial Sequence
  Description of Artificial Sequence: Synthetic oligonucleotide
  Antisense strand to SEQ ID NO: 2012858
cuauaacaaagguuccaug

SEQ ID NO: 2012860 - RNA, 19 nt, Artificial Sequence
  Description of Artificial Sequence: Synthetic oligonucleotide
  Sense strand starting at position 2477 of SEQ ID NO: 1881034
auggaaccuuuguuauagu

SEQ ID NO: 2012861 - RNA, 19 nt, Artificial Sequence
  Description of Artificial Sequence: Synthetic oligonucleotide
  Antisense strand to SEQ ID NO: 2012860
acuauaacaaagguuccau

SEQ ID NO: 2012862 - RNA, 19 nt, Artificial Sequence
  Description of Artificial Sequence: Synthetic oligonucleotide
  Sense strand starting at position 2627 of SEQ ID NO: 1881034
caguauuugugagccucaa

SEQ ID NO: 2012863 - RNA, 19 nt, Artificial Sequence
  Description of Artificial Sequence: Synthetic oligonucleotide
  Antisense strand to SEQ ID NO: 2012862
uugaggcucacaaauacug

SEQ ID NO: 2012864 - RNA, 19 nt, Artificial Sequence
  Description of Artificial Sequence: Synthetic oligonucleotide
  Sense strand starting at position 2681 of SEQ ID NO: 1881034
cugguagauacugguagau

SEQ ID NO: 2012865 - RNA, 19 nt, Artificial Sequence
  Description of Artificial Sequence: Synthetic oligonucleotide
  Antisense strand to SEQ ID NO: 2012864
aucuaccaguaucuaccag

SEQ ID NO: 2012866 - RNA, 19 nt, Artificial Sequence
  Description of Artificial Sequence: Synthetic oligonucleotide
  Sense strand starting at position 2697 of SEQ ID NO: 1881034
gauagaagguucucccuua

SEQ ID NO: 2012867 - RNA, 19 nt, Artificial Sequence
  Description of Artificial Sequence: Synthetic oligonucleotide
  Antisense strand to SEQ ID NO: 2012866
uaagggagaaccuucuauc

SEQ ID NO: 2012868 - RNA, 19 nt, Artificial Sequence
  Description of Artificial Sequence: Synthetic oligonucleotide
  Sense strand starting at position 3002 of SEQ ID NO: 1881034
cuuugugucccucaaagaa

SEQ ID NO: 2012869 - RNA, 19 nt, Artificial Sequence
  Description of Artificial Sequence: Synthetic oligonucleotide
  Antisense strand to SEQ ID NO: 2012868
uucuuugagggacacaaag

SEQ ID NO: 2012870 - RNA, 19 nt, Artificial Sequence
  Description of Artificial Sequence: Synthetic oligonucleotide
  Sense strand starting at position 3034 of SEQ ID NO: 1881034
aguuacucgagugauuacu

SEQ ID NO: 2012871 - RNA, 19 nt, Artificial Sequence
  Description of Artificial Sequence: Synthetic oligonucleotide
  Antisense strand to SEQ ID NO: 2012870
aguaaucacucgaguaacu

SEQ ID NO: 2012872 - RNA, 19 nt, Artificial Sequence
  Description of Artificial Sequence: Synthetic oligonucleotide
  Sense strand starting at position 3036 of SEQ ID NO: 1881034
uuacucgagugauuacuaa

SEQ ID NO: 2012873 - RNA, 19 nt, Artificial Sequence
  Description of Artificial Sequence: Synthetic oligonucleotide
  Antisense strand to SEQ ID NO: 2012872
uuaguaaucacucgaguaa

SEQ ID NO: 2012874 - RNA, 19 nt, Artificial Sequence
  Description of Artificial Sequence: Synthetic oligonucleotide
  Sense strand starting at position 3290 of SEQ ID NO: 1881034
ggaugaccuuguucuccaa

SEQ ID NO: 2012875 - RNA, 19 nt, Artificial Sequence
  Description of Artificial Sequence: Synthetic oligonucleotide
  Antisense strand to SEQ ID NO: 2012874
uuggagaacaaggucaucc

SEQ ID NO: 2012876 - RNA, 19 nt, Artificial Sequence
  Description of Artificial Sequence: Synthetic oligonucleotide
  Sense strand starting at position 3653 of SEQ ID NO: 1881034
ugggucucggcagagacau

SEQ ID NO: 2012877 - RNA, 19 nt, Artificial Sequence
  Description of Artificial Sequence: Synthetic oligonucleotide
  Antisense strand to SEQ ID NO: 2012876
augucucugccgagaccca

SEQ ID NO: 2012878 - RNA, 19 nt, Artificial Sequence
  Description of Artificial Sequence: Synthetic oligonucleotide
  Sense strand starting at position 3733 of SEQ ID NO: 1881034
acaagacuccaguguguag

SEQ ID NO: 2012879 - RNA, 19 nt, Artificial Sequence
  Description of Artificial Sequence: Synthetic oligonucleotide
  Antisense strand to SEQ ID NO: 2012878
cuacacacuggagucuugu

SEQ ID NO: 2012880 - RNA, 19 nt, Artificial Sequence
  Description of Artificial Sequence: Synthetic oligonucleotide
  Sense strand starting at position 3737 of SEQ ID NO: 1881034
gacuccaguguguaguuaa

SEQ ID NO: 2012881 - RNA, 19 nt, Artificial Sequence
  Description of Artificial Sequence: Synthetic oligonucleotide
  Antisense strand to SEQ ID NO: 2012880
uuaacuacacacuggaguc

SEQ ID NO: 2012882 - RNA, 19 nt, Artificial Sequence
  Description of Artificial Sequence: Synthetic oligonucleotide
  Sense strand starting at position 3907 of SEQ ID NO: 1881034
aggucuguaggaugggaau

SEQ ID NO: 2012883 - RNA, 19 nt, Artificial Sequence
  Description of Artificial Sequence: Synthetic oligonucleotide
  Antisense strand to SEQ ID NO: 2012882
auucccauccuacagaccu

SEQ ID NO: 2012884 - RNA, 19 nt, Artificial Sequence
  Description of Artificial Sequence: Synthetic oligonucleotide
  Sense strand starting at position 3920 of SEQ ID NO: 1881034
gggaaucacuuucuccagu

SEQ ID NO: 2012885 - RNA, 19 nt, Artificial Sequence
  Description of Artificial Sequence: Synthetic oligonucleotide
  Antisense strand to SEQ ID NO: 2012884
acuggagaaagugauuccc

SEQ ID NO: 2012886 - RNA, 19 nt, Artificial Sequence
  Description of Artificial Sequence: Synthetic oligonucleotide
  Sense strand starting at position 3921 of SEQ ID NO: 1881034
ggaaucacuuucuccagua

SEQ ID NO: 2012887 - RNA, 19 nt, Artificial Sequence
  Description of Artificial Sequence: Synthetic oligonucleotide
  Antisense strand to SEQ ID NO: 2012886
uacuggagaaagugauucc

SEQ ID NO: 2012888 - RNA, 19 nt, Artificial Sequence
  Description of Artificial Sequence: Synthetic oligonucleotide
  Sense strand starting at position 3978 of SEQ ID NO: 1881034
cuuguuuaaggucagauaa

SEQ ID NO: 2012889 - RNA, 19 nt, Artificial Sequence
  Description of Artificial Sequence: Synthetic oligonucleotide
  Antisense strand to SEQ ID NO: 2012888
uuaucugaccuuaaacaag

SEQ ID NO: 2012890 - RNA, 19 nt, Artificial Sequence
  Description of Artificial Sequence: Synthetic oligonucleotide
  Sense strand starting at position 53 of SEQ ID NO: 1881035
auggcagcaauugaguaaa

SEQ ID NO: 2012891 - RNA, 19 nt, Artificial Sequence
  Description of Artificial Sequence: Synthetic oligonucleotide
  Antisense strand to SEQ ID NO: 2012890
uuuacucaauugcugccau

SEQ ID NO: 2012892 - RNA, 19 nt, Artificial Sequence
  Description of Artificial Sequence: Synthetic oligonucleotide
  Sense strand starting at position 430 of SEQ ID NO: 1881035
agaugcuaccgguaugaga

SEQ ID NO: 2012893 - RNA, 19 nt, Artificial Sequence
  Description of Artificial Sequence: Synthetic oligonucleotide
  Antisense strand to SEQ ID NO: 2012892
ucucauaccgguagcaucu

SEQ ID NO: 2012894 - RNA, 19 nt, Artificial Sequence
  Description of Artificial Sequence: Synthetic oligonucleotide
  Sense strand starting at position 450 of SEQ ID NO: 1881035
gaauauaaacugugguucu

SEQ ID NO: 2012895 - RNA, 19 nt, Artificial Sequence
  Description of Artificial Sequence: Synthetic oligonucleotide
  Antisense strand to SEQ ID NO: 2012894
agaaccacaguuuauauuc

SEQ ID NO: 2012896 - RNA, 19 nt, Artificial Sequence
  Description of Artificial Sequence: Synthetic oligonucleotide
  Sense strand starting at position 481 of SEQ ID NO: 1881035
caauuagaguuaucugagg

SEQ ID NO: 2012897 - RNA, 19 nt, Artificial Sequence
  Description of Artificial Sequence: Synthetic oligonucleotide
  Antisense strand to SEQ ID NO: 2012896
ccucagauaacucuaauug

SEQ ID NO: 2012898 - RNA, 19 nt, Artificial Sequence
  Description of Artificial Sequence: Synthetic oligonucleotide
  Sense strand starting at position 483 of SEQ ID NO: 1881035
auuagaguuaucugaggau

SEQ ID NO: 2012899 - RNA, 19 nt, Artificial Sequence
  Description of Artificial Sequence: Synthetic oligonucleotide
  Antisense strand to SEQ ID NO: 2012898
auccucagauaacucuaau

SEQ ID NO: 2012900 - RNA, 19 nt, Artificial Sequence
  Description of Artificial Sequence: Synthetic oligonucleotide
  Sense strand starting at position 512 of SEQ ID NO: 1881035
uacugaugccaggauucca

SEQ ID NO: 2012901 - RNA, 19 nt, Artificial Sequence
  Description of Artificial Sequence: Synthetic oligonucleotide
  Antisense strand to SEQ ID NO: 2012900
uggaauccuggcaucagua

SEQ ID NO: 2012902 - RNA, 19 nt, Artificial Sequence
  Description of Artificial Sequence: Synthetic oligonucleotide
  Sense strand starting at position 570 of SEQ ID NO: 1881035
ucaggucagcaauaccauu

SEQ ID NO: 2012903 - RNA, 19 nt, Artificial Sequence
  Description of Artificial Sequence: Synthetic oligonucleotide
  Antisense strand to SEQ ID NO: 2012902
aaugguauugcugaccuga

SEQ ID NO: 2012904 - RNA, 19 nt, Artificial Sequence
  Description of Artificial Sequence: Synthetic oligonucleotide
  Sense strand starting at position 688 of SEQ ID NO: 1881035
agagacacuuucuuaguaa

SEQ ID NO: 2012905 - RNA, 19 nt, Artificial Sequence
  Description of Artificial Sequence: Synthetic oligonucleotide
  Antisense strand to SEQ ID NO: 2012904
uuacuaagaaagugucucu

SEQ ID NO: 2012906 - RNA, 19 nt, Artificial Sequence
  Description of Artificial Sequence: Synthetic oligonucleotide
  Sense strand starting at position 696 of SEQ ID NO: 1881035
uuucuuaguaagggugaga

SEQ ID NO: 2012907 - RNA, 19 nt, Artificial Sequence
  Description of Artificial Sequence: Synthetic oligonucleotide
  Antisense strand to SEQ ID NO: 2012906
ucucacccuuacuaagaaa

SEQ ID NO: 2012908 - RNA, 19 nt, Artificial Sequence
  Description of Artificial Sequence: Synthetic oligonucleotide
  Sense strand starting at position 707 of SEQ ID NO: 1881035
gggugagaaugcuuacuga

SEQ ID NO: 2012909 - RNA, 19 nt, Artificial Sequence
  Description of Artificial Sequence: Synthetic oligonucleotide
  Antisense strand to SEQ ID NO: 2012908
ucaguaagcauucucaccc

SEQ ID NO: 2012910 - RNA, 19 nt, Artificial Sequence
  Description of Artificial Sequence: Synthetic oligonucleotide
  Sense strand starting at position 710 of SEQ ID NO: 1881035
ugagaaugcuuacugauug

SEQ ID NO: 2012911 - RNA, 19 nt, Artificial Sequence
  Description of Artificial Sequence: Synthetic oligonucleotide
  Antisense strand to SEQ ID NO: 2012910
caaucaguaagcauucuca

SEQ ID NO: 2012912 - RNA, 19 nt, Artificial Sequence
  Description of Artificial Sequence: Synthetic oligonucleotide
  Sense strand starting at position 715 of SEQ ID NO: 1881035
augcuuacugauugaacaa

SEQ ID NO: 2012913 - RNA, 19 nt, Artificial Sequence
  Description of Artificial Sequence: Synthetic oligonucleotide
  Antisense strand to SEQ ID NO: 2012912
uuguucaaucaguaagcau

SEQ ID NO: 2012914 - RNA, 19 nt, Artificial Sequence
  Description of Artificial Sequence: Synthetic oligonucleotide
  Sense strand starting at position 814 of SEQ ID NO: 1881035
cccugaucucaggauaguu

SEQ ID NO: 2012915 - RNA, 19 nt, Artificial Sequence
  Description of Artificial Sequence: Synthetic oligonucleotide
  Antisense strand to SEQ ID NO: 2012914
aacuauccugagaucaggg

SEQ ID NO: 2012916 - RNA, 19 nt, Artificial Sequence
  Description of Artificial Sequence: Synthetic oligonucleotide
  Sense strand starting at position 864 of SEQ ID NO: 1881035
aaacuaugcgguuacaaua

SEQ ID NO: 2012917 - RNA, 19 nt, Artificial Sequence
  Description of Artificial Sequence: Synthetic oligonucleotide
  Antisense strand to SEQ ID NO: 2012916
uauuguaaccgcauaguuu

SEQ ID NO: 2012918 - RNA, 19 nt, Artificial Sequence
  Description of Artificial Sequence: Synthetic oligonucleotide
  Sense strand starting at position 879 of SEQ ID NO: 1881035
aauauaguguggucaauau

SEQ ID NO: 2012919 - RNA, 19 nt, Artificial Sequence
  Description of Artificial Sequence: Synthetic oligonucleotide
  Antisense strand to SEQ ID NO: 2012918
auauugaccacacuauauu

SEQ ID NO: 2012920 - RNA, 19 nt, Artificial Sequence
  Description of Artificial Sequence: Synthetic oligonucleotide
  Sense strand starting at position 883 of SEQ ID NO: 1881035
uaguguggucaauauggua

SEQ ID NO: 2012921 - RNA, 19 nt, Artificial Sequence
  Description of Artificial Sequence: Synthetic oligonucleotide
  Antisense strand to SEQ ID NO: 2012920
uaccauauugaccacacua

SEQ ID NO: 2012922 - RNA, 19 nt, Artificial Sequence
  Description of Artificial Sequence: Synthetic oligonucleotide
  Sense strand starting at position 1046 of SEQ ID NO: 1881035
auuggagguuucucagagu

SEQ ID NO: 2012923 - RNA, 19 nt, Artificial Sequence
  Description of Artificial Sequence: Synthetic oligonucleotide
  Antisense strand to SEQ ID NO: 2012922
acucugagaaaccuccaau

SEQ ID NO: 2012924 - RNA, 19 nt, Artificial Sequence
  Description of Artificial Sequence: Synthetic oligonucleotide
  Sense strand starting at position 1277 of SEQ ID NO: 1881035
acaugcucaccaggguaau

SEQ ID NO: 2012925 - RNA, 19 nt, Artificial Sequence
  Description of Artificial Sequence: Synthetic oligonucleotide
  Antisense strand to SEQ ID NO: 2012924
auuacccuggugagcaugu

SEQ ID NO: 2012926 - RNA, 19 nt, Artificial Sequence
  Description of Artificial Sequence: Synthetic oligonucleotide
  Sense strand starting at position 1288 of SEQ ID NO: 1881035
aggguaaugaccuggagcu

SEQ ID NO: 2012927 - RNA, 19 nt, Artificial Sequence
  Description of Artificial Sequence: Synthetic oligonucleotide
  Antisense strand to SEQ ID NO: 2012926
agcuccaggucauuacccu

SEQ ID NO: 2012928 - RNA, 19 nt, Artificial Sequence
  Description of Artificial Sequence: Synthetic oligonucleotide
  Sense strand starting at position 1289 of SEQ ID NO: 1881035
ggguaaugaccuggagcuu

SEQ ID NO: 2012929 - RNA, 19 nt, Artificial Sequence
  Description of Artificial Sequence: Synthetic oligonucleotide
  Antisense strand to SEQ ID NO: 2012928
aagcuccaggucauuaccc

SEQ ID NO: 2012930 - RNA, 19 nt, Artificial Sequence
  Description of Artificial Sequence: Synthetic oligonucleotide
  Sense strand starting at position 1290 of SEQ ID NO: 1881035
gguaaugaccuggagcuua

SEQ ID NO: 2012931 - RNA, 19 nt, Artificial Sequence
  Description of Artificial Sequence: Synthetic oligonucleotide
  Antisense strand to SEQ ID NO: 2012930
uaagcuccaggucauuacc

SEQ ID NO: 2012932 - RNA, 19 nt, Artificial Sequence
  Description of Artificial Sequence: Synthetic oligonucleotide
  Sense strand starting at position 1539 of SEQ ID NO: 1881035
ucuuuagugacguaacaga

SEQ ID NO: 2012933 - RNA, 19 nt, Artificial Sequence
  Description of Artificial Sequence: Synthetic oligonucleotide
  Antisense strand to SEQ ID NO: 2012932
ucuguuacgucacuaaaga

SEQ ID NO: 2012934 - RNA, 19 nt, Artificial Sequence
  Description of Artificial Sequence: Synthetic oligonucleotide
  Sense strand starting at position 1603 of SEQ ID NO: 1881035
uuggucagucuugacuaua

SEQ ID NO: 2012935 - RNA, 19 nt, Artificial Sequence
  Description of Artificial Sequence: Synthetic oligonucleotide
  Antisense strand to SEQ ID NO: 2012934
uauagucaagacugaccaa

SEQ ID NO: 2012936 - RNA, 19 nt, Artificial Sequence
  Description of Artificial Sequence: Synthetic oligonucleotide
  Sense strand starting at position 1606 of SEQ ID NO: 1881035
gucagucuugacuauauua

SEQ ID NO: 2012937 - RNA, 19 nt, Artificial Sequence
  Description of Artificial Sequence: Synthetic oligonucleotide
  Antisense strand to SEQ ID NO: 2012936
uaauauagucaagacugac

SEQ ID NO: 2012938 - RNA, 19 nt, Artificial Sequence
  Description of Artificial Sequence: Synthetic oligonucleotide
  Sense strand starting at position 1871 of SEQ ID NO: 1881035
augucucaccuggauuaug

SEQ ID NO: 2012939 - RNA, 19 nt, Artificial Sequence
  Description of Artificial Sequence: Synthetic oligonucleotide
  Antisense strand to SEQ ID NO: 2012938
cauaauccaggugagacau

SEQ ID NO: 2012940 - RNA, 19 nt, Artificial Sequence
  Description of Artificial Sequence: Synthetic oligonucleotide
  Sense strand starting at position 2028 of SEQ ID NO: 1881035
agguccuuccuaugauuga

SEQ ID NO: 2012941 - RNA, 19 nt, Artificial Sequence
  Description of Artificial Sequence: Synthetic oligonucleotide
  Antisense strand to SEQ ID NO: 2012940
ucaaucauaggaaggaccu

SEQ ID NO: 2012942 - RNA, 19 nt, Artificial Sequence
  Description of Artificial Sequence: Synthetic oligonucleotide
  Sense strand starting at position 2336 of SEQ ID NO: 1881035
aucagucaacauuauguau

SEQ ID NO: 2012943 - RNA, 19 nt, Artificial Sequence
  Description of Artificial Sequence: Synthetic oligonucleotide
  Antisense strand to SEQ ID NO: 2012942
auacauaauguugacugau

SEQ ID NO: 2012944 - RNA, 19 nt, Artificial Sequence
  Description of Artificial Sequence: Synthetic oligonucleotide
  Sense strand starting at position 2447 of SEQ ID NO: 1881035
ucuguuucacgaugggaga

SEQ ID NO: 2012945 - RNA, 19 nt, Artificial Sequence
  Description of Artificial Sequence: Synthetic oligonucleotide
  Antisense strand to SEQ ID NO: 2012944
ucucccaucgugaaacaga

SEQ ID NO: 2012946 - RNA, 19 nt, Artificial Sequence
  Description of Artificial Sequence: Synthetic oligonucleotide
  Sense strand starting at position 2448 of SEQ ID NO: 1881035
cuguuucacgaugggagaa

SEQ ID NO: 2012947 - RNA, 19 nt, Artificial Sequence
  Description of Artificial Sequence: Synthetic oligonucleotide
  Antisense strand to SEQ ID NO: 2012946
uucucccaucgugaaacag

SEQ ID NO: 2012948 - RNA, 19 nt, Artificial Sequence
  Description of Artificial Sequence: Synthetic oligonucleotide
  Sense strand starting at position 2571 of SEQ ID NO: 1881035
uuaacuguggcauaauaaa

SEQ ID NO: 2012949 - RNA, 19 nt, Artificial Sequence
  Description of Artificial Sequence: Synthetic oligonucleotide
  Antisense strand to SEQ ID NO: 2012948
uuuauuaugccacaguuaa

SEQ ID NO: 2012950 - RNA, 19 nt, Artificial Sequence
  Description of Artificial Sequence: Synthetic oligonucleotide
  Sense strand starting at position 2838 of SEQ ID NO: 1881035
uuggaugcugcuuaagauc

SEQ ID NO: 2012951 - RNA, 19 nt, Artificial Sequence
  Description of Artificial Sequence: Synthetic oligonucleotide
  Antisense strand to SEQ ID NO: 2012950
gaucuuaagcagcauccaa

SEQ ID NO: 2012952 - RNA, 19 nt, Artificial Sequence
  Description of Artificial Sequence: Synthetic oligonucleotide
  Sense strand starting at position 2847 of SEQ ID NO: 1881035
gcuuaagauccuggaagag

SEQ ID NO: 2012953 - RNA, 19 nt, Artificial Sequence
  Description of Artificial Sequence: Synthetic oligonucleotide
  Antisense strand to SEQ ID NO: 2012952
cucuuccaggaucuuaagc

SEQ ID NO: 2012954 - RNA, 19 nt, Artificial Sequence
  Description of Artificial Sequence: Synthetic oligonucleotide
  Sense strand starting at position 2935 of SEQ ID NO: 1881035
ugauaauugcacuauggug

SEQ ID NO: 2012955 - RNA, 19 nt, Artificial Sequence
  Description of Artificial Sequence: Synthetic oligonucleotide
  Antisense strand to SEQ ID NO: 2012954
caccauagugcaauuauca

SEQ ID NO: 2012956 - RNA, 19 nt, Artificial Sequence
  Description of Artificial Sequence: Synthetic oligonucleotide
  Sense strand starting at position 2941 of SEQ ID NO: 1881035
uugcacuauggugauguaa

SEQ ID NO: 2012957 - RNA, 19 nt, Artificial Sequence
  Description of Artificial Sequence: Synthetic oligonucleotide
  Antisense strand to SEQ ID NO: 2012956
uuacaucaccauagugcaa

SEQ ID NO: 2012958 - RNA, 19 nt, Artificial Sequence
  Description of Artificial Sequence: Synthetic oligonucleotide
  Sense strand starting at position 3042 of SEQ ID NO: 1881035
uugaaugaguacgcaagaa

SEQ ID NO: 2012959 - RNA, 19 nt, Artificial Sequence
  Description of Artificial Sequence: Synthetic oligonucleotide
  Antisense strand to SEQ ID NO: 2012958
uucuugcguacucauucaa

SEQ ID NO: 2012960 - RNA, 19 nt, Artificial Sequence
  Description of Artificial Sequence: Synthetic oligonucleotide
  Sense strand starting at position 3046 of SEQ ID NO: 1881035
augaguacgcaagaaguaa

SEQ ID NO: 2012961 - RNA, 19 nt, Artificial Sequence
  Description of Artificial Sequence: Synthetic oligonucleotide
  Antisense strand to SEQ ID NO: 2012960
uuacuucuugcguacucau

SEQ ID NO: 2012962 - RNA, 19 nt, Artificial Sequence
  Description of Artificial Sequence: Synthetic oligonucleotide
  Sense strand starting at position 3396 of SEQ ID NO: 1881035
aggaaagcauguucucauu

SEQ ID NO: 2012963 - RNA, 19 nt, Artificial Sequence
  Description of Artificial Sequence: Synthetic oligonucleotide
  Antisense strand to SEQ ID NO: 2012962
aaugagaacaugcuuuccu

SEQ ID NO: 2012964 - RNA, 19 nt, Artificial Sequence
  Description of Artificial Sequence: Synthetic oligonucleotide
  Sense strand starting at position 3398 of SEQ ID NO: 1881035
gaaagcauguucucauuag

SEQ ID NO: 2012965 - RNA, 19 nt, Artificial Sequence
  Description of Artificial Sequence: Synthetic oligonucleotide
  Antisense strand to SEQ ID NO: 2012964
cuaaugagaacaugcuuuc

SEQ ID NO: 2012966 - RNA, 19 nt, Artificial Sequence
  Description of Artificial Sequence: Synthetic oligonucleotide
  Sense strand starting at position 3485 of SEQ ID NO: 1881035
uuaguucuucuggagugga

SEQ ID NO: 2012967 - RNA, 19 nt, Artificial Sequence
  Description of Artificial Sequence: Synthetic oligonucleotide
  Antisense strand to SEQ ID NO: 2012966
uccacuccagaagaacuaa

SEQ ID NO: 2012968 - RNA, 19 nt, Artificial Sequence
  Description of Artificial Sequence: Synthetic oligonucleotide
  Sense strand starting at position 3934 of SEQ ID NO: 1881035
ucaacaaggcaauguaauu

SEQ ID NO: 2012969 - RNA, 19 nt, Artificial Sequence
  Description of Artificial Sequence: Synthetic oligonucleotide
  Antisense strand to SEQ ID NO: 2012968
aauuacauugccuuguuga

SEQ ID NO: 2012970 - RNA, 19 nt, Artificial Sequence
  Description of Artificial Sequence: Synthetic oligonucleotide
  Sense strand starting at position 364 of SEQ ID NO: 1881036
cccagaaauuaagccagau

SEQ ID NO: 2012971 - RNA, 19 nt, Artificial Sequence
  Description of Artificial Sequence: Synthetic oligonucleotide
  Antisense strand to SEQ ID NO: 2012970
aucuggcuuaauuucuggg

SEQ ID NO: 2012972 - RNA, 19 nt, Artificial Sequence
  Description of Artificial Sequence: Synthetic oligonucleotide
  Sense strand starting at position 950 of SEQ ID NO: 1881036
agcgauaagcaccauuaau

SEQ ID NO: 2012973 - RNA, 19 nt, Artificial Sequence
  Description of Artificial Sequence: Synthetic oligonucleotide
  Antisense strand to SEQ ID NO: 2012972
auuaauggugcuuaucgcu

SEQ ID NO: 2012974 - RNA, 19 nt, Artificial Sequence
  Description of Artificial Sequence: Synthetic oligonucleotide
  Sense strand starting at position 972 of SEQ ID NO: 1881036
ccugucagucuugauuaau

SEQ ID NO: 2012975 - RNA, 19 nt, Artificial Sequence
  Description of Artificial Sequence: Synthetic oligonucleotide
  Antisense strand to SEQ ID NO: 2012974
auuaaucaagacugacagg

SEQ ID NO: 2012976 - RNA, 19 nt, Artificial Sequence
  Description of Artificial Sequence: Synthetic oligonucleotide
  Sense strand starting at position 975 of SEQ ID NO: 1881036
gucagucuugauuaauucu

SEQ ID NO: 2012977 - RNA, 19 nt, Artificial Sequence
  Description of Artificial Sequence: Synthetic oligonucleotide
  Antisense strand to SEQ ID NO: 2012976
agaauuaaucaagacugac

SEQ ID NO: 2012978 - RNA, 19 nt, Artificial Sequence
  Description of Artificial Sequence: Synthetic oligonucleotide
  Sense strand starting at position 983 of SEQ ID NO: 1881036
ugauuaauucuguguacaa

SEQ ID NO: 2012979 - RNA, 19 nt, Artificial Sequence
  Description of Artificial Sequence: Synthetic oligonucleotide
  Antisense strand to SEQ ID NO: 2012978
uuguacacagaauuaauca

SEQ ID NO: 2012980 - RNA, 19 nt, Artificial Sequence
  Description of Artificial Sequence: Synthetic oligonucleotide
  Sense strand starting at position 985 of SEQ ID NO: 1881036
auuaauucuguguacaaug

SEQ ID NO: 2012981 - RNA, 19 nt, Artificial Sequence
  Description of Artificial Sequence: Synthetic oligonucleotide
  Antisense strand to SEQ ID NO: 2012980
cauuguacacagaauuaau

SEQ ID NO: 2012982 - RNA, 19 nt, Artificial Sequence
  Description of Artificial Sequence: Synthetic oligonucleotide
  Sense strand starting at position 990 of SEQ ID NO: 1881036
uucuguguacaaugaucaa

SEQ ID NO: 2012983 - RNA, 19 nt, Artificial Sequence
  Description of Artificial Sequence: Synthetic oligonucleotide
  Antisense strand to SEQ ID NO: 2012982
uugaucauuguacacagaa

SEQ ID NO: 2012984 - RNA, 19 nt, Artificial Sequence
  Description of Artificial Sequence: Synthetic oligonucleotide
  Sense strand starting at position 1104 of SEQ ID NO: 1881036
ggagcuuguaaggauucca

SEQ ID NO: 2012985 - RNA, 19 nt, Artificial Sequence
  Description of Artificial Sequence: Synthetic oligonucleotide
  Antisense strand to SEQ ID NO: 2012984
uggaauccuuacaagcucc

SEQ ID NO: 2012986 - RNA, 19 nt, Artificial Sequence
  Description of Artificial Sequence: Synthetic oligonucleotide
  Sense strand starting at position 1134 of SEQ ID NO: 1881036
gcauaugaagaaugaauuc

SEQ ID NO: 2012987 - RNA, 19 nt, Artificial Sequence
  Description of Artificial Sequence: Synthetic oligonucleotide
  Antisense strand to SEQ ID NO: 2012986
gaauucauucuucauaugc

SEQ ID NO: 2012988 - RNA, 19 nt, Artificial Sequence
  Description of Artificial Sequence: Synthetic oligonucleotide
  Sense strand starting at position 1198 of SEQ ID NO: 1881036
ggguuauucuauucuauaa

SEQ ID NO: 2012989 - RNA, 19 nt, Artificial Sequence
  Description of Artificial Sequence: Synthetic oligonucleotide
  Antisense strand to SEQ ID NO: 2012988
uuauagaauagaauaaccc

SEQ ID NO: 2012990 - RNA, 19 nt, Artificial Sequence
  Description of Artificial Sequence: Synthetic oligonucleotide
  Sense strand starting at position 1240 of SEQ ID NO: 1881036
cuacuucuucgucacaaug

SEQ ID NO: 2012991 - RNA, 19 nt, Artificial Sequence
  Description of Artificial Sequence: Synthetic oligonucleotide
  Antisense strand to SEQ ID NO: 2012990
cauugugacgaagaaguag

SEQ ID NO: 2012992 - RNA, 19 nt, Artificial Sequence
  Description of Artificial Sequence: Synthetic oligonucleotide
  Sense strand starting at position 1294 of SEQ ID NO: 1881036
gaacaaauguaggccauua

SEQ ID NO: 2012993 - RNA, 19 nt, Artificial Sequence
  Description of Artificial Sequence: Synthetic oligonucleotide
  Antisense strand to SEQ ID NO: 2012992
uaauggccuacauuuguuc

SEQ ID NO: 2012994 - RNA, 19 nt, Artificial Sequence
  Description of Artificial Sequence: Synthetic oligonucleotide
  Sense strand starting at position 1304 of SEQ ID NO: 1881036
aggccauuacuccacugau

SEQ ID NO: 2012995 - RNA, 19 nt, Artificial Sequence
  Description of Artificial Sequence: Synthetic oligonucleotide
  Antisense strand to SEQ ID NO: 2012994
aucaguggaguaauggccu

SEQ ID NO: 2012996 - RNA, 19 nt, Artificial Sequence
  Description of Artificial Sequence: Synthetic oligonucleotide
  Sense strand starting at position 1441 of SEQ ID NO: 1881036
aggacauuguucucaaagg

SEQ ID NO: 2012997 - RNA, 19 nt, Artificial Sequence
  Description of Artificial Sequence: Synthetic oligonucleotide
  Antisense strand to SEQ ID NO: 2012996
ccuuugagaacaauguccu

SEQ ID NO: 2012998 - RNA, 19 nt, Artificial Sequence
  Description of Artificial Sequence: Synthetic oligonucleotide
  Sense strand starting at position 1462 of SEQ ID NO: 1881036
uuuaauaggcccugaaagu

SEQ ID NO: 2012999 - RNA, 19 nt, Artificial Sequence
  Description of Artificial Sequence: Synthetic oligonucleotide
  Antisense strand to SEQ ID NO: 2012998
acuuucagggccuauuaaa

SEQ ID NO: 2013000 - RNA, 19 nt, Artificial Sequence
  Description of Artificial Sequence: Synthetic oligonucleotide
  Sense strand starting at position 1463 of SEQ ID NO: 1881036
uuaauaggcccugaaaguu

SEQ ID NO: 2013001 - RNA, 19 nt, Artificial Sequence
  Description of Artificial Sequence: Synthetic oligonucleotide
  Antisense strand to SEQ ID NO: 2013000
aacuuucagggccuauuaa

SEQ ID NO: 2013002 - RNA, 19 nt, Artificial Sequence
  Description of Artificial Sequence: Synthetic oligonucleotide
  Sense strand starting at position 1473 of SEQ ID NO: 1881036
cugaaaguuugacuuagaa

SEQ ID NO: 2013003 - RNA, 19 nt, Artificial Sequence
  Description of Artificial Sequence: Synthetic oligonucleotide
  Antisense strand to SEQ ID NO: 2013002
uucuaagucaaacuuucag

SEQ ID NO: 2013004 - RNA, 19 nt, Artificial Sequence
  Description of Artificial Sequence: Synthetic oligonucleotide
  Sense strand starting at position 1590 of SEQ ID NO: 1881036
uucucaugauagucugaau

SEQ ID NO: 2013005 - RNA, 19 nt, Artificial Sequence
  Description of Artificial Sequence: Synthetic oligonucleotide
  Antisense strand to SEQ ID NO: 2013004
auucagacuaucaugagaa

SEQ ID NO: 2013006 - RNA, 19 nt, Artificial Sequence
  Description of Artificial Sequence: Synthetic oligonucleotide
  Sense strand starting at position 1634 of SEQ ID NO: 1881036
ugcaaauuaguauacgauu

SEQ ID NO: 2013007 - RNA, 19 nt, Artificial Sequence
  Description of Artificial Sequence: Synthetic oligonucleotide
  Antisense strand to SEQ ID NO: 2013006
aaucguauacuaauuugca

SEQ ID NO: 2013008 - RNA, 19 nt, Artificial Sequence
  Description of Artificial Sequence: Synthetic oligonucleotide
  Sense strand starting at position 1681 of SEQ ID NO: 1881036
uagguaagucgacauuauu

SEQ ID NO: 2013009 - RNA, 19 nt, Artificial Sequence
  Description of Artificial Sequence: Synthetic oligonucleotide
  Antisense strand to SEQ ID NO: 2013008
aauaaugucgacuuaccua

SEQ ID NO: 2013010 - RNA, 19 nt, Artificial Sequence
  Description of Artificial Sequence: Synthetic oligonucleotide
  Sense strand starting at position 1684 of SEQ ID NO: 1881036
guaagucgacauuauuaua

SEQ ID NO: 2013011 - RNA, 19 nt, Artificial Sequence
  Description of Artificial Sequence: Synthetic oligonucleotide
  Antisense strand to SEQ ID NO: 2013010
uauaauaaugucgacuuac

SEQ ID NO: 2013012 - RNA, 19 nt, Artificial Sequence
  Description of Artificial Sequence: Synthetic oligonucleotide
  Sense strand starting at position 1760 of SEQ ID NO: 1881036
gcaguuaguaaacagggau

SEQ ID NO: 2013013 - RNA, 19 nt, Artificial Sequence
  Description of Artificial Sequence: Synthetic oligonucleotide
  Antisense strand to SEQ ID NO: 2013012
aucccuguuuacuaacugc

SEQ ID NO: 2013014 - RNA, 19 nt, Artificial Sequence
  Description of Artificial Sequence: Synthetic oligonucleotide
  Sense strand starting at position 1764 of SEQ ID NO: 1881036
uuaguaaacagggaugcuu

SEQ ID NO: 2013015 - RNA, 19 nt, Artificial Sequence
  Description of Artificial Sequence: Synthetic oligonucleotide
  Antisense strand to SEQ ID NO: 2013014
aagcaucccuguuuacuaa

SEQ ID NO: 2013016 - RNA, 19 nt, Artificial Sequence
  Description of Artificial Sequence: Synthetic oligonucleotide
  Sense strand starting at position 1766 of SEQ ID NO: 1881036
aguaaacagggaugcuuaa

SEQ ID NO: 2013017 - RNA, 19 nt, Artificial Sequence
  Description of Artificial Sequence: Synthetic oligonucleotide
  Antisense strand to SEQ ID NO: 2013016
uuaagcaucccuguuuacu

SEQ ID NO: 2013018 - RNA, 19 nt, Artificial Sequence
  Description of Artificial Sequence: Synthetic oligonucleotide
  Sense strand starting at position 2036 of SEQ ID NO: 1881036
gacacugagucagcaauga

SEQ ID NO: 2013019 - RNA, 19 nt, Artificial Sequence
  Description of Artificial Sequence: Synthetic oligonucleotide
  Antisense strand to SEQ ID NO: 2013018
ucauugcugacucaguguc

SEQ ID NO: 2013020 - RNA, 19 nt, Artificial Sequence
  Description of Artificial Sequence: Synthetic oligonucleotide
  Sense strand starting at position 2040 of SEQ ID NO: 1881036
cugagucagcaaugaauau

SEQ ID NO: 2013021 - RNA, 19 nt, Artificial Sequence
  Description of Artificial Sequence: Synthetic oligonucleotide
  Antisense strand to SEQ ID NO: 2013020
auauucauugcugacucag

SEQ ID NO: 2013022 - RNA, 19 nt, Artificial Sequence
  Description of Artificial Sequence: Synthetic oligonucleotide
  Sense strand starting at position 2058 of SEQ ID NO: 1881036
ugggaauuaucugcacauu

SEQ ID NO: 2013023 - RNA, 19 nt, Artificial Sequence
  Description of Artificial Sequence: Synthetic oligonucleotide
  Antisense strand to SEQ ID NO: 2013022
aaugugcagauaauuccca

SEQ ID NO: 2013024 - RNA, 19 nt, Artificial Sequence
  Description of Artificial Sequence: Synthetic oligonucleotide
  Sense strand starting at position 2462 of SEQ ID NO: 1881036
gugugcuuugaacauagga

SEQ ID NO: 2013025 - RNA, 19 nt, Artificial Sequence
  Description of Artificial Sequence: Synthetic oligonucleotide
  Antisense strand to SEQ ID NO: 2013024
uccuauguucaaagcacac

SEQ ID NO: 2013026 - RNA, 19 nt, Artificial Sequence
  Description of Artificial Sequence: Synthetic oligonucleotide
  Sense strand starting at position 2552 of SEQ ID NO: 1881036
ucuggaagucccugaaaug

SEQ ID NO: 2013027 - RNA, 19 nt, Artificial Sequence
  Description of Artificial Sequence: Synthetic oligonucleotide
  Antisense strand to SEQ ID NO: 2013026
cauuucagggacuuccaga

SEQ ID NO: 2013028 - RNA, 19 nt, Artificial Sequence
  Description of Artificial Sequence: Synthetic oligonucleotide
  Sense strand starting at position 2886 of SEQ ID NO: 1881036
ugugauucucaggauugcu

SEQ ID NO: 2013029 - RNA, 19 nt, Artificial Sequence
  Description of Artificial Sequence: Synthetic oligonucleotide
  Antisense strand to SEQ ID NO: 2013028
agcaauccugagaaucaca

SEQ ID NO: 2013030 - RNA, 19 nt, Artificial Sequence
  Description of Artificial Sequence: Synthetic oligonucleotide
  Sense strand starting at position 2976 of SEQ ID NO: 1881036
gcugguuauuucccacugu

SEQ ID NO: 2013031 - RNA, 19 nt, Artificial Sequence
  Description of Artificial Sequence: Synthetic oligonucleotide
  Antisense strand to SEQ ID NO: 2013030
acagugggaaauaaccagc

SEQ ID NO: 2013032 - RNA, 19 nt, Artificial Sequence
  Description of Artificial Sequence: Synthetic oligonucleotide
  Sense strand starting at position 3456 of SEQ ID NO: 1881036
ccucacagaucugugagaa

SEQ ID NO: 2013033 - RNA, 19 nt, Artificial Sequence
  Description of Artificial Sequence: Synthetic oligonucleotide
  Antisense strand to SEQ ID NO: 2013032
uucucacagaucugugagg

SEQ ID NO: 2013034 - RNA, 19 nt, Artificial Sequence
  Description of Artificial Sequence: Synthetic oligonucleotide
  Sense strand starting at position 3457 of SEQ ID NO: 1881036
cucacagaucugugagaau

SEQ ID NO: 2013035 - RNA, 19 nt, Artificial Sequence
  Description of Artificial Sequence: Synthetic oligonucleotide
  Antisense strand to SEQ ID NO: 2013034
auucucacagaucugugag

SEQ ID NO: 2013036 - RNA, 19 nt, Artificial Sequence
  Description of Artificial Sequence: Synthetic oligonucleotide
  Sense strand starting at position 3608 of SEQ ID NO: 1881036
cauauuaugugguuacaga

SEQ ID NO: 2013037 - RNA, 19 nt, Artificial Sequence
  Description of Artificial Sequence: Synthetic oligonucleotide
  Antisense strand to SEQ ID NO: 2013036
ucuguaaccacauaauaug

SEQ ID NO: 2013038 - RNA, 19 nt, Artificial Sequence
  Description of Artificial Sequence: Synthetic oligonucleotide
  Sense strand starting at position 3609 of SEQ ID NO: 1881036
auauuaugugguuacagau

SEQ ID NO: 2013039 - RNA, 19 nt, Artificial Sequence
  Description of Artificial Sequence: Synthetic oligonucleotide
  Antisense strand to SEQ ID NO: 2013038
aucuguaaccacauaauau

SEQ ID NO: 2013040 - RNA, 19 nt, Artificial Sequence
  Description of Artificial Sequence: Synthetic oligonucleotide
  Sense strand starting at position 3642 of SEQ ID NO: 1881036
aauuauguuggaugcauua

SEQ ID NO: 2013041 - RNA, 19 nt, Artificial Sequence
  Description of Artificial Sequence: Synthetic oligonucleotide
  Antisense strand to SEQ ID NO: 2013040
uaaugcauccaacauaauu

SEQ ID NO: 2013042 - RNA, 19 nt, Artificial Sequence
  Description of Artificial Sequence: Synthetic oligonucleotide
  Sense strand starting at position 3649 of SEQ ID NO: 1881036
uuggaugcauuaguggaaa

SEQ ID NO: 2013043 - RNA, 19 nt, Artificial Sequence
  Description of Artificial Sequence: Synthetic oligonucleotide
  Antisense strand to SEQ ID NO: 2013042
uuuccacuaaugcauccaa

SEQ ID NO: 2013044 - RNA, 19 nt, Artificial Sequence
  Description of Artificial Sequence: Synthetic oligonucleotide
  Sense strand starting at position 3690 of SEQ ID NO: 1881036
aguguaaucaauggaggag

SEQ ID NO: 2013045 - RNA, 19 nt, Artificial Sequence
  Description of Artificial Sequence: Synthetic oligonucleotide
  Antisense strand to SEQ ID NO: 2013044
cuccuccauugauuacacu

SEQ ID NO: 2013046 - RNA, 19 nt, Artificial Sequence
  Description of Artificial Sequence: Synthetic oligonucleotide
  Sense strand starting at position 3691 of SEQ ID NO: 1881036
guguaaucaauggaggagu

SEQ ID NO: 2013047 - RNA, 19 nt, Artificial Sequence
  Description of Artificial Sequence: Synthetic oligonucleotide
  Antisense strand to SEQ ID NO: 2013046
acuccuccauugauuacac

SEQ ID NO: 2013048 - RNA, 19 nt, Artificial Sequence
  Description of Artificial Sequence: Synthetic oligonucleotide
  Sense strand starting at position 3723 of SEQ ID NO: 1881036
gucauuuccuaagcuggua

SEQ ID NO: 2013049 - RNA, 19 nt, Artificial Sequence
  Description of Artificial Sequence: Synthetic oligonucleotide
  Antisense strand to SEQ ID NO: 2013048
uaccagcuuaggaaaugac

SEQ ID NO: 2013050 - RNA, 19 nt, Artificial Sequence
  Description of Artificial Sequence: Synthetic oligonucleotide
  Sense strand starting at position 16 of SEQ ID NO: 1881037
aggaacuuauauuguugau

SEQ ID NO: 2013051 - RNA, 19 nt, Artificial Sequence
  Description of Artificial Sequence: Synthetic oligonucleotide
  Antisense strand to SEQ ID NO: 2013050
aucaacaauauaaguuccu

SEQ ID NO: 2013052 - RNA, 19 nt, Artificial Sequence
  Description of Artificial Sequence: Synthetic oligonucleotide
  Sense strand starting at position 49 of SEQ ID NO: 1881037
guacuuaguggcuggaagu

SEQ ID NO: 2013053 - RNA, 19 nt, Artificial Sequence
  Description of Artificial Sequence: Synthetic oligonucleotide
  Antisense strand to SEQ ID NO: 2013052
acuuccagccacuaaguac

SEQ ID NO: 2013054 - RNA, 19 nt, Artificial Sequence
  Description of Artificial Sequence: Synthetic oligonucleotide
  Sense strand starting at position 80 of SEQ ID NO: 1881037
agcuacuugucacauauau

SEQ ID NO: 2013055 - RNA, 19 nt, Artificial Sequence
  Description of Artificial Sequence: Synthetic oligonucleotide
  Antisense strand to SEQ ID NO: 2013054
auauaugugacaaguagcu

SEQ ID NO: 2013056 - RNA, 19 nt, Artificial Sequence
  Description of Artificial Sequence: Synthetic oligonucleotide
  Sense strand starting at position 190 of SEQ ID NO: 1881037
agaauuggauucuaauucu

SEQ ID NO: 2013057 - RNA, 19 nt, Artificial Sequence
  Description of Artificial Sequence: Synthetic oligonucleotide
  Antisense strand to SEQ ID NO: 2013056
agaauuagaauccaauucu

SEQ ID NO: 2013058 - RNA, 19 nt, Artificial Sequence
  Description of Artificial Sequence: Synthetic oligonucleotide
  Sense strand starting at position 273 of SEQ ID NO: 1881037
uagguagauugcuccaaga

SEQ ID NO: 2013059 - RNA, 19 nt, Artificial Sequence
  Description of Artificial Sequence: Synthetic oligonucleotide
  Antisense strand to SEQ ID NO: 2013058
ucuuggagcaaucuaccua

SEQ ID NO: 2013060 - RNA, 19 nt, Artificial Sequence
  Description of Artificial Sequence: Synthetic oligonucleotide
  Sense strand starting at position 336 of SEQ ID NO: 1881037
agcuauacaugccuugaaa

SEQ ID NO: 2013061 - RNA, 19 nt, Artificial Sequence
  Description of Artificial Sequence: Synthetic oligonucleotide
  Antisense strand to SEQ ID NO: 2013060
uuucaaggcauguauagcu

SEQ ID NO: 2013062 - RNA, 19 nt, Artificial Sequence
  Description of Artificial Sequence: Synthetic oligonucleotide
  Sense strand starting at position 443 of SEQ ID NO: 1881037
aggagaauuucccagcuac

SEQ ID NO: 2013063 - RNA, 19 nt, Artificial Sequence
  Description of Artificial Sequence: Synthetic oligonucleotide
  Antisense strand to SEQ ID NO: 2013062
guagcugggaaauucuccu

SEQ ID NO: 2013064 - RNA, 19 nt, Artificial Sequence
  Description of Artificial Sequence: Synthetic oligonucleotide
  Sense strand starting at position 458 of SEQ ID NO: 1881037
cuaccuaucucauguauga

SEQ ID NO: 2013065 - RNA, 19 nt, Artificial Sequence
  Description of Artificial Sequence: Synthetic oligonucleotide
  Antisense strand to SEQ ID NO: 2013064
ucauacaugagauagguag

SEQ ID NO: 2013066 - RNA, 19 nt, Artificial Sequence
  Description of Artificial Sequence: Synthetic oligonucleotide
  Sense strand starting at position 486 of SEQ ID NO: 1881037
ucagauccacuuugaaaug

SEQ ID NO: 2013067 - RNA, 19 nt, Artificial Sequence
  Description of Artificial Sequence: Synthetic oligonucleotide
  Antisense strand to SEQ ID NO: 2013066
cauuucaaaguggaucuga

SEQ ID NO: 2013068 - RNA, 19 nt, Artificial Sequence
  Description of Artificial Sequence: Synthetic oligonucleotide
  Sense strand starting at position 522 of SEQ ID NO: 1881037
acaggugaguacucaauug

SEQ ID NO: 2013069 - RNA, 19 nt, Artificial Sequence
  Description of Artificial Sequence: Synthetic oligonucleotide
  Antisense strand to SEQ ID NO: 2013068
caauugaguacucaccugu

SEQ ID NO: 2013070 - RNA, 19 nt, Artificial Sequence
  Description of Artificial Sequence: Synthetic oligonucleotide
  Sense strand starting at position 557 of SEQ ID NO: 1881037
cccauuaugcuauguuaca

SEQ ID NO: 2013071 - RNA, 19 nt, Artificial Sequence
  Description of Artificial Sequence: Synthetic oligonucleotide
  Antisense strand to SEQ ID NO: 2013070
uguaacauagcauaauggg

SEQ ID NO: 2013072 - RNA, 19 nt, Artificial Sequence
  Description of Artificial Sequence: Synthetic oligonucleotide
  Sense strand starting at position 558 of SEQ ID NO: 1881037
ccauuaugcuauguuacau

SEQ ID NO: 2013073 - RNA, 19 nt, Artificial Sequence
  Description of Artificial Sequence: Synthetic oligonucleotide
  Antisense strand to SEQ ID NO: 2013072
auguaacauagcauaaugg

SEQ ID NO: 2013074 - RNA, 19 nt, Artificial Sequence
  Description of Artificial Sequence: Synthetic oligonucleotide
  Sense strand starting at position 616 of SEQ ID NO: 1881037
cauguaacuugauggugau

SEQ ID NO: 2013075 - RNA, 19 nt, Artificial Sequence
  Description of Artificial Sequence: Synthetic oligonucleotide
  Antisense strand to SEQ ID NO: 2013074
aucaccaucaaguuacaug

SEQ ID NO: 2013076 - RNA, 19 nt, Artificial Sequence
  Description of Artificial Sequence: Synthetic oligonucleotide
  Sense strand starting at position 726 of SEQ ID NO: 1881037
uugggauccuuaccauaac

SEQ ID NO: 2013077 - RNA, 19 nt, Artificial Sequence
  Description of Artificial Sequence: Synthetic oligonucleotide
  Antisense strand to SEQ ID NO: 2013076
guuaugguaaggaucccaa

SEQ ID NO: 2013078 - RNA, 19 nt, Artificial Sequence
  Description of Artificial Sequence: Synthetic oligonucleotide
  Sense strand starting at position 727 of SEQ ID NO: 1881037
ugggauccuuaccauaaca

SEQ ID NO: 2013079 - RNA, 19 nt, Artificial Sequence
  Description of Artificial Sequence: Synthetic oligonucleotide
  Antisense strand to SEQ ID NO: 2013078
uguuaugguaaggauccca

SEQ ID NO: 2013080 - RNA, 19 nt, Artificial Sequence
  Description of Artificial Sequence: Synthetic oligonucleotide
  Sense strand starting at position 759 of SEQ ID NO: 1881037
ggaacuagcucucaaucaa

SEQ ID NO: 2013081 - RNA, 19 nt, Artificial Sequence
  Description of Artificial Sequence: Synthetic oligonucleotide
  Antisense strand to SEQ ID NO: 2013080
uugauugagagcuaguucc

SEQ ID NO: 2013082 - RNA, 19 nt, Artificial Sequence
  Description of Artificial Sequence: Synthetic oligonucleotide
  Sense strand starting at position 837 of SEQ ID NO: 1881037
gcccaucaccagcaugaua

SEQ ID NO: 2013083 - RNA, 19 nt, Artificial Sequence
  Description of Artificial Sequence: Synthetic oligonucleotide
  Antisense strand to SEQ ID NO: 2013082
uaucaugcuggugaugggc

SEQ ID NO: 2013084 - RNA, 19 nt, Artificial Sequence
  Description of Artificial Sequence: Synthetic oligonucleotide
  Sense strand starting at position 858 of SEQ ID NO: 1881037
gaagguuaagacugaguuu

SEQ ID NO: 2013085 - RNA, 19 nt, Artificial Sequence
  Description of Artificial Sequence: Synthetic oligonucleotide
  Antisense strand to SEQ ID NO: 2013084
aaacucagucuuaaccuuc

SEQ ID NO: 2013086 - RNA, 19 nt, Artificial Sequence
  Description of Artificial Sequence: Synthetic oligonucleotide
  Sense strand starting at position 861 of SEQ ID NO: 1881037
gguuaagacugaguuuauc

SEQ ID NO: 2013087 - RNA, 19 nt, Artificial Sequence
  Description of Artificial Sequence: Synthetic oligonucleotide
  Antisense strand to SEQ ID NO: 2013086
gauaaacucagucuuaacc

SEQ ID NO: 2013088 - RNA, 19 nt, Artificial Sequence
  Description of Artificial Sequence: Synthetic oligonucleotide
  Sense strand starting at position 867 of SEQ ID NO: 1881037
gacugaguuuaucuacuga

SEQ ID NO: 2013089 - RNA, 19 nt, Artificial Sequence
  Description of Artificial Sequence: Synthetic oligonucleotide
  Antisense strand to SEQ ID NO: 2013088
ucaguagauaaacucaguc

SEQ ID NO: 2013090 - RNA, 19 nt, Artificial Sequence
  Description of Artificial Sequence: Synthetic oligonucleotide
  Sense strand starting at position 888 of SEQ ID NO: 1881037
guuugcuuccuuuggcauu

SEQ ID NO: 2013091 - RNA, 19 nt, Artificial Sequence
  Description of Artificial Sequence: Synthetic oligonucleotide
  Antisense strand to SEQ ID NO: 2013090
aaugccaaaggaagcaaac

SEQ ID NO: 2013092 - RNA, 19 nt, Artificial Sequence
  Description of Artificial Sequence: Synthetic oligonucleotide
  Sense strand starting at position 920 of SEQ ID NO: 1881037
gcagaaaugccaugucugu

SEQ ID NO: 2013093 - RNA, 19 nt, Artificial Sequence
  Description of Artificial Sequence: Synthetic oligonucleotide
  Antisense strand to SEQ ID NO: 2013092
acagacauggcauuucugc

SEQ ID NO: 2013094 - RNA, 19 nt, Artificial Sequence
  Description of Artificial Sequence: Synthetic oligonucleotide
  Sense strand starting at position 925 of SEQ ID NO: 1881037
aaugccaugucugugaauu

SEQ ID NO: 2013095 - RNA, 19 nt, Artificial Sequence
  Description of Artificial Sequence: Synthetic oligonucleotide
  Antisense strand to SEQ ID NO: 2013094
aauucacagacauggcauu

SEQ ID NO: 2013096 - RNA, 19 nt, Artificial Sequence
  Description of Artificial Sequence: Synthetic oligonucleotide
  Sense strand starting at position 926 of SEQ ID NO: 1881037
augccaugucugugaauua

SEQ ID NO: 2013097 - RNA, 19 nt, Artificial Sequence
  Description of Artificial Sequence: Synthetic oligonucleotide
  Antisense strand to SEQ ID NO: 2013096
uaauucacagacauggcau

SEQ ID NO: 2013098 - RNA, 19 nt, Artificial Sequence
  Description of Artificial Sequence: Synthetic oligonucleotide
  Sense strand starting at position 933 of SEQ ID NO: 1881037
gucugugaauuauaggaug

SEQ ID NO: 2013099 - RNA, 19 nt, Artificial Sequence
  Description of Artificial Sequence: Synthetic oligonucleotide
  Antisense strand to SEQ ID NO: 2013098
cauccuauaauucacagac

SEQ ID NO: 2013100 - RNA, 19 nt, Artificial Sequence
  Description of Artificial Sequence: Synthetic oligonucleotide
  Sense strand starting at position 936 of SEQ ID NO: 1881037
ugugaauuauaggauggaa

SEQ ID NO: 2013101 - RNA, 19 nt, Artificial Sequence
  Description of Artificial Sequence: Synthetic oligonucleotide
  Antisense strand to SEQ ID NO: 2013100
uuccauccuauaauucaca

SEQ ID NO: 2013102 - RNA, 19 nt, Artificial Sequence
  Description of Artificial Sequence: Synthetic oligonucleotide
  Sense strand starting at position 965 of SEQ ID NO: 1881037
ugaagaaacuagcuucuga

SEQ ID NO: 2013103 - RNA, 19 nt, Artificial Sequence
  Description of Artificial Sequence: Synthetic oligonucleotide
  Antisense strand to SEQ ID NO: 2013102
ucagaagcuaguuucuuca

SEQ ID NO: 2013104 - RNA, 19 nt, Artificial Sequence
  Description of Artificial Sequence: Synthetic oligonucleotide
  Sense strand starting at position 1011 of SEQ ID NO: 1881037
gcuccuuuauuaguaagca

SEQ ID NO: 2013105 - RNA, 19 nt, Artificial Sequence
  Description of Artificial Sequence: Synthetic oligonucleotide
  Antisense strand to SEQ ID NO: 2013104
ugcuuacuaauaaaggagc

SEQ ID NO: 2013106 - RNA, 19 nt, Artificial Sequence
  Description of Artificial Sequence: Synthetic oligonucleotide
  Sense strand starting at position 1015 of SEQ ID NO: 1881037
cuuuauuaguaagcacagu

SEQ ID NO: 2013107 - RNA, 19 nt, Artificial Sequence
  Description of Artificial Sequence: Synthetic oligonucleotide
  Antisense strand to SEQ ID NO: 2013106
acugugcuuacuaauaaag

SEQ ID NO: 2013108 - RNA, 19 nt, Artificial Sequence
  Description of Artificial Sequence: Synthetic oligonucleotide
  Sense strand starting at position 1021 of SEQ ID NO: 1881037
uaguaagcacaguaaaguu

SEQ ID NO: 2013109 - RNA, 19 nt, Artificial Sequence
  Description of Artificial Sequence: Synthetic oligonucleotide
  Antisense strand to SEQ ID NO: 2013108
aacuuuacugugcuuacua

SEQ ID NO: 2013110 - RNA, 19 nt, Artificial Sequence
  Description of Artificial Sequence: Synthetic oligonucleotide
  Sense strand starting at position 1145 of SEQ ID NO: 1881037
gcugcaaugcauuaugauu

SEQ ID NO: 2013111 - RNA, 19 nt, Artificial Sequence
  Description of Artificial Sequence: Synthetic oligonucleotide
  Antisense strand to SEQ ID NO: 2013110
aaucauaaugcauugcagc

SEQ ID NO: 2013112 - RNA, 19 nt, Artificial Sequence
  Description of Artificial Sequence: Synthetic oligonucleotide
  Sense strand starting at position 1294 of SEQ ID NO: 1881037
ccgugauaacugcagccaa

SEQ ID NO: 2013113 - RNA, 19 nt, Artificial Sequence
  Description of Artificial Sequence: Synthetic oligonucleotide
  Antisense strand to SEQ ID NO: 2013112
uuggcugcaguuaucacgg

SEQ ID NO: 2013114 - RNA, 19 nt, Artificial Sequence
  Description of Artificial Sequence: Synthetic oligonucleotide
  Sense strand starting at position 1325 of SEQ ID NO: 1881037
ugcacaaucauccggguuu

SEQ ID NO: 2013115 - RNA, 19 nt, Artificial Sequence
  Description of Artificial Sequence: Synthetic oligonucleotide
  Antisense strand to SEQ ID NO: 2013114
aaacccggaugauugugca

SEQ ID NO: 2013116 - RNA, 19 nt, Artificial Sequence
  Description of Artificial Sequence: Synthetic oligonucleotide
  Sense strand starting at position 1348 of SEQ ID NO: 1881037
gcacuauggugaccaaaua

SEQ ID NO: 2013117 - RNA, 19 nt, Artificial Sequence
  Description of Artificial Sequence: Synthetic oligonucleotide
  Antisense strand to SEQ ID NO: 2013116
uauuuggucaccauagugc

SEQ ID NO: 2013118 - RNA, 19 nt, Artificial Sequence
  Description of Artificial Sequence: Synthetic oligonucleotide
  Sense strand starting at position 1430 of SEQ ID NO: 1881037
guaagacccucguaagcaa

SEQ ID NO: 2013119 - RNA, 19 nt, Artificial Sequence
  Description of Artificial Sequence: Synthetic oligonucleotide
  Antisense strand to SEQ ID NO: 2013118
uugcuuacgagggucuuac

SEQ ID NO: 2013120 - RNA, 19 nt, Artificial Sequence
  Description of Artificial Sequence: Synthetic oligonucleotide
  Sense strand starting at position 1596 of SEQ ID NO: 1881037
gcgugagugaggcagaaua

SEQ ID NO: 2013121 - RNA, 19 nt, Artificial Sequence
  Description of Artificial Sequence: Synthetic oligonucleotide
  Antisense strand to SEQ ID NO: 2013120
uauucugccucacucacgc

SEQ ID NO: 2013122 - RNA, 19 nt, Artificial Sequence
  Description of Artificial Sequence: Synthetic oligonucleotide
  Sense strand starting at position 1598 of SEQ ID NO: 1881037
gugagugaggcagaauaca

SEQ ID NO: 2013123 - RNA, 19 nt, Artificial Sequence
  Description of Artificial Sequence: Synthetic oligonucleotide
  Antisense strand to SEQ ID NO: 2013122
uguauucugccucacucac

SEQ ID NO: 2013124 - RNA, 19 nt, Artificial Sequence
  Description of Artificial Sequence: Synthetic oligonucleotide
  Sense strand starting at position 2796 of SEQ ID NO: 1881037
aagcguaucagcgauggaa

SEQ ID NO: 2013125 - RNA, 19 nt, Artificial Sequence
  Description of Artificial Sequence: Synthetic oligonucleotide
  Antisense strand to SEQ ID NO: 2013124
uuccaucgcugauacgcuu

SEQ ID NO: 2013126 - RNA, 19 nt, Artificial Sequence
  Description of Artificial Sequence: Synthetic oligonucleotide
  Sense strand starting at position 2798 of SEQ ID NO: 1881037
gcguaucagcgauggaaga

SEQ ID NO: 2013127 - RNA, 19 nt, Artificial Sequence
  Description of Artificial Sequence: Synthetic oligonucleotide
  Antisense strand to SEQ ID NO: 2013126
ucuuccaucgcugauacgc

SEQ ID NO: 2013128 - RNA, 19 nt, Artificial Sequence
  Description of Artificial Sequence: Synthetic oligonucleotide
  Sense strand starting at position 2799 of SEQ ID NO: 1881037
cguaucagcgauggaagau

SEQ ID NO: 2013129 - RNA, 19 nt, Artificial Sequence
  Description of Artificial Sequence: Synthetic oligonucleotide
  Antisense strand to SEQ ID NO: 2013128
aucuuccaucgcugauacg

SEQ ID NO: 2013130 - RNA, 19 nt, Artificial Sequence
  Description of Artificial Sequence: Synthetic oligonucleotide
  Sense strand starting at position 406 of SEQ ID NO: 1881038
acaucaucagcaugaaguu

SEQ ID NO: 2013131 - RNA, 19 nt, Artificial Sequence
  Description of Artificial Sequence: Synthetic oligonucleotide
  Antisense strand to SEQ ID NO: 2013130
aacuucaugcugaugaugu

SEQ ID NO: 2013132 - RNA, 19 nt, Artificial Sequence
  Description of Artificial Sequence: Synthetic oligonucleotide
  Sense strand starting at position 534 of SEQ ID NO: 1881038
ucagaccuuuacuuguuau

SEQ ID NO: 2013133 - RNA, 19 nt, Artificial Sequence
  Description of Artificial Sequence: Synthetic oligonucleotide
  Antisense strand to SEQ ID NO: 2013132
auaacaaguaaaggucuga

SEQ ID NO: 2013134 - RNA, 19 nt, Artificial Sequence
  Description of Artificial Sequence: Synthetic oligonucleotide
  Sense strand starting at position 807 of SEQ ID NO: 1881038
gccuaaggcaaaugguaaa

SEQ ID NO: 2013135 - RNA, 19 nt, Artificial Sequence
  Description of Artificial Sequence: Synthetic oligonucleotide
  Antisense strand to SEQ ID NO: 2013134
uuuaccauuugccuuaggc

SEQ ID NO: 2013136 - RNA, 19 nt, Artificial Sequence
  Description of Artificial Sequence: Synthetic oligonucleotide
  Sense strand starting at position 860 of SEQ ID NO: 1881038
agacauuauuguuugauac

SEQ ID NO: 2013137 - RNA, 19 nt, Artificial Sequence
  Description of Artificial Sequence: Synthetic oligonucleotide
  Antisense strand to SEQ ID NO: 2013136
guaucaaacaauaaugucu

SEQ ID NO: 2013138 - RNA, 19 nt, Artificial Sequence
  Description of Artificial Sequence: Synthetic oligonucleotide
  Sense strand starting at position 881 of SEQ ID NO: 1881038
cuggauauaugcucucaau

SEQ ID NO: 2013139 - RNA, 19 nt, Artificial Sequence
  Description of Artificial Sequence: Synthetic oligonucleotide
  Antisense strand to SEQ ID NO: 2013138
auugagagcauauauccag

SEQ ID NO: 2013140 - RNA, 19 nt, Artificial Sequence
  Description of Artificial Sequence: Synthetic oligonucleotide
  Sense strand starting at position 927 of SEQ ID NO: 1881038
cuuucuaaucugggugaua

SEQ ID NO: 2013141 - RNA, 19 nt, Artificial Sequence
  Description of Artificial Sequence: Synthetic oligonucleotide
  Antisense strand to SEQ ID NO: 2013140
uaucacccagauuagaaag

SEQ ID NO: 2013142 - RNA, 19 nt, Artificial Sequence
  Description of Artificial Sequence: Synthetic oligonucleotide
  Sense strand starting at position 928 of SEQ ID NO: 1881038
uuucuaaucugggugauaa

SEQ ID NO: 2013143 - RNA, 19 nt, Artificial Sequence
  Description of Artificial Sequence: Synthetic oligonucleotide
  Antisense strand to SEQ ID NO: 2013142
uuaucacccagauuagaaa

SEQ ID NO: 2013144 - RNA, 19 nt, Artificial Sequence
  Description of Artificial Sequence: Synthetic oligonucleotide
  Sense strand starting at position 929 of SEQ ID NO: 1881038
uucuaaucugggugauaac

SEQ ID NO: 2013145 - RNA, 19 nt, Artificial Sequence
  Description of Artificial Sequence: Synthetic oligonucleotide
  Antisense strand to SEQ ID NO: 2013144
guuaucacccagauuagaa

SEQ ID NO: 2013146 - RNA, 19 nt, Artificial Sequence
  Description of Artificial Sequence: Synthetic oligonucleotide
  Sense strand starting at position 996 of SEQ ID NO: 1881038
aguagaucaccuggugauu

SEQ ID NO: 2013147 - RNA, 19 nt, Artificial Sequence
  Description of Artificial Sequence: Synthetic oligonucleotide
  Antisense strand to SEQ ID NO: 2013146
aaucaccaggugaucuacu

SEQ ID NO: 2013148 - RNA, 19 nt, Artificial Sequence
  Description of Artificial Sequence: Synthetic oligonucleotide
  Sense strand starting at position 1002 of SEQ ID NO: 1881038
ucaccuggugauuggcaua

SEQ ID NO: 2013149 - RNA, 19 nt, Artificial Sequence
  Description of Artificial Sequence: Synthetic oligonucleotide
  Antisense strand to SEQ ID NO: 2013148
uaugccaaucaccagguga

SEQ ID NO: 2013150 - RNA, 19 nt, Artificial Sequence
  Description of Artificial Sequence: Synthetic oligonucleotide
  Sense strand starting at position 1187 of SEQ ID NO: 1881038
cucugcuuucuggauugaa

SEQ ID NO: 2013151 - RNA, 19 nt, Artificial Sequence
  Description of Artificial Sequence: Synthetic oligonucleotide
  Antisense strand to SEQ ID NO: 2013150
uucaauccagaaagcagag

SEQ ID NO: 2013152 - RNA, 19 nt, Artificial Sequence
  Description of Artificial Sequence: Synthetic oligonucleotide
  Sense strand starting at position 1282 of SEQ ID NO: 1881038
ugacuuggauguucugaca

SEQ ID NO: 2013153 - RNA, 19 nt, Artificial Sequence
  Description of Artificial Sequence: Synthetic oligonucleotide
  Antisense strand to SEQ ID NO: 2013152
ugucagaacauccaaguca

SEQ ID NO: 2013154 - RNA, 19 nt, Artificial Sequence
  Description of Artificial Sequence: Synthetic oligonucleotide
  Sense strand starting at position 1338 of SEQ ID NO: 1881038
acuaauguccugugaggga

SEQ ID NO: 2013155 - RNA, 19 nt, Artificial Sequence
  Description of Artificial Sequence: Synthetic oligonucleotide
  Antisense strand to SEQ ID NO: 2013154
ucccucacaggacauuagu

SEQ ID NO: 2013156 - RNA, 19 nt, Artificial Sequence
  Description of Artificial Sequence: Synthetic oligonucleotide
  Sense strand starting at position 1494 of SEQ ID NO: 1881038
ugaugauugaacugugaca

SEQ ID NO: 2013157 - RNA, 19 nt, Artificial Sequence
  Description of Artificial Sequence: Synthetic oligonucleotide
  Antisense strand to SEQ ID NO: 2013156
ugucacaguucaaucauca

SEQ ID NO: 2013158 - RNA, 19 nt, Artificial Sequence
  Description of Artificial Sequence: Synthetic oligonucleotide
  Sense strand starting at position 1496 of SEQ ID NO: 1881038
augauugaacugugacauc

SEQ ID NO: 2013159 - RNA, 19 nt, Artificial Sequence
  Description of Artificial Sequence: Synthetic oligonucleotide
  Antisense strand to SEQ ID NO: 2013158
gaugucacaguucaaucau

SEQ ID NO: 2013160 - RNA, 19 nt, Artificial Sequence
  Description of Artificial Sequence: Synthetic oligonucleotide
  Sense strand starting at position 1702 of SEQ ID NO: 1881038
gacuuucugucaguagacu

SEQ ID NO: 2013161 - RNA, 19 nt, Artificial Sequence
  Description of Artificial Sequence: Synthetic oligonucleotide
  Antisense strand to SEQ ID NO: 2013160
agucuacugacagaaaguc

SEQ ID NO: 2013162 - RNA, 19 nt, Artificial Sequence
  Description of Artificial Sequence: Synthetic oligonucleotide
  Sense strand starting at position 1703 of SEQ ID NO: 1881038
acuuucugucaguagacuu

SEQ ID NO: 2013163 - RNA, 19 nt, Artificial Sequence
  Description of Artificial Sequence: Synthetic oligonucleotide
  Antisense strand to SEQ ID NO: 2013162
aagucuacugacagaaagu

SEQ ID NO: 2013164 - RNA, 19 nt, Artificial Sequence
  Description of Artificial Sequence: Synthetic oligonucleotide
  Sense strand starting at position 1748 of SEQ ID NO: 1881038
uuaaaucuguguucugaua

SEQ ID NO: 2013165 - RNA, 19 nt, Artificial Sequence
  Description of Artificial Sequence: Synthetic oligonucleotide
  Antisense strand to SEQ ID NO: 2013164
uaucagaacacagauuuaa

SEQ ID NO: 2013166 - RNA, 19 nt, Artificial Sequence
  Description of Artificial Sequence: Synthetic oligonucleotide
  Sense strand starting at position 1993 of SEQ ID NO: 1881038
ccaggaacuucugucuuga

SEQ ID NO: 2013167 - RNA, 19 nt, Artificial Sequence
  Description of Artificial Sequence: Synthetic oligonucleotide
  Antisense strand to SEQ ID NO: 2013166
ucaagacagaaguuccugg

SEQ ID NO: 2013168 - RNA, 19 nt, Artificial Sequence
  Description of Artificial Sequence: Synthetic oligonucleotide
  Sense strand starting at position 1995 of SEQ ID NO: 1881038
aggaacuucugucuugauu

SEQ ID NO: 2013169 - RNA, 19 nt, Artificial Sequence
  Description of Artificial Sequence: Synthetic oligonucleotide
  Antisense strand to SEQ ID NO: 2013168
aaucaagacagaaguuccu

SEQ ID NO: 2013170 - RNA, 19 nt, Artificial Sequence
  Description of Artificial Sequence: Synthetic oligonucleotide
  Sense strand starting at position 2011 of SEQ ID NO: 1881038
auugguuucucaucccuua

SEQ ID NO: 2013171 - RNA, 19 nt, Artificial Sequence
  Description of Artificial Sequence: Synthetic oligonucleotide
  Antisense strand to SEQ ID NO: 2013170
uaagggaugagaaaccaau

SEQ ID NO: 2013172 - RNA, 19 nt, Artificial Sequence
  Description of Artificial Sequence: Synthetic oligonucleotide
  Sense strand starting at position 2121 of SEQ ID NO: 1881038
ggugaauucuuucucuaaa

SEQ ID NO: 2013173 - RNA, 19 nt, Artificial Sequence
  Description of Artificial Sequence: Synthetic oligonucleotide
  Antisense strand to SEQ ID NO: 2013172
uuuagagaaagaauucacc

SEQ ID NO: 2013174 - RNA, 19 nt, Artificial Sequence
  Description of Artificial Sequence: Synthetic oligonucleotide
  Sense strand starting at position 2182 of SEQ ID NO: 1881038
auacaucugucaucaugau

SEQ ID NO: 2013175 - RNA, 19 nt, Artificial Sequence
  Description of Artificial Sequence: Synthetic oligonucleotide
  Antisense strand to SEQ ID NO: 2013174
aucaugaugacagauguau

SEQ ID NO: 2013176 - RNA, 19 nt, Artificial Sequence
  Description of Artificial Sequence: Synthetic oligonucleotide
  Sense strand starting at position 2196 of SEQ ID NO: 1881038
augauaaacugugucauca

SEQ ID NO: 2013177 - RNA, 19 nt, Artificial Sequence
  Description of Artificial Sequence: Synthetic oligonucleotide
  Antisense strand to SEQ ID NO: 2013176
ugaugacacaguuuaucau

SEQ ID NO: 2013178 - RNA, 19 nt, Artificial Sequence
  Description of Artificial Sequence: Synthetic oligonucleotide
  Sense strand starting at position 2438 of SEQ ID NO: 1881038
gaaccuguuccucauaggu

SEQ ID NO: 2013179 - RNA, 19 nt, Artificial Sequence
  Description of Artificial Sequence: Synthetic oligonucleotide
  Antisense strand to SEQ ID NO: 2013178
accuaugaggaacagguuc

SEQ ID NO: 2013180 - RNA, 19 nt, Artificial Sequence
  Description of Artificial Sequence: Synthetic oligonucleotide
  Sense strand starting at position 2462 of SEQ ID NO: 1881038
cugcuaagguuccuaggaa

SEQ ID NO: 2013181 - RNA, 19 nt, Artificial Sequence
  Description of Artificial Sequence: Synthetic oligonucleotide
  Antisense strand to SEQ ID NO: 2013180
uuccuaggaaccuuagcag

SEQ ID NO: 2013182 - RNA, 19 nt, Artificial Sequence
  Description of Artificial Sequence: Synthetic oligonucleotide
  Sense strand starting at position 2500 of SEQ ID NO: 1881038
gauuucugguccucgguau

SEQ ID NO: 2013183 - RNA, 19 nt, Artificial Sequence
  Description of Artificial Sequence: Synthetic oligonucleotide
  Antisense strand to SEQ ID NO: 2013182
auaccgaggaccagaaauc

SEQ ID NO: 2013184 - RNA, 19 nt, Artificial Sequence
  Description of Artificial Sequence: Synthetic oligonucleotide
  Sense strand starting at position 2501 of SEQ ID NO: 1881038
auuucugguccucgguauu

SEQ ID NO: 2013185 - RNA, 19 nt, Artificial Sequence
  Description of Artificial Sequence: Synthetic oligonucleotide
  Antisense strand to SEQ ID NO: 2013184
aauaccgaggaccagaaau

SEQ ID NO: 2013186 - RNA, 19 nt, Artificial Sequence
  Description of Artificial Sequence: Synthetic oligonucleotide
  Sense strand starting at position 2586 of SEQ ID NO: 1881038
cucaguauugugcaagauu

SEQ ID NO: 2013187 - RNA, 19 nt, Artificial Sequence
  Description of Artificial Sequence: Synthetic oligonucleotide
  Antisense strand to SEQ ID NO: 2013186
aaucuugcacaauacugag

SEQ ID NO: 2013188 - RNA, 19 nt, Artificial Sequence
  Description of Artificial Sequence: Synthetic oligonucleotide
  Sense strand starting at position 2787 of SEQ ID NO: 1881038
aggauuauuccauguuucu

SEQ ID NO: 2013189 - RNA, 19 nt, Artificial Sequence
  Description of Artificial Sequence: Synthetic oligonucleotide
  Antisense strand to SEQ ID NO: 2013188
agaaacauggaauaauccu

SEQ ID NO: 2013190 - RNA, 19 nt, Artificial Sequence
  Description of Artificial Sequence: Synthetic oligonucleotide
  Sense strand starting at position 2805 of SEQ ID NO: 1881038
ucgagcauuuccucuguuu

SEQ ID NO: 2013191 - RNA, 19 nt, Artificial Sequence
  Description of Artificial Sequence: Synthetic oligonucleotide
  Antisense strand to SEQ ID NO: 2013190
aaacagaggaaaugcucga

SEQ ID NO: 2013192 - RNA, 19 nt, Artificial Sequence
  Description of Artificial Sequence: Synthetic oligonucleotide
  Sense strand starting at position 2910 of SEQ ID NO: 1881038
ucguacugccgccuauauu

SEQ ID NO: 2013193 - RNA, 19 nt, Artificial Sequence
  Description of Artificial Sequence: Synthetic oligonucleotide
  Antisense strand to SEQ ID NO: 2013192
aauauaggcggcaguacga

SEQ ID NO: 2013194 - RNA, 19 nt, Artificial Sequence
  Description of Artificial Sequence: Synthetic oligonucleotide
  Sense strand starting at position 2968 of SEQ ID NO: 1881038
gggugucaacuugguaaau

SEQ ID NO: 2013195 - RNA, 19 nt, Artificial Sequence
  Description of Artificial Sequence: Synthetic oligonucleotide
  Antisense strand to SEQ ID NO: 2013194
auuuaccaaguugacaccc

SEQ ID NO: 2013196 - RNA, 19 nt, Artificial Sequence
  Description of Artificial Sequence: Synthetic oligonucleotide
  Sense strand starting at position 2969 of SEQ ID NO: 1881038
ggugucaacuugguaaaug

SEQ ID NO: 2013197 - RNA, 19 nt, Artificial Sequence
  Description of Artificial Sequence: Synthetic oligonucleotide
  Antisense strand to SEQ ID NO: 2013196
cauuuaccaaguugacacc

SEQ ID NO: 2013198 - RNA, 19 nt, Artificial Sequence
  Description of Artificial Sequence: Synthetic oligonucleotide
  Sense strand starting at position 3004 of SEQ ID NO: 1881038
ugucuaacugagcauugga

SEQ ID NO: 2013199 - RNA, 19 nt, Artificial Sequence
  Description of Artificial Sequence: Synthetic oligonucleotide
  Antisense strand to SEQ ID NO: 2013198
uccaaugcucaguuagaca

SEQ ID NO: 2013200 - RNA, 19 nt, Artificial Sequence
  Description of Artificial Sequence: Synthetic oligonucleotide
  Sense strand starting at position 3098 of SEQ ID NO: 1881038
gauggauauagaggugucu

SEQ ID NO: 2013201 - RNA, 19 nt, Artificial Sequence
  Description of Artificial Sequence: Synthetic oligonucleotide
  Antisense strand to SEQ ID NO: 2013200
agacaccucuauauccauc

SEQ ID NO: 2013202 - RNA, 19 nt, Artificial Sequence
  Description of Artificial Sequence: Synthetic oligonucleotide
  Sense strand starting at position 3718 of SEQ ID NO: 1881038
gugugaaagcaauaugaau

SEQ ID NO: 2013203 - RNA, 19 nt, Artificial Sequence
  Description of Artificial Sequence: Synthetic oligonucleotide
  Antisense strand to SEQ ID NO: 2013202
auucauauugcuuucacac

SEQ ID NO: 2013204 - RNA, 19 nt, Artificial Sequence
  Description of Artificial Sequence: Synthetic oligonucleotide
  Sense strand starting at position 3769 of SEQ ID NO: 1881038
gcauuauuuccugggcuag

SEQ ID NO: 2013205 - RNA, 19 nt, Artificial Sequence
  Description of Artificial Sequence: Synthetic oligonucleotide
  Antisense strand to SEQ ID NO: 2013204
cuagcccaggaaauaaugc

SEQ ID NO: 2013206 - RNA, 19 nt, Artificial Sequence
  Description of Artificial Sequence: Synthetic oligonucleotide
  Sense strand starting at position 3797 of SEQ ID NO: 1881038
guacccuacucucuugaga

SEQ ID NO: 2013207 - RNA, 19 nt, Artificial Sequence
  Description of Artificial Sequence: Synthetic oligonucleotide
  Antisense strand to SEQ ID NO: 2013206
ucucaagagaguaggguac

SEQ ID NO: 2013208 - RNA, 19 nt, Artificial Sequence
  Description of Artificial Sequence: Synthetic oligonucleotide
  Sense strand starting at position 3934 of SEQ ID NO: 1881038
auguaaucccacuguaaau

SEQ ID NO: 2013209 - RNA, 19 nt, Artificial Sequence
  Description of Artificial Sequence: Synthetic oligonucleotide
  Antisense strand to SEQ ID NO: 2013208
auuuacagugggauuacau

SEQ ID NO: 2013210 - RNA, 19 nt, Artificial Sequence
  Description of Artificial Sequence: Synthetic oligonucleotide
  Sense strand starting at position 504 of SEQ ID NO: 1881039
cugcuuuaggauuaagcau

SEQ ID NO: 2013211 - RNA, 19 nt, Artificial Sequence
  Description of Artificial Sequence: Synthetic oligonucleotide
  Antisense strand to SEQ ID NO: 2013210
augcuuaauccuaaagcag

SEQ ID NO: 2013212 - RNA, 19 nt, Artificial Sequence
  Description of Artificial Sequence: Synthetic oligonucleotide
  Sense strand starting at position 523 of SEQ ID NO: 1881039
ucauucuugcauggauaca

SEQ ID NO: 2013213 - RNA, 19 nt, Artificial Sequence
  Description of Artificial Sequence: Synthetic oligonucleotide
  Antisense strand to SEQ ID NO: 2013212
uguauccaugcaagaauga

SEQ ID NO: 2013214 - RNA, 19 nt, Artificial Sequence
  Description of Artificial Sequence: Synthetic oligonucleotide
  Sense strand starting at position 565 of SEQ ID NO: 1881039
gugcaauuacaauguauuu

SEQ ID NO: 2013215 - RNA, 19 nt, Artificial Sequence
  Description of Artificial Sequence: Synthetic oligonucleotide
  Antisense strand to SEQ ID NO: 2013214
aaauacauuguaauugcac

SEQ ID NO: 2013216 - RNA, 19 nt, Artificial Sequence
  Description of Artificial Sequence: Synthetic oligonucleotide
  Sense strand starting at position 800 of SEQ ID NO: 1881039
cauguaacucaccguaaga

SEQ ID NO: 2013217 - RNA, 19 nt, Artificial Sequence
  Description of Artificial Sequence: Synthetic oligonucleotide
  Antisense strand to SEQ ID NO: 2013216
ucuuacggugaguuacaug

SEQ ID NO: 2013218 - RNA, 19 nt, Artificial Sequence
  Description of Artificial Sequence: Synthetic oligonucleotide
  Sense strand starting at position 802 of SEQ ID NO: 1881039
uguaacucaccguaagauu

SEQ ID NO: 2013219 - RNA, 19 nt, Artificial Sequence
  Description of Artificial Sequence: Synthetic oligonucleotide
  Antisense strand to SEQ ID NO: 2013218
aaucuuacggugaguuaca

SEQ ID NO: 2013220 - RNA, 19 nt, Artificial Sequence
  Description of Artificial Sequence: Synthetic oligonucleotide
  Sense strand starting at position 824 of SEQ ID NO: 1881039
ucaagaaaucuguacguug

SEQ ID NO: 2013221 - RNA, 19 nt, Artificial Sequence
  Description of Artificial Sequence: Synthetic oligonucleotide
  Antisense strand to SEQ ID NO: 2013220
caacguacagauuucuuga

SEQ ID NO: 2013222 - RNA, 19 nt, Artificial Sequence
  Description of Artificial Sequence: Synthetic oligonucleotide
  Sense strand starting at position 839 of SEQ ID NO: 1881039
guuguuuauagguaaggaa

SEQ ID NO: 2013223 - RNA, 19 nt, Artificial Sequence
  Description of Artificial Sequence: Synthetic oligonucleotide
  Antisense strand to SEQ ID NO: 2013222
uuccuuaccuauaaacaac

SEQ ID NO: 2013224 - RNA, 19 nt, Artificial Sequence
  Description of Artificial Sequence: Synthetic oligonucleotide
  Sense strand starting at position 917 of SEQ ID NO: 1881039
cuguaucuacuugauggua

SEQ ID NO: 2013225 - RNA, 19 nt, Artificial Sequence
  Description of Artificial Sequence: Synthetic oligonucleotide
  Antisense strand to SEQ ID NO: 2013224
uaccaucaaguagauacag

SEQ ID NO: 2013226 - RNA, 19 nt, Artificial Sequence
  Description of Artificial Sequence: Synthetic oligonucleotide
  Sense strand starting at position 955 of SEQ ID NO: 1881039
aguugaaauucugcacuuu

SEQ ID NO: 2013227 - RNA, 19 nt, Artificial Sequence
  Description of Artificial Sequence: Synthetic oligonucleotide
  Antisense strand to SEQ ID NO: 2013226
aaagugcagaauuucaacu

SEQ ID NO: 2013228 - RNA, 19 nt, Artificial Sequence
  Description of Artificial Sequence: Synthetic oligonucleotide
  Sense strand starting at position 956 of SEQ ID NO: 1881039
guugaaauucugcacuuug

SEQ ID NO: 2013229 - RNA, 19 nt, Artificial Sequence
  Description of Artificial Sequence: Synthetic oligonucleotide
  Antisense strand to SEQ ID NO: 2013228
caaagugcagaauuucaac

SEQ ID NO: 2013230 - RNA, 19 nt, Artificial Sequence
  Description of Artificial Sequence: Synthetic oligonucleotide
  Sense strand starting at position 1229 of SEQ ID NO: 1881039
agccuaacacuucgacaga

SEQ ID NO: 2013231 - RNA, 19 nt, Artificial Sequence
  Description of Artificial Sequence: Synthetic oligonucleotide
  Antisense strand to SEQ ID NO: 2013230
ucugucgaaguguuaggcu

SEQ ID NO: 2013232 - RNA, 19 nt, Artificial Sequence
  Description of Artificial Sequence: Synthetic oligonucleotide
  Sense strand starting at position 1269 of SEQ ID NO: 1881039
gccacaugagucugacgaa

SEQ ID NO: 2013233 - RNA, 19 nt, Artificial Sequence
  Description of Artificial Sequence: Synthetic oligonucleotide
  Antisense strand to SEQ ID NO: 2013232
uucgucagacucauguggc

SEQ ID NO: 2013234 - RNA, 19 nt, Artificial Sequence
  Description of Artificial Sequence: Synthetic oligonucleotide
  Sense strand starting at position 2125 of SEQ ID NO: 1881039
cgugguagccaauaagaag

SEQ ID NO: 2013235 - RNA, 19 nt, Artificial Sequence
  Description of Artificial Sequence: Synthetic oligonucleotide
  Antisense strand to SEQ ID NO: 2013234
cuucuuauuggcuaccacg

SEQ ID NO: 2013236 - RNA, 19 nt, Artificial Sequence
  Description of Artificial Sequence: Synthetic oligonucleotide
  Sense strand starting at position 2251 of SEQ ID NO: 1881039
gcaaguuggguugaagaaa

SEQ ID NO: 2013237 - RNA, 19 nt, Artificial Sequence
  Description of Artificial Sequence: Synthetic oligonucleotide
  Antisense strand to SEQ ID NO: 2013236
uuucuucaacccaacuugc

SEQ ID NO: 2013238 - RNA, 19 nt, Artificial Sequence
  Description of Artificial Sequence: Synthetic oligonucleotide
  Sense strand starting at position 2429 of SEQ ID NO: 1881039
ucgucuuucgguaggaguu

SEQ ID NO: 2013239 - RNA, 19 nt, Artificial Sequence
  Description of Artificial Sequence: Synthetic oligonucleotide
  Antisense strand to SEQ ID NO: 2013238
aacuccuaccgaaagacga

SEQ ID NO: 2013240 - RNA, 19 nt, Artificial Sequence
  Description of Artificial Sequence: Synthetic oligonucleotide
  Sense strand starting at position 2439 of SEQ ID NO: 1881039
guaggaguuuggaagugga

SEQ ID NO: 2013241 - RNA, 19 nt, Artificial Sequence
  Description of Artificial Sequence: Synthetic oligonucleotide
  Antisense strand to SEQ ID NO: 2013240
uccacuuccaaacuccuac

SEQ ID NO: 2013242 - RNA, 19 nt, Artificial Sequence
  Description of Artificial Sequence: Synthetic oligonucleotide
  Sense strand starting at position 2484 of SEQ ID NO: 1881039
agucuuucggaauaguuag

SEQ ID NO: 2013243 - RNA, 19 nt, Artificial Sequence
  Description of Artificial Sequence: Synthetic oligonucleotide
  Antisense strand to SEQ ID NO: 2013242
cuaacuauuccgaaagacu

SEQ ID NO: 2013244 - RNA, 19 nt, Artificial Sequence
  Description of Artificial Sequence: Synthetic oligonucleotide
  Sense strand starting at position 2535 of SEQ ID NO: 1881039
agauacgucuuaguaaaug

SEQ ID NO: 2013245 - RNA, 19 nt, Artificial Sequence
  Description of Artificial Sequence: Synthetic oligonucleotide
  Antisense strand to SEQ ID NO: 2013244
cauuuacuaagacguaucu

SEQ ID NO: 2013246 - RNA, 19 nt, Artificial Sequence
  Description of Artificial Sequence: Synthetic oligonucleotide
  Sense strand starting at position 2576 of SEQ ID NO: 1881039
uuccgacuucucgauaacu

SEQ ID NO: 2013247 - RNA, 19 nt, Artificial Sequence
  Description of Artificial Sequence: Synthetic oligonucleotide
  Antisense strand to SEQ ID NO: 2013246
aguuaucgagaagucggaa

SEQ ID NO: 2013248 - RNA, 19 nt, Artificial Sequence
  Description of Artificial Sequence: Synthetic oligonucleotide
  Sense strand starting at position 2592 of SEQ ID NO: 1881039
acuggaagauuguugcuga

SEQ ID NO: 2013249 - RNA, 19 nt, Artificial Sequence
  Description of Artificial Sequence: Synthetic oligonucleotide
  Antisense strand to SEQ ID NO: 2013248
ucagcaacaaucuuccagu

SEQ ID NO: 2013250 - RNA, 19 nt, Artificial Sequence
  Description of Artificial Sequence: Synthetic oligonucleotide
  Sense strand starting at position 2595 of SEQ ID NO: 1881039
ggaagauuguugcugacuu

SEQ ID NO: 2013251 - RNA, 19 nt, Artificial Sequence
  Description of Artificial Sequence: Synthetic oligonucleotide
  Antisense strand to SEQ ID NO: 2013250
aagucagcaacaaucuucc

SEQ ID NO: 2013252 - RNA, 19 nt, Artificial Sequence
  Description of Artificial Sequence: Synthetic oligonucleotide
  Sense strand starting at position 2597 of SEQ ID NO: 1881039
aagauuguugcugacuuga

SEQ ID NO: 2013253 - RNA, 19 nt, Artificial Sequence
  Description of Artificial Sequence: Synthetic oligonucleotide
  Antisense strand to SEQ ID NO: 2013252
ucaagucagcaacaaucuu

SEQ ID NO: 2013254 - RNA, 19 nt, Artificial Sequence
  Description of Artificial Sequence: Synthetic oligonucleotide
  Sense strand starting at position 2671 of SEQ ID NO: 1881039
acagauuucugugaauugg

SEQ ID NO: 2013255 - RNA, 19 nt, Artificial Sequence
  Description of Artificial Sequence: Synthetic oligonucleotide
  Antisense strand to SEQ ID NO: 2013254
ccaauucacagaaaucugu

SEQ ID NO: 2013256 - RNA, 19 nt, Artificial Sequence
  Description of Artificial Sequence: Synthetic oligonucleotide
  Sense strand starting at position 2681 of SEQ ID NO: 1881039
gugaauuggagauggccau

SEQ ID NO: 2013257 - RNA, 19 nt, Artificial Sequence
  Description of Artificial Sequence: Synthetic oligonucleotide
  Antisense strand to SEQ ID NO: 2013256
auggccaucuccaauucac

SEQ ID NO: 2013258 - RNA, 19 nt, Artificial Sequence
  Description of Artificial Sequence: Synthetic oligonucleotide
  Sense strand starting at position 2766 of SEQ ID NO: 1881039
agaucucaagccuggguua

SEQ ID NO: 2013259 - RNA, 19 nt, Artificial Sequence
  Description of Artificial Sequence: Synthetic oligonucleotide
  Antisense strand to SEQ ID NO: 2013258
uaacccaggcuugagaucu

SEQ ID NO: 2013260 - RNA, 19 nt, Artificial Sequence
  Description of Artificial Sequence: Synthetic oligonucleotide
  Sense strand starting at position 2773 of SEQ ID NO: 1881039
aagccuggguuacuaaaua

SEQ ID NO: 2013261 - RNA, 19 nt, Artificial Sequence
  Description of Artificial Sequence: Synthetic oligonucleotide
  Antisense strand to SEQ ID NO: 2013260
uauuuaguaacccaggcuu

SEQ ID NO: 2013262 - RNA, 19 nt, Artificial Sequence
  Description of Artificial Sequence: Synthetic oligonucleotide
  Sense strand starting at position 2984 of SEQ ID NO: 1881039
acaaccagauuuggaaaua

SEQ ID NO: 2013263 - RNA, 19 nt, Artificial Sequence
  Description of Artificial Sequence: Synthetic oligonucleotide
  Antisense strand to SEQ ID NO: 2013262
uauuuccaaaucugguugu

SEQ ID NO: 2013264 - RNA, 19 nt, Artificial Sequence
  Description of Artificial Sequence: Synthetic oligonucleotide
  Sense strand starting at position 3062 of SEQ ID NO: 1881039
augggaauuacuugagccu

SEQ ID NO: 2013265 - RNA, 19 nt, Artificial Sequence
  Description of Artificial Sequence: Synthetic oligonucleotide
  Antisense strand to SEQ ID NO: 2013264
aggcucaaguaauucccau

SEQ ID NO: 2013266 - RNA, 19 nt, Artificial Sequence
  Description of Artificial Sequence: Synthetic oligonucleotide
  Sense strand starting at position 3065 of SEQ ID NO: 1881039
ggaauuacuugagccugua

SEQ ID NO: 2013267 - RNA, 19 nt, Artificial Sequence
  Description of Artificial Sequence: Synthetic oligonucleotide
  Antisense strand to SEQ ID NO: 2013266
uacaggcucaaguaauucc

SEQ ID NO: 2013268 - RNA, 19 nt, Artificial Sequence
  Description of Artificial Sequence: Synthetic oligonucleotide
  Sense strand starting at position 3068 of SEQ ID NO: 1881039
auuacuugagccuguauac

SEQ ID NO: 2013269 - RNA, 19 nt, Artificial Sequence
  Description of Artificial Sequence: Synthetic oligonucleotide
  Antisense strand to SEQ ID NO: 2013268
guauacaggcucaaguaau

SEQ ID NO: 2013270 - RNA, 19 nt, Artificial Sequence
  Description of Artificial Sequence: Synthetic oligonucleotide
  Sense strand starting at position 3096 of SEQ ID NO: 1881039
agacaucgcauugagcaaa

SEQ ID NO: 2013271 - RNA, 19 nt, Artificial Sequence
  Description of Artificial Sequence: Synthetic oligonucleotide
  Antisense strand to SEQ ID NO: 2013270
uuugcucaaugcgaugucu

SEQ ID NO: 2013272 - RNA, 19 nt, Artificial Sequence
  Description of Artificial Sequence: Synthetic oligonucleotide
  Sense strand starting at position 3146 of SEQ ID NO: 1881039
guuuguacagcagauugaa

SEQ ID NO: 2013273 - RNA, 19 nt, Artificial Sequence
  Description of Artificial Sequence: Synthetic oligonucleotide
  Antisense strand to SEQ ID NO: 2013272
uucaaucugcuguacaaac

SEQ ID NO: 2013274 - RNA, 19 nt, Artificial Sequence
  Description of Artificial Sequence: Synthetic oligonucleotide
  Sense strand starting at position 3178 of SEQ ID NO: 1881039
acggaaggccuguaauguu

SEQ ID NO: 2013275 - RNA, 19 nt, Artificial Sequence
  Description of Artificial Sequence: Synthetic oligonucleotide
  Antisense strand to SEQ ID NO: 2013274
aacauuacaggccuuccgu

SEQ ID NO: 2013276 - RNA, 19 nt, Artificial Sequence
  Description of Artificial Sequence: Synthetic oligonucleotide
  Sense strand starting at position 3264 of SEQ ID NO: 1881039
aguucuaauuagccuuuga

SEQ ID NO: 2013277 - RNA, 19 nt, Artificial Sequence
  Description of Artificial Sequence: Synthetic oligonucleotide
  Antisense strand to SEQ ID NO: 2013276
ucaaaggcuaauuagaacu

SEQ ID NO: 2013278 - RNA, 19 nt, Artificial Sequence
  Description of Artificial Sequence: Synthetic oligonucleotide
  Sense strand starting at position 3268 of SEQ ID NO: 1881039
cuaauuagccuuugaacag

SEQ ID NO: 2013279 - RNA, 19 nt, Artificial Sequence
  Description of Artificial Sequence: Synthetic oligonucleotide
  Antisense strand to SEQ ID NO: 2013278
cuguucaaaggcuaauuag

SEQ ID NO: 2013280 - RNA, 19 nt, Artificial Sequence
  Description of Artificial Sequence: Synthetic oligonucleotide
  Sense strand starting at position 3329 of SEQ ID NO: 1881039
acgagucagagccauaaua

SEQ ID NO: 2013281 - RNA, 19 nt, Artificial Sequence
  Description of Artificial Sequence: Synthetic oligonucleotide
  Antisense strand to SEQ ID NO: 2013280
uauuauggcucugacucgu

SEQ ID NO: 2013282 - RNA, 19 nt, Artificial Sequence
  Description of Artificial Sequence: Synthetic oligonucleotide
  Sense strand starting at position 3463 of SEQ ID NO: 1881039
gggugugcaugauuuccua

SEQ ID NO: 2013283 - RNA, 19 nt, Artificial Sequence
  Description of Artificial Sequence: Synthetic oligonucleotide
  Antisense strand to SEQ ID NO: 2013282
uaggaaaucaugcacaccc

SEQ ID NO: 2013284 - RNA, 19 nt, Artificial Sequence
  Description of Artificial Sequence: Synthetic oligonucleotide
  Sense strand starting at position 3597 of SEQ ID NO: 1881039
gcacgauauagacguagaa

SEQ ID NO: 2013285 - RNA, 19 nt, Artificial Sequence
  Description of Artificial Sequence: Synthetic oligonucleotide
  Antisense strand to SEQ ID NO: 2013284
uucuacgucuauaucgugc

SEQ ID NO: 2013286 - RNA, 19 nt, Artificial Sequence
  Description of Artificial Sequence: Synthetic oligonucleotide
  Sense strand starting at position 3677 of SEQ ID NO: 1881039
accuaaguguagccuaaau

SEQ ID NO: 2013287 - RNA, 19 nt, Artificial Sequence
  Description of Artificial Sequence: Synthetic oligonucleotide
  Antisense strand to SEQ ID NO: 2013286
auuuaggcuacacuuaggu

SEQ ID NO: 2013288 - RNA, 19 nt, Artificial Sequence
  Description of Artificial Sequence: Synthetic oligonucleotide
  Sense strand starting at position 3935 of SEQ ID NO: 1881039
ccacaugcccggcaauuau

SEQ ID NO: 2013289 - RNA, 19 nt, Artificial Sequence
  Description of Artificial Sequence: Synthetic oligonucleotide
  Antisense strand to SEQ ID NO: 2013288
auaauugccgggcaugugg

SEQ ID NO: 2013290 - RNA, 19 nt, Artificial Sequence
  Description of Artificial Sequence: Synthetic oligonucleotide
  Sense strand starting at position 108 of SEQ ID NO: 1881040
gcacuuacucaaugaaagg

SEQ ID NO: 2013291 - RNA, 19 nt, Artificial Sequence
  Description of Artificial Sequence: Synthetic oligonucleotide
  Antisense strand to SEQ ID NO: 2013290
ccuuucauugaguaagugc

SEQ ID NO: 2013292 - RNA, 19 nt, Artificial Sequence
  Description of Artificial Sequence: Synthetic oligonucleotide
  Sense strand starting at position 230 of SEQ ID NO: 1881040
cuagaaagugccugguaca

SEQ ID NO: 2013293 - RNA, 19 nt, Artificial Sequence
  Description of Artificial Sequence: Synthetic oligonucleotide
  Antisense strand to SEQ ID NO: 2013292
uguaccaggcacuuucuag

SEQ ID NO: 2013294 - RNA, 19 nt, Artificial Sequence
  Description of Artificial Sequence: Synthetic oligonucleotide
  Sense strand starting at position 278 of SEQ ID NO: 1881040
cugcacuaucauggcugaa

SEQ ID NO: 2013295 - RNA, 19 nt, Artificial Sequence
  Description of Artificial Sequence: Synthetic oligonucleotide
  Antisense strand to SEQ ID NO: 2013294
uucagccaugauagugcag

SEQ ID NO: 2013296 - RNA, 19 nt, Artificial Sequence
  Description of Artificial Sequence: Synthetic oligonucleotide
  Sense strand starting at position 280 of SEQ ID NO: 1881040
gcacuaucauggcugaaga

SEQ ID NO: 2013297 - RNA, 19 nt, Artificial Sequence
  Description of Artificial Sequence: Synthetic oligonucleotide
  Antisense strand to SEQ ID NO: 2013296
ucuucagccaugauagugc

SEQ ID NO: 2013298 - RNA, 19 nt, Artificial Sequence
  Description of Artificial Sequence: Synthetic oligonucleotide
  Sense strand starting at position 298 of SEQ ID NO: 1881040
aaugcugacguuuacugaa

SEQ ID NO: 2013299 - RNA, 19 nt, Artificial Sequence
  Description of Artificial Sequence: Synthetic oligonucleotide
  Antisense strand to SEQ ID NO: 2013298
uucaguaaacgucagcauu

SEQ ID NO: 2013300 - RNA, 19 nt, Artificial Sequence
  Description of Artificial Sequence: Synthetic oligonucleotide
  Sense strand starting at position 312 of SEQ ID NO: 1881040
cugaaaguuuaagccuuua

SEQ ID NO: 2013301 - RNA, 19 nt, Artificial Sequence
  Description of Artificial Sequence: Synthetic oligonucleotide
  Antisense strand to SEQ ID NO: 2013300
uaaaggcuuaaacuuucag

SEQ ID NO: 2013302 - RNA, 19 nt, Artificial Sequence
  Description of Artificial Sequence: Synthetic oligonucleotide
  Sense strand starting at position 364 of SEQ ID NO: 1881040
aagaccugucggcagcaau

SEQ ID NO: 2013303 - RNA, 19 nt, Artificial Sequence
  Description of Artificial Sequence: Synthetic oligonucleotide
  Antisense strand to SEQ ID NO: 2013302
auugcugccgacaggucuu

SEQ ID NO: 2013304 - RNA, 19 nt, Artificial Sequence
  Description of Artificial Sequence: Synthetic oligonucleotide
  Sense strand starting at position 367 of SEQ ID NO: 1881040
accugucggcagcaauauu

SEQ ID NO: 2013305 - RNA, 19 nt, Artificial Sequence
  Description of Artificial Sequence: Synthetic oligonucleotide
  Antisense strand to SEQ ID NO: 2013304
aauauugcugccgacaggu

SEQ ID NO: 2013306 - RNA, 19 nt, Artificial Sequence
  Description of Artificial Sequence: Synthetic oligonucleotide
  Sense strand starting at position 413 of SEQ ID NO: 1881040
ggaaauuaguaauaaucac

SEQ ID NO: 2013307 - RNA, 19 nt, Artificial Sequence
  Description of Artificial Sequence: Synthetic oligonucleotide
  Antisense strand to SEQ ID NO: 2013306
gugauuauuacuaauuucc

SEQ ID NO: 2013308 - RNA, 19 nt, Artificial Sequence
  Description of Artificial Sequence: Synthetic oligonucleotide
  Sense strand starting at position 422 of SEQ ID NO: 1881040
uaauaaucacgguguguaa

SEQ ID NO: 2013309 - RNA, 19 nt, Artificial Sequence
  Description of Artificial Sequence: Synthetic oligonucleotide
  Antisense strand to SEQ ID NO: 2013308
uuacacaccgugauuauua

SEQ ID NO: 2013310 - RNA, 19 nt, Artificial Sequence
  Description of Artificial Sequence: Synthetic oligonucleotide
  Sense strand starting at position 631 of SEQ ID NO: 1881040
gaaggauguuuauucuuuc

SEQ ID NO: 2013311 - RNA, 19 nt, Artificial Sequence
  Description of Artificial Sequence: Synthetic oligonucleotide
  Antisense strand to SEQ ID NO: 2013310
gaaagaauaaacauccuuc

SEQ ID NO: 2013312 - RNA, 19 nt, Artificial Sequence
  Description of Artificial Sequence: Synthetic oligonucleotide
  Sense strand starting at position 634 of SEQ ID NO: 1881040
ggauguuuauucuuucgua

SEQ ID NO: 2013313 - RNA, 19 nt, Artificial Sequence
  Description of Artificial Sequence: Synthetic oligonucleotide
  Antisense strand to SEQ ID NO: 2013312
uacgaaagaauaaacaucc

SEQ ID NO: 2013314 - RNA, 19 nt, Artificial Sequence
  Description of Artificial Sequence: Synthetic oligonucleotide
  Sense strand starting at position 1439 of SEQ ID NO: 1881040
ucauuucuguaggaaagug

SEQ ID NO: 2013315 - RNA, 19 nt, Artificial Sequence
  Description of Artificial Sequence: Synthetic oligonucleotide
  Antisense strand to SEQ ID NO: 2013314
cacuuuccuacagaaauga

SEQ ID NO: 2013316 - RNA, 19 nt, Artificial Sequence
  Description of Artificial Sequence: Synthetic oligonucleotide
  Sense strand starting at position 1444 of SEQ ID NO: 1881040
ucuguaggaaagugauuaa

SEQ ID NO: 2013317 - RNA, 19 nt, Artificial Sequence
  Description of Artificial Sequence: Synthetic oligonucleotide
  Antisense strand to SEQ ID NO: 2013316
uuaaucacuuuccuacaga

SEQ ID NO: 2013318 - RNA, 19 nt, Artificial Sequence
  Description of Artificial Sequence: Synthetic oligonucleotide
  Sense strand starting at position 1447 of SEQ ID NO: 1881040
guaggaaagugauuaauac

SEQ ID NO: 2013319 - RNA, 19 nt, Artificial Sequence
  Description of Artificial Sequence: Synthetic oligonucleotide
  Antisense strand to SEQ ID NO: 2013318
guauuaaucacuuuccuac

SEQ ID NO: 2013320 - RNA, 19 nt, Artificial Sequence
  Description of Artificial Sequence: Synthetic oligonucleotide
  Sense strand starting at position 1667 of SEQ ID NO: 1881040
ugcuaaagggucgagauga

SEQ ID NO: 2013321 - RNA, 19 nt, Artificial Sequence
  Description of Artificial Sequence: Synthetic oligonucleotide
  Antisense strand to SEQ ID NO: 2013320
ucaucucgacccuuuagca

SEQ ID NO: 2013322 - RNA, 19 nt, Artificial Sequence
  Description of Artificial Sequence: Synthetic oligonucleotide
  Sense strand starting at position 3072 of SEQ ID NO: 1881040
cugcacuccugaguuugau

SEQ ID NO: 2013323 - RNA, 19 nt, Artificial Sequence
  Description of Artificial Sequence: Synthetic oligonucleotide
  Antisense strand to SEQ ID NO: 2013322
aucaaacucaggagugcag

SEQ ID NO: 2013324 - RNA, 19 nt, Artificial Sequence
  Description of Artificial Sequence: Synthetic oligonucleotide
  Sense strand starting at position 3119 of SEQ ID NO: 1881040
cuugcagugcuuccggauu

SEQ ID NO: 2013325 - RNA, 19 nt, Artificial Sequence
  Description of Artificial Sequence: Synthetic oligonucleotide
  Antisense strand to SEQ ID NO: 2013324
aauccggaagcacugcaag

SEQ ID NO: 2013326 - RNA, 19 nt, Artificial Sequence
  Description of Artificial Sequence: Synthetic oligonucleotide
  Sense strand starting at position 3165 of SEQ ID NO: 1881040
uuuguaauggcgagguuug

SEQ ID NO: 2013327 - RNA, 19 nt, Artificial Sequence
  Description of Artificial Sequence: Synthetic oligonucleotide
  Antisense strand to SEQ ID NO: 2013326
caaaccucgccauuacaaa

SEQ ID NO: 2013328 - RNA, 19 nt, Artificial Sequence
  Description of Artificial Sequence: Synthetic oligonucleotide
  Sense strand starting at position 3182 of SEQ ID NO: 1881040
uguguggucccguuguuga

SEQ ID NO: 2013329 - RNA, 19 nt, Artificial Sequence
  Description of Artificial Sequence: Synthetic oligonucleotide
  Antisense strand to SEQ ID NO: 2013328
ucaacaacgggaccacaca

SEQ ID NO: 2013330 - RNA, 19 nt, Artificial Sequence
  Description of Artificial Sequence: Synthetic oligonucleotide
  Sense strand starting at position 3322 of SEQ ID NO: 1881040
acccuaaacggaugacuuu

SEQ ID NO: 2013331 - RNA, 19 nt, Artificial Sequence
  Description of Artificial Sequence: Synthetic oligonucleotide
  Antisense strand to SEQ ID NO: 2013330
aaagucauccguuuagggu

SEQ ID NO: 2013332 - RNA, 19 nt, Artificial Sequence
  Description of Artificial Sequence: Synthetic oligonucleotide
  Sense strand starting at position 3340 of SEQ ID NO: 1881040
ucuauuucuugugaagacu

SEQ ID NO: 2013333 - RNA, 19 nt, Artificial Sequence
  Description of Artificial Sequence: Synthetic oligonucleotide
  Antisense strand to SEQ ID NO: 2013332
agucuucacaagaaauaga

SEQ ID NO: 2013334 - RNA, 19 nt, Artificial Sequence
  Description of Artificial Sequence: Synthetic oligonucleotide
  Sense strand starting at position 3348 of SEQ ID NO: 1881040
uugugaagacuugguuaaa

SEQ ID NO: 2013335 - RNA, 19 nt, Artificial Sequence
  Description of Artificial Sequence: Synthetic oligonucleotide
  Antisense strand to SEQ ID NO: 2013334
uuuaaccaagucuucacaa

SEQ ID NO: 2013336 - RNA, 19 nt, Artificial Sequence
  Description of Artificial Sequence: Synthetic oligonucleotide
  Sense strand starting at position 3369 of SEQ ID NO: 1881040
ccaagaaucguuugaggau

SEQ ID NO: 2013337 - RNA, 19 nt, Artificial Sequence
  Description of Artificial Sequence: Synthetic oligonucleotide
  Antisense strand to SEQ ID NO: 2013336
auccucaaacgauucuugg

SEQ ID NO: 2013338 - RNA, 19 nt, Artificial Sequence
  Description of Artificial Sequence: Synthetic oligonucleotide
  Sense strand starting at position 3378 of SEQ ID NO: 1881040
guuugaggauucucuaaag

SEQ ID NO: 2013339 - RNA, 19 nt, Artificial Sequence
  Description of Artificial Sequence: Synthetic oligonucleotide
  Antisense strand to SEQ ID NO: 2013338
cuuuagagaauccucaaac

SEQ ID NO: 2013340 - RNA, 19 nt, Artificial Sequence
  Description of Artificial Sequence: Synthetic oligonucleotide
  Sense strand starting at position 3470 of SEQ ID NO: 1881040
ucucuugaggucugaaucu

SEQ ID NO: 2013341 - RNA, 19 nt, Artificial Sequence
  Description of Artificial Sequence: Synthetic oligonucleotide
  Antisense strand to SEQ ID NO: 2013340
agauucagaccucaagaga

SEQ ID NO: 2013342 - RNA, 19 nt, Artificial Sequence
  Description of Artificial Sequence: Synthetic oligonucleotide
  Sense strand starting at position 3494 of SEQ ID NO: 1881040
uguaucugcuaucucagaa

SEQ ID NO: 2013343 - RNA, 19 nt, Artificial Sequence
  Description of Artificial Sequence: Synthetic oligonucleotide
  Antisense strand to SEQ ID NO: 2013342
uucugagauagcagauaca

SEQ ID NO: 2013344 - RNA, 19 nt, Artificial Sequence
  Description of Artificial Sequence: Synthetic oligonucleotide
  Sense strand starting at position 3506 of SEQ ID NO: 1881040
cucagaaagccuggaguca

SEQ ID NO: 2013345 - RNA, 19 nt, Artificial Sequence
  Description of Artificial Sequence: Synthetic oligonucleotide
  Antisense strand to SEQ ID NO: 2013344
ugacuccaggcuuucugag

SEQ ID NO: 2013346 - RNA, 19 nt, Artificial Sequence
  Description of Artificial Sequence: Synthetic oligonucleotide
  Sense strand starting at position 3587 of SEQ ID NO: 1881040
ugguguuagaccuaggaau

SEQ ID NO: 2013347 - RNA, 19 nt, Artificial Sequence
  Description of Artificial Sequence: Synthetic oligonucleotide
  Antisense strand to SEQ ID NO: 2013346
auuccuaggucuaacacca

SEQ ID NO: 2013348 - RNA, 19 nt, Artificial Sequence
  Description of Artificial Sequence: Synthetic oligonucleotide
  Sense strand starting at position 3589 of SEQ ID NO: 1881040
guguuagaccuaggaauau

SEQ ID NO: 2013349 - RNA, 19 nt, Artificial Sequence
  Description of Artificial Sequence: Synthetic oligonucleotide
  Antisense strand to SEQ ID NO: 2013348
auauuccuaggucuaacac

SEQ ID NO: 2013350 - RNA, 19 nt, Artificial Sequence
  Description of Artificial Sequence: Synthetic oligonucleotide
  Sense strand starting at position 3598 of SEQ ID NO: 1881040
cuaggaauauacuauugau

SEQ ID NO: 2013351 - RNA, 19 nt, Artificial Sequence
  Description of Artificial Sequence: Synthetic oligonucleotide
  Antisense strand to SEQ ID NO: 2013350
aucaauaguauauuccuag

SEQ ID NO: 2013352 - RNA, 19 nt, Artificial Sequence
  Description of Artificial Sequence: Synthetic oligonucleotide
  Sense strand starting at position 3620 of SEQ ID NO: 1881040
aaacuuaucgguugauagg

SEQ ID NO: 2013353 - RNA, 19 nt, Artificial Sequence
  Description of Artificial Sequence: Synthetic oligonucleotide
  Antisense strand to SEQ ID NO: 2013352
ccuaucaaccgauaaguuu

SEQ ID NO: 2013354 - RNA, 19 nt, Artificial Sequence
  Description of Artificial Sequence: Synthetic oligonucleotide
  Sense strand starting at position 3754 of SEQ ID NO: 1881040
uucucacauugguccagaa

SEQ ID NO: 2013355 - RNA, 19 nt, Artificial Sequence
  Description of Artificial Sequence: Synthetic oligonucleotide
  Antisense strand to SEQ ID NO: 2013354
uucuggaccaaugugagaa

SEQ ID NO: 2013356 - RNA, 19 nt, Artificial Sequence
  Description of Artificial Sequence: Synthetic oligonucleotide
  Sense strand starting at position 3758 of SEQ ID NO: 1881040
cacauugguccagaaaugu

SEQ ID NO: 2013357 - RNA, 19 nt, Artificial Sequence
  Description of Artificial Sequence: Synthetic oligonucleotide
  Antisense strand to SEQ ID NO: 2013356
acauuucuggaccaaugug

SEQ ID NO: 2013358 - RNA, 19 nt, Artificial Sequence
  Description of Artificial Sequence: Synthetic oligonucleotide
  Sense strand starting at position 3766 of SEQ ID NO: 1881040
uccagaaaugucuggaucu

SEQ ID NO: 2013359 - RNA, 19 nt, Artificial Sequence
  Description of Artificial Sequence: Synthetic oligonucleotide
  Antisense strand to SEQ ID NO: 2013358
agauccagacauuucugga

SEQ ID NO: 2013360 - RNA, 19 nt, Artificial Sequence
  Description of Artificial Sequence: Synthetic oligonucleotide
  Sense strand starting at position 3776 of SEQ ID NO: 1881040
ucuggaucuuaauugauag

SEQ ID NO: 2013361 - RNA, 19 nt, Artificial Sequence
  Description of Artificial Sequence: Synthetic oligonucleotide
  Antisense strand to SEQ ID NO: 2013360
cuaucaauuaagauccaga

SEQ ID NO: 2013362 - RNA, 19 nt, Artificial Sequence
  Description of Artificial Sequence: Synthetic oligonucleotide
  Sense strand starting at position 3892 of SEQ ID NO: 1881040
uugcaauaguaaguuaaca

SEQ ID NO: 2013363 - RNA, 19 nt, Artificial Sequence
  Description of Artificial Sequence: Synthetic oligonucleotide
  Antisense strand to SEQ ID NO: 2013362
uguuaacuuacuauugcaa

SEQ ID NO: 2013364 - RNA, 19 nt, Artificial Sequence
  Description of Artificial Sequence: Synthetic oligonucleotide
  Sense strand starting at position 3930 of SEQ ID NO: 1881040
guucuuggccauugguuaa

SEQ ID NO: 2013365 - RNA, 19 nt, Artificial Sequence
  Description of Artificial Sequence: Synthetic oligonucleotide
  Antisense strand to SEQ ID NO: 2013364
uuaaccaauggccaagaac

SEQ ID NO: 2013366 - RNA, 19 nt, Artificial Sequence
  Description of Artificial Sequence: Synthetic oligonucleotide
  Sense strand starting at position 3934 of SEQ ID NO: 1881040
uuggccauugguuaacauu

SEQ ID NO: 2013367 - RNA, 19 nt, Artificial Sequence
  Description of Artificial Sequence: Synthetic oligonucleotide
  Antisense strand to SEQ ID NO: 2013366
aauguuaaccaauggccaa

SEQ ID NO: 2013368 - RNA, 19 nt, Artificial Sequence
  Description of Artificial Sequence: Synthetic oligonucleotide
  Sense strand starting at position 3954 of SEQ ID NO: 1881040
ccuuaauuagauuggucuu

SEQ ID NO: 2013369 - RNA, 19 nt, Artificial Sequence
  Description of Artificial Sequence: Synthetic oligonucleotide
  Antisense strand to SEQ ID NO: 2013368
aagaccaaucuaauuaagg

SEQ ID NO: 2013370 - RNA, 19 nt, Artificial Sequence
  Description of Artificial Sequence: Synthetic oligonucleotide
  Sense strand starting at position 221 of SEQ ID NO: 1881041
ccuggccuuucuuugauuu

SEQ ID NO: 2013371 - RNA, 19 nt, Artificial Sequence
  Description of Artificial Sequence: Synthetic oligonucleotide
  Antisense strand to SEQ ID NO: 2013370
aaaucaaagaaaggccagg

SEQ ID NO: 2013372 - RNA, 19 nt, Artificial Sequence
  Description of Artificial Sequence: Synthetic oligonucleotide
  Sense strand starting at position 399 of SEQ ID NO: 1881041
ucauauuacugccugguaa

SEQ ID NO: 2013373 - RNA, 19 nt, Artificial Sequence
  Description of Artificial Sequence: Synthetic oligonucleotide
  Antisense strand to SEQ ID NO: 2013372
uuaccaggcaguaauauga

SEQ ID NO: 2013374 - RNA, 19 nt, Artificial Sequence
  Description of Artificial Sequence: Synthetic oligonucleotide
  Sense strand starting at position 401 of SEQ ID NO: 1881041
auauuacugccugguaauu

SEQ ID NO: 2013375 - RNA, 19 nt, Artificial Sequence
  Description of Artificial Sequence: Synthetic oligonucleotide
  Antisense strand to SEQ ID NO: 2013374
aauuaccaggcaguaauau

SEQ ID NO: 2013376 - RNA, 19 nt, Artificial Sequence
  Description of Artificial Sequence: Synthetic oligonucleotide
  Sense strand starting at position 412 of SEQ ID NO: 1881041
ugguaauuacaugguuacu

SEQ ID NO: 2013377 - RNA, 19 nt, Artificial Sequence
  Description of Artificial Sequence: Synthetic oligonucleotide
  Antisense strand to SEQ ID NO: 2013376
aguaaccauguaauuacca

SEQ ID NO: 2013378 - RNA, 19 nt, Artificial Sequence
  Description of Artificial Sequence: Synthetic oligonucleotide
  Sense strand starting at position 481 of SEQ ID NO: 1881041
cuagaacagucucuagcuu

SEQ ID NO: 2013379 - RNA, 19 nt, Artificial Sequence
  Description of Artificial Sequence: Synthetic oligonucleotide
  Antisense strand to SEQ ID NO: 2013378
aagcuagagacuguucuag

SEQ ID NO: 2013380 - RNA, 19 nt, Artificial Sequence
  Description of Artificial Sequence: Synthetic oligonucleotide
  Sense strand starting at position 843 of SEQ ID NO: 1881041
cuauguugcccagauaguu

SEQ ID NO: 2013381 - RNA, 19 nt, Artificial Sequence
  Description of Artificial Sequence: Synthetic oligonucleotide
  Antisense strand to SEQ ID NO: 2013380
aacuaucugggcaacauag

SEQ ID NO: 2013382 - RNA, 19 nt, Artificial Sequence
  Description of Artificial Sequence: Synthetic oligonucleotide
  Sense strand starting at position 977 of SEQ ID NO: 1881041
ucugguagucuuuggauau

SEQ ID NO: 2013383 - RNA, 19 nt, Artificial Sequence
  Description of Artificial Sequence: Synthetic oligonucleotide
  Antisense strand to SEQ ID NO: 2013382
auauccaaagacuaccaga

SEQ ID NO: 2013384 - RNA, 19 nt, Artificial Sequence
  Description of Artificial Sequence: Synthetic oligonucleotide
  Sense strand starting at position 981 of SEQ ID NO: 1881041
guagucuuuggauaucugu

SEQ ID NO: 2013385 - RNA, 19 nt, Artificial Sequence
  Description of Artificial Sequence: Synthetic oligonucleotide
  Antisense strand to SEQ ID NO: 2013384
acagauauccaaagacuac

SEQ ID NO: 2013386 - RNA, 19 nt, Artificial Sequence
  Description of Artificial Sequence: Synthetic oligonucleotide
  Sense strand starting at position 988 of SEQ ID NO: 1881041
uuggauaucuguuccuauu

SEQ ID NO: 2013387 - RNA, 19 nt, Artificial Sequence
  Description of Artificial Sequence: Synthetic oligonucleotide
  Antisense strand to SEQ ID NO: 2013386
aauaggaacagauauccaa

SEQ ID NO: 2013388 - RNA, 19 nt, Artificial Sequence
  Description of Artificial Sequence: Synthetic oligonucleotide
  Sense strand starting at position 1343 of SEQ ID NO: 1881041
cuaucauauugguucugau

SEQ ID NO: 2013389 - RNA, 19 nt, Artificial Sequence
  Description of Artificial Sequence: Synthetic oligonucleotide
  Antisense strand to SEQ ID NO: 2013388
aucagaaccaauaugauag

SEQ ID NO: 2013390 - RNA, 19 nt, Artificial Sequence
  Description of Artificial Sequence: Synthetic oligonucleotide
  Sense strand starting at position 1353 of SEQ ID NO: 1881041
gguucugauccacaauauu

SEQ ID NO: 2013391 - RNA, 19 nt, Artificial Sequence
  Description of Artificial Sequence: Synthetic oligonucleotide
  Antisense strand to SEQ ID NO: 2013390
aauauuguggaucagaacc

SEQ ID NO: 2013392 - RNA, 19 nt, Artificial Sequence
  Description of Artificial Sequence: Synthetic oligonucleotide
  Sense strand starting at position 1429 of SEQ ID NO: 1881041
ucacuugaguucucaagug

SEQ ID NO: 2013393 - RNA, 19 nt, Artificial Sequence
  Description of Artificial Sequence: Synthetic oligonucleotide
  Antisense strand to SEQ ID NO: 2013392
cacuugagaacucaaguga

SEQ ID NO: 2013394 - RNA, 19 nt, Artificial Sequence
  Description of Artificial Sequence: Synthetic oligonucleotide
  Sense strand starting at position 1479 of SEQ ID NO: 1881041
auuugcuguuagccagauu

SEQ ID NO: 2013395 - RNA, 19 nt, Artificial Sequence
  Description of Artificial Sequence: Synthetic oligonucleotide
  Antisense strand to SEQ ID NO: 2013394
aaucuggcuaacagcaaau

SEQ ID NO: 2013396 - RNA, 19 nt, Artificial Sequence
  Description of Artificial Sequence: Synthetic oligonucleotide
  Sense strand starting at position 1604 of SEQ ID NO: 1881041
agaaugcgcggguuuguua

SEQ ID NO: 2013397 - RNA, 19 nt, Artificial Sequence
  Description of Artificial Sequence: Synthetic oligonucleotide
  Antisense strand to SEQ ID NO: 2013396
uaacaaacccgcgcauucu

SEQ ID NO: 2013398 - RNA, 19 nt, Artificial Sequence
  Description of Artificial Sequence: Synthetic oligonucleotide
  Sense strand starting at position 1685 of SEQ ID NO: 1881041
cccugaaugcauuaaguau

SEQ ID NO: 2013399 - RNA, 19 nt, Artificial Sequence
  Description of Artificial Sequence: Synthetic oligonucleotide
  Antisense strand to SEQ ID NO: 2013398
auacuuaaugcauucaggg

SEQ ID NO: 2013400 - RNA, 19 nt, Artificial Sequence
  Description of Artificial Sequence: Synthetic oligonucleotide
  Sense strand starting at position 2036 of SEQ ID NO: 1881041
aucuacauguggcuuaaga

SEQ ID NO: 2013401 - RNA, 19 nt, Artificial Sequence
  Description of Artificial Sequence: Synthetic oligonucleotide
  Antisense strand to SEQ ID NO: 2013400
ucuuaagccacauguagau

SEQ ID NO: 2013402 - RNA, 19 nt, Artificial Sequence
  Description of Artificial Sequence: Synthetic oligonucleotide
  Sense strand starting at position 2038 of SEQ ID NO: 1881041
cuacauguggcuuaagagu

SEQ ID NO: 2013403 - RNA, 19 nt, Artificial Sequence
  Description of Artificial Sequence: Synthetic oligonucleotide
  Antisense strand to SEQ ID NO: 2013402
acucuuaagccacauguag

SEQ ID NO: 2013404 - RNA, 19 nt, Artificial Sequence
  Description of Artificial Sequence: Synthetic oligonucleotide
  Sense strand starting at position 2082 of SEQ ID NO: 1881041
ugcaguaauugguuaauau

SEQ ID NO: 2013405 - RNA, 19 nt, Artificial Sequence
  Description of Artificial Sequence: Synthetic oligonucleotide
  Antisense strand to SEQ ID NO: 2013404
auauuaaccaauuacugca

SEQ ID NO: 2013406 - RNA, 19 nt, Artificial Sequence
  Description of Artificial Sequence: Synthetic oligonucleotide
  Sense strand starting at position 2083 of SEQ ID NO: 1881041
gcaguaauugguuaauaug

SEQ ID NO: 2013407 - RNA, 19 nt, Artificial Sequence
  Description of Artificial Sequence: Synthetic oligonucleotide
  Antisense strand to SEQ ID NO: 2013406
cauauuaaccaauuacugc

SEQ ID NO: 2013408 - RNA, 19 nt, Artificial Sequence
  Description of Artificial Sequence: Synthetic oligonucleotide
  Sense strand starting at position 2122 of SEQ ID NO: 1881041
auagauugugcucacaaua

SEQ ID NO: 2013409 - RNA, 19 nt, Artificial Sequence
  Description of Artificial Sequence: Synthetic oligonucleotide
  Antisense strand to SEQ ID NO: 2013408
uauugugagcacaaucuau

SEQ ID NO: 2013410 - RNA, 19 nt, Artificial Sequence
  Description of Artificial Sequence: Synthetic oligonucleotide
  Sense strand starting at position 2703 of SEQ ID NO: 1881041
uggaaugaauguuccaaca

SEQ ID NO: 2013411 - RNA, 19 nt, Artificial Sequence
  Description of Artificial Sequence: Synthetic oligonucleotide
  Antisense strand to SEQ ID NO: 2013410
uguuggaacauucauucca

SEQ ID NO: 2013412 - RNA, 19 nt, Artificial Sequence
  Description of Artificial Sequence: Synthetic oligonucleotide
  Sense strand starting at position 2791 of SEQ ID NO: 1881041
gcuuauguagccuacacua

SEQ ID NO: 2013413 - RNA, 19 nt, Artificial Sequence
  Description of Artificial Sequence: Synthetic oligonucleotide
  Antisense strand to SEQ ID NO: 2013412
uaguguaggcuacauaagc

SEQ ID NO: 2013414 - RNA, 19 nt, Artificial Sequence
  Description of Artificial Sequence: Synthetic oligonucleotide
  Sense strand starting at position 2860 of SEQ ID NO: 1881041
acauuucuguucucuguga

SEQ ID NO: 2013415 - RNA, 19 nt, Artificial Sequence
  Description of Artificial Sequence: Synthetic oligonucleotide
  Antisense strand to SEQ ID NO: 2013414
ucacagagaacagaaaugu

SEQ ID NO: 2013416 - RNA, 19 nt, Artificial Sequence
  Description of Artificial Sequence: Synthetic oligonucleotide
  Sense strand starting at position 2864 of SEQ ID NO: 1881041
uucuguucucugugaagag

SEQ ID NO: 2013417 - RNA, 19 nt, Artificial Sequence
  Description of Artificial Sequence: Synthetic oligonucleotide
  Antisense strand to SEQ ID NO: 2013416
cucuucacagagaacagaa

SEQ ID NO: 2013418 - RNA, 19 nt, Artificial Sequence
  Description of Artificial Sequence: Synthetic oligonucleotide
  Sense strand starting at position 3073 of SEQ ID NO: 1881041
agauuaccacgucacguau

SEQ ID NO: 2013419 - RNA, 19 nt, Artificial Sequence
  Description of Artificial Sequence: Synthetic oligonucleotide
  Antisense strand to SEQ ID NO: 2013418
auacgugacgugguaaucu

SEQ ID NO: 2013420 - RNA, 19 nt, Artificial Sequence
  Description of Artificial Sequence: Synthetic oligonucleotide
  Sense strand starting at position 3117 of SEQ ID NO: 1881041
aaauguccacagugagaga

SEQ ID NO: 2013421 - RNA, 19 nt, Artificial Sequence
  Description of Artificial Sequence: Synthetic oligonucleotide
  Antisense strand to SEQ ID NO: 2013420
ucucucacuguggacauuu

SEQ ID NO: 2013422 - RNA, 19 nt, Artificial Sequence
  Description of Artificial Sequence: Synthetic oligonucleotide
  Sense strand starting at position 3145 of SEQ ID NO: 1881041
auauuaugccucuguugaa

SEQ ID NO: 2013423 - RNA, 19 nt, Artificial Sequence
  Description of Artificial Sequence: Synthetic oligonucleotide
  Antisense strand to SEQ ID NO: 2013422
uucaacagaggcauaauau

SEQ ID NO: 2013424 - RNA, 19 nt, Artificial Sequence
  Description of Artificial Sequence: Synthetic oligonucleotide
  Sense strand starting at position 3261 of SEQ ID NO: 1881041
gcauguaaacuauggaaag

SEQ ID NO: 2013425 - RNA, 19 nt, Artificial Sequence
  Description of Artificial Sequence: Synthetic oligonucleotide
  Antisense strand to SEQ ID NO: 2013424
cuuuccauaguuuacaugc

SEQ ID NO: 2013426 - RNA, 19 nt, Artificial Sequence
  Description of Artificial Sequence: Synthetic oligonucleotide
  Sense strand starting at position 3275 of SEQ ID NO: 1881041
gaaagauaugcaugugaga

SEQ ID NO: 2013427 - RNA, 19 nt, Artificial Sequence
  Description of Artificial Sequence: Synthetic oligonucleotide
  Antisense strand to SEQ ID NO: 2013426
ucucacaugcauaucuuuc

SEQ ID NO: 2013428 - RNA, 19 nt, Artificial Sequence
  Description of Artificial Sequence: Synthetic oligonucleotide
  Sense strand starting at position 3374 of SEQ ID NO: 1881041
gccagaugugcuuugccau

SEQ ID NO: 2013429 - RNA, 19 nt, Artificial Sequence
  Description of Artificial Sequence: Synthetic oligonucleotide
  Antisense strand to SEQ ID NO: 2013428
auggcaaagcacaucuggc

SEQ ID NO: 2013430 - RNA, 19 nt, Artificial Sequence
  Description of Artificial Sequence: Synthetic oligonucleotide
  Sense strand starting at position 3404 of SEQ ID NO: 1881041
uggauauuagcauaucuua

SEQ ID NO: 2013431 - RNA, 19 nt, Artificial Sequence
  Description of Artificial Sequence: Synthetic oligonucleotide
  Antisense strand to SEQ ID NO: 2013430
uaagauaugcuaauaucca

SEQ ID NO: 2013432 - RNA, 19 nt, Artificial Sequence
  Description of Artificial Sequence: Synthetic oligonucleotide
  Sense strand starting at position 3452 of SEQ ID NO: 1881041
agucuaaugcauuaguacu

SEQ ID NO: 2013433 - RNA, 19 nt, Artificial Sequence
  Description of Artificial Sequence: Synthetic oligonucleotide
  Antisense strand to SEQ ID NO: 2013432
aguacuaaugcauuagacu

SEQ ID NO: 2013434 - RNA, 19 nt, Artificial Sequence
  Description of Artificial Sequence: Synthetic oligonucleotide
  Sense strand starting at position 3478 of SEQ ID NO: 1881041
ugaguauacaaauaguugu

SEQ ID NO: 2013435 - RNA, 19 nt, Artificial Sequence
  Description of Artificial Sequence: Synthetic oligonucleotide
  Antisense strand to SEQ ID NO: 2013434
acaacuauuuguauacuca

SEQ ID NO: 2013436 - RNA, 19 nt, Artificial Sequence
  Description of Artificial Sequence: Synthetic oligonucleotide
  Sense strand starting at position 3485 of SEQ ID NO: 1881041
acaaauaguuguccuaagu

SEQ ID NO: 2013437 - RNA, 19 nt, Artificial Sequence
  Description of Artificial Sequence: Synthetic oligonucleotide
  Antisense strand to SEQ ID NO: 2013436
acuuaggacaacuauuugu

SEQ ID NO: 2013438 - RNA, 19 nt, Artificial Sequence
  Description of Artificial Sequence: Synthetic oligonucleotide
  Sense strand starting at position 3491 of SEQ ID NO: 1881041
aguuguccuaaguggaaua

SEQ ID NO: 2013439 - RNA, 19 nt, Artificial Sequence
  Description of Artificial Sequence: Synthetic oligonucleotide
  Antisense strand to SEQ ID NO: 2013438
uauuccacuuaggacaacu

SEQ ID NO: 2013440 - RNA, 19 nt, Artificial Sequence
  Description of Artificial Sequence: Synthetic oligonucleotide
  Sense strand starting at position 3492 of SEQ ID NO: 1881041
guuguccuaaguggaauaa

SEQ ID NO: 2013441 - RNA, 19 nt, Artificial Sequence
  Description of Artificial Sequence: Synthetic oligonucleotide
  Antisense strand to SEQ ID NO: 2013440
uuauuccacuuaggacaac

SEQ ID NO: 2013442 - RNA, 19 nt, Artificial Sequence
  Description of Artificial Sequence: Synthetic oligonucleotide
  Sense strand starting at position 3870 of SEQ ID NO: 1881041
uguguaaaucuuggaggaa

SEQ ID NO: 2013443 - RNA, 19 nt, Artificial Sequence
  Description of Artificial Sequence: Synthetic oligonucleotide
  Antisense strand to SEQ ID NO: 2013442
uuccuccaagauuuacaca

SEQ ID NO: 2013444 - RNA, 19 nt, Artificial Sequence
  Description of Artificial Sequence: Synthetic oligonucleotide
  Sense strand starting at position 3911 of SEQ ID NO: 1881041
aacgccgaugucuacaaua

SEQ ID NO: 2013445 - RNA, 19 nt, Artificial Sequence
  Description of Artificial Sequence: Synthetic oligonucleotide
  Antisense strand to SEQ ID NO: 2013444
uauuguagacaucggcguu

SEQ ID NO: 2013446 - RNA, 19 nt, Artificial Sequence
  Description of Artificial Sequence: Synthetic oligonucleotide
  Sense strand starting at position 3913 of SEQ ID NO: 1881041
cgccgaugucuacaauaga

SEQ ID NO: 2013447 - RNA, 19 nt, Artificial Sequence
  Description of Artificial Sequence: Synthetic oligonucleotide
  Antisense strand to SEQ ID NO: 2013446
ucuauuguagacaucggcg

SEQ ID NO: 2013448 - RNA, 19 nt, Artificial Sequence
  Description of Artificial Sequence: Synthetic oligonucleotide
  Sense strand starting at position 3971 of SEQ ID NO: 1881041
gugaaacgcgaauaguaaa

SEQ ID NO: 2013449 - RNA, 19 nt, Artificial Sequence
  Description of Artificial Sequence: Synthetic oligonucleotide
  Antisense strand to SEQ ID NO: 2013448
uuuacuauucgcguuucac

SEQ ID NO: 2013450 - RNA, 19 nt, Artificial Sequence
  Description of Artificial Sequence: Synthetic oligonucleotide
  Sense strand starting at position 102 of SEQ ID NO: 1881042
ucuagaagaucacucugua

SEQ ID NO: 2013451 - RNA, 19 nt, Artificial Sequence
  Description of Artificial Sequence: Synthetic oligonucleotide
  Antisense strand to SEQ ID NO: 2013450
uacagagugaucuucuaga

SEQ ID NO: 2013452 - RNA, 19 nt, Artificial Sequence
  Description of Artificial Sequence: Synthetic oligonucleotide
  Sense strand starting at position 105 of SEQ ID NO: 1881042
agaagaucacucuguaagu

SEQ ID NO: 2013453 - RNA, 19 nt, Artificial Sequence
  Description of Artificial Sequence: Synthetic oligonucleotide
  Antisense strand to SEQ ID NO: 2013452
acuuacagagugaucuucu

SEQ ID NO: 2013454 - RNA, 19 nt, Artificial Sequence
  Description of Artificial Sequence: Synthetic oligonucleotide
  Sense strand starting at position 119 of SEQ ID NO: 1881042
uaaguauucgcugauugaa

SEQ ID NO: 2013455 - RNA, 19 nt, Artificial Sequence
  Description of Artificial Sequence: Synthetic oligonucleotide
  Antisense strand to SEQ ID NO: 2013454
uucaaucagcgaauacuua

SEQ ID NO: 2013456 - RNA, 19 nt, Artificial Sequence
  Description of Artificial Sequence: Synthetic oligonucleotide
  Sense strand starting at position 127 of SEQ ID NO: 1881042
cgcugauugaacggauuaa

SEQ ID NO: 2013457 - RNA, 19 nt, Artificial Sequence
  Description of Artificial Sequence: Synthetic oligonucleotide
  Antisense strand to SEQ ID NO: 2013456
uuaauccguucaaucagcg

SEQ ID NO: 2013458 - RNA, 19 nt, Artificial Sequence
  Description of Artificial Sequence: Synthetic oligonucleotide
  Sense strand starting at position 186 of SEQ ID NO: 1881042
uuuaaauggcaguaacuuu

SEQ ID NO: 2013459 - RNA, 19 nt, Artificial Sequence
  Description of Artificial Sequence: Synthetic oligonucleotide
  Antisense strand to SEQ ID NO: 2013458
aaaguuacugccauuuaaa

SEQ ID NO: 2013460 - RNA, 19 nt, Artificial Sequence
  Description of Artificial Sequence: Synthetic oligonucleotide
  Sense strand starting at position 195 of SEQ ID NO: 1881042
caguaacuuuggguucuaa

SEQ ID NO: 2013461 - RNA, 19 nt, Artificial Sequence
  Description of Artificial Sequence: Synthetic oligonucleotide
  Antisense strand to SEQ ID NO: 2013460
uuagaacccaaaguuacug

SEQ ID NO: 2013462 - RNA, 19 nt, Artificial Sequence
  Description of Artificial Sequence: Synthetic oligonucleotide
  Sense strand starting at position 207 of SEQ ID NO: 1881042
guucuaagguuguucucaa

SEQ ID NO: 2013463 - RNA, 19 nt, Artificial Sequence
  Description of Artificial Sequence: Synthetic oligonucleotide
  Antisense strand to SEQ ID NO: 2013462
uugagaacaaccuuagaac

SEQ ID NO: 2013464 - RNA, 19 nt, Artificial Sequence
  Description of Artificial Sequence: Synthetic oligonucleotide
  Sense strand starting at position 214 of SEQ ID NO: 1881042
gguuguucucaacaagaac

SEQ ID NO: 2013465 - RNA, 19 nt, Artificial Sequence
  Description of Artificial Sequence: Synthetic oligonucleotide
  Antisense strand to SEQ ID NO: 2013464
guucuuguugagaacaacc

SEQ ID NO: 2013466 - RNA, 19 nt, Artificial Sequence
  Description of Artificial Sequence: Synthetic oligonucleotide
  Sense strand starting at position 234 of SEQ ID NO: 1881042
ggaagaccuuagguaaguu

SEQ ID NO: 2013467 - RNA, 19 nt, Artificial Sequence
  Description of Artificial Sequence: Synthetic oligonucleotide
  Antisense strand to SEQ ID NO: 2013466
aacuuaccuaaggucuucc

SEQ ID NO: 2013468 - RNA, 19 nt, Artificial Sequence
  Description of Artificial Sequence: Synthetic oligonucleotide
  Sense strand starting at position 661 of SEQ ID NO: 1881042
uccagaucagcccgggaaa

SEQ ID NO: 2013469 - RNA, 19 nt, Artificial Sequence
  Description of Artificial Sequence: Synthetic oligonucleotide
  Antisense strand to SEQ ID NO: 2013468
uuucccgggcugaucugga

SEQ ID NO: 2013470 - RNA, 19 nt, Artificial Sequence
  Description of Artificial Sequence: Synthetic oligonucleotide
  Sense strand starting at position 798 of SEQ ID NO: 1881042
aguuaauauuacuugacag

SEQ ID NO: 2013471 - RNA, 19 nt, Artificial Sequence
  Description of Artificial Sequence: Synthetic oligonucleotide
  Antisense strand to SEQ ID NO: 2013470
cugucaaguaauauuaacu

SEQ ID NO: 2013472 - RNA, 19 nt, Artificial Sequence
  Description of Artificial Sequence: Synthetic oligonucleotide
  Sense strand starting at position 854 of SEQ ID NO: 1881042
gugguugcccaagacuagu

SEQ ID NO: 2013473 - RNA, 19 nt, Artificial Sequence
  Description of Artificial Sequence: Synthetic oligonucleotide
  Antisense strand to SEQ ID NO: 2013472
acuagucuugggcaaccac

SEQ ID NO: 2013474 - RNA, 19 nt, Artificial Sequence
  Description of Artificial Sequence: Synthetic oligonucleotide
  Sense strand starting at position 910 of SEQ ID NO: 1881042
gagcucaggaguuggagua

SEQ ID NO: 2013475 - RNA, 19 nt, Artificial Sequence
  Description of Artificial Sequence: Synthetic oligonucleotide
  Antisense strand to SEQ ID NO: 2013474
uacuccaacuccugagcuc

SEQ ID NO: 2013476 - RNA, 19 nt, Artificial Sequence
  Description of Artificial Sequence: Synthetic oligonucleotide
  Sense strand starting at position 1085 of SEQ ID NO: 1881042
cuuccuugacuccagucau

SEQ ID NO: 2013477 - RNA, 19 nt, Artificial Sequence
  Description of Artificial Sequence: Synthetic oligonucleotide
  Antisense strand to SEQ ID NO: 2013476
augacuggagucaaggaag

SEQ ID NO: 2013478 - RNA, 19 nt, Artificial Sequence
  Description of Artificial Sequence: Synthetic oligonucleotide
  Sense strand starting at position 1237 of SEQ ID NO: 1881042
uuguuaugacaucgguaaa

SEQ ID NO: 2013479 - RNA, 19 nt, Artificial Sequence
  Description of Artificial Sequence: Synthetic oligonucleotide
  Antisense strand to SEQ ID NO: 2013478
uuuaccgaugucauaacaa

SEQ ID NO: 2013480 - RNA, 19 nt, Artificial Sequence
  Description of Artificial Sequence: Synthetic oligonucleotide
  Sense strand starting at position 1238 of SEQ ID NO: 1881042
uguuaugacaucgguaaac

SEQ ID NO: 2013481 - RNA, 19 nt, Artificial Sequence
  Description of Artificial Sequence: Synthetic oligonucleotide
  Antisense strand to SEQ ID NO: 2013480
guuuaccgaugucauaaca

SEQ ID NO: 2013482 - RNA, 19 nt, Artificial Sequence
  Description of Artificial Sequence: Synthetic oligonucleotide
  Sense strand starting at position 1240 of SEQ ID NO: 1881042
uuaugacaucgguaaacug

SEQ ID NO: 2013483 - RNA, 19 nt, Artificial Sequence
  Description of Artificial Sequence: Synthetic oligonucleotide
  Antisense strand to SEQ ID NO: 2013482
caguuuaccgaugucauaa

SEQ ID NO: 2013484 - RNA, 19 nt, Artificial Sequence
  Description of Artificial Sequence: Synthetic oligonucleotide
  Sense strand starting at position 2183 of SEQ ID NO: 1881042
ggcaaagguuggagaaagu

SEQ ID NO: 2013485 - RNA, 19 nt, Artificial Sequence
  Description of Artificial Sequence: Synthetic oligonucleotide
  Antisense strand to SEQ ID NO: 2013484
acuuucuccaaccuuugcc

SEQ ID NO: 2013486 - RNA, 19 nt, Artificial Sequence
  Description of Artificial Sequence: Synthetic oligonucleotide
  Sense strand starting at position 2190 of SEQ ID NO: 1881042
guuggagaaaguuauaugu

SEQ ID NO: 2013487 - RNA, 19 nt, Artificial Sequence
  Description of Artificial Sequence: Synthetic oligonucleotide
  Antisense strand to SEQ ID NO: 2013486
acauauaacuuucuccaac

SEQ ID NO: 2013488 - RNA, 19 nt, Artificial Sequence
  Description of Artificial Sequence: Synthetic oligonucleotide
  Sense strand starting at position 2276 of SEQ ID NO: 1881042
cuaauacgcguugauggaa

SEQ ID NO: 2013489 - RNA, 19 nt, Artificial Sequence
  Description of Artificial Sequence: Synthetic oligonucleotide
  Antisense strand to SEQ ID NO: 2013488
uuccaucaacgcguauuag

SEQ ID NO: 2013490 - RNA, 19 nt, Artificial Sequence
  Description of Artificial Sequence: Synthetic oligonucleotide
  Sense strand starting at position 2365 of SEQ ID NO: 1881042
gcucacaugcagcaugaau

SEQ ID NO: 2013491 - RNA, 19 nt, Artificial Sequence
  Description of Artificial Sequence: Synthetic oligonucleotide
  Antisense strand to SEQ ID NO: 2013490
auucaugcugcaugugagc

SEQ ID NO: 2013492 - RNA, 19 nt, Artificial Sequence
  Description of Artificial Sequence: Synthetic oligonucleotide
  Sense strand starting at position 2848 of SEQ ID NO: 1881042
uggagcaaaugauugcuaa

SEQ ID NO: 2013493 - RNA, 19 nt, Artificial Sequence
  Description of Artificial Sequence: Synthetic oligonucleotide
  Antisense strand to SEQ ID NO: 2013492
uuagcaaucauuugcucca

SEQ ID NO: 2013494 - RNA, 19 nt, Artificial Sequence
  Description of Artificial Sequence: Synthetic oligonucleotide
  Sense strand starting at position 2849 of SEQ ID NO: 1881042
ggagcaaaugauugcuaau

SEQ ID NO: 2013495 - RNA, 19 nt, Artificial Sequence
  Description of Artificial Sequence: Synthetic oligonucleotide
  Antisense strand to SEQ ID NO: 2013494
auuagcaaucauuugcucc

SEQ ID NO: 2013496 - RNA, 19 nt, Artificial Sequence
  Description of Artificial Sequence: Synthetic oligonucleotide
  Sense strand starting at position 2851 of SEQ ID NO: 1881042
agcaaaugauugcuaaugu

SEQ ID NO: 2013497 - RNA, 19 nt, Artificial Sequence
  Description of Artificial Sequence: Synthetic oligonucleotide
  Antisense strand to SEQ ID NO: 2013496
acauuagcaaucauuugcu

SEQ ID NO: 2013498 - RNA, 19 nt, Artificial Sequence
  Description of Artificial Sequence: Synthetic oligonucleotide
  Sense strand starting at position 3005 of SEQ ID NO: 1881042
gagguagauuaauacauuu

SEQ ID NO: 2013499 - RNA, 19 nt, Artificial Sequence
  Description of Artificial Sequence: Synthetic oligonucleotide
  Antisense strand to SEQ ID NO: 2013498
aaauguauuaaucuaccuc

SEQ ID NO: 2013500 - RNA, 19 nt, Artificial Sequence
  Description of Artificial Sequence: Synthetic oligonucleotide
  Sense strand starting at position 3065 of SEQ ID NO: 1881042
accugaauccuagguuaug

SEQ ID NO: 2013501 - RNA, 19 nt, Artificial Sequence
  Description of Artificial Sequence: Synthetic oligonucleotide
  Antisense strand to SEQ ID NO: 2013500
cauaaccuaggauucaggu

SEQ ID NO: 2013502 - RNA, 19 nt, Artificial Sequence
  Description of Artificial Sequence: Synthetic oligonucleotide
  Sense strand starting at position 3068 of SEQ ID NO: 1881042
ugaauccuagguuaugcaa

SEQ ID NO: 2013503 - RNA, 19 nt, Artificial Sequence
  Description of Artificial Sequence: Synthetic oligonucleotide
  Antisense strand to SEQ ID NO: 2013502
uugcauaaccuaggauuca

SEQ ID NO: 2013504 - RNA, 19 nt, Artificial Sequence
  Description of Artificial Sequence: Synthetic oligonucleotide
  Sense strand starting at position 3134 of SEQ ID NO: 1881042
ugauguuguguuuacuaag

SEQ ID NO: 2013505 - RNA, 19 nt, Artificial Sequence
  Description of Artificial Sequence: Synthetic oligonucleotide
  Antisense strand to SEQ ID NO: 2013504
cuuaguaaacacaacauca

SEQ ID NO: 2013506 - RNA, 19 nt, Artificial Sequence
  Description of Artificial Sequence: Synthetic oligonucleotide
  Sense strand starting at position 3143 of SEQ ID NO: 1881042
guuuacuaagaucagaguu

SEQ ID NO: 2013507 - RNA, 19 nt, Artificial Sequence
  Description of Artificial Sequence: Synthetic oligonucleotide
  Antisense strand to SEQ ID NO: 2013506
aacucugaucuuaguaaac

SEQ ID NO: 2013508 - RNA, 19 nt, Artificial Sequence
  Description of Artificial Sequence: Synthetic oligonucleotide
  Sense strand starting at position 3192 of SEQ ID NO: 1881042
agguguguucaacaggaga

SEQ ID NO: 2013509 - RNA, 19 nt, Artificial Sequence
  Description of Artificial Sequence: Synthetic oligonucleotide
  Antisense strand to SEQ ID NO: 2013508
ucuccuguugaacacaccu

SEQ ID NO: 2013510 - RNA, 19 nt, Artificial Sequence
  Description of Artificial Sequence: Synthetic oligonucleotide
  Sense strand starting at position 3218 of SEQ ID NO: 1881042
gggcaaguuugccugacca

SEQ ID NO: 2013511 - RNA, 19 nt, Artificial Sequence
  Description of Artificial Sequence: Synthetic oligonucleotide
  Antisense strand to SEQ ID NO: 2013510
uggucaggcaaacuugccc

SEQ ID NO: 2013512 - RNA, 19 nt, Artificial Sequence
  Description of Artificial Sequence: Synthetic oligonucleotide
  Sense strand starting at position 3220 of SEQ ID NO: 1881042
gcaaguuugccugaccaca

SEQ ID NO: 2013513 - RNA, 19 nt, Artificial Sequence
  Description of Artificial Sequence: Synthetic oligonucleotide
  Antisense strand to SEQ ID NO: 2013512
uguggucaggcaaacuugc

SEQ ID NO: 2013514 - RNA, 19 nt, Artificial Sequence
  Description of Artificial Sequence: Synthetic oligonucleotide
  Sense strand starting at position 3299 of SEQ ID NO: 1881042
ggucuucagucuuugggaa

SEQ ID NO: 2013515 - RNA, 19 nt, Artificial Sequence
  Description of Artificial Sequence: Synthetic oligonucleotide
  Antisense strand to SEQ ID NO: 2013514
uucccaaagacugaagacc

SEQ ID NO: 2013516 - RNA, 19 nt, Artificial Sequence
  Description of Artificial Sequence: Synthetic oligonucleotide
  Sense strand starting at position 3621 of SEQ ID NO: 1881042
aguuguucucuguagugga

SEQ ID NO: 2013517 - RNA, 19 nt, Artificial Sequence
  Description of Artificial Sequence: Synthetic oligonucleotide
  Antisense strand to SEQ ID NO: 2013516
uccacuacagagaacaacu

SEQ ID NO: 2013518 - RNA, 19 nt, Artificial Sequence
  Description of Artificial Sequence: Synthetic oligonucleotide
  Sense strand starting at position 3674 of SEQ ID NO: 1881042
gaaguugaauuccuaugua

SEQ ID NO: 2013519 - RNA, 19 nt, Artificial Sequence
  Description of Artificial Sequence: Synthetic oligonucleotide
  Antisense strand to SEQ ID NO: 2013518
uacauaggaauucaacuuc

SEQ ID NO: 2013520 - RNA, 19 nt, Artificial Sequence
  Description of Artificial Sequence: Synthetic oligonucleotide
  Sense strand starting at position 3678 of SEQ ID NO: 1881042
uugaauuccuauguauguu

SEQ ID NO: 2013521 - RNA, 19 nt, Artificial Sequence
  Description of Artificial Sequence: Synthetic oligonucleotide
  Antisense strand to SEQ ID NO: 2013520
aacauacauaggaauucaa

SEQ ID NO: 2013522 - RNA, 19 nt, Artificial Sequence
  Description of Artificial Sequence: Synthetic oligonucleotide
  Sense strand starting at position 3740 of SEQ ID NO: 1881042
gcuacugucucucugacaa

SEQ ID NO: 2013523 - RNA, 19 nt, Artificial Sequence
  Description of Artificial Sequence: Synthetic oligonucleotide
  Antisense strand to SEQ ID NO: 2013522
uugucagagagacaguagc

SEQ ID NO: 2013524 - RNA, 19 nt, Artificial Sequence
  Description of Artificial Sequence: Synthetic oligonucleotide
  Sense strand starting at position 3905 of SEQ ID NO: 1881042
auguaucaggcagaaaucu

SEQ ID NO: 2013525 - RNA, 19 nt, Artificial Sequence
  Description of Artificial Sequence: Synthetic oligonucleotide
  Antisense strand to SEQ ID NO: 2013524
agauuucugccugauacau

SEQ ID NO: 2013526 - RNA, 19 nt, Artificial Sequence
  Description of Artificial Sequence: Synthetic oligonucleotide
  Sense strand starting at position 3949 of SEQ ID NO: 1881042
ccugguguugccuauauaa

SEQ ID NO: 2013527 - RNA, 19 nt, Artificial Sequence
  Description of Artificial Sequence: Synthetic oligonucleotide
  Antisense strand to SEQ ID NO: 2013526
uuauauaggcaacaccagg

SEQ ID NO: 2013528 - RNA, 19 nt, Artificial Sequence
  Description of Artificial Sequence: Synthetic oligonucleotide
  Sense strand starting at position 3951 of SEQ ID NO: 1881042
ugguguugccuauauaauc

SEQ ID NO: 2013529 - RNA, 19 nt, Artificial Sequence
  Description of Artificial Sequence: Synthetic oligonucleotide
  Antisense strand to SEQ ID NO: 2013528
gauuauauaggcaacacca

SEQ ID NO: 2013530 - RNA, 19 nt, Artificial Sequence
  Description of Artificial Sequence: Synthetic oligonucleotide
  Sense strand starting at position 181 of SEQ ID NO: 1881043
uauacaaguggguggaaau

SEQ ID NO: 2013531 - RNA, 19 nt, Artificial Sequence
  Description of Artificial Sequence: Synthetic oligonucleotide
  Antisense strand to SEQ ID NO: 2013530
auuuccacccacuuguaua

SEQ ID NO: 2013532 - RNA, 19 nt, Artificial Sequence
  Description of Artificial Sequence: Synthetic oligonucleotide
  Sense strand starting at position 182 of SEQ ID NO: 1881043
auacaaguggguggaaauu

SEQ ID NO: 2013533 - RNA, 19 nt, Artificial Sequence
  Description of Artificial Sequence: Synthetic oligonucleotide
  Antisense strand to SEQ ID NO: 2013532
aauuuccacccacuuguau

SEQ ID NO: 2013534 - RNA, 19 nt, Artificial Sequence
  Description of Artificial Sequence: Synthetic oligonucleotide
  Sense strand starting at position 220 of SEQ ID NO: 1881043
acaggaguucuguagucuc

SEQ ID NO: 2013535 - RNA, 19 nt, Artificial Sequence
  Description of Artificial Sequence: Synthetic oligonucleotide
  Antisense strand to SEQ ID NO: 2013534
gagacuacagaacuccugu

SEQ ID NO: 2013536 - RNA, 19 nt, Artificial Sequence
  Description of Artificial Sequence: Synthetic oligonucleotide
  Sense strand starting at position 360 of SEQ ID NO: 1881043
ccaucucuucuugaaagug

SEQ ID NO: 2013537 - RNA, 19 nt, Artificial Sequence
  Description of Artificial Sequence: Synthetic oligonucleotide
  Antisense strand to SEQ ID NO: 2013536
cacuuucaagaagagaugg

SEQ ID NO: 2013538 - RNA, 19 nt, Artificial Sequence
  Description of Artificial Sequence: Synthetic oligonucleotide
  Sense strand starting at position 736 of SEQ ID NO: 1881043
gugcucauuugucuuccua

SEQ ID NO: 2013539 - RNA, 19 nt, Artificial Sequence
  Description of Artificial Sequence: Synthetic oligonucleotide
  Antisense strand to SEQ ID NO: 2013538
uaggaagacaaaugagcac

SEQ ID NO: 2013540 - RNA, 19 nt, Artificial Sequence
  Description of Artificial Sequence: Synthetic oligonucleotide
  Sense strand starting at position 738 of SEQ ID NO: 1881043
gcucauuugucuuccuaca

SEQ ID NO: 2013541 - RNA, 19 nt, Artificial Sequence
  Description of Artificial Sequence: Synthetic oligonucleotide
  Antisense strand to SEQ ID NO: 2013540
uguaggaagacaaaugagc

SEQ ID NO: 2013542 - RNA, 19 nt, Artificial Sequence
  Description of Artificial Sequence: Synthetic oligonucleotide
  Sense strand starting at position 740 of SEQ ID NO: 1881043
ucauuugucuuccuacagu

SEQ ID NO: 2013543 - RNA, 19 nt, Artificial Sequence
  Description of Artificial Sequence: Synthetic oligonucleotide
  Antisense strand to SEQ ID NO: 2013542
acuguaggaagacaaauga

SEQ ID NO: 2013544 - RNA, 19 nt, Artificial Sequence
  Description of Artificial Sequence: Synthetic oligonucleotide
  Sense strand starting at position 1101 of SEQ ID NO: 1881043
ugguaauguauggaaguga

SEQ ID NO: 2013545 - RNA, 19 nt, Artificial Sequence
  Description of Artificial Sequence: Synthetic oligonucleotide
  Antisense strand to SEQ ID NO: 2013544
ucacuuccauacauuacca

SEQ ID NO: 2013546 - RNA, 19 nt, Artificial Sequence
  Description of Artificial Sequence: Synthetic oligonucleotide
  Sense strand starting at position 1149 of SEQ ID NO: 1881043
auucuaggagugcaaucau

SEQ ID NO: 2013547 - RNA, 19 nt, Artificial Sequence
  Description of Artificial Sequence: Synthetic oligonucleotide
  Antisense strand to SEQ ID NO: 2013546
augauugcacuccuagaau

SEQ ID NO: 2013548 - RNA, 19 nt, Artificial Sequence
  Description of Artificial Sequence: Synthetic oligonucleotide
  Sense strand starting at position 1156 of SEQ ID NO: 1881043
gagugcaaucauuacagca

SEQ ID NO: 2013549 - RNA, 19 nt, Artificial Sequence
  Description of Artificial Sequence: Synthetic oligonucleotide
  Antisense strand to SEQ ID NO: 2013548
ugcuguaaugauugcacuc

SEQ ID NO: 2013550 - RNA, 19 nt, Artificial Sequence
  Description of Artificial Sequence: Synthetic oligonucleotide
  Sense strand starting at position 1179 of SEQ ID NO: 1881043
aagagaaguccugguugua

SEQ ID NO: 2013551 - RNA, 19 nt, Artificial Sequence
  Description of Artificial Sequence: Synthetic oligonucleotide
  Antisense strand to SEQ ID NO: 2013550
uacaaccaggacuucucuu

SEQ ID NO: 2013552 - RNA, 19 nt, Artificial Sequence
  Description of Artificial Sequence: Synthetic oligonucleotide
  Sense strand starting at position 1285 of SEQ ID NO: 1881043
gcauauucuggguaagacu

SEQ ID NO: 2013553 - RNA, 19 nt, Artificial Sequence
  Description of Artificial Sequence: Synthetic oligonucleotide
  Antisense strand to SEQ ID NO: 2013552
agucuuacccagaauaugc

SEQ ID NO: 2013554 - RNA, 19 nt, Artificial Sequence
  Description of Artificial Sequence: Synthetic oligonucleotide
  Sense strand starting at position 1317 of SEQ ID NO: 1881043
auuguagcacaguaauaaa

SEQ ID NO: 2013555 - RNA, 19 nt, Artificial Sequence
  Description of Artificial Sequence: Synthetic oligonucleotide
  Antisense strand to SEQ ID NO: 2013554
uuuauuacugugcuacaau

SEQ ID NO: 2013556 - RNA, 19 nt, Artificial Sequence
  Description of Artificial Sequence: Synthetic oligonucleotide
  Sense strand starting at position 1763 of SEQ ID NO: 1881043
ggcucuguagcgucgagau

SEQ ID NO: 2013557 - RNA, 19 nt, Artificial Sequence
  Description of Artificial Sequence: Synthetic oligonucleotide
  Antisense strand to SEQ ID NO: 2013556
aucucgacgcuacagagcc

SEQ ID NO: 2013558 - RNA, 19 nt, Artificial Sequence
  Description of Artificial Sequence: Synthetic oligonucleotide
  Sense strand starting at position 2061 of SEQ ID NO: 1881043
aaaucaguuggugaucagu

SEQ ID NO: 2013559 - RNA, 19 nt, Artificial Sequence
  Description of Artificial Sequence: Synthetic oligonucleotide
  Antisense strand to SEQ ID NO: 2013558
acugaucaccaacugauuu

SEQ ID NO: 2013560 - RNA, 19 nt, Artificial Sequence
  Description of Artificial Sequence: Synthetic oligonucleotide
  Sense strand starting at position 2064 of SEQ ID NO: 1881043
ucaguuggugaucaguuau

SEQ ID NO: 2013561 - RNA, 19 nt, Artificial Sequence
  Description of Artificial Sequence: Synthetic oligonucleotide
  Antisense strand to SEQ ID NO: 2013560
auaacugaucaccaacuga

SEQ ID NO: 2013562 - RNA, 19 nt, Artificial Sequence
  Description of Artificial Sequence: Synthetic oligonucleotide
  Sense strand starting at position 2224 of SEQ ID NO: 1881043
ggcucauaagaauguuaaa

SEQ ID NO: 2013563 - RNA, 19 nt, Artificial Sequence
  Description of Artificial Sequence: Synthetic oligonucleotide
  Antisense strand to SEQ ID NO: 2013562
uuuaacauucuuaugagcc

SEQ ID NO: 2013564 - RNA, 19 nt, Artificial Sequence
  Description of Artificial Sequence: Synthetic oligonucleotide
  Sense strand starting at position 2300 of SEQ ID NO: 1881043
guuuccuauguacaggauu

SEQ ID NO: 2013565 - RNA, 19 nt, Artificial Sequence
  Description of Artificial Sequence: Synthetic oligonucleotide
  Antisense strand to SEQ ID NO: 2013564
aauccuguacauaggaaac

SEQ ID NO: 2013566 - RNA, 19 nt, Artificial Sequence
  Description of Artificial Sequence: Synthetic oligonucleotide
  Sense strand starting at position 2312 of SEQ ID NO: 1881043
caggauuggagaugucgaa

SEQ ID NO: 2013567 - RNA, 19 nt, Artificial Sequence
  Description of Artificial Sequence: Synthetic oligonucleotide
  Antisense strand to SEQ ID NO: 2013566
uucgacaucuccaauccug

SEQ ID NO: 2013568 - RNA, 19 nt, Artificial Sequence
  Description of Artificial Sequence: Synthetic oligonucleotide
  Sense strand starting at position 2466 of SEQ ID NO: 1881043
gggagugugauuuguucuc

SEQ ID NO: 2013569 - RNA, 19 nt, Artificial Sequence
  Description of Artificial Sequence: Synthetic oligonucleotide
  Antisense strand to SEQ ID NO: 2013568
gagaacaaaucacacuccc

SEQ ID NO: 2013570 - RNA, 19 nt, Artificial Sequence
  Description of Artificial Sequence: Synthetic oligonucleotide
  Sense strand starting at position 2468 of SEQ ID NO: 1881043
gagugugauuuguucucca

SEQ ID NO: 2013571 - RNA, 19 nt, Artificial Sequence
  Description of Artificial Sequence: Synthetic oligonucleotide
  Antisense strand to SEQ ID NO: 2013570
uggagaacaaaucacacuc

SEQ ID NO: 2013572 - RNA, 19 nt, Artificial Sequence
  Description of Artificial Sequence: Synthetic oligonucleotide
  Sense strand starting at position 2472 of SEQ ID NO: 1881043
gugauuuguucuccaaugu

SEQ ID NO: 2013573 - RNA, 19 nt, Artificial Sequence
  Description of Artificial Sequence: Synthetic oligonucleotide
  Antisense strand to SEQ ID NO: 2013572
acauuggagaacaaaucac

SEQ ID NO: 2013574 - RNA, 19 nt, Artificial Sequence
  Description of Artificial Sequence: Synthetic oligonucleotide
  Sense strand starting at position 2602 of SEQ ID NO: 1881043
gauuucccuuucgcagauu

SEQ ID NO: 2013575 - RNA, 19 nt, Artificial Sequence
  Description of Artificial Sequence: Synthetic oligonucleotide
  Antisense strand to SEQ ID NO: 2013574
aaucugcgaaagggaaauc

SEQ ID NO: 2013576 - RNA, 19 nt, Artificial Sequence
  Description of Artificial Sequence: Synthetic oligonucleotide
  Sense strand starting at position 2614 of SEQ ID NO: 1881043
gcagauugucagcugugca

SEQ ID NO: 2013577 - RNA, 19 nt, Artificial Sequence
  Description of Artificial Sequence: Synthetic oligonucleotide
  Antisense strand to SEQ ID NO: 2013576
ugcacagcugacaaucugc

SEQ ID NO: 2013578 - RNA, 19 nt, Artificial Sequence
  Description of Artificial Sequence: Synthetic oligonucleotide
  Sense strand starting at position 2680 of SEQ ID NO: 1881043
uuaaguauccacuguaagg

SEQ ID NO: 2013579 - RNA, 19 nt, Artificial Sequence
  Description of Artificial Sequence: Synthetic oligonucleotide
  Antisense strand to SEQ ID NO: 2013578
ccuuacaguggauacuuaa

SEQ ID NO: 2013580 - RNA, 19 nt, Artificial Sequence
  Description of Artificial Sequence: Synthetic oligonucleotide
  Sense strand starting at position 2799 of SEQ ID NO: 1881043
uuacccuuucuuggacaga

SEQ ID NO: 2013581 - RNA, 19 nt, Artificial Sequence
  Description of Artificial Sequence: Synthetic oligonucleotide
  Antisense strand to SEQ ID NO: 2013580
ucuguccaagaaaggguaa

SEQ ID NO: 2013582 - RNA, 19 nt, Artificial Sequence
  Description of Artificial Sequence: Synthetic oligonucleotide
  Sense strand starting at position 3140 of SEQ ID NO: 1881043
uaaggucuaugaguauaug

SEQ ID NO: 2013583 - RNA, 19 nt, Artificial Sequence
  Description of Artificial Sequence: Synthetic oligonucleotide
  Antisense strand to SEQ ID NO: 2013582
cauauacucauagaccuua

SEQ ID NO: 2013584 - RNA, 19 nt, Artificial Sequence
  Description of Artificial Sequence: Synthetic oligonucleotide
  Sense strand starting at position 3143 of SEQ ID NO: 1881043
ggucuaugaguauaugcac

SEQ ID NO: 2013585 - RNA, 19 nt, Artificial Sequence
  Description of Artificial Sequence: Synthetic oligonucleotide
  Antisense strand to SEQ ID NO: 2013584
gugcauauacucauagacc

SEQ ID NO: 2013586 - RNA, 19 nt, Artificial Sequence
  Description of Artificial Sequence: Synthetic oligonucleotide
  Sense strand starting at position 3400 of SEQ ID NO: 1881043
auguuaugaaguugaugga

SEQ ID NO: 2013587 - RNA, 19 nt, Artificial Sequence
  Description of Artificial Sequence: Synthetic oligonucleotide
  Antisense strand to SEQ ID NO: 2013586
uccaucaacuucauaacau

SEQ ID NO: 2013588 - RNA, 19 nt, Artificial Sequence
  Description of Artificial Sequence: Synthetic oligonucleotide
  Sense strand starting at position 3401 of SEQ ID NO: 1881043
uguuaugaaguugauggau

SEQ ID NO: 2013589 - RNA, 19 nt, Artificial Sequence
  Description of Artificial Sequence: Synthetic oligonucleotide
  Antisense strand to SEQ ID NO: 2013588
auccaucaacuucauaaca

SEQ ID NO: 2013590 - RNA, 19 nt, Artificial Sequence
  Description of Artificial Sequence: Synthetic oligonucleotide
  Sense strand starting at position 3477 of SEQ ID NO: 1881043
cugaaugaguaucuuguau

SEQ ID NO: 2013591 - RNA, 19 nt, Artificial Sequence
  Description of Artificial Sequence: Synthetic oligonucleotide
  Antisense strand to SEQ ID NO: 2013590
auacaagauacucauucag

SEQ ID NO: 2013592 - RNA, 19 nt, Artificial Sequence
  Description of Artificial Sequence: Synthetic oligonucleotide
  Sense strand starting at position 3510 of SEQ ID NO: 1881043
guaguagggaggcaucaaa

SEQ ID NO: 2013593 - RNA, 19 nt, Artificial Sequence
  Description of Artificial Sequence: Synthetic oligonucleotide
  Antisense strand to SEQ ID NO: 2013592
uuugaugccucccuacuac

SEQ ID NO: 2013594 - RNA, 19 nt, Artificial Sequence
  Description of Artificial Sequence: Synthetic oligonucleotide
  Sense strand starting at position 3697 of SEQ ID NO: 1881043
uuaucuguacuguauggau

SEQ ID NO: 2013595 - RNA, 19 nt, Artificial Sequence
  Description of Artificial Sequence: Synthetic oligonucleotide
  Antisense strand to SEQ ID NO: 2013594
auccauacaguacagauaa

SEQ ID NO: 2013596 - RNA, 19 nt, Artificial Sequence
  Description of Artificial Sequence: Synthetic oligonucleotide
  Sense strand starting at position 3718 of SEQ ID NO: 1881043
cagggaucuuaacuguuua

SEQ ID NO: 2013597 - RNA, 19 nt, Artificial Sequence
  Description of Artificial Sequence: Synthetic oligonucleotide
  Antisense strand to SEQ ID NO: 2013596
uaaacaguuaagaucccug

SEQ ID NO: 2013598 - RNA, 19 nt, Artificial Sequence
  Description of Artificial Sequence: Synthetic oligonucleotide
  Sense strand starting at position 3813 of SEQ ID NO: 1881043
ugauguauucuauggauua

SEQ ID NO: 2013599 - RNA, 19 nt, Artificial Sequence
  Description of Artificial Sequence: Synthetic oligonucleotide
  Antisense strand to SEQ ID NO: 2013598
uaauccauagaauacauca

SEQ ID NO: 2013600 - RNA, 19 nt, Artificial Sequence
  Description of Artificial Sequence: Synthetic oligonucleotide
  Sense strand starting at position 3820 of SEQ ID NO: 1881043
uucuauggauuagcugaaa

SEQ ID NO: 2013601 - RNA, 19 nt, Artificial Sequence
  Description of Artificial Sequence: Synthetic oligonucleotide
  Antisense strand to SEQ ID NO: 2013600
uuucagcuaauccauagaa

SEQ ID NO: 2013602 - RNA, 19 nt, Artificial Sequence
  Description of Artificial Sequence: Synthetic oligonucleotide
  Sense strand starting at position 3868 of SEQ ID NO: 1881043
acucauuccguggaugauu

SEQ ID NO: 2013603 - RNA, 19 nt, Artificial Sequence
  Description of Artificial Sequence: Synthetic oligonucleotide
  Antisense strand to SEQ ID NO: 2013602
aaucauccacggaaugagu

SEQ ID NO: 2013604 - RNA, 19 nt, Artificial Sequence
  Description of Artificial Sequence: Synthetic oligonucleotide
  Sense strand starting at position 3879 of SEQ ID NO: 1881043
ggaugauucuaccuccuuu

SEQ ID NO: 2013605 - RNA, 19 nt, Artificial Sequence
  Description of Artificial Sequence: Synthetic oligonucleotide
  Antisense strand to SEQ ID NO: 2013604
aaaggagguagaaucaucc

SEQ ID NO: 2013606 - RNA, 19 nt, Artificial Sequence
  Description of Artificial Sequence: Synthetic oligonucleotide
  Sense strand starting at position 3917 of SEQ ID NO: 1881043
ugcuaucucgccuuuguga

SEQ ID NO: 2013607 - RNA, 19 nt, Artificial Sequence
  Description of Artificial Sequence: Synthetic oligonucleotide
  Antisense strand to SEQ ID NO: 2013606
ucacaaaggcgagauagca

SEQ ID NO: 2013608 - RNA, 19 nt, Artificial Sequence
  Description of Artificial Sequence: Synthetic oligonucleotide
  Sense strand starting at position 3957 of SEQ ID NO: 1881043
aaugaacgguuauugauau

SEQ ID NO: 2013609 - RNA, 19 nt, Artificial Sequence
  Description of Artificial Sequence: Synthetic oligonucleotide
  Antisense strand to SEQ ID NO: 2013608
auaucaauaaccguucauu

SEQ ID NO: 2013610 - RNA, 19 nt, Artificial Sequence
  Description of Artificial Sequence: Synthetic oligonucleotide
  Sense strand starting at position 14 of SEQ ID NO: 1881044
aagcaaagaguuuguaaca

SEQ ID NO: 2013611 - RNA, 19 nt, Artificial Sequence
  Description of Artificial Sequence: Synthetic oligonucleotide
  Antisense strand to SEQ ID NO: 2013610
uguuacaaacucuuugcuu

SEQ ID NO: 2013612 - RNA, 19 nt, Artificial Sequence
  Description of Artificial Sequence: Synthetic oligonucleotide
  Sense strand starting at position 15 of SEQ ID NO: 1881044
agcaaagaguuuguaacau

SEQ ID NO: 2013613 - RNA, 19 nt, Artificial Sequence
  Description of Artificial Sequence: Synthetic oligonucleotide
  Antisense strand to SEQ ID NO: 2013612
auguuacaaacucuuugcu

SEQ ID NO: 2013614 - RNA, 19 nt, Artificial Sequence
  Description of Artificial Sequence: Synthetic oligonucleotide
  Sense strand starting at position 23 of SEQ ID NO: 1881044
guuuguaacauucgaggca

SEQ ID NO: 2013615 - RNA, 19 nt, Artificial Sequence
  Description of Artificial Sequence: Synthetic oligonucleotide
  Antisense strand to SEQ ID NO: 2013614
ugccucgaauguuacaaac

SEQ ID NO: 2013616 - RNA, 19 nt, Artificial Sequence
  Description of Artificial Sequence: Synthetic oligonucleotide
  Sense strand starting at position 51 of SEQ ID NO: 1881044
uggaguuauuccuuggacu

SEQ ID NO: 2013617 - RNA, 19 nt, Artificial Sequence
  Description of Artificial Sequence: Synthetic oligonucleotide
  Antisense strand to SEQ ID NO: 2013616
aguccaaggaauaacucca

SEQ ID NO: 2013618 - RNA, 19 nt, Artificial Sequence
  Description of Artificial Sequence: Synthetic oligonucleotide
  Sense strand starting at position 52 of SEQ ID NO: 1881044
ggaguuauuccuuggacua

SEQ ID NO: 2013619 - RNA, 19 nt, Artificial Sequence
  Description of Artificial Sequence: Synthetic oligonucleotide
  Antisense strand to SEQ ID NO: 2013618
uaguccaaggaauaacucc

SEQ ID NO: 2013620 - RNA, 19 nt, Artificial Sequence
  Description of Artificial Sequence: Synthetic oligonucleotide
  Sense strand starting at position 53 of SEQ ID NO: 1881044
gaguuauuccuuggacuaa

SEQ ID NO: 2013621 - RNA, 19 nt, Artificial Sequence
  Description of Artificial Sequence: Synthetic oligonucleotide
  Antisense strand to SEQ ID NO: 2013620
uuaguccaaggaauaacuc

SEQ ID NO: 2013622 - RNA, 19 nt, Artificial Sequence
  Description of Artificial Sequence: Synthetic oligonucleotide
  Sense strand starting at position 64 of SEQ ID NO: 1881044
uggacuaagucuuccucua

SEQ ID NO: 2013623 - RNA, 19 nt, Artificial Sequence
  Description of Artificial Sequence: Synthetic oligonucleotide
  Antisense strand to SEQ ID NO: 2013622
uagaggaagacuuagucca

SEQ ID NO: 2013624 - RNA, 19 nt, Artificial Sequence
  Description of Artificial Sequence: Synthetic oligonucleotide
  Sense strand starting at position 451 of SEQ ID NO: 1881044
cuuuaaauccaguguauaa

SEQ ID NO: 2013625 - RNA, 19 nt, Artificial Sequence
  Description of Artificial Sequence: Synthetic oligonucleotide
  Antisense strand to SEQ ID NO: 2013624
uuauacacuggauuuaaag

SEQ ID NO: 2013626 - RNA, 19 nt, Artificial Sequence
  Description of Artificial Sequence: Synthetic oligonucleotide
  Sense strand starting at position 601 of SEQ ID NO: 1881044
guccacagucaugauaacu

SEQ ID NO: 2013627 - RNA, 19 nt, Artificial Sequence
  Description of Artificial Sequence: Synthetic oligonucleotide
  Antisense strand to SEQ ID NO: 2013626
aguuaucaugacuguggac

SEQ ID NO: 2013628 - RNA, 19 nt, Artificial Sequence
  Description of Artificial Sequence: Synthetic oligonucleotide
  Sense strand starting at position 640 of SEQ ID NO: 1881044
aggcuauagcuccaagaag

SEQ ID NO: 2013629 - RNA, 19 nt, Artificial Sequence
  Description of Artificial Sequence: Synthetic oligonucleotide
  Antisense strand to SEQ ID NO: 2013628
cuucuuggagcuauagccu

SEQ ID NO: 2013630 - RNA, 19 nt, Artificial Sequence
  Description of Artificial Sequence: Synthetic oligonucleotide
  Sense strand starting at position 665 of SEQ ID NO: 1881044
gccaaaggucaagguuaaa

SEQ ID NO: 2013631 - RNA, 19 nt, Artificial Sequence
  Description of Artificial Sequence: Synthetic oligonucleotide
  Antisense strand to SEQ ID NO: 2013630
uuuaaccuugaccuuuggc

SEQ ID NO: 2013632 - RNA, 19 nt, Artificial Sequence
  Description of Artificial Sequence: Synthetic oligonucleotide
  Sense strand starting at position 865 of SEQ ID NO: 1881044
ggguaggugcguguguuau

SEQ ID NO: 2013633 - RNA, 19 nt, Artificial Sequence
  Description of Artificial Sequence: Synthetic oligonucleotide
  Antisense strand to SEQ ID NO: 2013632
auaacacacgcaccuaccc

SEQ ID NO: 2013634 - RNA, 19 nt, Artificial Sequence
  Description of Artificial Sequence: Synthetic oligonucleotide
  Sense strand starting at position 877 of SEQ ID NO: 1881044
guguuaucagggcaguaac

SEQ ID NO: 2013635 - RNA, 19 nt, Artificial Sequence
  Description of Artificial Sequence: Synthetic oligonucleotide
  Antisense strand to SEQ ID NO: 2013634
guuacugcccugauaacac

SEQ ID NO: 2013636 - RNA, 19 nt, Artificial Sequence
  Description of Artificial Sequence: Synthetic oligonucleotide
  Sense strand starting at position 1070 of SEQ ID NO: 1881044
ucauuaaugugagcaucac

SEQ ID NO: 2013637 - RNA, 19 nt, Artificial Sequence
  Description of Artificial Sequence: Synthetic oligonucleotide
  Antisense strand to SEQ ID NO: 2013636
gugaugcucacauuaauga

SEQ ID NO: 2013638 - RNA, 19 nt, Artificial Sequence
  Description of Artificial Sequence: Synthetic oligonucleotide
  Sense strand starting at position 1187 of SEQ ID NO: 1881044
aaggauaagagucaguguu

SEQ ID NO: 2013639 - RNA, 19 nt, Artificial Sequence
  Description of Artificial Sequence: Synthetic oligonucleotide
  Antisense strand to SEQ ID NO: 2013638
aacacugacucuuauccuu

SEQ ID NO: 2013640 - RNA, 19 nt, Artificial Sequence
  Description of Artificial Sequence: Synthetic oligonucleotide
  Sense strand starting at position 1194 of SEQ ID NO: 1881044
agagucaguguugggauua

SEQ ID NO: 2013641 - RNA, 19 nt, Artificial Sequence
  Description of Artificial Sequence: Synthetic oligonucleotide
  Antisense strand to SEQ ID NO: 2013640
uaaucccaacacugacucu

SEQ ID NO: 2013642 - RNA, 19 nt, Artificial Sequence
  Description of Artificial Sequence: Synthetic oligonucleotide
  Sense strand starting at position 1215 of SEQ ID NO: 1881044
gguugaaggacucaugucu

SEQ ID NO: 2013643 - RNA, 19 nt, Artificial Sequence
  Description of Artificial Sequence: Synthetic oligonucleotide
  Antisense strand to SEQ ID NO: 2013642
agacaugaguccuucaacc

SEQ ID NO: 2013644 - RNA, 19 nt, Artificial Sequence
  Description of Artificial Sequence: Synthetic oligonucleotide
  Sense strand starting at position 1358 of SEQ ID NO: 1881044
gacacacagcugugucaaa

SEQ ID NO: 2013645 - RNA, 19 nt, Artificial Sequence
  Description of Artificial Sequence: Synthetic oligonucleotide
  Antisense strand to SEQ ID NO: 2013644
uuugacacagcuguguguc

SEQ ID NO: 2013646 - RNA, 19 nt, Artificial Sequence
  Description of Artificial Sequence: Synthetic oligonucleotide
  Sense strand starting at position 1524 of SEQ ID NO: 1881044
cugcaugucauggaugauc

SEQ ID NO: 2013647 - RNA, 19 nt, Artificial Sequence
  Description of Artificial Sequence: Synthetic oligonucleotide
  Antisense strand to SEQ ID NO: 2013646
gaucauccaugacaugcag

SEQ ID NO: 2013648 - RNA, 19 nt, Artificial Sequence
  Description of Artificial Sequence: Synthetic oligonucleotide
  Sense strand starting at position 1526 of SEQ ID NO: 1881044
gcaugucauggaugauccu

SEQ ID NO: 2013649 - RNA, 19 nt, Artificial Sequence
  Description of Artificial Sequence: Synthetic oligonucleotide
  Antisense strand to SEQ ID NO: 2013648
aggaucauccaugacaugc

SEQ ID NO: 2013650 - RNA, 19 nt, Artificial Sequence
  Description of Artificial Sequence: Synthetic oligonucleotide
  Sense strand starting at position 1768 of SEQ ID NO: 1881044
uggcuacaagcucauagaa

SEQ ID NO: 2013651 - RNA, 19 nt, Artificial Sequence
  Description of Artificial Sequence: Synthetic oligonucleotide
  Antisense strand to SEQ ID NO: 2013650
uucuaugagcuuguagcca

SEQ ID NO: 2013652 - RNA, 19 nt, Artificial Sequence
  Description of Artificial Sequence: Synthetic oligonucleotide
  Sense strand starting at position 1777 of SEQ ID NO: 1881044
gcucauagaaggcauagua

SEQ ID NO: 2013653 - RNA, 19 nt, Artificial Sequence
  Description of Artificial Sequence: Synthetic oligonucleotide
  Antisense strand to SEQ ID NO: 2013652
uacuaugccuucuaugagc

SEQ ID NO: 2013654 - RNA, 19 nt, Artificial Sequence
  Description of Artificial Sequence: Synthetic oligonucleotide
  Sense strand starting at position 1840 of SEQ ID NO: 1881044
gggugugcaguuuggagaa

SEQ ID NO: 2013655 - RNA, 19 nt, Artificial Sequence
  Description of Artificial Sequence: Synthetic oligonucleotide
  Antisense strand to SEQ ID NO: 2013654
uucuccaaacugcacaccc

SEQ ID NO: 2013656 - RNA, 19 nt, Artificial Sequence
  Description of Artificial Sequence: Synthetic oligonucleotide
  Sense strand starting at position 1858 of SEQ ID NO: 1881044
aguuuacacagagguuagu

SEQ ID NO: 2013657 - RNA, 19 nt, Artificial Sequence
  Description of Artificial Sequence: Synthetic oligonucleotide
  Antisense strand to SEQ ID NO: 2013656
acuaaccucuguguaaacu

SEQ ID NO: 2013658 - RNA, 19 nt, Artificial Sequence
  Description of Artificial Sequence: Synthetic oligonucleotide
  Sense strand starting at position 1869 of SEQ ID NO: 1881044
agguuagucacaugcagga

SEQ ID NO: 2013659 - RNA, 19 nt, Artificial Sequence
  Description of Artificial Sequence: Synthetic oligonucleotide
  Antisense strand to SEQ ID NO: 2013658
uccugcaugugacuaaccu

SEQ ID NO: 2013660 - RNA, 19 nt, Artificial Sequence
  Description of Artificial Sequence: Synthetic oligonucleotide
  Sense strand starting at position 2045 of SEQ ID NO: 1881044
ugggaaugcugucuuaaga

SEQ ID NO: 2013661 - RNA, 19 nt, Artificial Sequence
  Description of Artificial Sequence: Synthetic oligonucleotide
  Antisense strand to SEQ ID NO: 2013660
ucuuaagacagcauuccca

SEQ ID NO: 2013662 - RNA, 19 nt, Artificial Sequence
  Description of Artificial Sequence: Synthetic oligonucleotide
  Sense strand starting at position 2186 of SEQ ID NO: 1881044
gguaucaucagguaucuga

SEQ ID NO: 2013663 - RNA, 19 nt, Artificial Sequence
  Description of Artificial Sequence: Synthetic oligonucleotide
  Antisense strand to SEQ ID NO: 2013662
ucagauaccugaugauacc

SEQ ID NO: 2013664 - RNA, 19 nt, Artificial Sequence
  Description of Artificial Sequence: Synthetic oligonucleotide
  Sense strand starting at position 2213 of SEQ ID NO: 1881044
ucccuaaugcaguaaagga

SEQ ID NO: 2013665 - RNA, 19 nt, Artificial Sequence
  Description of Artificial Sequence: Synthetic oligonucleotide
  Antisense strand to SEQ ID NO: 2013664
uccuuuacugcauuaggga

SEQ ID NO: 2013666 - RNA, 19 nt, Artificial Sequence
  Description of Artificial Sequence: Synthetic oligonucleotide
  Sense strand starting at position 2226 of SEQ ID NO: 1881044
aaaggauucugcuugucau

SEQ ID NO: 2013667 - RNA, 19 nt, Artificial Sequence
  Description of Artificial Sequence: Synthetic oligonucleotide
  Antisense strand to SEQ ID NO: 2013666
augacaagcagaauccuuu

SEQ ID NO: 2013668 - RNA, 19 nt, Artificial Sequence
  Description of Artificial Sequence: Synthetic oligonucleotide
  Sense strand starting at position 2227 of SEQ ID NO: 1881044
aaggauucugcuugucauc

SEQ ID NO: 2013669 - RNA, 19 nt, Artificial Sequence
  Description of Artificial Sequence: Synthetic oligonucleotide
  Antisense strand to SEQ ID NO: 2013668
gaugacaagcagaauccuu

SEQ ID NO: 2013670 - RNA, 19 nt, Artificial Sequence
  Description of Artificial Sequence: Synthetic oligonucleotide
  Sense strand starting at position 2232 of SEQ ID NO: 1881044
uucugcuugucaucccaua

SEQ ID NO: 2013671 - RNA, 19 nt, Artificial Sequence
  Description of Artificial Sequence: Synthetic oligonucleotide
  Antisense strand to SEQ ID NO: 2013670
uaugggaugacaagcagaa

SEQ ID NO: 2013672 - RNA, 19 nt, Artificial Sequence
  Description of Artificial Sequence: Synthetic oligonucleotide
  Sense strand starting at position 2302 of SEQ ID NO: 1881044
ucgugcacccaucagauua

SEQ ID NO: 2013673 - RNA, 19 nt, Artificial Sequence
  Description of Artificial Sequence: Synthetic oligonucleotide
  Antisense strand to SEQ ID NO: 2013672
uaaucugaugggugcacga

SEQ ID NO: 2013674 - RNA, 19 nt, Artificial Sequence
  Description of Artificial Sequence: Synthetic oligonucleotide
  Sense strand starting at position 2351 of SEQ ID NO: 1881044
ugacaugguggcugucaua

SEQ ID NO: 2013675 - RNA, 19 nt, Artificial Sequence
  Description of Artificial Sequence: Synthetic oligonucleotide
  Antisense strand to SEQ ID NO: 2013674
uaugacagccaccauguca

SEQ ID NO: 2013676 - RNA, 19 nt, Artificial Sequence
  Description of Artificial Sequence: Synthetic oligonucleotide
  Sense strand starting at position 2366 of SEQ ID NO: 1881044
cauaauguuguauguagca

SEQ ID NO: 2013677 - RNA, 19 nt, Artificial Sequence
  Description of Artificial Sequence: Synthetic oligonucleotide
  Antisense strand to SEQ ID NO: 2013676
ugcuacauacaacauuaug

SEQ ID NO: 2013678 - RNA, 19 nt, Artificial Sequence
  Description of Artificial Sequence: Synthetic oligonucleotide
  Sense strand starting at position 2390 of SEQ ID NO: 1881044
cguuacucacguuugugau

SEQ ID NO: 2013679 - RNA, 19 nt, Artificial Sequence
  Description of Artificial Sequence: Synthetic oligonucleotide
  Antisense strand to SEQ ID NO: 2013678
aucacaaacgugaguaacg

SEQ ID NO: 2013680 - RNA, 19 nt, Artificial Sequence
  Description of Artificial Sequence: Synthetic oligonucleotide
  Sense strand starting at position 2392 of SEQ ID NO: 1881044
uuacucacguuugugauga

SEQ ID NO: 2013681 - RNA, 19 nt, Artificial Sequence
  Description of Artificial Sequence: Synthetic oligonucleotide
  Antisense strand to SEQ ID NO: 2013680
ucaucacaaacgugaguaa

SEQ ID NO: 2013682 - RNA, 19 nt, Artificial Sequence
  Description of Artificial Sequence: Synthetic oligonucleotide
  Sense strand starting at position 2405 of SEQ ID NO: 1881044
ugaugauacuguguaaaca

SEQ ID NO: 2013683 - RNA, 19 nt, Artificial Sequence
  Description of Artificial Sequence: Synthetic oligonucleotide
  Antisense strand to SEQ ID NO: 2013682
uguuuacacaguaucauca

SEQ ID NO: 2013684 - RNA, 19 nt, Artificial Sequence
  Description of Artificial Sequence: Synthetic oligonucleotide
  Sense strand starting at position 2430 of SEQ ID NO: 1881044
cugcauugcuagucauaua

SEQ ID NO: 2013685 - RNA, 19 nt, Artificial Sequence
  Description of Artificial Sequence: Synthetic oligonucleotide
  Antisense strand to SEQ ID NO: 2013684
uauaugacuagcaaugcag

SEQ ID NO: 2013686 - RNA, 19 nt, Artificial Sequence
  Description of Artificial Sequence: Synthetic oligonucleotide
  Sense strand starting at position 2814 of SEQ ID NO: 1881044
cuacuacuuguuuaugcau

SEQ ID NO: 2013687 - RNA, 19 nt, Artificial Sequence
  Description of Artificial Sequence: Synthetic oligonucleotide
  Antisense strand to SEQ ID NO: 2013686
augcauaaacaaguaguag

SEQ ID NO: 2013688 - RNA, 19 nt, Artificial Sequence
  Description of Artificial Sequence: Synthetic oligonucleotide
  Sense strand starting at position 2817 of SEQ ID NO: 1881044
cuacuuguuuaugcauuua

SEQ ID NO: 2013689 - RNA, 19 nt, Artificial Sequence
  Description of Artificial Sequence: Synthetic oligonucleotide
  Antisense strand to SEQ ID NO: 2013688
uaaaugcauaaacaaguag

SEQ ID NO: 2013690 - RNA, 19 nt, Artificial Sequence
  Description of Artificial Sequence: Synthetic oligonucleotide
  Sense strand starting at position 136 of SEQ ID NO: 1881045
caagauacagcuugguuau

SEQ ID NO: 2013691 - RNA, 19 nt, Artificial Sequence
  Description of Artificial Sequence: Synthetic oligonucleotide
  Antisense strand to SEQ ID NO: 2013690
auaaccaagcuguaucuug

SEQ ID NO: 2013692 - RNA, 19 nt, Artificial Sequence
  Description of Artificial Sequence: Synthetic oligonucleotide
  Sense strand starting at position 255 of SEQ ID NO: 1881045
uggugagcccaauauacuu

SEQ ID NO: 2013693 - RNA, 19 nt, Artificial Sequence
  Description of Artificial Sequence: Synthetic oligonucleotide
  Antisense strand to SEQ ID NO: 2013692
aaguauauugggcucacca

SEQ ID NO: 2013694 - RNA, 19 nt, Artificial Sequence
  Description of Artificial Sequence: Synthetic oligonucleotide
  Sense strand starting at position 462 of SEQ ID NO: 1881045
ggaacaugucauggcccau

SEQ ID NO: 2013695 - RNA, 19 nt, Artificial Sequence
  Description of Artificial Sequence: Synthetic oligonucleotide
  Antisense strand to SEQ ID NO: 2013694
augggccaugacauguucc

SEQ ID NO: 2013696 - RNA, 19 nt, Artificial Sequence
  Description of Artificial Sequence: Synthetic oligonucleotide
  Sense strand starting at position 522 of SEQ ID NO: 1881045
gggagaccgcuguaaacau

SEQ ID NO: 2013697 - RNA, 19 nt, Artificial Sequence
  Description of Artificial Sequence: Synthetic oligonucleotide
  Antisense strand to SEQ ID NO: 2013696
auguuuacagcggucuccc

SEQ ID NO: 2013698 - RNA, 19 nt, Artificial Sequence
  Description of Artificial Sequence: Synthetic oligonucleotide
  Sense strand starting at position 871 of SEQ ID NO: 1881045
ugggaauggugauauuuca

SEQ ID NO: 2013699 - RNA, 19 nt, Artificial Sequence
  Description of Artificial Sequence: Synthetic oligonucleotide
  Antisense strand to SEQ ID NO: 2013698
ugaaauaucaccauuccca

SEQ ID NO: 2013700 - RNA, 19 nt, Artificial Sequence
  Description of Artificial Sequence: Synthetic oligonucleotide
  Sense strand starting at position 889 of SEQ ID NO: 1881045
aagaaugagccauggcuaa

SEQ ID NO: 2013701 - RNA, 19 nt, Artificial Sequence
  Description of Artificial Sequence: Synthetic oligonucleotide
  Antisense strand to SEQ ID NO: 2013700
uuagccauggcucauucuu

SEQ ID NO: 2013702 - RNA, 19 nt, Artificial Sequence
  Description of Artificial Sequence: Synthetic oligonucleotide
  Sense strand starting at position 910 of SEQ ID NO: 1881045
cuuagaaacuaggcuaauu

SEQ ID NO: 2013703 - RNA, 19 nt, Artificial Sequence
  Description of Artificial Sequence: Synthetic oligonucleotide
  Antisense strand to SEQ ID NO: 2013702
aauuagccuaguuucuaag

SEQ ID NO: 2013704 - RNA, 19 nt, Artificial Sequence
  Description of Artificial Sequence: Synthetic oligonucleotide
  Sense strand starting at position 971 of SEQ ID NO: 1881045
aagguaaacuuagucugau

SEQ ID NO: 2013705 - RNA, 19 nt, Artificial Sequence
  Description of Artificial Sequence: Synthetic oligonucleotide
  Antisense strand to SEQ ID NO: 2013704
aucagacuaaguuuaccuu

SEQ ID NO: 2013706 - RNA, 19 nt, Artificial Sequence
  Description of Artificial Sequence: Synthetic oligonucleotide
  Sense strand starting at position 972 of SEQ ID NO: 1881045
agguaaacuuagucugauu

SEQ ID NO: 2013707 - RNA, 19 nt, Artificial Sequence
  Description of Artificial Sequence: Synthetic oligonucleotide
  Antisense strand to SEQ ID NO: 2013706
aaucagacuaaguuuaccu

SEQ ID NO: 2013708 - RNA, 19 nt, Artificial Sequence
  Description of Artificial Sequence: Synthetic oligonucleotide
  Sense strand starting at position 1116 of SEQ ID NO: 1881045
agguaaaugucaucugcag

SEQ ID NO: 2013709 - RNA, 19 nt, Artificial Sequence
  Description of Artificial Sequence: Synthetic oligonucleotide
  Antisense strand to SEQ ID NO: 2013708
cugcagaugacauuuaccu

SEQ ID NO: 2013710 - RNA, 19 nt, Artificial Sequence
  Description of Artificial Sequence: Synthetic oligonucleotide
  Sense strand starting at position 1573 of SEQ ID NO: 1881045
cucagaaauccagggccuu

SEQ ID NO: 2013711 - RNA, 19 nt, Artificial Sequence
  Description of Artificial Sequence: Synthetic oligonucleotide
  Antisense strand to SEQ ID NO: 2013710
aaggcccuggauuucugag

SEQ ID NO: 2013712 - RNA, 19 nt, Artificial Sequence
  Description of Artificial Sequence: Synthetic oligonucleotide
  Sense strand starting at position 1629 of SEQ ID NO: 1881045
gauggucccugagucagaa

SEQ ID NO: 2013713 - RNA, 19 nt, Artificial Sequence
  Description of Artificial Sequence: Synthetic oligonucleotide
  Antisense strand to SEQ ID NO: 2013712
uucugacucagggaccauc

SEQ ID NO: 2013714 - RNA, 19 nt, Artificial Sequence
  Description of Artificial Sequence: Synthetic oligonucleotide
  Sense strand starting at position 1725 of SEQ ID NO: 1881045
augaauaacucaguugcau

SEQ ID NO: 2013715 - RNA, 19 nt, Artificial Sequence
  Description of Artificial Sequence: Synthetic oligonucleotide
  Antisense strand to SEQ ID NO: 2013714
augcaacugaguuauucau

SEQ ID NO: 2013716 - RNA, 19 nt, Artificial Sequence
  Description of Artificial Sequence: Synthetic oligonucleotide
  Sense strand starting at position 1762 of SEQ ID NO: 1881045
guaccaucuguugagugaa

SEQ ID NO: 2013717 - RNA, 19 nt, Artificial Sequence
  Description of Artificial Sequence: Synthetic oligonucleotide
  Antisense strand to SEQ ID NO: 2013716
uucacucaacagaugguac

SEQ ID NO: 2013718 - RNA, 19 nt, Artificial Sequence
  Description of Artificial Sequence: Synthetic oligonucleotide
  Sense strand starting at position 1833 of SEQ ID NO: 1881045
ugaacuuggcaaugugaug

SEQ ID NO: 2013719 - RNA, 19 nt, Artificial Sequence
  Description of Artificial Sequence: Synthetic oligonucleotide
  Antisense strand to SEQ ID NO: 2013718
caucacauugccaaguuca

SEQ ID NO: 2013720 - RNA, 19 nt, Artificial Sequence
  Description of Artificial Sequence: Synthetic oligonucleotide
  Sense strand starting at position 1924 of SEQ ID NO: 1881045
gcaccuugcgccuccaaau

SEQ ID NO: 2013721 - RNA, 19 nt, Artificial Sequence
  Description of Artificial Sequence: Synthetic oligonucleotide
  Antisense strand to SEQ ID NO: 2013720
auuuggaggcgcaaggugc

SEQ ID NO: 2013722 - RNA, 19 nt, Artificial Sequence
  Description of Artificial Sequence: Synthetic oligonucleotide
  Sense strand starting at position 1965 of SEQ ID NO: 1881045
uagugcugaugguuauuua

SEQ ID NO: 2013723 - RNA, 19 nt, Artificial Sequence
  Description of Artificial Sequence: Synthetic oligonucleotide
  Antisense strand to SEQ ID NO: 2013722
uaaauaaccaucagcacua

SEQ ID NO: 2013724 - RNA, 19 nt, Artificial Sequence
  Description of Artificial Sequence: Synthetic oligonucleotide
  Sense strand starting at position 2102 of SEQ ID NO: 1881045
agcuaaacuacgcaugaga

SEQ ID NO: 2013725 - RNA, 19 nt, Artificial Sequence
  Description of Artificial Sequence: Synthetic oligonucleotide
  Antisense strand to SEQ ID NO: 2013724
ucucaugcguaguuuagcu

SEQ ID NO: 2013726 - RNA, 19 nt, Artificial Sequence
  Description of Artificial Sequence: Synthetic oligonucleotide
  Sense strand starting at position 2104 of SEQ ID NO: 1881045
cuaaacuacgcaugagagu

SEQ ID NO: 2013727 - RNA, 19 nt, Artificial Sequence
  Description of Artificial Sequence: Synthetic oligonucleotide
  Antisense strand to SEQ ID NO: 2013726
acucucaugcguaguuuag

SEQ ID NO: 2013728 - RNA, 19 nt, Artificial Sequence
  Description of Artificial Sequence: Synthetic oligonucleotide
  Sense strand starting at position 2105 of SEQ ID NO: 1881045
uaaacuacgcaugagagua

SEQ ID NO: 2013729 - RNA, 19 nt, Artificial Sequence
  Description of Artificial Sequence: Synthetic oligonucleotide
  Antisense strand to SEQ ID NO: 2013728
uacucucaugcguaguuua

SEQ ID NO: 2013730 - RNA, 19 nt, Artificial Sequence
  Description of Artificial Sequence: Synthetic oligonucleotide
  Sense strand starting at position 2110 of SEQ ID NO: 1881045
uacgcaugagaguagacau

SEQ ID NO: 2013731 - RNA, 19 nt, Artificial Sequence
  Description of Artificial Sequence: Synthetic oligonucleotide
  Antisense strand to SEQ ID NO: 2013730
augucuacucucaugcgua

SEQ ID NO: 2013732 - RNA, 19 nt, Artificial Sequence
  Description of Artificial Sequence: Synthetic oligonucleotide
  Sense strand starting at position 2263 of SEQ ID NO: 1881045
ugggaaauuccaugugagc

SEQ ID NO: 2013733 - RNA, 19 nt, Artificial Sequence
  Description of Artificial Sequence: Synthetic oligonucleotide
  Antisense strand to SEQ ID NO: 2013732
gcucacauggaauuuccca

SEQ ID NO: 2013734 - RNA, 19 nt, Artificial Sequence
  Description of Artificial Sequence: Synthetic oligonucleotide
  Sense strand starting at position 2265 of SEQ ID NO: 1881045
ggaaauuccaugugagcac

SEQ ID NO: 2013735 - RNA, 19 nt, Artificial Sequence
  Description of Artificial Sequence: Synthetic oligonucleotide
  Antisense strand to SEQ ID NO: 2013734
gugcucacauggaauuucc

SEQ ID NO: 2013736 - RNA, 19 nt, Artificial Sequence
  Description of Artificial Sequence: Synthetic oligonucleotide
  Sense strand starting at position 2495 of SEQ ID NO: 1881045
cugaaacaagcuugauuga

SEQ ID NO: 2013737 - RNA, 19 nt, Artificial Sequence
  Description of Artificial Sequence: Synthetic oligonucleotide
  Antisense strand to SEQ ID NO: 2013736
ucaaucaagcuuguuucag

SEQ ID NO: 2013738 - RNA, 19 nt, Artificial Sequence
  Description of Artificial Sequence: Synthetic oligonucleotide
  Sense strand starting at position 2498 of SEQ ID NO: 1881045
aaacaagcuugauugaguu

SEQ ID NO: 2013739 - RNA, 19 nt, Artificial Sequence
  Description of Artificial Sequence: Synthetic oligonucleotide
  Antisense strand to SEQ ID NO: 2013738
aacucaaucaagcuuguuu

SEQ ID NO: 2013740 - RNA, 19 nt, Artificial Sequence
  Description of Artificial Sequence: Synthetic oligonucleotide
  Sense strand starting at position 2557 of SEQ ID NO: 1881045
gacugagaguggccuuuaa

SEQ ID NO: 2013741 - RNA, 19 nt, Artificial Sequence
  Description of Artificial Sequence: Synthetic oligonucleotide
  Antisense strand to SEQ ID NO: 2013740
uuaaaggccacucucaguc

SEQ ID NO: 2013742 - RNA, 19 nt, Artificial Sequence
  Description of Artificial Sequence: Synthetic oligonucleotide
  Sense strand starting at position 2561 of SEQ ID NO: 1881045
gagaguggccuuuaaggau

SEQ ID NO: 2013743 - RNA, 19 nt, Artificial Sequence
  Description of Artificial Sequence: Synthetic oligonucleotide
  Antisense strand to SEQ ID NO: 2013742
auccuuaaaggccacucuc

SEQ ID NO: 2013744 - RNA, 19 nt, Artificial Sequence
  Description of Artificial Sequence: Synthetic oligonucleotide
  Sense strand starting at position 3024 of SEQ ID NO: 1881045
gauaccuucucaguggaga

SEQ ID NO: 2013745 - RNA, 19 nt, Artificial Sequence
  Description of Artificial Sequence: Synthetic oligonucleotide
  Antisense strand to SEQ ID NO: 2013744
ucuccacugagaagguauc

SEQ ID NO: 2013746 - RNA, 19 nt, Artificial Sequence
  Description of Artificial Sequence: Synthetic oligonucleotide
  Sense strand starting at position 3025 of SEQ ID NO: 1881045
auaccuucucaguggagau

SEQ ID NO: 2013747 - RNA, 19 nt, Artificial Sequence
  Description of Artificial Sequence: Synthetic oligonucleotide
  Antisense strand to SEQ ID NO: 2013746
aucuccacugagaagguau

SEQ ID NO: 2013748 - RNA, 19 nt, Artificial Sequence
  Description of Artificial Sequence: Synthetic oligonucleotide
  Sense strand starting at position 3043 of SEQ ID NO: 1881045
uggcauuugaguugagcca

SEQ ID NO: 2013749 - RNA, 19 nt, Artificial Sequence
  Description of Artificial Sequence: Synthetic oligonucleotide
  Antisense strand to SEQ ID NO: 2013748
uggcucaacucaaaugcca

SEQ ID NO: 2013750 - RNA, 19 nt, Artificial Sequence
  Description of Artificial Sequence: Synthetic oligonucleotide
  Sense strand starting at position 3093 of SEQ ID NO: 1881045
gggaaauggcgugaguaaa

SEQ ID NO: 2013751 - RNA, 19 nt, Artificial Sequence
  Description of Artificial Sequence: Synthetic oligonucleotide
  Antisense strand to SEQ ID NO: 2013750
uuuacucacgccauuuccc

SEQ ID NO: 2013752 - RNA, 19 nt, Artificial Sequence
  Description of Artificial Sequence: Synthetic oligonucleotide
  Sense strand starting at position 3169 of SEQ ID NO: 1881045
ggagaaguccuggauggcu

SEQ ID NO: 2013753 - RNA, 19 nt, Artificial Sequence
  Description of Artificial Sequence: Synthetic oligonucleotide
  Antisense strand to SEQ ID NO: 2013752
agccauccaggacuucucc

SEQ ID NO: 2013754 - RNA, 19 nt, Artificial Sequence
  Description of Artificial Sequence: Synthetic oligonucleotide
  Sense strand starting at position 3181 of SEQ ID NO: 1881045
gauggcuaugcggaggaau

SEQ ID NO: 2013755 - RNA, 19 nt, Artificial Sequence
  Description of Artificial Sequence: Synthetic oligonucleotide
  Antisense strand to SEQ ID NO: 2013754
auuccuccgcauagccauc

SEQ ID NO: 2013756 - RNA, 19 nt, Artificial Sequence
  Description of Artificial Sequence: Synthetic oligonucleotide
  Sense strand starting at position 3183 of SEQ ID NO: 1881045
uggcuaugcggaggaauuu

SEQ ID NO: 2013757 - RNA, 19 nt, Artificial Sequence
  Description of Artificial Sequence: Synthetic oligonucleotide
  Antisense strand to SEQ ID NO: 2013756
aaauuccuccgcauagcca

SEQ ID NO: 2013758 - RNA, 19 nt, Artificial Sequence
  Description of Artificial Sequence: Synthetic oligonucleotide
  Sense strand starting at position 3270 of SEQ ID NO: 1881045
agaguugucaggcauuggu

SEQ ID NO: 2013759 - RNA, 19 nt, Artificial Sequence
  Description of Artificial Sequence: Synthetic oligonucleotide
  Antisense strand to SEQ ID NO: 2013758
accaaugccugacaacucu

SEQ ID NO: 2013760 - RNA, 19 nt, Artificial Sequence
  Description of Artificial Sequence: Synthetic oligonucleotide
  Sense strand starting at position 3283 of SEQ ID NO: 1881045
auugguuugguucagugau

SEQ ID NO: 2013761 - RNA, 19 nt, Artificial Sequence
  Description of Artificial Sequence: Synthetic oligonucleotide
  Antisense strand to SEQ ID NO: 2013760
aucacugaaccaaaccaau

SEQ ID NO: 2013762 - RNA, 19 nt, Artificial Sequence
  Description of Artificial Sequence: Synthetic oligonucleotide
  Sense strand starting at position 3449 of SEQ ID NO: 1881045
gauuauaugguacgaagaa

SEQ ID NO: 2013763 - RNA, 19 nt, Artificial Sequence
  Description of Artificial Sequence: Synthetic oligonucleotide
  Antisense strand to SEQ ID NO: 2013762
uucuucguaccauauaauc

SEQ ID NO: 2013764 - RNA, 19 nt, Artificial Sequence
  Description of Artificial Sequence: Synthetic oligonucleotide
  Sense strand starting at position 3471 of SEQ ID NO: 1881045
uucagagacucguucugag

SEQ ID NO: 2013765 - RNA, 19 nt, Artificial Sequence
  Description of Artificial Sequence: Synthetic oligonucleotide
  Antisense strand to SEQ ID NO: 2013764
cucagaacgagucucugaa

SEQ ID NO: 2013766 - RNA, 19 nt, Artificial Sequence
  Description of Artificial Sequence: Synthetic oligonucleotide
  Sense strand starting at position 3547 of SEQ ID NO: 1881045
gggauaguuggcuagguuu

SEQ ID NO: 2013767 - RNA, 19 nt, Artificial Sequence
  Description of Artificial Sequence: Synthetic oligonucleotide
  Antisense strand to SEQ ID NO: 2013766
aaaccuagccaacuauccc

SEQ ID NO: 2013768 - RNA, 19 nt, Artificial Sequence
  Description of Artificial Sequence: Synthetic oligonucleotide
  Sense strand starting at position 3971 of SEQ ID NO: 1881045
ucauuauaccgcuaggacu

SEQ ID NO: 2013769 - RNA, 19 nt, Artificial Sequence
  Description of Artificial Sequence: Synthetic oligonucleotide
  Antisense strand to SEQ ID NO: 2013768
aguccuagcgguauaauga

SEQ ID NO: 2013770 - RNA, 19 nt, Artificial Sequence
  Description of Artificial Sequence: Synthetic oligonucleotide
  Sense strand starting at position 33 of SEQ ID NO: 1881046
aggaguuccuauccugaug

SEQ ID NO: 2013771 - RNA, 19 nt, Artificial Sequence
  Description of Artificial Sequence: Synthetic oligonucleotide
  Antisense strand to SEQ ID NO: 2013770
caucaggauaggaacuccu

SEQ ID NO: 2013772 - RNA, 19 nt, Artificial Sequence
  Description of Artificial Sequence: Synthetic oligonucleotide
  Sense strand starting at position 66 of SEQ ID NO: 1881046
ccacaaguggacugauaac

SEQ ID NO: 2013773 - RNA, 19 nt, Artificial Sequence
  Description of Artificial Sequence: Synthetic oligonucleotide
  Antisense strand to SEQ ID NO: 2013772
guuaucaguccacuugugg

SEQ ID NO: 2013774 - RNA, 19 nt, Artificial Sequence
  Description of Artificial Sequence: Synthetic oligonucleotide
  Sense strand starting at position 147 of SEQ ID NO: 1881046
agaugacugaugugcuaau

SEQ ID NO: 2013775 - RNA, 19 nt, Artificial Sequence
  Description of Artificial Sequence: Synthetic oligonucleotide
  Antisense strand to SEQ ID NO: 2013774
auuagcacaucagucaucu

SEQ ID NO: 2013776 - RNA, 19 nt, Artificial Sequence
  Description of Artificial Sequence: Synthetic oligonucleotide
  Sense strand starting at position 148 of SEQ ID NO: 1881046
gaugacugaugugcuaauu

SEQ ID NO: 2013777 - RNA, 19 nt, Artificial Sequence
  Description of Artificial Sequence: Synthetic oligonucleotide
  Antisense strand to SEQ ID NO: 2013776
aauuagcacaucagucauc

SEQ ID NO: 2013778 - RNA, 19 nt, Artificial Sequence
  Description of Artificial Sequence: Synthetic oligonucleotide
  Sense strand starting at position 158 of SEQ ID NO: 1881046
gugcuaauucuggaacacu

SEQ ID NO: 2013779 - RNA, 19 nt, Artificial Sequence
  Description of Artificial Sequence: Synthetic oligonucleotide
  Antisense strand to SEQ ID NO: 2013778
aguguuccagaauuagcac

SEQ ID NO: 2013780 - RNA, 19 nt, Artificial Sequence
  Description of Artificial Sequence: Synthetic oligonucleotide
  Sense strand starting at position 230 of SEQ ID NO: 1881046
agugauaugagccgaauua

SEQ ID NO: 2013781 - RNA, 19 nt, Artificial Sequence
  Description of Artificial Sequence: Synthetic oligonucleotide
  Antisense strand to SEQ ID NO: 2013780
uaauucggcucauaucacu

SEQ ID NO: 2013782 - RNA, 19 nt, Artificial Sequence
  Description of Artificial Sequence: Synthetic oligonucleotide
  Sense strand starting at position 231 of SEQ ID NO: 1881046
gugauaugagccgaauuag

SEQ ID NO: 2013783 - RNA, 19 nt, Artificial Sequence
  Description of Artificial Sequence: Synthetic oligonucleotide
  Antisense strand to SEQ ID NO: 2013782
cuaauucggcucauaucac

SEQ ID NO: 2013784 - RNA, 19 nt, Artificial Sequence
  Description of Artificial Sequence: Synthetic oligonucleotide
  Sense strand starting at position 282 of SEQ ID NO: 1881046
ucaucagugucucuuggaa

SEQ ID NO: 2013785 - RNA, 19 nt, Artificial Sequence
  Description of Artificial Sequence: Synthetic oligonucleotide
  Antisense strand to SEQ ID NO: 2013784
uuccaagagacacugauga

SEQ ID NO: 2013786 - RNA, 19 nt, Artificial Sequence
  Description of Artificial Sequence: Synthetic oligonucleotide
  Sense strand starting at position 320 of SEQ ID NO: 1881046
cauggccugaguggucaaa

SEQ ID NO: 2013787 - RNA, 19 nt, Artificial Sequence
  Description of Artificial Sequence: Synthetic oligonucleotide
  Antisense strand to SEQ ID NO: 2013786
uuugaccacucaggccaug

SEQ ID NO: 2013788 - RNA, 19 nt, Artificial Sequence
  Description of Artificial Sequence: Synthetic oligonucleotide
  Sense strand starting at position 440 of SEQ ID NO: 1881046
agauacaugcgugagucuu

SEQ ID NO: 2013789 - RNA, 19 nt, Artificial Sequence
  Description of Artificial Sequence: Synthetic oligonucleotide
  Antisense strand to SEQ ID NO: 2013788
aagacucacgcauguaucu

SEQ ID NO: 2013790 - RNA, 19 nt, Artificial Sequence
  Description of Artificial Sequence: Synthetic oligonucleotide
  Sense strand starting at position 621 of SEQ ID NO: 1881046
gggaacaccuuggcuaaga

SEQ ID NO: 2013791 - RNA, 19 nt, Artificial Sequence
  Description of Artificial Sequence: Synthetic oligonucleotide
  Antisense strand to SEQ ID NO: 2013790
ucuuagccaagguguuccc

SEQ ID NO: 2013792 - RNA, 19 nt, Artificial Sequence
  Description of Artificial Sequence: Synthetic oligonucleotide
  Sense strand starting at position 622 of SEQ ID NO: 1881046
ggaacaccuuggcuaagaa

SEQ ID NO: 2013793 - RNA, 19 nt, Artificial Sequence
  Description of Artificial Sequence: Synthetic oligonucleotide
  Antisense strand to SEQ ID NO: 2013792
uucuuagccaagguguucc

SEQ ID NO: 2013794 - RNA, 19 nt, Artificial Sequence
  Description of Artificial Sequence: Synthetic oligonucleotide
  Sense strand starting at position 634 of SEQ ID NO: 1881046
cuaagaauguauucgugac

SEQ ID NO: 2013795 - RNA, 19 nt, Artificial Sequence
  Description of Artificial Sequence: Synthetic oligonucleotide
  Antisense strand to SEQ ID NO: 2013794
gucacgaauacauucuuag

SEQ ID NO: 2013796 - RNA, 19 nt, Artificial Sequence
  Description of Artificial Sequence: Synthetic oligonucleotide
  Sense strand starting at position 636 of SEQ ID NO: 1881046
aagaauguauucgugacag

SEQ ID NO: 2013797 - RNA, 19 nt, Artificial Sequence
  Description of Artificial Sequence: Synthetic oligonucleotide
  Antisense strand to SEQ ID NO: 2013796
cugucacgaauacauucuu

SEQ ID NO: 2013798 - RNA, 19 nt, Artificial Sequence
  Description of Artificial Sequence: Synthetic oligonucleotide
  Sense strand starting at position 638 of SEQ ID NO: 1881046
gaauguauucgugacagag

SEQ ID NO: 2013799 - RNA, 19 nt, Artificial Sequence
  Description of Artificial Sequence: Synthetic oligonucleotide
  Antisense strand to SEQ ID NO: 2013798
cucugucacgaauacauuc

SEQ ID NO: 2013800 - RNA, 19 nt, Artificial Sequence
  Description of Artificial Sequence: Synthetic oligonucleotide
  Sense strand starting at position 642 of SEQ ID NO: 1881046
guauucgugacagaggaga

SEQ ID NO: 2013801 - RNA, 19 nt, Artificial Sequence
  Description of Artificial Sequence: Synthetic oligonucleotide
  Antisense strand to SEQ ID NO: 2013800
ucuccucugucacgaauac

SEQ ID NO: 2013802 - RNA, 19 nt, Artificial Sequence
  Description of Artificial Sequence: Synthetic oligonucleotide
  Sense strand starting at position 735 of SEQ ID NO: 1881046
auugaugcagauugcuuaa

SEQ ID NO: 2013803 - RNA, 19 nt, Artificial Sequence
  Description of Artificial Sequence: Synthetic oligonucleotide
  Antisense strand to SEQ ID NO: 2013802
uuaagcaaucugcaucaau

SEQ ID NO: 2013804 - RNA, 19 nt, Artificial Sequence
  Description of Artificial Sequence: Synthetic oligonucleotide
  Sense strand starting at position 737 of SEQ ID NO: 1881046
ugaugcagauugcuuaauu

SEQ ID NO: 2013805 - RNA, 19 nt, Artificial Sequence
  Description of Artificial Sequence: Synthetic oligonucleotide
  Antisense strand to SEQ ID NO: 2013804
aauuaagcaaucugcauca

SEQ ID NO: 2013806 - RNA, 19 nt, Artificial Sequence
  Description of Artificial Sequence: Synthetic oligonucleotide
  Sense strand starting at position 747 of SEQ ID NO: 1881046
ugcuuaauuccuugaggua

SEQ ID NO: 2013807 - RNA, 19 nt, Artificial Sequence
  Description of Artificial Sequence: Synthetic oligonucleotide
  Antisense strand to SEQ ID NO: 2013806
uaccucaaggaauuaagca

SEQ ID NO: 2013808 - RNA, 19 nt, Artificial Sequence
  Description of Artificial Sequence: Synthetic oligonucleotide
  Sense strand starting at position 748 of SEQ ID NO: 1881046
gcuuaauuccuugagguaa

SEQ ID NO: 2013809 - RNA, 19 nt, Artificial Sequence
  Description of Artificial Sequence: Synthetic oligonucleotide
  Antisense strand to SEQ ID NO: 2013808
uuaccucaaggaauuaagc

SEQ ID NO: 2013810 - RNA, 19 nt, Artificial Sequence
  Description of Artificial Sequence: Synthetic oligonucleotide
  Sense strand starting at position 1650 of SEQ ID NO: 1881046
gcagaaugcgcagauuugu

SEQ ID NO: 2013811 - RNA, 19 nt, Artificial Sequence
  Description of Artificial Sequence: Synthetic oligonucleotide
  Antisense strand to SEQ ID NO: 2013810
acaaaucugcgcauucugc

SEQ ID NO: 2013812 - RNA, 19 nt, Artificial Sequence
  Description of Artificial Sequence: Synthetic oligonucleotide
  Sense strand starting at position 1660 of SEQ ID NO: 1881046
cagauuuguugcguaggua

SEQ ID NO: 2013813 - RNA, 19 nt, Artificial Sequence
  Description of Artificial Sequence: Synthetic oligonucleotide
  Antisense strand to SEQ ID NO: 2013812
uaccuacgcaacaaaucug

SEQ ID NO: 2013814 - RNA, 19 nt, Artificial Sequence
  Description of Artificial Sequence: Synthetic oligonucleotide
  Sense strand starting at position 1661 of SEQ ID NO: 1881046
agauuuguugcguagguac

SEQ ID NO: 2013815 - RNA, 19 nt, Artificial Sequence
  Description of Artificial Sequence: Synthetic oligonucleotide
  Antisense strand to SEQ ID NO: 2013814
guaccuacgcaacaaaucu

SEQ ID NO: 2013816 - RNA, 19 nt, Artificial Sequence
  Description of Artificial Sequence: Synthetic oligonucleotide
  Sense strand starting at position 1692 of SEQ ID NO: 1881046
cgguuugauucagucugaa

SEQ ID NO: 2013817 - RNA, 19 nt, Artificial Sequence
  Description of Artificial Sequence: Synthetic oligonucleotide
  Antisense strand to SEQ ID NO: 2013816
uucagacugaaucaaaccg

SEQ ID NO: 2013818 - RNA, 19 nt, Artificial Sequence
  Description of Artificial Sequence: Synthetic oligonucleotide
  Sense strand starting at position 1783 of SEQ ID NO: 1881046
ugauuaaggcccuaaccuu

SEQ ID NO: 2013819 - RNA, 19 nt, Artificial Sequence
  Description of Artificial Sequence: Synthetic oligonucleotide
  Antisense strand to SEQ ID NO: 2013818
aagguuagggccuuaauca

SEQ ID NO: 2013820 - RNA, 19 nt, Artificial Sequence
  Description of Artificial Sequence: Synthetic oligonucleotide
  Sense strand starting at position 2586 of SEQ ID NO: 1881046
gcuguuaucgcagcuguga

SEQ ID NO: 2013821 - RNA, 19 nt, Artificial Sequence
  Description of Artificial Sequence: Synthetic oligonucleotide
  Antisense strand to SEQ ID NO: 2013820
ucacagcugcgauaacagc

SEQ ID NO: 2013822 - RNA, 19 nt, Artificial Sequence
  Description of Artificial Sequence: Synthetic oligonucleotide
  Sense strand starting at position 2810 of SEQ ID NO: 1881046
cgaauugggucuccuuaaa

SEQ ID NO: 2013823 - RNA, 19 nt, Artificial Sequence
  Description of Artificial Sequence: Synthetic oligonucleotide
  Antisense strand to SEQ ID NO: 2013822
uuuaaggagacccaauucg

SEQ ID NO: 2013824 - RNA, 19 nt, Artificial Sequence
  Description of Artificial Sequence: Synthetic oligonucleotide
  Sense strand starting at position 2851 of SEQ ID NO: 1881046
cagauaucugguggcccua

SEQ ID NO: 2013825 - RNA, 19 nt, Artificial Sequence
  Description of Artificial Sequence: Synthetic oligonucleotide
  Antisense strand to SEQ ID NO: 2013824
uagggccaccagauaucug

SEQ ID NO: 2013826 - RNA, 19 nt, Artificial Sequence
  Description of Artificial Sequence: Synthetic oligonucleotide
  Sense strand starting at position 2871 of SEQ ID NO: 1881046
cucuguaugcaacaauuga

SEQ ID NO: 2013827 - RNA, 19 nt, Artificial Sequence
  Description of Artificial Sequence: Synthetic oligonucleotide
  Antisense strand to SEQ ID NO: 2013826
ucaauuguugcauacagag

SEQ ID NO: 2013828 - RNA, 19 nt, Artificial Sequence
  Description of Artificial Sequence: Synthetic oligonucleotide
  Sense strand starting at position 2953 of SEQ ID NO: 1881046
uccugauaaggugauguuu

SEQ ID NO: 2013829 - RNA, 19 nt, Artificial Sequence
  Description of Artificial Sequence: Synthetic oligonucleotide
  Antisense strand to SEQ ID NO: 2013828
aaacaucaccuuaucagga

SEQ ID NO: 2013830 - RNA, 19 nt, Artificial Sequence
  Description of Artificial Sequence: Synthetic oligonucleotide
  Sense strand starting at position 2959 of SEQ ID NO: 1881046
uaaggugauguuuaaagua

SEQ ID NO: 2013831 - RNA, 19 nt, Artificial Sequence
  Description of Artificial Sequence: Synthetic oligonucleotide
  Antisense strand to SEQ ID NO: 2013830
uacuuuaaacaucaccuua

SEQ ID NO: 2013832 - RNA, 19 nt, Artificial Sequence
  Description of Artificial Sequence: Synthetic oligonucleotide
  Sense strand starting at position 3302 of SEQ ID NO: 1881046
gaggcagucucagucaaag

SEQ ID NO: 2013833 - RNA, 19 nt, Artificial Sequence
  Description of Artificial Sequence: Synthetic oligonucleotide
  Antisense strand to SEQ ID NO: 2013832
cuuugacugagacugccuc

SEQ ID NO: 2013834 - RNA, 19 nt, Artificial Sequence
  Description of Artificial Sequence: Synthetic oligonucleotide
  Sense strand starting at position 3304 of SEQ ID NO: 1881046
ggcagucucagucaaagua

SEQ ID NO: 2013835 - RNA, 19 nt, Artificial Sequence
  Description of Artificial Sequence: Synthetic oligonucleotide
  Antisense strand to SEQ ID NO: 2013834
uacuuugacugagacugcc

SEQ ID NO: 2013836 - RNA, 19 nt, Artificial Sequence
  Description of Artificial Sequence: Synthetic oligonucleotide
  Sense strand starting at position 3347 of SEQ ID NO: 1881046
uccuuugauagagggcuua

SEQ ID NO: 2013837 - RNA, 19 nt, Artificial Sequence
  Description of Artificial Sequence: Synthetic oligonucleotide
  Antisense strand to SEQ ID NO: 2013836
uaagcccucuaucaaagga

SEQ ID NO: 2013838 - RNA, 19 nt, Artificial Sequence
  Description of Artificial Sequence: Synthetic oligonucleotide
  Sense strand starting at position 3379 of SEQ ID NO: 1881046
uaugcauuggacuggguua

SEQ ID NO: 2013839 - RNA, 19 nt, Artificial Sequence
  Description of Artificial Sequence: Synthetic oligonucleotide
  Antisense strand to SEQ ID NO: 2013838
uaacccaguccaaugcaua

SEQ ID NO: 2013840 - RNA, 19 nt, Artificial Sequence
  Description of Artificial Sequence: Synthetic oligonucleotide
  Sense strand starting at position 3437 of SEQ ID NO: 1881046
gccuaacuugccuaaaguu

SEQ ID NO: 2013841 - RNA, 19 nt, Artificial Sequence
  Description of Artificial Sequence: Synthetic oligonucleotide
  Antisense strand to SEQ ID NO: 2013840
aacuuuaggcaaguuaggc

SEQ ID NO: 2013842 - RNA, 19 nt, Artificial Sequence
  Description of Artificial Sequence: Synthetic oligonucleotide
  Sense strand starting at position 3456 of SEQ ID NO: 1881046
agcgucaggagguauagua

SEQ ID NO: 2013843 - RNA, 19 nt, Artificial Sequence
  Description of Artificial Sequence: Synthetic oligonucleotide
  Antisense strand to SEQ ID NO: 2013842
uacuauaccuccugacgcu

SEQ ID NO: 2013844 - RNA, 19 nt, Artificial Sequence
  Description of Artificial Sequence: Synthetic oligonucleotide
  Sense strand starting at position 3463 of SEQ ID NO: 1881046
ggagguauaguaugcauau

SEQ ID NO: 2013845 - RNA, 19 nt, Artificial Sequence
  Description of Artificial Sequence: Synthetic oligonucleotide
  Antisense strand to SEQ ID NO: 2013844
auaugcauacuauaccucc

SEQ ID NO: 2013846 - RNA, 19 nt, Artificial Sequence
  Description of Artificial Sequence: Synthetic oligonucleotide
  Sense strand starting at position 3464 of SEQ ID NO: 1881046
gagguauaguaugcauauu

SEQ ID NO: 2013847 - RNA, 19 nt, Artificial Sequence
  Description of Artificial Sequence: Synthetic oligonucleotide
  Antisense strand to SEQ ID NO: 2013846
aauaugcauacuauaccuc

SEQ ID NO: 2013848 - RNA, 19 nt, Artificial Sequence
  Description of Artificial Sequence: Synthetic oligonucleotide
  Sense strand starting at position 3505 of SEQ ID NO: 1881046
cuuugaagaucucucugga

SEQ ID NO: 2013849 - RNA, 19 nt, Artificial Sequence
  Description of Artificial Sequence: Synthetic oligonucleotide
  Antisense strand to SEQ ID NO: 2013848
uccagagagaucuucaaag

SEQ ID NO: 2013850 - RNA, 19 nt, Artificial Sequence
  Description of Artificial Sequence: Synthetic oligonucleotide
  Sense strand starting at position 106 of SEQ ID NO: 1881047
gguaaaucauaagcuggaa

SEQ ID NO: 2013851 - RNA, 19 nt, Artificial Sequence
  Description of Artificial Sequence: Synthetic oligonucleotide
  Antisense strand to SEQ ID NO: 2013850
uuccagcuuaugauuuacc

SEQ ID NO: 2013852 - RNA, 19 nt, Artificial Sequence
  Description of Artificial Sequence: Synthetic oligonucleotide
  Sense strand starting at position 432 of SEQ ID NO: 1881047
ucguuccaccucuagaaau

SEQ ID NO: 2013853 - RNA, 19 nt, Artificial Sequence
  Description of Artificial Sequence: Synthetic oligonucleotide
  Antisense strand to SEQ ID NO: 2013852
auuucuagagguggaacga

SEQ ID NO: 2013854 - RNA, 19 nt, Artificial Sequence
  Description of Artificial Sequence: Synthetic oligonucleotide
  Sense strand starting at position 442 of SEQ ID NO: 1881047
ucuagaaauuuguaagaca

SEQ ID NO: 2013855 - RNA, 19 nt, Artificial Sequence
  Description of Artificial Sequence: Synthetic oligonucleotide
  Antisense strand to SEQ ID NO: 2013854
ugucuuacaaauuucuaga

SEQ ID NO: 2013856 - RNA, 19 nt, Artificial Sequence
  Description of Artificial Sequence: Synthetic oligonucleotide
  Sense strand starting at position 1058 of SEQ ID NO: 1881047
auaucuagcucucugauga

SEQ ID NO: 2013857 - RNA, 19 nt, Artificial Sequence
  Description of Artificial Sequence: Synthetic oligonucleotide
  Antisense strand to SEQ ID NO: 2013856
ucaucagagagcuagauau

SEQ ID NO: 2013858 - RNA, 19 nt, Artificial Sequence
  Description of Artificial Sequence: Synthetic oligonucleotide
  Sense strand starting at position 1336 of SEQ ID NO: 1881047
gcggaaauuaauugaucga

SEQ ID NO: 2013859 - RNA, 19 nt, Artificial Sequence
  Description of Artificial Sequence: Synthetic oligonucleotide
  Antisense strand to SEQ ID NO: 2013858
ucgaucaauuaauuuccgc

SEQ ID NO: 2013860 - RNA, 19 nt, Artificial Sequence
  Description of Artificial Sequence: Synthetic oligonucleotide
  Sense strand starting at position 1339 of SEQ ID NO: 1881047
gaaauuaauugaucgauug

SEQ ID NO: 2013861 - RNA, 19 nt, Artificial Sequence
  Description of Artificial Sequence: Synthetic oligonucleotide
  Antisense strand to SEQ ID NO: 2013860
caaucgaucaauuaauuuc

SEQ ID NO: 2013862 - RNA, 19 nt, Artificial Sequence
  Description of Artificial Sequence: Synthetic oligonucleotide
  Sense strand starting at position 1349 of SEQ ID NO: 1881047
gaucgauugagugauuggu

SEQ ID NO: 2013863 - RNA, 19 nt, Artificial Sequence
  Description of Artificial Sequence: Synthetic oligonucleotide
  Antisense strand to SEQ ID NO: 2013862
accaaucacucaaucgauc

SEQ ID NO: 2013864 - RNA, 19 nt, Artificial Sequence
  Description of Artificial Sequence: Synthetic oligonucleotide
  Sense strand starting at position 1353 of SEQ ID NO: 1881047
gauugagugauugguuaac

SEQ ID NO: 2013865 - RNA, 19 nt, Artificial Sequence
  Description of Artificial Sequence: Synthetic oligonucleotide
  Antisense strand to SEQ ID NO: 2013864
guuaaccaaucacucaauc

SEQ ID NO: 2013866 - RNA, 19 nt, Artificial Sequence
  Description of Artificial Sequence: Synthetic oligonucleotide
  Sense strand starting at position 1529 of SEQ ID NO: 1881047
aagguuucccaguggaauu

SEQ ID NO: 2013867 - RNA, 19 nt, Artificial Sequence
  Description of Artificial Sequence: Synthetic oligonucleotide
  Antisense strand to SEQ ID NO: 2013866
aauuccacugggaaaccuu

SEQ ID NO: 2013868 - RNA, 19 nt, Artificial Sequence
  Description of Artificial Sequence: Synthetic oligonucleotide
  Sense strand starting at position 1783 of SEQ ID NO: 1881047
uugcaucauccgguugcua

SEQ ID NO: 2013869 - RNA, 19 nt, Artificial Sequence
  Description of Artificial Sequence: Synthetic oligonucleotide
  Antisense strand to SEQ ID NO: 2013868
uagcaaccggaugaugcaa

SEQ ID NO: 2013870 - RNA, 19 nt, Artificial Sequence
  Description of Artificial Sequence: Synthetic oligonucleotide
  Sense strand starting at position 1883 of SEQ ID NO: 1881047
ucaggugcaucauugggaa

SEQ ID NO: 2013871 - RNA, 19 nt, Artificial Sequence
  Description of Artificial Sequence: Synthetic oligonucleotide
  Antisense strand to SEQ ID NO: 2013870
uucccaaugaugcaccuga

SEQ ID NO: 2013872 - RNA, 19 nt, Artificial Sequence
  Description of Artificial Sequence: Synthetic oligonucleotide
  Sense strand starting at position 1885 of SEQ ID NO: 1881047
aggugcaucauugggaaca

SEQ ID NO: 2013873 - RNA, 19 nt, Artificial Sequence
  Description of Artificial Sequence: Synthetic oligonucleotide
  Antisense strand to SEQ ID NO: 2013872
uguucccaaugaugcaccu

SEQ ID NO: 2013874 - RNA, 19 nt, Artificial Sequence
  Description of Artificial Sequence: Synthetic oligonucleotide
  Sense strand starting at position 1905 of SEQ ID NO: 1881047
ggcgcuuugcaguuugcaa

SEQ ID NO: 2013875 - RNA, 19 nt, Artificial Sequence
  Description of Artificial Sequence: Synthetic oligonucleotide
  Antisense strand to SEQ ID NO: 2013874
uugcaaacugcaaagcgcc

SEQ ID NO: 2013876 - RNA, 19 nt, Artificial Sequence
  Description of Artificial Sequence: Synthetic oligonucleotide
  Sense strand starting at position 1906 of SEQ ID NO: 1881047
gcgcuuugcaguuugcaaa

SEQ ID NO: 2013877 - RNA, 19 nt, Artificial Sequence
  Description of Artificial Sequence: Synthetic oligonucleotide
  Antisense strand to SEQ ID NO: 2013876
uuugcaaacugcaaagcgc

SEQ ID NO: 2013878 - RNA, 19 nt, Artificial Sequence
  Description of Artificial Sequence: Synthetic oligonucleotide
  Sense strand starting at position 2078 of SEQ ID NO: 1881047
ccaguaguacaugggucaa

SEQ ID NO: 2013879 - RNA, 19 nt, Artificial Sequence
  Description of Artificial Sequence: Synthetic oligonucleotide
  Antisense strand to SEQ ID NO: 2013878
uugacccauguacuacugg

SEQ ID NO: 2013880 - RNA, 19 nt, Artificial Sequence
  Description of Artificial Sequence: Synthetic oligonucleotide
  Sense strand starting at position 2217 of SEQ ID NO: 1881047
gcugaucacccuuauacag

SEQ ID NO: 2013881 - RNA, 19 nt, Artificial Sequence
  Description of Artificial Sequence: Synthetic oligonucleotide
  Antisense strand to SEQ ID NO: 2013880
cuguauaagggugaucagc

SEQ ID NO: 2013882 - RNA, 19 nt, Artificial Sequence
  Description of Artificial Sequence: Synthetic oligonucleotide
  Sense strand starting at position 2717 of SEQ ID NO: 1881047
gugggagcuccucgcauuu

SEQ ID NO: 2013883 - RNA, 19 nt, Artificial Sequence
  Description of Artificial Sequence: Synthetic oligonucleotide
  Antisense strand to SEQ ID NO: 2013882
aaaugcgaggagcucccac

SEQ ID NO: 2013884 - RNA, 19 nt, Artificial Sequence
  Description of Artificial Sequence: Synthetic oligonucleotide
  Sense strand starting at position 2938 of SEQ ID NO: 1881047
ugcagagcuaccgacuaaa

SEQ ID NO: 2013885 - RNA, 19 nt, Artificial Sequence
  Description of Artificial Sequence: Synthetic oligonucleotide
  Antisense strand to SEQ ID NO: 2013884
uuuagucgguagcucugca

SEQ ID NO: 2013886 - RNA, 19 nt, Artificial Sequence
  Description of Artificial Sequence: Synthetic oligonucleotide
  Sense strand starting at position 3023 of SEQ ID NO: 1881047
agagucuacgcacaaauca

SEQ ID NO: 2013887 - RNA, 19 nt, Artificial Sequence
  Description of Artificial Sequence: Synthetic oligonucleotide
  Antisense strand to SEQ ID NO: 2013886
ugauuugugcguagacucu

SEQ ID NO: 2013888 - RNA, 19 nt, Artificial Sequence
  Description of Artificial Sequence: Synthetic oligonucleotide
  Sense strand starting at position 3147 of SEQ ID NO: 1881047
gaaggaguuuacuuugguu

SEQ ID NO: 2013889 - RNA, 19 nt, Artificial Sequence
  Description of Artificial Sequence: Synthetic oligonucleotide
  Antisense strand to SEQ ID NO: 2013888
aaccaaaguaaacuccuuc

SEQ ID NO: 2013890 - RNA, 19 nt, Artificial Sequence
  Description of Artificial Sequence: Synthetic oligonucleotide
  Sense strand starting at position 3149 of SEQ ID NO: 1881047
aggaguuuacuuugguuua

SEQ ID NO: 2013891 - RNA, 19 nt, Artificial Sequence
  Description of Artificial Sequence: Synthetic oligonucleotide
  Antisense strand to SEQ ID NO: 2013890
uaaaccaaaguaaacuccu

SEQ ID NO: 2013892 - RNA, 19 nt, Artificial Sequence
  Description of Artificial Sequence: Synthetic oligonucleotide
  Sense strand starting at position 3222 of SEQ ID NO: 1881047
aggcuaaucucgguaauuu

SEQ ID NO: 2013893 - RNA, 19 nt, Artificial Sequence
  Description of Artificial Sequence: Synthetic oligonucleotide
  Antisense strand to SEQ ID NO: 2013892
aaauuaccgagauuagccu

SEQ ID NO: 2013894 - RNA, 19 nt, Artificial Sequence
  Description of Artificial Sequence: Synthetic oligonucleotide
  Sense strand starting at position 3268 of SEQ ID NO: 1881047
auccaaguucuugagucuu

SEQ ID NO: 2013895 - RNA, 19 nt, Artificial Sequence
  Description of Artificial Sequence: Synthetic oligonucleotide
  Antisense strand to SEQ ID NO: 2013894
aagacucaagaacuuggau

SEQ ID NO: 2013896 - RNA, 19 nt, Artificial Sequence
  Description of Artificial Sequence: Synthetic oligonucleotide
  Sense strand starting at position 3367 of SEQ ID NO: 1881047
uguguuuauuucccuuagu

SEQ ID NO: 2013897 - RNA, 19 nt, Artificial Sequence
  Description of Artificial Sequence: Synthetic oligonucleotide
  Antisense strand to SEQ ID NO: 2013896
acuaagggaaauaaacaca

SEQ ID NO: 2013898 - RNA, 19 nt, Artificial Sequence
  Description of Artificial Sequence: Synthetic oligonucleotide
  Sense strand starting at position 3368 of SEQ ID NO: 1881047
guguuuauuucccuuagug

SEQ ID NO: 2013899 - RNA, 19 nt, Artificial Sequence
  Description of Artificial Sequence: Synthetic oligonucleotide
  Antisense strand to SEQ ID NO: 2013898
cacuaagggaaauaaacac

SEQ ID NO: 2013900 - RNA, 19 nt, Artificial Sequence
  Description of Artificial Sequence: Synthetic oligonucleotide
  Sense strand starting at position 3370 of SEQ ID NO: 1881047
guuuauuucccuuaguguu

SEQ ID NO: 2013901 - RNA, 19 nt, Artificial Sequence
  Description of Artificial Sequence: Synthetic oligonucleotide
  Antisense strand to SEQ ID NO: 2013900
aacacuaagggaaauaaac

SEQ ID NO: 2013902 - RNA, 19 nt, Artificial Sequence
  Description of Artificial Sequence: Synthetic oligonucleotide
  Sense strand starting at position 3383 of SEQ ID NO: 1881047
aguguuacccauuagcauc

SEQ ID NO: 2013903 - RNA, 19 nt, Artificial Sequence
  Description of Artificial Sequence: Synthetic oligonucleotide
  Antisense strand to SEQ ID NO: 2013902
gaugcuaauggguaacacu

SEQ ID NO: 2013904 - RNA, 19 nt, Artificial Sequence
  Description of Artificial Sequence: Synthetic oligonucleotide
  Sense strand starting at position 3430 of SEQ ID NO: 1881047
guuguacucacuucguguu

SEQ ID NO: 2013905 - RNA, 19 nt, Artificial Sequence
  Description of Artificial Sequence: Synthetic oligonucleotide
  Antisense strand to SEQ ID NO: 2013904
aacacgaagugaguacaac

SEQ ID NO: 2013906 - RNA, 19 nt, Artificial Sequence
  Description of Artificial Sequence: Synthetic oligonucleotide
  Sense strand starting at position 3568 of SEQ ID NO: 1881047
uuggcaguuaggcauagau

SEQ ID NO: 2013907 - RNA, 19 nt, Artificial Sequence
  Description of Artificial Sequence: Synthetic oligonucleotide
  Antisense strand to SEQ ID NO: 2013906
aucuaugccuaacugccaa

SEQ ID NO: 2013908 - RNA, 19 nt, Artificial Sequence
  Description of Artificial Sequence: Synthetic oligonucleotide
  Sense strand starting at position 3570 of SEQ ID NO: 1881047
ggcaguuaggcauagauac

SEQ ID NO: 2013909 - RNA, 19 nt, Artificial Sequence
  Description of Artificial Sequence: Synthetic oligonucleotide
  Antisense strand to SEQ ID NO: 2013908
guaucuaugccuaacugcc

SEQ ID NO: 2013910 - RNA, 19 nt, Artificial Sequence
  Description of Artificial Sequence: Synthetic oligonucleotide
  Sense strand starting at position 3659 of SEQ ID NO: 1881047
acuaguaacuuucugaaag

SEQ ID NO: 2013911 - RNA, 19 nt, Artificial Sequence
  Description of Artificial Sequence: Synthetic oligonucleotide
  Antisense strand to SEQ ID NO: 2013910
cuuucagaaaguuacuagu

SEQ ID NO: 2013912 - RNA, 19 nt, Artificial Sequence
  Description of Artificial Sequence: Synthetic oligonucleotide
  Sense strand starting at position 3669 of SEQ ID NO: 1881047
uucugaaagguucagugga

SEQ ID NO: 2013913 - RNA, 19 nt, Artificial Sequence
  Description of Artificial Sequence: Synthetic oligonucleotide
  Antisense strand to SEQ ID NO: 2013912
uccacugaaccuuucagaa

SEQ ID NO: 2013914 - RNA, 19 nt, Artificial Sequence
  Description of Artificial Sequence: Synthetic oligonucleotide
  Sense strand starting at position 3671 of SEQ ID NO: 1881047
cugaaagguucaguggaaa

SEQ ID NO: 2013915 - RNA, 19 nt, Artificial Sequence
  Description of Artificial Sequence: Synthetic oligonucleotide
  Antisense strand to SEQ ID NO: 2013914
uuuccacugaaccuuucag

SEQ ID NO: 2013916 - RNA, 19 nt, Artificial Sequence
  Description of Artificial Sequence: Synthetic oligonucleotide
  Sense strand starting at position 3781 of SEQ ID NO: 1881047
ggugccauuucuguuuacu

SEQ ID NO: 2013917 - RNA, 19 nt, Artificial Sequence
  Description of Artificial Sequence: Synthetic oligonucleotide
  Antisense strand to SEQ ID NO: 2013916
aguaaacagaaauggcacc

SEQ ID NO: 2013918 - RNA, 19 nt, Artificial Sequence
  Description of Artificial Sequence: Synthetic oligonucleotide
  Sense strand starting at position 3783 of SEQ ID NO: 1881047
ugccauuucuguuuacugu

SEQ ID NO: 2013919 - RNA, 19 nt, Artificial Sequence
  Description of Artificial Sequence: Synthetic oligonucleotide
  Antisense strand to SEQ ID NO: 2013918
acaguaaacagaaauggca

SEQ ID NO: 2013920 - RNA, 19 nt, Artificial Sequence
  Description of Artificial Sequence: Synthetic oligonucleotide
  Sense strand starting at position 3784 of SEQ ID NO: 1881047
gccauuucuguuuacugua

SEQ ID NO: 2013921 - RNA, 19 nt, Artificial Sequence
  Description of Artificial Sequence: Synthetic oligonucleotide
  Antisense strand to SEQ ID NO: 2013920
uacaguaaacagaaauggc

SEQ ID NO: 2013922 - RNA, 19 nt, Artificial Sequence
  Description of Artificial Sequence: Synthetic oligonucleotide
  Sense strand starting at position 3797 of SEQ ID NO: 1881047
acuguaauguucuuugaaa

SEQ ID NO: 2013923 - RNA, 19 nt, Artificial Sequence
  Description of Artificial Sequence: Synthetic oligonucleotide
  Antisense strand to SEQ ID NO: 2013922
uuucaaagaacauuacagu

SEQ ID NO: 2013924 - RNA, 19 nt, Artificial Sequence
  Description of Artificial Sequence: Synthetic oligonucleotide
  Sense strand starting at position 3919 of SEQ ID NO: 1881047
aaggaagugucuuccacug

SEQ ID NO: 2013925 - RNA, 19 nt, Artificial Sequence
  Description of Artificial Sequence: Synthetic oligonucleotide
  Antisense strand to SEQ ID NO: 2013924
caguggaagacacuuccuu

SEQ ID NO: 2013926 - RNA, 19 nt, Artificial Sequence
  Description of Artificial Sequence: Synthetic oligonucleotide
  Sense strand starting at position 3963 of SEQ ID NO: 1881047
ugugcucugcuagcuaauu

SEQ ID NO: 2013927 - RNA, 19 nt, Artificial Sequence
  Description of Artificial Sequence: Synthetic oligonucleotide
  Antisense strand to SEQ ID NO: 2013926
aauuagcuagcagagcaca

SEQ ID NO: 2013928 - RNA, 19 nt, Artificial Sequence
  Description of Artificial Sequence: Synthetic oligonucleotide
  Sense strand starting at position 3981 of SEQ ID NO: 1881047
uagguuauuguguaucuga

SEQ ID NO: 2013929 - RNA, 19 nt, Artificial Sequence
  Description of Artificial Sequence: Synthetic oligonucleotide
  Antisense strand to SEQ ID NO: 2013928
ucagauacacaauaaccua

SEQ ID NO: 2013930 - RNA, 19 nt, Artificial Sequence
  Description of Artificial Sequence: Synthetic oligonucleotide
  Sense strand starting at position 2087 of SEQ ID NO: 1881048
cccacuggcugguaauaga

SEQ ID NO: 2013931 - RNA, 19 nt, Artificial Sequence
  Description of Artificial Sequence: Synthetic oligonucleotide
  Antisense strand to SEQ ID NO: 2013930
ucuauuaccagccaguggg

SEQ ID NO: 2013932 - RNA, 19 nt, Artificial Sequence
  Description of Artificial Sequence: Synthetic oligonucleotide
  Sense strand starting at position 2260 of SEQ ID NO: 1881048
ugacaagucucccugacag

SEQ ID NO: 2013933 - RNA, 19 nt, Artificial Sequence
  Description of Artificial Sequence: Synthetic oligonucleotide
  Antisense strand to SEQ ID NO: 2013932
cugucagggagacuuguca

SEQ ID NO: 2013934 - RNA, 19 nt, Artificial Sequence
  Description of Artificial Sequence: Synthetic oligonucleotide
  Sense strand starting at position 2361 of SEQ ID NO: 1881048
gugucuaccucagucugaa

SEQ ID NO: 2013935 - RNA, 19 nt, Artificial Sequence
  Description of Artificial Sequence: Synthetic oligonucleotide
  Antisense strand to SEQ ID NO: 2013934
uucagacugagguagacac

SEQ ID NO: 2013936 - RNA, 19 nt, Artificial Sequence
  Description of Artificial Sequence: Synthetic oligonucleotide
  Sense strand starting at position 2465 of SEQ ID NO: 1881048
ucauuuaguugccaggauu

SEQ ID NO: 2013937 - RNA, 19 nt, Artificial Sequence
  Description of Artificial Sequence: Synthetic oligonucleotide
  Antisense strand to SEQ ID NO: 2013936
aauccuggcaacuaaauga

SEQ ID NO: 2013938 - RNA, 19 nt, Artificial Sequence
  Description of Artificial Sequence: Synthetic oligonucleotide
  Sense strand starting at position 2472 of SEQ ID NO: 1881048
guugccaggauuuguacua

SEQ ID NO: 2013939 - RNA, 19 nt, Artificial Sequence
  Description of Artificial Sequence: Synthetic oligonucleotide
  Antisense strand to SEQ ID NO: 2013938
uaguacaaauccuggcaac

SEQ ID NO: 2013940 - RNA, 19 nt, Artificial Sequence
  Description of Artificial Sequence: Synthetic oligonucleotide
  Sense strand starting at position 2477 of SEQ ID NO: 1881048
caggauuuguacuaagagu

SEQ ID NO: 2013941 - RNA, 19 nt, Artificial Sequence
  Description of Artificial Sequence: Synthetic oligonucleotide
  Antisense strand to SEQ ID NO: 2013940
acucuuaguacaaauccug

SEQ ID NO: 2013942 - RNA, 19 nt, Artificial Sequence
  Description of Artificial Sequence: Synthetic oligonucleotide
  Sense strand starting at position 2514 of SEQ ID NO: 1881048
acgauuauucuuuagaagu

SEQ ID NO: 2013943 - RNA, 19 nt, Artificial Sequence
  Description of Artificial Sequence: Synthetic oligonucleotide
  Antisense strand to SEQ ID NO: 2013942
acuucuaaagaauaaucgu

SEQ ID NO: 2013944 - RNA, 19 nt, Artificial Sequence
  Description of Artificial Sequence: Synthetic oligonucleotide
  Sense strand starting at position 2592 of SEQ ID NO: 1881048
uacuguaagccugggauau

SEQ ID NO: 2013945 - RNA, 19 nt, Artificial Sequence
  Description of Artificial Sequence: Synthetic oligonucleotide
  Antisense strand to SEQ ID NO: 2013944
auaucccaggcuuacagua

SEQ ID NO: 2013946 - RNA, 19 nt, Artificial Sequence
  Description of Artificial Sequence: Synthetic oligonucleotide
  Sense strand starting at position 2593 of SEQ ID NO: 1881048
acuguaagccugggauauu

SEQ ID NO: 2013947 - RNA, 19 nt, Artificial Sequence
  Description of Artificial Sequence: Synthetic oligonucleotide
  Antisense strand to SEQ ID NO: 2013946
aauaucccaggcuuacagu

SEQ ID NO: 2013948 - RNA, 19 nt, Artificial Sequence
  Description of Artificial Sequence: Synthetic oligonucleotide
  Sense strand starting at position 2594 of SEQ ID NO: 1881048
cuguaagccugggauauua

SEQ ID NO: 2013949 - RNA, 19 nt, Artificial Sequence
  Description of Artificial Sequence: Synthetic oligonucleotide
  Antisense strand to SEQ ID NO: 2013948
uaauaucccaggcuuacag

SEQ ID NO: 2013950 - RNA, 19 nt, Artificial Sequence
  Description of Artificial Sequence: Synthetic oligonucleotide
  Sense strand starting at position 2602 of SEQ ID NO: 1881048
cugggauauuaugaacuua

SEQ ID NO: 2013951 - RNA, 19 nt, Artificial Sequence
  Description of Artificial Sequence: Synthetic oligonucleotide
  Antisense strand to SEQ ID NO: 2013950
uaaguucauaauaucccag

SEQ ID NO: 2013952 - RNA, 19 nt, Artificial Sequence
  Description of Artificial Sequence: Synthetic oligonucleotide
  Sense strand starting at position 2712 of SEQ ID NO: 1881048
ccugcugacaugggagaua

SEQ ID NO: 2013953 - RNA, 19 nt, Artificial Sequence
  Description of Artificial Sequence: Synthetic oligonucleotide
  Antisense strand to SEQ ID NO: 2013952
uaucucccaugucagcagg

SEQ ID NO: 2013954 - RNA, 19 nt, Artificial Sequence
  Description of Artificial Sequence: Synthetic oligonucleotide
  Sense strand starting at position 2725 of SEQ ID NO: 1881048
gagauagaaucaggcaaga

SEQ ID NO: 2013955 - RNA, 19 nt, Artificial Sequence
  Description of Artificial Sequence: Synthetic oligonucleotide
  Antisense strand to SEQ ID NO: 2013954
ucuugccugauucuaucuc

SEQ ID NO: 2013956 - RNA, 19 nt, Artificial Sequence
  Description of Artificial Sequence: Synthetic oligonucleotide
  Sense strand starting at position 2740 of SEQ ID NO: 1881048
aagaguuaacauggaucuu

SEQ ID NO: 2013957 - RNA, 19 nt, Artificial Sequence
  Description of Artificial Sequence: Synthetic oligonucleotide
  Antisense strand to SEQ ID NO: 2013956
aagauccauguuaacucuu

SEQ ID NO: 2013958 - RNA, 19 nt, Artificial Sequence
  Description of Artificial Sequence: Synthetic oligonucleotide
  Sense strand starting at position 2758 of SEQ ID NO: 1881048
uuccaauucugguacagaa

SEQ ID NO: 2013959 - RNA, 19 nt, Artificial Sequence
  Description of Artificial Sequence: Synthetic oligonucleotide
  Antisense strand to SEQ ID NO: 2013958
uucuguaccagaauuggaa

SEQ ID NO: 2013960 - RNA, 19 nt, Artificial Sequence
  Description of Artificial Sequence: Synthetic oligonucleotide
  Sense strand starting at position 2851 of SEQ ID NO: 1881048
cagcgugagugaugguaca

SEQ ID NO: 2013961 - RNA, 19 nt, Artificial Sequence
  Description of Artificial Sequence: Synthetic oligonucleotide
  Antisense strand to SEQ ID NO: 2013960
uguaccaucacucacgcug

SEQ ID NO: 2013962 - RNA, 19 nt, Artificial Sequence
  Description of Artificial Sequence: Synthetic oligonucleotide
  Sense strand starting at position 2912 of SEQ ID NO: 1881048
ccauuuggcuucugaaagg

SEQ ID NO: 2013963 - RNA, 19 nt, Artificial Sequence
  Description of Artificial Sequence: Synthetic oligonucleotide
  Antisense strand to SEQ ID NO: 2013962
ccuuucagaagccaaaugg

SEQ ID NO: 2013964 - RNA, 19 nt, Artificial Sequence
  Description of Artificial Sequence: Synthetic oligonucleotide
  Sense strand starting at position 3027 of SEQ ID NO: 1881048
cccugauuguucuugaaga

SEQ ID NO: 2013965 - RNA, 19 nt, Artificial Sequence
  Description of Artificial Sequence: Synthetic oligonucleotide
  Antisense strand to SEQ ID NO: 2013964
ucuucaagaacaaucaggg

SEQ ID NO: 2013966 - RNA, 19 nt, Artificial Sequence
  Description of Artificial Sequence: Synthetic oligonucleotide
  Sense strand starting at position 3028 of SEQ ID NO: 1881048
ccugauuguucuugaagag

SEQ ID NO: 2013967 - RNA, 19 nt, Artificial Sequence
  Description of Artificial Sequence: Synthetic oligonucleotide
  Antisense strand to SEQ ID NO: 2013966
cucuucaagaacaaucagg

SEQ ID NO: 2013968 - RNA, 19 nt, Artificial Sequence
  Description of Artificial Sequence: Synthetic oligonucleotide
  Sense strand starting at position 3053 of SEQ ID NO: 1881048
gcaagaugaggguguguuu

SEQ ID NO: 2013969 - RNA, 19 nt, Artificial Sequence
  Description of Artificial Sequence: Synthetic oligonucleotide
  Antisense strand to SEQ ID NO: 2013968
aaacacacccucaucuugc

SEQ ID NO: 2013970 - RNA, 19 nt, Artificial Sequence
  Description of Artificial Sequence: Synthetic oligonucleotide
  Sense strand starting at position 3060 of SEQ ID NO: 1881048
gaggguguguuucugagca

SEQ ID NO: 2013971 - RNA, 19 nt, Artificial Sequence
  Description of Artificial Sequence: Synthetic oligonucleotide
  Antisense strand to SEQ ID NO: 2013970
ugcucagaaacacacccuc

SEQ ID NO: 2013972 - RNA, 19 nt, Artificial Sequence
  Description of Artificial Sequence: Synthetic oligonucleotide
  Sense strand starting at position 3062 of SEQ ID NO: 1881048
ggguguguuucugagcaau

SEQ ID NO: 2013973 - RNA, 19 nt, Artificial Sequence
  Description of Artificial Sequence: Synthetic oligonucleotide
  Antisense strand to SEQ ID NO: 2013972
auugcucagaaacacaccc

SEQ ID NO: 2013974 - RNA, 19 nt, Artificial Sequence
  Description of Artificial Sequence: Synthetic oligonucleotide
  Sense strand starting at position 3064 of SEQ ID NO: 1881048
guguguuucugagcaauuc

SEQ ID NO: 2013975 - RNA, 19 nt, Artificial Sequence
  Description of Artificial Sequence: Synthetic oligonucleotide
  Antisense strand to SEQ ID NO: 2013974
gaauugcucagaaacacac

SEQ ID NO: 2013976 - RNA, 19 nt, Artificial Sequence
  Description of Artificial Sequence: Synthetic oligonucleotide
  Sense strand starting at position 3122 of SEQ ID NO: 1881048
ggagacuugucagucugag

SEQ ID NO: 2013977 - RNA, 19 nt, Artificial Sequence
  Description of Artificial Sequence: Synthetic oligonucleotide
  Antisense strand to SEQ ID NO: 2013976
cucagacugacaagucucc

SEQ ID NO: 2013978 - RNA, 19 nt, Artificial Sequence
  Description of Artificial Sequence: Synthetic oligonucleotide
  Sense strand starting at position 3126 of SEQ ID NO: 1881048
acuugucagucugagcaga

SEQ ID NO: 2013979 - RNA, 19 nt, Artificial Sequence
  Description of Artificial Sequence: Synthetic oligonucleotide
  Antisense strand to SEQ ID NO: 2013978
ucugcucagacugacaagu

SEQ ID NO: 2013980 - RNA, 19 nt, Artificial Sequence
  Description of Artificial Sequence: Synthetic oligonucleotide
  Sense strand starting at position 3128 of SEQ ID NO: 1881048
uugucagucugagcagaaa

SEQ ID NO: 2013981 - RNA, 19 nt, Artificial Sequence
  Description of Artificial Sequence: Synthetic oligonucleotide
  Antisense strand to SEQ ID NO: 2013980
uuucugcucagacugacaa

SEQ ID NO: 2013982 - RNA, 19 nt, Artificial Sequence
  Description of Artificial Sequence: Synthetic oligonucleotide
  Sense strand starting at position 3148 of SEQ ID NO: 1881048
uguucaaggugagauauga

SEQ ID NO: 2013983 - RNA, 19 nt, Artificial Sequence
  Description of Artificial Sequence: Synthetic oligonucleotide
  Antisense strand to SEQ ID NO: 2013982
ucauaucucaccuugaaca

SEQ ID NO: 2013984 - RNA, 19 nt, Artificial Sequence
  Description of Artificial Sequence: Synthetic oligonucleotide
  Sense strand starting at position 3222 of SEQ ID NO: 1881048
aucagauaugaaggcaagu

SEQ ID NO: 2013985 - RNA, 19 nt, Artificial Sequence
  Description of Artificial Sequence: Synthetic oligonucleotide
  Antisense strand to SEQ ID NO: 2013984
acuugccuucauaucugau

SEQ ID NO: 2013986 - RNA, 19 nt, Artificial Sequence
  Description of Artificial Sequence: Synthetic oligonucleotide
  Sense strand starting at position 3235 of SEQ ID NO: 1881048
gcaaguggcagagaugauu

SEQ ID NO: 2013987 - RNA, 19 nt, Artificial Sequence
  Description of Artificial Sequence: Synthetic oligonucleotide
  Antisense strand to SEQ ID NO: 2013986
aaucaucucugccacuugc

SEQ ID NO: 2013988 - RNA, 19 nt, Artificial Sequence
  Description of Artificial Sequence: Synthetic oligonucleotide
  Sense strand starting at position 3270 of SEQ ID NO: 1881048
aagggugggugucauuaau

SEQ ID NO: 2013989 - RNA, 19 nt, Artificial Sequence
  Description of Artificial Sequence: Synthetic oligonucleotide
  Antisense strand to SEQ ID NO: 2013988
auuaaugacacccacccuu

SEQ ID NO: 2013990 - RNA, 19 nt, Artificial Sequence
  Description of Artificial Sequence: Synthetic oligonucleotide
  Sense strand starting at position 3276 of SEQ ID NO: 1881048
gggugucauuaauagacau

SEQ ID NO: 2013991 - RNA, 19 nt, Artificial Sequence
  Description of Artificial Sequence: Synthetic oligonucleotide
  Antisense strand to SEQ ID NO: 2013990
augucuauuaaugacaccc

SEQ ID NO: 2013992 - RNA, 19 nt, Artificial Sequence
  Description of Artificial Sequence: Synthetic oligonucleotide
  Sense strand starting at position 3332 of SEQ ID NO: 1881048
gggacuguugugggagaua

SEQ ID NO: 2013993 - RNA, 19 nt, Artificial Sequence
  Description of Artificial Sequence: Synthetic oligonucleotide
  Antisense strand to SEQ ID NO: 2013992
uaucucccacaacaguccc

SEQ ID NO: 2013994 - RNA, 19 nt, Artificial Sequence
  Description of Artificial Sequence: Synthetic oligonucleotide
  Sense strand starting at position 3343 of SEQ ID NO: 1881048
gggagauaaugcccaucca

SEQ ID NO: 2013995 - RNA, 19 nt, Artificial Sequence
  Description of Artificial Sequence: Synthetic oligonucleotide
  Antisense strand to SEQ ID NO: 2013994
uggaugggcauuaucuccc

SEQ ID NO: 2013996 - RNA, 19 nt, Artificial Sequence
  Description of Artificial Sequence: Synthetic oligonucleotide
  Sense strand starting at position 3424 of SEQ ID NO: 1881048
gaugacguaucucaugauc

SEQ ID NO: 2013997 - RNA, 19 nt, Artificial Sequence
  Description of Artificial Sequence: Synthetic oligonucleotide
  Antisense strand to SEQ ID NO: 2013996
gaucaugagauacgucauc

SEQ ID NO: 2013998 - RNA, 19 nt, Artificial Sequence
  Description of Artificial Sequence: Synthetic oligonucleotide
  Sense strand starting at position 3426 of SEQ ID NO: 1881048
ugacguaucucaugaucuc

SEQ ID NO: 2013999 - RNA, 19 nt, Artificial Sequence
  Description of Artificial Sequence: Synthetic oligonucleotide
  Antisense strand to SEQ ID NO: 2013998
gagaucaugagauacguca

SEQ ID NO: 2014000 - RNA, 19 nt, Artificial Sequence
  Description of Artificial Sequence: Synthetic oligonucleotide
  Sense strand starting at position 3666 of SEQ ID NO: 1881048
ccagcaaauagguguugaa

SEQ ID NO: 2014001 - RNA, 19 nt, Artificial Sequence
  Description of Artificial Sequence: Synthetic oligonucleotide
  Antisense strand to SEQ ID NO: 2014000
uucaacaccuauuugcugg

SEQ ID NO: 2014002 - RNA, 19 nt, Artificial Sequence
  Description of Artificial Sequence: Synthetic oligonucleotide
  Sense strand starting at position 3669 of SEQ ID NO: 1881048
gcaaauagguguugaauaa

SEQ ID NO: 2014003 - RNA, 19 nt, Artificial Sequence
  Description of Artificial Sequence: Synthetic oligonucleotide
  Antisense strand to SEQ ID NO: 2014002
uuauucaacaccuauuugc

SEQ ID NO: 2014004 - RNA, 19 nt, Artificial Sequence
  Description of Artificial Sequence: Synthetic oligonucleotide
  Sense strand starting at position 3884 of SEQ ID NO: 1881048
cagguuauccucuagagua

SEQ ID NO: 2014005 - RNA, 19 nt, Artificial Sequence
  Description of Artificial Sequence: Synthetic oligonucleotide
  Antisense strand to SEQ ID NO: 2014004
uacucuagaggauaaccug

SEQ ID NO: 2014006 - RNA, 19 nt, Artificial Sequence
  Description of Artificial Sequence: Synthetic oligonucleotide
  Sense strand starting at position 3886 of SEQ ID NO: 1881048
gguuauccucuagaguaac

SEQ ID NO: 2014007 - RNA, 19 nt, Artificial Sequence
  Description of Artificial Sequence: Synthetic oligonucleotide
  Antisense strand to SEQ ID NO: 2014006
guuacucuagaggauaacc

SEQ ID NO: 2014008 - RNA, 19 nt, Artificial Sequence
  Description of Artificial Sequence: Synthetic oligonucleotide
  Sense strand starting at position 55 of SEQ ID NO: 1881049
gugagaucugucagcguag

SEQ ID NO: 2014009 - RNA, 19 nt, Artificial Sequence
  Description of Artificial Sequence: Synthetic oligonucleotide
  Antisense strand to SEQ ID NO: 2014008
cuacgcugacagaucucac

SEQ ID NO: 2014010 - RNA, 19 nt, Artificial Sequence
  Description of Artificial Sequence: Synthetic oligonucleotide
  Sense strand starting at position 107 of SEQ ID NO: 1881049
ggugcaggcauagaguaaa

SEQ ID NO: 2014011 - RNA, 19 nt, Artificial Sequence
  Description of Artificial Sequence: Synthetic oligonucleotide
  Antisense strand to SEQ ID NO: 2014010
uuuacucuaugccugcacc

SEQ ID NO: 2014012 - RNA, 19 nt, Artificial Sequence
  Description of Artificial Sequence: Synthetic oligonucleotide
  Sense strand starting at position 283 of SEQ ID NO: 1881049
agugaagaacagugaguaa

SEQ ID NO: 2014013 - RNA, 19 nt, Artificial Sequence
  Description of Artificial Sequence: Synthetic oligonucleotide
  Antisense strand to SEQ ID NO: 2014012
uuacucacuguucuucacu

SEQ ID NO: 2014014 - RNA, 19 nt, Artificial Sequence
  Description of Artificial Sequence: Synthetic oligonucleotide
  Sense strand starting at position 347 of SEQ ID NO: 1881049
ucggaauuggagugcuaga

SEQ ID NO: 2014015 - RNA, 19 nt, Artificial Sequence
  Description of Artificial Sequence: Synthetic oligonucleotide
  Antisense strand to SEQ ID NO: 2014014
ucuagcacuccaauuccga

SEQ ID NO: 2014016 - RNA, 19 nt, Artificial Sequence
  Description of Artificial Sequence: Synthetic oligonucleotide
  Sense strand starting at position 433 of SEQ ID NO: 1881049
augcaaagauguuuaaauc

SEQ ID NO: 2014017 - RNA, 19 nt, Artificial Sequence
  Description of Artificial Sequence: Synthetic oligonucleotide
  Antisense strand to SEQ ID NO: 2014016
gauuuaaacaucuuugcau

SEQ ID NO: 2014018 - RNA, 19 nt, Artificial Sequence
  Description of Artificial Sequence: Synthetic oligonucleotide
  Sense strand starting at position 443 of SEQ ID NO: 1881049
guuuaaauccagcaguaca

SEQ ID NO: 2014019 - RNA, 19 nt, Artificial Sequence
  Description of Artificial Sequence: Synthetic oligonucleotide
  Antisense strand to SEQ ID NO: 2014018
uguacugcuggauuuaaac

SEQ ID NO: 2014020 - RNA, 19 nt, Artificial Sequence
  Description of Artificial Sequence: Synthetic oligonucleotide
  Sense strand starting at position 458 of SEQ ID NO: 1881049
uacagaauggcuugguaaa

SEQ ID NO: 2014021 - RNA, 19 nt, Artificial Sequence
  Description of Artificial Sequence: Synthetic oligonucleotide
  Antisense strand to SEQ ID NO: 2014020
uuuaccaagccauucugua

SEQ ID NO: 2014022 - RNA, 19 nt, Artificial Sequence
  Description of Artificial Sequence: Synthetic oligonucleotide
  Sense strand starting at position 515 of SEQ ID NO: 1881049
agugguaauagucaaaguu

SEQ ID NO: 2014023 - RNA, 19 nt, Artificial Sequence
  Description of Artificial Sequence: Synthetic oligonucleotide
  Antisense strand to SEQ ID NO: 2014022
aacuuugacuauuaccacu

SEQ ID NO: 2014024 - RNA, 19 nt, Artificial Sequence
  Description of Artificial Sequence: Synthetic oligonucleotide
  Sense strand starting at position 661 of SEQ ID NO: 1881049
uguuccaagagucaguauu

SEQ ID NO: 2014025 - RNA, 19 nt, Artificial Sequence
  Description of Artificial Sequence: Synthetic oligonucleotide
  Antisense strand to SEQ ID NO: 2014024
aauacugacucuuggaaca

SEQ ID NO: 2014026 - RNA, 19 nt, Artificial Sequence
  Description of Artificial Sequence: Synthetic oligonucleotide
  Sense strand starting at position 892 of SEQ ID NO: 1881049
gugucagaguauccaaaga

SEQ ID NO: 2014027 - RNA, 19 nt, Artificial Sequence
  Description of Artificial Sequence: Synthetic oligonucleotide
  Antisense strand to SEQ ID NO: 2014026
ucuuuggauacucugacac

SEQ ID NO: 2014028 - RNA, 19 nt, Artificial Sequence
  Description of Artificial Sequence: Synthetic oligonucleotide
  Sense strand starting at position 931 of SEQ ID NO: 1881049
aggacuuuccugugguuua

SEQ ID NO: 2014029 - RNA, 19 nt, Artificial Sequence
  Description of Artificial Sequence: Synthetic oligonucleotide
  Antisense strand to SEQ ID NO: 2014028
uaaaccacaggaaaguccu

SEQ ID NO: 2014030 - RNA, 19 nt, Artificial Sequence
  Description of Artificial Sequence: Synthetic oligonucleotide
  Sense strand starting at position 944 of SEQ ID NO: 1881049
gguuuaaaucuugaguaca

SEQ ID NO: 2014031 - RNA, 19 nt, Artificial Sequence
  Description of Artificial Sequence: Synthetic oligonucleotide
  Antisense strand to SEQ ID NO: 2014030
uguacucaagauuuaaacc

SEQ ID NO: 2014032 - RNA, 19 nt, Artificial Sequence
  Description of Artificial Sequence: Synthetic oligonucleotide
  Sense strand starting at position 971 of SEQ ID NO: 1881049
uuugacacccaguaaguau

SEQ ID NO: 2014033 - RNA, 19 nt, Artificial Sequence
  Description of Artificial Sequence: Synthetic oligonucleotide
  Antisense strand to SEQ ID NO: 2014032
auacuuacugggugucaaa

SEQ ID NO: 2014034 - RNA, 19 nt, Artificial Sequence
  Description of Artificial Sequence: Synthetic oligonucleotide
  Sense strand starting at position 1049 of SEQ ID NO: 1881049
uugucaucucucuaucaug

SEQ ID NO: 2014035 - RNA, 19 nt, Artificial Sequence
  Description of Artificial Sequence: Synthetic oligonucleotide
  Antisense strand to SEQ ID NO: 2014034
caugauagagagaugacaa

SEQ ID NO: 2014036 - RNA, 19 nt, Artificial Sequence
  Description of Artificial Sequence: Synthetic oligonucleotide
  Sense strand starting at position 1126 of SEQ ID NO: 1881049
gguaauuggcaaugaugga

SEQ ID NO: 2014037 - RNA, 19 nt, Artificial Sequence
  Description of Artificial Sequence: Synthetic oligonucleotide
  Antisense strand to SEQ ID NO: 2014036
uccaucauugccaauuacc

SEQ ID NO: 2014038 - RNA, 19 nt, Artificial Sequence
  Description of Artificial Sequence: Synthetic oligonucleotide
  Sense strand starting at position 1144 of SEQ ID NO: 1881049
aaugacuguccggaguaaa

SEQ ID NO: 2014039 - RNA, 19 nt, Artificial Sequence
  Description of Artificial Sequence: Synthetic oligonucleotide
  Antisense strand to SEQ ID NO: 2014038
uuuacuccggacagucauu

SEQ ID NO: 2014040 - RNA, 19 nt, Artificial Sequence
  Description of Artificial Sequence: Synthetic oligonucleotide
  Sense strand starting at position 1147 of SEQ ID NO: 1881049
gacuguccggaguaaagaa

SEQ ID NO: 2014041 - RNA, 19 nt, Artificial Sequence
  Description of Artificial Sequence: Synthetic oligonucleotide
  Antisense strand to SEQ ID NO: 2014040
uucuuuacuccggacaguc

SEQ ID NO: 2014042 - RNA, 19 nt, Artificial Sequence
  Description of Artificial Sequence: Synthetic oligonucleotide
  Sense strand starting at position 1176 of SEQ ID NO: 1881049
guucuugugccaugauuuc

SEQ ID NO: 2014043 - RNA, 19 nt, Artificial Sequence
  Description of Artificial Sequence: Synthetic oligonucleotide
  Antisense strand to SEQ ID NO: 2014042
gaaaucauggcacaagaac

SEQ ID NO: 2014044 - RNA, 19 nt, Artificial Sequence
  Description of Artificial Sequence: Synthetic oligonucleotide
  Sense strand starting at position 1335 of SEQ ID NO: 1881049
ccagcuuguugacuuggaa

SEQ ID NO: 2014045 - RNA, 19 nt, Artificial Sequence
  Description of Artificial Sequence: Synthetic oligonucleotide
  Antisense strand to SEQ ID NO: 2014044
uuccaagucaacaagcugg

SEQ ID NO: 2014046 - RNA, 19 nt, Artificial Sequence
  Description of Artificial Sequence: Synthetic oligonucleotide
  Sense strand starting at position 1338 of SEQ ID NO: 1881049
gcuuguugacuuggaaacu

SEQ ID NO: 2014047 - RNA, 19 nt, Artificial Sequence
  Description of Artificial Sequence: Synthetic oligonucleotide
  Antisense strand to SEQ ID NO: 2014046
aguuuccaagucaacaagc

SEQ ID NO: 2014048 - RNA, 19 nt, Artificial Sequence
  Description of Artificial Sequence: Synthetic oligonucleotide
  Sense strand starting at position 1483 of SEQ ID NO: 1881049
gggucacuuguucagugaa

SEQ ID NO: 2014049 - RNA, 19 nt, Artificial Sequence
  Description of Artificial Sequence: Synthetic oligonucleotide
  Antisense strand to SEQ ID NO: 2014048
uucacugaacaagugaccc

SEQ ID NO: 2014050 - RNA, 19 nt, Artificial Sequence
  Description of Artificial Sequence: Synthetic oligonucleotide
  Sense strand starting at position 1741 of SEQ ID NO: 1881049
ucauccaaucuguaaaugu

SEQ ID NO: 2014051 - RNA, 19 nt, Artificial Sequence
  Description of Artificial Sequence: Synthetic oligonucleotide
  Antisense strand to SEQ ID NO: 2014050
acauuuacagauuggauga

SEQ ID NO: 2014052 - RNA, 19 nt, Artificial Sequence
  Description of Artificial Sequence: Synthetic oligonucleotide
  Sense strand starting at position 1832 of SEQ ID NO: 1881049
cccuuuacagacugugaaa

SEQ ID NO: 2014053 - RNA, 19 nt, Artificial Sequence
  Description of Artificial Sequence: Synthetic oligonucleotide
  Antisense strand to SEQ ID NO: 2014052
uuucacagucuguaaaggg

SEQ ID NO: 2014054 - RNA, 19 nt, Artificial Sequence
  Description of Artificial Sequence: Synthetic oligonucleotide
  Sense strand starting at position 1866 of SEQ ID NO: 1881049
cuuacagacuguucugaag

SEQ ID NO: 2014055 - RNA, 19 nt, Artificial Sequence
  Description of Artificial Sequence: Synthetic oligonucleotide
  Antisense strand to SEQ ID NO: 2014054
cuucagaacagucuguaag

SEQ ID NO: 2014056 - RNA, 19 nt, Artificial Sequence
  Description of Artificial Sequence: Synthetic oligonucleotide
  Sense strand starting at position 2083 of SEQ ID NO: 1881049
gcuacccuagcuugaaaua

SEQ ID NO: 2014057 - RNA, 19 nt, Artificial Sequence
  Description of Artificial Sequence: Synthetic oligonucleotide
  Antisense strand to SEQ ID NO: 2014056
uauuucaagcuaggguagc

SEQ ID NO: 2014058 - RNA, 19 nt, Artificial Sequence
  Description of Artificial Sequence: Synthetic oligonucleotide
  Sense strand starting at position 2117 of SEQ ID NO: 1881049
guuaguuuacuuuaacaga

SEQ ID NO: 2014059 - RNA, 19 nt, Artificial Sequence
  Description of Artificial Sequence: Synthetic oligonucleotide
  Antisense strand to SEQ ID NO: 2014058
ucuguuaaaguaaacuaac

SEQ ID NO: 2014060 - RNA, 19 nt, Artificial Sequence
  Description of Artificial Sequence: Synthetic oligonucleotide
  Sense strand starting at position 2133 of SEQ ID NO: 1881049
agagauucuugauugcaga

SEQ ID NO: 2014061 - RNA, 19 nt, Artificial Sequence
  Description of Artificial Sequence: Synthetic oligonucleotide
  Antisense strand to SEQ ID NO: 2014060
ucugcaaucaagaaucucu

SEQ ID NO: 2014062 - RNA, 19 nt, Artificial Sequence
  Description of Artificial Sequence: Synthetic oligonucleotide
  Sense strand starting at position 2134 of SEQ ID NO: 1881049
gagauucuugauugcagag

SEQ ID NO: 2014063 - RNA, 19 nt, Artificial Sequence
  Description of Artificial Sequence: Synthetic oligonucleotide
  Antisense strand to SEQ ID NO: 2014062
cucugcaaucaagaaucuc

SEQ ID NO: 2014064 - RNA, 19 nt, Artificial Sequence
  Description of Artificial Sequence: Synthetic oligonucleotide
  Sense strand starting at position 2140 of SEQ ID NO: 1881049
cuugauugcagaggaacuu

SEQ ID NO: 2014065 - RNA, 19 nt, Artificial Sequence
  Description of Artificial Sequence: Synthetic oligonucleotide
  Antisense strand to SEQ ID NO: 2014064
aaguuccucugcaaucaag

SEQ ID NO: 2014066 - RNA, 19 nt, Artificial Sequence
  Description of Artificial Sequence: Synthetic oligonucleotide
  Sense strand starting at position 2302 of SEQ ID NO: 1881049
uaauucucugugugauaug

SEQ ID NO: 2014067 - RNA, 19 nt, Artificial Sequence
  Description of Artificial Sequence: Synthetic oligonucleotide
  Antisense strand to SEQ ID NO: 2014066
cauaucacacagagaauua

SEQ ID NO: 2014068 - RNA, 19 nt, Artificial Sequence
  Description of Artificial Sequence: Synthetic oligonucleotide
  Sense strand starting at position 2307 of SEQ ID NO: 1881049
cucugugugauauggagaa

SEQ ID NO: 2014069 - RNA, 19 nt, Artificial Sequence
  Description of Artificial Sequence: Synthetic oligonucleotide
  Antisense strand to SEQ ID NO: 2014068
uucuccauaucacacagag

SEQ ID NO: 2014070 - RNA, 19 nt, Artificial Sequence
  Description of Artificial Sequence: Synthetic oligonucleotide
  Sense strand starting at position 2329 of SEQ ID NO: 1881049
gccugaggccaggagaauu

SEQ ID NO: 2014071 - RNA, 19 nt, Artificial Sequence
  Description of Artificial Sequence: Synthetic oligonucleotide
  Antisense strand to SEQ ID NO: 2014070
aauucuccuggccucaggc

SEQ ID NO: 2014072 - RNA, 19 nt, Artificial Sequence
  Description of Artificial Sequence: Synthetic oligonucleotide
  Sense strand starting at position 2349 of SEQ ID NO: 1881049
agguacuuuccagagucau

SEQ ID NO: 2014073 - RNA, 19 nt, Artificial Sequence
  Description of Artificial Sequence: Synthetic oligonucleotide
  Antisense strand to SEQ ID NO: 2014072
augacucuggaaaguaccu

SEQ ID NO: 2014074 - RNA, 19 nt, Artificial Sequence
  Description of Artificial Sequence: Synthetic oligonucleotide
  Sense strand starting at position 2651 of SEQ ID NO: 1881049
ucucacaggugauugcaaa

SEQ ID NO: 2014075 - RNA, 19 nt, Artificial Sequence
  Description of Artificial Sequence: Synthetic oligonucleotide
  Antisense strand to SEQ ID NO: 2014074
uuugcaaucaccugugaga

SEQ ID NO: 2014076 - RNA, 19 nt, Artificial Sequence
  Description of Artificial Sequence: Synthetic oligonucleotide
  Sense strand starting at position 2890 of SEQ ID NO: 1881049
uuagcuuguuacucaagag

SEQ ID NO: 2014077 - RNA, 19 nt, Artificial Sequence
  Description of Artificial Sequence: Synthetic oligonucleotide
  Antisense strand to SEQ ID NO: 2014076
cucuugaguaacaagcuaa

SEQ ID NO: 2014078 - RNA, 19 nt, Artificial Sequence
  Description of Artificial Sequence: Synthetic oligonucleotide
  Sense strand starting at position 3322 of SEQ ID NO: 1881049
augccagagaccuauguga

SEQ ID NO: 2014079 - RNA, 19 nt, Artificial Sequence
  Description of Artificial Sequence: Synthetic oligonucleotide
  Antisense strand to SEQ ID NO: 2014078
ucacauaggucucuggcau

SEQ ID NO: 2014080 - RNA, 19 nt, Artificial Sequence
  Description of Artificial Sequence: Synthetic oligonucleotide
  Sense strand starting at position 3324 of SEQ ID NO: 1881049
gccagagaccuaugugaca

SEQ ID NO: 2014081 - RNA, 19 nt, Artificial Sequence
  Description of Artificial Sequence: Synthetic oligonucleotide
  Antisense strand to SEQ ID NO: 2014080
ugucacauaggucucuggc

SEQ ID NO: 2014082 - RNA, 19 nt, Artificial Sequence
  Description of Artificial Sequence: Synthetic oligonucleotide
  Sense strand starting at position 3399 of SEQ ID NO: 1881049
cccugugaccugcagguaa

SEQ ID NO: 2014083 - RNA, 19 nt, Artificial Sequence
  Description of Artificial Sequence: Synthetic oligonucleotide
  Antisense strand to SEQ ID NO: 2014082
uuaccugcaggucacaggg

SEQ ID NO: 2014084 - RNA, 19 nt, Artificial Sequence
  Description of Artificial Sequence: Synthetic oligonucleotide
  Sense strand starting at position 3403 of SEQ ID NO: 1881049
gugaccugcagguaaacau

SEQ ID NO: 2014085 - RNA, 19 nt, Artificial Sequence
  Description of Artificial Sequence: Synthetic oligonucleotide
  Antisense strand to SEQ ID NO: 2014084
auguuuaccugcaggucac

SEQ ID NO: 2014086 - RNA, 19 nt, Artificial Sequence
  Description of Artificial Sequence: Synthetic oligonucleotide
  Sense strand starting at position 3447 of SEQ ID NO: 1881049
ugaugacauuccgccacaa

SEQ ID NO: 2014087 - RNA, 19 nt, Artificial Sequence
  Description of Artificial Sequence: Synthetic oligonucleotide
  Antisense strand to SEQ ID NO: 2014086
uuguggcggaaugucauca

SEQ ID NO: 2014088 - RNA, 19 nt, Artificial Sequence
  Description of Artificial Sequence: Synthetic oligonucleotide
  Sense strand starting at position 102 of SEQ ID NO: 1881050
ugagcuaucaagcaugaga

SEQ ID NO: 2014089 - RNA, 19 nt, Artificial Sequence
  Description of Artificial Sequence: Synthetic oligonucleotide
  Antisense strand to SEQ ID NO: 2014088
ucucaugcuugauagcuca

SEQ ID NO: 2014090 - RNA, 19 nt, Artificial Sequence
  Description of Artificial Sequence: Synthetic oligonucleotide
  Sense strand starting at position 104 of SEQ ID NO: 1881050
agcuaucaagcaugagaag

SEQ ID NO: 2014091 - RNA, 19 nt, Artificial Sequence
  Description of Artificial Sequence: Synthetic oligonucleotide
  Antisense strand to SEQ ID NO: 2014090
cuucucaugcuugauagcu

SEQ ID NO: 2014092 - RNA, 19 nt, Artificial Sequence
  Description of Artificial Sequence: Synthetic oligonucleotide
  Sense strand starting at position 180 of SEQ ID NO: 1881050
uguauuguaugauuccaac

SEQ ID NO: 2014093 - RNA, 19 nt, Artificial Sequence
  Description of Artificial Sequence: Synthetic oligonucleotide
  Antisense strand to SEQ ID NO: 2014092
guuggaaucauacaauaca

SEQ ID NO: 2014094 - RNA, 19 nt, Artificial Sequence
  Description of Artificial Sequence: Synthetic oligonucleotide
  Sense strand starting at position 408 of SEQ ID NO: 1881050
aacugugaacuuuggguaa

SEQ ID NO: 2014095 - RNA, 19 nt, Artificial Sequence
  Description of Artificial Sequence: Synthetic oligonucleotide
  Antisense strand to SEQ ID NO: 2014094
uuacccaaaguucacaguu

SEQ ID NO: 2014096 - RNA, 19 nt, Artificial Sequence
  Description of Artificial Sequence: Synthetic oligonucleotide
  Sense strand starting at position 411 of SEQ ID NO: 1881050
ugugaacuuuggguaacaa

SEQ ID NO: 2014097 - RNA, 19 nt, Artificial Sequence
  Description of Artificial Sequence: Synthetic oligonucleotide
  Antisense strand to SEQ ID NO: 2014096
uuguuacccaaaguucaca

SEQ ID NO: 2014098 - RNA, 19 nt, Artificial Sequence
  Description of Artificial Sequence: Synthetic oligonucleotide
  Sense strand starting at position 456 of SEQ ID NO: 1881050
gggaacuacuguuccacua

SEQ ID NO: 2014099 - RNA, 19 nt, Artificial Sequence
  Description of Artificial Sequence: Synthetic oligonucleotide
  Antisense strand to SEQ ID NO: 2014098
uaguggaacaguaguuccc

SEQ ID NO: 2014100 - RNA, 19 nt, Artificial Sequence
  Description of Artificial Sequence: Synthetic oligonucleotide
  Sense strand starting at position 936 of SEQ ID NO: 1881050
agaagugauaucugguucu

SEQ ID NO: 2014101 - RNA, 19 nt, Artificial Sequence
  Description of Artificial Sequence: Synthetic oligonucleotide
  Antisense strand to SEQ ID NO: 2014100
agaaccagauaucacuucu

SEQ ID NO: 2014102 - RNA, 19 nt, Artificial Sequence
  Description of Artificial Sequence: Synthetic oligonucleotide
  Sense strand starting at position 939 of SEQ ID NO: 1881050
agugauaucugguucuaua

SEQ ID NO: 2014103 - RNA, 19 nt, Artificial Sequence
  Description of Artificial Sequence: Synthetic oligonucleotide
  Antisense strand to SEQ ID NO: 2014102
uauagaaccagauaucacu

SEQ ID NO: 2014104 - RNA, 19 nt, Artificial Sequence
  Description of Artificial Sequence: Synthetic oligonucleotide
  Sense strand starting at position 1121 of SEQ ID NO: 1881050
aguugagacaucugcagau

SEQ ID NO: 2014105 - RNA, 19 nt, Artificial Sequence
  Description of Artificial Sequence: Synthetic oligonucleotide
  Antisense strand to SEQ ID NO: 2014104
aucugcagaugucucaacu

SEQ ID NO: 2014106 - RNA, 19 nt, Artificial Sequence
  Description of Artificial Sequence: Synthetic oligonucleotide
  Sense strand starting at position 1231 of SEQ ID NO: 1881050
ggaaauaguccaggcacaa

SEQ ID NO: 2014107 - RNA, 19 nt, Artificial Sequence
  Description of Artificial Sequence: Synthetic oligonucleotide
  Antisense strand to SEQ ID NO: 2014106
uugugccuggacuauuucc

SEQ ID NO: 2014108 - RNA, 19 nt, Artificial Sequence
  Description of Artificial Sequence: Synthetic oligonucleotide
  Sense strand starting at position 1264 of SEQ ID NO: 1881050
ccuccaggucaugaguuau

SEQ ID NO: 2014109 - RNA, 19 nt, Artificial Sequence
  Description of Artificial Sequence: Synthetic oligonucleotide
  Antisense strand to SEQ ID NO: 2014108
auaacucaugaccuggagg

SEQ ID NO: 2014110 - RNA, 19 nt, Artificial Sequence
  Description of Artificial Sequence: Synthetic oligonucleotide
  Sense strand starting at position 1332 of SEQ ID NO: 1881050
agaacaaaccugugccauu

SEQ ID NO: 2014111 - RNA, 19 nt, Artificial Sequence
  Description of Artificial Sequence: Synthetic oligonucleotide
  Antisense strand to SEQ ID NO: 2014110
aauggcacagguuuguucu

SEQ ID NO: 2014112 - RNA, 19 nt, Artificial Sequence
  Description of Artificial Sequence: Synthetic oligonucleotide
  Sense strand starting at position 1346 of SEQ ID NO: 1881050
ccauucuugaugugagaug

SEQ ID NO: 2014113 - RNA, 19 nt, Artificial Sequence
  Description of Artificial Sequence: Synthetic oligonucleotide
  Antisense strand to SEQ ID NO: 2014112
caucucacaucaagaaugg

SEQ ID NO: 2014114 - RNA, 19 nt, Artificial Sequence
  Description of Artificial Sequence: Synthetic oligonucleotide
  Sense strand starting at position 1720 of SEQ ID NO: 1881050
ccucauauaguugagcaua

SEQ ID NO: 2014115 - RNA, 19 nt, Artificial Sequence
  Description of Artificial Sequence: Synthetic oligonucleotide
  Antisense strand to SEQ ID NO: 2014114
uaugcucaacuauaugagg

SEQ ID NO: 2014116 - RNA, 19 nt, Artificial Sequence
  Description of Artificial Sequence: Synthetic oligonucleotide
  Sense strand starting at position 1722 of SEQ ID NO: 1881050
ucauauaguugagcauaaa

SEQ ID NO: 2014117 - RNA, 19 nt, Artificial Sequence
  Description of Artificial Sequence: Synthetic oligonucleotide
  Antisense strand to SEQ ID NO: 2014116
uuuaugcucaacuauauga

SEQ ID NO: 2014118 - RNA, 19 nt, Artificial Sequence
  Description of Artificial Sequence: Synthetic oligonucleotide
  Sense strand starting at position 1768 of SEQ ID NO: 1881050
cugacaggccuccauaaua

SEQ ID NO: 2014119 - RNA, 19 nt, Artificial Sequence
  Description of Artificial Sequence: Synthetic oligonucleotide
  Antisense strand to SEQ ID NO: 2014118
uauuauggaggccugucag

SEQ ID NO: 2014120 - RNA, 19 nt, Artificial Sequence
  Description of Artificial Sequence: Synthetic oligonucleotide
  Sense strand starting at position 1799 of SEQ ID NO: 1881050
guccauccagaaugcauaa

SEQ ID NO: 2014121 - RNA, 19 nt, Artificial Sequence
  Description of Artificial Sequence: Synthetic oligonucleotide
  Antisense strand to SEQ ID NO: 2014120
uuaugcauucuggauggac

SEQ ID NO: 2014122 - RNA, 19 nt, Artificial Sequence
  Description of Artificial Sequence: Synthetic oligonucleotide
  Sense strand starting at position 1821 of SEQ ID NO: 1881050
uggagugcauaccuauaga

SEQ ID NO: 2014123 - RNA, 19 nt, Artificial Sequence
  Description of Artificial Sequence: Synthetic oligonucleotide
  Antisense strand to SEQ ID NO: 2014122
ucuauagguaugcacucca

SEQ ID NO: 2014124 - RNA, 19 nt, Artificial Sequence
  Description of Artificial Sequence: Synthetic oligonucleotide
  Sense strand starting at position 1824 of SEQ ID NO: 1881050
agugcauaccuauagaauu

SEQ ID NO: 2014125 - RNA, 19 nt, Artificial Sequence
  Description of Artificial Sequence: Synthetic oligonucleotide
  Antisense strand to SEQ ID NO: 2014124
aauucuauagguaugcacu

SEQ ID NO: 2014126 - RNA, 19 nt, Artificial Sequence
  Description of Artificial Sequence: Synthetic oligonucleotide
  Sense strand starting at position 1985 of SEQ ID NO: 1881050
agguuagcacuggacuuaa

SEQ ID NO: 2014127 - RNA, 19 nt, Artificial Sequence
  Description of Artificial Sequence: Synthetic oligonucleotide
  Antisense strand to SEQ ID NO: 2014126
uuaaguccagugcuaaccu

SEQ ID NO: 2014128 - RNA, 19 nt, Artificial Sequence
  Description of Artificial Sequence: Synthetic oligonucleotide
  Sense strand starting at position 2026 of SEQ ID NO: 1881050
uggcucauagccuagggau

SEQ ID NO: 2014129 - RNA, 19 nt, Artificial Sequence
  Description of Artificial Sequence: Synthetic oligonucleotide
  Antisense strand to SEQ ID NO: 2014128
aucccuaggcuaugagcca

SEQ ID NO: 2014130 - RNA, 19 nt, Artificial Sequence
  Description of Artificial Sequence: Synthetic oligonucleotide
  Sense strand starting at position 2028 of SEQ ID NO: 1881050
gcucauagccuagggauga

SEQ ID NO: 2014131 - RNA, 19 nt, Artificial Sequence
  Description of Artificial Sequence: Synthetic oligonucleotide
  Antisense strand to SEQ ID NO: 2014130
ucaucccuaggcuaugagc

SEQ ID NO: 2014132 - RNA, 19 nt, Artificial Sequence
  Description of Artificial Sequence: Synthetic oligonucleotide
  Sense strand starting at position 2146 of SEQ ID NO: 1881050
gccacucugaaaugagaga

SEQ ID NO: 2014133 - RNA, 19 nt, Artificial Sequence
  Description of Artificial Sequence: Synthetic oligonucleotide
  Antisense strand to SEQ ID NO: 2014132
ucucucauuucagaguggc

SEQ ID NO: 2014134 - RNA, 19 nt, Artificial Sequence
  Description of Artificial Sequence: Synthetic oligonucleotide
  Sense strand starting at position 2692 of SEQ ID NO: 1881050
uauguuggguuucuaacau

SEQ ID NO: 2014135 - RNA, 19 nt, Artificial Sequence
  Description of Artificial Sequence: Synthetic oligonucleotide
  Antisense strand to SEQ ID NO: 2014134
auguuagaaacccaacaua

SEQ ID NO: 2014136 - RNA, 19 nt, Artificial Sequence
  Description of Artificial Sequence: Synthetic oligonucleotide
  Sense strand starting at position 2854 of SEQ ID NO: 1881050
caucgacgauccuucugaa

SEQ ID NO: 2014137 - RNA, 19 nt, Artificial Sequence
  Description of Artificial Sequence: Synthetic oligonucleotide
  Antisense strand to SEQ ID NO: 2014136
uucagaaggaucgucgaug

SEQ ID NO: 2014138 - RNA, 19 nt, Artificial Sequence
  Description of Artificial Sequence: Synthetic oligonucleotide
  Sense strand starting at position 3000 of SEQ ID NO: 1881050
cccagucuccuuuagauua

SEQ ID NO: 2014139 - RNA, 19 nt, Artificial Sequence
  Description of Artificial Sequence: Synthetic oligonucleotide
  Antisense strand to SEQ ID NO: 2014138
uaaucuaaaggagacuggg

SEQ ID NO: 2014140 - RNA, 19 nt, Artificial Sequence
  Description of Artificial Sequence: Synthetic oligonucleotide
  Sense strand starting at position 3035 of SEQ ID NO: 1881050
agaaucaaugcauguuaua

SEQ ID NO: 2014141 - RNA, 19 nt, Artificial Sequence
  Description of Artificial Sequence: Synthetic oligonucleotide
  Antisense strand to SEQ ID NO: 2014140
uauaacaugcauugauucu

SEQ ID NO: 2014142 - RNA, 19 nt, Artificial Sequence
  Description of Artificial Sequence: Synthetic oligonucleotide
  Sense strand starting at position 3141 of SEQ ID NO: 1881050
caagacauucuaggguuau

SEQ ID NO: 2014143 - RNA, 19 nt, Artificial Sequence
  Description of Artificial Sequence: Synthetic oligonucleotide
  Antisense strand to SEQ ID NO: 2014142
auaacccuagaaugucuug

SEQ ID NO: 2014144 - RNA, 19 nt, Artificial Sequence
  Description of Artificial Sequence: Synthetic oligonucleotide
  Sense strand starting at position 3498 of SEQ ID NO: 1881050
uuguacuugcaccauauau

SEQ ID NO: 2014145 - RNA, 19 nt, Artificial Sequence
  Description of Artificial Sequence: Synthetic oligonucleotide
  Antisense strand to SEQ ID NO: 2014144
auauauggugcaaguacaa

SEQ ID NO: 2014146 - RNA, 19 nt, Artificial Sequence
  Description of Artificial Sequence: Synthetic oligonucleotide
  Sense strand starting at position 3500 of SEQ ID NO: 1881050
guacuugcaccauauaucu

SEQ ID NO: 2014147 - RNA, 19 nt, Artificial Sequence
  Description of Artificial Sequence: Synthetic oligonucleotide
  Antisense strand to SEQ ID NO: 2014146
agauauauggugcaaguac

SEQ ID NO: 2014148 - RNA, 19 nt, Artificial Sequence
  Description of Artificial Sequence: Synthetic oligonucleotide
  Sense strand starting at position 3525 of SEQ ID NO: 1881050
acaaguuaaccguaacauc

SEQ ID NO: 2014149 - RNA, 19 nt, Artificial Sequence
  Description of Artificial Sequence: Synthetic oligonucleotide
  Antisense strand to SEQ ID NO: 2014148
gauguuacgguuaacuugu

SEQ ID NO: 2014150 - RNA, 19 nt, Artificial Sequence
  Description of Artificial Sequence: Synthetic oligonucleotide
  Sense strand starting at position 3642 of SEQ ID NO: 1881050
cauugcucuggugaaacuu

SEQ ID NO: 2014151 - RNA, 19 nt, Artificial Sequence
  Description of Artificial Sequence: Synthetic oligonucleotide
  Antisense strand to SEQ ID NO: 2014150
aaguuucaccagagcaaug

SEQ ID NO: 2014152 - RNA, 19 nt, Artificial Sequence
  Description of Artificial Sequence: Synthetic oligonucleotide
  Sense strand starting at position 3648 of SEQ ID NO: 1881050
ucuggugaaacuuguggau

SEQ ID NO: 2014153 - RNA, 19 nt, Artificial Sequence
  Description of Artificial Sequence: Synthetic oligonucleotide
  Antisense strand to SEQ ID NO: 2014152
auccacaaguuucaccaga

SEQ ID NO: 2014154 - RNA, 19 nt, Artificial Sequence
  Description of Artificial Sequence: Synthetic oligonucleotide
  Sense strand starting at position 3660 of SEQ ID NO: 1881050
uguggaucagacuguuauc

SEQ ID NO: 2014155 - RNA, 19 nt, Artificial Sequence
  Description of Artificial Sequence: Synthetic oligonucleotide
  Antisense strand to SEQ ID NO: 2014154
gauaacagucugauccaca

SEQ ID NO: 2014156 - RNA, 19 nt, Artificial Sequence
  Description of Artificial Sequence: Synthetic oligonucleotide
  Sense strand starting at position 3757 of SEQ ID NO: 1881050
accuguggcagugaauauu

SEQ ID NO: 2014157 - RNA, 19 nt, Artificial Sequence
  Description of Artificial Sequence: Synthetic oligonucleotide
  Antisense strand to SEQ ID NO: 2014156
aauauucacugccacaggu

SEQ ID NO: 2014158 - RNA, 19 nt, Artificial Sequence
  Description of Artificial Sequence: Synthetic oligonucleotide
  Sense strand starting at position 3766 of SEQ ID NO: 1881050
agugaauauugccuaucca

SEQ ID NO: 2014159 - RNA, 19 nt, Artificial Sequence
  Description of Artificial Sequence: Synthetic oligonucleotide
  Antisense strand to SEQ ID NO: 2014158
uggauaggcaauauucacu

SEQ ID NO: 2014160 - RNA, 19 nt, Artificial Sequence
  Description of Artificial Sequence: Synthetic oligonucleotide
  Sense strand starting at position 3767 of SEQ ID NO: 1881050
gugaauauugccuauccau

SEQ ID NO: 2014161 - RNA, 19 nt, Artificial Sequence
  Description of Artificial Sequence: Synthetic oligonucleotide
  Antisense strand to SEQ ID NO: 2014160
auggauaggcaauauucac

SEQ ID NO: 2014162 - RNA, 19 nt, Artificial Sequence
  Description of Artificial Sequence: Synthetic oligonucleotide
  Sense strand starting at position 3792 of SEQ ID NO: 1881050
guuuacauaucucugugaa

SEQ ID NO: 2014163 - RNA, 19 nt, Artificial Sequence
  Description of Artificial Sequence: Synthetic oligonucleotide
  Antisense strand to SEQ ID NO: 2014162
uucacagagauauguaaac

SEQ ID NO: 2014164 - RNA, 19 nt, Artificial Sequence
  Description of Artificial Sequence: Synthetic oligonucleotide
  Sense strand starting at position 3794 of SEQ ID NO: 1881050
uuacauaucucugugaaug

SEQ ID NO: 2014165 - RNA, 19 nt, Artificial Sequence
  Description of Artificial Sequence: Synthetic oligonucleotide
  Antisense strand to SEQ ID NO: 2014164
cauucacagagauauguaa

SEQ ID NO: 2014166 - RNA, 19 nt, Artificial Sequence
  Description of Artificial Sequence: Synthetic oligonucleotide
  Sense strand starting at position 3799 of SEQ ID NO: 1881050
uaucucugugaaugagaua

SEQ ID NO: 2014167 - RNA, 19 nt, Artificial Sequence
  Description of Artificial Sequence: Synthetic oligonucleotide
  Antisense strand to SEQ ID NO: 2014166
uaucucauucacagagaua

SEQ ID NO: 2014168 - RNA, 19 nt, Artificial Sequence
  Description of Artificial Sequence: Synthetic oligonucleotide
  Sense strand starting at position 86 of SEQ ID NO: 1881051
uccacauacugucucagau

SEQ ID NO: 2014169 - RNA, 19 nt, Artificial Sequence
  Description of Artificial Sequence: Synthetic oligonucleotide
  Antisense strand to SEQ ID NO: 2014168
aucugagacaguaugugga

SEQ ID NO: 2014170 - RNA, 19 nt, Artificial Sequence
  Description of Artificial Sequence: Synthetic oligonucleotide
  Sense strand starting at position 115 of SEQ ID NO: 1881051
gagaucuuagcagauugua

SEQ ID NO: 2014171 - RNA, 19 nt, Artificial Sequence
  Description of Artificial Sequence: Synthetic oligonucleotide
  Antisense strand to SEQ ID NO: 2014170
uacaaucugcuaagaucuc

SEQ ID NO: 2014172 - RNA, 19 nt, Artificial Sequence
  Description of Artificial Sequence: Synthetic oligonucleotide
  Sense strand starting at position 191 of SEQ ID NO: 1881051
aguuguucccagcagacua

SEQ ID NO: 2014173 - RNA, 19 nt, Artificial Sequence
  Description of Artificial Sequence: Synthetic oligonucleotide
  Antisense strand to SEQ ID NO: 2014172
uagucugcugggaacaacu

SEQ ID NO: 2014174 - RNA, 19 nt, Artificial Sequence
  Description of Artificial Sequence: Synthetic oligonucleotide
  Sense strand starting at position 215 of SEQ ID NO: 1881051
aggagaugauucuuuagug

SEQ ID NO: 2014175 - RNA, 19 nt, Artificial Sequence
  Description of Artificial Sequence: Synthetic oligonucleotide
  Antisense strand to SEQ ID NO: 2014174
cacuaaagaaucaucuccu

SEQ ID NO: 2014176 - RNA, 19 nt, Artificial Sequence
  Description of Artificial Sequence: Synthetic oligonucleotide
  Sense strand starting at position 216 of SEQ ID NO: 1881051
ggagaugauucuuuaguga

SEQ ID NO: 2014177 - RNA, 19 nt, Artificial Sequence
  Description of Artificial Sequence: Synthetic oligonucleotide
  Antisense strand to SEQ ID NO: 2014176
ucacuaaagaaucaucucc

SEQ ID NO: 2014178 - RNA, 19 nt, Artificial Sequence
  Description of Artificial Sequence: Synthetic oligonucleotide
  Sense strand starting at position 297 of SEQ ID NO: 1881051
acuggauauuugcuuuguu

SEQ ID NO: 2014179 - RNA, 19 nt, Artificial Sequence
  Description of Artificial Sequence: Synthetic oligonucleotide
  Antisense strand to SEQ ID NO: 2014178
aacaaagcaaauauccagu

SEQ ID NO: 2014180 - RNA, 19 nt, Artificial Sequence
  Description of Artificial Sequence: Synthetic oligonucleotide
  Sense strand starting at position 300 of SEQ ID NO: 1881051
ggauauuugcuuuguucuu

SEQ ID NO: 2014181 - RNA, 19 nt, Artificial Sequence
  Description of Artificial Sequence: Synthetic oligonucleotide
  Antisense strand to SEQ ID NO: 2014180
aagaacaaagcaaauaucc

SEQ ID NO: 2014182 - RNA, 19 nt, Artificial Sequence
  Description of Artificial Sequence: Synthetic oligonucleotide
  Sense strand starting at position 381 of SEQ ID NO: 1881051
agauaauggucuuuacagu

SEQ ID NO: 2014183 - RNA, 19 nt, Artificial Sequence
  Description of Artificial Sequence: Synthetic oligonucleotide
  Antisense strand to SEQ ID NO: 2014182
acuguaaagaccauuaucu

SEQ ID NO: 2014184 - RNA, 19 nt, Artificial Sequence
  Description of Artificial Sequence: Synthetic oligonucleotide
  Sense strand starting at position 382 of SEQ ID NO: 1881051
gauaauggucuuuacagua

SEQ ID NO: 2014185 - RNA, 19 nt, Artificial Sequence
  Description of Artificial Sequence: Synthetic oligonucleotide
  Antisense strand to SEQ ID NO: 2014184
uacuguaaagaccauuauc

SEQ ID NO: 2014186 - RNA, 19 nt, Artificial Sequence
  Description of Artificial Sequence: Synthetic oligonucleotide
  Sense strand starting at position 387 of SEQ ID NO: 1881051
uggucuuuacaguauaaau

SEQ ID NO: 2014187 - RNA, 19 nt, Artificial Sequence
  Description of Artificial Sequence: Synthetic oligonucleotide
  Antisense strand to SEQ ID NO: 2014186
auuuauacuguaaagacca

SEQ ID NO: 2014188 - RNA, 19 nt, Artificial Sequence
  Description of Artificial Sequence: Synthetic oligonucleotide
  Sense strand starting at position 389 of SEQ ID NO: 1881051
gucuuuacaguauaaaugu

SEQ ID NO: 2014189 - RNA, 19 nt, Artificial Sequence
  Description of Artificial Sequence: Synthetic oligonucleotide
  Antisense strand to SEQ ID NO: 2014188
acauuuauacuguaaagac

SEQ ID NO: 2014190 - RNA, 19 nt, Artificial Sequence
  Description of Artificial Sequence: Synthetic oligonucleotide
  Sense strand starting at position 446 of SEQ ID NO: 1881051
gguggcaagcuagagauau

SEQ ID NO: 2014191 - RNA, 19 nt, Artificial Sequence
  Description of Artificial Sequence: Synthetic oligonucleotide
  Antisense strand to SEQ ID NO: 2014190
auaucucuagcuugccacc

SEQ ID NO: 2014192 - RNA, 19 nt, Artificial Sequence
  Description of Artificial Sequence: Synthetic oligonucleotide
  Sense strand starting at position 457 of SEQ ID NO: 1881051
agagauaucuagccuauug

SEQ ID NO: 2014193 - RNA, 19 nt, Artificial Sequence
  Description of Artificial Sequence: Synthetic oligonucleotide
  Antisense strand to SEQ ID NO: 2014192
caauaggcuagauaucucu

SEQ ID NO: 2014194 - RNA, 19 nt, Artificial Sequence
  Description of Artificial Sequence: Synthetic oligonucleotide
  Sense strand starting at position 492 of SEQ ID NO: 1881051
acuugcacuggaugauaau

SEQ ID NO: 2014195 - RNA, 19 nt, Artificial Sequence
  Description of Artificial Sequence: Synthetic oligonucleotide
  Antisense strand to SEQ ID NO: 2014194
auuaucauccagugcaagu

SEQ ID NO: 2014196 - RNA, 19 nt, Artificial Sequence
  Description of Artificial Sequence: Synthetic oligonucleotide
  Sense strand starting at position 548 of SEQ ID NO: 1881051
ucuguaacaugacuguuaa

SEQ ID NO: 2014197 - RNA, 19 nt, Artificial Sequence
  Description of Artificial Sequence: Synthetic oligonucleotide
  Antisense strand to SEQ ID NO: 2014196
uuaacagucauguuacaga

SEQ ID NO: 2014198 - RNA, 19 nt, Artificial Sequence
  Description of Artificial Sequence: Synthetic oligonucleotide
  Sense strand starting at position 549 of SEQ ID NO: 1881051
cuguaacaugacuguuaau

SEQ ID NO: 2014199 - RNA, 19 nt, Artificial Sequence
  Description of Artificial Sequence: Synthetic oligonucleotide
  Antisense strand to SEQ ID NO: 2014198
auuaacagucauguuacag

SEQ ID NO: 2014200 - RNA, 19 nt, Artificial Sequence
  Description of Artificial Sequence: Synthetic oligonucleotide
  Sense strand starting at position 735 of SEQ ID NO: 1881051
uuuguucuguauuugaguu

SEQ ID NO: 2014201 - RNA, 19 nt, Artificial Sequence
  Description of Artificial Sequence: Synthetic oligonucleotide
  Antisense strand to SEQ ID NO: 2014200
aacucaaauacagaacaaa

SEQ ID NO: 2014202 - RNA, 19 nt, Artificial Sequence
  Description of Artificial Sequence: Synthetic oligonucleotide
  Sense strand starting at position 904 of SEQ ID NO: 1881051
guaauacacuuguuagaug

SEQ ID NO: 2014203 - RNA, 19 nt, Artificial Sequence
  Description of Artificial Sequence: Synthetic oligonucleotide
  Antisense strand to SEQ ID NO: 2014202
caucuaacaaguguauuac

SEQ ID NO: 2014204 - RNA, 19 nt, Artificial Sequence
  Description of Artificial Sequence: Synthetic oligonucleotide
  Sense strand starting at position 1112 of SEQ ID NO: 1881051
cgccuaugauggguaauuu

SEQ ID NO: 2014205 - RNA, 19 nt, Artificial Sequence
  Description of Artificial Sequence: Synthetic oligonucleotide
  Antisense strand to SEQ ID NO: 2014204
aaauuacccaucauaggcg

SEQ ID NO: 2014206 - RNA, 19 nt, Artificial Sequence
  Description of Artificial Sequence: Synthetic oligonucleotide
  Sense strand starting at position 1182 of SEQ ID NO: 1881051
uugauugucuaggcuaaga

SEQ ID NO: 2014207 - RNA, 19 nt, Artificial Sequence
  Description of Artificial Sequence: Synthetic oligonucleotide
  Antisense strand to SEQ ID NO: 2014206
ucuuagccuagacaaucaa

SEQ ID NO: 2014208 - RNA, 19 nt, Artificial Sequence
  Description of Artificial Sequence: Synthetic oligonucleotide
  Sense strand starting at position 1184 of SEQ ID NO: 1881051
gauugucuaggcuaagaca

SEQ ID NO: 2014209 - RNA, 19 nt, Artificial Sequence
  Description of Artificial Sequence: Synthetic oligonucleotide
  Antisense strand to SEQ ID NO: 2014208
ugucuuagccuagacaauc

SEQ ID NO: 2014210 - RNA, 19 nt, Artificial Sequence
  Description of Artificial Sequence: Synthetic oligonucleotide
  Sense strand starting at position 1207 of SEQ ID NO: 1881051
cggagugaaaugcaauaau

SEQ ID NO: 2014211 - RNA, 19 nt, Artificial Sequence
  Description of Artificial Sequence: Synthetic oligonucleotide
  Antisense strand to SEQ ID NO: 2014210
auuauugcauuucacuccg

SEQ ID NO: 2014212 - RNA, 19 nt, Artificial Sequence
  Description of Artificial Sequence: Synthetic oligonucleotide
  Sense strand starting at position 1230 of SEQ ID NO: 1881051
aagagauguaaauacgugu

SEQ ID NO: 2014213 - RNA, 19 nt, Artificial Sequence
  Description of Artificial Sequence: Synthetic oligonucleotide
  Antisense strand to SEQ ID NO: 2014212
acacguauuuacaucucuu

SEQ ID NO: 2014214 - RNA, 19 nt, Artificial Sequence
  Description of Artificial Sequence: Synthetic oligonucleotide
  Sense strand starting at position 2002 of SEQ ID NO: 1881051
uuuggcagggcauaagaau

SEQ ID NO: 2014215 - RNA, 19 nt, Artificial Sequence
  Description of Artificial Sequence: Synthetic oligonucleotide
  Antisense strand to SEQ ID NO: 2014214
auucuuaugcccugccaaa

SEQ ID NO: 2014216 - RNA, 19 nt, Artificial Sequence
  Description of Artificial Sequence: Synthetic oligonucleotide
  Sense strand starting at position 2762 of SEQ ID NO: 1881051
uauuuaggucgagaagcgu

SEQ ID NO: 2014217 - RNA, 19 nt, Artificial Sequence
  Description of Artificial Sequence: Synthetic oligonucleotide
  Antisense strand to SEQ ID NO: 2014216
acgcuucucgaccuaaaua

SEQ ID NO: 2014218 - RNA, 19 nt, Artificial Sequence
  Description of Artificial Sequence: Synthetic oligonucleotide
  Sense strand starting at position 2795 of SEQ ID NO: 1881051
cagucuuguguacaaggga

SEQ ID NO: 2014219 - RNA, 19 nt, Artificial Sequence
  Description of Artificial Sequence: Synthetic oligonucleotide
  Antisense strand to SEQ ID NO: 2014218
ucccuuguacacaagacug

SEQ ID NO: 2014220 - RNA, 19 nt, Artificial Sequence
  Description of Artificial Sequence: Synthetic oligonucleotide
  Sense strand starting at position 2823 of SEQ ID NO: 1881051
aguacaacuucucuggaga

SEQ ID NO: 2014221 - RNA, 19 nt, Artificial Sequence
  Description of Artificial Sequence: Synthetic oligonucleotide
  Antisense strand to SEQ ID NO: 2014220
ucuccagagaaguuguacu

SEQ ID NO: 2014222 - RNA, 19 nt, Artificial Sequence
  Description of Artificial Sequence: Synthetic oligonucleotide
  Sense strand starting at position 2824 of SEQ ID NO: 1881051
guacaacuucucuggagaa

SEQ ID NO: 2014223 - RNA, 19 nt, Artificial Sequence
  Description of Artificial Sequence: Synthetic oligonucleotide
  Antisense strand to SEQ ID NO: 2014222
uucuccagagaaguuguac

SEQ ID NO: 2014224 - RNA, 19 nt, Artificial Sequence
  Description of Artificial Sequence: Synthetic oligonucleotide
  Sense strand starting at position 3214 of SEQ ID NO: 1881051
ggugaaauuauguauggca

SEQ ID NO: 2014225 - RNA, 19 nt, Artificial Sequence
  Description of Artificial Sequence: Synthetic oligonucleotide
  Antisense strand to SEQ ID NO: 2014224
ugccauacauaauuucacc

SEQ ID NO: 2014226 - RNA, 19 nt, Artificial Sequence
  Description of Artificial Sequence: Synthetic oligonucleotide
  Sense strand starting at position 3216 of SEQ ID NO: 1881051
ugaaauuauguauggcaag

SEQ ID NO: 2014227 - RNA, 19 nt, Artificial Sequence
  Description of Artificial Sequence: Synthetic oligonucleotide
  Antisense strand to SEQ ID NO: 2014226
cuugccauacauaauuuca

SEQ ID NO: 2014228 - RNA, 19 nt, Artificial Sequence
  Description of Artificial Sequence: Synthetic oligonucleotide
  Sense strand starting at position 3222 of SEQ ID NO: 1881051
uauguauggcaagaguauc

SEQ ID NO: 2014229 - RNA, 19 nt, Artificial Sequence
  Description of Artificial Sequence: Synthetic oligonucleotide
  Antisense strand to SEQ ID NO: 2014228
gauacucuugccauacaua

SEQ ID NO: 2014230 - RNA, 19 nt, Artificial Sequence
  Description of Artificial Sequence: Synthetic oligonucleotide
  Sense strand starting at position 3364 of SEQ ID NO: 1881051
cccaaauauuguguacauu

SEQ ID NO: 2014231 - RNA, 19 nt, Artificial Sequence
  Description of Artificial Sequence: Synthetic oligonucleotide
  Antisense strand to SEQ ID NO: 2014230
aauguacacaauauuuggg

SEQ ID NO: 2014232 - RNA, 19 nt, Artificial Sequence
  Description of Artificial Sequence: Synthetic oligonucleotide
  Sense strand starting at position 3365 of SEQ ID NO: 1881051
ccaaauauuguguacauua

SEQ ID NO: 2014233 - RNA, 19 nt, Artificial Sequence
  Description of Artificial Sequence: Synthetic oligonucleotide
  Antisense strand to SEQ ID NO: 2014232
uaauguacacaauauuugg

SEQ ID NO: 2014234 - RNA, 19 nt, Artificial Sequence
  Description of Artificial Sequence: Synthetic oligonucleotide
  Sense strand starting at position 3430 of SEQ ID NO: 1881051
auaccuaguuagucauuau

SEQ ID NO: 2014235 - RNA, 19 nt, Artificial Sequence
  Description of Artificial Sequence: Synthetic oligonucleotide
  Antisense strand to SEQ ID NO: 2014234
auaaugacuaacuagguau

SEQ ID NO: 2014236 - RNA, 19 nt, Artificial Sequence
  Description of Artificial Sequence: Synthetic oligonucleotide
  Sense strand starting at position 3462 of SEQ ID NO: 1881051
cuaggaagguuucucuaua

SEQ ID NO: 2014237 - RNA, 19 nt, Artificial Sequence
  Description of Artificial Sequence: Synthetic oligonucleotide
  Antisense strand to SEQ ID NO: 2014236
uauagagaaaccuuccuag

SEQ ID NO: 2014238 - RNA, 19 nt, Artificial Sequence
  Description of Artificial Sequence: Synthetic oligonucleotide
  Sense strand starting at position 3463 of SEQ ID NO: 1881051
uaggaagguuucucuauag

SEQ ID NO: 2014239 - RNA, 19 nt, Artificial Sequence
  Description of Artificial Sequence: Synthetic oligonucleotide
  Antisense strand to SEQ ID NO: 2014238
cuauagagaaaccuuccua

SEQ ID NO: 2014240 - RNA, 19 nt, Artificial Sequence
  Description of Artificial Sequence: Synthetic oligonucleotide
  Sense strand starting at position 3579 of SEQ ID NO: 1881051
augacuugauuugauuagu

SEQ ID NO: 2014241 - RNA, 19 nt, Artificial Sequence
  Description of Artificial Sequence: Synthetic oligonucleotide
  Antisense strand to SEQ ID NO: 2014240
acuaaucaaaucaagucau

SEQ ID NO: 2014242 - RNA, 19 nt, Artificial Sequence
  Description of Artificial Sequence: Synthetic oligonucleotide
  Sense strand starting at position 3662 of SEQ ID NO: 1881051
gcuugcucuagugugcuua

SEQ ID NO: 2014243 - RNA, 19 nt, Artificial Sequence
  Description of Artificial Sequence: Synthetic oligonucleotide
  Antisense strand to SEQ ID NO: 2014242
uaagcacacuagagcaagc

SEQ ID NO: 2014244 - RNA, 19 nt, Artificial Sequence
  Description of Artificial Sequence: Synthetic oligonucleotide
  Sense strand starting at position 3699 of SEQ ID NO: 1881051
gaagaugauucuguagcua

SEQ ID NO: 2014245 - RNA, 19 nt, Artificial Sequence
  Description of Artificial Sequence: Synthetic oligonucleotide
  Antisense strand to SEQ ID NO: 2014244
uagcuacagaaucaucuuc

SEQ ID NO: 2014246 - RNA, 19 nt, Artificial Sequence
  Description of Artificial Sequence: Synthetic oligonucleotide
  Sense strand starting at position 3813 of SEQ ID NO: 1881051
agugcugaucaacagaacu

SEQ ID NO: 2014247 - RNA, 19 nt, Artificial Sequence
  Description of Artificial Sequence: Synthetic oligonucleotide
  Antisense strand to SEQ ID NO: 2014246
aguucuguugaucagcacu

SEQ ID NO: 2014248 - RNA, 19 nt, Artificial Sequence
  Description of Artificial Sequence: Synthetic oligonucleotide
  Sense strand starting at position 34 of SEQ ID NO: 1881052
aucacugaaucagaaagaa

SEQ ID NO: 2014249 - RNA, 19 nt, Artificial Sequence
  Description of Artificial Sequence: Synthetic oligonucleotide
  Antisense strand to SEQ ID NO: 2014248
uucuuucugauucagugau

SEQ ID NO: 2014250 - RNA, 19 nt, Artificial Sequence
  Description of Artificial Sequence: Synthetic oligonucleotide
  Sense strand starting at position 108 of SEQ ID NO: 1881052
acauuaguuucucucagag

SEQ ID NO: 2014251 - RNA, 19 nt, Artificial Sequence
  Description of Artificial Sequence: Synthetic oligonucleotide
  Antisense strand to SEQ ID NO: 2014250
cucugagagaaacuaaugu

SEQ ID NO: 2014252 - RNA, 19 nt, Artificial Sequence
  Description of Artificial Sequence: Synthetic oligonucleotide
  Sense strand starting at position 114 of SEQ ID NO: 1881052
guuucucucagaggagguu

SEQ ID NO: 2014253 - RNA, 19 nt, Artificial Sequence
  Description of Artificial Sequence: Synthetic oligonucleotide
  Antisense strand to SEQ ID NO: 2014252
aaccuccucugagagaaac

SEQ ID NO: 2014254 - RNA, 19 nt, Artificial Sequence
  Description of Artificial Sequence: Synthetic oligonucleotide
  Sense strand starting at position 323 of SEQ ID NO: 1881052
cuuuguguuccuucugcau

SEQ ID NO: 2014255 - RNA, 19 nt, Artificial Sequence
  Description of Artificial Sequence: Synthetic oligonucleotide
  Antisense strand to SEQ ID NO: 2014254
augcagaaggaacacaaag

SEQ ID NO: 2014256 - RNA, 19 nt, Artificial Sequence
  Description of Artificial Sequence: Synthetic oligonucleotide
  Sense strand starting at position 330 of SEQ ID NO: 1881052
uuccuucugcauuagucau

SEQ ID NO: 2014257 - RNA, 19 nt, Artificial Sequence
  Description of Artificial Sequence: Synthetic oligonucleotide
  Antisense strand to SEQ ID NO: 2014256
augacuaaugcagaaggaa

SEQ ID NO: 2014258 - RNA, 19 nt, Artificial Sequence
  Description of Artificial Sequence: Synthetic oligonucleotide
  Sense strand starting at position 511 of SEQ ID NO: 1881052
caacuuaauugguuaguga

SEQ ID NO: 2014259 - RNA, 19 nt, Artificial Sequence
  Description of Artificial Sequence: Synthetic oligonucleotide
  Antisense strand to SEQ ID NO: 2014258
ucacuaaccaauuaaguug

SEQ ID NO: 2014260 - RNA, 19 nt, Artificial Sequence
  Description of Artificial Sequence: Synthetic oligonucleotide
  Sense strand starting at position 519 of SEQ ID NO: 1881052
uugguuagugaccaguagu

SEQ ID NO: 2014261 - RNA, 19 nt, Artificial Sequence
  Description of Artificial Sequence: Synthetic oligonucleotide
  Antisense strand to SEQ ID NO: 2014260
acuacuggucacuaaccaa

SEQ ID NO: 2014262 - RNA, 19 nt, Artificial Sequence
  Description of Artificial Sequence: Synthetic oligonucleotide
  Sense strand starting at position 937 of SEQ ID NO: 1881052
ugaauauuuguuuguguug

SEQ ID NO: 2014263 - RNA, 19 nt, Artificial Sequence
  Description of Artificial Sequence: Synthetic oligonucleotide
  Antisense strand to SEQ ID NO: 2014262
caacacaaacaaauauuca

SEQ ID NO: 2014264 - RNA, 19 nt, Artificial Sequence
  Description of Artificial Sequence: Synthetic oligonucleotide
  Sense strand starting at position 1014 of SEQ ID NO: 1881052
acucgaaggucucuaaggu

SEQ ID NO: 2014265 - RNA, 19 nt, Artificial Sequence
  Description of Artificial Sequence: Synthetic oligonucleotide
  Antisense strand to SEQ ID NO: 2014264
accuuagagaccuucgagu

SEQ ID NO: 2014266 - RNA, 19 nt, Artificial Sequence
  Description of Artificial Sequence: Synthetic oligonucleotide
  Sense strand starting at position 1241 of SEQ ID NO: 1881052
gucugcugggacugagauu

SEQ ID NO: 2014267 - RNA, 19 nt, Artificial Sequence
  Description of Artificial Sequence: Synthetic oligonucleotide
  Antisense strand to SEQ ID NO: 2014266
aaucucagucccagcagac

SEQ ID NO: 2014268 - RNA, 19 nt, Artificial Sequence
  Description of Artificial Sequence: Synthetic oligonucleotide
  Sense strand starting at position 1242 of SEQ ID NO: 1881052
ucugcugggacugagauua

SEQ ID NO: 2014269 - RNA, 19 nt, Artificial Sequence
  Description of Artificial Sequence: Synthetic oligonucleotide
  Antisense strand to SEQ ID NO: 2014268
uaaucucagucccagcaga

SEQ ID NO: 2014270 - RNA, 19 nt, Artificial Sequence
  Description of Artificial Sequence: Synthetic oligonucleotide
  Sense strand starting at position 1497 of SEQ ID NO: 1881052
gugucugugcgucucucaa

SEQ ID NO: 2014271 - RNA, 19 nt, Artificial Sequence
  Description of Artificial Sequence: Synthetic oligonucleotide
  Antisense strand to SEQ ID NO: 2014270
uugagagacgcacagacac

SEQ ID NO: 2014272 - RNA, 19 nt, Artificial Sequence
  Description of Artificial Sequence: Synthetic oligonucleotide
  Sense strand starting at position 1516 of SEQ ID NO: 1881052
gcuucuacaggcuaaugaa

SEQ ID NO: 2014273 - RNA, 19 nt, Artificial Sequence
  Description of Artificial Sequence: Synthetic oligonucleotide
  Antisense strand to SEQ ID NO: 2014272
uucauuagccuguagaagc

SEQ ID NO: 2014274 - RNA, 19 nt, Artificial Sequence
  Description of Artificial Sequence: Synthetic oligonucleotide
  Sense strand starting at position 1525 of SEQ ID NO: 1881052
ggcuaaugaaagcauguua

SEQ ID NO: 2014275 - RNA, 19 nt, Artificial Sequence
  Description of Artificial Sequence: Synthetic oligonucleotide
  Antisense strand to SEQ ID NO: 2014274
uaacaugcuuucauuagcc

SEQ ID NO: 2014276 - RNA, 19 nt, Artificial Sequence
  Description of Artificial Sequence: Synthetic oligonucleotide
  Sense strand starting at position 1549 of SEQ ID NO: 1881052
agagaacaggccugaguuu

SEQ ID NO: 2014277 - RNA, 19 nt, Artificial Sequence
  Description of Artificial Sequence: Synthetic oligonucleotide
  Antisense strand to SEQ ID NO: 2014276
aaacucaggccuguucucu

SEQ ID NO: 2014278 - RNA, 19 nt, Artificial Sequence
  Description of Artificial Sequence: Synthetic oligonucleotide
  Sense strand starting at position 1599 of SEQ ID NO: 1881052
cucucuuuggcacagaaua

SEQ ID NO: 2014279 - RNA, 19 nt, Artificial Sequence
  Description of Artificial Sequence: Synthetic oligonucleotide
  Antisense strand to SEQ ID NO: 2014278
uauucugugccaaagagag

SEQ ID NO: 2014280 - RNA, 19 nt, Artificial Sequence
  Description of Artificial Sequence: Synthetic oligonucleotide
  Sense strand starting at position 1637 of SEQ ID NO: 1881052
cuauccagacagugaguua

SEQ ID NO: 2014281 - RNA, 19 nt, Artificial Sequence
  Description of Artificial Sequence: Synthetic oligonucleotide
  Antisense strand to SEQ ID NO: 2014280
uaacucacugucuggauag

SEQ ID NO: 2014282 - RNA, 19 nt, Artificial Sequence
  Description of Artificial Sequence: Synthetic oligonucleotide
  Sense strand starting at position 1640 of SEQ ID NO: 1881052
uccagacagugaguuaauu

SEQ ID NO: 2014283 - RNA, 19 nt, Artificial Sequence
  Description of Artificial Sequence: Synthetic oligonucleotide
  Antisense strand to SEQ ID NO: 2014282
aauuaacucacugucugga

SEQ ID NO: 2014284 - RNA, 19 nt, Artificial Sequence
  Description of Artificial Sequence: Synthetic oligonucleotide
  Sense strand starting at position 1695 of SEQ ID NO: 1881052
aaacauuggucagugcaga

SEQ ID NO: 2014285 - RNA, 19 nt, Artificial Sequence
  Description of Artificial Sequence: Synthetic oligonucleotide
  Antisense strand to SEQ ID NO: 2014284
ucugcacugaccaauguuu

SEQ ID NO: 2014286 - RNA, 19 nt, Artificial Sequence
  Description of Artificial Sequence: Synthetic oligonucleotide
  Sense strand starting at position 1696 of SEQ ID NO: 1881052
aacauuggucagugcagau

SEQ ID NO: 2014287 - RNA, 19 nt, Artificial Sequence
  Description of Artificial Sequence: Synthetic oligonucleotide
  Antisense strand to SEQ ID NO: 2014286
aucugcacugaccaauguu

SEQ ID NO: 2014288 - RNA, 19 nt, Artificial Sequence
  Description of Artificial Sequence: Synthetic oligonucleotide
  Sense strand starting at position 1791 of SEQ ID NO: 1881052
gaacuaaucggaggaucuu

SEQ ID NO: 2014289 - RNA, 19 nt, Artificial Sequence
  Description of Artificial Sequence: Synthetic oligonucleotide
  Antisense strand to SEQ ID NO: 2014288
aagauccuccgauuaguuc

SEQ ID NO: 2014290 - RNA, 19 nt, Artificial Sequence
  Description of Artificial Sequence: Synthetic oligonucleotide
  Sense strand starting at position 2096 of SEQ ID NO: 1881052
auuguuagucuccaucauu

SEQ ID NO: 2014291 - RNA, 19 nt, Artificial Sequence
  Description of Artificial Sequence: Synthetic oligonucleotide
  Antisense strand to SEQ ID NO: 2014290
aaugauggagacuaacaau

SEQ ID NO: 2014292 - RNA, 19 nt, Artificial Sequence
  Description of Artificial Sequence: Synthetic oligonucleotide
  Sense strand starting at position 2099 of SEQ ID NO: 1881052
guuagucuccaucauuaag

SEQ ID NO: 2014293 - RNA, 19 nt, Artificial Sequence
  Description of Artificial Sequence: Synthetic oligonucleotide
  Antisense strand to SEQ ID NO: 2014292
cuuaaugauggagacuaac

SEQ ID NO: 2014294 - RNA, 19 nt, Artificial Sequence
  Description of Artificial Sequence: Synthetic oligonucleotide
  Sense strand starting at position 2165 of SEQ ID NO: 1881052
gaggauaccucaccaugua

SEQ ID NO: 2014295 - RNA, 19 nt, Artificial Sequence
  Description of Artificial Sequence: Synthetic oligonucleotide
  Antisense strand to SEQ ID NO: 2014294
uacauggugagguauccuc

SEQ ID NO: 2014296 - RNA, 19 nt, Artificial Sequence
  Description of Artificial Sequence: Synthetic oligonucleotide
  Sense strand starting at position 2329 of SEQ ID NO: 1881052
acaugugcccuaggagagu

SEQ ID NO: 2014297 - RNA, 19 nt, Artificial Sequence
  Description of Artificial Sequence: Synthetic oligonucleotide
  Antisense strand to SEQ ID NO: 2014296
acucuccuagggcacaugu

SEQ ID NO: 2014298 - RNA, 19 nt, Artificial Sequence
  Description of Artificial Sequence: Synthetic oligonucleotide
  Sense strand starting at position 2820 of SEQ ID NO: 1881052
aguagaaauagucaccguu

SEQ ID NO: 2014299 - RNA, 19 nt, Artificial Sequence
  Description of Artificial Sequence: Synthetic oligonucleotide
  Antisense strand to SEQ ID NO: 2014298
aacggugacuauuucuacu

SEQ ID NO: 2014300 - RNA, 19 nt, Artificial Sequence
  Description of Artificial Sequence: Synthetic oligonucleotide
  Sense strand starting at position 2822 of SEQ ID NO: 1881052
uagaaauagucaccguuua

SEQ ID NO: 2014301 - RNA, 19 nt, Artificial Sequence
  Description of Artificial Sequence: Synthetic oligonucleotide
  Antisense strand to SEQ ID NO: 2014300
uaaacggugacuauuucua

SEQ ID NO: 2014302 - RNA, 19 nt, Artificial Sequence
  Description of Artificial Sequence: Synthetic oligonucleotide
  Sense strand starting at position 2823 of SEQ ID NO: 1881052
agaaauagucaccguuuag

SEQ ID NO: 2014303 - RNA, 19 nt, Artificial Sequence
  Description of Artificial Sequence: Synthetic oligonucleotide
  Antisense strand to SEQ ID NO: 2014302
cuaaacggugacuauuucu

SEQ ID NO: 2014304 - RNA, 19 nt, Artificial Sequence
  Description of Artificial Sequence: Synthetic oligonucleotide
  Sense strand starting at position 3046 of SEQ ID NO: 1881052
uuguauuauugaccugagu

SEQ ID NO: 2014305 - RNA, 19 nt, Artificial Sequence
  Description of Artificial Sequence: Synthetic oligonucleotide
  Antisense strand to SEQ ID NO: 2014304
acucaggucaauaauacaa

SEQ ID NO: 2014306 - RNA, 19 nt, Artificial Sequence
  Description of Artificial Sequence: Synthetic oligonucleotide
  Sense strand starting at position 3088 of SEQ ID NO: 1881052
acuggacuucucuguuaau

SEQ ID NO: 2014307 - RNA, 19 nt, Artificial Sequence
  Description of Artificial Sequence: Synthetic oligonucleotide
  Antisense strand to SEQ ID NO: 2014306
auuaacagagaaguccagu

SEQ ID NO: 2014308 - RNA, 19 nt, Artificial Sequence
  Description of Artificial Sequence: Synthetic oligonucleotide
  Sense strand starting at position 3089 of SEQ ID NO: 1881052
cuggacuucucuguuaauu

SEQ ID NO: 2014309 - RNA, 19 nt, Artificial Sequence
  Description of Artificial Sequence: Synthetic oligonucleotide
  Antisense strand to SEQ ID NO: 2014308
aauuaacagagaaguccag

SEQ ID NO: 2014310 - RNA, 19 nt, Artificial Sequence
  Description of Artificial Sequence: Synthetic oligonucleotide
  Sense strand starting at position 3169 of SEQ ID NO: 1881052
acauaugguccacgaaaga

SEQ ID NO: 2014311 - RNA, 19 nt, Artificial Sequence
  Description of Artificial Sequence: Synthetic oligonucleotide
  Antisense strand to SEQ ID NO: 2014310
ucuuucguggaccauaugu

SEQ ID NO: 2014312 - RNA, 19 nt, Artificial Sequence
  Description of Artificial Sequence: Synthetic oligonucleotide
  Sense strand starting at position 3271 of SEQ ID NO: 1881052
gcagcugucaauuaaagga

SEQ ID NO: 2014313 - RNA, 19 nt, Artificial Sequence
  Description of Artificial Sequence: Synthetic oligonucleotide
  Antisense strand to SEQ ID NO: 2014312
uccuuuaauugacagcugc

SEQ ID NO: 2014314 - RNA, 19 nt, Artificial Sequence
  Description of Artificial Sequence: Synthetic oligonucleotide
  Sense strand starting at position 3290 of SEQ ID NO: 1881052
gggagauuccagugauccu

SEQ ID NO: 2014315 - RNA, 19 nt, Artificial Sequence
  Description of Artificial Sequence: Synthetic oligonucleotide
  Antisense strand to SEQ ID NO: 2014314
aggaucacuggaaucuccc

SEQ ID NO: 2014316 - RNA, 19 nt, Artificial Sequence
  Description of Artificial Sequence: Synthetic oligonucleotide
  Sense strand starting at position 3576 of SEQ ID NO: 1881052
gaagcuuuguaccuucuga

SEQ ID NO: 2014317 - RNA, 19 nt, Artificial Sequence
  Description of Artificial Sequence: Synthetic oligonucleotide
  Antisense strand to SEQ ID NO: 2014316
ucagaagguacaaagcuuc

SEQ ID NO: 2014318 - RNA, 19 nt, Artificial Sequence
  Description of Artificial Sequence: Synthetic oligonucleotide
  Sense strand starting at position 3617 of SEQ ID NO: 1881052
ggcaucagucuuuacaaca

SEQ ID NO: 2014319 - RNA, 19 nt, Artificial Sequence
  Description of Artificial Sequence: Synthetic oligonucleotide
  Antisense strand to SEQ ID NO: 2014318
uguuguaaagacugaugcc

SEQ ID NO: 2014320 - RNA, 19 nt, Artificial Sequence
  Description of Artificial Sequence: Synthetic oligonucleotide
  Sense strand starting at position 3659 of SEQ ID NO: 1881052
caugucuuguggguaugaa

SEQ ID NO: 2014321 - RNA, 19 nt, Artificial Sequence
  Description of Artificial Sequence: Synthetic oligonucleotide
  Antisense strand to SEQ ID NO: 2014320
uucauacccacaagacaug

SEQ ID NO: 2014322 - RNA, 19 nt, Artificial Sequence
  Description of Artificial Sequence: Synthetic oligonucleotide
  Sense strand starting at position 3660 of SEQ ID NO: 1881052
augucuuguggguaugaaa

SEQ ID NO: 2014323 - RNA, 19 nt, Artificial Sequence
  Description of Artificial Sequence: Synthetic oligonucleotide
  Antisense strand to SEQ ID NO: 2014322
uuucauacccacaagacau

SEQ ID NO: 2014324 - RNA, 19 nt, Artificial Sequence
  Description of Artificial Sequence: Synthetic oligonucleotide
  Sense strand starting at position 3892 of SEQ ID NO: 1881052
uuuggcuuaugauccaaau

SEQ ID NO: 2014325 - RNA, 19 nt, Artificial Sequence
  Description of Artificial Sequence: Synthetic oligonucleotide
  Antisense strand to SEQ ID NO: 2014324
auuuggaucauaagccaaa

SEQ ID NO: 2014326 - RNA, 19 nt, Artificial Sequence
  Description of Artificial Sequence: Synthetic oligonucleotide
  Sense strand starting at position 3940 of SEQ ID NO: 1881052
agguuaacucuguauuaag

SEQ ID NO: 2014327 - RNA, 19 nt, Artificial Sequence
  Description of Artificial Sequence: Synthetic oligonucleotide
  Antisense strand to SEQ ID NO: 2014326
cuuaauacagaguuaaccu

SEQ ID NO: 2014328 - RNA, 19 nt, Artificial Sequence
  Description of Artificial Sequence: Synthetic oligonucleotide
  Sense strand starting at position 43 of SEQ ID NO: 1881053
gccugaucccugcauugag

SEQ ID NO: 2014329 - RNA, 19 nt, Artificial Sequence
  Description of Artificial Sequence: Synthetic oligonucleotide
  Antisense strand to SEQ ID NO: 2014328
cucaaugcagggaucaggc

SEQ ID NO: 2014330 - RNA, 19 nt, Artificial Sequence
  Description of Artificial Sequence: Synthetic oligonucleotide
  Sense strand starting at position 696 of SEQ ID NO: 1881053
gggagcuacugcucucaga

SEQ ID NO: 2014331 - RNA, 19 nt, Artificial Sequence
  Description of Artificial Sequence: Synthetic oligonucleotide
  Antisense strand to SEQ ID NO: 2014330
ucugagagcaguagcuccc

SEQ ID NO: 2014332 - RNA, 19 nt, Artificial Sequence
  Description of Artificial Sequence: Synthetic oligonucleotide
  Sense strand starting at position 743 of SEQ ID NO: 1881053
gguuguugugaaggcuaaa

SEQ ID NO: 2014333 - RNA, 19 nt, Artificial Sequence
  Description of Artificial Sequence: Synthetic oligonucleotide
  Antisense strand to SEQ ID NO: 2014332
uuuagccuucacaacaacc

SEQ ID NO: 2014334 - RNA, 19 nt, Artificial Sequence
  Description of Artificial Sequence: Synthetic oligonucleotide
  Sense strand starting at position 881 of SEQ ID NO: 1881053
agagugggcccgugaaaga

SEQ ID NO: 2014335 - RNA, 19 nt, Artificial Sequence
  Description of Artificial Sequence: Synthetic oligonucleotide
  Antisense strand to SEQ ID NO: 2014334
ucuuucacgggcccacucu

SEQ ID NO: 2014336 - RNA, 19 nt, Artificial Sequence
  Description of Artificial Sequence: Synthetic oligonucleotide
  Sense strand starting at position 983 of SEQ ID NO: 1881053
auucuaaguugccugggau

SEQ ID NO: 2014337 - RNA, 19 nt, Artificial Sequence
  Description of Artificial Sequence: Synthetic oligonucleotide
  Antisense strand to SEQ ID NO: 2014336
aucccaggcaacuuagaau

SEQ ID NO: 2014338 - RNA, 19 nt, Artificial Sequence
  Description of Artificial Sequence: Synthetic oligonucleotide
  Sense strand starting at position 984 of SEQ ID NO: 1881053
uucuaaguugccugggauu

SEQ ID NO: 2014339 - RNA, 19 nt, Artificial Sequence
  Description of Artificial Sequence: Synthetic oligonucleotide
  Antisense strand to SEQ ID NO: 2014338
aaucccaggcaacuuagaa

SEQ ID NO: 2014340 - RNA, 19 nt, Artificial Sequence
  Description of Artificial Sequence: Synthetic oligonucleotide
  Sense strand starting at position 1091 of SEQ ID NO: 1881053
guagcaguucuagaacuug

SEQ ID NO: 2014341 - RNA, 19 nt, Artificial Sequence
  Description of Artificial Sequence: Synthetic oligonucleotide
  Antisense strand to SEQ ID NO: 2014340
caaguucuagaacugcuac

SEQ ID NO: 2014342 - RNA, 19 nt, Artificial Sequence
  Description of Artificial Sequence: Synthetic oligonucleotide
  Sense strand starting at position 1326 of SEQ ID NO: 1881053
auaugaaaguucucuguaa

SEQ ID NO: 2014343 - RNA, 19 nt, Artificial Sequence
  Description of Artificial Sequence: Synthetic oligonucleotide
  Antisense strand to SEQ ID NO: 2014342
uuacagagaacuuucauau

SEQ ID NO: 2014344 - RNA, 19 nt, Artificial Sequence
  Description of Artificial Sequence: Synthetic oligonucleotide
  Sense strand starting at position 1330 of SEQ ID NO: 1881053
gaaaguucucuguaaacug

SEQ ID NO: 2014345 - RNA, 19 nt, Artificial Sequence
  Description of Artificial Sequence: Synthetic oligonucleotide
  Antisense strand to SEQ ID NO: 2014344
caguuuacagagaacuuuc

SEQ ID NO: 2014346 - RNA, 19 nt, Artificial Sequence
  Description of Artificial Sequence: Synthetic oligonucleotide
  Sense strand starting at position 1337 of SEQ ID NO: 1881053
cucuguaaacugcaaagua

SEQ ID NO: 2014347 - RNA, 19 nt, Artificial Sequence
  Description of Artificial Sequence: Synthetic oligonucleotide
  Antisense strand to SEQ ID NO: 2014346
uacuuugcaguuuacagag

SEQ ID NO: 2014348 - RNA, 19 nt, Artificial Sequence
  Description of Artificial Sequence: Synthetic oligonucleotide
  Sense strand starting at position 1351 of SEQ ID NO: 1881053
aaguauuagcuguacguua

SEQ ID NO: 2014349 - RNA, 19 nt, Artificial Sequence
  Description of Artificial Sequence: Synthetic oligonucleotide
  Antisense strand to SEQ ID NO: 2014348
uaacguacagcuaauacuu

SEQ ID NO: 2014350 - RNA, 19 nt, Artificial Sequence
  Description of Artificial Sequence: Synthetic oligonucleotide
  Sense strand starting at position 1608 of SEQ ID NO: 1881053
uuccuucugccgggaauga

SEQ ID NO: 2014351 - RNA, 19 nt, Artificial Sequence
  Description of Artificial Sequence: Synthetic oligonucleotide
  Antisense strand to SEQ ID NO: 2014350
ucauucccggcagaaggaa

SEQ ID NO: 2014352 - RNA, 19 nt, Artificial Sequence
  Description of Artificial Sequence: Synthetic oligonucleotide
  Sense strand starting at position 1669 of SEQ ID NO: 1881053
acucaaugccgaugacagu

SEQ ID NO: 2014353 - RNA, 19 nt, Artificial Sequence
  Description of Artificial Sequence: Synthetic oligonucleotide
  Antisense strand to SEQ ID NO: 2014352
acugucaucggcauugagu

SEQ ID NO: 2014354 - RNA, 19 nt, Artificial Sequence
  Description of Artificial Sequence: Synthetic oligonucleotide
  Sense strand starting at position 1682 of SEQ ID NO: 1881053
gacaguuccugccugauac

SEQ ID NO: 2014355 - RNA, 19 nt, Artificial Sequence
  Description of Artificial Sequence: Synthetic oligonucleotide
  Antisense strand to SEQ ID NO: 2014354
guaucaggcaggaacuguc

SEQ ID NO: 2014356 - RNA, 19 nt, Artificial Sequence
  Description of Artificial Sequence: Synthetic oligonucleotide
  Sense strand starting at position 1927 of SEQ ID NO: 1881053
cuauucuguuuggcucaga

SEQ ID NO: 2014357 - RNA, 19 nt, Artificial Sequence
  Description of Artificial Sequence: Synthetic oligonucleotide
  Antisense strand to SEQ ID NO: 2014356
ucugagccaaacagaauag

SEQ ID NO: 2014358 - RNA, 19 nt, Artificial Sequence
  Description of Artificial Sequence: Synthetic oligonucleotide
  Sense strand starting at position 1928 of SEQ ID NO: 1881053
uauucuguuuggcucagau

SEQ ID NO: 2014359 - RNA, 19 nt, Artificial Sequence
  Description of Artificial Sequence: Synthetic oligonucleotide
  Antisense strand to SEQ ID NO: 2014358
aucugagccaaacagaaua

SEQ ID NO: 2014360 - RNA, 19 nt, Artificial Sequence
  Description of Artificial Sequence: Synthetic oligonucleotide
  Sense strand starting at position 2121 of SEQ ID NO: 1881053
cgggcuggucagugaauga

SEQ ID NO: 2014361 - RNA, 19 nt, Artificial Sequence
  Description of Artificial Sequence: Synthetic oligonucleotide
  Antisense strand to SEQ ID NO: 2014360
ucauucacugaccagcccg

SEQ ID NO: 2014362 - RNA, 19 nt, Artificial Sequence
  Description of Artificial Sequence: Synthetic oligonucleotide
  Sense strand starting at position 2125 of SEQ ID NO: 1881053
cuggucagugaaugaauaa

SEQ ID NO: 2014363 - RNA, 19 nt, Artificial Sequence
  Description of Artificial Sequence: Synthetic oligonucleotide
  Antisense strand to SEQ ID NO: 2014362
uuauucauucacugaccag

SEQ ID NO: 2014364 - RNA, 19 nt, Artificial Sequence
  Description of Artificial Sequence: Synthetic oligonucleotide
  Sense strand starting at position 2216 of SEQ ID NO: 1881053
ggcggaauuugccugauau

SEQ ID NO: 2014365 - RNA, 19 nt, Artificial Sequence
  Description of Artificial Sequence: Synthetic oligonucleotide
  Antisense strand to SEQ ID NO: 2014364
auaucaggcaaauuccgcc

SEQ ID NO: 2014366 - RNA, 19 nt, Artificial Sequence
  Description of Artificial Sequence: Synthetic oligonucleotide
  Sense strand starting at position 2217 of SEQ ID NO: 1881053
gcggaauuugccugauauc

SEQ ID NO: 2014367 - RNA, 19 nt, Artificial Sequence
  Description of Artificial Sequence: Synthetic oligonucleotide
  Antisense strand to SEQ ID NO: 2014366
gauaucaggcaaauuccgc

SEQ ID NO: 2014368 - RNA, 19 nt, Artificial Sequence
  Description of Artificial Sequence: Synthetic oligonucleotide
  Sense strand starting at position 2663 of SEQ ID NO: 1881053
ggaguugaggcccaaugua

SEQ ID NO: 2014369 - RNA, 19 nt, Artificial Sequence
  Description of Artificial Sequence: Synthetic oligonucleotide
  Antisense strand to SEQ ID NO: 2014368
uacauugggccucaacucc

SEQ ID NO: 2014370 - RNA, 19 nt, Artificial Sequence
  Description of Artificial Sequence: Synthetic oligonucleotide
  Sense strand starting at position 2705 of SEQ ID NO: 1881053
ggguggaguccugauggca

SEQ ID NO: 2014371 - RNA, 19 nt, Artificial Sequence
  Description of Artificial Sequence: Synthetic oligonucleotide
  Antisense strand to SEQ ID NO: 2014370
ugccaucaggacuccaccc

SEQ ID NO: 2014372 - RNA, 19 nt, Artificial Sequence
  Description of Artificial Sequence: Synthetic oligonucleotide
  Sense strand starting at position 2739 of SEQ ID NO: 1881053
ugaccuuggccucaucaca

SEQ ID NO: 2014373 - RNA, 19 nt, Artificial Sequence
  Description of Artificial Sequence: Synthetic oligonucleotide
  Antisense strand to SEQ ID NO: 2014372
ugugaugaggccaagguca

SEQ ID NO: 2014374 - RNA, 19 nt, Artificial Sequence
  Description of Artificial Sequence: Synthetic oligonucleotide
  Sense strand starting at position 2806 of SEQ ID NO: 1881053
gaguguuggaguuaucuuc

SEQ ID NO: 2014375 - RNA, 19 nt, Artificial Sequence
  Description of Artificial Sequence: Synthetic oligonucleotide
  Antisense strand to SEQ ID NO: 2014374
gaagauaacuccaacacuc

SEQ ID NO: 2014376 - RNA, 19 nt, Artificial Sequence
  Description of Artificial Sequence: Synthetic oligonucleotide
  Sense strand starting at position 2813 of SEQ ID NO: 1881053
ggaguuaucuucucuaacc

SEQ ID NO: 2014377 - RNA, 19 nt, Artificial Sequence
  Description of Artificial Sequence: Synthetic oligonucleotide
  Antisense strand to SEQ ID NO: 2014376
gguuagagaagauaacucc

SEQ ID NO: 2014378 - RNA, 19 nt, Artificial Sequence
  Description of Artificial Sequence: Synthetic oligonucleotide
  Sense strand starting at position 3043 of SEQ ID NO: 1881053
gcagcuuuggcagcuguua

SEQ ID NO: 2014379 - RNA, 19 nt, Artificial Sequence
  Description of Artificial Sequence: Synthetic oligonucleotide
  Antisense strand to SEQ ID NO: 2014378
uaacagcugccaaagcugc

SEQ ID NO: 2014380 - RNA, 19 nt, Artificial Sequence
  Description of Artificial Sequence: Synthetic oligonucleotide
  Sense strand starting at position 3055 of SEQ ID NO: 1881053
gcuguuauccuguagaaac

SEQ ID NO: 2014381 - RNA, 19 nt, Artificial Sequence
  Description of Artificial Sequence: Synthetic oligonucleotide
  Antisense strand to SEQ ID NO: 2014380
guuucuacaggauaacagc

SEQ ID NO: 2014382 - RNA, 19 nt, Artificial Sequence
  Description of Artificial Sequence: Synthetic oligonucleotide
  Sense strand starting at position 3057 of SEQ ID NO: 1881053
uguuauccuguagaaacgu

SEQ ID NO: 2014383 - RNA, 19 nt, Artificial Sequence
  Description of Artificial Sequence: Synthetic oligonucleotide
  Antisense strand to SEQ ID NO: 2014382
acguuucuacaggauaaca

SEQ ID NO: 2014384 - RNA, 19 nt, Artificial Sequence
  Description of Artificial Sequence: Synthetic oligonucleotide
  Sense strand starting at position 3085 of SEQ ID NO: 1881053
ccugucugaucuucugauu

SEQ ID NO: 2014385 - RNA, 19 nt, Artificial Sequence
  Description of Artificial Sequence: Synthetic oligonucleotide
  Antisense strand to SEQ ID NO: 2014384
aaucagaagaucagacagg

SEQ ID NO: 2014386 - RNA, 19 nt, Artificial Sequence
  Description of Artificial Sequence: Synthetic oligonucleotide
  Sense strand starting at position 3091 of SEQ ID NO: 1881053
ugaucuucugauugucuuu

SEQ ID NO: 2014387 - RNA, 19 nt, Artificial Sequence
  Description of Artificial Sequence: Synthetic oligonucleotide
  Antisense strand to SEQ ID NO: 2014386
aaagacaaucagaagauca

SEQ ID NO: 2014388 - RNA, 19 nt, Artificial Sequence
  Description of Artificial Sequence: Synthetic oligonucleotide
  Sense strand starting at position 3175 of SEQ ID NO: 1881053
aauauaucguggcugaaag

SEQ ID NO: 2014389 - RNA, 19 nt, Artificial Sequence
  Description of Artificial Sequence: Synthetic oligonucleotide
  Antisense strand to SEQ ID NO: 2014388
cuuucagccacgauauauu

SEQ ID NO: 2014390 - RNA, 19 nt, Artificial Sequence
  Description of Artificial Sequence: Synthetic oligonucleotide
  Sense strand starting at position 3218 of SEQ ID NO: 1881053
cuguaagggaggugucaga

SEQ ID NO: 2014391 - RNA, 19 nt, Artificial Sequence
  Description of Artificial Sequence: Synthetic oligonucleotide
  Antisense strand to SEQ ID NO: 2014390
ucugacaccucccuuacag

SEQ ID NO: 2014392 - RNA, 19 nt, Artificial Sequence
  Description of Artificial Sequence: Synthetic oligonucleotide
  Sense strand starting at position 3310 of SEQ ID NO: 1881053
uauuauggagucuauguca

SEQ ID NO: 2014393 - RNA, 19 nt, Artificial Sequence
  Description of Artificial Sequence: Synthetic oligonucleotide
  Antisense strand to SEQ ID NO: 2014392
ugacauagacuccauaaua

SEQ ID NO: 2014394 - RNA, 19 nt, Artificial Sequence
  Description of Artificial Sequence: Synthetic oligonucleotide
  Sense strand starting at position 3695 of SEQ ID NO: 1881053
gcccaugaaagguguauua

SEQ ID NO: 2014395 - RNA, 19 nt, Artificial Sequence
  Description of Artificial Sequence: Synthetic oligonucleotide
  Antisense strand to SEQ ID NO: 2014394
uaauacaccuuucaugggc

SEQ ID NO: 2014396 - RNA, 19 nt, Artificial Sequence
  Description of Artificial Sequence: Synthetic oligonucleotide
  Sense strand starting at position 3697 of SEQ ID NO: 1881053
ccaugaaagguguauuauc

SEQ ID NO: 2014397 - RNA, 19 nt, Artificial Sequence
  Description of Artificial Sequence: Synthetic oligonucleotide
  Antisense strand to SEQ ID NO: 2014396
gauaauacaccuuucaugg

SEQ ID NO: 2014398 - RNA, 19 nt, Artificial Sequence
  Description of Artificial Sequence: Synthetic oligonucleotide
  Sense strand starting at position 3792 of SEQ ID NO: 1881053
agcuauccugccuaaugga

SEQ ID NO: 2014399 - RNA, 19 nt, Artificial Sequence
  Description of Artificial Sequence: Synthetic oligonucleotide
  Antisense strand to SEQ ID NO: 2014398
uccauuaggcaggauagcu

SEQ ID NO: 2014400 - RNA, 19 nt, Artificial Sequence
  Description of Artificial Sequence: Synthetic oligonucleotide
  Sense strand starting at position 3874 of SEQ ID NO: 1881053
agagcuaauucuccagcau

SEQ ID NO: 2014401 - RNA, 19 nt, Artificial Sequence
  Description of Artificial Sequence: Synthetic oligonucleotide
  Antisense strand to SEQ ID NO: 2014400
augcuggagaauuagcucu

SEQ ID NO: 2014402 - RNA, 19 nt, Artificial Sequence
  Description of Artificial Sequence: Synthetic oligonucleotide
  Sense strand starting at position 3887 of SEQ ID NO: 1881053
cagcauuucuggccugcua

SEQ ID NO: 2014403 - RNA, 19 nt, Artificial Sequence
  Description of Artificial Sequence: Synthetic oligonucleotide
  Antisense strand to SEQ ID NO: 2014402
uagcaggccagaaaugcug

SEQ ID NO: 2014404 - RNA, 19 nt, Artificial Sequence
  Description of Artificial Sequence: Synthetic oligonucleotide
  Sense strand starting at position 3889 of SEQ ID NO: 1881053
gcauuucuggccugcuauu

SEQ ID NO: 2014405 - RNA, 19 nt, Artificial Sequence
  Description of Artificial Sequence: Synthetic oligonucleotide
  Antisense strand to SEQ ID NO: 2014404
aauagcaggccagaaaugc

SEQ ID NO: 2014406 - RNA, 19 nt, Artificial Sequence
  Description of Artificial Sequence: Synthetic oligonucleotide
  Sense strand starting at position 3970 of SEQ ID NO: 1881053
gugguagucaggcagaugu

SEQ ID NO: 2014407 - RNA, 19 nt, Artificial Sequence
  Description of Artificial Sequence: Synthetic oligonucleotide
  Antisense strand to SEQ ID NO: 2014406
acaucugccugacuaccac

SEQ ID NO: 2014408 - RNA, 19 nt, Artificial Sequence
  Description of Artificial Sequence: Synthetic oligonucleotide
  Sense strand starting at position 286 of SEQ ID NO: 1881054
uuguuagugccugcuuuau

SEQ ID NO: 2014409 - RNA, 19 nt, Artificial Sequence
  Description of Artificial Sequence: Synthetic oligonucleotide
  Antisense strand to SEQ ID NO: 2014408
auaaagcaggcacuaacaa

SEQ ID NO: 2014410 - RNA, 19 nt, Artificial Sequence
  Description of Artificial Sequence: Synthetic oligonucleotide
  Sense strand starting at position 458 of SEQ ID NO: 1881054
aggaguuugccagguacag

SEQ ID NO: 2014411 - RNA, 19 nt, Artificial Sequence
  Description of Artificial Sequence: Synthetic oligonucleotide
  Antisense strand to SEQ ID NO: 2014410
cuguaccuggcaaacuccu

SEQ ID NO: 2014412 - RNA, 19 nt, Artificial Sequence
  Description of Artificial Sequence: Synthetic oligonucleotide
  Sense strand starting at position 460 of SEQ ID NO: 1881054
gaguuugccagguacagaa

SEQ ID NO: 2014413 - RNA, 19 nt, Artificial Sequence
  Description of Artificial Sequence: Synthetic oligonucleotide
  Antisense strand to SEQ ID NO: 2014412
uucuguaccuggcaaacuc

SEQ ID NO: 2014414 - RNA, 19 nt, Artificial Sequence
  Description of Artificial Sequence: Synthetic oligonucleotide
  Sense strand starting at position 924 of SEQ ID NO: 1881054
guaagaaggcuacacaagu

SEQ ID NO: 2014415 - RNA, 19 nt, Artificial Sequence
  Description of Artificial Sequence: Synthetic oligonucleotide
  Antisense strand to SEQ ID NO: 2014414
acuuguguagccuucuuac

SEQ ID NO: 2014416 - RNA, 19 nt, Artificial Sequence
  Description of Artificial Sequence: Synthetic oligonucleotide
  Sense strand starting at position 1064 of SEQ ID NO: 1881054
aggucaggcaucugcuaga

SEQ ID NO: 2014417 - RNA, 19 nt, Artificial Sequence
  Description of Artificial Sequence: Synthetic oligonucleotide
  Antisense strand to SEQ ID NO: 2014416
ucuagcagaugccugaccu

SEQ ID NO: 2014418 - RNA, 19 nt, Artificial Sequence
  Description of Artificial Sequence: Synthetic oligonucleotide
  Sense strand starting at position 1355 of SEQ ID NO: 1881054
uguccauguccacaauaaa

SEQ ID NO: 2014419 - RNA, 19 nt, Artificial Sequence
  Description of Artificial Sequence: Synthetic oligonucleotide
  Antisense strand to SEQ ID NO: 2014418
uuuauuguggacauggaca

SEQ ID NO: 2014420 - RNA, 19 nt, Artificial Sequence
  Description of Artificial Sequence: Synthetic oligonucleotide
  Sense strand starting at position 1412 of SEQ ID NO: 1881054
ugccuuuccucuccagaga

SEQ ID NO: 2014421 - RNA, 19 nt, Artificial Sequence
  Description of Artificial Sequence: Synthetic oligonucleotide
  Antisense strand to SEQ ID NO: 2014420
ucucuggagaggaaaggca

SEQ ID NO: 2014422 - RNA, 19 nt, Artificial Sequence
  Description of Artificial Sequence: Synthetic oligonucleotide
  Sense strand starting at position 1602 of SEQ ID NO: 1881054
cucuuaaaugccgauuaga

SEQ ID NO: 2014423 - RNA, 19 nt, Artificial Sequence
  Description of Artificial Sequence: Synthetic oligonucleotide
  Antisense strand to SEQ ID NO: 2014422
ucuaaucggcauuuaagag

SEQ ID NO: 2014424 - RNA, 19 nt, Artificial Sequence
  Description of Artificial Sequence: Synthetic oligonucleotide
  Sense strand starting at position 1682 of SEQ ID NO: 1881054
uucuuaacccagugaauga

SEQ ID NO: 2014425 - RNA, 19 nt, Artificial Sequence
  Description of Artificial Sequence: Synthetic oligonucleotide
  Antisense strand to SEQ ID NO: 2014424
ucauucacuggguuaagaa

SEQ ID NO: 2014426 - RNA, 19 nt, Artificial Sequence
  Description of Artificial Sequence: Synthetic oligonucleotide
  Sense strand starting at position 1691 of SEQ ID NO: 1881054
cagugaaugacacggucua

SEQ ID NO: 2014427 - RNA, 19 nt, Artificial Sequence
  Description of Artificial Sequence: Synthetic oligonucleotide
  Antisense strand to SEQ ID NO: 2014426
uagaccgugucauucacug

SEQ ID NO: 2014428 - RNA, 19 nt, Artificial Sequence
  Description of Artificial Sequence: Synthetic oligonucleotide
  Sense strand starting at position 1773 of SEQ ID NO: 1881054
cucugaaaucaguagugcu

SEQ ID NO: 2014429 - RNA, 19 nt, Artificial Sequence
  Description of Artificial Sequence: Synthetic oligonucleotide
  Antisense strand to SEQ ID NO: 2014428
agcacuacugauuucagag

SEQ ID NO: 2014430 - RNA, 19 nt, Artificial Sequence
  Description of Artificial Sequence: Synthetic oligonucleotide
  Sense strand starting at position 1819 of SEQ ID NO: 1881054
aggacaugcuauguuccaa

SEQ ID NO: 2014431 - RNA, 19 nt, Artificial Sequence
  Description of Artificial Sequence: Synthetic oligonucleotide
  Antisense strand to SEQ ID NO: 2014430
uuggaacauagcauguccu

SEQ ID NO: 2014432 - RNA, 19 nt, Artificial Sequence
  Description of Artificial Sequence: Synthetic oligonucleotide
  Sense strand starting at position 1853 of SEQ ID NO: 1881054
uguuauuucugcccaucca

SEQ ID NO: 2014433 - RNA, 19 nt, Artificial Sequence
  Description of Artificial Sequence: Synthetic oligonucleotide
  Antisense strand to SEQ ID NO: 2014432
uggaugggcagaaauaaca

SEQ ID NO: 2014434 - RNA, 19 nt, Artificial Sequence
  Description of Artificial Sequence: Synthetic oligonucleotide
  Sense strand starting at position 2360 of SEQ ID NO: 1881054
cccugaugccacuauaaug

SEQ ID NO: 2014435 - RNA, 19 nt, Artificial Sequence
  Description of Artificial Sequence: Synthetic oligonucleotide
  Antisense strand to SEQ ID NO: 2014434
cauuauaguggcaucaggg

SEQ ID NO: 2014436 - RNA, 19 nt, Artificial Sequence
  Description of Artificial Sequence: Synthetic oligonucleotide
  Sense strand starting at position 2474 of SEQ ID NO: 1881054
gaaugugagcuuugggagu

SEQ ID NO: 2014437 - RNA, 19 nt, Artificial Sequence
  Description of Artificial Sequence: Synthetic oligonucleotide
  Antisense strand to SEQ ID NO: 2014436
acucccaaagcucacauuc

SEQ ID NO: 2014438 - RNA, 19 nt, Artificial Sequence
  Description of Artificial Sequence: Synthetic oligonucleotide
  Sense strand starting at position 2506 of SEQ ID NO: 1881054
cgcagugggcuguuauguu

SEQ ID NO: 2014439 - RNA, 19 nt, Artificial Sequence
  Description of Artificial Sequence: Synthetic oligonucleotide
  Antisense strand to SEQ ID NO: 2014438
aacauaacagcccacugcg

SEQ ID NO: 2014440 - RNA, 19 nt, Artificial Sequence
  Description of Artificial Sequence: Synthetic oligonucleotide
  Sense strand starting at position 2743 of SEQ ID NO: 1881054
cauuccauguguuuggaca

SEQ ID NO: 2014441 - RNA, 19 nt, Artificial Sequence
  Description of Artificial Sequence: Synthetic oligonucleotide
  Antisense strand to SEQ ID NO: 2014440
uguccaaacacauggaaug

SEQ ID NO: 2014442 - RNA, 19 nt, Artificial Sequence
  Description of Artificial Sequence: Synthetic oligonucleotide
  Sense strand starting at position 2744 of SEQ ID NO: 1881054
auuccauguguuuggacaa

SEQ ID NO: 2014443 - RNA, 19 nt, Artificial Sequence
  Description of Artificial Sequence: Synthetic oligonucleotide
  Antisense strand to SEQ ID NO: 2014442
uuguccaaacacauggaau

SEQ ID NO: 2014444 - RNA, 19 nt, Artificial Sequence
  Description of Artificial Sequence: Synthetic oligonucleotide
  Sense strand starting at position 2922 of SEQ ID NO: 1881054
aauguuguauuguuggaau

SEQ ID NO: 2014445 - RNA, 19 nt, Artificial Sequence
  Description of Artificial Sequence: Synthetic oligonucleotide
  Antisense strand to SEQ ID NO: 2014444
auuccaacaauacaacauu

SEQ ID NO: 2014446 - RNA, 19 nt, Artificial Sequence
  Description of Artificial Sequence: Synthetic oligonucleotide
  Sense strand starting at position 3293 of SEQ ID NO: 1881054
cagcauuugguguguuagu

SEQ ID NO: 2014447 - RNA, 19 nt, Artificial Sequence
  Description of Artificial Sequence: Synthetic oligonucleotide
  Antisense strand to SEQ ID NO: 2014446
acuaacacaccaaaugcug

SEQ ID NO: 2014448 - RNA, 19 nt, Artificial Sequence
  Description of Artificial Sequence: Synthetic oligonucleotide
  Sense strand starting at position 3349 of SEQ ID NO: 1881054
uaucucaugguugguuuaa

SEQ ID NO: 2014449 - RNA, 19 nt, Artificial Sequence
  Description of Artificial Sequence: Synthetic oligonucleotide
  Antisense strand to SEQ ID NO: 2014448
uuaaaccaaccaugagaua

SEQ ID NO: 2014450 - RNA, 19 nt, Artificial Sequence
  Description of Artificial Sequence: Synthetic oligonucleotide
  Sense strand starting at position 3382 of SEQ ID NO: 1881054
augauauaccuauguggag

SEQ ID NO: 2014451 - RNA, 19 nt, Artificial Sequence
  Description of Artificial Sequence: Synthetic oligonucleotide
  Antisense strand to SEQ ID NO: 2014450
cuccacauagguauaucau

SEQ ID NO: 2014452 - RNA, 19 nt, Artificial Sequence
  Description of Artificial Sequence: Synthetic oligonucleotide
  Sense strand starting at position 3424 of SEQ ID NO: 1881054
aucuguguaucuucuugaa

SEQ ID NO: 2014453 - RNA, 19 nt, Artificial Sequence
  Description of Artificial Sequence: Synthetic oligonucleotide
  Antisense strand to SEQ ID NO: 2014452
uucaagaagauacacagau

SEQ ID NO: 2014454 - RNA, 19 nt, Artificial Sequence
  Description of Artificial Sequence: Synthetic oligonucleotide
  Sense strand starting at position 3426 of SEQ ID NO: 1881054
cuguguaucuucuugaaug

SEQ ID NO: 2014455 - RNA, 19 nt, Artificial Sequence
  Description of Artificial Sequence: Synthetic oligonucleotide
  Antisense strand to SEQ ID NO: 2014454
cauucaagaagauacacag

SEQ ID NO: 2014456 - RNA, 19 nt, Artificial Sequence
  Description of Artificial Sequence: Synthetic oligonucleotide
  Sense strand starting at position 3428 of SEQ ID NO: 1881054
guguaucuucuugaaugag

SEQ ID NO: 2014457 - RNA, 19 nt, Artificial Sequence
  Description of Artificial Sequence: Synthetic oligonucleotide
  Antisense strand to SEQ ID NO: 2014456
cucauucaagaagauacac

SEQ ID NO: 2014458 - RNA, 19 nt, Artificial Sequence
  Description of Artificial Sequence: Synthetic oligonucleotide
  Sense strand starting at position 3440 of SEQ ID NO: 1881054
gaaugaggugucuguuuag

SEQ ID NO: 2014459 - RNA, 19 nt, Artificial Sequence
  Description of Artificial Sequence: Synthetic oligonucleotide
  Antisense strand to SEQ ID NO: 2014458
cuaaacagacaccucauuc

SEQ ID NO: 2014460 - RNA, 19 nt, Artificial Sequence
  Description of Artificial Sequence: Synthetic oligonucleotide
  Sense strand starting at position 3490 of SEQ ID NO: 1881054
uccuauuauugaguguuaa

SEQ ID NO: 2014461 - RNA, 19 nt, Artificial Sequence
  Description of Artificial Sequence: Synthetic oligonucleotide
  Antisense strand to SEQ ID NO: 2014460
uuaacacucaauaauagga

SEQ ID NO: 2014462 - RNA, 19 nt, Artificial Sequence
  Description of Artificial Sequence: Synthetic oligonucleotide
  Sense strand starting at position 3491 of SEQ ID NO: 1881054
ccuauuauugaguguuaag

SEQ ID NO: 2014463 - RNA, 19 nt, Artificial Sequence
  Description of Artificial Sequence: Synthetic oligonucleotide
  Antisense strand to SEQ ID NO: 2014462
cuuaacacucaauaauagg

SEQ ID NO: 2014464 - RNA, 19 nt, Artificial Sequence
  Description of Artificial Sequence: Synthetic oligonucleotide
  Sense strand starting at position 3596 of SEQ ID NO: 1881054
ucuccugagcaaugagguu

SEQ ID NO: 2014465 - RNA, 19 nt, Artificial Sequence
  Description of Artificial Sequence: Synthetic oligonucleotide
  Antisense strand to SEQ ID NO: 2014464
aaccucauugcucaggaga

SEQ ID NO: 2014466 - RNA, 19 nt, Artificial Sequence
  Description of Artificial Sequence: Synthetic oligonucleotide
  Sense strand starting at position 3676 of SEQ ID NO: 1881054
aguuuccaccucuauagau

SEQ ID NO: 2014467 - RNA, 19 nt, Artificial Sequence
  Description of Artificial Sequence: Synthetic oligonucleotide
  Antisense strand to SEQ ID NO: 2014466
aucuauagagguggaaacu

SEQ ID NO: 2014468 - RNA, 19 nt, Artificial Sequence
  Description of Artificial Sequence: Synthetic oligonucleotide
  Sense strand starting at position 3866 of SEQ ID NO: 1881054
cuagcuaucaacgaugguu

SEQ ID NO: 2014469 - RNA, 19 nt, Artificial Sequence
  Description of Artificial Sequence: Synthetic oligonucleotide
  Antisense strand to SEQ ID NO: 2014468
aaccaucguugauagcuag

SEQ ID NO: 2014470 - RNA, 19 nt, Artificial Sequence
  Description of Artificial Sequence: Synthetic oligonucleotide
  Sense strand starting at position 3920 of SEQ ID NO: 1881054
cacaaaucuguuugcagga

SEQ ID NO: 2014471 - RNA, 19 nt, Artificial Sequence
  Description of Artificial Sequence: Synthetic oligonucleotide
  Antisense strand to SEQ ID NO: 2014470
uccugcaaacagauuugug

SEQ ID NO: 2014472 - RNA, 19 nt, Artificial Sequence
  Description of Artificial Sequence: Synthetic oligonucleotide
  Sense strand starting at position 3921 of SEQ ID NO: 1881054
acaaaucuguuugcaggaa

SEQ ID NO: 2014473 - RNA, 19 nt, Artificial Sequence
  Description of Artificial Sequence: Synthetic oligonucleotide
  Antisense strand to SEQ ID NO: 2014472
uuccugcaaacagauuugu

SEQ ID NO: 2014474 - RNA, 19 nt, Artificial Sequence
  Description of Artificial Sequence: Synthetic oligonucleotide
  Sense strand starting at position 3925 of SEQ ID NO: 1881054
aucuguuugcaggaagauu

SEQ ID NO: 2014475 - RNA, 19 nt, Artificial Sequence
  Description of Artificial Sequence: Synthetic oligonucleotide
  Antisense strand to SEQ ID NO: 2014474
aaucuuccugcaaacagau

SEQ ID NO: 2014476 - RNA, 19 nt, Artificial Sequence
  Description of Artificial Sequence: Synthetic oligonucleotide
  Sense strand starting at position 3933 of SEQ ID NO: 1881054
gcaggaagauuccuguggu

SEQ ID NO: 2014477 - RNA, 19 nt, Artificial Sequence
  Description of Artificial Sequence: Synthetic oligonucleotide
  Antisense strand to SEQ ID NO: 2014476
accacaggaaucuuccugc

SEQ ID NO: 2014478 - RNA, 19 nt, Artificial Sequence
  Description of Artificial Sequence: Synthetic oligonucleotide
  Sense strand starting at position 3936 of SEQ ID NO: 1881054
ggaagauuccugugguugg

SEQ ID NO: 2014479 - RNA, 19 nt, Artificial Sequence
  Description of Artificial Sequence: Synthetic oligonucleotide
  Antisense strand to SEQ ID NO: 2014478
ccaaccacaggaaucuucc

SEQ ID NO: 2014480 - RNA, 19 nt, Artificial Sequence
  Description of Artificial Sequence: Synthetic oligonucleotide
  Sense strand starting at position 3939 of SEQ ID NO: 1881054
agauuccugugguuggaau

SEQ ID NO: 2014481 - RNA, 19 nt, Artificial Sequence
  Description of Artificial Sequence: Synthetic oligonucleotide
  Antisense strand to SEQ ID NO: 2014480
auuccaaccacaggaaucu

SEQ ID NO: 2014482 - RNA, 19 nt, Artificial Sequence
  Description of Artificial Sequence: Synthetic oligonucleotide
  Sense strand starting at position 3951 of SEQ ID NO: 1881054
uuggaaucccuuggucuua

SEQ ID NO: 2014483 - RNA, 19 nt, Artificial Sequence
  Description of Artificial Sequence: Synthetic oligonucleotide
  Antisense strand to SEQ ID NO: 2014482
uaagaccaagggauuccaa

SEQ ID NO: 2014484 - RNA, 19 nt, Artificial Sequence
  Description of Artificial Sequence: Synthetic oligonucleotide
  Sense strand starting at position 3962 of SEQ ID NO: 1881054
uggucuuaggaauggguca

SEQ ID NO: 2014485 - RNA, 19 nt, Artificial Sequence
  Description of Artificial Sequence: Synthetic oligonucleotide
  Antisense strand to SEQ ID NO: 2014484
ugacccauuccuaagacca

SEQ ID NO: 2014486 - RNA, 19 nt, Artificial Sequence
  Description of Artificial Sequence: Synthetic oligonucleotide
  Sense strand starting at position 3964 of SEQ ID NO: 1881054
gucuuaggaaugggucaga

SEQ ID NO: 2014487 - RNA, 19 nt, Artificial Sequence
  Description of Artificial Sequence: Synthetic oligonucleotide
  Antisense strand to SEQ ID NO: 2014486
ucugacccauuccuaagac

SEQ ID NO: 2014488 - RNA, 19 nt, Artificial Sequence
  Description of Artificial Sequence: Synthetic oligonucleotide
  Sense strand starting at position 213 of SEQ ID NO: 1881055
cuuguacaugcaugaauaa

SEQ ID NO: 2014489 - RNA, 19 nt, Artificial Sequence
  Description of Artificial Sequence: Synthetic oligonucleotide
  Antisense strand to SEQ ID NO: 2014488
uuauucaugcauguacaag

SEQ ID NO: 2014490 - RNA, 19 nt, Artificial Sequence
  Description of Artificial Sequence: Synthetic oligonucleotide
  Sense strand starting at position 538 of SEQ ID NO: 1881055
ugaagagugacugguaaug

SEQ ID NO: 2014491 - RNA, 19 nt, Artificial Sequence
  Description of Artificial Sequence: Synthetic oligonucleotide
  Antisense strand to SEQ ID NO: 2014490
cauuaccagucacucuuca

SEQ ID NO: 2014492 - RNA, 19 nt, Artificial Sequence
  Description of Artificial Sequence: Synthetic oligonucleotide
  Sense strand starting at position 594 of SEQ ID NO: 1881055
ugaaauugacucuggugau

SEQ ID NO: 2014493 - RNA, 19 nt, Artificial Sequence
  Description of Artificial Sequence: Synthetic oligonucleotide
  Antisense strand to SEQ ID NO: 2014492
aucaccagagucaauuuca

SEQ ID NO: 2014494 - RNA, 19 nt, Artificial Sequence
  Description of Artificial Sequence: Synthetic oligonucleotide
  Sense strand starting at position 680 of SEQ ID NO: 1881055
cuaauuuccucugugagca

SEQ ID NO: 2014495 - RNA, 19 nt, Artificial Sequence
  Description of Artificial Sequence: Synthetic oligonucleotide
  Antisense strand to SEQ ID NO: 2014494
ugcucacagaggaaauuag

SEQ ID NO: 2014496 - RNA, 19 nt, Artificial Sequence
  Description of Artificial Sequence: Synthetic oligonucleotide
  Sense strand starting at position 831 of SEQ ID NO: 1881055
ugagauuugugggacugag

SEQ ID NO: 2014497 - RNA, 19 nt, Artificial Sequence
  Description of Artificial Sequence: Synthetic oligonucleotide
  Antisense strand to SEQ ID NO: 2014496
cucagucccacaaaucuca

SEQ ID NO: 2014498 - RNA, 19 nt, Artificial Sequence
  Description of Artificial Sequence: Synthetic oligonucleotide
  Sense strand starting at position 847 of SEQ ID NO: 1881055
gagagauuguuaguuacuc

SEQ ID NO: 2014499 - RNA, 19 nt, Artificial Sequence
  Description of Artificial Sequence: Synthetic oligonucleotide
  Antisense strand to SEQ ID NO: 2014498
gaguaacuaacaaucucuc

SEQ ID NO: 2014500 - RNA, 19 nt, Artificial Sequence
  Description of Artificial Sequence: Synthetic oligonucleotide
  Sense strand starting at position 848 of SEQ ID NO: 1881055
agagauuguuaguuacuca

SEQ ID NO: 2014501 - RNA, 19 nt, Artificial Sequence
  Description of Artificial Sequence: Synthetic oligonucleotide
  Antisense strand to SEQ ID NO: 2014500
ugaguaacuaacaaucucu

SEQ ID NO: 2014502 - RNA, 19 nt, Artificial Sequence
  Description of Artificial Sequence: Synthetic oligonucleotide
  Sense strand starting at position 905 of SEQ ID NO: 1881055
ucccuuuggagugauguga

SEQ ID NO: 2014503 - RNA, 19 nt, Artificial Sequence
  Description of Artificial Sequence: Synthetic oligonucleotide
  Antisense strand to SEQ ID NO: 2014502
ucacaucacuccaaaggga

SEQ ID NO: 2014504 - RNA, 19 nt, Artificial Sequence
  Description of Artificial Sequence: Synthetic oligonucleotide
  Sense strand starting at position 909 of SEQ ID NO: 1881055
uuuggagugaugugaacag

SEQ ID NO: 2014505 - RNA, 19 nt, Artificial Sequence
  Description of Artificial Sequence: Synthetic oligonucleotide
  Antisense strand to SEQ ID NO: 2014504
cuguucacaucacuccaaa

SEQ ID NO: 2014506 - RNA, 19 nt, Artificial Sequence
  Description of Artificial Sequence: Synthetic oligonucleotide
  Sense strand starting at position 913 of SEQ ID NO: 1881055
gagugaugugaacagagcu

SEQ ID NO: 2014507 - RNA, 19 nt, Artificial Sequence
  Description of Artificial Sequence: Synthetic oligonucleotide
  Antisense strand to SEQ ID NO: 2014506
agcucuguucacaucacuc

SEQ ID NO: 2014508 - RNA, 19 nt, Artificial Sequence
  Description of Artificial Sequence: Synthetic oligonucleotide
  Sense strand starting at position 933 of SEQ ID NO: 1881055
gaggccacucuacauguaa

SEQ ID NO: 2014509 - RNA, 19 nt, Artificial Sequence
  Description of Artificial Sequence: Synthetic oligonucleotide
  Antisense strand to SEQ ID NO: 2014508
uuacauguagaguggccuc

SEQ ID NO: 2014510 - RNA, 19 nt, Artificial Sequence
  Description of Artificial Sequence: Synthetic oligonucleotide
  Sense strand starting at position 1243 of SEQ ID NO: 1881055
accaucuagucagucauca

SEQ ID NO: 2014511 - RNA, 19 nt, Artificial Sequence
  Description of Artificial Sequence: Synthetic oligonucleotide
  Antisense strand to SEQ ID NO: 2014510
ugaugacugacuagauggu

SEQ ID NO: 2014512 - RNA, 19 nt, Artificial Sequence
  Description of Artificial Sequence: Synthetic oligonucleotide
  Sense strand starting at position 1331 of SEQ ID NO: 1881055
ugcggaaauauacaaguau

SEQ ID NO: 2014513 - RNA, 19 nt, Artificial Sequence
  Description of Artificial Sequence: Synthetic oligonucleotide
  Antisense strand to SEQ ID NO: 2014512
auacuuguauauuuccgca

SEQ ID NO: 2014514 - RNA, 19 nt, Artificial Sequence
  Description of Artificial Sequence: Synthetic oligonucleotide
  Sense strand starting at position 1543 of SEQ ID NO: 1881055
guaaaucaucuugaugucu

SEQ ID NO: 2014515 - RNA, 19 nt, Artificial Sequence
  Description of Artificial Sequence: Synthetic oligonucleotide
  Antisense strand to SEQ ID NO: 2014514
agacaucaagaugauuuac

SEQ ID NO: 2014516 - RNA, 19 nt, Artificial Sequence
  Description of Artificial Sequence: Synthetic oligonucleotide
  Sense strand starting at position 1648 of SEQ ID NO: 1881055
auaggcaucugacuaguau

SEQ ID NO: 2014517 - RNA, 19 nt, Artificial Sequence
  Description of Artificial Sequence: Synthetic oligonucleotide
  Antisense strand to SEQ ID NO: 2014516
auacuagucagaugccuau

SEQ ID NO: 2014518 - RNA, 19 nt, Artificial Sequence
  Description of Artificial Sequence: Synthetic oligonucleotide
  Sense strand starting at position 1649 of SEQ ID NO: 1881055
uaggcaucugacuaguaug

SEQ ID NO: 2014519 - RNA, 19 nt, Artificial Sequence
  Description of Artificial Sequence: Synthetic oligonucleotide
  Antisense strand to SEQ ID NO: 2014518
cauacuagucagaugccua

SEQ ID NO: 2014520 - RNA, 19 nt, Artificial Sequence
  Description of Artificial Sequence: Synthetic oligonucleotide
  Sense strand starting at position 1654 of SEQ ID NO: 1881055
aucugacuaguauguaaua

SEQ ID NO: 2014521 - RNA, 19 nt, Artificial Sequence
  Description of Artificial Sequence: Synthetic oligonucleotide
  Antisense strand to SEQ ID NO: 2014520
uauuacauacuagucagau

SEQ ID NO: 2014522 - RNA, 19 nt, Artificial Sequence
  Description of Artificial Sequence: Synthetic oligonucleotide
  Sense strand starting at position 1655 of SEQ ID NO: 1881055
ucugacuaguauguaauaa

SEQ ID NO: 2014523 - RNA, 19 nt, Artificial Sequence
  Description of Artificial Sequence: Synthetic oligonucleotide
  Antisense strand to SEQ ID NO: 2014522
uuauuacauacuagucaga

SEQ ID NO: 2014524 - RNA, 19 nt, Artificial Sequence
  Description of Artificial Sequence: Synthetic oligonucleotide
  Sense strand starting at position 1849 of SEQ ID NO: 1881055
ugucuugacaguuagagua

SEQ ID NO: 2014525 - RNA, 19 nt, Artificial Sequence
  Description of Artificial Sequence: Synthetic oligonucleotide
  Antisense strand to SEQ ID NO: 2014524
uacucuaacugucaagaca

SEQ ID NO: 2014526 - RNA, 19 nt, Artificial Sequence
  Description of Artificial Sequence: Synthetic oligonucleotide
  Sense strand starting at position 2000 of SEQ ID NO: 1881055
uguugcuaugcugaagaga

SEQ ID NO: 2014527 - RNA, 19 nt, Artificial Sequence
  Description of Artificial Sequence: Synthetic oligonucleotide
  Antisense strand to SEQ ID NO: 2014526
ucucuucagcauagcaaca

SEQ ID NO: 2014528 - RNA, 19 nt, Artificial Sequence
  Description of Artificial Sequence: Synthetic oligonucleotide
  Sense strand starting at position 2208 of SEQ ID NO: 1881055
cccaaacuugugggaguua

SEQ ID NO: 2014529 - RNA, 19 nt, Artificial Sequence
  Description of Artificial Sequence: Synthetic oligonucleotide
  Antisense strand to SEQ ID NO: 2014528
uaacucccacaaguuuggg

SEQ ID NO: 2014530 - RNA, 19 nt, Artificial Sequence
  Description of Artificial Sequence: Synthetic oligonucleotide
  Sense strand starting at position 2379 of SEQ ID NO: 1881055
cuauuaagugugcauugga

SEQ ID NO: 2014531 - RNA, 19 nt, Artificial Sequence
  Description of Artificial Sequence: Synthetic oligonucleotide
  Antisense strand to SEQ ID NO: 2014530
uccaaugcacacuuaauag

SEQ ID NO: 2014532 - RNA, 19 nt, Artificial Sequence
  Description of Artificial Sequence: Synthetic oligonucleotide
  Sense strand starting at position 2454 of SEQ ID NO: 1881055
aagugacugucaucaugaa

SEQ ID NO: 2014533 - RNA, 19 nt, Artificial Sequence
  Description of Artificial Sequence: Synthetic oligonucleotide
  Antisense strand to SEQ ID NO: 2014532
uucaugaugacagucacuu

SEQ ID NO: 2014534 - RNA, 19 nt, Artificial Sequence
  Description of Artificial Sequence: Synthetic oligonucleotide
  Sense strand starting at position 2458 of SEQ ID NO: 1881055
gacugucaucaugaaagcu

SEQ ID NO: 2014535 - RNA, 19 nt, Artificial Sequence
  Description of Artificial Sequence: Synthetic oligonucleotide
  Antisense strand to SEQ ID NO: 2014534
agcuuucaugaugacaguc

SEQ ID NO: 2014536 - RNA, 19 nt, Artificial Sequence
  Description of Artificial Sequence: Synthetic oligonucleotide
  Sense strand starting at position 2476 of SEQ ID NO: 1881055
ugauucucucaaugguaau

SEQ ID NO: 2014537 - RNA, 19 nt, Artificial Sequence
  Description of Artificial Sequence: Synthetic oligonucleotide
  Antisense strand to SEQ ID NO: 2014536
auuaccauugagagaauca

SEQ ID NO: 2014538 - RNA, 19 nt, Artificial Sequence
  Description of Artificial Sequence: Synthetic oligonucleotide
  Sense strand starting at position 2494 of SEQ ID NO: 1881055
uguaccagaucugcagaaa

SEQ ID NO: 2014539 - RNA, 19 nt, Artificial Sequence
  Description of Artificial Sequence: Synthetic oligonucleotide
  Antisense strand to SEQ ID NO: 2014538
uuucugcagaucugguaca

SEQ ID NO: 2014540 - RNA, 19 nt, Artificial Sequence
  Description of Artificial Sequence: Synthetic oligonucleotide
  Sense strand starting at position 2573 of SEQ ID NO: 1881055
guuucuauaccacauuguu

SEQ ID NO: 2014541 - RNA, 19 nt, Artificial Sequence
  Description of Artificial Sequence: Synthetic oligonucleotide
  Antisense strand to SEQ ID NO: 2014540
aacaaugugguauagaaac

SEQ ID NO: 2014542 - RNA, 19 nt, Artificial Sequence
  Description of Artificial Sequence: Synthetic oligonucleotide
  Sense strand starting at position 2824 of SEQ ID NO: 1881055
cauucuguugagugacaca

SEQ ID NO: 2014543 - RNA, 19 nt, Artificial Sequence
  Description of Artificial Sequence: Synthetic oligonucleotide
  Antisense strand to SEQ ID NO: 2014542
ugugucacucaacagaaug

SEQ ID NO: 2014544 - RNA, 19 nt, Artificial Sequence
  Description of Artificial Sequence: Synthetic oligonucleotide
  Sense strand starting at position 2829 of SEQ ID NO: 1881055
uguugagugacacauugua

SEQ ID NO: 2014545 - RNA, 19 nt, Artificial Sequence
  Description of Artificial Sequence: Synthetic oligonucleotide
  Antisense strand to SEQ ID NO: 2014544
uacaaugugucacucaaca

SEQ ID NO: 2014546 - RNA, 19 nt, Artificial Sequence
  Description of Artificial Sequence: Synthetic oligonucleotide
  Sense strand starting at position 2845 of SEQ ID NO: 1881055
guacaucggguuuauacau

SEQ ID NO: 2014547 - RNA, 19 nt, Artificial Sequence
  Description of Artificial Sequence: Synthetic oligonucleotide
  Antisense strand to SEQ ID NO: 2014546
auguauaaacccgauguac

SEQ ID NO: 2014548 - RNA, 19 nt, Artificial Sequence
  Description of Artificial Sequence: Synthetic oligonucleotide
  Sense strand starting at position 2888 of SEQ ID NO: 1881055
guaaaucagucuccuauaa

SEQ ID NO: 2014549 - RNA, 19 nt, Artificial Sequence
  Description of Artificial Sequence: Synthetic oligonucleotide
  Antisense strand to SEQ ID NO: 2014548
uuauaggagacugauuuac

SEQ ID NO: 2014550 - RNA, 19 nt, Artificial Sequence
  Description of Artificial Sequence: Synthetic oligonucleotide
  Sense strand starting at position 2916 of SEQ ID NO: 1881055
cucagagugcauugauaaa

SEQ ID NO: 2014551 - RNA, 19 nt, Artificial Sequence
  Description of Artificial Sequence: Synthetic oligonucleotide
  Antisense strand to SEQ ID NO: 2014550
uuuaucaaugcacucugag

SEQ ID NO: 2014552 - RNA, 19 nt, Artificial Sequence
  Description of Artificial Sequence: Synthetic oligonucleotide
  Sense strand starting at position 2944 of SEQ ID NO: 1881055
ucuagaugugcacaucuga

SEQ ID NO: 2014553 - RNA, 19 nt, Artificial Sequence
  Description of Artificial Sequence: Synthetic oligonucleotide
  Antisense strand to SEQ ID NO: 2014552
ucagaugugcacaucuaga

SEQ ID NO: 2014554 - RNA, 19 nt, Artificial Sequence
  Description of Artificial Sequence: Synthetic oligonucleotide
  Sense strand starting at position 2953 of SEQ ID NO: 1881055
gcacaucugacagguggaa

SEQ ID NO: 2014555 - RNA, 19 nt, Artificial Sequence
  Description of Artificial Sequence: Synthetic oligonucleotide
  Antisense strand to SEQ ID NO: 2014554
uuccaccugucagaugugc

SEQ ID NO: 2014556 - RNA, 19 nt, Artificial Sequence
  Description of Artificial Sequence: Synthetic oligonucleotide
  Sense strand starting at position 3090 of SEQ ID NO: 1881055
acuguuuagcaacauugua

SEQ ID NO: 2014557 - RNA, 19 nt, Artificial Sequence
  Description of Artificial Sequence: Synthetic oligonucleotide
  Antisense strand to SEQ ID NO: 2014556
uacaauguugcuaaacagu

SEQ ID NO: 2014558 - RNA, 19 nt, Artificial Sequence
  Description of Artificial Sequence: Synthetic oligonucleotide
  Sense strand starting at position 3288 of SEQ ID NO: 1881055
acauuaaugucacugagug

SEQ ID NO: 2014559 - RNA, 19 nt, Artificial Sequence
  Description of Artificial Sequence: Synthetic oligonucleotide
  Antisense strand to SEQ ID NO: 2014558
cacucagugacauuaaugu

SEQ ID NO: 2014560 - RNA, 19 nt, Artificial Sequence
  Description of Artificial Sequence: Synthetic oligonucleotide
  Sense strand starting at position 3397 of SEQ ID NO: 1881055
gguauaauuuacguggagu

SEQ ID NO: 2014561 - RNA, 19 nt, Artificial Sequence
  Description of Artificial Sequence: Synthetic oligonucleotide
  Antisense strand to SEQ ID NO: 2014560
acuccacguaaauuauacc

SEQ ID NO: 2014562 - RNA, 19 nt, Artificial Sequence
  Description of Artificial Sequence: Synthetic oligonucleotide
  Sense strand starting at position 3454 of SEQ ID NO: 1881055
ugaugaauaugugccauca

SEQ ID NO: 2014563 - RNA, 19 nt, Artificial Sequence
  Description of Artificial Sequence: Synthetic oligonucleotide
  Antisense strand to SEQ ID NO: 2014562
ugauggcacauauucauca

SEQ ID NO: 2014564 - RNA, 19 nt, Artificial Sequence
  Description of Artificial Sequence: Synthetic oligonucleotide
  Sense strand starting at position 3755 of SEQ ID NO: 1881055
auaguauagcuacaucaca

SEQ ID NO: 2014565 - RNA, 19 nt, Artificial Sequence
  Description of Artificial Sequence: Synthetic oligonucleotide
  Antisense strand to SEQ ID NO: 2014564
ugugauguagcuauacuau

SEQ ID NO: 2014566 - RNA, 19 nt, Artificial Sequence
  Description of Artificial Sequence: Synthetic oligonucleotide
  Sense strand starting at position 3819 of SEQ ID NO: 1881055
aguucuuggcaauaauaaa

SEQ ID NO: 2014567 - RNA, 19 nt, Artificial Sequence
  Description of Artificial Sequence: Synthetic oligonucleotide
  Antisense strand to SEQ ID NO: 2014566
uuuauuauugccaagaacu

SEQ ID NO: 2014568 - RNA, 19 nt, Artificial Sequence
  Description of Artificial Sequence: Synthetic oligonucleotide
  Sense strand starting at position 320 of SEQ ID NO: 1881056
cuaucacagugaucuuaca

SEQ ID NO: 2014569 - RNA, 19 nt, Artificial Sequence
  Description of Artificial Sequence: Synthetic oligonucleotide
  Antisense strand to SEQ ID NO: 2014568
uguaagaucacugugauag

SEQ ID NO: 2014570 - RNA, 19 nt, Artificial Sequence
  Description of Artificial Sequence: Synthetic oligonucleotide
  Sense strand starting at position 480 of SEQ ID NO: 1881056
uugggauagagcugagaca

SEQ ID NO: 2014571 - RNA, 19 nt, Artificial Sequence
  Description of Artificial Sequence: Synthetic oligonucleotide
  Antisense strand to SEQ ID NO: 2014570
ugucucagcucuaucccaa

SEQ ID NO: 2014572 - RNA, 19 nt, Artificial Sequence
  Description of Artificial Sequence: Synthetic oligonucleotide
  Sense strand starting at position 554 of SEQ ID NO: 1881056
guuacaauauagcuagaga

SEQ ID NO: 2014573 - RNA, 19 nt, Artificial Sequence
  Description of Artificial Sequence: Synthetic oligonucleotide
  Antisense strand to SEQ ID NO: 2014572
ucucuagcuauauuguaac

SEQ ID NO: 2014574 - RNA, 19 nt, Artificial Sequence
  Description of Artificial Sequence: Synthetic oligonucleotide
  Sense strand starting at position 646 of SEQ ID NO: 1881056
augauaaauugaguuguga

SEQ ID NO: 2014575 - RNA, 19 nt, Artificial Sequence
  Description of Artificial Sequence: Synthetic oligonucleotide
  Antisense strand to SEQ ID NO: 2014574
ucacaacucaauuuaucau

SEQ ID NO: 2014576 - RNA, 19 nt, Artificial Sequence
  Description of Artificial Sequence: Synthetic oligonucleotide
  Sense strand starting at position 681 of SEQ ID NO: 1881056
aguugagaucuacaagcuu

SEQ ID NO: 2014577 - RNA, 19 nt, Artificial Sequence
  Description of Artificial Sequence: Synthetic oligonucleotide
  Antisense strand to SEQ ID NO: 2014576
aagcuuguagaucucaacu

SEQ ID NO: 2014578 - RNA, 19 nt, Artificial Sequence
  Description of Artificial Sequence: Synthetic oligonucleotide
  Sense strand starting at position 755 of SEQ ID NO: 1881056
guauuauuugguggcuuag

SEQ ID NO: 2014579 - RNA, 19 nt, Artificial Sequence
  Description of Artificial Sequence: Synthetic oligonucleotide
  Antisense strand to SEQ ID NO: 2014578
cuaagccaccaaauaauac

SEQ ID NO: 2014580 - RNA, 19 nt, Artificial Sequence
  Description of Artificial Sequence: Synthetic oligonucleotide
  Sense strand starting at position 776 of SEQ ID NO: 1881056
aguaccauucuuuaaguaa

SEQ ID NO: 2014581 - RNA, 19 nt, Artificial Sequence
  Description of Artificial Sequence: Synthetic oligonucleotide
  Antisense strand to SEQ ID NO: 2014580
uuacuuaaagaaugguacu

SEQ ID NO: 2014582 - RNA, 19 nt, Artificial Sequence
  Description of Artificial Sequence: Synthetic oligonucleotide
  Sense strand starting at position 894 of SEQ ID NO: 1881056
gaugaugguuacuugggua

SEQ ID NO: 2014583 - RNA, 19 nt, Artificial Sequence
  Description of Artificial Sequence: Synthetic oligonucleotide
  Antisense strand to SEQ ID NO: 2014582
uacccaaguaaccaucauc

SEQ ID NO: 2014584 - RNA, 19 nt, Artificial Sequence
  Description of Artificial Sequence: Synthetic oligonucleotide
  Sense strand starting at position 899 of SEQ ID NO: 1881056
ugguuacuuggguaaccau

SEQ ID NO: 2014585 - RNA, 19 nt, Artificial Sequence
  Description of Artificial Sequence: Synthetic oligonucleotide
  Antisense strand to SEQ ID NO: 2014584
augguuacccaaguaacca

SEQ ID NO: 2014586 - RNA, 19 nt, Artificial Sequence
  Description of Artificial Sequence: Synthetic oligonucleotide
  Sense strand starting at position 919 of SEQ ID NO: 1881056
cucuuaguuggguaacuaa

SEQ ID NO: 2014587 - RNA, 19 nt, Artificial Sequence
  Description of Artificial Sequence: Synthetic oligonucleotide
  Antisense strand to SEQ ID NO: 2014586
uuaguuacccaacuaagag

SEQ ID NO: 2014588 - RNA, 19 nt, Artificial Sequence
  Description of Artificial Sequence: Synthetic oligonucleotide
  Sense strand starting at position 940 of SEQ ID NO: 1881056
guccaacuccaggaaguau

SEQ ID NO: 2014589 - RNA, 19 nt, Artificial Sequence
  Description of Artificial Sequence: Synthetic oligonucleotide
  Antisense strand to SEQ ID NO: 2014588
auacuuccuggaguuggac

SEQ ID NO: 2014590 - RNA, 19 nt, Artificial Sequence
  Description of Artificial Sequence: Synthetic oligonucleotide
  Sense strand starting at position 1026 of SEQ ID NO: 1881056
cuuuaucugcuuuaagaug

SEQ ID NO: 2014591 - RNA, 19 nt, Artificial Sequence
  Description of Artificial Sequence: Synthetic oligonucleotide
  Antisense strand to SEQ ID NO: 2014590
caucuuaaagcagauaaag

SEQ ID NO: 2014592 - RNA, 19 nt, Artificial Sequence
  Description of Artificial Sequence: Synthetic oligonucleotide
  Sense strand starting at position 1035 of SEQ ID NO: 1881056
cuuuaagauguuugaaaug

SEQ ID NO: 2014593 - RNA, 19 nt, Artificial Sequence
  Description of Artificial Sequence: Synthetic oligonucleotide
  Antisense strand to SEQ ID NO: 2014592
cauuucaaacaucuuaaag

SEQ ID NO: 2014594 - RNA, 19 nt, Artificial Sequence
  Description of Artificial Sequence: Synthetic oligonucleotide
  Sense strand starting at position 1055 of SEQ ID NO: 1881056
auaagagaaucugcuuuau

SEQ ID NO: 2014595 - RNA, 19 nt, Artificial Sequence
  Description of Artificial Sequence: Synthetic oligonucleotide
  Antisense strand to SEQ ID NO: 2014594
auaaagcagauucucuuau

SEQ ID NO: 2014596 - RNA, 19 nt, Artificial Sequence
  Description of Artificial Sequence: Synthetic oligonucleotide
  Sense strand starting at position 1165 of SEQ ID NO: 1881056
ugaauuauuugggagaacu

SEQ ID NO: 2014597 - RNA, 19 nt, Artificial Sequence
  Description of Artificial Sequence: Synthetic oligonucleotide
  Antisense strand to SEQ ID NO: 2014596
aguucucccaaauaauuca

SEQ ID NO: 2014598 - RNA, 19 nt, Artificial Sequence
  Description of Artificial Sequence: Synthetic oligonucleotide
  Sense strand starting at position 1472 of SEQ ID NO: 1881056
uuaacuucugugcaagaaa

SEQ ID NO: 2014599 - RNA, 19 nt, Artificial Sequence
  Description of Artificial Sequence: Synthetic oligonucleotide
  Antisense strand to SEQ ID NO: 2014598
uuucuugcacagaaguuaa

SEQ ID NO: 2014600 - RNA, 19 nt, Artificial Sequence
  Description of Artificial Sequence: Synthetic oligonucleotide
  Sense strand starting at position 1561 of SEQ ID NO: 1881056
ggagaugaaucaucauagc

SEQ ID NO: 2014601 - RNA, 19 nt, Artificial Sequence
  Description of Artificial Sequence: Synthetic oligonucleotide
  Antisense strand to SEQ ID NO: 2014600
gcuaugaugauucaucucc

SEQ ID NO: 2014602 - RNA, 19 nt, Artificial Sequence
  Description of Artificial Sequence: Synthetic oligonucleotide
  Sense strand starting at position 1603 of SEQ ID NO: 1881056
auaacaguucugugauaag

SEQ ID NO: 2014603 - RNA, 19 nt, Artificial Sequence
  Description of Artificial Sequence: Synthetic oligonucleotide
  Antisense strand to SEQ ID NO: 2014602
cuuaucacagaacuguuau

SEQ ID NO: 2014604 - RNA, 19 nt, Artificial Sequence
  Description of Artificial Sequence: Synthetic oligonucleotide
  Sense strand starting at position 1613 of SEQ ID NO: 1881056
ugugauaagcucugcauuu

SEQ ID NO: 2014605 - RNA, 19 nt, Artificial Sequence
  Description of Artificial Sequence: Synthetic oligonucleotide
  Antisense strand to SEQ ID NO: 2014604
aaaugcagagcuuaucaca

SEQ ID NO: 2014606 - RNA, 19 nt, Artificial Sequence
  Description of Artificial Sequence: Synthetic oligonucleotide
  Sense strand starting at position 1614 of SEQ ID NO: 1881056
gugauaagcucugcauuug

SEQ ID NO: 2014607 - RNA, 19 nt, Artificial Sequence
  Description of Artificial Sequence: Synthetic oligonucleotide
  Antisense strand to SEQ ID NO: 2014606
caaaugcagagcuuaucac

SEQ ID NO: 2014608 - RNA, 19 nt, Artificial Sequence
  Description of Artificial Sequence: Synthetic oligonucleotide
  Sense strand starting at position 1793 of SEQ ID NO: 1881056
ggucuaacuguuuaaauca

SEQ ID NO: 2014609 - RNA, 19 nt, Artificial Sequence
  Description of Artificial Sequence: Synthetic oligonucleotide
  Antisense strand to SEQ ID NO: 2014608
ugauuuaaacaguuagacc

SEQ ID NO: 2014610 - RNA, 19 nt, Artificial Sequence
  Description of Artificial Sequence: Synthetic oligonucleotide
  Sense strand starting at position 1876 of SEQ ID NO: 1881056
aauggaaggagguguacua

SEQ ID NO: 2014611 - RNA, 19 nt, Artificial Sequence
  Description of Artificial Sequence: Synthetic oligonucleotide
  Antisense strand to SEQ ID NO: 2014610
uaguacaccuccuuccauu

SEQ ID NO: 2014612 - RNA, 19 nt, Artificial Sequence
  Description of Artificial Sequence: Synthetic oligonucleotide
  Sense strand starting at position 2040 of SEQ ID NO: 1881056
gaauaaguacagugggagu

SEQ ID NO: 2014613 - RNA, 19 nt, Artificial Sequence
  Description of Artificial Sequence: Synthetic oligonucleotide
  Antisense strand to SEQ ID NO: 2014612
acucccacuguacuuauuc

SEQ ID NO: 2014614 - RNA, 19 nt, Artificial Sequence
  Description of Artificial Sequence: Synthetic oligonucleotide
  Sense strand starting at position 2073 of SEQ ID NO: 1881056
auuuccgcccauugucaua

SEQ ID NO: 2014615 - RNA, 19 nt, Artificial Sequence
  Description of Artificial Sequence: Synthetic oligonucleotide
  Antisense strand to SEQ ID NO: 2014614
uaugacaaugggcggaaau

SEQ ID NO: 2014616 - RNA, 19 nt, Artificial Sequence
  Description of Artificial Sequence: Synthetic oligonucleotide
  Sense strand starting at position 2149 of SEQ ID NO: 1881056
ugaaaucugcaucacaguu

SEQ ID NO: 2014617 - RNA, 19 nt, Artificial Sequence
  Description of Artificial Sequence: Synthetic oligonucleotide
  Antisense strand to SEQ ID NO: 2014616
aacugugaugcagauuuca

SEQ ID NO: 2014618 - RNA, 19 nt, Artificial Sequence
  Description of Artificial Sequence: Synthetic oligonucleotide
  Sense strand starting at position 2299 of SEQ ID NO: 1881056
ucaauaaagcuuggacacu

SEQ ID NO: 2014619 - RNA, 19 nt, Artificial Sequence
  Description of Artificial Sequence: Synthetic oligonucleotide
  Antisense strand to SEQ ID NO: 2014618
aguguccaagcuuuauuga

SEQ ID NO: 2014620 - RNA, 19 nt, Artificial Sequence
  Description of Artificial Sequence: Synthetic oligonucleotide
  Sense strand starting at position 2377 of SEQ ID NO: 1881056
guuuaaugaugucccagga

SEQ ID NO: 2014621 - RNA, 19 nt, Artificial Sequence
  Description of Artificial Sequence: Synthetic oligonucleotide
  Antisense strand to SEQ ID NO: 2014620
uccugggacaucauuaaac

SEQ ID NO: 2014622 - RNA, 19 nt, Artificial Sequence
  Description of Artificial Sequence: Synthetic oligonucleotide
  Sense strand starting at position 2842 of SEQ ID NO: 1881056
uguauagaaauuggagcau

SEQ ID NO: 2014623 - RNA, 19 nt, Artificial Sequence
  Description of Artificial Sequence: Synthetic oligonucleotide
  Antisense strand to SEQ ID NO: 2014622
augcuccaauuucuauaca

SEQ ID NO: 2014624 - RNA, 19 nt, Artificial Sequence
  Description of Artificial Sequence: Synthetic oligonucleotide
  Sense strand starting at position 2888 of SEQ ID NO: 1881056
gccagaaaccauuggaacu

SEQ ID NO: 2014625 - RNA, 19 nt, Artificial Sequence
  Description of Artificial Sequence: Synthetic oligonucleotide
  Antisense strand to SEQ ID NO: 2014624
aguuccaaugguuucuggc

SEQ ID NO: 2014626 - RNA, 19 nt, Artificial Sequence
  Description of Artificial Sequence: Synthetic oligonucleotide
  Sense strand starting at position 2928 of SEQ ID NO: 1881056
gcugaauguccuguugcuu

SEQ ID NO: 2014627 - RNA, 19 nt, Artificial Sequence
  Description of Artificial Sequence: Synthetic oligonucleotide
  Antisense strand to SEQ ID NO: 2014626
aagcaacaggacauucagc

SEQ ID NO: 2014628 - RNA, 19 nt, Artificial Sequence
  Description of Artificial Sequence: Synthetic oligonucleotide
  Sense strand starting at position 2954 of SEQ ID NO: 1881056
cgguguugccagaguagac

SEQ ID NO: 2014629 - RNA, 19 nt, Artificial Sequence
  Description of Artificial Sequence: Synthetic oligonucleotide
  Antisense strand to SEQ ID NO: 2014628
gucuacucuggcaacaccg

SEQ ID NO: 2014630 - RNA, 19 nt, Artificial Sequence
  Description of Artificial Sequence: Synthetic oligonucleotide
  Sense strand starting at position 3132 of SEQ ID NO: 1881056
gcaucacaugcagaagauu

SEQ ID NO: 2014631 - RNA, 19 nt, Artificial Sequence
  Description of Artificial Sequence: Synthetic oligonucleotide
  Antisense strand to SEQ ID NO: 2014630
aaucuucugcaugugaugc

SEQ ID NO: 2014632 - RNA, 19 nt, Artificial Sequence
  Description of Artificial Sequence: Synthetic oligonucleotide
  Sense strand starting at position 3199 of SEQ ID NO: 1881056
uguguaugauccucagaaa

SEQ ID NO: 2014633 - RNA, 19 nt, Artificial Sequence
  Description of Artificial Sequence: Synthetic oligonucleotide
  Antisense strand to SEQ ID NO: 2014632
uuucugaggaucauacaca

SEQ ID NO: 2014634 - RNA, 19 nt, Artificial Sequence
  Description of Artificial Sequence: Synthetic oligonucleotide
  Sense strand starting at position 3241 of SEQ ID NO: 1881056
accuaaauucugugaguaa

SEQ ID NO: 2014635 - RNA, 19 nt, Artificial Sequence
  Description of Artificial Sequence: Synthetic oligonucleotide
  Antisense strand to SEQ ID NO: 2014634
uuacucacagaauuuaggu

SEQ ID NO: 2014636 - RNA, 19 nt, Artificial Sequence
  Description of Artificial Sequence: Synthetic oligonucleotide
  Sense strand starting at position 3244 of SEQ ID NO: 1881056
uaaauucugugaguaaaga

SEQ ID NO: 2014637 - RNA, 19 nt, Artificial Sequence
  Description of Artificial Sequence: Synthetic oligonucleotide
  Antisense strand to SEQ ID NO: 2014636
ucuuuacucacagaauuua

SEQ ID NO: 2014638 - RNA, 19 nt, Artificial Sequence
  Description of Artificial Sequence: Synthetic oligonucleotide
  Sense strand starting at position 3303 of SEQ ID NO: 1881056
agucacaaccgucaacaau

SEQ ID NO: 2014639 - RNA, 19 nt, Artificial Sequence
  Description of Artificial Sequence: Synthetic oligonucleotide
  Antisense strand to SEQ ID NO: 2014638
auuguugacgguugugacu

SEQ ID NO: 2014640 - RNA, 19 nt, Artificial Sequence
  Description of Artificial Sequence: Synthetic oligonucleotide
  Sense strand starting at position 3424 of SEQ ID NO: 1881056
auaccaaacccguagacuu

SEQ ID NO: 2014641 - RNA, 19 nt, Artificial Sequence
  Description of Artificial Sequence: Synthetic oligonucleotide
  Antisense strand to SEQ ID NO: 2014640
aagucuacggguuugguau

SEQ ID NO: 2014642 - RNA, 19 nt, Artificial Sequence
  Description of Artificial Sequence: Synthetic oligonucleotide
  Sense strand starting at position 3711 of SEQ ID NO: 1881056
agaacagcugcauaaucuu

SEQ ID NO: 2014643 - RNA, 19 nt, Artificial Sequence
  Description of Artificial Sequence: Synthetic oligonucleotide
  Antisense strand to SEQ ID NO: 2014642
aagauuaugcagcuguucu

SEQ ID NO: 2014644 - RNA, 19 nt, Artificial Sequence
  Description of Artificial Sequence: Synthetic oligonucleotide
  Sense strand starting at position 3741 of SEQ ID NO: 1881056
uuuagagguuaaucuuacu

SEQ ID NO: 2014645 - RNA, 19 nt, Artificial Sequence
  Description of Artificial Sequence: Synthetic oligonucleotide
  Antisense strand to SEQ ID NO: 2014644
aguaagauuaaccucuaaa

SEQ ID NO: 2014646 - RNA, 19 nt, Artificial Sequence
  Description of Artificial Sequence: Synthetic oligonucleotide
  Sense strand starting at position 3794 of SEQ ID NO: 1881056
uuuggaauccaaggcaaua

SEQ ID NO: 2014647 - RNA, 19 nt, Artificial Sequence
  Description of Artificial Sequence: Synthetic oligonucleotide
  Antisense strand to SEQ ID NO: 2014646
uauugccuuggauuccaaa

SEQ ID NO: 2014648 - RNA, 19 nt, Artificial Sequence
  Description of Artificial Sequence: Synthetic oligonucleotide
  Sense strand starting at position 565 of SEQ ID NO: 1881057
uugaaauauagugguagaa

SEQ ID NO: 2014649 - RNA, 19 nt, Artificial Sequence
  Description of Artificial Sequence: Synthetic oligonucleotide
  Antisense strand to SEQ ID NO: 2014648
uucuaccacuauauuucaa

SEQ ID NO: 2014650 - RNA, 19 nt, Artificial Sequence
  Description of Artificial Sequence: Synthetic oligonucleotide
  Sense strand starting at position 577 of SEQ ID NO: 1881057
gguagaacccugugggaga

SEQ ID NO: 2014651 - RNA, 19 nt, Artificial Sequence
  Description of Artificial Sequence: Synthetic oligonucleotide
  Antisense strand to SEQ ID NO: 2014650
ucucccacaggguucuacc

SEQ ID NO: 2014652 - RNA, 19 nt, Artificial Sequence
  Description of Artificial Sequence: Synthetic oligonucleotide
  Sense strand starting at position 616 of SEQ ID NO: 1881057
ggacaauaagcuuaucgau

SEQ ID NO: 2014653 - RNA, 19 nt, Artificial Sequence
  Description of Artificial Sequence: Synthetic oligonucleotide
  Antisense strand to SEQ ID NO: 2014652
aucgauaagcuuauugucc

SEQ ID NO: 2014654 - RNA, 19 nt, Artificial Sequence
  Description of Artificial Sequence: Synthetic oligonucleotide
  Sense strand starting at position 628 of SEQ ID NO: 1881057
uaucgauggguuugaagau

SEQ ID NO: 2014655 - RNA, 19 nt, Artificial Sequence
  Description of Artificial Sequence: Synthetic oligonucleotide
  Antisense strand to SEQ ID NO: 2014654
aucuucaaacccaucgaua

SEQ ID NO: 2014656 - RNA, 19 nt, Artificial Sequence
  Description of Artificial Sequence: Synthetic oligonucleotide
  Sense strand starting at position 730 of SEQ ID NO: 1881057
auuaucauauaggaaggau

SEQ ID NO: 2014657 - RNA, 19 nt, Artificial Sequence
  Description of Artificial Sequence: Synthetic oligonucleotide
  Antisense strand to SEQ ID NO: 2014656
auccuuccuauaugauaau

SEQ ID NO: 2014658 - RNA, 19 nt, Artificial Sequence
  Description of Artificial Sequence: Synthetic oligonucleotide
  Sense strand starting at position 804 of SEQ ID NO: 1881057
ggaaccuccucugcucaaa

SEQ ID NO: 2014659 - RNA, 19 nt, Artificial Sequence
  Description of Artificial Sequence: Synthetic oligonucleotide
  Antisense strand to SEQ ID NO: 2014658
uuugagcagaggagguucc

SEQ ID NO: 2014660 - RNA, 19 nt, Artificial Sequence
  Description of Artificial Sequence: Synthetic oligonucleotide
  Sense strand starting at position 892 of SEQ ID NO: 1881057
gggcguuuaacuuacagga

SEQ ID NO: 2014661 - RNA, 19 nt, Artificial Sequence
  Description of Artificial Sequence: Synthetic oligonucleotide
  Antisense strand to SEQ ID NO: 2014660
uccuguaaguuaaacgccc

SEQ ID NO: 2014662 - RNA, 19 nt, Artificial Sequence
  Description of Artificial Sequence: Synthetic oligonucleotide
  Sense strand starting at position 971 of SEQ ID NO: 1881057
gagaaucagcaguggaaau

SEQ ID NO: 2014663 - RNA, 19 nt, Artificial Sequence
  Description of Artificial Sequence: Synthetic oligonucleotide
  Antisense strand to SEQ ID NO: 2014662
auuuccacugcugauucuc

SEQ ID NO: 2014664 - RNA, 19 nt, Artificial Sequence
  Description of Artificial Sequence: Synthetic oligonucleotide
  Sense strand starting at position 1117 of SEQ ID NO: 1881057
uagggugcagcugaucaua

SEQ ID NO: 2014665 - RNA, 19 nt, Artificial Sequence
  Description of Artificial Sequence: Synthetic oligonucleotide
  Antisense strand to SEQ ID NO: 2014664
uaugaucagcugcacccua

SEQ ID NO: 2014666 - RNA, 19 nt, Artificial Sequence
  Description of Artificial Sequence: Synthetic oligonucleotide
  Sense strand starting at position 1136 of SEQ ID NO: 1881057
ggagggacuuguguggaca

SEQ ID NO: 2014667 - RNA, 19 nt, Artificial Sequence
  Description of Artificial Sequence: Synthetic oligonucleotide
  Antisense strand to SEQ ID NO: 2014666
uguccacacaagucccucc

SEQ ID NO: 2014668 - RNA, 19 nt, Artificial Sequence
  Description of Artificial Sequence: Synthetic oligonucleotide
  Sense strand starting at position 1177 of SEQ ID NO: 1881057
cacagucugcaaggagaaa

SEQ ID NO: 2014669 - RNA, 19 nt, Artificial Sequence
  Description of Artificial Sequence: Synthetic oligonucleotide
  Antisense strand to SEQ ID NO: 2014668
uuucuccuugcagacugug

SEQ ID NO: 2014670 - RNA, 19 nt, Artificial Sequence
  Description of Artificial Sequence: Synthetic oligonucleotide
  Sense strand starting at position 1444 of SEQ ID NO: 1881057
ugaggcuuggaugguaauu

SEQ ID NO: 2014671 - RNA, 19 nt, Artificial Sequence
  Description of Artificial Sequence: Synthetic oligonucleotide
  Antisense strand to SEQ ID NO: 2014670
aauuaccauccaagccuca

SEQ ID NO: 2014672 - RNA, 19 nt, Artificial Sequence
  Description of Artificial Sequence: Synthetic oligonucleotide
  Sense strand starting at position 1481 of SEQ ID NO: 1881057
cagaucuguuguucuuuga

SEQ ID NO: 2014673 - RNA, 19 nt, Artificial Sequence
  Description of Artificial Sequence: Synthetic oligonucleotide
  Antisense strand to SEQ ID NO: 2014672
ucaaagaacaacagaucug

SEQ ID NO: 2014674 - RNA, 19 nt, Artificial Sequence
  Description of Artificial Sequence: Synthetic oligonucleotide
  Sense strand starting at position 1484 of SEQ ID NO: 1881057
aucuguuguucuuugaaag

SEQ ID NO: 2014675 - RNA, 19 nt, Artificial Sequence
  Description of Artificial Sequence: Synthetic oligonucleotide
  Antisense strand to SEQ ID NO: 2014674
cuuucaaagaacaacagau

SEQ ID NO: 2014676 - RNA, 19 nt, Artificial Sequence
  Description of Artificial Sequence: Synthetic oligonucleotide
  Sense strand starting at position 1495 of SEQ ID NO: 1881057
uuugaaagcugacuuaaag

SEQ ID NO: 2014677 - RNA, 19 nt, Artificial Sequence
  Description of Artificial Sequence: Synthetic oligonucleotide
  Antisense strand to SEQ ID NO: 2014676
cuuuaagucagcuuucaaa

SEQ ID NO: 2014678 - RNA, 19 nt, Artificial Sequence
  Description of Artificial Sequence: Synthetic oligonucleotide
  Sense strand starting at position 1617 of SEQ ID NO: 1881057
cauuaucaacuuugggagu

SEQ ID NO: 2014679 - RNA, 19 nt, Artificial Sequence
  Description of Artificial Sequence: Synthetic oligonucleotide
  Antisense strand to SEQ ID NO: 2014678
acucccaaaguugauaaug

SEQ ID NO: 2014680 - RNA, 19 nt, Artificial Sequence
  Description of Artificial Sequence: Synthetic oligonucleotide
  Sense strand starting at position 1628 of SEQ ID NO: 1881057
uugggaguugagugaauca

SEQ ID NO: 2014681 - RNA, 19 nt, Artificial Sequence
  Description of Artificial Sequence: Synthetic oligonucleotide
  Antisense strand to SEQ ID NO: 2014680
ugauucacucaacucccaa

SEQ ID NO: 2014682 - RNA, 19 nt, Artificial Sequence
  Description of Artificial Sequence: Synthetic oligonucleotide
  Sense strand starting at position 1665 of SEQ ID NO: 1881057
gcauuauuguccuugagga

SEQ ID NO: 2014683 - RNA, 19 nt, Artificial Sequence
  Description of Artificial Sequence: Synthetic oligonucleotide
  Antisense strand to SEQ ID NO: 2014682
uccucaaggacaauaaugc

SEQ ID NO: 2014684 - RNA, 19 nt, Artificial Sequence
  Description of Artificial Sequence: Synthetic oligonucleotide
  Sense strand starting at position 1666 of SEQ ID NO: 1881057
cauuauuguccuugaggaa

SEQ ID NO: 2014685 - RNA, 19 nt, Artificial Sequence
  Description of Artificial Sequence: Synthetic oligonucleotide
  Antisense strand to SEQ ID NO: 2014684
uuccucaaggacaauaaug

SEQ ID NO: 2014686 - RNA, 19 nt, Artificial Sequence
  Description of Artificial Sequence: Synthetic oligonucleotide
  Sense strand starting at position 1719 of SEQ ID NO: 1881057
ccgucucuucgucuguaaa

SEQ ID NO: 2014687 - RNA, 19 nt, Artificial Sequence
  Description of Artificial Sequence: Synthetic oligonucleotide
  Antisense strand to SEQ ID NO: 2014686
uuuacagacgaagagacgg

SEQ ID NO: 2014688 - RNA, 19 nt, Artificial Sequence
  Description of Artificial Sequence: Synthetic oligonucleotide
  Sense strand starting at position 1741 of SEQ ID NO: 1881057
ggaugacaaugccuccuau

SEQ ID NO: 2014689 - RNA, 19 nt, Artificial Sequence
  Description of Artificial Sequence: Synthetic oligonucleotide
  Antisense strand to SEQ ID NO: 2014688
auaggaggcauugucaucc

SEQ ID NO: 2014690 - RNA, 19 nt, Artificial Sequence
  Description of Artificial Sequence: Synthetic oligonucleotide
  Sense strand starting at position 1780 of SEQ ID NO: 1881057
cagaguuaacaguagccua

SEQ ID NO: 2014691 - RNA, 19 nt, Artificial Sequence
  Description of Artificial Sequence: Synthetic oligonucleotide
  Antisense strand to SEQ ID NO: 2014690
uaggcuacuguuaacucug

SEQ ID NO: 2014692 - RNA, 19 nt, Artificial Sequence
  Description of Artificial Sequence: Synthetic oligonucleotide
  Sense strand starting at position 2071 of SEQ ID NO: 1881057
uugacaucccauuggucaa

SEQ ID NO: 2014693 - RNA, 19 nt, Artificial Sequence
  Description of Artificial Sequence: Synthetic oligonucleotide
  Antisense strand to SEQ ID NO: 2014692
uugaccaaugggaugucaa

SEQ ID NO: 2014694 - RNA, 19 nt, Artificial Sequence
  Description of Artificial Sequence: Synthetic oligonucleotide
  Sense strand starting at position 2792 of SEQ ID NO: 1881057
ccuugcugucuccaaagau

SEQ ID NO: 2014695 - RNA, 19 nt, Artificial Sequence
  Description of Artificial Sequence: Synthetic oligonucleotide
  Antisense strand to SEQ ID NO: 2014694
aucuuuggagacagcaagg

SEQ ID NO: 2014696 - RNA, 19 nt, Artificial Sequence
  Description of Artificial Sequence: Synthetic oligonucleotide
  Sense strand starting at position 2806 of SEQ ID NO: 1881057
aagauuucuuaguaaggga

SEQ ID NO: 2014697 - RNA, 19 nt, Artificial Sequence
  Description of Artificial Sequence: Synthetic oligonucleotide
  Antisense strand to SEQ ID NO: 2014696
ucccuuacuaagaaaucuu

SEQ ID NO: 2014698 - RNA, 19 nt, Artificial Sequence
  Description of Artificial Sequence: Synthetic oligonucleotide
  Sense strand starting at position 2814 of SEQ ID NO: 1881057
uuaguaagggaguggucuu

SEQ ID NO: 2014699 - RNA, 19 nt, Artificial Sequence
  Description of Artificial Sequence: Synthetic oligonucleotide
  Antisense strand to SEQ ID NO: 2014698
aagaccacucccuuacuaa

SEQ ID NO: 2014700 - RNA, 19 nt, Artificial Sequence
  Description of Artificial Sequence: Synthetic oligonucleotide
  Sense strand starting at position 2815 of SEQ ID NO: 1881057
uaguaagggaguggucuuu

SEQ ID NO: 2014701 - RNA, 19 nt, Artificial Sequence
  Description of Artificial Sequence: Synthetic oligonucleotide
  Antisense strand to SEQ ID NO: 2014700
aaagaccacucccuuacua

SEQ ID NO: 2014702 - RNA, 19 nt, Artificial Sequence
  Description of Artificial Sequence: Synthetic oligonucleotide
  Sense strand starting at position 2821 of SEQ ID NO: 1881057
gggaguggucuuuacuucu

SEQ ID NO: 2014703 - RNA, 19 nt, Artificial Sequence
  Description of Artificial Sequence: Synthetic oligonucleotide
  Antisense strand to SEQ ID NO: 2014702
agaaguaaagaccacuccc

SEQ ID NO: 2014704 - RNA, 19 nt, Artificial Sequence
  Description of Artificial Sequence: Synthetic oligonucleotide
  Sense strand starting at position 2824 of SEQ ID NO: 1881057
aguggucuuuacuucuaaa

SEQ ID NO: 2014705 - RNA, 19 nt, Artificial Sequence
  Description of Artificial Sequence: Synthetic oligonucleotide
  Antisense strand to SEQ ID NO: 2014704
uuuagaaguaaagaccacu

SEQ ID NO: 2014706 - RNA, 19 nt, Artificial Sequence
  Description of Artificial Sequence: Synthetic oligonucleotide
  Sense strand starting at position 2924 of SEQ ID NO: 1881057
uguaauaaagugugauaac

SEQ ID NO: 2014707 - RNA, 19 nt, Artificial Sequence
  Description of Artificial Sequence: Synthetic oligonucleotide
  Antisense strand to SEQ ID NO: 2014706
guuaucacacuuuauuaca

SEQ ID NO: 2014708 - RNA, 19 nt, Artificial Sequence
  Description of Artificial Sequence: Synthetic oligonucleotide
  Sense strand starting at position 2970 of SEQ ID NO: 1881057
uuucuuggccuugggauaa

SEQ ID NO: 2014709 - RNA, 19 nt, Artificial Sequence
  Description of Artificial Sequence: Synthetic oligonucleotide
  Antisense strand to SEQ ID NO: 2014708
uuaucccaaggccaagaaa

SEQ ID NO: 2014710 - RNA, 19 nt, Artificial Sequence
  Description of Artificial Sequence: Synthetic oligonucleotide
  Sense strand starting at position 3227 of SEQ ID NO: 1881057
gauauuaggcuugguggga

SEQ ID NO: 2014711 - RNA, 19 nt, Artificial Sequence
  Description of Artificial Sequence: Synthetic oligonucleotide
  Antisense strand to SEQ ID NO: 2014710
ucccaccaagccuaauauc

SEQ ID NO: 2014712 - RNA, 19 nt, Artificial Sequence
  Description of Artificial Sequence: Synthetic oligonucleotide
  Sense strand starting at position 3231 of SEQ ID NO: 1881057
uuaggcuuggugggagauu

SEQ ID NO: 2014713 - RNA, 19 nt, Artificial Sequence
  Description of Artificial Sequence: Synthetic oligonucleotide
  Antisense strand to SEQ ID NO: 2014712
aaucucccaccaagccuaa

SEQ ID NO: 2014714 - RNA, 19 nt, Artificial Sequence
  Description of Artificial Sequence: Synthetic oligonucleotide
  Sense strand starting at position 3394 of SEQ ID NO: 1881057
aaagaauacugcucagcga

SEQ ID NO: 2014715 - RNA, 19 nt, Artificial Sequence
  Description of Artificial Sequence: Synthetic oligonucleotide
  Antisense strand to SEQ ID NO: 2014714
ucgcugagcaguauucuuu

SEQ ID NO: 2014716 - RNA, 19 nt, Artificial Sequence
  Description of Artificial Sequence: Synthetic oligonucleotide
  Sense strand starting at position 3395 of SEQ ID NO: 1881057
aagaauacugcucagcgau

SEQ ID NO: 2014717 - RNA, 19 nt, Artificial Sequence
  Description of Artificial Sequence: Synthetic oligonucleotide
  Antisense strand to SEQ ID NO: 2014716
aucgcugagcaguauucuu

SEQ ID NO: 2014718 - RNA, 19 nt, Artificial Sequence
  Description of Artificial Sequence: Synthetic oligonucleotide
  Sense strand starting at position 3443 of SEQ ID NO: 1881057
aaccauuaugccgagugaa

SEQ ID NO: 2014719 - RNA, 19 nt, Artificial Sequence
  Description of Artificial Sequence: Synthetic oligonucleotide
  Antisense strand to SEQ ID NO: 2014718
uucacucggcauaaugguu

SEQ ID NO: 2014720 - RNA, 19 nt, Artificial Sequence
  Description of Artificial Sequence: Synthetic oligonucleotide
  Sense strand starting at position 3623 of SEQ ID NO: 1881057
ugaugauaauguucuguac

SEQ ID NO: 2014721 - RNA, 19 nt, Artificial Sequence
  Description of Artificial Sequence: Synthetic oligonucleotide
  Antisense strand to SEQ ID NO: 2014720
guacagaacauuaucauca

SEQ ID NO: 2014722 - RNA, 19 nt, Artificial Sequence
  Description of Artificial Sequence: Synthetic oligonucleotide
  Sense strand starting at position 3626 of SEQ ID NO: 1881057
ugauaauguucuguaccuc

SEQ ID NO: 2014723 - RNA, 19 nt, Artificial Sequence
  Description of Artificial Sequence: Synthetic oligonucleotide
  Antisense strand to SEQ ID NO: 2014722
gagguacagaacauuauca

SEQ ID NO: 2014724 - RNA, 19 nt, Artificial Sequence
  Description of Artificial Sequence: Synthetic oligonucleotide
  Sense strand starting at position 3635 of SEQ ID NO: 1881057
ucuguaccucgacagaguu

SEQ ID NO: 2014725 - RNA, 19 nt, Artificial Sequence
  Description of Artificial Sequence: Synthetic oligonucleotide
  Antisense strand to SEQ ID NO: 2014724
aacucugucgagguacaga

SEQ ID NO: 2014726 - RNA, 19 nt, Artificial Sequence
  Description of Artificial Sequence: Synthetic oligonucleotide
  Sense strand starting at position 3743 of SEQ ID NO: 1881057
ggcagaggacuuugaguag

SEQ ID NO: 2014727 - RNA, 19 nt, Artificial Sequence
  Description of Artificial Sequence: Synthetic oligonucleotide
  Antisense strand to SEQ ID NO: 2014726
cuacucaaaguccucugcc

SEQ ID NO: 2014728 - RNA, 19 nt, Artificial Sequence
  Description of Artificial Sequence: Synthetic oligonucleotide
  Sense strand starting at position 300 of SEQ ID NO: 1881058
cugugaaauguguggaaca

SEQ ID NO: 2014729 - RNA, 19 nt, Artificial Sequence
  Description of Artificial Sequence: Synthetic oligonucleotide
  Antisense strand to SEQ ID NO: 2014728
uguuccacacauuucacag

SEQ ID NO: 2014730 - RNA, 19 nt, Artificial Sequence
  Description of Artificial Sequence: Synthetic oligonucleotide
  Sense strand starting at position 493 of SEQ ID NO: 1881058
guguguuugaaacacucca

SEQ ID NO: 2014731 - RNA, 19 nt, Artificial Sequence
  Description of Artificial Sequence: Synthetic oligonucleotide
  Antisense strand to SEQ ID NO: 2014730
uggaguguuucaaacacac

SEQ ID NO: 2014732 - RNA, 19 nt, Artificial Sequence
  Description of Artificial Sequence: Synthetic oligonucleotide
  Sense strand starting at position 550 of SEQ ID NO: 1881058
cuagauuggugggucucaa

SEQ ID NO: 2014733 - RNA, 19 nt, Artificial Sequence
  Description of Artificial Sequence: Synthetic oligonucleotide
  Antisense strand to SEQ ID NO: 2014732
uugagacccaccaaucuag

SEQ ID NO: 2014734 - RNA, 19 nt, Artificial Sequence
  Description of Artificial Sequence: Synthetic oligonucleotide
  Sense strand starting at position 762 of SEQ ID NO: 1881058
agcuguaaugcuuuguguu

SEQ ID NO: 2014735 - RNA, 19 nt, Artificial Sequence
  Description of Artificial Sequence: Synthetic oligonucleotide
  Antisense strand to SEQ ID NO: 2014734
aacacaaagcauuacagcu

SEQ ID NO: 2014736 - RNA, 19 nt, Artificial Sequence
  Description of Artificial Sequence: Synthetic oligonucleotide
  Sense strand starting at position 851 of SEQ ID NO: 1881058
cucacuguagcucauuaua

SEQ ID NO: 2014737 - RNA, 19 nt, Artificial Sequence
  Description of Artificial Sequence: Synthetic oligonucleotide
  Antisense strand to SEQ ID NO: 2014736
uauaaugagcuacagugag

SEQ ID NO: 2014738 - RNA, 19 nt, Artificial Sequence
  Description of Artificial Sequence: Synthetic oligonucleotide
  Sense strand starting at position 1029 of SEQ ID NO: 1881058
uuguuaaagacguagaauc

SEQ ID NO: 2014739 - RNA, 19 nt, Artificial Sequence
  Description of Artificial Sequence: Synthetic oligonucleotide
  Antisense strand to SEQ ID NO: 2014738
gauucuacgucuuuaacaa

SEQ ID NO: 2014740 - RNA, 19 nt, Artificial Sequence
  Description of Artificial Sequence: Synthetic oligonucleotide
  Sense strand starting at position 1112 of SEQ ID NO: 1881058
gaagcacugcucuagagag

SEQ ID NO: 2014741 - RNA, 19 nt, Artificial Sequence
  Description of Artificial Sequence: Synthetic oligonucleotide
  Antisense strand to SEQ ID NO: 2014740
cucucuagagcagugcuuc

SEQ ID NO: 2014742 - RNA, 19 nt, Artificial Sequence
  Description of Artificial Sequence: Synthetic oligonucleotide
  Sense strand starting at position 1187 of SEQ ID NO: 1881058
ugcaaauucccucaggaua

SEQ ID NO: 2014743 - RNA, 19 nt, Artificial Sequence
  Description of Artificial Sequence: Synthetic oligonucleotide
  Antisense strand to SEQ ID NO: 2014742
uauccugagggaauuugca

SEQ ID NO: 2014744 - RNA, 19 nt, Artificial Sequence
  Description of Artificial Sequence: Synthetic oligonucleotide
  Sense strand starting at position 1200 of SEQ ID NO: 1881058
aggauaggcuucuugauua

SEQ ID NO: 2014745 - RNA, 19 nt, Artificial Sequence
  Description of Artificial Sequence: Synthetic oligonucleotide
  Antisense strand to SEQ ID NO: 2014744
uaaucaagaagccuauccu

SEQ ID NO: 2014746 - RNA, 19 nt, Artificial Sequence
  Description of Artificial Sequence: Synthetic oligonucleotide
  Sense strand starting at position 1309 of SEQ ID NO: 1881058
gaguguuaucuccaaggua

SEQ ID NO: 2014747 - RNA, 19 nt, Artificial Sequence
  Description of Artificial Sequence: Synthetic oligonucleotide
  Antisense strand to SEQ ID NO: 2014746
uaccuuggagauaacacuc

SEQ ID NO: 2014748 - RNA, 19 nt, Artificial Sequence
  Description of Artificial Sequence: Synthetic oligonucleotide
  Sense strand starting at position 1442 of SEQ ID NO: 1881058
ucugaaucuuauguuggaa

SEQ ID NO: 2014749 - RNA, 19 nt, Artificial Sequence
  Description of Artificial Sequence: Synthetic oligonucleotide
  Antisense strand to SEQ ID NO: 2014748
uuccaacauaagauucaga

SEQ ID NO: 2014750 - RNA, 19 nt, Artificial Sequence
  Description of Artificial Sequence: Synthetic oligonucleotide
  Sense strand starting at position 1445 of SEQ ID NO: 1881058
gaaucuuauguuggaaugu

SEQ ID NO: 2014751 - RNA, 19 nt, Artificial Sequence
  Description of Artificial Sequence: Synthetic oligonucleotide
  Antisense strand to SEQ ID NO: 2014750
acauuccaacauaagauuc

SEQ ID NO: 2014752 - RNA, 19 nt, Artificial Sequence
  Description of Artificial Sequence: Synthetic oligonucleotide
  Sense strand starting at position 1454 of SEQ ID NO: 1881058
guuggaaugugauccucag

SEQ ID NO: 2014753 - RNA, 19 nt, Artificial Sequence
  Description of Artificial Sequence: Synthetic oligonucleotide
  Antisense strand to SEQ ID NO: 2014752
cugaggaucacauuccaac

SEQ ID NO: 2014754 - RNA, 19 nt, Artificial Sequence
  Description of Artificial Sequence: Synthetic oligonucleotide
  Sense strand starting at position 1708 of SEQ ID NO: 1881058
gccacugccaggcagaaau

SEQ ID NO: 2014755 - RNA, 19 nt, Artificial Sequence
  Description of Artificial Sequence: Synthetic oligonucleotide
  Antisense strand to SEQ ID NO: 2014754
auuucugccuggcaguggc

SEQ ID NO: 2014756 - RNA, 19 nt, Artificial Sequence
  Description of Artificial Sequence: Synthetic oligonucleotide
  Sense strand starting at position 1831 of SEQ ID NO: 1881058
aauauaucucauggguagu

SEQ ID NO: 2014757 - RNA, 19 nt, Artificial Sequence
  Description of Artificial Sequence: Synthetic oligonucleotide
  Antisense strand to SEQ ID NO: 2014756
acuacccaugagauauauu

SEQ ID NO: 2014758 - RNA, 19 nt, Artificial Sequence
  Description of Artificial Sequence: Synthetic oligonucleotide
  Sense strand starting at position 1833 of SEQ ID NO: 1881058
uauaucucauggguaguaa

SEQ ID NO: 2014759 - RNA, 19 nt, Artificial Sequence
  Description of Artificial Sequence: Synthetic oligonucleotide
  Antisense strand to SEQ ID NO: 2014758
uuacuacccaugagauaua

SEQ ID NO: 2014760 - RNA, 19 nt, Artificial Sequence
  Description of Artificial Sequence: Synthetic oligonucleotide
  Sense strand starting at position 1834 of SEQ ID NO: 1881058
auaucucauggguaguaau

SEQ ID NO: 2014761 - RNA, 19 nt, Artificial Sequence
  Description of Artificial Sequence: Synthetic oligonucleotide
  Antisense strand to SEQ ID NO: 2014760
auuacuacccaugagauau

SEQ ID NO: 2014762 - RNA, 19 nt, Artificial Sequence
  Description of Artificial Sequence: Synthetic oligonucleotide
  Sense strand starting at position 1857 of SEQ ID NO: 1881058
uuagacuugcuugguauuu

SEQ ID NO: 2014763 - RNA, 19 nt, Artificial Sequence
  Description of Artificial Sequence: Synthetic oligonucleotide
  Antisense strand to SEQ ID NO: 2014762
aaauaccaagcaagucuaa

SEQ ID NO: 2014764 - RNA, 19 nt, Artificial Sequence
  Description of Artificial Sequence: Synthetic oligonucleotide
  Sense strand starting at position 2145 of SEQ ID NO: 1881058
gccucaccacgguagaaau

SEQ ID NO: 2014765 - RNA, 19 nt, Artificial Sequence
  Description of Artificial Sequence: Synthetic oligonucleotide
  Antisense strand to SEQ ID NO: 2014764
auuucuaccguggugaggc

SEQ ID NO: 2014766 - RNA, 19 nt, Artificial Sequence
  Description of Artificial Sequence: Synthetic oligonucleotide
  Sense strand starting at position 2183 of SEQ ID NO: 1881058
uuuaaugcucuugagaaau

SEQ ID NO: 2014767 - RNA, 19 nt, Artificial Sequence
  Description of Artificial Sequence: Synthetic oligonucleotide
  Antisense strand to SEQ ID NO: 2014766
auuucucaagagcauuaaa

SEQ ID NO: 2014768 - RNA, 19 nt, Artificial Sequence
  Description of Artificial Sequence: Synthetic oligonucleotide
  Sense strand starting at position 2189 of SEQ ID NO: 1881058
gcucuugagaaauggucaa

SEQ ID NO: 2014769 - RNA, 19 nt, Artificial Sequence
  Description of Artificial Sequence: Synthetic oligonucleotide
  Antisense strand to SEQ ID NO: 2014768
uugaccauuucucaagagc

SEQ ID NO: 2014770 - RNA, 19 nt, Artificial Sequence
  Description of Artificial Sequence: Synthetic oligonucleotide
  Sense strand starting at position 2202 of SEQ ID NO: 1881058
ggucaaguugaacaucuuu

SEQ ID NO: 2014771 - RNA, 19 nt, Artificial Sequence
  Description of Artificial Sequence: Synthetic oligonucleotide
  Antisense strand to SEQ ID NO: 2014770
aaagauguucaacuugacc

SEQ ID NO: 2014772 - RNA, 19 nt, Artificial Sequence
  Description of Artificial Sequence: Synthetic oligonucleotide
  Sense strand starting at position 2207 of SEQ ID NO: 1881058
aguugaacaucuuugggaa

SEQ ID NO: 2014773 - RNA, 19 nt, Artificial Sequence
  Description of Artificial Sequence: Synthetic oligonucleotide
  Antisense strand to SEQ ID NO: 2014772
uucccaaagauguucaacu

SEQ ID NO: 2014774 - RNA, 19 nt, Artificial Sequence
  Description of Artificial Sequence: Synthetic oligonucleotide
  Sense strand starting at position 2208 of SEQ ID NO: 1881058
guugaacaucuuugggaau

SEQ ID NO: 2014775 - RNA, 19 nt, Artificial Sequence
  Description of Artificial Sequence: Synthetic oligonucleotide
  Antisense strand to SEQ ID NO: 2014774
auucccaaagauguucaac

SEQ ID NO: 2014776 - RNA, 19 nt, Artificial Sequence
  Description of Artificial Sequence: Synthetic oligonucleotide
  Sense strand starting at position 2214 of SEQ ID NO: 1881058
caucuuugggaaugaguca

SEQ ID NO: 2014777 - RNA, 19 nt, Artificial Sequence
  Description of Artificial Sequence: Synthetic oligonucleotide
  Antisense strand to SEQ ID NO: 2014776
ugacucauucccaaagaug

SEQ ID NO: 2014778 - RNA, 19 nt, Artificial Sequence
  Description of Artificial Sequence: Synthetic oligonucleotide
  Sense strand starting at position 2228 of SEQ ID NO: 1881058
agucaaucucaggaggcuu

SEQ ID NO: 2014779 - RNA, 19 nt, Artificial Sequence
  Description of Artificial Sequence: Synthetic oligonucleotide
  Antisense strand to SEQ ID NO: 2014778
aagccuccugagauugacu

SEQ ID NO: 2014780 - RNA, 19 nt, Artificial Sequence
  Description of Artificial Sequence: Synthetic oligonucleotide
  Sense strand starting at position 2256 of SEQ ID NO: 1881058
aaguguggucagcagaaga

SEQ ID NO: 2014781 - RNA, 19 nt, Artificial Sequence
  Description of Artificial Sequence: Synthetic oligonucleotide
  Antisense strand to SEQ ID NO: 2014780
ucuucugcugaccacacuu

SEQ ID NO: 2014782 - RNA, 19 nt, Artificial Sequence
  Description of Artificial Sequence: Synthetic oligonucleotide
  Sense strand starting at position 2286 of SEQ ID NO: 1881058
agucccaauuaguccuaau

SEQ ID NO: 2014783 - RNA, 19 nt, Artificial Sequence
  Description of Artificial Sequence: Synthetic oligonucleotide
  Antisense strand to SEQ ID NO: 2014782
auuaggacuaauugggacu

SEQ ID NO: 2014784 - RNA, 19 nt, Artificial Sequence
  Description of Artificial Sequence: Synthetic oligonucleotide
  Sense strand starting at position 2388 of SEQ ID NO: 1881058
gguuaaggaccuugagauu

SEQ ID NO: 2014785 - RNA, 19 nt, Artificial Sequence
  Description of Artificial Sequence: Synthetic oligonucleotide
  Antisense strand to SEQ ID NO: 2014784
aaucucaagguccuuaacc

SEQ ID NO: 2014786 - RNA, 19 nt, Artificial Sequence
  Description of Artificial Sequence: Synthetic oligonucleotide
  Sense strand starting at position 2405 of SEQ ID NO: 1881058
uugggagcuuauccuagau

SEQ ID NO: 2014787 - RNA, 19 nt, Artificial Sequence
  Description of Artificial Sequence: Synthetic oligonucleotide
  Antisense strand to SEQ ID NO: 2014786
aucuaggauaagcucccaa

SEQ ID NO: 2014788 - RNA, 19 nt, Artificial Sequence
  Description of Artificial Sequence: Synthetic oligonucleotide
  Sense strand starting at position 2435 of SEQ ID NO: 1881058
gcccaaugucaucaaagga

SEQ ID NO: 2014789 - RNA, 19 nt, Artificial Sequence
  Description of Artificial Sequence: Synthetic oligonucleotide
  Antisense strand to SEQ ID NO: 2014788
uccuuugaugacauugggc

SEQ ID NO: 2014790 - RNA, 19 nt, Artificial Sequence
  Description of Artificial Sequence: Synthetic oligonucleotide
  Sense strand starting at position 2495 of SEQ ID NO: 1881058
gagagauggcagugucaga

SEQ ID NO: 2014791 - RNA, 19 nt, Artificial Sequence
  Description of Artificial Sequence: Synthetic oligonucleotide
  Antisense strand to SEQ ID NO: 2014790
ucugacacugccaucucuc

SEQ ID NO: 2014792 - RNA, 19 nt, Artificial Sequence
  Description of Artificial Sequence: Synthetic oligonucleotide
  Sense strand starting at position 2550 of SEQ ID NO: 1881058
ggagcuaagaaaugagcau

SEQ ID NO: 2014793 - RNA, 19 nt, Artificial Sequence
  Description of Artificial Sequence: Synthetic oligonucleotide
  Antisense strand to SEQ ID NO: 2014792
augcucauuucuuagcucc

SEQ ID NO: 2014794 - RNA, 19 nt, Artificial Sequence
  Description of Artificial Sequence: Synthetic oligonucleotide
  Sense strand starting at position 2562 of SEQ ID NO: 1881058
ugagcauagucucuagaag

SEQ ID NO: 2014795 - RNA, 19 nt, Artificial Sequence
  Description of Artificial Sequence: Synthetic oligonucleotide
  Antisense strand to SEQ ID NO: 2014794
cuucuagagacuaugcuca

SEQ ID NO: 2014796 - RNA, 19 nt, Artificial Sequence
  Description of Artificial Sequence: Synthetic oligonucleotide
  Sense strand starting at position 2595 of SEQ ID NO: 1881058
gagacagauucuguccuag

SEQ ID NO: 2014797 - RNA, 19 nt, Artificial Sequence
  Description of Artificial Sequence: Synthetic oligonucleotide
  Antisense strand to SEQ ID NO: 2014796
cuaggacagaaucugucuc

SEQ ID NO: 2014798 - RNA, 19 nt, Artificial Sequence
  Description of Artificial Sequence: Synthetic oligonucleotide
  Sense strand starting at position 3025 of SEQ ID NO: 1881058
guuugaagaguauagaugu

SEQ ID NO: 2014799 - RNA, 19 nt, Artificial Sequence
  Description of Artificial Sequence: Synthetic oligonucleotide
  Antisense strand to SEQ ID NO: 2014798
acaucuauacucuucaaac

SEQ ID NO: 2014800 - RNA, 19 nt, Artificial Sequence
  Description of Artificial Sequence: Synthetic oligonucleotide
  Sense strand starting at position 3197 of SEQ ID NO: 1881058
cucccugugggauggauau

SEQ ID NO: 2014801 - RNA, 19 nt, Artificial Sequence
  Description of Artificial Sequence: Synthetic oligonucleotide
  Antisense strand to SEQ ID NO: 2014800
auauccaucccacagggag

SEQ ID NO: 2014802 - RNA, 19 nt, Artificial Sequence
  Description of Artificial Sequence: Synthetic oligonucleotide
  Sense strand starting at position 3647 of SEQ ID NO: 1881058
uguguuuauuuagugccua

SEQ ID NO: 2014803 - RNA, 19 nt, Artificial Sequence
  Description of Artificial Sequence: Synthetic oligonucleotide
  Antisense strand to SEQ ID NO: 2014802
uaggcacuaaauaaacaca

SEQ ID NO: 2014804 - RNA, 19 nt, Artificial Sequence
  Description of Artificial Sequence: Synthetic oligonucleotide
  Sense strand starting at position 3841 of SEQ ID NO: 1881058
cugagacuccuaggucaga

SEQ ID NO: 2014805 - RNA, 19 nt, Artificial Sequence
  Description of Artificial Sequence: Synthetic oligonucleotide
  Antisense strand to SEQ ID NO: 2014804
ucugaccuaggagucucag

SEQ ID NO: 2014806 - RNA, 19 nt, Artificial Sequence
  Description of Artificial Sequence: Synthetic oligonucleotide
  Sense strand starting at position 3982 of SEQ ID NO: 1881058
ugucauagccaaggaacau

SEQ ID NO: 2014807 - RNA, 19 nt, Artificial Sequence
  Description of Artificial Sequence: Synthetic oligonucleotide
  Antisense strand to SEQ ID NO: 2014806
auguuccuuggcuaugaca

SEQ ID NO: 2014808 - RNA, 19 nt, Artificial Sequence
  Description of Artificial Sequence: Synthetic oligonucleotide
  Sense strand starting at position 116 of SEQ ID NO: 1881059
cccauaagauggucacacu

SEQ ID NO: 2014809 - RNA, 19 nt, Artificial Sequence
  Description of Artificial Sequence: Synthetic oligonucleotide
  Antisense strand to SEQ ID NO: 2014808
agugugaccaucuuauggg

SEQ ID NO: 2014810 - RNA, 19 nt, Artificial Sequence
  Description of Artificial Sequence: Synthetic oligonucleotide
  Sense strand starting at position 224 of SEQ ID NO: 1881059
acaacuugccuggaguuaa

SEQ ID NO: 2014811 - RNA, 19 nt, Artificial Sequence
  Description of Artificial Sequence: Synthetic oligonucleotide
  Antisense strand to SEQ ID NO: 2014810
uuaacuccaggcaaguugu

SEQ ID NO: 2014812 - RNA, 19 nt, Artificial Sequence
  Description of Artificial Sequence: Synthetic oligonucleotide
  Sense strand starting at position 238 of SEQ ID NO: 1881059
guuaaagucccuuaguuaa

SEQ ID NO: 2014813 - RNA, 19 nt, Artificial Sequence
  Description of Artificial Sequence: Synthetic oligonucleotide
  Antisense strand to SEQ ID NO: 2014812
uuaacuaagggacuuuaac

SEQ ID NO: 2014814 - RNA, 19 nt, Artificial Sequence
  Description of Artificial Sequence: Synthetic oligonucleotide
  Sense strand starting at position 278 of SEQ ID NO: 1881059
guucuuuaauaggcagaaa

SEQ ID NO: 2014815 - RNA, 19 nt, Artificial Sequence
  Description of Artificial Sequence: Synthetic oligonucleotide
  Antisense strand to SEQ ID NO: 2014814
uuucugccuauuaaagaac

SEQ ID NO: 2014816 - RNA, 19 nt, Artificial Sequence
  Description of Artificial Sequence: Synthetic oligonucleotide
  Sense strand starting at position 324 of SEQ ID NO: 1881059
auuucuauccuguguugua

SEQ ID NO: 2014817 - RNA, 19 nt, Artificial Sequence
  Description of Artificial Sequence: Synthetic oligonucleotide
  Antisense strand to SEQ ID NO: 2014816
uacaacacaggauagaaau

SEQ ID NO: 2014818 - RNA, 19 nt, Artificial Sequence
  Description of Artificial Sequence: Synthetic oligonucleotide
  Sense strand starting at position 377 of SEQ ID NO: 1881059
cagagauucguguauccac

SEQ ID NO: 2014819 - RNA, 19 nt, Artificial Sequence
  Description of Artificial Sequence: Synthetic oligonucleotide
  Antisense strand to SEQ ID NO: 2014818
guggauacacgaaucucug

SEQ ID NO: 2014820 - RNA, 19 nt, Artificial Sequence
  Description of Artificial Sequence: Synthetic oligonucleotide
  Sense strand starting at position 419 of SEQ ID NO: 1881059
agacuauaccgauggcaug

SEQ ID NO: 2014821 - RNA, 19 nt, Artificial Sequence
  Description of Artificial Sequence: Synthetic oligonucleotide
  Antisense strand to SEQ ID NO: 2014820
caugccaucgguauagucu

SEQ ID NO: 2014822 - RNA, 19 nt, Artificial Sequence
  Description of Artificial Sequence: Synthetic oligonucleotide
  Sense strand starting at position 520 of SEQ ID NO: 1881059
ggaccaugcuuuccaaaua

SEQ ID NO: 2014823 - RNA, 19 nt, Artificial Sequence
  Description of Artificial Sequence: Synthetic oligonucleotide
  Antisense strand to SEQ ID NO: 2014822
uauuuggaaagcauggucc

SEQ ID NO: 2014824 - RNA, 19 nt, Artificial Sequence
  Description of Artificial Sequence: Synthetic oligonucleotide
  Sense strand starting at position 729 of SEQ ID NO: 1881059
guuugaguuaacgaaggua

SEQ ID NO: 2014825 - RNA, 19 nt, Artificial Sequence
  Description of Artificial Sequence: Synthetic oligonucleotide
  Antisense strand to SEQ ID NO: 2014824
uaccuucguuaacucaaac

SEQ ID NO: 2014826 - RNA, 19 nt, Artificial Sequence
  Description of Artificial Sequence: Synthetic oligonucleotide
  Sense strand starting at position 753 of SEQ ID NO: 1881059
uaggucauuugagaacaau

SEQ ID NO: 2014827 - RNA, 19 nt, Artificial Sequence
  Description of Artificial Sequence: Synthetic oligonucleotide
  Antisense strand to SEQ ID NO: 2014826
auuguucucaaaugaccua

SEQ ID NO: 2014828 - RNA, 19 nt, Artificial Sequence
  Description of Artificial Sequence: Synthetic oligonucleotide
  Sense strand starting at position 1004 of SEQ ID NO: 1881059
guaauaucucauugaauug

SEQ ID NO: 2014829 - RNA, 19 nt, Artificial Sequence
  Description of Artificial Sequence: Synthetic oligonucleotide
  Antisense strand to SEQ ID NO: 2014828
caauucaaugagauauuac

SEQ ID NO: 2014830 - RNA, 19 nt, Artificial Sequence
  Description of Artificial Sequence: Synthetic oligonucleotide
  Sense strand starting at position 1142 of SEQ ID NO: 1881059
ucaaauaacugaguuguga

SEQ ID NO: 2014831 - RNA, 19 nt, Artificial Sequence
  Description of Artificial Sequence: Synthetic oligonucleotide
  Antisense strand to SEQ ID NO: 2014830
ucacaacucaguuauuuga

SEQ ID NO: 2014832 - RNA, 19 nt, Artificial Sequence
  Description of Artificial Sequence: Synthetic oligonucleotide
  Sense strand starting at position 1266 of SEQ ID NO: 1881059
agccuugaauaauugagga

SEQ ID NO: 2014833 - RNA, 19 nt, Artificial Sequence
  Description of Artificial Sequence: Synthetic oligonucleotide
  Antisense strand to SEQ ID NO: 2014832
uccucaauuauucaaggcu

SEQ ID NO: 2014834 - RNA, 19 nt, Artificial Sequence
  Description of Artificial Sequence: Synthetic oligonucleotide
  Sense strand starting at position 1354 of SEQ ID NO: 1881059
uuuggagguaagugaaaua

SEQ ID NO: 2014835 - RNA, 19 nt, Artificial Sequence
  Description of Artificial Sequence: Synthetic oligonucleotide
  Antisense strand to SEQ ID NO: 2014834
uauuucacuuaccuccaaa

SEQ ID NO: 2014836 - RNA, 19 nt, Artificial Sequence
  Description of Artificial Sequence: Synthetic oligonucleotide
  Sense strand starting at position 1442 of SEQ ID NO: 1881059
ugagaaaggucucauuuau

SEQ ID NO: 2014837 - RNA, 19 nt, Artificial Sequence
  Description of Artificial Sequence: Synthetic oligonucleotide
  Antisense strand to SEQ ID NO: 2014836
auaaaugagaccuuucuca

SEQ ID NO: 2014838 - RNA, 19 nt, Artificial Sequence
  Description of Artificial Sequence: Synthetic oligonucleotide
  Sense strand starting at position 1488 of SEQ ID NO: 1881059
gccacuuaucacgagagug

SEQ ID NO: 2014839 - RNA, 19 nt, Artificial Sequence
  Description of Artificial Sequence: Synthetic oligonucleotide
  Antisense strand to SEQ ID NO: 2014838
cacucucgugauaaguggc

SEQ ID NO: 2014840 - RNA, 19 nt, Artificial Sequence
  Description of Artificial Sequence: Synthetic oligonucleotide
  Sense strand starting at position 1634 of SEQ ID NO: 1881059
caauaauagucauugugga

SEQ ID NO: 2014841 - RNA, 19 nt, Artificial Sequence
  Description of Artificial Sequence: Synthetic oligonucleotide
  Antisense strand to SEQ ID NO: 2014840
uccacaaugacuauuauug

SEQ ID NO: 2014842 - RNA, 19 nt, Artificial Sequence
  Description of Artificial Sequence: Synthetic oligonucleotide
  Sense strand starting at position 1765 of SEQ ID NO: 1881059
gugaauuucugagucugcu

SEQ ID NO: 2014843 - RNA, 19 nt, Artificial Sequence
  Description of Artificial Sequence: Synthetic oligonucleotide
  Antisense strand to SEQ ID NO: 2014842
agcagacucagaaauucac

SEQ ID NO: 2014844 - RNA, 19 nt, Artificial Sequence
  Description of Artificial Sequence: Synthetic oligonucleotide
  Sense strand starting at position 1786 of SEQ ID NO: 1881059
aguugauaacuguaagugu

SEQ ID NO: 2014845 - RNA, 19 nt, Artificial Sequence
  Description of Artificial Sequence: Synthetic oligonucleotide
  Antisense strand to SEQ ID NO: 2014844
acacuuacaguuaucaacu

SEQ ID NO: 2014846 - RNA, 19 nt, Artificial Sequence
  Description of Artificial Sequence: Synthetic oligonucleotide
  Sense strand starting at position 1864 of SEQ ID NO: 1881059
cuagguacugauuaucuau

SEQ ID NO: 2014847 - RNA, 19 nt, Artificial Sequence
  Description of Artificial Sequence: Synthetic oligonucleotide
  Antisense strand to SEQ ID NO: 2014846
auagauaaucaguaccuag

SEQ ID NO: 2014848 - RNA, 19 nt, Artificial Sequence
  Description of Artificial Sequence: Synthetic oligonucleotide
  Sense strand starting at position 1985 of SEQ ID NO: 1881059
uguaguugaagucaaauag

SEQ ID NO: 2014849 - RNA, 19 nt, Artificial Sequence
  Description of Artificial Sequence: Synthetic oligonucleotide
  Antisense strand to SEQ ID NO: 2014848
cuauuugacuucaacuaca

SEQ ID NO: 2014850 - RNA, 19 nt, Artificial Sequence
  Description of Artificial Sequence: Synthetic oligonucleotide
  Sense strand starting at position 2067 of SEQ ID NO: 1881059
ugaugacuguuuccuagga

SEQ ID NO: 2014851 - RNA, 19 nt, Artificial Sequence
  Description of Artificial Sequence: Synthetic oligonucleotide
  Antisense strand to SEQ ID NO: 2014850
uccuaggaaacagucauca

SEQ ID NO: 2014852 - RNA, 19 nt, Artificial Sequence
  Description of Artificial Sequence: Synthetic oligonucleotide
  Sense strand starting at position 2170 of SEQ ID NO: 1881059
acagcaucccaagagugau

SEQ ID NO: 2014853 - RNA, 19 nt, Artificial Sequence
  Description of Artificial Sequence: Synthetic oligonucleotide
  Antisense strand to SEQ ID NO: 2014852
aucacucuugggaugcugu

SEQ ID NO: 2014854 - RNA, 19 nt, Artificial Sequence
  Description of Artificial Sequence: Synthetic oligonucleotide
  Sense strand starting at position 2360 of SEQ ID NO: 1881059
cagcguauuagauaggaga

SEQ ID NO: 2014855 - RNA, 19 nt, Artificial Sequence
  Description of Artificial Sequence: Synthetic oligonucleotide
  Antisense strand to SEQ ID NO: 2014854
ucuccuaucuaauacgcug

SEQ ID NO: 2014856 - RNA, 19 nt, Artificial Sequence
  Description of Artificial Sequence: Synthetic oligonucleotide
  Sense strand starting at position 2362 of SEQ ID NO: 1881059
gcguauuagauaggagaua

SEQ ID NO: 2014857 - RNA, 19 nt, Artificial Sequence
  Description of Artificial Sequence: Synthetic oligonucleotide
  Antisense strand to SEQ ID NO: 2014856
uaucuccuaucuaauacgc

SEQ ID NO: 2014858 - RNA, 19 nt, Artificial Sequence
  Description of Artificial Sequence: Synthetic oligonucleotide
  Sense strand starting at position 2378 of SEQ ID NO: 1881059
auacuauggugaucaucuu

SEQ ID NO: 2014859 - RNA, 19 nt, Artificial Sequence
  Description of Artificial Sequence: Synthetic oligonucleotide
  Antisense strand to SEQ ID NO: 2014858
aagaugaucaccauaguau

SEQ ID NO: 2014860 - RNA, 19 nt, Artificial Sequence
  Description of Artificial Sequence: Synthetic oligonucleotide
  Sense strand starting at position 2384 of SEQ ID NO: 1881059
uggugaucaucuuuggaag

SEQ ID NO: 2014861 - RNA, 19 nt, Artificial Sequence
  Description of Artificial Sequence: Synthetic oligonucleotide
  Antisense strand to SEQ ID NO: 2014860
cuuccaaagaugaucacca

SEQ ID NO: 2014862 - RNA, 19 nt, Artificial Sequence
  Description of Artificial Sequence: Synthetic oligonucleotide
  Sense strand starting at position 2499 of SEQ ID NO: 1881059
ugcauuuacuggucaacuc

SEQ ID NO: 2014863 - RNA, 19 nt, Artificial Sequence
  Description of Artificial Sequence: Synthetic oligonucleotide
  Antisense strand to SEQ ID NO: 2014862
gaguugaccaguaaaugca

SEQ ID NO: 2014864 - RNA, 19 nt, Artificial Sequence
  Description of Artificial Sequence: Synthetic oligonucleotide
  Sense strand starting at position 3168 of SEQ ID NO: 1881059
ccacuugacguacagauaa

SEQ ID NO: 2014865 - RNA, 19 nt, Artificial Sequence
  Description of Artificial Sequence: Synthetic oligonucleotide
  Antisense strand to SEQ ID NO: 2014864
uuaucuguacgucaagugg

SEQ ID NO: 2014866 - RNA, 19 nt, Artificial Sequence
  Description of Artificial Sequence: Synthetic oligonucleotide
  Sense strand starting at position 3388 of SEQ ID NO: 1881059
guauaagagcccuaagacu

SEQ ID NO: 2014867 - RNA, 19 nt, Artificial Sequence
  Description of Artificial Sequence: Synthetic oligonucleotide
  Antisense strand to SEQ ID NO: 2014866
agucuuagggcucuuauac

SEQ ID NO: 2014868 - RNA, 19 nt, Artificial Sequence
  Description of Artificial Sequence: Synthetic oligonucleotide
  Sense strand starting at position 3445 of SEQ ID NO: 1881059
cuauuauucucucugaagg

SEQ ID NO: 2014869 - RNA, 19 nt, Artificial Sequence
  Description of Artificial Sequence: Synthetic oligonucleotide
  Antisense strand to SEQ ID NO: 2014868
ccuucagagagaauaauag

SEQ ID NO: 2014870 - RNA, 19 nt, Artificial Sequence
  Description of Artificial Sequence: Synthetic oligonucleotide
  Sense strand starting at position 3486 of SEQ ID NO: 1881059
gagguauauuugcucuagu

SEQ ID NO: 2014871 - RNA, 19 nt, Artificial Sequence
  Description of Artificial Sequence: Synthetic oligonucleotide
  Antisense strand to SEQ ID NO: 2014870
acuagagcaaauauaccuc

SEQ ID NO: 2014872 - RNA, 19 nt, Artificial Sequence
  Description of Artificial Sequence: Synthetic oligonucleotide
  Sense strand starting at position 3487 of SEQ ID NO: 1881059
agguauauuugcucuaguc

SEQ ID NO: 2014873 - RNA, 19 nt, Artificial Sequence
  Description of Artificial Sequence: Synthetic oligonucleotide
  Antisense strand to SEQ ID NO: 2014872
gacuagagcaaauauaccu

SEQ ID NO: 2014874 - RNA, 19 nt, Artificial Sequence
  Description of Artificial Sequence: Synthetic oligonucleotide
  Sense strand starting at position 3489 of SEQ ID NO: 1881059
guauauuugcucuagucuc

SEQ ID NO: 2014875 - RNA, 19 nt, Artificial Sequence
  Description of Artificial Sequence: Synthetic oligonucleotide
  Antisense strand to SEQ ID NO: 2014874
gagacuagagcaaauauac

SEQ ID NO: 2014876 - RNA, 19 nt, Artificial Sequence
  Description of Artificial Sequence: Synthetic oligonucleotide
  Sense strand starting at position 3497 of SEQ ID NO: 1881059
gcucuagucucagucauuu

SEQ ID NO: 2014877 - RNA, 19 nt, Artificial Sequence
  Description of Artificial Sequence: Synthetic oligonucleotide
  Antisense strand to SEQ ID NO: 2014876
aaaugacugagacuagagc

SEQ ID NO: 2014878 - RNA, 19 nt, Artificial Sequence
  Description of Artificial Sequence: Synthetic oligonucleotide
  Sense strand starting at position 3501 of SEQ ID NO: 1881059
uagucucagucauuuagua

SEQ ID NO: 2014879 - RNA, 19 nt, Artificial Sequence
  Description of Artificial Sequence: Synthetic oligonucleotide
  Antisense strand to SEQ ID NO: 2014878
uacuaaaugacugagacua

SEQ ID NO: 2014880 - RNA, 19 nt, Artificial Sequence
  Description of Artificial Sequence: Synthetic oligonucleotide
  Sense strand starting at position 3505 of SEQ ID NO: 1881059
cucagucauuuaguauguu

SEQ ID NO: 2014881 - RNA, 19 nt, Artificial Sequence
  Description of Artificial Sequence: Synthetic oligonucleotide
  Antisense strand to SEQ ID NO: 2014880
aacauacuaaaugacugag

SEQ ID NO: 2014882 - RNA, 19 nt, Artificial Sequence
  Description of Artificial Sequence: Synthetic oligonucleotide
  Sense strand starting at position 3683 of SEQ ID NO: 1881059
aucccuaaccuguaucgau

SEQ ID NO: 2014883 - RNA, 19 nt, Artificial Sequence
  Description of Artificial Sequence: Synthetic oligonucleotide
  Antisense strand to SEQ ID NO: 2014882
aucgauacagguuagggau

SEQ ID NO: 2014884 - RNA, 19 nt, Artificial Sequence
  Description of Artificial Sequence: Synthetic oligonucleotide
  Sense strand starting at position 3690 of SEQ ID NO: 1881059
accuguaucgaucacucau

SEQ ID NO: 2014885 - RNA, 19 nt, Artificial Sequence
  Description of Artificial Sequence: Synthetic oligonucleotide
  Antisense strand to SEQ ID NO: 2014884
augagugaucgauacaggu

SEQ ID NO: 2014886 - RNA, 19 nt, Artificial Sequence
  Description of Artificial Sequence: Synthetic oligonucleotide
  Sense strand starting at position 3968 of SEQ ID NO: 1881059
ucguuaauagauugacaau

SEQ ID NO: 2014887 - RNA, 19 nt, Artificial Sequence
  Description of Artificial Sequence: Synthetic oligonucleotide
  Antisense strand to SEQ ID NO: 2014886
auugucaaucuauuaacga

SEQ ID NO: 2014888 - RNA, 19 nt, Artificial Sequence
  Description of Artificial Sequence: Synthetic oligonucleotide
  Sense strand starting at position 341 of SEQ ID NO: 1881060
cauuguuaucuuuagguug

SEQ ID NO: 2014889 - RNA, 19 nt, Artificial Sequence
  Description of Artificial Sequence: Synthetic oligonucleotide
  Antisense strand to SEQ ID NO: 2014888
caaccuaaagauaacaaug

SEQ ID NO: 2014890 - RNA, 19 nt, Artificial Sequence
  Description of Artificial Sequence: Synthetic oligonucleotide
  Sense strand starting at position 347 of SEQ ID NO: 1881060
uaucuuuagguugauguca

SEQ ID NO: 2014891 - RNA, 19 nt, Artificial Sequence
  Description of Artificial Sequence: Synthetic oligonucleotide
  Antisense strand to SEQ ID NO: 2014890
ugacaucaaccuaaagaua

SEQ ID NO: 2014892 - RNA, 19 nt, Artificial Sequence
  Description of Artificial Sequence: Synthetic oligonucleotide
  Sense strand starting at position 408 of SEQ ID NO: 1881060
agaaauguuucucuuagac

SEQ ID NO: 2014893 - RNA, 19 nt, Artificial Sequence
  Description of Artificial Sequence: Synthetic oligonucleotide
  Antisense strand to SEQ ID NO: 2014892
gucuaagagaaacauuucu

SEQ ID NO: 2014894 - RNA, 19 nt, Artificial Sequence
  Description of Artificial Sequence: Synthetic oligonucleotide
  Sense strand starting at position 609 of SEQ ID NO: 1881060
gucacuaucgcccauggau

SEQ ID NO: 2014895 - RNA, 19 nt, Artificial Sequence
  Description of Artificial Sequence: Synthetic oligonucleotide
  Antisense strand to SEQ ID NO: 2014894
auccaugggcgauagugac

SEQ ID NO: 2014896 - RNA, 19 nt, Artificial Sequence
  Description of Artificial Sequence: Synthetic oligonucleotide
  Sense strand starting at position 618 of SEQ ID NO: 1881060
gcccauggauucccuuaaa

SEQ ID NO: 2014897 - RNA, 19 nt, Artificial Sequence
  Description of Artificial Sequence: Synthetic oligonucleotide
  Antisense strand to SEQ ID NO: 2014896
uuuaagggaauccaugggc

SEQ ID NO: 2014898 - RNA, 19 nt, Artificial Sequence
  Description of Artificial Sequence: Synthetic oligonucleotide
  Sense strand starting at position 1436 of SEQ ID NO: 1881060
aacaaaguugcuggaagaa

SEQ ID NO: 2014899 - RNA, 19 nt, Artificial Sequence
  Description of Artificial Sequence: Synthetic oligonucleotide
  Antisense strand to SEQ ID NO: 2014898
uucuuccagcaacuuuguu

SEQ ID NO: 2014900 - RNA, 19 nt, Artificial Sequence
  Description of Artificial Sequence: Synthetic oligonucleotide
  Sense strand starting at position 1839 of SEQ ID NO: 1881060
gcacuaaagaacuggagua

SEQ ID NO: 2014901 - RNA, 19 nt, Artificial Sequence
  Description of Artificial Sequence: Synthetic oligonucleotide
  Antisense strand to SEQ ID NO: 2014900
uacuccaguucuuuagugc

SEQ ID NO: 2014902 - RNA, 19 nt, Artificial Sequence
  Description of Artificial Sequence: Synthetic oligonucleotide
  Sense strand starting at position 1999 of SEQ ID NO: 1881060
cguaaaggucggcaacaga

SEQ ID NO: 2014903 - RNA, 19 nt, Artificial Sequence
  Description of Artificial Sequence: Synthetic oligonucleotide
  Antisense strand to SEQ ID NO: 2014902
ucuguugccgaccuuuacg

SEQ ID NO: 2014904 - RNA, 19 nt, Artificial Sequence
  Description of Artificial Sequence: Synthetic oligonucleotide
  Sense strand starting at position 2122 of SEQ ID NO: 1881060
gaguucugugcuggaagag

SEQ ID NO: 2014905 - RNA, 19 nt, Artificial Sequence
  Description of Artificial Sequence: Synthetic oligonucleotide
  Antisense strand to SEQ ID NO: 2014904
cucuuccagcacagaacuc

SEQ ID NO: 2014906 - RNA, 19 nt, Artificial Sequence
  Description of Artificial Sequence: Synthetic oligonucleotide
  Sense strand starting at position 2197 of SEQ ID NO: 1881060
cagugcguugcgucuauaa

SEQ ID NO: 2014907 - RNA, 19 nt, Artificial Sequence
  Description of Artificial Sequence: Synthetic oligonucleotide
  Antisense strand to SEQ ID NO: 2014906
uuauagacgcaacgcacug

SEQ ID NO: 2014908 - RNA, 19 nt, Artificial Sequence
  Description of Artificial Sequence: Synthetic oligonucleotide
  Sense strand starting at position 2233 of SEQ ID NO: 1881060
gaggguagccuuggaaauu

SEQ ID NO: 2014909 - RNA, 19 nt, Artificial Sequence
  Description of Artificial Sequence: Synthetic oligonucleotide
  Antisense strand to SEQ ID NO: 2014908
aauuuccaaggcuacccuc

SEQ ID NO: 2014910 - RNA, 19 nt, Artificial Sequence
  Description of Artificial Sequence: Synthetic oligonucleotide
  Sense strand starting at position 2268 of SEQ ID NO: 1881060
ccacuagucaggugaacag

SEQ ID NO: 2014911 - RNA, 19 nt, Artificial Sequence
  Description of Artificial Sequence: Synthetic oligonucleotide
  Antisense strand to SEQ ID NO: 2014910
cuguucaccugacuagugg

SEQ ID NO: 2014912 - RNA, 19 nt, Artificial Sequence
  Description of Artificial Sequence: Synthetic oligonucleotide
  Sense strand starting at position 2309 of SEQ ID NO: 1881060
acuugauccuggguaguag

SEQ ID NO: 2014913 - RNA, 19 nt, Artificial Sequence
  Description of Artificial Sequence: Synthetic oligonucleotide
  Antisense strand to SEQ ID NO: 2014912
cuacuacccaggaucaagu

SEQ ID NO: 2014914 - RNA, 19 nt, Artificial Sequence
  Description of Artificial Sequence: Synthetic oligonucleotide
  Sense strand starting at position 2318 of SEQ ID NO: 1881060
uggguaguagcuuacaacu

SEQ ID NO: 2014915 - RNA, 19 nt, Artificial Sequence
  Description of Artificial Sequence: Synthetic oligonucleotide
  Antisense strand to SEQ ID NO: 2014914
aguuguaagcuacuaccca

SEQ ID NO: 2014916 - RNA, 19 nt, Artificial Sequence
  Description of Artificial Sequence: Synthetic oligonucleotide
  Sense strand starting at position 2395 of SEQ ID NO: 1881060
agagaaauggcggguuauc

SEQ ID NO: 2014917 - RNA, 19 nt, Artificial Sequence
  Description of Artificial Sequence: Synthetic oligonucleotide
  Antisense strand to SEQ ID NO: 2014916
gauaacccgccauuucucu

SEQ ID NO: 2014918 - RNA, 19 nt, Artificial Sequence
  Description of Artificial Sequence: Synthetic oligonucleotide
  Sense strand starting at position 2400 of SEQ ID NO: 1881060
aauggcggguuaucaagaa

SEQ ID NO: 2014919 - RNA, 19 nt, Artificial Sequence
  Description of Artificial Sequence: Synthetic oligonucleotide
  Antisense strand to SEQ ID NO: 2014918
uucuugauaacccgccauu

SEQ ID NO: 2014920 - RNA, 19 nt, Artificial Sequence
  Description of Artificial Sequence: Synthetic oligonucleotide
  Sense strand starting at position 2441 of SEQ ID NO: 1881060
ccauuauucugggcuuuga

SEQ ID NO: 2014921 - RNA, 19 nt, Artificial Sequence
  Description of Artificial Sequence: Synthetic oligonucleotide
  Antisense strand to SEQ ID NO: 2014920
ucaaagcccagaauaaugg

SEQ ID NO: 2014922 - RNA, 19 nt, Artificial Sequence
  Description of Artificial Sequence: Synthetic oligonucleotide
  Sense strand starting at position 2474 of SEQ ID NO: 1881060
ccaaauggaucagcagauu

SEQ ID NO: 2014923 - RNA, 19 nt, Artificial Sequence
  Description of Artificial Sequence: Synthetic oligonucleotide
  Antisense strand to SEQ ID NO: 2014922
aaucugcugauccauuugg

SEQ ID NO: 2014924 - RNA, 19 nt, Artificial Sequence
  Description of Artificial Sequence: Synthetic oligonucleotide
  Sense strand starting at position 2507 of SEQ ID NO: 1881060
gcguuucuuggcagaggau

SEQ ID NO: 2014925 - RNA, 19 nt, Artificial Sequence
  Description of Artificial Sequence: Synthetic oligonucleotide
  Antisense strand to SEQ ID NO: 2014924
auccucugccaagaaacgc

SEQ ID NO: 2014926 - RNA, 19 nt, Artificial Sequence
  Description of Artificial Sequence: Synthetic oligonucleotide
  Sense strand starting at position 2553 of SEQ ID NO: 1881060
gaucacacuugcuugauga

SEQ ID NO: 2014927 - RNA, 19 nt, Artificial Sequence
  Description of Artificial Sequence: Synthetic oligonucleotide
  Antisense strand to SEQ ID NO: 2014926
ucaucaagcaagugugauc

SEQ ID NO: 2014928 - RNA, 19 nt, Artificial Sequence
  Description of Artificial Sequence: Synthetic oligonucleotide
  Sense strand starting at position 2554 of SEQ ID NO: 1881060
aucacacuugcuugaugaa

SEQ ID NO: 2014929 - RNA, 19 nt, Artificial Sequence
  Description of Artificial Sequence: Synthetic oligonucleotide
  Antisense strand to SEQ ID NO: 2014928
uucaucaagcaagugugau

SEQ ID NO: 2014930 - RNA, 19 nt, Artificial Sequence
  Description of Artificial Sequence: Synthetic oligonucleotide
  Sense strand starting at position 2555 of SEQ ID NO: 1881060
ucacacuugcuugaugaaa

SEQ ID NO: 2014931 - RNA, 19 nt, Artificial Sequence
  Description of Artificial Sequence: Synthetic oligonucleotide
  Antisense strand to SEQ ID NO: 2014930
uuucaucaagcaaguguga

SEQ ID NO: 2014932 - RNA, 19 nt, Artificial Sequence
  Description of Artificial Sequence: Synthetic oligonucleotide
  Sense strand starting at position 2588 of SEQ ID NO: 1881060
ugcucaucccaugaaugcu

SEQ ID NO: 2014933 - RNA, 19 nt, Artificial Sequence
  Description of Artificial Sequence: Synthetic oligonucleotide
  Antisense strand to SEQ ID NO: 2014932
agcauucaugggaugagca

SEQ ID NO: 2014934 - RNA, 19 nt, Artificial Sequence
  Description of Artificial Sequence: Synthetic oligonucleotide
  Sense strand starting at position 2683 of SEQ ID NO: 1881060
uagguuguaucccucaaug

SEQ ID NO: 2014935 - RNA, 19 nt, Artificial Sequence
  Description of Artificial Sequence: Synthetic oligonucleotide
  Antisense strand to SEQ ID NO: 2014934
cauugagggauacaaccua

SEQ ID NO: 2014936 - RNA, 19 nt, Artificial Sequence
  Description of Artificial Sequence: Synthetic oligonucleotide
  Sense strand starting at position 2722 of SEQ ID NO: 1881060
gcaugugugacagaaauua

SEQ ID NO: 2014937 - RNA, 19 nt, Artificial Sequence
  Description of Artificial Sequence: Synthetic oligonucleotide
  Antisense strand to SEQ ID NO: 2014936
uaauuucugucacacaugc

SEQ ID NO: 2014938 - RNA, 19 nt, Artificial Sequence
  Description of Artificial Sequence: Synthetic oligonucleotide
  Sense strand starting at position 2773 of SEQ ID NO: 1881060
uggguaaugcaaugugaac

SEQ ID NO: 2014939 - RNA, 19 nt, Artificial Sequence
  Description of Artificial Sequence: Synthetic oligonucleotide
  Antisense strand to SEQ ID NO: 2014938
guucacauugcauuaccca

SEQ ID NO: 2014940 - RNA, 19 nt, Artificial Sequence
  Description of Artificial Sequence: Synthetic oligonucleotide
  Sense strand starting at position 2775 of SEQ ID NO: 1881060
gguaaugcaaugugaacaa

SEQ ID NO: 2014941 - RNA, 19 nt, Artificial Sequence
  Description of Artificial Sequence: Synthetic oligonucleotide
  Antisense strand to SEQ ID NO: 2014940
uuguucacauugcauuacc

SEQ ID NO: 2014942 - RNA, 19 nt, Artificial Sequence
  Description of Artificial Sequence: Synthetic oligonucleotide
  Sense strand starting at position 2779 of SEQ ID NO: 1881060
augcaaugugaacaaguuu

SEQ ID NO: 2014943 - RNA, 19 nt, Artificial Sequence
  Description of Artificial Sequence: Synthetic oligonucleotide
  Antisense strand to SEQ ID NO: 2014942
aaacuuguucacauugcau

SEQ ID NO: 2014944 - RNA, 19 nt, Artificial Sequence
  Description of Artificial Sequence: Synthetic oligonucleotide
  Sense strand starting at position 2976 of SEQ ID NO: 1881060
agauuauauguguaaugug

SEQ ID NO: 2014945 - RNA, 19 nt, Artificial Sequence
  Description of Artificial Sequence: Synthetic oligonucleotide
  Antisense strand to SEQ ID NO: 2014944
cacauuacacauauaaucu

SEQ ID NO: 2014946 - RNA, 19 nt, Artificial Sequence
  Description of Artificial Sequence: Synthetic oligonucleotide
  Sense strand starting at position 3033 of SEQ ID NO: 1881060
uuguuauaccgagaacagu

SEQ ID NO: 2014947 - RNA, 19 nt, Artificial Sequence
  Description of Artificial Sequence: Synthetic oligonucleotide
  Antisense strand to SEQ ID NO: 2014946
acuguucucgguauaacaa

SEQ ID NO: 2014948 - RNA, 19 nt, Artificial Sequence
  Description of Artificial Sequence: Synthetic oligonucleotide
  Sense strand starting at position 3104 of SEQ ID NO: 1881060
auagaagcuaccgguuuaa

SEQ ID NO: 2014949 - RNA, 19 nt, Artificial Sequence
  Description of Artificial Sequence: Synthetic oligonucleotide
  Antisense strand to SEQ ID NO: 2014948
uuaaaccgguagcuucuau

SEQ ID NO: 2014950 - RNA, 19 nt, Artificial Sequence
  Description of Artificial Sequence: Synthetic oligonucleotide
  Sense strand starting at position 3115 of SEQ ID NO: 1881060
cgguuuaaaucaccuuuau

SEQ ID NO: 2014951 - RNA, 19 nt, Artificial Sequence
  Description of Artificial Sequence: Synthetic oligonucleotide
  Antisense strand to SEQ ID NO: 2014950
auaaaggugauuuaaaccg

SEQ ID NO: 2014952 - RNA, 19 nt, Artificial Sequence
  Description of Artificial Sequence: Synthetic oligonucleotide
  Sense strand starting at position 3305 of SEQ ID NO: 1881060
aggaauagcugacugguaa

SEQ ID NO: 2014953 - RNA, 19 nt, Artificial Sequence
  Description of Artificial Sequence: Synthetic oligonucleotide
  Antisense strand to SEQ ID NO: 2014952
uuaccagucagcuauuccu

SEQ ID NO: 2014954 - RNA, 19 nt, Artificial Sequence
  Description of Artificial Sequence: Synthetic oligonucleotide
  Sense strand starting at position 3306 of SEQ ID NO: 1881060
ggaauagcugacugguaag

SEQ ID NO: 2014955 - RNA, 19 nt, Artificial Sequence
  Description of Artificial Sequence: Synthetic oligonucleotide
  Antisense strand to SEQ ID NO: 2014954
cuuaccagucagcuauucc

SEQ ID NO: 2014956 - RNA, 19 nt, Artificial Sequence
  Description of Artificial Sequence: Synthetic oligonucleotide
  Sense strand starting at position 3316 of SEQ ID NO: 1881060
acugguaaguuauuauucu

SEQ ID NO: 2014957 - RNA, 19 nt, Artificial Sequence
  Description of Artificial Sequence: Synthetic oligonucleotide
  Antisense strand to SEQ ID NO: 2014956
agaauaauaacuuaccagu

SEQ ID NO: 2014958 - RNA, 19 nt, Artificial Sequence
  Description of Artificial Sequence: Synthetic oligonucleotide
  Sense strand starting at position 3320 of SEQ ID NO: 1881060
guaaguuauuauucuucca

SEQ ID NO: 2014959 - RNA, 19 nt, Artificial Sequence
  Description of Artificial Sequence: Synthetic oligonucleotide
  Antisense strand to SEQ ID NO: 2014958
uggaagaauaauaacuuac

SEQ ID NO: 2014960 - RNA, 19 nt, Artificial Sequence
  Description of Artificial Sequence: Synthetic oligonucleotide
  Sense strand starting at position 3669 of SEQ ID NO: 1881060
aucugagguauuuguguua

SEQ ID NO: 2014961 - RNA, 19 nt, Artificial Sequence
  Description of Artificial Sequence: Synthetic oligonucleotide
  Antisense strand to SEQ ID NO: 2014960
uaacacaaauaccucagau

SEQ ID NO: 2014962 - RNA, 19 nt, Artificial Sequence
  Description of Artificial Sequence: Synthetic oligonucleotide
  Sense strand starting at position 3736 of SEQ ID NO: 1881060
cauuaaugauaggucuaug

SEQ ID NO: 2014963 - RNA, 19 nt, Artificial Sequence
  Description of Artificial Sequence: Synthetic oligonucleotide
  Antisense strand to SEQ ID NO: 2014962
cauagaccuaucauuaaug

SEQ ID NO: 2014964 - RNA, 19 nt, Artificial Sequence
  Description of Artificial Sequence: Synthetic oligonucleotide
  Sense strand starting at position 3888 of SEQ ID NO: 1881060
aaagguguccugggagagu

SEQ ID NO: 2014965 - RNA, 19 nt, Artificial Sequence
  Description of Artificial Sequence: Synthetic oligonucleotide
  Antisense strand to SEQ ID NO: 2014964
acucucccaggacaccuuu

SEQ ID NO: 2014966 - RNA, 19 nt, Artificial Sequence
  Description of Artificial Sequence: Synthetic oligonucleotide
  Sense strand starting at position 3956 of SEQ ID NO: 1881060
ucccaacaucugggaguuu

SEQ ID NO: 2014967 - RNA, 19 nt, Artificial Sequence
  Description of Artificial Sequence: Synthetic oligonucleotide
  Antisense strand to SEQ ID NO: 2014966
aaacucccagauguuggga

SEQ ID NO: 2014968 - RNA, 19 nt, Artificial Sequence
  Description of Artificial Sequence: Synthetic oligonucleotide
  Sense strand starting at position 122 of SEQ ID NO: 1881061
agcugugcaugcccauaaa

SEQ ID NO: 2014969 - RNA, 19 nt, Artificial Sequence
  Description of Artificial Sequence: Synthetic oligonucleotide
  Antisense strand to SEQ ID NO: 2014968
uuuaugggcaugcacagcu

SEQ ID NO: 2014970 - RNA, 19 nt, Artificial Sequence
  Description of Artificial Sequence: Synthetic oligonucleotide
  Sense strand starting at position 190 of SEQ ID NO: 1881061
ccacuuccaugacagagau

SEQ ID NO: 2014971 - RNA, 19 nt, Artificial Sequence
  Description of Artificial Sequence: Synthetic oligonucleotide
  Antisense strand to SEQ ID NO: 2014970
aucucugucauggaagugg

SEQ ID NO: 2014972 - RNA, 19 nt, Artificial Sequence
  Description of Artificial Sequence: Synthetic oligonucleotide
  Sense strand starting at position 196 of SEQ ID NO: 1881061
ccaugacagagauggcuaa

SEQ ID NO: 2014973 - RNA, 19 nt, Artificial Sequence
  Description of Artificial Sequence: Synthetic oligonucleotide
  Antisense strand to SEQ ID NO: 2014972
uuagccaucucugucaugg

SEQ ID NO: 2014974 - RNA, 19 nt, Artificial Sequence
  Description of Artificial Sequence: Synthetic oligonucleotide
  Sense strand starting at position 321 of SEQ ID NO: 1881061
ccuccaucccgacagucau

SEQ ID NO: 2014975 - RNA, 19 nt, Artificial Sequence
  Description of Artificial Sequence: Synthetic oligonucleotide
  Antisense strand to SEQ ID NO: 2014974
augacugucgggauggagg

SEQ ID NO: 2014976 - RNA, 19 nt, Artificial Sequence
  Description of Artificial Sequence: Synthetic oligonucleotide
  Sense strand starting at position 424 of SEQ ID NO: 1881061
agucuacacucugcauaga

SEQ ID NO: 2014977 - RNA, 19 nt, Artificial Sequence
  Description of Artificial Sequence: Synthetic oligonucleotide
  Antisense strand to SEQ ID NO: 2014976
ucuaugcagaguguagacu

SEQ ID NO: 2014978 - RNA, 19 nt, Artificial Sequence
  Description of Artificial Sequence: Synthetic oligonucleotide
  Sense strand starting at position 490 of SEQ ID NO: 1881061
uggauucuccagcagcuuu

SEQ ID NO: 2014979 - RNA, 19 nt, Artificial Sequence
  Description of Artificial Sequence: Synthetic oligonucleotide
  Antisense strand to SEQ ID NO: 2014978
aaagcugcuggagaaucca

SEQ ID NO: 2014980 - RNA, 19 nt, Artificial Sequence
  Description of Artificial Sequence: Synthetic oligonucleotide
  Sense strand starting at position 700 of SEQ ID NO: 1881061
ggccuacuucuagacucuu

SEQ ID NO: 2014981 - RNA, 19 nt, Artificial Sequence
  Description of Artificial Sequence: Synthetic oligonucleotide
  Antisense strand to SEQ ID NO: 2014980
aagagucuagaaguaggcc

SEQ ID NO: 2014982 - RNA, 19 nt, Artificial Sequence
  Description of Artificial Sequence: Synthetic oligonucleotide
  Sense strand starting at position 706 of SEQ ID NO: 1881061
cuucuagacucuucugugu

SEQ ID NO: 2014983 - RNA, 19 nt, Artificial Sequence
  Description of Artificial Sequence: Synthetic oligonucleotide
  Antisense strand to SEQ ID NO: 2014982
acacagaagagucuagaag

SEQ ID NO: 2014984 - RNA, 19 nt, Artificial Sequence
  Description of Artificial Sequence: Synthetic oligonucleotide
  Sense strand starting at position 711 of SEQ ID NO: 1881061
agacucuucuguguuguca

SEQ ID NO: 2014985 - RNA, 19 nt, Artificial Sequence
  Description of Artificial Sequence: Synthetic oligonucleotide
  Antisense strand to SEQ ID NO: 2014984
ugacaacacagaagagucu

SEQ ID NO: 2014986 - RNA, 19 nt, Artificial Sequence
  Description of Artificial Sequence: Synthetic oligonucleotide
  Sense strand starting at position 1105 of SEQ ID NO: 1881061
cguugccauacucgaugau

SEQ ID NO: 2014987 - RNA, 19 nt, Artificial Sequence
  Description of Artificial Sequence: Synthetic oligonucleotide
  Antisense strand to SEQ ID NO: 2014986
aucaucgaguauggcaacg

SEQ ID NO: 2014988 - RNA, 19 nt, Artificial Sequence
  Description of Artificial Sequence: Synthetic oligonucleotide
  Sense strand starting at position 1106 of SEQ ID NO: 1881061
guugccauacucgaugauu

SEQ ID NO: 2014989 - RNA, 19 nt, Artificial Sequence
  Description of Artificial Sequence: Synthetic oligonucleotide
  Antisense strand to SEQ ID NO: 2014988
aaucaucgaguauggcaac

SEQ ID NO: 2014990 - RNA, 19 nt, Artificial Sequence
  Description of Artificial Sequence: Synthetic oligonucleotide
  Sense strand starting at position 1109 of SEQ ID NO: 1881061
gccauacucgaugauucca

SEQ ID NO: 2014991 - RNA, 19 nt, Artificial Sequence
  Description of Artificial Sequence: Synthetic oligonucleotide
  Antisense strand to SEQ ID NO: 2014990
uggaaucaucgaguauggc

SEQ ID NO: 2014992 - RNA, 19 nt, Artificial Sequence
  Description of Artificial Sequence: Synthetic oligonucleotide
  Sense strand starting at position 1156 of SEQ ID NO: 1881061
ggccucagccuguucugua

SEQ ID NO: 2014993 - RNA, 19 nt, Artificial Sequence
  Description of Artificial Sequence: Synthetic oligonucleotide
  Antisense strand to SEQ ID NO: 2014992
uacagaacaggcugaggcc

SEQ ID NO: 2014994 - RNA, 19 nt, Artificial Sequence
  Description of Artificial Sequence: Synthetic oligonucleotide
  Sense strand starting at position 1157 of SEQ ID NO: 1881061
gccucagccuguucuguau

SEQ ID NO: 2014995 - RNA, 19 nt, Artificial Sequence
  Description of Artificial Sequence: Synthetic oligonucleotide
  Antisense strand to SEQ ID NO: 2014994
auacagaacaggcugaggc

SEQ ID NO: 2014996 - RNA, 19 nt, Artificial Sequence
  Description of Artificial Sequence: Synthetic oligonucleotide
  Sense strand starting at position 1185 of SEQ ID NO: 1881061
agagucacucagugagagu

SEQ ID NO: 2014997 - RNA, 19 nt, Artificial Sequence
  Description of Artificial Sequence: Synthetic oligonucleotide
  Antisense strand to SEQ ID NO: 2014996
acucucacugagugacucu

SEQ ID NO: 2014998 - RNA, 19 nt, Artificial Sequence
  Description of Artificial Sequence: Synthetic oligonucleotide
  Sense strand starting at position 1379 of SEQ ID NO: 1881061
gggucuuaagccuggguuu

SEQ ID NO: 2014999 - RNA, 19 nt, Artificial Sequence
  Description of Artificial Sequence: Synthetic oligonucleotide
  Antisense strand to SEQ ID NO: 2014998
aaacccaggcuuaagaccc

SEQ ID NO: 2015000 - RNA, 19 nt, Artificial Sequence
  Description of Artificial Sequence: Synthetic oligonucleotide
  Sense strand starting at position 1703 of SEQ ID NO: 1881061
aucucugcccugggaugau

SEQ ID NO: 2015001 - RNA, 19 nt, Artificial Sequence
  Description of Artificial Sequence: Synthetic oligonucleotide
  Antisense strand to SEQ ID NO: 2015000
aucaucccagggcagagau

SEQ ID NO: 2015002 - RNA, 19 nt, Artificial Sequence
  Description of Artificial Sequence: Synthetic oligonucleotide
  Sense strand starting at position 1718 of SEQ ID NO: 1881061
ugaucucucgccugccuua

SEQ ID NO: 2015003 - RNA, 19 nt, Artificial Sequence
  Description of Artificial Sequence: Synthetic oligonucleotide
  Antisense strand to SEQ ID NO: 2015002
uaaggcaggcgagagauca

SEQ ID NO: 2015004 - RNA, 19 nt, Artificial Sequence
  Description of Artificial Sequence: Synthetic oligonucleotide
  Sense strand starting at position 1965 of SEQ ID NO: 1881061
gcaggcauuugcucaacca

SEQ ID NO: 2015005 - RNA, 19 nt, Artificial Sequence
  Description of Artificial Sequence: Synthetic oligonucleotide
  Antisense strand to SEQ ID NO: 2015004
ugguugagcaaaugccugc

SEQ ID NO: 2015006 - RNA, 19 nt, Artificial Sequence
  Description of Artificial Sequence: Synthetic oligonucleotide
  Sense strand starting at position 1972 of SEQ ID NO: 1881061
uuugcucaaccagagcaau

SEQ ID NO: 2015007 - RNA, 19 nt, Artificial Sequence
  Description of Artificial Sequence: Synthetic oligonucleotide
  Antisense strand to SEQ ID NO: 2015006
auugcucugguugagcaaa

SEQ ID NO: 2015008 - RNA, 19 nt, Artificial Sequence
  Description of Artificial Sequence: Synthetic oligonucleotide
  Sense strand starting at position 2023 of SEQ ID NO: 1881061
cugguucuaucuuugccaa

SEQ ID NO: 2015009 - RNA, 19 nt, Artificial Sequence
  Description of Artificial Sequence: Synthetic oligonucleotide
  Antisense strand to SEQ ID NO: 2015008
uuggcaaagauagaaccag

SEQ ID NO: 2015010 - RNA, 19 nt, Artificial Sequence
  Description of Artificial Sequence: Synthetic oligonucleotide
  Sense strand starting at position 2024 of SEQ ID NO: 1881061
ugguucuaucuuugccaaa

SEQ ID NO: 2015011 - RNA, 19 nt, Artificial Sequence
  Description of Artificial Sequence: Synthetic oligonucleotide
  Antisense strand to SEQ ID NO: 2015010
uuuggcaaagauagaacca

SEQ ID NO: 2015012 - RNA, 19 nt, Artificial Sequence
  Description of Artificial Sequence: Synthetic oligonucleotide
  Sense strand starting at position 2025 of SEQ ID NO: 1881061
gguucuaucuuugccaaac

SEQ ID NO: 2015013 - RNA, 19 nt, Artificial Sequence
  Description of Artificial Sequence: Synthetic oligonucleotide
  Antisense strand to SEQ ID NO: 2015012
guuuggcaaagauagaacc

SEQ ID NO: 2015014 - RNA, 19 nt, Artificial Sequence
  Description of Artificial Sequence: Synthetic oligonucleotide
  Sense strand starting at position 2080 of SEQ ID NO: 1881061
ggagguuccugacagugaa

SEQ ID NO: 2015015 - RNA, 19 nt, Artificial Sequence
  Description of Artificial Sequence: Synthetic oligonucleotide
  Antisense strand to SEQ ID NO: 2015014
uucacugucaggaaccucc

SEQ ID NO: 2015016 - RNA, 19 nt, Artificial Sequence
  Description of Artificial Sequence: Synthetic oligonucleotide
  Sense strand starting at position 2175 of SEQ ID NO: 1881061
gggcuuaauugccucauua

SEQ ID NO: 2015017 - RNA, 19 nt, Artificial Sequence
  Description of Artificial Sequence: Synthetic oligonucleotide
  Antisense strand to SEQ ID NO: 2015016
uaaugaggcaauuaagccc

SEQ ID NO: 2015018 - RNA, 19 nt, Artificial Sequence
  Description of Artificial Sequence: Synthetic oligonucleotide
  Sense strand starting at position 2177 of SEQ ID NO: 1881061
gcuuaauugccucauuagc

SEQ ID NO: 2015019 - RNA, 19 nt, Artificial Sequence
  Description of Artificial Sequence: Synthetic oligonucleotide
  Antisense strand to SEQ ID NO: 2015018
gcuaaugaggcaauuaagc

SEQ ID NO: 2015020 - RNA, 19 nt, Artificial Sequence
  Description of Artificial Sequence: Synthetic oligonucleotide
  Sense strand starting at position 2272 of SEQ ID NO: 1881061
ugaggcauugauggugaca

SEQ ID NO: 2015021 - RNA, 19 nt, Artificial Sequence
  Description of Artificial Sequence: Synthetic oligonucleotide
  Antisense strand to SEQ ID NO: 2015020
ugucaccaucaaugccuca

SEQ ID NO: 2015022 - RNA, 19 nt, Artificial Sequence
  Description of Artificial Sequence: Synthetic oligonucleotide
  Sense strand starting at position 2431 of SEQ ID NO: 1881061
ugcggacuguucccaggua

SEQ ID NO: 2015023 - RNA, 19 nt, Artificial Sequence
  Description of Artificial Sequence: Synthetic oligonucleotide
  Antisense strand to SEQ ID NO: 2015022
uaccugggaacaguccgca

SEQ ID NO: 2015024 - RNA, 19 nt, Artificial Sequence
  Description of Artificial Sequence: Synthetic oligonucleotide
  Sense strand starting at position 2580 of SEQ ID NO: 1881061
ggaggaguucaauggcucu

SEQ ID NO: 2015025 - RNA, 19 nt, Artificial Sequence
  Description of Artificial Sequence: Synthetic oligonucleotide
  Antisense strand to SEQ ID NO: 2015024
agagccauugaacuccucc

SEQ ID NO: 2015026 - RNA, 19 nt, Artificial Sequence
  Description of Artificial Sequence: Synthetic oligonucleotide
  Sense strand starting at position 3145 of SEQ ID NO: 1881061
ccacauugggcccaucaga

SEQ ID NO: 2015027 - RNA, 19 nt, Artificial Sequence
  Description of Artificial Sequence: Synthetic oligonucleotide
  Antisense strand to SEQ ID NO: 2015026
ucugaugggcccaaugugg

SEQ ID NO: 2015028 - RNA, 19 nt, Artificial Sequence
  Description of Artificial Sequence: Synthetic oligonucleotide
  Sense strand starting at position 3341 of SEQ ID NO: 1881061
gugaccaaggugugaguau

SEQ ID NO: 2015029 - RNA, 19 nt, Artificial Sequence
  Description of Artificial Sequence: Synthetic oligonucleotide
  Antisense strand to SEQ ID NO: 2015028
auacucacaccuuggucac

SEQ ID NO: 2015030 - RNA, 19 nt, Artificial Sequence
  Description of Artificial Sequence: Synthetic oligonucleotide
  Sense strand starting at position 3596 of SEQ ID NO: 1881061
agcgaaugagagggaucua

SEQ ID NO: 2015031 - RNA, 19 nt, Artificial Sequence
  Description of Artificial Sequence: Synthetic oligonucleotide
  Antisense strand to SEQ ID NO: 2015030
uagaucccucucauucgcu

SEQ ID NO: 2015032 - RNA, 19 nt, Artificial Sequence
  Description of Artificial Sequence: Synthetic oligonucleotide
  Sense strand starting at position 3615 of SEQ ID NO: 1881061
gguugcaugcgccauauga

SEQ ID NO: 2015033 - RNA, 19 nt, Artificial Sequence
  Description of Artificial Sequence: Synthetic oligonucleotide
  Antisense strand to SEQ ID NO: 2015032
ucauauggcgcaugcaacc

SEQ ID NO: 2015034 - RNA, 19 nt, Artificial Sequence
  Description of Artificial Sequence: Synthetic oligonucleotide
  Sense strand starting at position 3617 of SEQ ID NO: 1881061
uugcaugcgccauaugaga

SEQ ID NO: 2015035 - RNA, 19 nt, Artificial Sequence
  Description of Artificial Sequence: Synthetic oligonucleotide
  Antisense strand to SEQ ID NO: 2015034
ucucauauggcgcaugcaa

SEQ ID NO: 2015036 - RNA, 19 nt, Artificial Sequence
  Description of Artificial Sequence: Synthetic oligonucleotide
  Sense strand starting at position 3619 of SEQ ID NO: 1881061
gcaugcgccauaugagaau

SEQ ID NO: 2015037 - RNA, 19 nt, Artificial Sequence
  Description of Artificial Sequence: Synthetic oligonucleotide
  Antisense strand to SEQ ID NO: 2015036
auucucauauggcgcaugc

SEQ ID NO: 2015038 - RNA, 19 nt, Artificial Sequence
  Description of Artificial Sequence: Synthetic oligonucleotide
  Sense strand starting at position 3636 of SEQ ID NO: 1881061
aucuaaugccuaugaucug

SEQ ID NO: 2015039 - RNA, 19 nt, Artificial Sequence
  Description of Artificial Sequence: Synthetic oligonucleotide
  Antisense strand to SEQ ID NO: 2015038
cagaucauaggcauuagau

SEQ ID NO: 2015040 - RNA, 19 nt, Artificial Sequence
  Description of Artificial Sequence: Synthetic oligonucleotide
  Sense strand starting at position 3748 of SEQ ID NO: 1881061
gaggaccgcuggucuauaa

SEQ ID NO: 2015041 - RNA, 19 nt, Artificial Sequence
  Description of Artificial Sequence: Synthetic oligonucleotide
  Antisense strand to SEQ ID NO: 2015040
uuauagaccagcgguccuc

SEQ ID NO: 2015042 - RNA, 19 nt, Artificial Sequence
  Description of Artificial Sequence: Synthetic oligonucleotide
  Sense strand starting at position 3807 of SEQ ID NO: 1881061
gcagaugagcuauguaaag

SEQ ID NO: 2015043 - RNA, 19 nt, Artificial Sequence
  Description of Artificial Sequence: Synthetic oligonucleotide
  Antisense strand to SEQ ID NO: 2015042
cuuuacauagcucaucugc

SEQ ID NO: 2015044 - RNA, 19 nt, Artificial Sequence
  Description of Artificial Sequence: Synthetic oligonucleotide
  Sense strand starting at position 3849 of SEQ ID NO: 1881061
accucuuugugcccagaaa

SEQ ID NO: 2015045 - RNA, 19 nt, Artificial Sequence
  Description of Artificial Sequence: Synthetic oligonucleotide
  Antisense strand to SEQ ID NO: 2015044
uuucugggcacaaagaggu

SEQ ID NO: 2015046 - RNA, 19 nt, Artificial Sequence
  Description of Artificial Sequence: Synthetic oligonucleotide
  Sense strand starting at position 3850 of SEQ ID NO: 1881061
ccucuuugugcccagaaag

SEQ ID NO: 2015047 - RNA, 19 nt, Artificial Sequence
  Description of Artificial Sequence: Synthetic oligonucleotide
  Antisense strand to SEQ ID NO: 2015046
cuuucugggcacaaagagg

SEQ ID NO: 2015048 - RNA, 19 nt, Artificial Sequence
  Description of Artificial Sequence: Synthetic oligonucleotide
  Sense strand starting at position 13 of SEQ ID NO: 1881062
gcggguaccuauuucuaaa

SEQ ID NO: 2015049 - RNA, 19 nt, Artificial Sequence
  Description of Artificial Sequence: Synthetic oligonucleotide
  Antisense strand to SEQ ID NO: 2015048
uuuagaaauagguacccgc

SEQ ID NO: 2015050 - RNA, 19 nt, Artificial Sequence
  Description of Artificial Sequence: Synthetic oligonucleotide
  Sense strand starting at position 253 of SEQ ID NO: 1881062
gacugaagauuugacuuga

SEQ ID NO: 2015051 - RNA, 19 nt, Artificial Sequence
  Description of Artificial Sequence: Synthetic oligonucleotide
  Antisense strand to SEQ ID NO: 2015050
ucaagucaaaucuucaguc

SEQ ID NO: 2015052 - RNA, 19 nt, Artificial Sequence
  Description of Artificial Sequence: Synthetic oligonucleotide
  Sense strand starting at position 456 of SEQ ID NO: 1881062
ccacaaauugucuaguauc

SEQ ID NO: 2015053 - RNA, 19 nt, Artificial Sequence
  Description of Artificial Sequence: Synthetic oligonucleotide
  Antisense strand to SEQ ID NO: 2015052
gauacuagacaauuugugg

SEQ ID NO: 2015054 - RNA, 19 nt, Artificial Sequence
  Description of Artificial Sequence: Synthetic oligonucleotide
  Sense strand starting at position 488 of SEQ ID NO: 1881062
guugauuuaucugccuauu

SEQ ID NO: 2015055 - RNA, 19 nt, Artificial Sequence
  Description of Artificial Sequence: Synthetic oligonucleotide
  Antisense strand to SEQ ID NO: 2015054
aauaggcagauaaaucaac

SEQ ID NO: 2015056 - RNA, 19 nt, Artificial Sequence
  Description of Artificial Sequence: Synthetic oligonucleotide
  Sense strand starting at position 542 of SEQ ID NO: 1881062
aucaaagaacucuagcguu

SEQ ID NO: 2015057 - RNA, 19 nt, Artificial Sequence
  Description of Artificial Sequence: Synthetic oligonucleotide
  Antisense strand to SEQ ID NO: 2015056
aacgcuagaguucuuugau

SEQ ID NO: 2015058 - RNA, 19 nt, Artificial Sequence
  Description of Artificial Sequence: Synthetic oligonucleotide
  Sense strand starting at position 562 of SEQ ID NO: 1881062
cucaauuacugaguaggga

SEQ ID NO: 2015059 - RNA, 19 nt, Artificial Sequence
  Description of Artificial Sequence: Synthetic oligonucleotide
  Antisense strand to SEQ ID NO: 2015058
ucccuacucaguaauugag

SEQ ID NO: 2015060 - RNA, 19 nt, Artificial Sequence
  Description of Artificial Sequence: Synthetic oligonucleotide
  Sense strand starting at position 627 of SEQ ID NO: 1881062
uucuuaucugcauaaugag

SEQ ID NO: 2015061 - RNA, 19 nt, Artificial Sequence
  Description of Artificial Sequence: Synthetic oligonucleotide
  Antisense strand to SEQ ID NO: 2015060
cucauuaugcagauaagaa

SEQ ID NO: 2015062 - RNA, 19 nt, Artificial Sequence
  Description of Artificial Sequence: Synthetic oligonucleotide
  Sense strand starting at position 634 of SEQ ID NO: 1881062
cugcauaaugagcaugaua

SEQ ID NO: 2015063 - RNA, 19 nt, Artificial Sequence
  Description of Artificial Sequence: Synthetic oligonucleotide
  Antisense strand to SEQ ID NO: 2015062
uaucaugcucauuaugcag

SEQ ID NO: 2015064 - RNA, 19 nt, Artificial Sequence
  Description of Artificial Sequence: Synthetic oligonucleotide
  Sense strand starting at position 636 of SEQ ID NO: 1881062
gcauaaugagcaugauaaa

SEQ ID NO: 2015065 - RNA, 19 nt, Artificial Sequence
  Description of Artificial Sequence: Synthetic oligonucleotide
  Antisense strand to SEQ ID NO: 2015064
uuuaucaugcucauuaugc

SEQ ID NO: 2015066 - RNA, 19 nt, Artificial Sequence
  Description of Artificial Sequence: Synthetic oligonucleotide
  Sense strand starting at position 649 of SEQ ID NO: 1881062
gauaaauuagguuggaugu

SEQ ID NO: 2015067 - RNA, 19 nt, Artificial Sequence
  Description of Artificial Sequence: Synthetic oligonucleotide
  Antisense strand to SEQ ID NO: 2015066
acauccaaccuaauuuauc

SEQ ID NO: 2015068 - RNA, 19 nt, Artificial Sequence
  Description of Artificial Sequence: Synthetic oligonucleotide
  Sense strand starting at position 673 of SEQ ID NO: 1881062
uacguaaauagaugugaga

SEQ ID NO: 2015069 - RNA, 19 nt, Artificial Sequence
  Description of Artificial Sequence: Synthetic oligonucleotide
  Antisense strand to SEQ ID NO: 2015068
ucucacaucuauuuacgua

SEQ ID NO: 2015070 - RNA, 19 nt, Artificial Sequence
  Description of Artificial Sequence: Synthetic oligonucleotide
  Sense strand starting at position 720 of SEQ ID NO: 1881062
uugaaagaaucaguauguu

SEQ ID NO: 2015071 - RNA, 19 nt, Artificial Sequence
  Description of Artificial Sequence: Synthetic oligonucleotide
  Antisense strand to SEQ ID NO: 2015070
aacauacugauucuuucaa

SEQ ID NO: 2015072 - RNA, 19 nt, Artificial Sequence
  Description of Artificial Sequence: Synthetic oligonucleotide
  Sense strand starting at position 723 of SEQ ID NO: 1881062
aaagaaucaguauguuaag

SEQ ID NO: 2015073 - RNA, 19 nt, Artificial Sequence
  Description of Artificial Sequence: Synthetic oligonucleotide
  Antisense strand to SEQ ID NO: 2015072
cuuaacauacugauucuuu

SEQ ID NO: 2015074 - RNA, 19 nt, Artificial Sequence
  Description of Artificial Sequence: Synthetic oligonucleotide
  Sense strand starting at position 837 of SEQ ID NO: 1881062
gauagcagccaguaauuga

SEQ ID NO: 2015075 - RNA, 19 nt, Artificial Sequence
  Description of Artificial Sequence: Synthetic oligonucleotide
  Antisense strand to SEQ ID NO: 2015074
ucaauuacuggcugcuauc

SEQ ID NO: 2015076 - RNA, 19 nt, Artificial Sequence
  Description of Artificial Sequence: Synthetic oligonucleotide
  Sense strand starting at position 934 of SEQ ID NO: 1881062
gggagaugucuugacugug

SEQ ID NO: 2015077 - RNA, 19 nt, Artificial Sequence
  Description of Artificial Sequence: Synthetic oligonucleotide
  Antisense strand to SEQ ID NO: 2015076
cacagucaagacaucuccc

SEQ ID NO: 2015078 - RNA, 19 nt, Artificial Sequence
  Description of Artificial Sequence: Synthetic oligonucleotide
  Sense strand starting at position 994 of SEQ ID NO: 1881062
cucugacaucccugaugaa

SEQ ID NO: 2015079 - RNA, 19 nt, Artificial Sequence
  Description of Artificial Sequence: Synthetic oligonucleotide
  Antisense strand to SEQ ID NO: 2015078
uucaucagggaugucagag

SEQ ID NO: 2015080 - RNA, 19 nt, Artificial Sequence
  Description of Artificial Sequence: Synthetic oligonucleotide
  Sense strand starting at position 1219 of SEQ ID NO: 1881062
cuagauacuuagccugaau

SEQ ID NO: 2015081 - RNA, 19 nt, Artificial Sequence
  Description of Artificial Sequence: Synthetic oligonucleotide
  Antisense strand to SEQ ID NO: 2015080
auucaggcuaaguaucuag

SEQ ID NO: 2015082 - RNA, 19 nt, Artificial Sequence
  Description of Artificial Sequence: Synthetic oligonucleotide
  Sense strand starting at position 1221 of SEQ ID NO: 1881062
agauacuuagccugaauuc

SEQ ID NO: 2015083 - RNA, 19 nt, Artificial Sequence
  Description of Artificial Sequence: Synthetic oligonucleotide
  Antisense strand to SEQ ID NO: 2015082
gaauucaggcuaaguaucu

SEQ ID NO: 2015084 - RNA, 19 nt, Artificial Sequence
  Description of Artificial Sequence: Synthetic oligonucleotide
  Sense strand starting at position 1333 of SEQ ID NO: 1881062
ugguuuauggcccagaauc

SEQ ID NO: 2015085 - RNA, 19 nt, Artificial Sequence
  Description of Artificial Sequence: Synthetic oligonucleotide
  Antisense strand to SEQ ID NO: 2015084
gauucugggccauaaacca

SEQ ID NO: 2015086 - RNA, 19 nt, Artificial Sequence
  Description of Artificial Sequence: Synthetic oligonucleotide
  Sense strand starting at position 1587 of SEQ ID NO: 1881062
uccagauucccugaugcca

SEQ ID NO: 2015087 - RNA, 19 nt, Artificial Sequence
  Description of Artificial Sequence: Synthetic oligonucleotide
  Antisense strand to SEQ ID NO: 2015086
uggcaucagggaaucugga

SEQ ID NO: 2015088 - RNA, 19 nt, Artificial Sequence
  Description of Artificial Sequence: Synthetic oligonucleotide
  Sense strand starting at position 1778 of SEQ ID NO: 1881062
accugaguauaggcauaga

SEQ ID NO: 2015089 - RNA, 19 nt, Artificial Sequence
  Description of Artificial Sequence: Synthetic oligonucleotide
  Antisense strand to SEQ ID NO: 2015088
ucuaugccuauacucaggu

SEQ ID NO: 2015090 - RNA, 19 nt, Artificial Sequence
  Description of Artificial Sequence: Synthetic oligonucleotide
  Sense strand starting at position 2148 of SEQ ID NO: 1881062
gaagaaaguccacgagagu

SEQ ID NO: 2015091 - RNA, 19 nt, Artificial Sequence
  Description of Artificial Sequence: Synthetic oligonucleotide
  Antisense strand to SEQ ID NO: 2015090
acucucguggacuuucuuc

SEQ ID NO: 2015092 - RNA, 19 nt, Artificial Sequence
  Description of Artificial Sequence: Synthetic oligonucleotide
  Sense strand starting at position 2151 of SEQ ID NO: 1881062
gaaaguccacgagaguuau

SEQ ID NO: 2015093 - RNA, 19 nt, Artificial Sequence
  Description of Artificial Sequence: Synthetic oligonucleotide
  Antisense strand to SEQ ID NO: 2015092
auaacucucguggacuuuc

SEQ ID NO: 2015094 - RNA, 19 nt, Artificial Sequence
  Description of Artificial Sequence: Synthetic oligonucleotide
  Sense strand starting at position 2155 of SEQ ID NO: 1881062
guccacgagaguuauuaug

SEQ ID NO: 2015095 - RNA, 19 nt, Artificial Sequence
  Description of Artificial Sequence: Synthetic oligonucleotide
  Antisense strand to SEQ ID NO: 2015094
cauaauaacucucguggac

SEQ ID NO: 2015096 - RNA, 19 nt, Artificial Sequence
  Description of Artificial Sequence: Synthetic oligonucleotide
  Sense strand starting at position 2157 of SEQ ID NO: 1881062
ccacgagaguuauuaugau

SEQ ID NO: 2015097 - RNA, 19 nt, Artificial Sequence
  Description of Artificial Sequence: Synthetic oligonucleotide
  Antisense strand to SEQ ID NO: 2015096
aucauaauaacucucgugg

SEQ ID NO: 2015098 - RNA, 19 nt, Artificial Sequence
  Description of Artificial Sequence: Synthetic oligonucleotide
  Sense strand starting at position 2169 of SEQ ID NO: 1881062
uuaugauacuagcuauuga

SEQ ID NO: 2015099 - RNA, 19 nt, Artificial Sequence
  Description of Artificial Sequence: Synthetic oligonucleotide
  Antisense strand to SEQ ID NO: 2015098
ucaauagcuaguaucauaa

SEQ ID NO: 2015100 - RNA, 19 nt, Artificial Sequence
  Description of Artificial Sequence: Synthetic oligonucleotide
  Sense strand starting at position 2374 of SEQ ID NO: 1881062
uggugcaaucaggacuuaa

SEQ ID NO: 2015101 - RNA, 19 nt, Artificial Sequence
  Description of Artificial Sequence: Synthetic oligonucleotide
  Antisense strand to SEQ ID NO: 2015100
uuaaguccugauugcacca

SEQ ID NO: 2015102 - RNA, 19 nt, Artificial Sequence
  Description of Artificial Sequence: Synthetic oligonucleotide
  Sense strand starting at position 2628 of SEQ ID NO: 1881062
aguagagacucaguagauu

SEQ ID NO: 2015103 - RNA, 19 nt, Artificial Sequence
  Description of Artificial Sequence: Synthetic oligonucleotide
  Antisense strand to SEQ ID NO: 2015102
aaucuacugagucucuacu

SEQ ID NO: 2015104 - RNA, 19 nt, Artificial Sequence
  Description of Artificial Sequence: Synthetic oligonucleotide
  Sense strand starting at position 2846 of SEQ ID NO: 1881062
cugugugaaguggaugauu

SEQ ID NO: 2015105 - RNA, 19 nt, Artificial Sequence
  Description of Artificial Sequence: Synthetic oligonucleotide
  Antisense strand to SEQ ID NO: 2015104
aaucauccacuucacacag

SEQ ID NO: 2015106 - RNA, 19 nt, Artificial Sequence
  Description of Artificial Sequence: Synthetic oligonucleotide
  Sense strand starting at position 2919 of SEQ ID NO: 1881062
gcaugaauucuugagucag

SEQ ID NO: 2015107 - RNA, 19 nt, Artificial Sequence
  Description of Artificial Sequence: Synthetic oligonucleotide
  Antisense strand to SEQ ID NO: 2015106
cugacucaagaauucaugc

SEQ ID NO: 2015108 - RNA, 19 nt, Artificial Sequence
  Description of Artificial Sequence: Synthetic oligonucleotide
  Sense strand starting at position 2952 of SEQ ID NO: 1881062
ugccucaaggcugagauau

SEQ ID NO: 2015109 - RNA, 19 nt, Artificial Sequence
  Description of Artificial Sequence: Synthetic oligonucleotide
  Antisense strand to SEQ ID NO: 2015108
auaucucagccuugaggca

SEQ ID NO: 2015110 - RNA, 19 nt, Artificial Sequence
  Description of Artificial Sequence: Synthetic oligonucleotide
  Sense strand starting at position 3124 of SEQ ID NO: 1881062
cugcucgauauuuggucaa

SEQ ID NO: 2015111 - RNA, 19 nt, Artificial Sequence
  Description of Artificial Sequence: Synthetic oligonucleotide
  Antisense strand to SEQ ID NO: 2015110
uugaccaaauaucgagcag

SEQ ID NO: 2015112 - RNA, 19 nt, Artificial Sequence
  Description of Artificial Sequence: Synthetic oligonucleotide
  Sense strand starting at position 3157 of SEQ ID NO: 1881062
cauagaauguagcuuagau

SEQ ID NO: 2015113 - RNA, 19 nt, Artificial Sequence
  Description of Artificial Sequence: Synthetic oligonucleotide
  Antisense strand to SEQ ID NO: 2015112
aucuaagcuacauucuaug

SEQ ID NO: 2015114 - RNA, 19 nt, Artificial Sequence
  Description of Artificial Sequence: Synthetic oligonucleotide
  Sense strand starting at position 3350 of SEQ ID NO: 1881062
cuggguccugacuaggauu

SEQ ID NO: 2015115 - RNA, 19 nt, Artificial Sequence
  Description of Artificial Sequence: Synthetic oligonucleotide
  Antisense strand to SEQ ID NO: 2015114
aauccuagucaggacccag

SEQ ID NO: 2015116 - RNA, 19 nt, Artificial Sequence
  Description of Artificial Sequence: Synthetic oligonucleotide
  Sense strand starting at position 3385 of SEQ ID NO: 1881062
gguaucucaccuuacauca

SEQ ID NO: 2015117 - RNA, 19 nt, Artificial Sequence
  Description of Artificial Sequence: Synthetic oligonucleotide
  Antisense strand to SEQ ID NO: 2015116
ugauguaaggugagauacc

SEQ ID NO: 2015118 - RNA, 19 nt, Artificial Sequence
  Description of Artificial Sequence: Synthetic oligonucleotide
  Sense strand starting at position 3481 of SEQ ID NO: 1881062
gcaguuucugauuacacaa

SEQ ID NO: 2015119 - RNA, 19 nt, Artificial Sequence
  Description of Artificial Sequence: Synthetic oligonucleotide
  Antisense strand to SEQ ID NO: 2015118
uuguguaaucagaaacugc

SEQ ID NO: 2015120 - RNA, 19 nt, Artificial Sequence
  Description of Artificial Sequence: Synthetic oligonucleotide
  Sense strand starting at position 3536 of SEQ ID NO: 1881062
ugccaaugacuuuagaauu

SEQ ID NO: 2015121 - RNA, 19 nt, Artificial Sequence
  Description of Artificial Sequence: Synthetic oligonucleotide
  Antisense strand to SEQ ID NO: 2015120
aauucuaaagucauuggca

SEQ ID NO: 2015122 - RNA, 19 nt, Artificial Sequence
  Description of Artificial Sequence: Synthetic oligonucleotide
  Sense strand starting at position 3914 of SEQ ID NO: 1881062
gggugcucgaguguguuau

SEQ ID NO: 2015123 - RNA, 19 nt, Artificial Sequence
  Description of Artificial Sequence: Synthetic oligonucleotide
  Antisense strand to SEQ ID NO: 2015122
auaacacacucgagcaccc

SEQ ID NO: 2015124 - RNA, 19 nt, Artificial Sequence
  Description of Artificial Sequence: Synthetic oligonucleotide
  Sense strand starting at position 3963 of SEQ ID NO: 1881062
aagagaaagucauccaggu

SEQ ID NO: 2015125 - RNA, 19 nt, Artificial Sequence
  Description of Artificial Sequence: Synthetic oligonucleotide
  Antisense strand to SEQ ID NO: 2015124
accuggaugacuuucucuu

SEQ ID NO: 2015126 - RNA, 19 nt, Artificial Sequence
  Description of Artificial Sequence: Synthetic oligonucleotide
  Sense strand starting at position 3967 of SEQ ID NO: 1881062
gaaagucauccaggugauc

SEQ ID NO: 2015127 - RNA, 19 nt, Artificial Sequence
  Description of Artificial Sequence: Synthetic oligonucleotide
  Antisense strand to SEQ ID NO: 2015126
gaucaccuggaugacuuuc

SEQ ID NO: 2015128 - RNA, 19 nt, Artificial Sequence
  Description of Artificial Sequence: Synthetic oligonucleotide
  Sense strand starting at position 18 of SEQ ID NO: 1881063
acaauuauuugguguuaca

SEQ ID NO: 2015129 - RNA, 19 nt, Artificial Sequence
  Description of Artificial Sequence: Synthetic oligonucleotide
  Antisense strand to SEQ ID NO: 2015128
uguaacaccaaauaauugu

SEQ ID NO: 2015130 - RNA, 19 nt, Artificial Sequence
  Description of Artificial Sequence: Synthetic oligonucleotide
  Sense strand starting at position 48 of SEQ ID NO: 1881063
gcguaacuuuacuccacaa

SEQ ID NO: 2015131 - RNA, 19 nt, Artificial Sequence
  Description of Artificial Sequence: Synthetic oligonucleotide
  Antisense strand to SEQ ID NO: 2015130
uuguggaguaaaguuacgc

SEQ ID NO: 2015132 - RNA, 19 nt, Artificial Sequence
  Description of Artificial Sequence: Synthetic oligonucleotide
  Sense strand starting at position 213 of SEQ ID NO: 1881063
aacugauugagguggcaga

SEQ ID NO: 2015133 - RNA, 19 nt, Artificial Sequence
  Description of Artificial Sequence: Synthetic oligonucleotide
  Antisense strand to SEQ ID NO: 2015132
ucugccaccucaaucaguu

SEQ ID NO: 2015134 - RNA, 19 nt, Artificial Sequence
  Description of Artificial Sequence: Synthetic oligonucleotide
  Sense strand starting at position 354 of SEQ ID NO: 1881063
gugacuugcccagggcaca

SEQ ID NO: 2015135 - RNA, 19 nt, Artificial Sequence
  Description of Artificial Sequence: Synthetic oligonucleotide
  Antisense strand to SEQ ID NO: 2015134
ugugcccugggcaagucac

SEQ ID NO: 2015136 - RNA, 19 nt, Artificial Sequence
  Description of Artificial Sequence: Synthetic oligonucleotide
  Sense strand starting at position 668 of SEQ ID NO: 1881063
guaugcugauguuccaaau

SEQ ID NO: 2015137 - RNA, 19 nt, Artificial Sequence
  Description of Artificial Sequence: Synthetic oligonucleotide
  Antisense strand to SEQ ID NO: 2015136
auuuggaacaucagcauac

SEQ ID NO: 2015138 - RNA, 19 nt, Artificial Sequence
  Description of Artificial Sequence: Synthetic oligonucleotide
  Sense strand starting at position 2072 of SEQ ID NO: 1881063
acacuuguccuggaacuua

SEQ ID NO: 2015139 - RNA, 19 nt, Artificial Sequence
  Description of Artificial Sequence: Synthetic oligonucleotide
  Antisense strand to SEQ ID NO: 2015138
uaaguuccaggacaagugu

SEQ ID NO: 2015140 - RNA, 19 nt, Artificial Sequence
  Description of Artificial Sequence: Synthetic oligonucleotide
  Sense strand starting at position 2097 of SEQ ID NO: 1881063
ucagcucugucacuuaguu

SEQ ID NO: 2015141 - RNA, 19 nt, Artificial Sequence
  Description of Artificial Sequence: Synthetic oligonucleotide
  Antisense strand to SEQ ID NO: 2015140
aacuaagugacagagcuga

SEQ ID NO: 2015142 - RNA, 19 nt, Artificial Sequence
  Description of Artificial Sequence: Synthetic oligonucleotide
  Sense strand starting at position 2103 of SEQ ID NO: 1881063
cugucacuuaguugggaua

SEQ ID NO: 2015143 - RNA, 19 nt, Artificial Sequence
  Description of Artificial Sequence: Synthetic oligonucleotide
  Antisense strand to SEQ ID NO: 2015142
uaucccaacuaagugacag

SEQ ID NO: 2015144 - RNA, 19 nt, Artificial Sequence
  Description of Artificial Sequence: Synthetic oligonucleotide
  Sense strand starting at position 2116 of SEQ ID NO: 1881063
gggauacgaccuugauuau

SEQ ID NO: 2015145 - RNA, 19 nt, Artificial Sequence
  Description of Artificial Sequence: Synthetic oligonucleotide
  Antisense strand to SEQ ID NO: 2015144
auaaucaaggucguauccc

SEQ ID NO: 2015146 - RNA, 19 nt, Artificial Sequence
  Description of Artificial Sequence: Synthetic oligonucleotide
  Sense strand starting at position 2122 of SEQ ID NO: 1881063
cgaccuugauuaucacuaa

SEQ ID NO: 2015147 - RNA, 19 nt, Artificial Sequence
  Description of Artificial Sequence: Synthetic oligonucleotide
  Antisense strand to SEQ ID NO: 2015146
uuagugauaaucaaggucg

SEQ ID NO: 2015148 - RNA, 19 nt, Artificial Sequence
  Description of Artificial Sequence: Synthetic oligonucleotide
  Sense strand starting at position 2194 of SEQ ID NO: 1881063
ggccaaaguggucaggaga

SEQ ID NO: 2015149 - RNA, 19 nt, Artificial Sequence
  Description of Artificial Sequence: Synthetic oligonucleotide
  Antisense strand to SEQ ID NO: 2015148
ucuccugaccacuuuggcc

SEQ ID NO: 2015150 - RNA, 19 nt, Artificial Sequence
  Description of Artificial Sequence: Synthetic oligonucleotide
  Sense strand starting at position 2236 of SEQ ID NO: 1881063
acugauugggcuugggaga

SEQ ID NO: 2015151 - RNA, 19 nt, Artificial Sequence
  Description of Artificial Sequence: Synthetic oligonucleotide
  Antisense strand to SEQ ID NO: 2015150
ucucccaagcccaaucagu

SEQ ID NO: 2015152 - RNA, 19 nt, Artificial Sequence
  Description of Artificial Sequence: Synthetic oligonucleotide
  Sense strand starting at position 2434 of SEQ ID NO: 1881063
caagguguagugcaaagau

SEQ ID NO: 2015153 - RNA, 19 nt, Artificial Sequence
  Description of Artificial Sequence: Synthetic oligonucleotide
  Antisense strand to SEQ ID NO: 2015152
aucuuugcacuacaccuug

SEQ ID NO: 2015154 - RNA, 19 nt, Artificial Sequence
  Description of Artificial Sequence: Synthetic oligonucleotide
  Sense strand starting at position 2442 of SEQ ID NO: 1881063
agugcaaagaucugggcuu

SEQ ID NO: 2015155 - RNA, 19 nt, Artificial Sequence
  Description of Artificial Sequence: Synthetic oligonucleotide
  Antisense strand to SEQ ID NO: 2015154
aagcccagaucuuugcacu

SEQ ID NO: 2015156 - RNA, 19 nt, Artificial Sequence
  Description of Artificial Sequence: Synthetic oligonucleotide
  Sense strand starting at position 2480 of SEQ ID NO: 1881063
ggauaccagcucugugauc

SEQ ID NO: 2015157 - RNA, 19 nt, Artificial Sequence
  Description of Artificial Sequence: Synthetic oligonucleotide
  Antisense strand to SEQ ID NO: 2015156
gaucacagagcugguaucc

SEQ ID NO: 2015158 - RNA, 19 nt, Artificial Sequence
  Description of Artificial Sequence: Synthetic oligonucleotide
  Sense strand starting at position 2482 of SEQ ID NO: 1881063
auaccagcucugugaucca

SEQ ID NO: 2015159 - RNA, 19 nt, Artificial Sequence
  Description of Artificial Sequence: Synthetic oligonucleotide
  Antisense strand to SEQ ID NO: 2015158
uggaucacagagcugguau

SEQ ID NO: 2015160 - RNA, 19 nt, Artificial Sequence
  Description of Artificial Sequence: Synthetic oligonucleotide
  Sense strand starting at position 2553 of SEQ ID NO: 1881063
gguuacugccaagacugaa

SEQ ID NO: 2015161 - RNA, 19 nt, Artificial Sequence
  Description of Artificial Sequence: Synthetic oligonucleotide
  Antisense strand to SEQ ID NO: 2015160
uucagucuuggcaguaacc

SEQ ID NO: 2015162 - RNA, 19 nt, Artificial Sequence
  Description of Artificial Sequence: Synthetic oligonucleotide
  Sense strand starting at position 2585 of SEQ ID NO: 1881063
augagcuguagcuggcaaa

SEQ ID NO: 2015163 - RNA, 19 nt, Artificial Sequence
  Description of Artificial Sequence: Synthetic oligonucleotide
  Antisense strand to SEQ ID NO: 2015162
uuugccagcuacagcucau

SEQ ID NO: 2015164 - RNA, 19 nt, Artificial Sequence
  Description of Artificial Sequence: Synthetic oligonucleotide
  Sense strand starting at position 2683 of SEQ ID NO: 1881063
guguuaaaugcucaugcag

SEQ ID NO: 2015165 - RNA, 19 nt, Artificial Sequence
  Description of Artificial Sequence: Synthetic oligonucleotide
  Antisense strand to SEQ ID NO: 2015164
cugcaugagcauuuaacac

SEQ ID NO: 2015166 - RNA, 19 nt, Artificial Sequence
  Description of Artificial Sequence: Synthetic oligonucleotide
  Sense strand starting at position 2907 of SEQ ID NO: 1881063
gagagagguuuccauauuc

SEQ ID NO: 2015167 - RNA, 19 nt, Artificial Sequence
  Description of Artificial Sequence: Synthetic oligonucleotide
  Antisense strand to SEQ ID NO: 2015166
gaauauggaaaccucucuc

SEQ ID NO: 2015168 - RNA, 19 nt, Artificial Sequence
  Description of Artificial Sequence: Synthetic oligonucleotide
  Sense strand starting at position 2941 of SEQ ID NO: 1881063
gaauacacugggugaacuu

SEQ ID NO: 2015169 - RNA, 19 nt, Artificial Sequence
  Description of Artificial Sequence: Synthetic oligonucleotide
  Antisense strand to SEQ ID NO: 2015168
aaguucacccaguguauuc

SEQ ID NO: 2015170 - RNA, 19 nt, Artificial Sequence
  Description of Artificial Sequence: Synthetic oligonucleotide
  Sense strand starting at position 3092 of SEQ ID NO: 1881063
uccuuuauggaucguuuaa

SEQ ID NO: 2015171 - RNA, 19 nt, Artificial Sequence
  Description of Artificial Sequence: Synthetic oligonucleotide
  Antisense strand to SEQ ID NO: 2015170
uuaaacgauccauaaagga

SEQ ID NO: 2015172 - RNA, 19 nt, Artificial Sequence
  Description of Artificial Sequence: Synthetic oligonucleotide
  Sense strand starting at position 3094 of SEQ ID NO: 1881063
cuuuauggaucguuuaaug

SEQ ID NO: 2015173 - RNA, 19 nt, Artificial Sequence
  Description of Artificial Sequence: Synthetic oligonucleotide
  Antisense strand to SEQ ID NO: 2015172
cauuaaacgauccauaaag

SEQ ID NO: 2015174 - RNA, 19 nt, Artificial Sequence
  Description of Artificial Sequence: Synthetic oligonucleotide
  Sense strand starting at position 3124 of SEQ ID NO: 1881063
acuugagggucucuaaagu

SEQ ID NO: 2015175 - RNA, 19 nt, Artificial Sequence
  Description of Artificial Sequence: Synthetic oligonucleotide
  Antisense strand to SEQ ID NO: 2015174
acuuuagagacccucaagu

SEQ ID NO: 2015176 - RNA, 19 nt, Artificial Sequence
  Description of Artificial Sequence: Synthetic oligonucleotide
  Sense strand starting at position 3167 of SEQ ID NO: 1881063
gcgagcuauuugcuggaga

SEQ ID NO: 2015177 - RNA, 19 nt, Artificial Sequence
  Description of Artificial Sequence: Synthetic oligonucleotide
  Antisense strand to SEQ ID NO: 2015176
ucuccagcaaauagcucgc

SEQ ID NO: 2015178 - RNA, 19 nt, Artificial Sequence
  Description of Artificial Sequence: Synthetic oligonucleotide
  Sense strand starting at position 3215 of SEQ ID NO: 1881063
cuuuguguauaauuagcau

SEQ ID NO: 2015179 - RNA, 19 nt, Artificial Sequence
  Description of Artificial Sequence: Synthetic oligonucleotide
  Antisense strand to SEQ ID NO: 2015178
augcuaauuauacacaaag

SEQ ID NO: 2015180 - RNA, 19 nt, Artificial Sequence
  Description of Artificial Sequence: Synthetic oligonucleotide
  Sense strand starting at position 3218 of SEQ ID NO: 1881063
uguguauaauuagcauaag

SEQ ID NO: 2015181 - RNA, 19 nt, Artificial Sequence
  Description of Artificial Sequence: Synthetic oligonucleotide
  Antisense strand to SEQ ID NO: 2015180
cuuaugcuaauuauacaca

SEQ ID NO: 2015182 - RNA, 19 nt, Artificial Sequence
  Description of Artificial Sequence: Synthetic oligonucleotide
  Sense strand starting at position 3221 of SEQ ID NO: 1881063
guauaauuagcauaagagc

SEQ ID NO: 2015183 - RNA, 19 nt, Artificial Sequence
  Description of Artificial Sequence: Synthetic oligonucleotide
  Antisense strand to SEQ ID NO: 2015182
gcucuuaugcuaauuauac

SEQ ID NO: 2015184 - RNA, 19 nt, Artificial Sequence
  Description of Artificial Sequence: Synthetic oligonucleotide
  Sense strand starting at position 3236 of SEQ ID NO: 1881063
gagcacacguauuuaaguu

SEQ ID NO: 2015185 - RNA, 19 nt, Artificial Sequence
  Description of Artificial Sequence: Synthetic oligonucleotide
  Antisense strand to SEQ ID NO: 2015184
aacuuaaauacgugugcuc

SEQ ID NO: 2015186 - RNA, 19 nt, Artificial Sequence
  Description of Artificial Sequence: Synthetic oligonucleotide
  Sense strand starting at position 3244 of SEQ ID NO: 1881063
guauuuaaguucucaugca

SEQ ID NO: 2015187 - RNA, 19 nt, Artificial Sequence
  Description of Artificial Sequence: Synthetic oligonucleotide
  Antisense strand to SEQ ID NO: 2015186
ugcaugagaacuuaaauac

SEQ ID NO: 2015188 - RNA, 19 nt, Artificial Sequence
  Description of Artificial Sequence: Synthetic oligonucleotide
  Sense strand starting at position 3260 of SEQ ID NO: 1881063
gcacuuauaguuguguguu

SEQ ID NO: 2015189 - RNA, 19 nt, Artificial Sequence
  Description of Artificial Sequence: Synthetic oligonucleotide
  Antisense strand to SEQ ID NO: 2015188
aacacacaacuauaagugc

SEQ ID NO: 2015190 - RNA, 19 nt, Artificial Sequence
  Description of Artificial Sequence: Synthetic oligonucleotide
  Sense strand starting at position 3263 of SEQ ID NO: 1881063
cuuauaguuguguguucag

SEQ ID NO: 2015191 - RNA, 19 nt, Artificial Sequence
  Description of Artificial Sequence: Synthetic oligonucleotide
  Antisense strand to SEQ ID NO: 2015190
cugaacacacaacuauaag

SEQ ID NO: 2015192 - RNA, 19 nt, Artificial Sequence
  Description of Artificial Sequence: Synthetic oligonucleotide
  Sense strand starting at position 3266 of SEQ ID NO: 1881063
auaguuguguguucagaaa

SEQ ID NO: 2015193 - RNA, 19 nt, Artificial Sequence
  Description of Artificial Sequence: Synthetic oligonucleotide
  Antisense strand to SEQ ID NO: 2015192
uuucugaacacacaacuau

SEQ ID NO: 2015194 - RNA, 19 nt, Artificial Sequence
  Description of Artificial Sequence: Synthetic oligonucleotide
  Sense strand starting at position 3282 of SEQ ID NO: 1881063
aaaucaucuugagagagug

SEQ ID NO: 2015195 - RNA, 19 nt, Artificial Sequence
  Description of Artificial Sequence: Synthetic oligonucleotide
  Antisense strand to SEQ ID NO: 2015194
cacucucucaagaugauuu

SEQ ID NO: 2015196 - RNA, 19 nt, Artificial Sequence
  Description of Artificial Sequence: Synthetic oligonucleotide
  Sense strand starting at position 3664 of SEQ ID NO: 1881063
aaaugucacuggcaaauga

SEQ ID NO: 2015197 - RNA, 19 nt, Artificial Sequence
  Description of Artificial Sequence: Synthetic oligonucleotide
  Antisense strand to SEQ ID NO: 2015196
ucauuugccagugacauuu

SEQ ID NO: 2015198 - RNA, 19 nt, Artificial Sequence
  Description of Artificial Sequence: Synthetic oligonucleotide
  Sense strand starting at position 3740 of SEQ ID NO: 1881063
gacagaguuugcuucuuua

SEQ ID NO: 2015199 - RNA, 19 nt, Artificial Sequence
  Description of Artificial Sequence: Synthetic oligonucleotide
  Antisense strand to SEQ ID NO: 2015198
uaaagaagcaaacucuguc

SEQ ID NO: 2015200 - RNA, 19 nt, Artificial Sequence
  Description of Artificial Sequence: Synthetic oligonucleotide
  Sense strand starting at position 3743 of SEQ ID NO: 1881063
agaguuugcuucuuuaauc

SEQ ID NO: 2015201 - RNA, 19 nt, Artificial Sequence
  Description of Artificial Sequence: Synthetic oligonucleotide
  Antisense strand to SEQ ID NO: 2015200
gauuaaagaagcaaacucu

SEQ ID NO: 2015202 - RNA, 19 nt, Artificial Sequence
  Description of Artificial Sequence: Synthetic oligonucleotide
  Sense strand starting at position 3827 of SEQ ID NO: 1881063
gaaagcaaacgaugaguau

SEQ ID NO: 2015203 - RNA, 19 nt, Artificial Sequence
  Description of Artificial Sequence: Synthetic oligonucleotide
  Antisense strand to SEQ ID NO: 2015202
auacucaucguuugcuuuc

SEQ ID NO: 2015204 - RNA, 19 nt, Artificial Sequence
  Description of Artificial Sequence: Synthetic oligonucleotide
  Sense strand starting at position 3836 of SEQ ID NO: 1881063
cgaugaguaucggucucaa

SEQ ID NO: 2015205 - RNA, 19 nt, Artificial Sequence
  Description of Artificial Sequence: Synthetic oligonucleotide
  Antisense strand to SEQ ID NO: 2015204
uugagaccgauacucaucg

SEQ ID NO: 2015206 - RNA, 19 nt, Artificial Sequence
  Description of Artificial Sequence: Synthetic oligonucleotide
  Sense strand starting at position 3848 of SEQ ID NO: 1881063
gucucaagcuuccuauaga

SEQ ID NO: 2015207 - RNA, 19 nt, Artificial Sequence
  Description of Artificial Sequence: Synthetic oligonucleotide
  Antisense strand to SEQ ID NO: 2015206
ucuauaggaagcuugagac

SEQ ID NO: 2015208 - RNA, 19 nt, Artificial Sequence
  Description of Artificial Sequence: Synthetic oligonucleotide
  Sense strand starting at position 419 of SEQ ID NO: 1881064
cugggagucacuggauguu

SEQ ID NO: 2015209 - RNA, 19 nt, Artificial Sequence
  Description of Artificial Sequence: Synthetic oligonucleotide
  Antisense strand to SEQ ID NO: 2015208
aacauccagugacucccag

SEQ ID NO: 2015210 - RNA, 19 nt, Artificial Sequence
  Description of Artificial Sequence: Synthetic oligonucleotide
  Sense strand starting at position 587 of SEQ ID NO: 1881064
agggcuuaauacuccagaa

SEQ ID NO: 2015211 - RNA, 19 nt, Artificial Sequence
  Description of Artificial Sequence: Synthetic oligonucleotide
  Antisense strand to SEQ ID NO: 2015210
uucuggaguauuaagcccu

SEQ ID NO: 2015212 - RNA, 19 nt, Artificial Sequence
  Description of Artificial Sequence: Synthetic oligonucleotide
  Sense strand starting at position 826 of SEQ ID NO: 1881064
gcaggaaucuuacauuuaa

SEQ ID NO: 2015213 - RNA, 19 nt, Artificial Sequence
  Description of Artificial Sequence: Synthetic oligonucleotide
  Antisense strand to SEQ ID NO: 2015212
uuaaauguaagauuccugc

SEQ ID NO: 2015214 - RNA, 19 nt, Artificial Sequence
  Description of Artificial Sequence: Synthetic oligonucleotide
  Sense strand starting at position 858 of SEQ ID NO: 1881064
gugauuccucugcacacua

SEQ ID NO: 2015215 - RNA, 19 nt, Artificial Sequence
  Description of Artificial Sequence: Synthetic oligonucleotide
  Antisense strand to SEQ ID NO: 2015214
uagugugcagaggaaucac

SEQ ID NO: 2015216 - RNA, 19 nt, Artificial Sequence
  Description of Artificial Sequence: Synthetic oligonucleotide
  Sense strand starting at position 899 of SEQ ID NO: 1881064
gcaugcaugcaccaacaua

SEQ ID NO: 2015217 - RNA, 19 nt, Artificial Sequence
  Description of Artificial Sequence: Synthetic oligonucleotide
  Antisense strand to SEQ ID NO: 2015216
uauguuggugcaugcaugc

SEQ ID NO: 2015218 - RNA, 19 nt, Artificial Sequence
  Description of Artificial Sequence: Synthetic oligonucleotide
  Sense strand starting at position 1235 of SEQ ID NO: 1881064
accugaagauguuugaguu

SEQ ID NO: 2015219 - RNA, 19 nt, Artificial Sequence
  Description of Artificial Sequence: Synthetic oligonucleotide
  Antisense strand to SEQ ID NO: 2015218
aacucaaacaucuucaggu

SEQ ID NO: 2015220 - RNA, 19 nt, Artificial Sequence
  Description of Artificial Sequence: Synthetic oligonucleotide
  Sense strand starting at position 1236 of SEQ ID NO: 1881064
ccugaagauguuugaguua

SEQ ID NO: 2015221 - RNA, 19 nt, Artificial Sequence
  Description of Artificial Sequence: Synthetic oligonucleotide
  Antisense strand to SEQ ID NO: 2015220
uaacucaaacaucuucagg

SEQ ID NO: 2015222 - RNA, 19 nt, Artificial Sequence
  Description of Artificial Sequence: Synthetic oligonucleotide
  Sense strand starting at position 1239 of SEQ ID NO: 1881064
gaagauguuugaguuaaua

SEQ ID NO: 2015223 - RNA, 19 nt, Artificial Sequence
  Description of Artificial Sequence: Synthetic oligonucleotide
  Antisense strand to SEQ ID NO: 2015222
uauuaacucaaacaucuuc

SEQ ID NO: 2015224 - RNA, 19 nt, Artificial Sequence
  Description of Artificial Sequence: Synthetic oligonucleotide
  Sense strand starting at position 1280 of SEQ ID NO: 1881064
cuaggacuuuccuuguaga

SEQ ID NO: 2015225 - RNA, 19 nt, Artificial Sequence
  Description of Artificial Sequence: Synthetic oligonucleotide
  Antisense strand to SEQ ID NO: 2015224
ucuacaaggaaaguccuag

SEQ ID NO: 2015226 - RNA, 19 nt, Artificial Sequence
  Description of Artificial Sequence: Synthetic oligonucleotide
  Sense strand starting at position 1281 of SEQ ID NO: 1881064
uaggacuuuccuuguagaa

SEQ ID NO: 2015227 - RNA, 19 nt, Artificial Sequence
  Description of Artificial Sequence: Synthetic oligonucleotide
  Antisense strand to SEQ ID NO: 2015226
uucuacaaggaaaguccua

SEQ ID NO: 2015228 - RNA, 19 nt, Artificial Sequence
  Description of Artificial Sequence: Synthetic oligonucleotide
  Sense strand starting at position 1322 of SEQ ID NO: 1881064
cucaacuuugagcaagauu

SEQ ID NO: 2015229 - RNA, 19 nt, Artificial Sequence
  Description of Artificial Sequence: Synthetic oligonucleotide
  Antisense strand to SEQ ID NO: 2015228
aaucuugcucaaaguugag

SEQ ID NO: 2015230 - RNA, 19 nt, Artificial Sequence
  Description of Artificial Sequence: Synthetic oligonucleotide
  Sense strand starting at position 1517 of SEQ ID NO: 1881064
guggcuagaaagcauuaca

SEQ ID NO: 2015231 - RNA, 19 nt, Artificial Sequence
  Description of Artificial Sequence: Synthetic oligonucleotide
  Antisense strand to SEQ ID NO: 2015230
uguaaugcuuucuagccac

SEQ ID NO: 2015232 - RNA, 19 nt, Artificial Sequence
  Description of Artificial Sequence: Synthetic oligonucleotide
  Sense strand starting at position 1520 of SEQ ID NO: 1881064
gcuagaaagcauuacauug

SEQ ID NO: 2015233 - RNA, 19 nt, Artificial Sequence
  Description of Artificial Sequence: Synthetic oligonucleotide
  Antisense strand to SEQ ID NO: 2015232
caauguaaugcuuucuagc

SEQ ID NO: 2015234 - RNA, 19 nt, Artificial Sequence
  Description of Artificial Sequence: Synthetic oligonucleotide
  Sense strand starting at position 1590 of SEQ ID NO: 1881064
gggcacuggcauuauaaca

SEQ ID NO: 2015235 - RNA, 19 nt, Artificial Sequence
  Description of Artificial Sequence: Synthetic oligonucleotide
  Antisense strand to SEQ ID NO: 2015234
uguuauaaugccagugccc

SEQ ID NO: 2015236 - RNA, 19 nt, Artificial Sequence
  Description of Artificial Sequence: Synthetic oligonucleotide
  Sense strand starting at position 1606 of SEQ ID NO: 1881064
acagaagcucuccaaaugu

SEQ ID NO: 2015237 - RNA, 19 nt, Artificial Sequence
  Description of Artificial Sequence: Synthetic oligonucleotide
  Antisense strand to SEQ ID NO: 2015236
acauuuggagagcuucugu

SEQ ID NO: 2015238 - RNA, 19 nt, Artificial Sequence
  Description of Artificial Sequence: Synthetic oligonucleotide
  Sense strand starting at position 1617 of SEQ ID NO: 1881064
ccaaauguuccacagugca

SEQ ID NO: 2015239 - RNA, 19 nt, Artificial Sequence
  Description of Artificial Sequence: Synthetic oligonucleotide
  Antisense strand to SEQ ID NO: 2015238
ugcacuguggaacauuugg

SEQ ID NO: 2015240 - RNA, 19 nt, Artificial Sequence
  Description of Artificial Sequence: Synthetic oligonucleotide
  Sense strand starting at position 1781 of SEQ ID NO: 1881064
gucacaauuguguaaagca

SEQ ID NO: 2015241 - RNA, 19 nt, Artificial Sequence
  Description of Artificial Sequence: Synthetic oligonucleotide
  Antisense strand to SEQ ID NO: 2015240
ugcuuuacacaauugugac

SEQ ID NO: 2015242 - RNA, 19 nt, Artificial Sequence
  Description of Artificial Sequence: Synthetic oligonucleotide
  Sense strand starting at position 2019 of SEQ ID NO: 1881064
ggaggaagguuugcuagaa

SEQ ID NO: 2015243 - RNA, 19 nt, Artificial Sequence
  Description of Artificial Sequence: Synthetic oligonucleotide
  Antisense strand to SEQ ID NO: 2015242
uucuagcaaaccuuccucc

SEQ ID NO: 2015244 - RNA, 19 nt, Artificial Sequence
  Description of Artificial Sequence: Synthetic oligonucleotide
  Sense strand starting at position 2020 of SEQ ID NO: 1881064
gaggaagguuugcuagaau

SEQ ID NO: 2015245 - RNA, 19 nt, Artificial Sequence
  Description of Artificial Sequence: Synthetic oligonucleotide
  Antisense strand to SEQ ID NO: 2015244
auucuagcaaaccuuccuc

SEQ ID NO: 2015246 - RNA, 19 nt, Artificial Sequence
  Description of Artificial Sequence: Synthetic oligonucleotide
  Sense strand starting at position 2023 of SEQ ID NO: 1881064
gaagguuugcuagaauuac

SEQ ID NO: 2015247 - RNA, 19 nt, Artificial Sequence
  Description of Artificial Sequence: Synthetic oligonucleotide
  Antisense strand to SEQ ID NO: 2015246
guaauucuagcaaaccuuc

SEQ ID NO: 2015248 - RNA, 19 nt, Artificial Sequence
  Description of Artificial Sequence: Synthetic oligonucleotide
  Sense strand starting at position 2298 of SEQ ID NO: 1881064
ggcaaagggucucucagaa

SEQ ID NO: 2015249 - RNA, 19 nt, Artificial Sequence
  Description of Artificial Sequence: Synthetic oligonucleotide
  Antisense strand to SEQ ID NO: 2015248
uucugagagacccuuugcc

SEQ ID NO: 2015250 - RNA, 19 nt, Artificial Sequence
  Description of Artificial Sequence: Synthetic oligonucleotide
  Sense strand starting at position 2458 of SEQ ID NO: 1881064
ugagcuagauuacuggcaa

SEQ ID NO: 2015251 - RNA, 19 nt, Artificial Sequence
  Description of Artificial Sequence: Synthetic oligonucleotide
  Antisense strand to SEQ ID NO: 2015250
uugccaguaaucuagcuca

SEQ ID NO: 2015252 - RNA, 19 nt, Artificial Sequence
  Description of Artificial Sequence: Synthetic oligonucleotide
  Sense strand starting at position 2528 of SEQ ID NO: 1881064
auuagacuaucugucccau

SEQ ID NO: 2015253 - RNA, 19 nt, Artificial Sequence
  Description of Artificial Sequence: Synthetic oligonucleotide
  Antisense strand to SEQ ID NO: 2015252
augggacagauagucuaau

SEQ ID NO: 2015254 - RNA, 19 nt, Artificial Sequence
  Description of Artificial Sequence: Synthetic oligonucleotide
  Sense strand starting at position 2605 of SEQ ID NO: 1881064
gucuucucacaacaaaugu

SEQ ID NO: 2015255 - RNA, 19 nt, Artificial Sequence
  Description of Artificial Sequence: Synthetic oligonucleotide
  Antisense strand to SEQ ID NO: 2015254
acauuuguugugagaagac

SEQ ID NO: 2015256 - RNA, 19 nt, Artificial Sequence
  Description of Artificial Sequence: Synthetic oligonucleotide
  Sense strand starting at position 2743 of SEQ ID NO: 1881064
uugugaaugacccagaggu

SEQ ID NO: 2015257 - RNA, 19 nt, Artificial Sequence
  Description of Artificial Sequence: Synthetic oligonucleotide
  Antisense strand to SEQ ID NO: 2015256
accucugggucauucacaa

SEQ ID NO: 2015258 - RNA, 19 nt, Artificial Sequence
  Description of Artificial Sequence: Synthetic oligonucleotide
  Sense strand starting at position 2753 of SEQ ID NO: 1881064
cccagagguccaugaucca

SEQ ID NO: 2015259 - RNA, 19 nt, Artificial Sequence
  Description of Artificial Sequence: Synthetic oligonucleotide
  Antisense strand to SEQ ID NO: 2015258
uggaucauggaccucuggg

SEQ ID NO: 2015260 - RNA, 19 nt, Artificial Sequence
  Description of Artificial Sequence: Synthetic oligonucleotide
  Sense strand starting at position 2760 of SEQ ID NO: 1881064
guccaugauccacagucau

SEQ ID NO: 2015261 - RNA, 19 nt, Artificial Sequence
  Description of Artificial Sequence: Synthetic oligonucleotide
  Antisense strand to SEQ ID NO: 2015260
augacuguggaucauggac

SEQ ID NO: 2015262 - RNA, 19 nt, Artificial Sequence
  Description of Artificial Sequence: Synthetic oligonucleotide
  Sense strand starting at position 2771 of SEQ ID NO: 1881064
acagucaugcgccauuuga

SEQ ID NO: 2015263 - RNA, 19 nt, Artificial Sequence
  Description of Artificial Sequence: Synthetic oligonucleotide
  Antisense strand to SEQ ID NO: 2015262
ucaaauggcgcaugacugu

SEQ ID NO: 2015264 - RNA, 19 nt, Artificial Sequence
  Description of Artificial Sequence: Synthetic oligonucleotide
  Sense strand starting at position 2775 of SEQ ID NO: 1881064
ucaugcgccauuugaauga

SEQ ID NO: 2015265 - RNA, 19 nt, Artificial Sequence
  Description of Artificial Sequence: Synthetic oligonucleotide
  Antisense strand to SEQ ID NO: 2015264
ucauucaaauggcgcauga

SEQ ID NO: 2015266 - RNA, 19 nt, Artificial Sequence
  Description of Artificial Sequence: Synthetic oligonucleotide
  Sense strand starting at position 2779 of SEQ ID NO: 1881064
gcgccauuugaaugaagca

SEQ ID NO: 2015267 - RNA, 19 nt, Artificial Sequence
  Description of Artificial Sequence: Synthetic oligonucleotide
  Antisense strand to SEQ ID NO: 2015266
ugcuucauucaaauggcgc

SEQ ID NO: 2015268 - RNA, 19 nt, Artificial Sequence
  Description of Artificial Sequence: Synthetic oligonucleotide
  Sense strand starting at position 2920 of SEQ ID NO: 1881064
uggucaugugguugaagag

SEQ ID NO: 2015269 - RNA, 19 nt, Artificial Sequence
  Description of Artificial Sequence: Synthetic oligonucleotide
  Antisense strand to SEQ ID NO: 2015268
cucuucaaccacaugacca

SEQ ID NO: 2015270 - RNA, 19 nt, Artificial Sequence
  Description of Artificial Sequence: Synthetic oligonucleotide
  Sense strand starting at position 2921 of SEQ ID NO: 1881064
ggucaugugguugaagaga

SEQ ID NO: 2015271 - RNA, 19 nt, Artificial Sequence
  Description of Artificial Sequence: Synthetic oligonucleotide
  Antisense strand to SEQ ID NO: 2015270
ucucuucaaccacaugacc

SEQ ID NO: 2015272 - RNA, 19 nt, Artificial Sequence
  Description of Artificial Sequence: Synthetic oligonucleotide
  Sense strand starting at position 2968 of SEQ ID NO: 1881064
caacuugugguaggagaau

SEQ ID NO: 2015273 - RNA, 19 nt, Artificial Sequence
  Description of Artificial Sequence: Synthetic oligonucleotide
  Antisense strand to SEQ ID NO: 2015272
auucuccuaccacaaguug

SEQ ID NO: 2015274 - RNA, 19 nt, Artificial Sequence
  Description of Artificial Sequence: Synthetic oligonucleotide
  Sense strand starting at position 3003 of SEQ ID NO: 1881064
ggagcuuuacaagacaugu

SEQ ID NO: 2015275 - RNA, 19 nt, Artificial Sequence
  Description of Artificial Sequence: Synthetic oligonucleotide
  Antisense strand to SEQ ID NO: 2015274
acaugucuuguaaagcucc

SEQ ID NO: 2015276 - RNA, 19 nt, Artificial Sequence
  Description of Artificial Sequence: Synthetic oligonucleotide
  Sense strand starting at position 3040 of SEQ ID NO: 1881064
gaaucuguguuagcauuuc

SEQ ID NO: 2015277 - RNA, 19 nt, Artificial Sequence
  Description of Artificial Sequence: Synthetic oligonucleotide
  Antisense strand to SEQ ID NO: 2015276
gaaaugcuaacacagauuc

SEQ ID NO: 2015278 - RNA, 19 nt, Artificial Sequence
  Description of Artificial Sequence: Synthetic oligonucleotide
  Sense strand starting at position 3072 of SEQ ID NO: 1881064
ucgggaucccuggagguuu

SEQ ID NO: 2015279 - RNA, 19 nt, Artificial Sequence
  Description of Artificial Sequence: Synthetic oligonucleotide
  Antisense strand to SEQ ID NO: 2015278
aaaccuccagggaucccga

SEQ ID NO: 2015280 - RNA, 19 nt, Artificial Sequence
  Description of Artificial Sequence: Synthetic oligonucleotide
  Sense strand starting at position 3389 of SEQ ID NO: 1881064
ucgacuaggccucaaauau

SEQ ID NO: 2015281 - RNA, 19 nt, Artificial Sequence
  Description of Artificial Sequence: Synthetic oligonucleotide
  Antisense strand to SEQ ID NO: 2015280
auauuugaggccuagucga

SEQ ID NO: 2015282 - RNA, 19 nt, Artificial Sequence
  Description of Artificial Sequence: Synthetic oligonucleotide
  Sense strand starting at position 3520 of SEQ ID NO: 1881064
auguauaaguccuugaccu

SEQ ID NO: 2015283 - RNA, 19 nt, Artificial Sequence
  Description of Artificial Sequence: Synthetic oligonucleotide
  Antisense strand to SEQ ID NO: 2015282
aggucaaggacuuauacau

SEQ ID NO: 2015284 - RNA, 19 nt, Artificial Sequence
  Description of Artificial Sequence: Synthetic oligonucleotide
  Sense strand starting at position 3869 of SEQ ID NO: 1881064
auggaagccacauguguaa

SEQ ID NO: 2015285 - RNA, 19 nt, Artificial Sequence
  Description of Artificial Sequence: Synthetic oligonucleotide
  Antisense strand to SEQ ID NO: 2015284
uuacacauguggcuuccau

SEQ ID NO: 2015286 - RNA, 19 nt, Artificial Sequence
  Description of Artificial Sequence: Synthetic oligonucleotide
  Sense strand starting at position 3876 of SEQ ID NO: 1881064
ccacauguguaacuuuaaa

SEQ ID NO: 2015287 - RNA, 19 nt, Artificial Sequence
  Description of Artificial Sequence: Synthetic oligonucleotide
  Antisense strand to SEQ ID NO: 2015286
uuuaaaguuacacaugugg

SEQ ID NO: 2015288 - RNA, 19 nt, Artificial Sequence
  Description of Artificial Sequence: Synthetic oligonucleotide
  Sense strand starting at position 101 of SEQ ID NO: 1881065
gacagauacugcccaguga

SEQ ID NO: 2015289 - RNA, 19 nt, Artificial Sequence
  Description of Artificial Sequence: Synthetic oligonucleotide
  Antisense strand to SEQ ID NO: 2015288
ucacugggcaguaucuguc

SEQ ID NO: 2015290 - RNA, 19 nt, Artificial Sequence
  Description of Artificial Sequence: Synthetic oligonucleotide
  Sense strand starting at position 102 of SEQ ID NO: 1881065
acagauacugcccagugaa

SEQ ID NO: 2015291 - RNA, 19 nt, Artificial Sequence
  Description of Artificial Sequence: Synthetic oligonucleotide
  Antisense strand to SEQ ID NO: 2015290
uucacugggcaguaucugu

SEQ ID NO: 2015292 - RNA, 19 nt, Artificial Sequence
  Description of Artificial Sequence: Synthetic oligonucleotide
  Sense strand starting at position 157 of SEQ ID NO: 1881065
agcagaaucuuugucucag

SEQ ID NO: 2015293 - RNA, 19 nt, Artificial Sequence
  Description of Artificial Sequence: Synthetic oligonucleotide
  Antisense strand to SEQ ID NO: 2015292
cugagacaaagauucugcu

SEQ ID NO: 2015294 - RNA, 19 nt, Artificial Sequence
  Description of Artificial Sequence: Synthetic oligonucleotide
  Sense strand starting at position 158 of SEQ ID NO: 1881065
gcagaaucuuugucucaga

SEQ ID NO: 2015295 - RNA, 19 nt, Artificial Sequence
  Description of Artificial Sequence: Synthetic oligonucleotide
  Antisense strand to SEQ ID NO: 2015294
ucugagacaaagauucugc

SEQ ID NO: 2015296 - RNA, 19 nt, Artificial Sequence
  Description of Artificial Sequence: Synthetic oligonucleotide
  Sense strand starting at position 268 of SEQ ID NO: 1881065
gguucucugcaaggagacu

SEQ ID NO: 2015297 - RNA, 19 nt, Artificial Sequence
  Description of Artificial Sequence: Synthetic oligonucleotide
  Antisense strand to SEQ ID NO: 2015296
agucuccuugcagagaacc

SEQ ID NO: 2015298 - RNA, 19 nt, Artificial Sequence
  Description of Artificial Sequence: Synthetic oligonucleotide
  Sense strand starting at position 310 of SEQ ID NO: 1881065
gguguuuaucagggaauca

SEQ ID NO: 2015299 - RNA, 19 nt, Artificial Sequence
  Description of Artificial Sequence: Synthetic oligonucleotide
  Antisense strand to SEQ ID NO: 2015298
ugauucccugauaaacacc

SEQ ID NO: 2015300 - RNA, 19 nt, Artificial Sequence
  Description of Artificial Sequence: Synthetic oligonucleotide
  Sense strand starting at position 321 of SEQ ID NO: 1881065
gggaaucaaugccugugaa

SEQ ID NO: 2015301 - RNA, 19 nt, Artificial Sequence
  Description of Artificial Sequence: Synthetic oligonucleotide
  Antisense strand to SEQ ID NO: 2015300
uucacaggcauugauuccc

SEQ ID NO: 2015302 - RNA, 19 nt, Artificial Sequence
  Description of Artificial Sequence: Synthetic oligonucleotide
  Sense strand starting at position 322 of SEQ ID NO: 1881065
ggaaucaaugccugugaaa

SEQ ID NO: 2015303 - RNA, 19 nt, Artificial Sequence
  Description of Artificial Sequence: Synthetic oligonucleotide
  Antisense strand to SEQ ID NO: 2015302
uuucacaggcauugauucc

SEQ ID NO: 2015304 - RNA, 19 nt, Artificial Sequence
  Description of Artificial Sequence: Synthetic oligonucleotide
  Sense strand starting at position 324 of SEQ ID NO: 1881065
aaucaaugccugugaaagg

SEQ ID NO: 2015305 - RNA, 19 nt, Artificial Sequence
  Description of Artificial Sequence: Synthetic oligonucleotide
  Antisense strand to SEQ ID NO: 2015304
ccuuucacaggcauugauu

SEQ ID NO: 2015306 - RNA, 19 nt, Artificial Sequence
  Description of Artificial Sequence: Synthetic oligonucleotide
  Sense strand starting at position 448 of SEQ ID NO: 1881065
cugagucucccaugggaug

SEQ ID NO: 2015307 - RNA, 19 nt, Artificial Sequence
  Description of Artificial Sequence: Synthetic oligonucleotide
  Antisense strand to SEQ ID NO: 2015306
caucccaugggagacucag

SEQ ID NO: 2015308 - RNA, 19 nt, Artificial Sequence
  Description of Artificial Sequence: Synthetic oligonucleotide
  Sense strand starting at position 449 of SEQ ID NO: 1881065
ugagucucccaugggauga

SEQ ID NO: 2015309 - RNA, 19 nt, Artificial Sequence
  Description of Artificial Sequence: Synthetic oligonucleotide
  Antisense strand to SEQ ID NO: 2015308
ucaucccaugggagacuca

SEQ ID NO: 2015310 - RNA, 19 nt, Artificial Sequence
  Description of Artificial Sequence: Synthetic oligonucleotide
  Sense strand starting at position 954 of SEQ ID NO: 1881065
acagaaacugcuugaucuc

SEQ ID NO: 2015311 - RNA, 19 nt, Artificial Sequence
  Description of Artificial Sequence: Synthetic oligonucleotide
  Antisense strand to SEQ ID NO: 2015310
gagaucaagcaguuucugu

SEQ ID NO: 2015312 - RNA, 19 nt, Artificial Sequence
  Description of Artificial Sequence: Synthetic oligonucleotide
  Sense strand starting at position 1110 of SEQ ID NO: 1881065
uugcauuugcugugauuac

SEQ ID NO: 2015313 - RNA, 19 nt, Artificial Sequence
  Description of Artificial Sequence: Synthetic oligonucleotide
  Antisense strand to SEQ ID NO: 2015312
guaaucacagcaaaugcaa

SEQ ID NO: 2015314 - RNA, 19 nt, Artificial Sequence
  Description of Artificial Sequence: Synthetic oligonucleotide
  Sense strand starting at position 1219 of SEQ ID NO: 1881065
gagacauucugauugacuu

SEQ ID NO: 2015315 - RNA, 19 nt, Artificial Sequence
  Description of Artificial Sequence: Synthetic oligonucleotide
  Antisense strand to SEQ ID NO: 2015314
aagucaaucagaaugucuc

SEQ ID NO: 2015316 - RNA, 19 nt, Artificial Sequence
  Description of Artificial Sequence: Synthetic oligonucleotide
  Sense strand starting at position 1220 of SEQ ID NO: 1881065
agacauucugauugacuuc

SEQ ID NO: 2015317 - RNA, 19 nt, Artificial Sequence
  Description of Artificial Sequence: Synthetic oligonucleotide
  Antisense strand to SEQ ID NO: 2015316
gaagucaaucagaaugucu

SEQ ID NO: 2015318 - RNA, 19 nt, Artificial Sequence
  Description of Artificial Sequence: Synthetic oligonucleotide
  Sense strand starting at position 1647 of SEQ ID NO: 1881065
ugaugcaucacgcuguguu

SEQ ID NO: 2015319 - RNA, 19 nt, Artificial Sequence
  Description of Artificial Sequence: Synthetic oligonucleotide
  Antisense strand to SEQ ID NO: 2015318
aacacagcgugaugcauca

SEQ ID NO: 2015320 - RNA, 19 nt, Artificial Sequence
  Description of Artificial Sequence: Synthetic oligonucleotide
  Sense strand starting at position 1988 of SEQ ID NO: 1881065
acaagucggagauguagaa

SEQ ID NO: 2015321 - RNA, 19 nt, Artificial Sequence
  Description of Artificial Sequence: Synthetic oligonucleotide
  Antisense strand to SEQ ID NO: 2015320
uucuacaucuccgacuugu

SEQ ID NO: 2015322 - RNA, 19 nt, Artificial Sequence
  Description of Artificial Sequence: Synthetic oligonucleotide
  Sense strand starting at position 1998 of SEQ ID NO: 1881065
gauguagaaguguauguau

SEQ ID NO: 2015323 - RNA, 19 nt, Artificial Sequence
  Description of Artificial Sequence: Synthetic oligonucleotide
  Antisense strand to SEQ ID NO: 2015322
auacauacacuucuacauc

SEQ ID NO: 2015324 - RNA, 19 nt, Artificial Sequence
  Description of Artificial Sequence: Synthetic oligonucleotide
  Sense strand starting at position 2119 of SEQ ID NO: 1881065
gucaacuccuucucagaga

SEQ ID NO: 2015325 - RNA, 19 nt, Artificial Sequence
  Description of Artificial Sequence: Synthetic oligonucleotide
  Antisense strand to SEQ ID NO: 2015324
ucucugagaaggaguugac

SEQ ID NO: 2015326 - RNA, 19 nt, Artificial Sequence
  Description of Artificial Sequence: Synthetic oligonucleotide
  Sense strand starting at position 2566 of SEQ ID NO: 1881065
ccguaacuuccagaaccau

SEQ ID NO: 2015327 - RNA, 19 nt, Artificial Sequence
  Description of Artificial Sequence: Synthetic oligonucleotide
  Antisense strand to SEQ ID NO: 2015326
augguucuggaaguuacgg

SEQ ID NO: 2015328 - RNA, 19 nt, Artificial Sequence
  Description of Artificial Sequence: Synthetic oligonucleotide
  Sense strand starting at position 2814 of SEQ ID NO: 1881065
uuaucugucaaguggagau

SEQ ID NO: 2015329 - RNA, 19 nt, Artificial Sequence
  Description of Artificial Sequence: Synthetic oligonucleotide
  Antisense strand to SEQ ID NO: 2015328
aucuccacuugacagauaa

SEQ ID NO: 2015330 - RNA, 19 nt, Artificial Sequence
  Description of Artificial Sequence: Synthetic oligonucleotide
  Sense strand starting at position 2924 of SEQ ID NO: 1881065
aagugucaggaaugguaau

SEQ ID NO: 2015331 - RNA, 19 nt, Artificial Sequence
  Description of Artificial Sequence: Synthetic oligonucleotide
  Antisense strand to SEQ ID NO: 2015330
auuaccauuccugacacuu

SEQ ID NO: 2015332 - RNA, 19 nt, Artificial Sequence
  Description of Artificial Sequence: Synthetic oligonucleotide
  Sense strand starting at position 2925 of SEQ ID NO: 1881065
agugucaggaaugguaaua

SEQ ID NO: 2015333 - RNA, 19 nt, Artificial Sequence
  Description of Artificial Sequence: Synthetic oligonucleotide
  Antisense strand to SEQ ID NO: 2015332
uauuaccauuccugacacu

SEQ ID NO: 2015334 - RNA, 19 nt, Artificial Sequence
  Description of Artificial Sequence: Synthetic oligonucleotide
  Sense strand starting at position 2967 of SEQ ID NO: 1881065
uccucuuagcucugagaga

SEQ ID NO: 2015335 - RNA, 19 nt, Artificial Sequence
  Description of Artificial Sequence: Synthetic oligonucleotide
  Antisense strand to SEQ ID NO: 2015334
ucucucagagcuaagagga

SEQ ID NO: 2015336 - RNA, 19 nt, Artificial Sequence
  Description of Artificial Sequence: Synthetic oligonucleotide
  Sense strand starting at position 3045 of SEQ ID NO: 1881065
gccaaacuccuagaguuua

SEQ ID NO: 2015337 - RNA, 19 nt, Artificial Sequence
  Description of Artificial Sequence: Synthetic oligonucleotide
  Antisense strand to SEQ ID NO: 2015336
uaaacucuaggaguuuggc

SEQ ID NO: 2015338 - RNA, 19 nt, Artificial Sequence
  Description of Artificial Sequence: Synthetic oligonucleotide
  Sense strand starting at position 3050 of SEQ ID NO: 1881065
acuccuagaguuuaucacu

SEQ ID NO: 2015339 - RNA, 19 nt, Artificial Sequence
  Description of Artificial Sequence: Synthetic oligonucleotide
  Antisense strand to SEQ ID NO: 2015338
agugauaaacucuaggagu

SEQ ID NO: 2015340 - RNA, 19 nt, Artificial Sequence
  Description of Artificial Sequence: Synthetic oligonucleotide
  Sense strand starting at position 3108 of SEQ ID NO: 1881065
acucuuuggaacuguggaa

SEQ ID NO: 2015341 - RNA, 19 nt, Artificial Sequence
  Description of Artificial Sequence: Synthetic oligonucleotide
  Antisense strand to SEQ ID NO: 2015340
uuccacaguuccaaagagu

SEQ ID NO: 2015342 - RNA, 19 nt, Artificial Sequence
  Description of Artificial Sequence: Synthetic oligonucleotide
  Sense strand starting at position 3112 of SEQ ID NO: 1881065
uuuggaacuguggaaaguu

SEQ ID NO: 2015343 - RNA, 19 nt, Artificial Sequence
  Description of Artificial Sequence: Synthetic oligonucleotide
  Antisense strand to SEQ ID NO: 2015342
aacuuuccacaguuccaaa

SEQ ID NO: 2015344 - RNA, 19 nt, Artificial Sequence
  Description of Artificial Sequence: Synthetic oligonucleotide
  Sense strand starting at position 3335 of SEQ ID NO: 1881065
cugugucuucgacauaaua

SEQ ID NO: 2015345 - RNA, 19 nt, Artificial Sequence
  Description of Artificial Sequence: Synthetic oligonucleotide
  Antisense strand to SEQ ID NO: 2015344
uauuaugucgaagacacag

SEQ ID NO: 2015346 - RNA, 19 nt, Artificial Sequence
  Description of Artificial Sequence: Synthetic oligonucleotide
  Sense strand starting at position 3337 of SEQ ID NO: 1881065
gugucuucgacauaauagg

SEQ ID NO: 2015347 - RNA, 19 nt, Artificial Sequence
  Description of Artificial Sequence: Synthetic oligonucleotide
  Antisense strand to SEQ ID NO: 2015346
ccuauuaugucgaagacac

SEQ ID NO: 2015348 - RNA, 19 nt, Artificial Sequence
  Description of Artificial Sequence: Synthetic oligonucleotide
  Sense strand starting at position 3343 of SEQ ID NO: 1881065
ucgacauaauagguguuaa

SEQ ID NO: 2015349 - RNA, 19 nt, Artificial Sequence
  Description of Artificial Sequence: Synthetic oligonucleotide
  Antisense strand to SEQ ID NO: 2015348
uuaacaccuauuaugucga

SEQ ID NO: 2015350 - RNA, 19 nt, Artificial Sequence
  Description of Artificial Sequence: Synthetic oligonucleotide
  Sense strand starting at position 3344 of SEQ ID NO: 1881065
cgacauaauagguguuaag

SEQ ID NO: 2015351 - RNA, 19 nt, Artificial Sequence
  Description of Artificial Sequence: Synthetic oligonucleotide
  Antisense strand to SEQ ID NO: 2015350
cuuaacaccuauuaugucg

SEQ ID NO: 2015352 - RNA, 19 nt, Artificial Sequence
  Description of Artificial Sequence: Synthetic oligonucleotide
  Sense strand starting at position 3371 of SEQ ID NO: 1881065
ugcuaaagauauguuaagu

SEQ ID NO: 2015353 - RNA, 19 nt, Artificial Sequence
  Description of Artificial Sequence: Synthetic oligonucleotide
  Antisense strand to SEQ ID NO: 2015352
acuuaacauaucuuuagca

SEQ ID NO: 2015354 - RNA, 19 nt, Artificial Sequence
  Description of Artificial Sequence: Synthetic oligonucleotide
  Sense strand starting at position 3481 of SEQ ID NO: 1881065
gaacuuggccaaggaaauc

SEQ ID NO: 2015355 - RNA, 19 nt, Artificial Sequence
  Description of Artificial Sequence: Synthetic oligonucleotide
  Antisense strand to SEQ ID NO: 2015354
gauuuccuuggccaaguuc

SEQ ID NO: 2015356 - RNA, 19 nt, Artificial Sequence
  Description of Artificial Sequence: Synthetic oligonucleotide
  Sense strand starting at position 3698 of SEQ ID NO: 1881065
ggaguaauguuccuaagac

SEQ ID NO: 2015357 - RNA, 19 nt, Artificial Sequence
  Description of Artificial Sequence: Synthetic oligonucleotide
  Antisense strand to SEQ ID NO: 2015356
gucuuaggaacauuacucc

SEQ ID NO: 2015358 - RNA, 19 nt, Artificial Sequence
  Description of Artificial Sequence: Synthetic oligonucleotide
  Sense strand starting at position 3754 of SEQ ID NO: 1881065
uaauuugguucccauggaa

SEQ ID NO: 2015359 - RNA, 19 nt, Artificial Sequence
  Description of Artificial Sequence: Synthetic oligonucleotide
  Antisense strand to SEQ ID NO: 2015358
uuccaugggaaccaaauua

SEQ ID NO: 2015360 - RNA, 19 nt, Artificial Sequence
  Description of Artificial Sequence: Synthetic oligonucleotide
  Sense strand starting at position 3773 of SEQ ID NO: 1881065
gcaaauauuugagcgcaua

SEQ ID NO: 2015361 - RNA, 19 nt, Artificial Sequence
  Description of Artificial Sequence: Synthetic oligonucleotide
  Antisense strand to SEQ ID NO: 2015360
uaugcgcucaaauauuugc

SEQ ID NO: 2015362 - RNA, 19 nt, Artificial Sequence
  Description of Artificial Sequence: Synthetic oligonucleotide
  Sense strand starting at position 3866 of SEQ ID NO: 1881065
gugagaguuuguucacaag

SEQ ID NO: 2015363 - RNA, 19 nt, Artificial Sequence
  Description of Artificial Sequence: Synthetic oligonucleotide
  Antisense strand to SEQ ID NO: 2015362
cuugugaacaaacucucac

SEQ ID NO: 2015364 - RNA, 19 nt, Artificial Sequence
  Description of Artificial Sequence: Synthetic oligonucleotide
  Sense strand starting at position 3890 of SEQ ID NO: 1881065
caucucugugugcaaugaa

SEQ ID NO: 2015365 - RNA, 19 nt, Artificial Sequence
  Description of Artificial Sequence: Synthetic oligonucleotide
  Antisense strand to SEQ ID NO: 2015364
uucauugcacacagagaug

SEQ ID NO: 2015366 - RNA, 19 nt, Artificial Sequence
  Description of Artificial Sequence: Synthetic oligonucleotide
  Sense strand starting at position 3962 of SEQ ID NO: 1881065
gccaucaucccagaggcua

SEQ ID NO: 2015367 - RNA, 19 nt, Artificial Sequence
  Description of Artificial Sequence: Synthetic oligonucleotide
  Antisense strand to SEQ ID NO: 2015366
uagccucugggaugauggc

SEQ ID NO: 2015368 - RNA, 19 nt, Artificial Sequence
  Description of Artificial Sequence: Synthetic oligonucleotide
  Sense strand starting at position 187 of SEQ ID NO: 1881066
ugcuuugaagccuaaauau

SEQ ID NO: 2015369 - RNA, 19 nt, Artificial Sequence
  Description of Artificial Sequence: Synthetic oligonucleotide
  Antisense strand to SEQ ID NO: 2015368
auauuuaggcuucaaagca

SEQ ID NO: 2015370 - RNA, 19 nt, Artificial Sequence
  Description of Artificial Sequence: Synthetic oligonucleotide
  Sense strand starting at position 304 of SEQ ID NO: 1881066
auaauaguguuaccagaaa

SEQ ID NO: 2015371 - RNA, 19 nt, Artificial Sequence
  Description of Artificial Sequence: Synthetic oligonucleotide
  Antisense strand to SEQ ID NO: 2015370
uuucugguaacacuauuau

SEQ ID NO: 2015372 - RNA, 19 nt, Artificial Sequence
  Description of Artificial Sequence: Synthetic oligonucleotide
  Sense strand starting at position 347 of SEQ ID NO: 1881066
uugauaguguuaccaccau

SEQ ID NO: 2015373 - RNA, 19 nt, Artificial Sequence
  Description of Artificial Sequence: Synthetic oligonucleotide
  Antisense strand to SEQ ID NO: 2015372
auggugguaacacuaucaa

SEQ ID NO: 2015374 - RNA, 19 nt, Artificial Sequence
  Description of Artificial Sequence: Synthetic oligonucleotide
  Sense strand starting at position 351 of SEQ ID NO: 1881066
uaguguuaccaccauagga

SEQ ID NO: 2015375 - RNA, 19 nt, Artificial Sequence
  Description of Artificial Sequence: Synthetic oligonucleotide
  Antisense strand to SEQ ID NO: 2015374
uccuauggugguaacacua

SEQ ID NO: 2015376 - RNA, 19 nt, Artificial Sequence
  Description of Artificial Sequence: Synthetic oligonucleotide
  Sense strand starting at position 375 of SEQ ID NO: 1881066
acaugaauugauggccauu

SEQ ID NO: 2015377 - RNA, 19 nt, Artificial Sequence
  Description of Artificial Sequence: Synthetic oligonucleotide
  Antisense strand to SEQ ID NO: 2015376
aauggccaucaauucaugu

SEQ ID NO: 2015378 - RNA, 19 nt, Artificial Sequence
  Description of Artificial Sequence: Synthetic oligonucleotide
  Sense strand starting at position 476 of SEQ ID NO: 1881066
ucuggcuuuccagcguuau

SEQ ID NO: 2015379 - RNA, 19 nt, Artificial Sequence
  Description of Artificial Sequence: Synthetic oligonucleotide
  Antisense strand to SEQ ID NO: 2015378
auaacgcuggaaagccaga

SEQ ID NO: 2015380 - RNA, 19 nt, Artificial Sequence
  Description of Artificial Sequence: Synthetic oligonucleotide
  Sense strand starting at position 478 of SEQ ID NO: 1881066
uggcuuuccagcguuauca

SEQ ID NO: 2015381 - RNA, 19 nt, Artificial Sequence
  Description of Artificial Sequence: Synthetic oligonucleotide
  Antisense strand to SEQ ID NO: 2015380
ugauaacgcuggaaagcca

SEQ ID NO: 2015382 - RNA, 19 nt, Artificial Sequence
  Description of Artificial Sequence: Synthetic oligonucleotide
  Sense strand starting at position 479 of SEQ ID NO: 1881066
ggcuuuccagcguuaucau

SEQ ID NO: 2015383 - RNA, 19 nt, Artificial Sequence
  Description of Artificial Sequence: Synthetic oligonucleotide
  Antisense strand to SEQ ID NO: 2015382
augauaacgcuggaaagcc

SEQ ID NO: 2015384 - RNA, 19 nt, Artificial Sequence
  Description of Artificial Sequence: Synthetic oligonucleotide
  Sense strand starting at position 487 of SEQ ID NO: 1881066
agcguuaucauuguuguuu

SEQ ID NO: 2015385 - RNA, 19 nt, Artificial Sequence
  Description of Artificial Sequence: Synthetic oligonucleotide
  Antisense strand to SEQ ID NO: 2015384
aaacaacaaugauaacgcu

SEQ ID NO: 2015386 - RNA, 19 nt, Artificial Sequence
  Description of Artificial Sequence: Synthetic oligonucleotide
  Sense strand starting at position 591 of SEQ ID NO: 1881066
agcuuucugccucacugaa

SEQ ID NO: 2015387 - RNA, 19 nt, Artificial Sequence
  Description of Artificial Sequence: Synthetic oligonucleotide
  Antisense strand to SEQ ID NO: 2015386
uucagugaggcagaaagcu

SEQ ID NO: 2015388 - RNA, 19 nt, Artificial Sequence
  Description of Artificial Sequence: Synthetic oligonucleotide
  Sense strand starting at position 793 of SEQ ID NO: 1881066
ucgccagaccaauaucauu

SEQ ID NO: 2015389 - RNA, 19 nt, Artificial Sequence
  Description of Artificial Sequence: Synthetic oligonucleotide
  Antisense strand to SEQ ID NO: 2015388
aaugauauuggucuggcga

SEQ ID NO: 2015390 - RNA, 19 nt, Artificial Sequence
  Description of Artificial Sequence: Synthetic oligonucleotide
  Sense strand starting at position 817 of SEQ ID NO: 1881066
gggucagcuagcuacaaau

SEQ ID NO: 2015391 - RNA, 19 nt, Artificial Sequence
  Description of Artificial Sequence: Synthetic oligonucleotide
  Antisense strand to SEQ ID NO: 2015390
auuuguagcuagcugaccc

SEQ ID NO: 2015392 - RNA, 19 nt, Artificial Sequence
  Description of Artificial Sequence: Synthetic oligonucleotide
  Sense strand starting at position 840 of SEQ ID NO: 1881066
aauugagguuggucagagu

SEQ ID NO: 2015393 - RNA, 19 nt, Artificial Sequence
  Description of Artificial Sequence: Synthetic oligonucleotide
  Antisense strand to SEQ ID NO: 2015392
acucugaccaaccucaauu

SEQ ID NO: 2015394 - RNA, 19 nt, Artificial Sequence
  Description of Artificial Sequence: Synthetic oligonucleotide
  Sense strand starting at position 970 of SEQ ID NO: 1881066
auugcucucggauagcaaa

SEQ ID NO: 2015395 - RNA, 19 nt, Artificial Sequence
  Description of Artificial Sequence: Synthetic oligonucleotide
  Antisense strand to SEQ ID NO: 2015394
uuugcuauccgagagcaau

SEQ ID NO: 2015396 - RNA, 19 nt, Artificial Sequence
  Description of Artificial Sequence: Synthetic oligonucleotide
  Sense strand starting at position 1020 of SEQ ID NO: 1881066
aaugcuguaguuugaaaua

SEQ ID NO: 2015397 - RNA, 19 nt, Artificial Sequence
  Description of Artificial Sequence: Synthetic oligonucleotide
  Antisense strand to SEQ ID NO: 2015396
uauuucaaacuacagcauu

SEQ ID NO: 2015398 - RNA, 19 nt, Artificial Sequence
  Description of Artificial Sequence: Synthetic oligonucleotide
  Sense strand starting at position 1025 of SEQ ID NO: 1881066
uguaguuugaaauaauggu

SEQ ID NO: 2015399 - RNA, 19 nt, Artificial Sequence
  Description of Artificial Sequence: Synthetic oligonucleotide
  Antisense strand to SEQ ID NO: 2015398
accauuauuucaaacuaca

SEQ ID NO: 2015400 - RNA, 19 nt, Artificial Sequence
  Description of Artificial Sequence: Synthetic oligonucleotide
  Sense strand starting at position 1108 of SEQ ID NO: 1881066
acuugauuguaguuuacaa

SEQ ID NO: 2015401 - RNA, 19 nt, Artificial Sequence
  Description of Artificial Sequence: Synthetic oligonucleotide
  Antisense strand to SEQ ID NO: 2015400
uuguaaacuacaaucaagu

SEQ ID NO: 2015402 - RNA, 19 nt, Artificial Sequence
  Description of Artificial Sequence: Synthetic oligonucleotide
  Sense strand starting at position 1118 of SEQ ID NO: 1881066
aguuuacaauucucaggua

SEQ ID NO: 2015403 - RNA, 19 nt, Artificial Sequence
  Description of Artificial Sequence: Synthetic oligonucleotide
  Antisense strand to SEQ ID NO: 2015402
uaccugagaauuguaaacu

SEQ ID NO: 2015404 - RNA, 19 nt, Artificial Sequence
  Description of Artificial Sequence: Synthetic oligonucleotide
  Sense strand starting at position 1164 of SEQ ID NO: 1881066
auacaaauguugguuuagu

SEQ ID NO: 2015405 - RNA, 19 nt, Artificial Sequence
  Description of Artificial Sequence: Synthetic oligonucleotide
  Antisense strand to SEQ ID NO: 2015404
acuaaaccaacauuuguau

SEQ ID NO: 2015406 - RNA, 19 nt, Artificial Sequence
  Description of Artificial Sequence: Synthetic oligonucleotide
  Sense strand starting at position 1180 of SEQ ID NO: 1881066
agugcuuaucuugauguag

SEQ ID NO: 2015407 - RNA, 19 nt, Artificial Sequence
  Description of Artificial Sequence: Synthetic oligonucleotide
  Antisense strand to SEQ ID NO: 2015406
cuacaucaagauaagcacu

SEQ ID NO: 2015408 - RNA, 19 nt, Artificial Sequence
  Description of Artificial Sequence: Synthetic oligonucleotide
  Sense strand starting at position 1472 of SEQ ID NO: 1881066
auauauuagugacucagua

SEQ ID NO: 2015409 - RNA, 19 nt, Artificial Sequence
  Description of Artificial Sequence: Synthetic oligonucleotide
  Antisense strand to SEQ ID NO: 2015408
uacugagucacuaauauau

SEQ ID NO: 2015410 - RNA, 19 nt, Artificial Sequence
  Description of Artificial Sequence: Synthetic oligonucleotide
  Sense strand starting at position 1476 of SEQ ID NO: 1881066
auuagugacucaguagaua

SEQ ID NO: 2015411 - RNA, 19 nt, Artificial Sequence
  Description of Artificial Sequence: Synthetic oligonucleotide
  Antisense strand to SEQ ID NO: 2015410
uaucuacugagucacuaau

SEQ ID NO: 2015412 - RNA, 19 nt, Artificial Sequence
  Description of Artificial Sequence: Synthetic oligonucleotide
  Sense strand starting at position 1764 of SEQ ID NO: 1881066
auucuaccugaaugagcaa

SEQ ID NO: 2015413 - RNA, 19 nt, Artificial Sequence
  Description of Artificial Sequence: Synthetic oligonucleotide
  Antisense strand to SEQ ID NO: 2015412
uugcucauucagguagaau

SEQ ID NO: 2015414 - RNA, 19 nt, Artificial Sequence
  Description of Artificial Sequence: Synthetic oligonucleotide
  Sense strand starting at position 2424 of SEQ ID NO: 1881066
agaaauauggcguggaccu

SEQ ID NO: 2015415 - RNA, 19 nt, Artificial Sequence
  Description of Artificial Sequence: Synthetic oligonucleotide
  Antisense strand to SEQ ID NO: 2015414
agguccacgccauauuucu

SEQ ID NO: 2015416 - RNA, 19 nt, Artificial Sequence
  Description of Artificial Sequence: Synthetic oligonucleotide
  Sense strand starting at position 2431 of SEQ ID NO: 1881066
uggcguggaccucaucaga

SEQ ID NO: 2015417 - RNA, 19 nt, Artificial Sequence
  Description of Artificial Sequence: Synthetic oligonucleotide
  Antisense strand to SEQ ID NO: 2015416
ucugaugagguccacgcca

SEQ ID NO: 2015418 - RNA, 19 nt, Artificial Sequence
  Description of Artificial Sequence: Synthetic oligonucleotide
  Sense strand starting at position 2584 of SEQ ID NO: 1881066
gucaccuguggaugacauu

SEQ ID NO: 2015419 - RNA, 19 nt, Artificial Sequence
  Description of Artificial Sequence: Synthetic oligonucleotide
  Antisense strand to SEQ ID NO: 2015418
aaugucauccacaggugac

SEQ ID NO: 2015420 - RNA, 19 nt, Artificial Sequence
  Description of Artificial Sequence: Synthetic oligonucleotide
  Sense strand starting at position 2731 of SEQ ID NO: 1881066
aggugucaacucugagaug

SEQ ID NO: 2015421 - RNA, 19 nt, Artificial Sequence
  Description of Artificial Sequence: Synthetic oligonucleotide
  Antisense strand to SEQ ID NO: 2015420
caucucagaguugacaccu

SEQ ID NO: 2015422 - RNA, 19 nt, Artificial Sequence
  Description of Artificial Sequence: Synthetic oligonucleotide
  Sense strand starting at position 2737 of SEQ ID NO: 1881066
caacucugagauggucaaa

SEQ ID NO: 2015423 - RNA, 19 nt, Artificial Sequence
  Description of Artificial Sequence: Synthetic oligonucleotide
  Antisense strand to SEQ ID NO: 2015422
uuugaccaucucagaguug

SEQ ID NO: 2015424 - RNA, 19 nt, Artificial Sequence
  Description of Artificial Sequence: Synthetic oligonucleotide
  Sense strand starting at position 2907 of SEQ ID NO: 1881066
cuuucaaaggaguggugau

SEQ ID NO: 2015425 - RNA, 19 nt, Artificial Sequence
  Description of Artificial Sequence: Synthetic oligonucleotide
  Antisense strand to SEQ ID NO: 2015424
aucaccacuccuuugaaag

SEQ ID NO: 2015426 - RNA, 19 nt, Artificial Sequence
  Description of Artificial Sequence: Synthetic oligonucleotide
  Sense strand starting at position 2983 of SEQ ID NO: 1881066
uccagauucucaguuuauu

SEQ ID NO: 2015427 - RNA, 19 nt, Artificial Sequence
  Description of Artificial Sequence: Synthetic oligonucleotide
  Antisense strand to SEQ ID NO: 2015426
aauaaacugagaaucugga

SEQ ID NO: 2015428 - RNA, 19 nt, Artificial Sequence
  Description of Artificial Sequence: Synthetic oligonucleotide
  Sense strand starting at position 3170 of SEQ ID NO: 1881066
auugaugacucacccugau

SEQ ID NO: 2015429 - RNA, 19 nt, Artificial Sequence
  Description of Artificial Sequence: Synthetic oligonucleotide
  Antisense strand to SEQ ID NO: 2015428
aucagggugagucaucaau

SEQ ID NO: 2015430 - RNA, 19 nt, Artificial Sequence
  Description of Artificial Sequence: Synthetic oligonucleotide
  Sense strand starting at position 3194 of SEQ ID NO: 1881066
uccgcuauuucuguacagu

SEQ ID NO: 2015431 - RNA, 19 nt, Artificial Sequence
  Description of Artificial Sequence: Synthetic oligonucleotide
  Antisense strand to SEQ ID NO: 2015430
acuguacagaaauagcgga

SEQ ID NO: 2015432 - RNA, 19 nt, Artificial Sequence
  Description of Artificial Sequence: Synthetic oligonucleotide
  Sense strand starting at position 3195 of SEQ ID NO: 1881066
ccgcuauuucuguacagug

SEQ ID NO: 2015433 - RNA, 19 nt, Artificial Sequence
  Description of Artificial Sequence: Synthetic oligonucleotide
  Antisense strand to SEQ ID NO: 2015432
cacuguacagaaauagcgg

SEQ ID NO: 2015434 - RNA, 19 nt, Artificial Sequence
  Description of Artificial Sequence: Synthetic oligonucleotide
  Sense strand starting at position 3281 of SEQ ID NO: 1881066
uggagagcauccuuuacuu

SEQ ID NO: 2015435 - RNA, 19 nt, Artificial Sequence
  Description of Artificial Sequence: Synthetic oligonucleotide
  Antisense strand to SEQ ID NO: 2015434
aaguaaaggaugcucucca

SEQ ID NO: 2015436 - RNA, 19 nt, Artificial Sequence
  Description of Artificial Sequence: Synthetic oligonucleotide
  Sense strand starting at position 3516 of SEQ ID NO: 1881066
cagugaagucaucagcucu

SEQ ID NO: 2015437 - RNA, 19 nt, Artificial Sequence
  Description of Artificial Sequence: Synthetic oligonucleotide
  Antisense strand to SEQ ID NO: 2015436
agagcugaugacuucacug

SEQ ID NO: 2015438 - RNA, 19 nt, Artificial Sequence
  Description of Artificial Sequence: Synthetic oligonucleotide
  Sense strand starting at position 3556 of SEQ ID NO: 1881066
gcugaauguauggaaagcu

SEQ ID NO: 2015439 - RNA, 19 nt, Artificial Sequence
  Description of Artificial Sequence: Synthetic oligonucleotide
  Antisense strand to SEQ ID NO: 2015438
agcuuuccauacauucagc

SEQ ID NO: 2015440 - RNA, 19 nt, Artificial Sequence
  Description of Artificial Sequence: Synthetic oligonucleotide
  Sense strand starting at position 3659 of SEQ ID NO: 1881066
uugugacauuguccacaac

SEQ ID NO: 2015441 - RNA, 19 nt, Artificial Sequence
  Description of Artificial Sequence: Synthetic oligonucleotide
  Antisense strand to SEQ ID NO: 2015440
guuguggacaaugucacaa

SEQ ID NO: 2015442 - RNA, 19 nt, Artificial Sequence
  Description of Artificial Sequence: Synthetic oligonucleotide
  Sense strand starting at position 3695 of SEQ ID NO: 1881066
gccagacauuuacagaaau

SEQ ID NO: 2015443 - RNA, 19 nt, Artificial Sequence
  Description of Artificial Sequence: Synthetic oligonucleotide
  Antisense strand to SEQ ID NO: 2015442
auuucuguaaaugucuggc

SEQ ID NO: 2015444 - RNA, 19 nt, Artificial Sequence
  Description of Artificial Sequence: Synthetic oligonucleotide
  Sense strand starting at position 3764 of SEQ ID NO: 1881066
gcaggaagccaugaaguua

SEQ ID NO: 2015445 - RNA, 19 nt, Artificial Sequence
  Description of Artificial Sequence: Synthetic oligonucleotide
  Antisense strand to SEQ ID NO: 2015444
uaacuucauggcuuccugc

SEQ ID NO: 2015446 - RNA, 19 nt, Artificial Sequence
  Description of Artificial Sequence: Synthetic oligonucleotide
  Sense strand starting at position 3833 of SEQ ID NO: 1881066
cuagguguuggaugggaaa

SEQ ID NO: 2015447 - RNA, 19 nt, Artificial Sequence
  Description of Artificial Sequence: Synthetic oligonucleotide
  Antisense strand to SEQ ID NO: 2015446
uuucccauccaacaccuag

SEQ ID NO: 2015448 - RNA, 19 nt, Artificial Sequence
  Description of Artificial Sequence: Synthetic oligonucleotide
  Sense strand starting at position 46 of SEQ ID NO: 1881067
uuagaaaggcaaugguaau

SEQ ID NO: 2015449 - RNA, 19 nt, Artificial Sequence
  Description of Artificial Sequence: Synthetic oligonucleotide
  Antisense strand to SEQ ID NO: 2015448
auuaccauugccuuucuaa

SEQ ID NO: 2015450 - RNA, 19 nt, Artificial Sequence
  Description of Artificial Sequence: Synthetic oligonucleotide
  Sense strand starting at position 357 of SEQ ID NO: 1881067
acuugcucagguuaaacau

SEQ ID NO: 2015451 - RNA, 19 nt, Artificial Sequence
  Description of Artificial Sequence: Synthetic oligonucleotide
  Antisense strand to SEQ ID NO: 2015450
auguuuaaccugagcaagu

SEQ ID NO: 2015452 - RNA, 19 nt, Artificial Sequence
  Description of Artificial Sequence: Synthetic oligonucleotide
  Sense strand starting at position 393 of SEQ ID NO: 1881067
auuaaauggugcucuuaaa

SEQ ID NO: 2015453 - RNA, 19 nt, Artificial Sequence
  Description of Artificial Sequence: Synthetic oligonucleotide
  Antisense strand to SEQ ID NO: 2015452
uuuaagagcaccauuuaau

SEQ ID NO: 2015454 - RNA, 19 nt, Artificial Sequence
  Description of Artificial Sequence: Synthetic oligonucleotide
  Sense strand starting at position 610 of SEQ ID NO: 1881067
uuaagaaaugaucggguga

SEQ ID NO: 2015455 - RNA, 19 nt, Artificial Sequence
  Description of Artificial Sequence: Synthetic oligonucleotide
  Antisense strand to SEQ ID NO: 2015454
ucacccgaucauuucuuaa

SEQ ID NO: 2015456 - RNA, 19 nt, Artificial Sequence
  Description of Artificial Sequence: Synthetic oligonucleotide
  Sense strand starting at position 721 of SEQ ID NO: 1881067
uuaguacuagaaugaaguu

SEQ ID NO: 2015457 - RNA, 19 nt, Artificial Sequence
  Description of Artificial Sequence: Synthetic oligonucleotide
  Antisense strand to SEQ ID NO: 2015456
aacuucauucuaguacuaa

SEQ ID NO: 2015458 - RNA, 19 nt, Artificial Sequence
  Description of Artificial Sequence: Synthetic oligonucleotide
  Sense strand starting at position 728 of SEQ ID NO: 1881067
uagaaugaaguuugccuau

SEQ ID NO: 2015459 - RNA, 19 nt, Artificial Sequence
  Description of Artificial Sequence: Synthetic oligonucleotide
  Antisense strand to SEQ ID NO: 2015458
auaggcaaacuucauucua

SEQ ID NO: 2015460 - RNA, 19 nt, Artificial Sequence
  Description of Artificial Sequence: Synthetic oligonucleotide
  Sense strand starting at position 761 of SEQ ID NO: 1881067
guuaaugaaagcuguggaa

SEQ ID NO: 2015461 - RNA, 19 nt, Artificial Sequence
  Description of Artificial Sequence: Synthetic oligonucleotide
  Antisense strand to SEQ ID NO: 2015460
uuccacagcuuucauuaac

SEQ ID NO: 2015462 - RNA, 19 nt, Artificial Sequence
  Description of Artificial Sequence: Synthetic oligonucleotide
  Sense strand starting at position 763 of SEQ ID NO: 1881067
uaaugaaagcuguggaaug

SEQ ID NO: 2015463 - RNA, 19 nt, Artificial Sequence
  Description of Artificial Sequence: Synthetic oligonucleotide
  Antisense strand to SEQ ID NO: 2015462
cauuccacagcuuucauua

SEQ ID NO: 2015464 - RNA, 19 nt, Artificial Sequence
  Description of Artificial Sequence: Synthetic oligonucleotide
  Sense strand starting at position 774 of SEQ ID NO: 1881067
guggaaugcaugggacuau

SEQ ID NO: 2015465 - RNA, 19 nt, Artificial Sequence
  Description of Artificial Sequence: Synthetic oligonucleotide
  Antisense strand to SEQ ID NO: 2015464
auagucccaugcauuccac

SEQ ID NO: 2015466 - RNA, 19 nt, Artificial Sequence
  Description of Artificial Sequence: Synthetic oligonucleotide
  Sense strand starting at position 826 of SEQ ID NO: 1881067
gaggauccuccuuagccua

SEQ ID NO: 2015467 - RNA, 19 nt, Artificial Sequence
  Description of Artificial Sequence: Synthetic oligonucleotide
  Antisense strand to SEQ ID NO: 2015466
uaggcuaaggaggauccuc

SEQ ID NO: 2015468 - RNA, 19 nt, Artificial Sequence
  Description of Artificial Sequence: Synthetic oligonucleotide
  Sense strand starting at position 1123 of SEQ ID NO: 1881067
cccagaauuguguacaauc

SEQ ID NO: 2015469 - RNA, 19 nt, Artificial Sequence
  Description of Artificial Sequence: Synthetic oligonucleotide
  Antisense strand to SEQ ID NO: 2015468
gauuguacacaauucuggg

SEQ ID NO: 2015470 - RNA, 19 nt, Artificial Sequence
  Description of Artificial Sequence: Synthetic oligonucleotide
  Sense strand starting at position 1335 of SEQ ID NO: 1881067
cugagauaugccgggaaac

SEQ ID NO: 2015471 - RNA, 19 nt, Artificial Sequence
  Description of Artificial Sequence: Synthetic oligonucleotide
  Antisense strand to SEQ ID NO: 2015470
guuucccggcauaucucag

SEQ ID NO: 2015472 - RNA, 19 nt, Artificial Sequence
  Description of Artificial Sequence: Synthetic oligonucleotide
  Sense strand starting at position 1416 of SEQ ID NO: 1881067
cugucaugagcugaacuca

SEQ ID NO: 2015473 - RNA, 19 nt, Artificial Sequence
  Description of Artificial Sequence: Synthetic oligonucleotide
  Antisense strand to SEQ ID NO: 2015472
ugaguucagcucaugacag

SEQ ID NO: 2015474 - RNA, 19 nt, Artificial Sequence
  Description of Artificial Sequence: Synthetic oligonucleotide
  Sense strand starting at position 1533 of SEQ ID NO: 1881067
ucaagagagcuguacuuac

SEQ ID NO: 2015475 - RNA, 19 nt, Artificial Sequence
  Description of Artificial Sequence: Synthetic oligonucleotide
  Antisense strand to SEQ ID NO: 2015474
guaaguacagcucucuuga

SEQ ID NO: 2015476 - RNA, 19 nt, Artificial Sequence
  Description of Artificial Sequence: Synthetic oligonucleotide
  Sense strand starting at position 1632 of SEQ ID NO: 1881067
gggagugaaugucuccuga

SEQ ID NO: 2015477 - RNA, 19 nt, Artificial Sequence
  Description of Artificial Sequence: Synthetic oligonucleotide
  Antisense strand to SEQ ID NO: 2015476
ucaggagacauucacuccc

SEQ ID NO: 2015478 - RNA, 19 nt, Artificial Sequence
  Description of Artificial Sequence: Synthetic oligonucleotide
  Sense strand starting at position 1634 of SEQ ID NO: 1881067
gagugaaugucuccugaac

SEQ ID NO: 2015479 - RNA, 19 nt, Artificial Sequence
  Description of Artificial Sequence: Synthetic oligonucleotide
  Antisense strand to SEQ ID NO: 2015478
guucaggagacauucacuc

SEQ ID NO: 2015480 - RNA, 19 nt, Artificial Sequence
  Description of Artificial Sequence: Synthetic oligonucleotide
  Sense strand starting at position 1699 of SEQ ID NO: 1881067
ccagcaggccucugauuua

SEQ ID NO: 2015481 - RNA, 19 nt, Artificial Sequence
  Description of Artificial Sequence: Synthetic oligonucleotide
  Antisense strand to SEQ ID NO: 2015480
uaaaucagaggccugcugg

SEQ ID NO: 2015482 - RNA, 19 nt, Artificial Sequence
  Description of Artificial Sequence: Synthetic oligonucleotide
  Sense strand starting at position 1886 of SEQ ID NO: 1881067
uggaaaguucaaggucaug

SEQ ID NO: 2015483 - RNA, 19 nt, Artificial Sequence
  Description of Artificial Sequence: Synthetic oligonucleotide
  Antisense strand to SEQ ID NO: 2015482
caugaccuugaacuuucca

SEQ ID NO: 2015484 - RNA, 19 nt, Artificial Sequence
  Description of Artificial Sequence: Synthetic oligonucleotide
  Sense strand starting at position 1911 of SEQ ID NO: 1881067
guagguuugguguccggua

SEQ ID NO: 2015485 - RNA, 19 nt, Artificial Sequence
  Description of Artificial Sequence: Synthetic oligonucleotide
  Antisense strand to SEQ ID NO: 2015484
uaccggacaccaaaccuac

SEQ ID NO: 2015486 - RNA, 19 nt, Artificial Sequence
  Description of Artificial Sequence: Synthetic oligonucleotide
  Sense strand starting at position 1948 of SEQ ID NO: 1881067
agaugaugcccuggacacu

SEQ ID NO: 2015487 - RNA, 19 nt, Artificial Sequence
  Description of Artificial Sequence: Synthetic oligonucleotide
  Antisense strand to SEQ ID NO: 2015486
aguguccagggcaucaucu

SEQ ID NO: 2015488 - RNA, 19 nt, Artificial Sequence
  Description of Artificial Sequence: Synthetic oligonucleotide
  Sense strand starting at position 1965 of SEQ ID NO: 1881067
cugcauccucuguaggaga

SEQ ID NO: 2015489 - RNA, 19 nt, Artificial Sequence
  Description of Artificial Sequence: Synthetic oligonucleotide
  Antisense strand to SEQ ID NO: 2015488
ucuccuacagaggaugcag

SEQ ID NO: 2015490 - RNA, 19 nt, Artificial Sequence
  Description of Artificial Sequence: Synthetic oligonucleotide
  Sense strand starting at position 1967 of SEQ ID NO: 1881067
gcauccucuguaggagaga

SEQ ID NO: 2015491 - RNA, 19 nt, Artificial Sequence
  Description of Artificial Sequence: Synthetic oligonucleotide
  Antisense strand to SEQ ID NO: 2015490
ucucuccuacagaggaugc

SEQ ID NO: 2015492 - RNA, 19 nt, Artificial Sequence
  Description of Artificial Sequence: Synthetic oligonucleotide
  Sense strand starting at position 2242 of SEQ ID NO: 1881067
cccucagacugguuacaca

SEQ ID NO: 2015493 - RNA, 19 nt, Artificial Sequence
  Description of Artificial Sequence: Synthetic oligonucleotide
  Antisense strand to SEQ ID NO: 2015492
uguguaaccagucugaggg

SEQ ID NO: 2015494 - RNA, 19 nt, Artificial Sequence
  Description of Artificial Sequence: Synthetic oligonucleotide
  Sense strand starting at position 2405 of SEQ ID NO: 1881067
aguuguuuggagcaaauua

SEQ ID NO: 2015495 - RNA, 19 nt, Artificial Sequence
  Description of Artificial Sequence: Synthetic oligonucleotide
  Antisense strand to SEQ ID NO: 2015494
uaauuugcuccaaacaacu

SEQ ID NO: 2015496 - RNA, 19 nt, Artificial Sequence
  Description of Artificial Sequence: Synthetic oligonucleotide
  Sense strand starting at position 2649 of SEQ ID NO: 1881067
guccuacuccuagagauuc

SEQ ID NO: 2015497 - RNA, 19 nt, Artificial Sequence
  Description of Artificial Sequence: Synthetic oligonucleotide
  Antisense strand to SEQ ID NO: 2015496
gaaucucuaggaguaggac

SEQ ID NO: 2015498 - RNA, 19 nt, Artificial Sequence
  Description of Artificial Sequence: Synthetic oligonucleotide
  Sense strand starting at position 2763 of SEQ ID NO: 1881067
ggcuuaguaucaccuagga

SEQ ID NO: 2015499 - RNA, 19 nt, Artificial Sequence
  Description of Artificial Sequence: Synthetic oligonucleotide
  Antisense strand to SEQ ID NO: 2015498
uccuaggugauacuaagcc

SEQ ID NO: 2015500 - RNA, 19 nt, Artificial Sequence
  Description of Artificial Sequence: Synthetic oligonucleotide
  Sense strand starting at position 2829 of SEQ ID NO: 1881067
ugaaucaguuacuuuggga

SEQ ID NO: 2015501 - RNA, 19 nt, Artificial Sequence
  Description of Artificial Sequence: Synthetic oligonucleotide
  Antisense strand to SEQ ID NO: 2015500
ucccaaaguaacugauuca

SEQ ID NO: 2015502 - RNA, 19 nt, Artificial Sequence
  Description of Artificial Sequence: Synthetic oligonucleotide
  Sense strand starting at position 2880 of SEQ ID NO: 1881067
uuugauguccaugaaaguc

SEQ ID NO: 2015503 - RNA, 19 nt, Artificial Sequence
  Description of Artificial Sequence: Synthetic oligonucleotide
  Antisense strand to SEQ ID NO: 2015502
gacuuucauggacaucaaa

SEQ ID NO: 2015504 - RNA, 19 nt, Artificial Sequence
  Description of Artificial Sequence: Synthetic oligonucleotide
  Sense strand starting at position 3097 of SEQ ID NO: 1881067
ccggguccucaucagaagu

SEQ ID NO: 2015505 - RNA, 19 nt, Artificial Sequence
  Description of Artificial Sequence: Synthetic oligonucleotide
  Antisense strand to SEQ ID NO: 2015504
acuucugaugaggacccgg

SEQ ID NO: 2015506 - RNA, 19 nt, Artificial Sequence
  Description of Artificial Sequence: Synthetic oligonucleotide
  Sense strand starting at position 3311 of SEQ ID NO: 1881067
uguucugaucccuaaugug

SEQ ID NO: 2015507 - RNA, 19 nt, Artificial Sequence
  Description of Artificial Sequence: Synthetic oligonucleotide
  Antisense strand to SEQ ID NO: 2015506
cacauuagggaucagaaca

SEQ ID NO: 2015508 - RNA, 19 nt, Artificial Sequence
  Description of Artificial Sequence: Synthetic oligonucleotide
  Sense strand starting at position 3492 of SEQ ID NO: 1881067
auuugccuuccauguuuau

SEQ ID NO: 2015509 - RNA, 19 nt, Artificial Sequence
  Description of Artificial Sequence: Synthetic oligonucleotide
  Antisense strand to SEQ ID NO: 2015508
auaaacauggaaggcaaau

SEQ ID NO: 2015510 - RNA, 19 nt, Artificial Sequence
  Description of Artificial Sequence: Synthetic oligonucleotide
  Sense strand starting at position 3532 of SEQ ID NO: 1881067
aucagaagaugcuucccua

SEQ ID NO: 2015511 - RNA, 19 nt, Artificial Sequence
  Description of Artificial Sequence: Synthetic oligonucleotide
  Antisense strand to SEQ ID NO: 2015510
uagggaagcaucuucugau

SEQ ID NO: 2015512 - RNA, 19 nt, Artificial Sequence
  Description of Artificial Sequence: Synthetic oligonucleotide
  Sense strand starting at position 3621 of SEQ ID NO: 1881067
ucucuaugucuaugcauuu

SEQ ID NO: 2015513 - RNA, 19 nt, Artificial Sequence
  Description of Artificial Sequence: Synthetic oligonucleotide
  Antisense strand to SEQ ID NO: 2015512
aaaugcauagacauagaga

SEQ ID NO: 2015514 - RNA, 19 nt, Artificial Sequence
  Description of Artificial Sequence: Synthetic oligonucleotide
  Sense strand starting at position 3853 of SEQ ID NO: 1881067
agaugauguaagugaguua

SEQ ID NO: 2015515 - RNA, 19 nt, Artificial Sequence
  Description of Artificial Sequence: Synthetic oligonucleotide
  Antisense strand to SEQ ID NO: 2015514
uaacucacuuacaucaucu

SEQ ID NO: 2015516 - RNA, 19 nt, Artificial Sequence
  Description of Artificial Sequence: Synthetic oligonucleotide
  Sense strand starting at position 3858 of SEQ ID NO: 1881067
auguaagugaguuagcaag

SEQ ID NO: 2015517 - RNA, 19 nt, Artificial Sequence
  Description of Artificial Sequence: Synthetic oligonucleotide
  Antisense strand to SEQ ID NO: 2015516
cuugcuaacucacuuacau

SEQ ID NO: 2015518 - RNA, 19 nt, Artificial Sequence
  Description of Artificial Sequence: Synthetic oligonucleotide
  Sense strand starting at position 3860 of SEQ ID NO: 1881067
guaagugaguuagcaagga

SEQ ID NO: 2015519 - RNA, 19 nt, Artificial Sequence
  Description of Artificial Sequence: Synthetic oligonucleotide
  Antisense strand to SEQ ID NO: 2015518
uccuugcuaacucacuuac

SEQ ID NO: 2015520 - RNA, 19 nt, Artificial Sequence
  Description of Artificial Sequence: Synthetic oligonucleotide
  Sense strand starting at position 3864 of SEQ ID NO: 1881067
gugaguuagcaaggaggga

SEQ ID NO: 2015521 - RNA, 19 nt, Artificial Sequence
  Description of Artificial Sequence: Synthetic oligonucleotide
  Antisense strand to SEQ ID NO: 2015520
ucccuccuugcuaacucac

SEQ ID NO: 2015522 - RNA, 19 nt, Artificial Sequence
  Description of Artificial Sequence: Synthetic oligonucleotide
  Sense strand starting at position 3888 of SEQ ID NO: 1881067
gguucugaaaucuaggcua

SEQ ID NO: 2015523 - RNA, 19 nt, Artificial Sequence
  Description of Artificial Sequence: Synthetic oligonucleotide
  Antisense strand to SEQ ID NO: 2015522
uagccuagauuucagaacc

SEQ ID NO: 2015524 - RNA, 19 nt, Artificial Sequence
  Description of Artificial Sequence: Synthetic oligonucleotide
  Sense strand starting at position 3890 of SEQ ID NO: 1881067
uucugaaaucuaggcuaag

SEQ ID NO: 2015525 - RNA, 19 nt, Artificial Sequence
  Description of Artificial Sequence: Synthetic oligonucleotide
  Antisense strand to SEQ ID NO: 2015524
cuuagccuagauuucagaa

SEQ ID NO: 2015526 - RNA, 19 nt, Artificial Sequence
  Description of Artificial Sequence: Synthetic oligonucleotide
  Sense strand starting at position 3935 of SEQ ID NO: 1881067
cucagucuuggugaucaag

SEQ ID NO: 2015527 - RNA, 19 nt, Artificial Sequence
  Description of Artificial Sequence: Synthetic oligonucleotide
  Antisense strand to SEQ ID NO: 2015526
cuugaucaccaagacugag

SEQ ID NO: 2015528 - RNA, 19 nt, Artificial Sequence
  Description of Artificial Sequence: Synthetic oligonucleotide
  Sense strand starting at position 192 of SEQ ID NO: 1881068
ccugacugacaugguaaua

SEQ ID NO: 2015529 - RNA, 19 nt, Artificial Sequence
  Description of Artificial Sequence: Synthetic oligonucleotide
  Antisense strand to SEQ ID NO: 2015528
uauuaccaugucagucagg

SEQ ID NO: 2015530 - RNA, 19 nt, Artificial Sequence
  Description of Artificial Sequence: Synthetic oligonucleotide
  Sense strand starting at position 203 of SEQ ID NO: 1881068
ugguaauaacaguauccau

SEQ ID NO: 2015531 - RNA, 19 nt, Artificial Sequence
  Description of Artificial Sequence: Synthetic oligonucleotide
  Antisense strand to SEQ ID NO: 2015530
auggauacuguuauuacca

SEQ ID NO: 2015532 - RNA, 19 nt, Artificial Sequence
  Description of Artificial Sequence: Synthetic oligonucleotide
  Sense strand starting at position 259 of SEQ ID NO: 1881068
ugcaaaugggucugauuaa

SEQ ID NO: 2015533 - RNA, 19 nt, Artificial Sequence
  Description of Artificial Sequence: Synthetic oligonucleotide
  Antisense strand to SEQ ID NO: 2015532
uuaaucagacccauuugca

SEQ ID NO: 2015534 - RNA, 19 nt, Artificial Sequence
  Description of Artificial Sequence: Synthetic oligonucleotide
  Sense strand starting at position 282 of SEQ ID NO: 1881068
auuugaugguaagauuacu

SEQ ID NO: 2015535 - RNA, 19 nt, Artificial Sequence
  Description of Artificial Sequence: Synthetic oligonucleotide
  Antisense strand to SEQ ID NO: 2015534
aguaaucuuaccaucaaau

SEQ ID NO: 2015536 - RNA, 19 nt, Artificial Sequence
  Description of Artificial Sequence: Synthetic oligonucleotide
  Sense strand starting at position 293 of SEQ ID NO: 1881068
agauuacugccaggguuag

SEQ ID NO: 2015537 - RNA, 19 nt, Artificial Sequence
  Description of Artificial Sequence: Synthetic oligonucleotide
  Antisense strand to SEQ ID NO: 2015536
cuaacccuggcaguaaucu

SEQ ID NO: 2015538 - RNA, 19 nt, Artificial Sequence
  Description of Artificial Sequence: Synthetic oligonucleotide
  Sense strand starting at position 294 of SEQ ID NO: 1881068
gauuacugccaggguuaga

SEQ ID NO: 2015539 - RNA, 19 nt, Artificial Sequence
  Description of Artificial Sequence: Synthetic oligonucleotide
  Antisense strand to SEQ ID NO: 2015538
ucuaacccuggcaguaauc

SEQ ID NO: 2015540 - RNA, 19 nt, Artificial Sequence
  Description of Artificial Sequence: Synthetic oligonucleotide
  Sense strand starting at position 322 of SEQ ID NO: 1881068
agauaaaccuugcuuaaag

SEQ ID NO: 2015541 - RNA, 19 nt, Artificial Sequence
  Description of Artificial Sequence: Synthetic oligonucleotide
  Antisense strand to SEQ ID NO: 2015540
cuuuaagcaagguuuaucu

SEQ ID NO: 2015542 - RNA, 19 nt, Artificial Sequence
  Description of Artificial Sequence: Synthetic oligonucleotide
  Sense strand starting at position 413 of SEQ ID NO: 1881068
ggaagaggaucccuuccuu

SEQ ID NO: 2015543 - RNA, 19 nt, Artificial Sequence
  Description of Artificial Sequence: Synthetic oligonucleotide
  Antisense strand to SEQ ID NO: 2015542
aaggaagggauccucuucc

SEQ ID NO: 2015544 - RNA, 19 nt, Artificial Sequence
  Description of Artificial Sequence: Synthetic oligonucleotide
  Sense strand starting at position 420 of SEQ ID NO: 1881068
gaucccuuccuuuggguua

SEQ ID NO: 2015545 - RNA, 19 nt, Artificial Sequence
  Description of Artificial Sequence: Synthetic oligonucleotide
  Antisense strand to SEQ ID NO: 2015544
uaacccaaaggaagggauc

SEQ ID NO: 2015546 - RNA, 19 nt, Artificial Sequence
  Description of Artificial Sequence: Synthetic oligonucleotide
  Sense strand starting at position 507 of SEQ ID NO: 1881068
aguuauuucuccuugcuga

SEQ ID NO: 2015547 - RNA, 19 nt, Artificial Sequence
  Description of Artificial Sequence: Synthetic oligonucleotide
  Antisense strand to SEQ ID NO: 2015546
ucagcaaggagaaauaacu

SEQ ID NO: 2015548 - RNA, 19 nt, Artificial Sequence
  Description of Artificial Sequence: Synthetic oligonucleotide
  Sense strand starting at position 508 of SEQ ID NO: 1881068
guuauuucuccuugcugac

SEQ ID NO: 2015549 - RNA, 19 nt, Artificial Sequence
  Description of Artificial Sequence: Synthetic oligonucleotide
  Antisense strand to SEQ ID NO: 2015548
gucagcaaggagaaauaac

SEQ ID NO: 2015550 - RNA, 19 nt, Artificial Sequence
  Description of Artificial Sequence: Synthetic oligonucleotide
  Sense strand starting at position 906 of SEQ ID NO: 1881068
agagucuugaugugaacug

SEQ ID NO: 2015551 - RNA, 19 nt, Artificial Sequence
  Description of Artificial Sequence: Synthetic oligonucleotide
  Antisense strand to SEQ ID NO: 2015550
caguucacaucaagacucu

SEQ ID NO: 2015552 - RNA, 19 nt, Artificial Sequence
  Description of Artificial Sequence: Synthetic oligonucleotide
  Sense strand starting at position 911 of SEQ ID NO: 1881068
cuugaugugaacugcuuga

SEQ ID NO: 2015553 - RNA, 19 nt, Artificial Sequence
  Description of Artificial Sequence: Synthetic oligonucleotide
  Antisense strand to SEQ ID NO: 2015552
ucaagcaguucacaucaag

SEQ ID NO: 2015554 - RNA, 19 nt, Artificial Sequence
  Description of Artificial Sequence: Synthetic oligonucleotide
  Sense strand starting at position 961 of SEQ ID NO: 1881068
uccaucuguuccucaggau

SEQ ID NO: 2015555 - RNA, 19 nt, Artificial Sequence
  Description of Artificial Sequence: Synthetic oligonucleotide
  Antisense strand to SEQ ID NO: 2015554
auccugaggaacagaugga

SEQ ID NO: 2015556 - RNA, 19 nt, Artificial Sequence
  Description of Artificial Sequence: Synthetic oligonucleotide
  Sense strand starting at position 1244 of SEQ ID NO: 1881068
guccauuucuguuccucua

SEQ ID NO: 2015557 - RNA, 19 nt, Artificial Sequence
  Description of Artificial Sequence: Synthetic oligonucleotide
  Antisense strand to SEQ ID NO: 2015556
uagaggaacagaaauggac

SEQ ID NO: 2015558 - RNA, 19 nt, Artificial Sequence
  Description of Artificial Sequence: Synthetic oligonucleotide
  Sense strand starting at position 1403 of SEQ ID NO: 1881068
cagaguaguguguaugagu

SEQ ID NO: 2015559 - RNA, 19 nt, Artificial Sequence
  Description of Artificial Sequence: Synthetic oligonucleotide
  Antisense strand to SEQ ID NO: 2015558
acucauacacacuacucug

SEQ ID NO: 2015560 - RNA, 19 nt, Artificial Sequence
  Description of Artificial Sequence: Synthetic oligonucleotide
  Sense strand starting at position 1410 of SEQ ID NO: 1881068
guguguaugaguggaugaa

SEQ ID NO: 2015561 - RNA, 19 nt, Artificial Sequence
  Description of Artificial Sequence: Synthetic oligonucleotide
  Antisense strand to SEQ ID NO: 2015560
uucauccacucauacacac

SEQ ID NO: 2015562 - RNA, 19 nt, Artificial Sequence
  Description of Artificial Sequence: Synthetic oligonucleotide
  Sense strand starting at position 1411 of SEQ ID NO: 1881068
uguguaugaguggaugaau

SEQ ID NO: 2015563 - RNA, 19 nt, Artificial Sequence
  Description of Artificial Sequence: Synthetic oligonucleotide
  Antisense strand to SEQ ID NO: 2015562
auucauccacucauacaca

SEQ ID NO: 2015564 - RNA, 19 nt, Artificial Sequence
  Description of Artificial Sequence: Synthetic oligonucleotide
  Sense strand starting at position 1456 of SEQ ID NO: 1881068
gcuccaacuugagucugaa

SEQ ID NO: 2015565 - RNA, 19 nt, Artificial Sequence
  Description of Artificial Sequence: Synthetic oligonucleotide
  Antisense strand to SEQ ID NO: 2015564
uucagacucaaguuggagc

SEQ ID NO: 2015566 - RNA, 19 nt, Artificial Sequence
  Description of Artificial Sequence: Synthetic oligonucleotide
  Sense strand starting at position 1459 of SEQ ID NO: 1881068
ccaacuugagucugaaacu

SEQ ID NO: 2015567 - RNA, 19 nt, Artificial Sequence
  Description of Artificial Sequence: Synthetic oligonucleotide
  Antisense strand to SEQ ID NO: 2015566
aguuucagacucaaguugg

SEQ ID NO: 2015568 - RNA, 19 nt, Artificial Sequence
  Description of Artificial Sequence: Synthetic oligonucleotide
  Sense strand starting at position 1553 of SEQ ID NO: 1881068
cucugagaucuaugaucca

SEQ ID NO: 2015569 - RNA, 19 nt, Artificial Sequence
  Description of Artificial Sequence: Synthetic oligonucleotide
  Antisense strand to SEQ ID NO: 2015568
uggaucauagaucucagag

SEQ ID NO: 2015570 - RNA, 19 nt, Artificial Sequence
  Description of Artificial Sequence: Synthetic oligonucleotide
  Sense strand starting at position 1584 of SEQ ID NO: 1881068
gugacaccuuagucacuua

SEQ ID NO: 2015571 - RNA, 19 nt, Artificial Sequence
  Description of Artificial Sequence: Synthetic oligonucleotide
  Antisense strand to SEQ ID NO: 2015570
uaagugacuaaggugucac

SEQ ID NO: 2015572 - RNA, 19 nt, Artificial Sequence
  Description of Artificial Sequence: Synthetic oligonucleotide
  Sense strand starting at position 2216 of SEQ ID NO: 1881068
aggucugucugauucuaug

SEQ ID NO: 2015573 - RNA, 19 nt, Artificial Sequence
  Description of Artificial Sequence: Synthetic oligonucleotide
  Antisense strand to SEQ ID NO: 2015572
cauagaaucagacagaccu

SEQ ID NO: 2015574 - RNA, 19 nt, Artificial Sequence
  Description of Artificial Sequence: Synthetic oligonucleotide
  Sense strand starting at position 2330 of SEQ ID NO: 1881068
uuugauaagugcucauuga

SEQ ID NO: 2015575 - RNA, 19 nt, Artificial Sequence
  Description of Artificial Sequence: Synthetic oligonucleotide
  Antisense strand to SEQ ID NO: 2015574
ucaaugagcacuuaucaaa

SEQ ID NO: 2015576 - RNA, 19 nt, Artificial Sequence
  Description of Artificial Sequence: Synthetic oligonucleotide
  Sense strand starting at position 2331 of SEQ ID NO: 1881068
uugauaagugcucauugaa

SEQ ID NO: 2015577 - RNA, 19 nt, Artificial Sequence
  Description of Artificial Sequence: Synthetic oligonucleotide
  Antisense strand to SEQ ID NO: 2015576
uucaaugagcacuuaucaa

SEQ ID NO: 2015578 - RNA, 19 nt, Artificial Sequence
  Description of Artificial Sequence: Synthetic oligonucleotide
  Sense strand starting at position 2334 of SEQ ID NO: 1881068
auaagugcucauugaagaa

SEQ ID NO: 2015579 - RNA, 19 nt, Artificial Sequence
  Description of Artificial Sequence: Synthetic oligonucleotide
  Antisense strand to SEQ ID NO: 2015578
uucuucaaugagcacuuau

SEQ ID NO: 2015580 - RNA, 19 nt, Artificial Sequence
  Description of Artificial Sequence: Synthetic oligonucleotide
  Sense strand starting at position 2459 of SEQ ID NO: 1881068
cuguaaacgggaggcauua

SEQ ID NO: 2015581 - RNA, 19 nt, Artificial Sequence
  Description of Artificial Sequence: Synthetic oligonucleotide
  Antisense strand to SEQ ID NO: 2015580
uaaugccucccguuuacag

SEQ ID NO: 2015582 - RNA, 19 nt, Artificial Sequence
  Description of Artificial Sequence: Synthetic oligonucleotide
  Sense strand starting at position 2780 of SEQ ID NO: 1881068
cagugcucucgacagggau

SEQ ID NO: 2015583 - RNA, 19 nt, Artificial Sequence
  Description of Artificial Sequence: Synthetic oligonucleotide
  Antisense strand to SEQ ID NO: 2015582
aucccugucgagagcacug

SEQ ID NO: 2015584 - RNA, 19 nt, Artificial Sequence
  Description of Artificial Sequence: Synthetic oligonucleotide
  Sense strand starting at position 2857 of SEQ ID NO: 1881068
aggcaaggucccugggaaa

SEQ ID NO: 2015585 - RNA, 19 nt, Artificial Sequence
  Description of Artificial Sequence: Synthetic oligonucleotide
  Antisense strand to SEQ ID NO: 2015584
uuucccagggaccuugccu

SEQ ID NO: 2015586 - RNA, 19 nt, Artificial Sequence
  Description of Artificial Sequence: Synthetic oligonucleotide
  Sense strand starting at position 3055 of SEQ ID NO: 1881068
aaacgauaccgcugauuaa

SEQ ID NO: 2015587 - RNA, 19 nt, Artificial Sequence
  Description of Artificial Sequence: Synthetic oligonucleotide
  Antisense strand to SEQ ID NO: 2015586
uuaaucagcgguaucguuu

SEQ ID NO: 2015588 - RNA, 19 nt, Artificial Sequence
  Description of Artificial Sequence: Synthetic oligonucleotide
  Sense strand starting at position 3056 of SEQ ID NO: 1881068
aacgauaccgcugauuaaa

SEQ ID NO: 2015589 - RNA, 19 nt, Artificial Sequence
  Description of Artificial Sequence: Synthetic oligonucleotide
  Antisense strand to SEQ ID NO: 2015588
uuuaaucagcgguaucguu

SEQ ID NO: 2015590 - RNA, 19 nt, Artificial Sequence
  Description of Artificial Sequence: Synthetic oligonucleotide
  Sense strand starting at position 3205 of SEQ ID NO: 1881068
gcagcuuagggaugaauac

SEQ ID NO: 2015591 - RNA, 19 nt, Artificial Sequence
  Description of Artificial Sequence: Synthetic oligonucleotide
  Antisense strand to SEQ ID NO: 2015590
guauucaucccuaagcugc

SEQ ID NO: 2015592 - RNA, 19 nt, Artificial Sequence
  Description of Artificial Sequence: Synthetic oligonucleotide
  Sense strand starting at position 3337 of SEQ ID NO: 1881068
gagaguuacuccucagaac

SEQ ID NO: 2015593 - RNA, 19 nt, Artificial Sequence
  Description of Artificial Sequence: Synthetic oligonucleotide
  Antisense strand to SEQ ID NO: 2015592
guucugaggaguaacucuc

SEQ ID NO: 2015594 - RNA, 19 nt, Artificial Sequence
  Description of Artificial Sequence: Synthetic oligonucleotide
  Sense strand starting at position 3524 of SEQ ID NO: 1881068
gucggucugaguuugucuu

SEQ ID NO: 2015595 - RNA, 19 nt, Artificial Sequence
  Description of Artificial Sequence: Synthetic oligonucleotide
  Antisense strand to SEQ ID NO: 2015594
aagacaaacucagaccgac

SEQ ID NO: 2015596 - RNA, 19 nt, Artificial Sequence
  Description of Artificial Sequence: Synthetic oligonucleotide
  Sense strand starting at position 3542 of SEQ ID NO: 1881068
uuuccugcucaggaaacau

SEQ ID NO: 2015597 - RNA, 19 nt, Artificial Sequence
  Description of Artificial Sequence: Synthetic oligonucleotide
  Antisense strand to SEQ ID NO: 2015596
auguuuccugagcaggaaa

SEQ ID NO: 2015598 - RNA, 19 nt, Artificial Sequence
  Description of Artificial Sequence: Synthetic oligonucleotide
  Sense strand starting at position 3677 of SEQ ID NO: 1881068
ugacuuuguucuguuagga

SEQ ID NO: 2015599 - RNA, 19 nt, Artificial Sequence
  Description of Artificial Sequence: Synthetic oligonucleotide
  Antisense strand to SEQ ID NO: 2015598
uccuaacagaacaaaguca

SEQ ID NO: 2015600 - RNA, 19 nt, Artificial Sequence
  Description of Artificial Sequence: Synthetic oligonucleotide
  Sense strand starting at position 3757 of SEQ ID NO: 1881068
gcagaagauuguccaggaa

SEQ ID NO: 2015601 - RNA, 19 nt, Artificial Sequence
  Description of Artificial Sequence: Synthetic oligonucleotide
  Antisense strand to SEQ ID NO: 2015600
uuccuggacaaucuucugc

SEQ ID NO: 2015602 - RNA, 19 nt, Artificial Sequence
  Description of Artificial Sequence: Synthetic oligonucleotide
  Sense strand starting at position 3774 of SEQ ID NO: 1881068
aagggugauugcuuugaau

SEQ ID NO: 2015603 - RNA, 19 nt, Artificial Sequence
  Description of Artificial Sequence: Synthetic oligonucleotide
  Antisense strand to SEQ ID NO: 2015602
auucaaagcaaucacccuu

SEQ ID NO: 2015604 - RNA, 19 nt, Artificial Sequence
  Description of Artificial Sequence: Synthetic oligonucleotide
  Sense strand starting at position 3841 of SEQ ID NO: 1881068
agaauaaauuuggagcuga

SEQ ID NO: 2015605 - RNA, 19 nt, Artificial Sequence
  Description of Artificial Sequence: Synthetic oligonucleotide
  Antisense strand to SEQ ID NO: 2015604
ucagcuccaaauuuauucu

SEQ ID NO: 2015606 - RNA, 19 nt, Artificial Sequence
  Description of Artificial Sequence: Synthetic oligonucleotide
  Sense strand starting at position 3914 of SEQ ID NO: 1881068
ggaauucuugcugacauca

SEQ ID NO: 2015607 - RNA, 19 nt, Artificial Sequence
  Description of Artificial Sequence: Synthetic oligonucleotide
  Antisense strand to SEQ ID NO: 2015606
ugaugucagcaagaauucc

SEQ ID NO: 2015608 - RNA, 19 nt, Artificial Sequence
  Description of Artificial Sequence: Synthetic oligonucleotide
  Sense strand starting at position 109 of SEQ ID NO: 1881069
ccuagaucuuguguugaaa

SEQ ID NO: 2015609 - RNA, 19 nt, Artificial Sequence
  Description of Artificial Sequence: Synthetic oligonucleotide
  Antisense strand to SEQ ID NO: 2015608
uuucaacacaagaucuagg

SEQ ID NO: 2015610 - RNA, 19 nt, Artificial Sequence
  Description of Artificial Sequence: Synthetic oligonucleotide
  Sense strand starting at position 219 of SEQ ID NO: 1881069
accuuugagaaauggcuga

SEQ ID NO: 2015611 - RNA, 19 nt, Artificial Sequence
  Description of Artificial Sequence: Synthetic oligonucleotide
  Antisense strand to SEQ ID NO: 2015610
ucagccauuucucaaaggu

SEQ ID NO: 2015612 - RNA, 19 nt, Artificial Sequence
  Description of Artificial Sequence: Synthetic oligonucleotide
  Sense strand starting at position 240 of SEQ ID NO: 1881069
cuaggucugaggcaguaaa

SEQ ID NO: 2015613 - RNA, 19 nt, Artificial Sequence
  Description of Artificial Sequence: Synthetic oligonucleotide
  Antisense strand to SEQ ID NO: 2015612
uuuacugccucagaccuag

SEQ ID NO: 2015614 - RNA, 19 nt, Artificial Sequence
  Description of Artificial Sequence: Synthetic oligonucleotide
  Sense strand starting at position 251 of SEQ ID NO: 1881069
gcaguaaauguacaauaug

SEQ ID NO: 2015615 - RNA, 19 nt, Artificial Sequence
  Description of Artificial Sequence: Synthetic oligonucleotide
  Antisense strand to SEQ ID NO: 2015614
cauauuguacauuuacugc

SEQ ID NO: 2015616 - RNA, 19 nt, Artificial Sequence
  Description of Artificial Sequence: Synthetic oligonucleotide
  Sense strand starting at position 276 of SEQ ID NO: 1881069
gaacucuuacagugucaga

SEQ ID NO: 2015617 - RNA, 19 nt, Artificial Sequence
  Description of Artificial Sequence: Synthetic oligonucleotide
  Antisense strand to SEQ ID NO: 2015616
ucugacacuguaagaguuc

SEQ ID NO: 2015618 - RNA, 19 nt, Artificial Sequence
  Description of Artificial Sequence: Synthetic oligonucleotide
  Sense strand starting at position 301 of SEQ ID NO: 1881069
guaagcuaucaagacauuc

SEQ ID NO: 2015619 - RNA, 19 nt, Artificial Sequence
  Description of Artificial Sequence: Synthetic oligonucleotide
  Antisense strand to SEQ ID NO: 2015618
gaaugucuugauagcuuac

SEQ ID NO: 2015620 - RNA, 19 nt, Artificial Sequence
  Description of Artificial Sequence: Synthetic oligonucleotide
  Sense strand starting at position 383 of SEQ ID NO: 1881069
auggauaaucacugcaauu

SEQ ID NO: 2015621 - RNA, 19 nt, Artificial Sequence
  Description of Artificial Sequence: Synthetic oligonucleotide
  Antisense strand to SEQ ID NO: 2015620
aauugcagugauuauccau

SEQ ID NO: 2015622 - RNA, 19 nt, Artificial Sequence
  Description of Artificial Sequence: Synthetic oligonucleotide
  Sense strand starting at position 520 of SEQ ID NO: 1881069
guaagaaucuagcuguuau

SEQ ID NO: 2015623 - RNA, 19 nt, Artificial Sequence
  Description of Artificial Sequence: Synthetic oligonucleotide
  Antisense strand to SEQ ID NO: 2015622
auaacagcuagauucuuac

SEQ ID NO: 2015624 - RNA, 19 nt, Artificial Sequence
  Description of Artificial Sequence: Synthetic oligonucleotide
  Sense strand starting at position 625 of SEQ ID NO: 1881069
uuaugaugcuuccuugaaa

SEQ ID NO: 2015625 - RNA, 19 nt, Artificial Sequence
  Description of Artificial Sequence: Synthetic oligonucleotide
  Antisense strand to SEQ ID NO: 2015624
uuucaaggaagcaucauaa

SEQ ID NO: 2015626 - RNA, 19 nt, Artificial Sequence
  Description of Artificial Sequence: Synthetic oligonucleotide
  Sense strand starting at position 628 of SEQ ID NO: 1881069
ugaugcuuccuugaaagac

SEQ ID NO: 2015627 - RNA, 19 nt, Artificial Sequence
  Description of Artificial Sequence: Synthetic oligonucleotide
  Antisense strand to SEQ ID NO: 2015626
gucuuucaaggaagcauca

SEQ ID NO: 2015628 - RNA, 19 nt, Artificial Sequence
  Description of Artificial Sequence: Synthetic oligonucleotide
  Sense strand starting at position 655 of SEQ ID NO: 1881069
gaaacuugagcacgagaaa

SEQ ID NO: 2015629 - RNA, 19 nt, Artificial Sequence
  Description of Artificial Sequence: Synthetic oligonucleotide
  Antisense strand to SEQ ID NO: 2015628
uuucucgugcucaaguuuc

SEQ ID NO: 2015630 - RNA, 19 nt, Artificial Sequence
  Description of Artificial Sequence: Synthetic oligonucleotide
  Sense strand starting at position 762 of SEQ ID NO: 1881069
ggcuauauucuauaguuaa

SEQ ID NO: 2015631 - RNA, 19 nt, Artificial Sequence
  Description of Artificial Sequence: Synthetic oligonucleotide
  Antisense strand to SEQ ID NO: 2015630
uuaacuauagaauauagcc

SEQ ID NO: 2015632 - RNA, 19 nt, Artificial Sequence
  Description of Artificial Sequence: Synthetic oligonucleotide
  Sense strand starting at position 832 of SEQ ID NO: 1881069
gcagucuagcccuaccaga

SEQ ID NO: 2015633 - RNA, 19 nt, Artificial Sequence
  Description of Artificial Sequence: Synthetic oligonucleotide
  Antisense strand to SEQ ID NO: 2015632
ucugguagggcuagacugc

SEQ ID NO: 2015634 - RNA, 19 nt, Artificial Sequence
  Description of Artificial Sequence: Synthetic oligonucleotide
  Sense strand starting at position 878 of SEQ ID NO: 1881069
aguauauuagcccauaagu

SEQ ID NO: 2015635 - RNA, 19 nt, Artificial Sequence
  Description of Artificial Sequence: Synthetic oligonucleotide
  Antisense strand to SEQ ID NO: 2015634
acuuaugggcuaauauacu

SEQ ID NO: 2015636 - RNA, 19 nt, Artificial Sequence
  Description of Artificial Sequence: Synthetic oligonucleotide
  Sense strand starting at position 953 of SEQ ID NO: 1881069
guggaaauuuacguaugug

SEQ ID NO: 2015637 - RNA, 19 nt, Artificial Sequence
  Description of Artificial Sequence: Synthetic oligonucleotide
  Antisense strand to SEQ ID NO: 2015636
cacauacguaaauuuccac

SEQ ID NO: 2015638 - RNA, 19 nt, Artificial Sequence
  Description of Artificial Sequence: Synthetic oligonucleotide
  Sense strand starting at position 1073 of SEQ ID NO: 1881069
uagguagaauuccugcaua

SEQ ID NO: 2015639 - RNA, 19 nt, Artificial Sequence
  Description of Artificial Sequence: Synthetic oligonucleotide
  Antisense strand to SEQ ID NO: 2015638
uaugcaggaauucuaccua

SEQ ID NO: 2015640 - RNA, 19 nt, Artificial Sequence
  Description of Artificial Sequence: Synthetic oligonucleotide
  Sense strand starting at position 1076 of SEQ ID NO: 1881069
guagaauuccugcauauau

SEQ ID NO: 2015641 - RNA, 19 nt, Artificial Sequence
  Description of Artificial Sequence: Synthetic oligonucleotide
  Antisense strand to SEQ ID NO: 2015640
auauaugcaggaauucuac

SEQ ID NO: 2015642 - RNA, 19 nt, Artificial Sequence
  Description of Artificial Sequence: Synthetic oligonucleotide
  Sense strand starting at position 1078 of SEQ ID NO: 1881069
agaauuccugcauauaugu

SEQ ID NO: 2015643 - RNA, 19 nt, Artificial Sequence
  Description of Artificial Sequence: Synthetic oligonucleotide
  Antisense strand to SEQ ID NO: 2015642
acauauaugcaggaauucu

SEQ ID NO: 2015644 - RNA, 19 nt, Artificial Sequence
  Description of Artificial Sequence: Synthetic oligonucleotide
  Sense strand starting at position 1110 of SEQ ID NO: 1881069
ucuauuacucgugaaucuu

SEQ ID NO: 2015645 - RNA, 19 nt, Artificial Sequence
  Description of Artificial Sequence: Synthetic oligonucleotide
  Antisense strand to SEQ ID NO: 2015644
aagauucacgaguaauaga

SEQ ID NO: 2015646 - RNA, 19 nt, Artificial Sequence
  Description of Artificial Sequence: Synthetic oligonucleotide
  Sense strand starting at position 1261 of SEQ ID NO: 1881069
gcgaaagagacuugacaac

SEQ ID NO: 2015647 - RNA, 19 nt, Artificial Sequence
  Description of Artificial Sequence: Synthetic oligonucleotide
  Antisense strand to SEQ ID NO: 2015646
guugucaagucucuuucgc

SEQ ID NO: 2015648 - RNA, 19 nt, Artificial Sequence
  Description of Artificial Sequence: Synthetic oligonucleotide
  Sense strand starting at position 1297 of SEQ ID NO: 1881069
auugaugcacuaugugauu

SEQ ID NO: 2015649 - RNA, 19 nt, Artificial Sequence
  Description of Artificial Sequence: Synthetic oligonucleotide
  Antisense strand to SEQ ID NO: 2015648
aaucacauagugcaucaau

SEQ ID NO: 2015650 - RNA, 19 nt, Artificial Sequence
  Description of Artificial Sequence: Synthetic oligonucleotide
  Sense strand starting at position 1308 of SEQ ID NO: 1881069
augugauucuuguuaaauc

SEQ ID NO: 2015651 - RNA, 19 nt, Artificial Sequence
  Description of Artificial Sequence: Synthetic oligonucleotide
  Antisense strand to SEQ ID NO: 2015650
gauuuaacaagaaucacau

SEQ ID NO: 2015652 - RNA, 19 nt, Artificial Sequence
  Description of Artificial Sequence: Synthetic oligonucleotide
  Sense strand starting at position 1459 of SEQ ID NO: 1881069
uccugugguccucaauuga

SEQ ID NO: 2015653 - RNA, 19 nt, Artificial Sequence
  Description of Artificial Sequence: Synthetic oligonucleotide
  Antisense strand to SEQ ID NO: 2015652
ucaauugaggaccacagga

SEQ ID NO: 2015654 - RNA, 19 nt, Artificial Sequence
  Description of Artificial Sequence: Synthetic oligonucleotide
  Sense strand starting at position 1647 of SEQ ID NO: 1881069
gcuaaauagugauuguuua

SEQ ID NO: 2015655 - RNA, 19 nt, Artificial Sequence
  Description of Artificial Sequence: Synthetic oligonucleotide
  Antisense strand to SEQ ID NO: 2015654
uaaacaaucacuauuuagc

SEQ ID NO: 2015656 - RNA, 19 nt, Artificial Sequence
  Description of Artificial Sequence: Synthetic oligonucleotide
  Sense strand starting at position 1648 of SEQ ID NO: 1881069
cuaaauagugauuguuuag

SEQ ID NO: 2015657 - RNA, 19 nt, Artificial Sequence
  Description of Artificial Sequence: Synthetic oligonucleotide
  Antisense strand to SEQ ID NO: 2015656
cuaaacaaucacuauuuag

SEQ ID NO: 2015658 - RNA, 19 nt, Artificial Sequence
  Description of Artificial Sequence: Synthetic oligonucleotide
  Sense strand starting at position 1657 of SEQ ID NO: 1881069
gauuguuuagcacaggaca

SEQ ID NO: 2015659 - RNA, 19 nt, Artificial Sequence
  Description of Artificial Sequence: Synthetic oligonucleotide
  Antisense strand to SEQ ID NO: 2015658
uguccugugcuaaacaauc

SEQ ID NO: 2015660 - RNA, 19 nt, Artificial Sequence
  Description of Artificial Sequence: Synthetic oligonucleotide
  Sense strand starting at position 1804 of SEQ ID NO: 1881069
cugagauauuaggcugaau

SEQ ID NO: 2015661 - RNA, 19 nt, Artificial Sequence
  Description of Artificial Sequence: Synthetic oligonucleotide
  Antisense strand to SEQ ID NO: 2015660
auucagccuaauaucucag

SEQ ID NO: 2015662 - RNA, 19 nt, Artificial Sequence
  Description of Artificial Sequence: Synthetic oligonucleotide
  Sense strand starting at position 1806 of SEQ ID NO: 1881069
gagauauuaggcugaauca

SEQ ID NO: 2015663 - RNA, 19 nt, Artificial Sequence
  Description of Artificial Sequence: Synthetic oligonucleotide
  Antisense strand to SEQ ID NO: 2015662
ugauucagccuaauaucuc

SEQ ID NO: 2015664 - RNA, 19 nt, Artificial Sequence
  Description of Artificial Sequence: Synthetic oligonucleotide
  Sense strand starting at position 2572 of SEQ ID NO: 1881069
uagcguauucgucuuuguu

SEQ ID NO: 2015665 - RNA, 19 nt, Artificial Sequence
  Description of Artificial Sequence: Synthetic oligonucleotide
  Antisense strand to SEQ ID NO: 2015664
aacaaagacgaauacgcua

SEQ ID NO: 2015666 - RNA, 19 nt, Artificial Sequence
  Description of Artificial Sequence: Synthetic oligonucleotide
  Sense strand starting at position 2573 of SEQ ID NO: 1881069
agcguauucgucuuuguuu

SEQ ID NO: 2015667 - RNA, 19 nt, Artificial Sequence
  Description of Artificial Sequence: Synthetic oligonucleotide
  Antisense strand to SEQ ID NO: 2015666
aaacaaagacgaauacgcu

SEQ ID NO: 2015668 - RNA, 19 nt, Artificial Sequence
  Description of Artificial Sequence: Synthetic oligonucleotide
  Sense strand starting at position 3060 of SEQ ID NO: 1881069
guaauauaugucuacuaug

SEQ ID NO: 2015669 - RNA, 19 nt, Artificial Sequence
  Description of Artificial Sequence: Synthetic oligonucleotide
  Antisense strand to SEQ ID NO: 2015668
cauaguagacauauauuac

SEQ ID NO: 2015670 - RNA, 19 nt, Artificial Sequence
  Description of Artificial Sequence: Synthetic oligonucleotide
  Sense strand starting at position 3065 of SEQ ID NO: 1881069
auaugucuacuauggucau

SEQ ID NO: 2015671 - RNA, 19 nt, Artificial Sequence
  Description of Artificial Sequence: Synthetic oligonucleotide
  Antisense strand to SEQ ID NO: 2015670
augaccauaguagacauau

SEQ ID NO: 2015672 - RNA, 19 nt, Artificial Sequence
  Description of Artificial Sequence: Synthetic oligonucleotide
  Sense strand starting at position 3414 of SEQ ID NO: 1881069
ugaaaugaauuacuuggua

SEQ ID NO: 2015673 - RNA, 19 nt, Artificial Sequence
  Description of Artificial Sequence: Synthetic oligonucleotide
  Antisense strand to SEQ ID NO: 2015672
uaccaaguaauucauuuca

SEQ ID NO: 2015674 - RNA, 19 nt, Artificial Sequence
  Description of Artificial Sequence: Synthetic oligonucleotide
  Sense strand starting at position 3482 of SEQ ID NO: 1881069
auccgugucguugcaugua

SEQ ID NO: 2015675 - RNA, 19 nt, Artificial Sequence
  Description of Artificial Sequence: Synthetic oligonucleotide
  Antisense strand to SEQ ID NO: 2015674
uacaugcaacgacacggau

SEQ ID NO: 2015676 - RNA, 19 nt, Artificial Sequence
  Description of Artificial Sequence: Synthetic oligonucleotide
  Sense strand starting at position 3523 of SEQ ID NO: 1881069
uucuaugcuguaugaaauu

SEQ ID NO: 2015677 - RNA, 19 nt, Artificial Sequence
  Description of Artificial Sequence: Synthetic oligonucleotide
  Antisense strand to SEQ ID NO: 2015676
aauuucauacagcauagaa

SEQ ID NO: 2015678 - RNA, 19 nt, Artificial Sequence
  Description of Artificial Sequence: Synthetic oligonucleotide
  Sense strand starting at position 3541 of SEQ ID NO: 1881069
ucaguuauaugaguauaca

SEQ ID NO: 2015679 - RNA, 19 nt, Artificial Sequence
  Description of Artificial Sequence: Synthetic oligonucleotide
  Antisense strand to SEQ ID NO: 2015678
uguauacucauauaacuga

SEQ ID NO: 2015680 - RNA, 19 nt, Artificial Sequence
  Description of Artificial Sequence: Synthetic oligonucleotide
  Sense strand starting at position 3687 of SEQ ID NO: 1881069
cgcagauaugugcaaccau

SEQ ID NO: 2015681 - RNA, 19 nt, Artificial Sequence
  Description of Artificial Sequence: Synthetic oligonucleotide
  Antisense strand to SEQ ID NO: 2015680
augguugcacauaucugcg

SEQ ID NO: 2015682 - RNA, 19 nt, Artificial Sequence
  Description of Artificial Sequence: Synthetic oligonucleotide
  Sense strand starting at position 3948 of SEQ ID NO: 1881069
gauaauacuuccgugaacg

SEQ ID NO: 2015683 - RNA, 19 nt, Artificial Sequence
  Description of Artificial Sequence: Synthetic oligonucleotide
  Antisense strand to SEQ ID NO: 2015682
cguucacggaaguauuauc

SEQ ID NO: 2015684 - RNA, 19 nt, Artificial Sequence
  Description of Artificial Sequence: Synthetic oligonucleotide
  Sense strand starting at position 3962 of SEQ ID NO: 1881069
gaacguuauucugugaauc

SEQ ID NO: 2015685 - RNA, 19 nt, Artificial Sequence
  Description of Artificial Sequence: Synthetic oligonucleotide
  Antisense strand to SEQ ID NO: 2015684
gauucacagaauaacguuc

SEQ ID NO: 2015686 - RNA, 19 nt, Artificial Sequence
  Description of Artificial Sequence: Synthetic oligonucleotide
  Sense strand starting at position 3973 of SEQ ID NO: 1881069
ugugaaucgguucacauag

SEQ ID NO: 2015687 - RNA, 19 nt, Artificial Sequence
  Description of Artificial Sequence: Synthetic oligonucleotide
  Antisense strand to SEQ ID NO: 2015686
cuaugugaaccgauucaca

SEQ ID NO: 2015688 - RNA, 19 nt, Artificial Sequence
  Description of Artificial Sequence: Synthetic oligonucleotide
  Sense strand starting at position 9 of SEQ ID NO: 1881070
aauuauagcugguuaugag

SEQ ID NO: 2015689 - RNA, 19 nt, Artificial Sequence
  Description of Artificial Sequence: Synthetic oligonucleotide
  Antisense strand to SEQ ID NO: 2015688
cucauaaccagcuauaauu

SEQ ID NO: 2015690 - RNA, 19 nt, Artificial Sequence
  Description of Artificial Sequence: Synthetic oligonucleotide
  Sense strand starting at position 18 of SEQ ID NO: 1881070
ugguuaugagcauaccuua

SEQ ID NO: 2015691 - RNA, 19 nt, Artificial Sequence
  Description of Artificial Sequence: Synthetic oligonucleotide
  Antisense strand to SEQ ID NO: 2015690
uaagguaugcucauaacca

SEQ ID NO: 2015692 - RNA, 19 nt, Artificial Sequence
  Description of Artificial Sequence: Synthetic oligonucleotide
  Sense strand starting at position 21 of SEQ ID NO: 1881070
uuaugagcauaccuuagau

SEQ ID NO: 2015693 - RNA, 19 nt, Artificial Sequence
  Description of Artificial Sequence: Synthetic oligonucleotide
  Antisense strand to SEQ ID NO: 2015692
aucuaagguaugcucauaa

SEQ ID NO: 2015694 - RNA, 19 nt, Artificial Sequence
  Description of Artificial Sequence: Synthetic oligonucleotide
  Sense strand starting at position 39 of SEQ ID NO: 1881070
uauguaucgcaauagaaau

SEQ ID NO: 2015695 - RNA, 19 nt, Artificial Sequence
  Description of Artificial Sequence: Synthetic oligonucleotide
  Antisense strand to SEQ ID NO: 2015694
auuucuauugcgauacaua

SEQ ID NO: 2015696 - RNA, 19 nt, Artificial Sequence
  Description of Artificial Sequence: Synthetic oligonucleotide
  Sense strand starting at position 94 of SEQ ID NO: 1881070
acggaaguauuaucuguaa

SEQ ID NO: 2015697 - RNA, 19 nt, Artificial Sequence
  Description of Artificial Sequence: Synthetic oligonucleotide
  Antisense strand to SEQ ID NO: 2015696
uuacagauaauacuuccgu

SEQ ID NO: 2015698 - RNA, 19 nt, Artificial Sequence
  Description of Artificial Sequence: Synthetic oligonucleotide
  Sense strand starting at position 124 of SEQ ID NO: 1881070
cuggaaagaacucgaaugu

SEQ ID NO: 2015699 - RNA, 19 nt, Artificial Sequence
  Description of Artificial Sequence: Synthetic oligonucleotide
  Antisense strand to SEQ ID NO: 2015698
acauucgaguucuuuccag

SEQ ID NO: 2015700 - RNA, 19 nt, Artificial Sequence
  Description of Artificial Sequence: Synthetic oligonucleotide
  Sense strand starting at position 294 of SEQ ID NO: 1881070
aguuaaaggguaugaaguu

SEQ ID NO: 2015701 - RNA, 19 nt, Artificial Sequence
  Description of Artificial Sequence: Synthetic oligonucleotide
  Antisense strand to SEQ ID NO: 2015700
aacuucauacccuuuaacu

SEQ ID NO: 2015702 - RNA, 19 nt, Artificial Sequence
  Description of Artificial Sequence: Synthetic oligonucleotide
  Sense strand starting at position 373 of SEQ ID NO: 1881070
ugcugaaagcaaugaauug

SEQ ID NO: 2015703 - RNA, 19 nt, Artificial Sequence
  Description of Artificial Sequence: Synthetic oligonucleotide
  Antisense strand to SEQ ID NO: 2015702
caauucauugcuuucagca

SEQ ID NO: 2015704 - RNA, 19 nt, Artificial Sequence
  Description of Artificial Sequence: Synthetic oligonucleotide
  Sense strand starting at position 374 of SEQ ID NO: 1881070
gcugaaagcaaugaauugu

SEQ ID NO: 2015705 - RNA, 19 nt, Artificial Sequence
  Description of Artificial Sequence: Synthetic oligonucleotide
  Antisense strand to SEQ ID NO: 2015704
acaauucauugcuuucagc

SEQ ID NO: 2015706 - RNA, 19 nt, Artificial Sequence
  Description of Artificial Sequence: Synthetic oligonucleotide
  Sense strand starting at position 693 of SEQ ID NO: 1881070
uuaguuaauuucuugagcu

SEQ ID NO: 2015707 - RNA, 19 nt, Artificial Sequence
  Description of Artificial Sequence: Synthetic oligonucleotide
  Antisense strand to SEQ ID NO: 2015706
agcucaagaaauuaacuaa

SEQ ID NO: 2015708 - RNA, 19 nt, Artificial Sequence
  Description of Artificial Sequence: Synthetic oligonucleotide
  Sense strand starting at position 735 of SEQ ID NO: 1881070
uuguguuaaucuuugaaag

SEQ ID NO: 2015709 - RNA, 19 nt, Artificial Sequence
  Description of Artificial Sequence: Synthetic oligonucleotide
  Antisense strand to SEQ ID NO: 2015708
cuuucaaagauuaacacaa

SEQ ID NO: 2015710 - RNA, 19 nt, Artificial Sequence
  Description of Artificial Sequence: Synthetic oligonucleotide
  Sense strand starting at position 746 of SEQ ID NO: 1881070
uuugaaaguuuacugaacu

SEQ ID NO: 2015711 - RNA, 19 nt, Artificial Sequence
  Description of Artificial Sequence: Synthetic oligonucleotide
  Antisense strand to SEQ ID NO: 2015710
aguucaguaaacuuucaaa

SEQ ID NO: 2015712 - RNA, 19 nt, Artificial Sequence
  Description of Artificial Sequence: Synthetic oligonucleotide
  Sense strand starting at position 1372 of SEQ ID NO: 1881070
cugggugaauuagugauua

SEQ ID NO: 2015713 - RNA, 19 nt, Artificial Sequence
  Description of Artificial Sequence: Synthetic oligonucleotide
  Antisense strand to SEQ ID NO: 2015712
uaaucacuaauucacccag

SEQ ID NO: 2015714 - RNA, 19 nt, Artificial Sequence
  Description of Artificial Sequence: Synthetic oligonucleotide
  Sense strand starting at position 1380 of SEQ ID NO: 1881070
auuagugauuaggcucuaa

SEQ ID NO: 2015715 - RNA, 19 nt, Artificial Sequence
  Description of Artificial Sequence: Synthetic oligonucleotide
  Antisense strand to SEQ ID NO: 2015714
uuagagccuaaucacuaau

SEQ ID NO: 2015716 - RNA, 19 nt, Artificial Sequence
  Description of Artificial Sequence: Synthetic oligonucleotide
  Sense strand starting at position 1384 of SEQ ID NO: 1881070
gugauuaggcucuaaucuu

SEQ ID NO: 2015717 - RNA, 19 nt, Artificial Sequence
  Description of Artificial Sequence: Synthetic oligonucleotide
  Antisense strand to SEQ ID NO: 2015716
aagauuagagccuaaucac

SEQ ID NO: 2015718 - RNA, 19 nt, Artificial Sequence
  Description of Artificial Sequence: Synthetic oligonucleotide
  Sense strand starting at position 1499 of SEQ ID NO: 1881070
gcccaaauucuagaguauu

SEQ ID NO: 2015719 - RNA, 19 nt, Artificial Sequence
  Description of Artificial Sequence: Synthetic oligonucleotide
  Antisense strand to SEQ ID NO: 2015718
aauacucuagaauuugggc

SEQ ID NO: 2015720 - RNA, 19 nt, Artificial Sequence
  Description of Artificial Sequence: Synthetic oligonucleotide
  Sense strand starting at position 1505 of SEQ ID NO: 1881070
auucuagaguauuugcuuu

SEQ ID NO: 2015721 - RNA, 19 nt, Artificial Sequence
  Description of Artificial Sequence: Synthetic oligonucleotide
  Antisense strand to SEQ ID NO: 2015720
aaagcaaauacucuagaau

SEQ ID NO: 2015722 - RNA, 19 nt, Artificial Sequence
  Description of Artificial Sequence: Synthetic oligonucleotide
  Sense strand starting at position 1544 of SEQ ID NO: 1881070
uggguaaacuucuugauua

SEQ ID NO: 2015723 - RNA, 19 nt, Artificial Sequence
  Description of Artificial Sequence: Synthetic oligonucleotide
  Antisense strand to SEQ ID NO: 2015722
uaaucaagaaguuuaccca

SEQ ID NO: 2015724 - RNA, 19 nt, Artificial Sequence
  Description of Artificial Sequence: Synthetic oligonucleotide
  Sense strand starting at position 2187 of SEQ ID NO: 1881070
uuaaauauugccgauacuu

SEQ ID NO: 2015725 - RNA, 19 nt, Artificial Sequence
  Description of Artificial Sequence: Synthetic oligonucleotide
  Antisense strand to SEQ ID NO: 2015724
aaguaucggcaauauuuaa

SEQ ID NO: 2015726 - RNA, 19 nt, Artificial Sequence
  Description of Artificial Sequence: Synthetic oligonucleotide
  Sense strand starting at position 2200 of SEQ ID NO: 1881070
auacuugaccuacgcaaga

SEQ ID NO: 2015727 - RNA, 19 nt, Artificial Sequence
  Description of Artificial Sequence: Synthetic oligonucleotide
  Antisense strand to SEQ ID NO: 2015726
ucuugcguaggucaaguau

SEQ ID NO: 2015728 - RNA, 19 nt, Artificial Sequence
  Description of Artificial Sequence: Synthetic oligonucleotide
  Sense strand starting at position 2240 of SEQ ID NO: 1881070
cuaauaucucaguauguau

SEQ ID NO: 2015729 - RNA, 19 nt, Artificial Sequence
  Description of Artificial Sequence: Synthetic oligonucleotide
  Antisense strand to SEQ ID NO: 2015728
auacauacugagauauuag

SEQ ID NO: 2015730 - RNA, 19 nt, Artificial Sequence
  Description of Artificial Sequence: Synthetic oligonucleotide
  Sense strand starting at position 2872 of SEQ ID NO: 1881070
gguggucuuccagaauauc

SEQ ID NO: 2015731 - RNA, 19 nt, Artificial Sequence
  Description of Artificial Sequence: Synthetic oligonucleotide
  Antisense strand to SEQ ID NO: 2015730
gauauucuggaagaccacc

SEQ ID NO: 2015732 - RNA, 19 nt, Artificial Sequence
  Description of Artificial Sequence: Synthetic oligonucleotide
  Sense strand starting at position 2875 of SEQ ID NO: 1881070
ggucuuccagaauauccuu

SEQ ID NO: 2015733 - RNA, 19 nt, Artificial Sequence
  Description of Artificial Sequence: Synthetic oligonucleotide
  Antisense strand to SEQ ID NO: 2015732
aaggauauucuggaagacc

SEQ ID NO: 2015734 - RNA, 19 nt, Artificial Sequence
  Description of Artificial Sequence: Synthetic oligonucleotide
  Sense strand starting at position 2907 of SEQ ID NO: 1881070
ucagauugguuccucauua

SEQ ID NO: 2015735 - RNA, 19 nt, Artificial Sequence
  Description of Artificial Sequence: Synthetic oligonucleotide
  Antisense strand to SEQ ID NO: 2015734
uaaugaggaaccaaucuga

SEQ ID NO: 2015736 - RNA, 19 nt, Artificial Sequence
  Description of Artificial Sequence: Synthetic oligonucleotide
  Sense strand starting at position 2911 of SEQ ID NO: 1881070
auugguuccucauuauaag

SEQ ID NO: 2015737 - RNA, 19 nt, Artificial Sequence
  Description of Artificial Sequence: Synthetic oligonucleotide
  Antisense strand to SEQ ID NO: 2015736
cuuauaaugaggaaccaau

SEQ ID NO: 2015738 - RNA, 19 nt, Artificial Sequence
  Description of Artificial Sequence: Synthetic oligonucleotide
  Sense strand starting at position 2912 of SEQ ID NO: 1881070
uugguuccucauuauaaga

SEQ ID NO: 2015739 - RNA, 19 nt, Artificial Sequence
  Description of Artificial Sequence: Synthetic oligonucleotide
  Antisense strand to SEQ ID NO: 2015738
ucuuauaaugaggaaccaa

SEQ ID NO: 2015740 - RNA, 19 nt, Artificial Sequence
  Description of Artificial Sequence: Synthetic oligonucleotide
  Sense strand starting at position 2932 of SEQ ID NO: 1881070
ucacgaguaauagauaugu

SEQ ID NO: 2015741 - RNA, 19 nt, Artificial Sequence
  Description of Artificial Sequence: Synthetic oligonucleotide
  Antisense strand to SEQ ID NO: 2015740
acauaucuauuacucguga

SEQ ID NO: 2015742 - RNA, 19 nt, Artificial Sequence
  Description of Artificial Sequence: Synthetic oligonucleotide
  Sense strand starting at position 2934 of SEQ ID NO: 1881070
acgaguaauagauauguac

SEQ ID NO: 2015743 - RNA, 19 nt, Artificial Sequence
  Description of Artificial Sequence: Synthetic oligonucleotide
  Antisense strand to SEQ ID NO: 2015742
guacauaucuauuacucgu

SEQ ID NO: 2015744 - RNA, 19 nt, Artificial Sequence
  Description of Artificial Sequence: Synthetic oligonucleotide
  Sense strand starting at position 2937 of SEQ ID NO: 1881070
aguaauagauauguacaca

SEQ ID NO: 2015745 - RNA, 19 nt, Artificial Sequence
  Description of Artificial Sequence: Synthetic oligonucleotide
  Antisense strand to SEQ ID NO: 2015744
uguguacauaucuauuacu

SEQ ID NO: 2015746 - RNA, 19 nt, Artificial Sequence
  Description of Artificial Sequence: Synthetic oligonucleotide
  Sense strand starting at position 2968 of SEQ ID NO: 1881070
caggaauucuaccuaggug

SEQ ID NO: 2015747 - RNA, 19 nt, Artificial Sequence
  Description of Artificial Sequence: Synthetic oligonucleotide
  Antisense strand to SEQ ID NO: 2015746
caccuagguagaauuccug

SEQ ID NO: 2015748 - RNA, 19 nt, Artificial Sequence
  Description of Artificial Sequence: Synthetic oligonucleotide
  Sense strand starting at position 2971 of SEQ ID NO: 1881070
gaauucuaccuaggugaug

SEQ ID NO: 2015749 - RNA, 19 nt, Artificial Sequence
  Description of Artificial Sequence: Synthetic oligonucleotide
  Antisense strand to SEQ ID NO: 2015748
caucaccuagguagaauuc

SEQ ID NO: 2015750 - RNA, 19 nt, Artificial Sequence
  Description of Artificial Sequence: Synthetic oligonucleotide
  Sense strand starting at position 3058 of SEQ ID NO: 1881070
ugaccagcgauuugcaaua

SEQ ID NO: 2015751 - RNA, 19 nt, Artificial Sequence
  Description of Artificial Sequence: Synthetic oligonucleotide
  Antisense strand to SEQ ID NO: 2015750
uauugcaaaucgcugguca

SEQ ID NO: 2015752 - RNA, 19 nt, Artificial Sequence
  Description of Artificial Sequence: Synthetic oligonucleotide
  Sense strand starting at position 3102 of SEQ ID NO: 1881070
cauuguaauugggucuaag

SEQ ID NO: 2015753 - RNA, 19 nt, Artificial Sequence
  Description of Artificial Sequence: Synthetic oligonucleotide
  Antisense strand to SEQ ID NO: 2015752
cuuagacccaauuacaaug

SEQ ID NO: 2015754 - RNA, 19 nt, Artificial Sequence
  Description of Artificial Sequence: Synthetic oligonucleotide
  Sense strand starting at position 3157 of SEQ ID NO: 1881070
cuacuuaugggcuaauaua

SEQ ID NO: 2015755 - RNA, 19 nt, Artificial Sequence
  Description of Artificial Sequence: Synthetic oligonucleotide
  Antisense strand to SEQ ID NO: 2015754
uauauuagcccauaaguag

SEQ ID NO: 2015756 - RNA, 19 nt, Artificial Sequence
  Description of Artificial Sequence: Synthetic oligonucleotide
  Sense strand starting at position 3211 of SEQ ID NO: 1881070
agggcuagacugcaucauu

SEQ ID NO: 2015757 - RNA, 19 nt, Artificial Sequence
  Description of Artificial Sequence: Synthetic oligonucleotide
  Antisense strand to SEQ ID NO: 2015756
aaugaugcagucuagcccu

SEQ ID NO: 2015758 - RNA, 19 nt, Artificial Sequence
  Description of Artificial Sequence: Synthetic oligonucleotide
  Sense strand starting at position 3477 of SEQ ID NO: 1881070
guugguaucguaaguggga

SEQ ID NO: 2015759 - RNA, 19 nt, Artificial Sequence
  Description of Artificial Sequence: Synthetic oligonucleotide
  Antisense strand to SEQ ID NO: 2015758
ucccacuuacgauaccaac

SEQ ID NO: 2015760 - RNA, 19 nt, Artificial Sequence
  Description of Artificial Sequence: Synthetic oligonucleotide
  Sense strand starting at position 3492 of SEQ ID NO: 1881070
gggauuaucucuuccacuu

SEQ ID NO: 2015761 - RNA, 19 nt, Artificial Sequence
  Description of Artificial Sequence: Synthetic oligonucleotide
  Antisense strand to SEQ ID NO: 2015760
aaguggaagagauaauccc

SEQ ID NO: 2015762 - RNA, 19 nt, Artificial Sequence
  Description of Artificial Sequence: Synthetic oligonucleotide
  Sense strand starting at position 3874 of SEQ ID NO: 1881070
uacagucugcacugaaaga

SEQ ID NO: 2015763 - RNA, 19 nt, Artificial Sequence
  Description of Artificial Sequence: Synthetic oligonucleotide
  Antisense strand to SEQ ID NO: 2015762
ucuuucagugcagacugua

SEQ ID NO: 2015764 - RNA, 19 nt, Artificial Sequence
  Description of Artificial Sequence: Synthetic oligonucleotide
  Sense strand starting at position 3898 of SEQ ID NO: 1881070
augguuaaauggcuuauca

SEQ ID NO: 2015765 - RNA, 19 nt, Artificial Sequence
  Description of Artificial Sequence: Synthetic oligonucleotide
  Antisense strand to SEQ ID NO: 2015764
ugauaagccauuuaaccau

SEQ ID NO: 2015766 - RNA, 19 nt, Artificial Sequence
  Description of Artificial Sequence: Synthetic oligonucleotide
  Sense strand starting at position 3900 of SEQ ID NO: 1881070
gguuaaauggcuuaucacu

SEQ ID NO: 2015767 - RNA, 19 nt, Artificial Sequence
  Description of Artificial Sequence: Synthetic oligonucleotide
  Antisense strand to SEQ ID NO: 2015766
agugauaagccauuuaacc

SEQ ID NO: 2015768 - RNA, 19 nt, Artificial Sequence
  Description of Artificial Sequence: Synthetic oligonucleotide
  Sense strand starting at position 15 of SEQ ID NO: 1881071
uagauaggacuuggugauu

SEQ ID NO: 2015769 - RNA, 19 nt, Artificial Sequence
  Description of Artificial Sequence: Synthetic oligonucleotide
  Antisense strand to SEQ ID NO: 2015768
aaucaccaaguccuaucua

SEQ ID NO: 2015770 - RNA, 19 nt, Artificial Sequence
  Description of Artificial Sequence: Synthetic oligonucleotide
  Sense strand starting at position 20 of SEQ ID NO: 1881071
aggacuuggugauugggua

SEQ ID NO: 2015771 - RNA, 19 nt, Artificial Sequence
  Description of Artificial Sequence: Synthetic oligonucleotide
  Antisense strand to SEQ ID NO: 2015770
uacccaaucaccaaguccu

SEQ ID NO: 2015772 - RNA, 19 nt, Artificial Sequence
  Description of Artificial Sequence: Synthetic oligonucleotide
  Sense strand starting at position 21 of SEQ ID NO: 1881071
ggacuuggugauuggguaa

SEQ ID NO: 2015773 - RNA, 19 nt, Artificial Sequence
  Description of Artificial Sequence: Synthetic oligonucleotide
  Antisense strand to SEQ ID NO: 2015772
uuacccaaucaccaagucc

SEQ ID NO: 2015774 - RNA, 19 nt, Artificial Sequence
  Description of Artificial Sequence: Synthetic oligonucleotide
  Sense strand starting at position 38 of SEQ ID NO: 1881071
aaggcagagggcugaauua

SEQ ID NO: 2015775 - RNA, 19 nt, Artificial Sequence
  Description of Artificial Sequence: Synthetic oligonucleotide
  Antisense strand to SEQ ID NO: 2015774
uaauucagcccucugccuu

SEQ ID NO: 2015776 - RNA, 19 nt, Artificial Sequence
  Description of Artificial Sequence: Synthetic oligonucleotide
  Sense strand starting at position 87 of SEQ ID NO: 1881071
uucugaugacuguggagau

SEQ ID NO: 2015777 - RNA, 19 nt, Artificial Sequence
  Description of Artificial Sequence: Synthetic oligonucleotide
  Antisense strand to SEQ ID NO: 2015776
aucuccacagucaucagaa

SEQ ID NO: 2015778 - RNA, 19 nt, Artificial Sequence
  Description of Artificial Sequence: Synthetic oligonucleotide
  Sense strand starting at position 142 of SEQ ID NO: 1881071
agcagagaaugaguucagu

SEQ ID NO: 2015779 - RNA, 19 nt, Artificial Sequence
  Description of Artificial Sequence: Synthetic oligonucleotide
  Antisense strand to SEQ ID NO: 2015778
acugaacucauucucugcu

SEQ ID NO: 2015780 - RNA, 19 nt, Artificial Sequence
  Description of Artificial Sequence: Synthetic oligonucleotide
  Sense strand starting at position 188 of SEQ ID NO: 1881071
gugauaucuagcuagagcu

SEQ ID NO: 2015781 - RNA, 19 nt, Artificial Sequence
  Description of Artificial Sequence: Synthetic oligonucleotide
  Antisense strand to SEQ ID NO: 2015780
agcucuagcuagauaucac

SEQ ID NO: 2015782 - RNA, 19 nt, Artificial Sequence
  Description of Artificial Sequence: Synthetic oligonucleotide
  Sense strand starting at position 255 of SEQ ID NO: 1881071
uggguuggaaauugcuaau

SEQ ID NO: 2015783 - RNA, 19 nt, Artificial Sequence
  Description of Artificial Sequence: Synthetic oligonucleotide
  Antisense strand to SEQ ID NO: 2015782
auuagcaauuuccaaccca

SEQ ID NO: 2015784 - RNA, 19 nt, Artificial Sequence
  Description of Artificial Sequence: Synthetic oligonucleotide
  Sense strand starting at position 313 of SEQ ID NO: 1881071
gaaugagugaagugagcaa

SEQ ID NO: 2015785 - RNA, 19 nt, Artificial Sequence
  Description of Artificial Sequence: Synthetic oligonucleotide
  Antisense strand to SEQ ID NO: 2015784
uugcucacuucacucauuc

SEQ ID NO: 2015786 - RNA, 19 nt, Artificial Sequence
  Description of Artificial Sequence: Synthetic oligonucleotide
  Sense strand starting at position 317 of SEQ ID NO: 1881071
gagugaagugagcaaaguu

SEQ ID NO: 2015787 - RNA, 19 nt, Artificial Sequence
  Description of Artificial Sequence: Synthetic oligonucleotide
  Antisense strand to SEQ ID NO: 2015786
aacuuugcucacuucacuc

SEQ ID NO: 2015788 - RNA, 19 nt, Artificial Sequence
  Description of Artificial Sequence: Synthetic oligonucleotide
  Sense strand starting at position 382 of SEQ ID NO: 1881071
agauguuaccaaggaggca

SEQ ID NO: 2015789 - RNA, 19 nt, Artificial Sequence
  Description of Artificial Sequence: Synthetic oligonucleotide
  Antisense strand to SEQ ID NO: 2015788
ugccuccuugguaacaucu

SEQ ID NO: 2015790 - RNA, 19 nt, Artificial Sequence
  Description of Artificial Sequence: Synthetic oligonucleotide
  Sense strand starting at position 420 of SEQ ID NO: 1881071
ugugauaauccagaggguu

SEQ ID NO: 2015791 - RNA, 19 nt, Artificial Sequence
  Description of Artificial Sequence: Synthetic oligonucleotide
  Antisense strand to SEQ ID NO: 2015790
aacccucuggauuaucaca

SEQ ID NO: 2015792 - RNA, 19 nt, Artificial Sequence
  Description of Artificial Sequence: Synthetic oligonucleotide
  Sense strand starting at position 444 of SEQ ID NO: 1881071
uucugaaaccaagguagua

SEQ ID NO: 2015793 - RNA, 19 nt, Artificial Sequence
  Description of Artificial Sequence: Synthetic oligonucleotide
  Antisense strand to SEQ ID NO: 2015792
uacuaccuugguuucagaa

SEQ ID NO: 2015794 - RNA, 19 nt, Artificial Sequence
  Description of Artificial Sequence: Synthetic oligonucleotide
  Sense strand starting at position 476 of SEQ ID NO: 1881071
aggugagagucaucccaag

SEQ ID NO: 2015795 - RNA, 19 nt, Artificial Sequence
  Description of Artificial Sequence: Synthetic oligonucleotide
  Antisense strand to SEQ ID NO: 2015794
cuugggaugacucucaccu

SEQ ID NO: 2015796 - RNA, 19 nt, Artificial Sequence
  Description of Artificial Sequence: Synthetic oligonucleotide
  Sense strand starting at position 493 of SEQ ID NO: 1881071
aggugucaaauguagcaga

SEQ ID NO: 2015797 - RNA, 19 nt, Artificial Sequence
  Description of Artificial Sequence: Synthetic oligonucleotide
  Antisense strand to SEQ ID NO: 2015796
ucugcuacauuugacaccu

SEQ ID NO: 2015798 - RNA, 19 nt, Artificial Sequence
  Description of Artificial Sequence: Synthetic oligonucleotide
  Sense strand starting at position 534 of SEQ ID NO: 1881071
gaggaaugccugcaagguu

SEQ ID NO: 2015799 - RNA, 19 nt, Artificial Sequence
  Description of Artificial Sequence: Synthetic oligonucleotide
  Antisense strand to SEQ ID NO: 2015798
aaccuugcaggcauuccuc

SEQ ID NO: 2015800 - RNA, 19 nt, Artificial Sequence
  Description of Artificial Sequence: Synthetic oligonucleotide
  Sense strand starting at position 1694 of SEQ ID NO: 1881071
augaaagagccuugcauua

SEQ ID NO: 2015801 - RNA, 19 nt, Artificial Sequence
  Description of Artificial Sequence: Synthetic oligonucleotide
  Antisense strand to SEQ ID NO: 2015800
uaaugcaaggcucuuucau

SEQ ID NO: 2015802 - RNA, 19 nt, Artificial Sequence
  Description of Artificial Sequence: Synthetic oligonucleotide
  Sense strand starting at position 1763 of SEQ ID NO: 1881071
ugaccaugacucugggcaa

SEQ ID NO: 2015803 - RNA, 19 nt, Artificial Sequence
  Description of Artificial Sequence: Synthetic oligonucleotide
  Antisense strand to SEQ ID NO: 2015802
uugcccagagucaugguca

SEQ ID NO: 2015804 - RNA, 19 nt, Artificial Sequence
  Description of Artificial Sequence: Synthetic oligonucleotide
  Sense strand starting at position 1827 of SEQ ID NO: 1881071
gagauuggacuaugauguu

SEQ ID NO: 2015805 - RNA, 19 nt, Artificial Sequence
  Description of Artificial Sequence: Synthetic oligonucleotide
  Antisense strand to SEQ ID NO: 2015804
aacaucauaguccaaucuc

SEQ ID NO: 2015806 - RNA, 19 nt, Artificial Sequence
  Description of Artificial Sequence: Synthetic oligonucleotide
  Sense strand starting at position 2248 of SEQ ID NO: 1881071
ggccguuucggagugcaga

SEQ ID NO: 2015807 - RNA, 19 nt, Artificial Sequence
  Description of Artificial Sequence: Synthetic oligonucleotide
  Antisense strand to SEQ ID NO: 2015806
ucugcacuccgaaacggcc

SEQ ID NO: 2015808 - RNA, 19 nt, Artificial Sequence
  Description of Artificial Sequence: Synthetic oligonucleotide
  Sense strand starting at position 2986 of SEQ ID NO: 1881071
gugagucccguggaggaaa

SEQ ID NO: 2015809 - RNA, 19 nt, Artificial Sequence
  Description of Artificial Sequence: Synthetic oligonucleotide
  Antisense strand to SEQ ID NO: 2015808
uuuccuccacgggacucac

SEQ ID NO: 2015810 - RNA, 19 nt, Artificial Sequence
  Description of Artificial Sequence: Synthetic oligonucleotide
  Sense strand starting at position 3147 of SEQ ID NO: 1881071
cagguucugguggaaguau

SEQ ID NO: 2015811 - RNA, 19 nt, Artificial Sequence
  Description of Artificial Sequence: Synthetic oligonucleotide
  Antisense strand to SEQ ID NO: 2015810
auacuuccaccagaaccug

SEQ ID NO: 2015812 - RNA, 19 nt, Artificial Sequence
  Description of Artificial Sequence: Synthetic oligonucleotide
  Sense strand starting at position 3211 of SEQ ID NO: 1881071
agggaaucggguugggauu

SEQ ID NO: 2015813 - RNA, 19 nt, Artificial Sequence
  Description of Artificial Sequence: Synthetic oligonucleotide
  Antisense strand to SEQ ID NO: 2015812
aaucccaacccgauucccu

SEQ ID NO: 2015814 - RNA, 19 nt, Artificial Sequence
  Description of Artificial Sequence: Synthetic oligonucleotide
  Sense strand starting at position 3261 of SEQ ID NO: 1881071
ggaagaagcuuugugacag

SEQ ID NO: 2015815 - RNA, 19 nt, Artificial Sequence
  Description of Artificial Sequence: Synthetic oligonucleotide
  Antisense strand to SEQ ID NO: 2015814
cugucacaaagcuucuucc

SEQ ID NO: 2015816 - RNA, 19 nt, Artificial Sequence
  Description of Artificial Sequence: Synthetic oligonucleotide
  Sense strand starting at position 3323 of SEQ ID NO: 1881071
gaaucuugguguuuggaca

SEQ ID NO: 2015817 - RNA, 19 nt, Artificial Sequence
  Description of Artificial Sequence: Synthetic oligonucleotide
  Antisense strand to SEQ ID NO: 2015816
uguccaaacaccaagauuc

SEQ ID NO: 2015818 - RNA, 19 nt, Artificial Sequence
  Description of Artificial Sequence: Synthetic oligonucleotide
  Sense strand starting at position 3346 of SEQ ID NO: 1881071
agguaugaaucacucacau

SEQ ID NO: 2015819 - RNA, 19 nt, Artificial Sequence
  Description of Artificial Sequence: Synthetic oligonucleotide
  Antisense strand to SEQ ID NO: 2015818
augugagugauucauaccu

SEQ ID NO: 2015820 - RNA, 19 nt, Artificial Sequence
  Description of Artificial Sequence: Synthetic oligonucleotide
  Sense strand starting at position 3474 of SEQ ID NO: 1881071
auacgauucuaacuaaaug

SEQ ID NO: 2015821 - RNA, 19 nt, Artificial Sequence
  Description of Artificial Sequence: Synthetic oligonucleotide
  Antisense strand to SEQ ID NO: 2015820
cauuuaguuagaaucguau

SEQ ID NO: 2015822 - RNA, 19 nt, Artificial Sequence
  Description of Artificial Sequence: Synthetic oligonucleotide
  Sense strand starting at position 3494 of SEQ ID NO: 1881071
guagaacauaccuggguau

SEQ ID NO: 2015823 - RNA, 19 nt, Artificial Sequence
  Description of Artificial Sequence: Synthetic oligonucleotide
  Antisense strand to SEQ ID NO: 2015822
auacccagguauguucuac

SEQ ID NO: 2015824 - RNA, 19 nt, Artificial Sequence
  Description of Artificial Sequence: Synthetic oligonucleotide
  Sense strand starting at position 3496 of SEQ ID NO: 1881071
agaacauaccuggguaugu

SEQ ID NO: 2015825 - RNA, 19 nt, Artificial Sequence
  Description of Artificial Sequence: Synthetic oligonucleotide
  Antisense strand to SEQ ID NO: 2015824
acauacccagguauguucu

SEQ ID NO: 2015826 - RNA, 19 nt, Artificial Sequence
  Description of Artificial Sequence: Synthetic oligonucleotide
  Sense strand starting at position 3522 of SEQ ID NO: 1881071
acuuuagaucuaugaggca

SEQ ID NO: 2015827 - RNA, 19 nt, Artificial Sequence
  Description of Artificial Sequence: Synthetic oligonucleotide
  Antisense strand to SEQ ID NO: 2015826
ugccucauagaucuaaagu

SEQ ID NO: 2015828 - RNA, 19 nt, Artificial Sequence
  Description of Artificial Sequence: Synthetic oligonucleotide
  Sense strand starting at position 3562 of SEQ ID NO: 1881071
cuaagaaaugcagggacuu

SEQ ID NO: 2015829 - RNA, 19 nt, Artificial Sequence
  Description of Artificial Sequence: Synthetic oligonucleotide
  Antisense strand to SEQ ID NO: 2015828
aagucccugcauuucuuag

SEQ ID NO: 2015830 - RNA, 19 nt, Artificial Sequence
  Description of Artificial Sequence: Synthetic oligonucleotide
  Sense strand starting at position 3578 of SEQ ID NO: 1881071
cuugaaagauuauugcaaa

SEQ ID NO: 2015831 - RNA, 19 nt, Artificial Sequence
  Description of Artificial Sequence: Synthetic oligonucleotide
  Antisense strand to SEQ ID NO: 2015830
uuugcaauaaucuuucaag

SEQ ID NO: 2015832 - RNA, 19 nt, Artificial Sequence
  Description of Artificial Sequence: Synthetic oligonucleotide
  Sense strand starting at position 3625 of SEQ ID NO: 1881071
aaaugaaaguguuucgauu

SEQ ID NO: 2015833 - RNA, 19 nt, Artificial Sequence
  Description of Artificial Sequence: Synthetic oligonucleotide
  Antisense strand to SEQ ID NO: 2015832
aaucgaaacacuuucauuu

SEQ ID NO: 2015834 - RNA, 19 nt, Artificial Sequence
  Description of Artificial Sequence: Synthetic oligonucleotide
  Sense strand starting at position 3655 of SEQ ID NO: 1881071
aagggugaguacguaauga

SEQ ID NO: 2015835 - RNA, 19 nt, Artificial Sequence
  Description of Artificial Sequence: Synthetic oligonucleotide
  Antisense strand to SEQ ID NO: 2015834
ucauuacguacucacccuu

SEQ ID NO: 2015836 - RNA, 19 nt, Artificial Sequence
  Description of Artificial Sequence: Synthetic oligonucleotide
  Sense strand starting at position 3671 of SEQ ID NO: 1881071
ugaacagugcucuaucuuu

SEQ ID NO: 2015837 - RNA, 19 nt, Artificial Sequence
  Description of Artificial Sequence: Synthetic oligonucleotide
  Antisense strand to SEQ ID NO: 2015836
aaagauagagcacuguuca

SEQ ID NO: 2015838 - RNA, 19 nt, Artificial Sequence
  Description of Artificial Sequence: Synthetic oligonucleotide
  Sense strand starting at position 3738 of SEQ ID NO: 1881071
acuggaauauaugugacau

SEQ ID NO: 2015839 - RNA, 19 nt, Artificial Sequence
  Description of Artificial Sequence: Synthetic oligonucleotide
  Antisense strand to SEQ ID NO: 2015838
augucacauauauuccagu

SEQ ID NO: 2015840 - RNA, 19 nt, Artificial Sequence
  Description of Artificial Sequence: Synthetic oligonucleotide
  Sense strand starting at position 3769 of SEQ ID NO: 1881071
agguuuguugcuuugcuua

SEQ ID NO: 2015841 - RNA, 19 nt, Artificial Sequence
  Description of Artificial Sequence: Synthetic oligonucleotide
  Antisense strand to SEQ ID NO: 2015840
uaagcaaagcaacaaaccu

SEQ ID NO: 2015842 - RNA, 19 nt, Artificial Sequence
  Description of Artificial Sequence: Synthetic oligonucleotide
  Sense strand starting at position 3782 of SEQ ID NO: 1881071
ugcuuaauagacuacaguu

SEQ ID NO: 2015843 - RNA, 19 nt, Artificial Sequence
  Description of Artificial Sequence: Synthetic oligonucleotide
  Antisense strand to SEQ ID NO: 2015842
aacuguagucuauuaagca

SEQ ID NO: 2015844 - RNA, 19 nt, Artificial Sequence
  Description of Artificial Sequence: Synthetic oligonucleotide
  Sense strand starting at position 3926 of SEQ ID NO: 1881071
ugguaucuuugauuugcau

SEQ ID NO: 2015845 - RNA, 19 nt, Artificial Sequence
  Description of Artificial Sequence: Synthetic oligonucleotide
  Antisense strand to SEQ ID NO: 2015844
augcaaaucaaagauacca

SEQ ID NO: 2015846 - RNA, 19 nt, Artificial Sequence
  Description of Artificial Sequence: Synthetic oligonucleotide
  Sense strand starting at position 3960 of SEQ ID NO: 1881071
ucaggcagagagugaaaua

SEQ ID NO: 2015847 - RNA, 19 nt, Artificial Sequence
  Description of Artificial Sequence: Synthetic oligonucleotide
  Antisense strand to SEQ ID NO: 2015846
uauuucacucucugccuga

SEQ ID NO: 2015848 - RNA, 19 nt, Artificial Sequence
  Description of Artificial Sequence: Synthetic oligonucleotide
  Sense strand starting at position 62 of SEQ ID NO: 1881072
ggguuucccagaggaagca

SEQ ID NO: 2015849 - RNA, 19 nt, Artificial Sequence
  Description of Artificial Sequence: Synthetic oligonucleotide
  Antisense strand to SEQ ID NO: 2015848
ugcuuccucugggaaaccc

SEQ ID NO: 2015850 - RNA, 19 nt, Artificial Sequence
  Description of Artificial Sequence: Synthetic oligonucleotide
  Sense strand starting at position 95 of SEQ ID NO: 1881072
cuuaacagaugagaagaua

SEQ ID NO: 2015851 - RNA, 19 nt, Artificial Sequence
  Description of Artificial Sequence: Synthetic oligonucleotide
  Antisense strand to SEQ ID NO: 2015850
uaucuucucaucuguuaag

SEQ ID NO: 2015852 - RNA, 19 nt, Artificial Sequence
  Description of Artificial Sequence: Synthetic oligonucleotide
  Sense strand starting at position 752 of SEQ ID NO: 1881072
ggagaugucagccgccauu

SEQ ID NO: 2015853 - RNA, 19 nt, Artificial Sequence
  Description of Artificial Sequence: Synthetic oligonucleotide
  Antisense strand to SEQ ID NO: 2015852
aauggcggcugacaucucc

SEQ ID NO: 2015854 - RNA, 19 nt, Artificial Sequence
  Description of Artificial Sequence: Synthetic oligonucleotide
  Sense strand starting at position 800 of SEQ ID NO: 1881072
gguugauugcucugcuuug

SEQ ID NO: 2015855 - RNA, 19 nt, Artificial Sequence
  Description of Artificial Sequence: Synthetic oligonucleotide
  Antisense strand to SEQ ID NO: 2015854
caaagcagagcaaucaacc

SEQ ID NO: 2015856 - RNA, 19 nt, Artificial Sequence
  Description of Artificial Sequence: Synthetic oligonucleotide
  Sense strand starting at position 801 of SEQ ID NO: 1881072
guugauugcucugcuuugu

SEQ ID NO: 2015857 - RNA, 19 nt, Artificial Sequence
  Description of Artificial Sequence: Synthetic oligonucleotide
  Antisense strand to SEQ ID NO: 2015856
acaaagcagagcaaucaac

SEQ ID NO: 2015858 - RNA, 19 nt, Artificial Sequence
  Description of Artificial Sequence: Synthetic oligonucleotide
  Sense strand starting at position 805 of SEQ ID NO: 1881072
auugcucugcuuugugaac

SEQ ID NO: 2015859 - RNA, 19 nt, Artificial Sequence
  Description of Artificial Sequence: Synthetic oligonucleotide
  Antisense strand to SEQ ID NO: 2015858
guucacaaagcagagcaau

SEQ ID NO: 2015860 - RNA, 19 nt, Artificial Sequence
  Description of Artificial Sequence: Synthetic oligonucleotide
  Sense strand starting at position 806 of SEQ ID NO: 1881072
uugcucugcuuugugaaca

SEQ ID NO: 2015861 - RNA, 19 nt, Artificial Sequence
  Description of Artificial Sequence: Synthetic oligonucleotide
  Antisense strand to SEQ ID NO: 2015860
uguucacaaagcagagcaa

SEQ ID NO: 2015862 - RNA, 19 nt, Artificial Sequence
  Description of Artificial Sequence: Synthetic oligonucleotide
  Sense strand starting at position 1280 of SEQ ID NO: 1881072
cccucaaggccuugaacua

SEQ ID NO: 2015863 - RNA, 19 nt, Artificial Sequence
  Description of Artificial Sequence: Synthetic oligonucleotide
  Antisense strand to SEQ ID NO: 2015862
uaguucaaggccuugaggg

SEQ ID NO: 2015864 - RNA, 19 nt, Artificial Sequence
  Description of Artificial Sequence: Synthetic oligonucleotide
  Sense strand starting at position 1354 of SEQ ID NO: 1881072
gcaagugacucacuucuua

SEQ ID NO: 2015865 - RNA, 19 nt, Artificial Sequence
  Description of Artificial Sequence: Synthetic oligonucleotide
  Antisense strand to SEQ ID NO: 2015864
uaagaagugagucacuugc

SEQ ID NO: 2015866 - RNA, 19 nt, Artificial Sequence
  Description of Artificial Sequence: Synthetic oligonucleotide
  Sense strand starting at position 1370 of SEQ ID NO: 1881072
uuagucuucucucuuggaa

SEQ ID NO: 2015867 - RNA, 19 nt, Artificial Sequence
  Description of Artificial Sequence: Synthetic oligonucleotide
  Antisense strand to SEQ ID NO: 2015866
uuccaagagagaagacuaa

SEQ ID NO: 2015868 - RNA, 19 nt, Artificial Sequence
  Description of Artificial Sequence: Synthetic oligonucleotide
  Sense strand starting at position 1486 of SEQ ID NO: 1881072
cugucauugcagcguggau

SEQ ID NO: 2015869 - RNA, 19 nt, Artificial Sequence
  Description of Artificial Sequence: Synthetic oligonucleotide
  Antisense strand to SEQ ID NO: 2015868
auccacgcugcaaugacag

SEQ ID NO: 2015870 - RNA, 19 nt, Artificial Sequence
  Description of Artificial Sequence: Synthetic oligonucleotide
  Sense strand starting at position 1502 of SEQ ID NO: 1881072
gaucguaaugcacguaaug

SEQ ID NO: 2015871 - RNA, 19 nt, Artificial Sequence
  Description of Artificial Sequence: Synthetic oligonucleotide
  Antisense strand to SEQ ID NO: 2015870
cauuacgugcauuacgauc

SEQ ID NO: 2015872 - RNA, 19 nt, Artificial Sequence
  Description of Artificial Sequence: Synthetic oligonucleotide
  Sense strand starting at position 1504 of SEQ ID NO: 1881072
ucguaaugcacguaaugca

SEQ ID NO: 2015873 - RNA, 19 nt, Artificial Sequence
  Description of Artificial Sequence: Synthetic oligonucleotide
  Antisense strand to SEQ ID NO: 2015872
ugcauuacgugcauuacga

SEQ ID NO: 2015874 - RNA, 19 nt, Artificial Sequence
  Description of Artificial Sequence: Synthetic oligonucleotide
  Sense strand starting at position 1512 of SEQ ID NO: 1881072
cacguaaugcagugugaca

SEQ ID NO: 2015875 - RNA, 19 nt, Artificial Sequence
  Description of Artificial Sequence: Synthetic oligonucleotide
  Antisense strand to SEQ ID NO: 2015874
ugucacacugcauuacgug

SEQ ID NO: 2015876 - RNA, 19 nt, Artificial Sequence
  Description of Artificial Sequence: Synthetic oligonucleotide
  Sense strand starting at position 2118 of SEQ ID NO: 1881072
gucugaggcuguuagguaa

SEQ ID NO: 2015877 - RNA, 19 nt, Artificial Sequence
  Description of Artificial Sequence: Synthetic oligonucleotide
  Antisense strand to SEQ ID NO: 2015876
uuaccuaacagccucagac

SEQ ID NO: 2015878 - RNA, 19 nt, Artificial Sequence
  Description of Artificial Sequence: Synthetic oligonucleotide
  Sense strand starting at position 2133 of SEQ ID NO: 1881072
guaacaggucuuggccaga

SEQ ID NO: 2015879 - RNA, 19 nt, Artificial Sequence
  Description of Artificial Sequence: Synthetic oligonucleotide
  Antisense strand to SEQ ID NO: 2015878
ucuggccaagaccuguuac

SEQ ID NO: 2015880 - RNA, 19 nt, Artificial Sequence
  Description of Artificial Sequence: Synthetic oligonucleotide
  Sense strand starting at position 2136 of SEQ ID NO: 1881072
acaggucuuggccagacau

SEQ ID NO: 2015881 - RNA, 19 nt, Artificial Sequence
  Description of Artificial Sequence: Synthetic oligonucleotide
  Antisense strand to SEQ ID NO: 2015880
augucuggccaagaccugu

SEQ ID NO: 2015882 - RNA, 19 nt, Artificial Sequence
  Description of Artificial Sequence: Synthetic oligonucleotide
  Sense strand starting at position 2148 of SEQ ID NO: 1881072
cagacauucugguuccgca

SEQ ID NO: 2015883 - RNA, 19 nt, Artificial Sequence
  Description of Artificial Sequence: Synthetic oligonucleotide
  Antisense strand to SEQ ID NO: 2015882
ugcggaaccagaaugucug

SEQ ID NO: 2015884 - RNA, 19 nt, Artificial Sequence
  Description of Artificial Sequence: Synthetic oligonucleotide
  Sense strand starting at position 2204 of SEQ ID NO: 1881072
agggcaagcugucuaaaca

SEQ ID NO: 2015885 - RNA, 19 nt, Artificial Sequence
  Description of Artificial Sequence: Synthetic oligonucleotide
  Antisense strand to SEQ ID NO: 2015884
uguuuagacagcuugcccu

SEQ ID NO: 2015886 - RNA, 19 nt, Artificial Sequence
  Description of Artificial Sequence: Synthetic oligonucleotide
  Sense strand starting at position 2328 of SEQ ID NO: 1881072
gcaucaaacucagggaaga

SEQ ID NO: 2015887 - RNA, 19 nt, Artificial Sequence
  Description of Artificial Sequence: Synthetic oligonucleotide
  Antisense strand to SEQ ID NO: 2015886
ucuucccugaguuugaugc

SEQ ID NO: 2015888 - RNA, 19 nt, Artificial Sequence
  Description of Artificial Sequence: Synthetic oligonucleotide
  Sense strand starting at position 2886 of SEQ ID NO: 1881072
agucuugcucuuuguuauu

SEQ ID NO: 2015889 - RNA, 19 nt, Artificial Sequence
  Description of Artificial Sequence: Synthetic oligonucleotide
  Antisense strand to SEQ ID NO: 2015888
aauaacaaagagcaagacu

SEQ ID NO: 2015890 - RNA, 19 nt, Artificial Sequence
  Description of Artificial Sequence: Synthetic oligonucleotide
  Sense strand starting at position 2906 of SEQ ID NO: 1881072
ugaugucuuuccuccaguu

SEQ ID NO: 2015891 - RNA, 19 nt, Artificial Sequence
  Description of Artificial Sequence: Synthetic oligonucleotide
  Antisense strand to SEQ ID NO: 2015890
aacuggaggaaagacauca

SEQ ID NO: 2015892 - RNA, 19 nt, Artificial Sequence
  Description of Artificial Sequence: Synthetic oligonucleotide
  Sense strand starting at position 3076 of SEQ ID NO: 1881072
accuuaagccucuggaaau

SEQ ID NO: 2015893 - RNA, 19 nt, Artificial Sequence
  Description of Artificial Sequence: Synthetic oligonucleotide
  Antisense strand to SEQ ID NO: 2015892
auuuccagaggcuuaaggu

SEQ ID NO: 2015894 - RNA, 19 nt, Artificial Sequence
  Description of Artificial Sequence: Synthetic oligonucleotide
  Sense strand starting at position 3077 of SEQ ID NO: 1881072
ccuuaagccucuggaaauc

SEQ ID NO: 2015895 - RNA, 19 nt, Artificial Sequence
  Description of Artificial Sequence: Synthetic oligonucleotide
  Antisense strand to SEQ ID NO: 2015894
gauuuccagaggcuuaagg

SEQ ID NO: 2015896 - RNA, 19 nt, Artificial Sequence
  Description of Artificial Sequence: Synthetic oligonucleotide
  Sense strand starting at position 3088 of SEQ ID NO: 1881072
uggaaaucagccugguagu

SEQ ID NO: 2015897 - RNA, 19 nt, Artificial Sequence
  Description of Artificial Sequence: Synthetic oligonucleotide
  Antisense strand to SEQ ID NO: 2015896
acuaccaggcugauuucca

SEQ ID NO: 2015898 - RNA, 19 nt, Artificial Sequence
  Description of Artificial Sequence: Synthetic oligonucleotide
  Sense strand starting at position 3089 of SEQ ID NO: 1881072
ggaaaucagccugguagug

SEQ ID NO: 2015899 - RNA, 19 nt, Artificial Sequence
  Description of Artificial Sequence: Synthetic oligonucleotide
  Antisense strand to SEQ ID NO: 2015898
cacuaccaggcugauuucc

SEQ ID NO: 2015900 - RNA, 19 nt, Artificial Sequence
  Description of Artificial Sequence: Synthetic oligonucleotide
  Sense strand starting at position 3143 of SEQ ID NO: 1881072
gggaauuccugucaccucu

SEQ ID NO: 2015901 - RNA, 19 nt, Artificial Sequence
  Description of Artificial Sequence: Synthetic oligonucleotide
  Antisense strand to SEQ ID NO: 2015900
agaggugacaggaauuccc

SEQ ID NO: 2015902 - RNA, 19 nt, Artificial Sequence
  Description of Artificial Sequence: Synthetic oligonucleotide
  Sense strand starting at position 3235 of SEQ ID NO: 1881072
agaggucaguugguucauu

SEQ ID NO: 2015903 - RNA, 19 nt, Artificial Sequence
  Description of Artificial Sequence: Synthetic oligonucleotide
  Antisense strand to SEQ ID NO: 2015902
aaugaaccaacugaccucu

SEQ ID NO: 2015904 - RNA, 19 nt, Artificial Sequence
  Description of Artificial Sequence: Synthetic oligonucleotide
  Sense strand starting at position 3263 of SEQ ID NO: 1881072
uuuauuuaagcacgugcaa

SEQ ID NO: 2015905 - RNA, 19 nt, Artificial Sequence
  Description of Artificial Sequence: Synthetic oligonucleotide
  Antisense strand to SEQ ID NO: 2015904
uugcacgugcuuaaauaaa

SEQ ID NO: 2015906 - RNA, 19 nt, Artificial Sequence
  Description of Artificial Sequence: Synthetic oligonucleotide
  Sense strand starting at position 3310 of SEQ ID NO: 1881072
gguccauagcaggagugaa

SEQ ID NO: 2015907 - RNA, 19 nt, Artificial Sequence
  Description of Artificial Sequence: Synthetic oligonucleotide
  Antisense strand to SEQ ID NO: 2015906
uucacuccugcuauggacc

SEQ ID NO: 2015908 - RNA, 19 nt, Artificial Sequence
  Description of Artificial Sequence: Synthetic oligonucleotide
  Sense strand starting at position 3334 of SEQ ID NO: 1881072
ugugcagacugucccuaaa

SEQ ID NO: 2015909 - RNA, 19 nt, Artificial Sequence
  Description of Artificial Sequence: Synthetic oligonucleotide
  Antisense strand to SEQ ID NO: 2015908
uuuagggacagucugcaca

SEQ ID NO: 2015910 - RNA, 19 nt, Artificial Sequence
  Description of Artificial Sequence: Synthetic oligonucleotide
  Sense strand starting at position 3336 of SEQ ID NO: 1881072
ugcagacugucccuaaauc

SEQ ID NO: 2015911 - RNA, 19 nt, Artificial Sequence
  Description of Artificial Sequence: Synthetic oligonucleotide
  Antisense strand to SEQ ID NO: 2015910
gauuuagggacagucugca

SEQ ID NO: 2015912 - RNA, 19 nt, Artificial Sequence
  Description of Artificial Sequence: Synthetic oligonucleotide
  Sense strand starting at position 3410 of SEQ ID NO: 1881072
agaucauccgggugggacu

SEQ ID NO: 2015913 - RNA, 19 nt, Artificial Sequence
  Description of Artificial Sequence: Synthetic oligonucleotide
  Antisense strand to SEQ ID NO: 2015912
agucccacccggaugaucu

SEQ ID NO: 2015914 - RNA, 19 nt, Artificial Sequence
  Description of Artificial Sequence: Synthetic oligonucleotide
  Sense strand starting at position 3754 of SEQ ID NO: 1881072
cagccugaugucugagugu

SEQ ID NO: 2015915 - RNA, 19 nt, Artificial Sequence
  Description of Artificial Sequence: Synthetic oligonucleotide
  Antisense strand to SEQ ID NO: 2015914
acacucagacaucaggcug

SEQ ID NO: 2015916 - RNA, 19 nt, Artificial Sequence
  Description of Artificial Sequence: Synthetic oligonucleotide
  Sense strand starting at position 3911 of SEQ ID NO: 1881072
ugggauuacagacgcauga

SEQ ID NO: 2015917 - RNA, 19 nt, Artificial Sequence
  Description of Artificial Sequence: Synthetic oligonucleotide
  Antisense strand to SEQ ID NO: 2015916
ucaugcgucuguaauccca

SEQ ID NO: 2015918 - RNA, 19 nt, Artificial Sequence
  Description of Artificial Sequence: Synthetic oligonucleotide
  Sense strand starting at position 24 of SEQ ID NO: 1881073
accuaucagugagccaaau

SEQ ID NO: 2015919 - RNA, 19 nt, Artificial Sequence
  Description of Artificial Sequence: Synthetic oligonucleotide
  Antisense strand to SEQ ID NO: 2015918
auuuggcucacugauaggu

SEQ ID NO: 2015920 - RNA, 19 nt, Artificial Sequence
  Description of Artificial Sequence: Synthetic oligonucleotide
  Sense strand starting at position 178 of SEQ ID NO: 1881073
cauccuggccaucgagaaa

SEQ ID NO: 2015921 - RNA, 19 nt, Artificial Sequence
  Description of Artificial Sequence: Synthetic oligonucleotide
  Antisense strand to SEQ ID NO: 2015920
uuucucgauggccaggaug

SEQ ID NO: 2015922 - RNA, 19 nt, Artificial Sequence
  Description of Artificial Sequence: Synthetic oligonucleotide
  Sense strand starting at position 409 of SEQ ID NO: 1881073
uguuacguuauagauguua

SEQ ID NO: 2015923 - RNA, 19 nt, Artificial Sequence
  Description of Artificial Sequence: Synthetic oligonucleotide
  Antisense strand to SEQ ID NO: 2015922
uaacaucuauaacguaaca

SEQ ID NO: 2015924 - RNA, 19 nt, Artificial Sequence
  Description of Artificial Sequence: Synthetic oligonucleotide
  Sense strand starting at position 525 of SEQ ID NO: 1881073
auuguugaguugguauaag

SEQ ID NO: 2015925 - RNA, 19 nt, Artificial Sequence
  Description of Artificial Sequence: Synthetic oligonucleotide
  Antisense strand to SEQ ID NO: 2015924
cuuauaccaacucaacaau

SEQ ID NO: 2015926 - RNA, 19 nt, Artificial Sequence
  Description of Artificial Sequence: Synthetic oligonucleotide
  Sense strand starting at position 570 of SEQ ID NO: 1881073
guaacagcuuccucaugga

SEQ ID NO: 2015927 - RNA, 19 nt, Artificial Sequence
  Description of Artificial Sequence: Synthetic oligonucleotide
  Antisense strand to SEQ ID NO: 2015926
uccaugaggaagcuguuac

SEQ ID NO: 2015928 - RNA, 19 nt, Artificial Sequence
  Description of Artificial Sequence: Synthetic oligonucleotide
  Sense strand starting at position 637 of SEQ ID NO: 1881073
guacccugacuuuaacuga

SEQ ID NO: 2015929 - RNA, 19 nt, Artificial Sequence
  Description of Artificial Sequence: Synthetic oligonucleotide
  Antisense strand to SEQ ID NO: 2015928
ucaguuaaagucaggguac

SEQ ID NO: 2015930 - RNA, 19 nt, Artificial Sequence
  Description of Artificial Sequence: Synthetic oligonucleotide
  Sense strand starting at position 688 of SEQ ID NO: 1881073
uccagacuugacuguauaa

SEQ ID NO: 2015931 - RNA, 19 nt, Artificial Sequence
  Description of Artificial Sequence: Synthetic oligonucleotide
  Antisense strand to SEQ ID NO: 2015930
uuauacagucaagucugga

SEQ ID NO: 2015932 - RNA, 19 nt, Artificial Sequence
  Description of Artificial Sequence: Synthetic oligonucleotide
  Sense strand starting at position 734 of SEQ ID NO: 1881073
ccguguguacugccuguua

SEQ ID NO: 2015933 - RNA, 19 nt, Artificial Sequence
  Description of Artificial Sequence: Synthetic oligonucleotide
  Antisense strand to SEQ ID NO: 2015932
uaacaggcaguacacacgg

SEQ ID NO: 2015934 - RNA, 19 nt, Artificial Sequence
  Description of Artificial Sequence: Synthetic oligonucleotide
  Sense strand starting at position 785 of SEQ ID NO: 1881073
uugaaugaccuuugaauuc

SEQ ID NO: 2015935 - RNA, 19 nt, Artificial Sequence
  Description of Artificial Sequence: Synthetic oligonucleotide
  Antisense strand to SEQ ID NO: 2015934
gaauucaaaggucauucaa

SEQ ID NO: 2015936 - RNA, 19 nt, Artificial Sequence
  Description of Artificial Sequence: Synthetic oligonucleotide
  Sense strand starting at position 1776 of SEQ ID NO: 1881073
guuguauaucgggaacuga

SEQ ID NO: 2015937 - RNA, 19 nt, Artificial Sequence
  Description of Artificial Sequence: Synthetic oligonucleotide
  Antisense strand to SEQ ID NO: 2015936
ucaguucccgauauacaac

SEQ ID NO: 2015938 - RNA, 19 nt, Artificial Sequence
  Description of Artificial Sequence: Synthetic oligonucleotide
  Sense strand starting at position 2213 of SEQ ID NO: 1881073
ucacaacguggguaacauu

SEQ ID NO: 2015939 - RNA, 19 nt, Artificial Sequence
  Description of Artificial Sequence: Synthetic oligonucleotide
  Antisense strand to SEQ ID NO: 2015938
aauguuacccacguuguga

SEQ ID NO: 2015940 - RNA, 19 nt, Artificial Sequence
  Description of Artificial Sequence: Synthetic oligonucleotide
  Sense strand starting at position 2222 of SEQ ID NO: 1881073
ggguaacauucgguaauaa

SEQ ID NO: 2015941 - RNA, 19 nt, Artificial Sequence
  Description of Artificial Sequence: Synthetic oligonucleotide
  Antisense strand to SEQ ID NO: 2015940
uuauuaccgaauguuaccc

SEQ ID NO: 2015942 - RNA, 19 nt, Artificial Sequence
  Description of Artificial Sequence: Synthetic oligonucleotide
  Sense strand starting at position 2223 of SEQ ID NO: 1881073
gguaacauucgguaauaaa

SEQ ID NO: 2015943 - RNA, 19 nt, Artificial Sequence
  Description of Artificial Sequence: Synthetic oligonucleotide
  Antisense strand to SEQ ID NO: 2015942
uuuauuaccgaauguuacc

SEQ ID NO: 2015944 - RNA, 19 nt, Artificial Sequence
  Description of Artificial Sequence: Synthetic oligonucleotide
  Sense strand starting at position 2255 of SEQ ID NO: 1881073
ggauguauuaaacgaauug

SEQ ID NO: 2015945 - RNA, 19 nt, Artificial Sequence
  Description of Artificial Sequence: Synthetic oligonucleotide
  Antisense strand to SEQ ID NO: 2015944
caauucguuuaauacaucc

SEQ ID NO: 2015946 - RNA, 19 nt, Artificial Sequence
  Description of Artificial Sequence: Synthetic oligonucleotide
  Sense strand starting at position 2357 of SEQ ID NO: 1881073
agugugguucgugugacau

SEQ ID NO: 2015947 - RNA, 19 nt, Artificial Sequence
  Description of Artificial Sequence: Synthetic oligonucleotide
  Antisense strand to SEQ ID NO: 2015946
augucacacgaaccacacu

SEQ ID NO: 2015948 - RNA, 19 nt, Artificial Sequence
  Description of Artificial Sequence: Synthetic oligonucleotide
  Sense strand starting at position 2367 of SEQ ID NO: 1881073
gugugacaugcuuacagag

SEQ ID NO: 2015949 - RNA, 19 nt, Artificial Sequence
  Description of Artificial Sequence: Synthetic oligonucleotide
  Antisense strand to SEQ ID NO: 2015948
cucuguaagcaugucacac

SEQ ID NO: 2015950 - RNA, 19 nt, Artificial Sequence
  Description of Artificial Sequence: Synthetic oligonucleotide
  Sense strand starting at position 2417 of SEQ ID NO: 1881073
gacgaaauuucuguccgcu

SEQ ID NO: 2015951 - RNA, 19 nt, Artificial Sequence
  Description of Artificial Sequence: Synthetic oligonucleotide
  Antisense strand to SEQ ID NO: 2015950
agcggacagaaauuucguc

SEQ ID NO: 2015952 - RNA, 19 nt, Artificial Sequence
  Description of Artificial Sequence: Synthetic oligonucleotide
  Sense strand starting at position 2419 of SEQ ID NO: 1881073
cgaaauuucuguccgcucu

SEQ ID NO: 2015953 - RNA, 19 nt, Artificial Sequence
  Description of Artificial Sequence: Synthetic oligonucleotide
  Antisense strand to SEQ ID NO: 2015952
agagcggacagaaauuucg

SEQ ID NO: 2015954 - RNA, 19 nt, Artificial Sequence
  Description of Artificial Sequence: Synthetic oligonucleotide
  Sense strand starting at position 2444 of SEQ ID NO: 1881073
agacuaauuacagagucgu

SEQ ID NO: 2015955 - RNA, 19 nt, Artificial Sequence
  Description of Artificial Sequence: Synthetic oligonucleotide
  Antisense strand to SEQ ID NO: 2015954
acgacucuguaauuagucu

SEQ ID NO: 2015956 - RNA, 19 nt, Artificial Sequence
  Description of Artificial Sequence: Synthetic oligonucleotide
  Sense strand starting at position 2479 of SEQ ID NO: 1881073
ucauuccucccggaagcuu

SEQ ID NO: 2015957 - RNA, 19 nt, Artificial Sequence
  Description of Artificial Sequence: Synthetic oligonucleotide
  Antisense strand to SEQ ID NO: 2015956
aagcuuccgggaggaauga

SEQ ID NO: 2015958 - RNA, 19 nt, Artificial Sequence
  Description of Artificial Sequence: Synthetic oligonucleotide
  Sense strand starting at position 2635 of SEQ ID NO: 1881073
guuccuucucaagaucaug

SEQ ID NO: 2015959 - RNA, 19 nt, Artificial Sequence
  Description of Artificial Sequence: Synthetic oligonucleotide
  Antisense strand to SEQ ID NO: 2015958
caugaucuugagaaggaac

SEQ ID NO: 2015960 - RNA, 19 nt, Artificial Sequence
  Description of Artificial Sequence: Synthetic oligonucleotide
  Sense strand starting at position 2748 of SEQ ID NO: 1881073
aaauguuaccacgauaguu

SEQ ID NO: 2015961 - RNA, 19 nt, Artificial Sequence
  Description of Artificial Sequence: Synthetic oligonucleotide
  Antisense strand to SEQ ID NO: 2015960
aacuaucgugguaacauuu

SEQ ID NO: 2015962 - RNA, 19 nt, Artificial Sequence
  Description of Artificial Sequence: Synthetic oligonucleotide
  Sense strand starting at position 3026 of SEQ ID NO: 1881073
gcuuaccauaugugggaaa

SEQ ID NO: 2015963 - RNA, 19 nt, Artificial Sequence
  Description of Artificial Sequence: Synthetic oligonucleotide
  Antisense strand to SEQ ID NO: 2015962
uuucccacauaugguaagc

SEQ ID NO: 2015964 - RNA, 19 nt, Artificial Sequence
  Description of Artificial Sequence: Synthetic oligonucleotide
  Sense strand starting at position 3138 of SEQ ID NO: 1881073
cgcuuaauuucuucuggga

SEQ ID NO: 2015965 - RNA, 19 nt, Artificial Sequence
  Description of Artificial Sequence: Synthetic oligonucleotide
  Antisense strand to SEQ ID NO: 2015964
ucccagaagaaauuaagcg

SEQ ID NO: 2015966 - RNA, 19 nt, Artificial Sequence
  Description of Artificial Sequence: Synthetic oligonucleotide
  Sense strand starting at position 3200 of SEQ ID NO: 1881073
acucuucuagaauguaguu

SEQ ID NO: 2015967 - RNA, 19 nt, Artificial Sequence
  Description of Artificial Sequence: Synthetic oligonucleotide
  Antisense strand to SEQ ID NO: 2015966
aacuacauucuagaagagu

SEQ ID NO: 2015968 - RNA, 19 nt, Artificial Sequence
  Description of Artificial Sequence: Synthetic oligonucleotide
  Sense strand starting at position 3205 of SEQ ID NO: 1881073
ucuagaauguaguuagaaa

SEQ ID NO: 2015969 - RNA, 19 nt, Artificial Sequence
  Description of Artificial Sequence: Synthetic oligonucleotide
  Antisense strand to SEQ ID NO: 2015968
uuucuaacuacauucuaga

SEQ ID NO: 2015970 - RNA, 19 nt, Artificial Sequence
  Description of Artificial Sequence: Synthetic oligonucleotide
  Sense strand starting at position 3218 of SEQ ID NO: 1881073
uagaaagggaggugucauu

SEQ ID NO: 2015971 - RNA, 19 nt, Artificial Sequence
  Description of Artificial Sequence: Synthetic oligonucleotide
  Antisense strand to SEQ ID NO: 2015970
aaugacaccucccuuucua

SEQ ID NO: 2015972 - RNA, 19 nt, Artificial Sequence
  Description of Artificial Sequence: Synthetic oligonucleotide
  Sense strand starting at position 3264 of SEQ ID NO: 1881073
acacuuggucgagaggcau

SEQ ID NO: 2015973 - RNA, 19 nt, Artificial Sequence
  Description of Artificial Sequence: Synthetic oligonucleotide
  Antisense strand to SEQ ID NO: 2015972
augccucucgaccaagugu

SEQ ID NO: 2015974 - RNA, 19 nt, Artificial Sequence
  Description of Artificial Sequence: Synthetic oligonucleotide
  Sense strand starting at position 3324 of SEQ ID NO: 1881073
uccuccuggccuuaguaau

SEQ ID NO: 2015975 - RNA, 19 nt, Artificial Sequence
  Description of Artificial Sequence: Synthetic oligonucleotide
  Antisense strand to SEQ ID NO: 2015974
auuacuaaggccaggagga

SEQ ID NO: 2015976 - RNA, 19 nt, Artificial Sequence
  Description of Artificial Sequence: Synthetic oligonucleotide
  Sense strand starting at position 3345 of SEQ ID NO: 1881073
gguuaaagagauugcauau

SEQ ID NO: 2015977 - RNA, 19 nt, Artificial Sequence
  Description of Artificial Sequence: Synthetic oligonucleotide
  Antisense strand to SEQ ID NO: 2015976
auaugcaaucucuuuaacc

SEQ ID NO: 2015978 - RNA, 19 nt, Artificial Sequence
  Description of Artificial Sequence: Synthetic oligonucleotide
  Sense strand starting at position 3531 of SEQ ID NO: 1881073
cauuaagugguagauucua

SEQ ID NO: 2015979 - RNA, 19 nt, Artificial Sequence
  Description of Artificial Sequence: Synthetic oligonucleotide
  Antisense strand to SEQ ID NO: 2015978
uagaaucuaccacuuaaug

SEQ ID NO: 2015980 - RNA, 19 nt, Artificial Sequence
  Description of Artificial Sequence: Synthetic oligonucleotide
  Sense strand starting at position 3629 of SEQ ID NO: 1881073
ccugaaacuugauuguuua

SEQ ID NO: 2015981 - RNA, 19 nt, Artificial Sequence
  Description of Artificial Sequence: Synthetic oligonucleotide
  Antisense strand to SEQ ID NO: 2015980
uaaacaaucaaguuucagg

SEQ ID NO: 2015982 - RNA, 19 nt, Artificial Sequence
  Description of Artificial Sequence: Synthetic oligonucleotide
  Sense strand starting at position 3630 of SEQ ID NO: 1881073
cugaaacuugauuguuuac

SEQ ID NO: 2015983 - RNA, 19 nt, Artificial Sequence
  Description of Artificial Sequence: Synthetic oligonucleotide
  Antisense strand to SEQ ID NO: 2015982
guaaacaaucaaguuucag

SEQ ID NO: 2015984 - RNA, 19 nt, Artificial Sequence
  Description of Artificial Sequence: Synthetic oligonucleotide
  Sense strand starting at position 3704 of SEQ ID NO: 1881073
uuagaaugcuguuuagaau

SEQ ID NO: 2015985 - RNA, 19 nt, Artificial Sequence
  Description of Artificial Sequence: Synthetic oligonucleotide
  Antisense strand to SEQ ID NO: 2015984
auucuaaacagcauucuaa

SEQ ID NO: 2015986 - RNA, 19 nt, Artificial Sequence
  Description of Artificial Sequence: Synthetic oligonucleotide
  Sense strand starting at position 3705 of SEQ ID NO: 1881073
uagaaugcuguuuagaaua

SEQ ID NO: 2015987 - RNA, 19 nt, Artificial Sequence
  Description of Artificial Sequence: Synthetic oligonucleotide
  Antisense strand to SEQ ID NO: 2015986
uauucuaaacagcauucua

SEQ ID NO: 2015988 - RNA, 19 nt, Artificial Sequence
  Description of Artificial Sequence: Synthetic oligonucleotide
  Sense strand starting at position 3852 of SEQ ID NO: 1881073
guucgaguaaaucaaugua

SEQ ID NO: 2015989 - RNA, 19 nt, Artificial Sequence
  Description of Artificial Sequence: Synthetic oligonucleotide
  Antisense strand to SEQ ID NO: 2015988
uacauugauuuacucgaac

SEQ ID NO: 2015990 - RNA, 19 nt, Artificial Sequence
  Description of Artificial Sequence: Synthetic oligonucleotide
  Sense strand starting at position 3902 of SEQ ID NO: 1881073
auuauaagacuguggugaa

SEQ ID NO: 2015991 - RNA, 19 nt, Artificial Sequence
  Description of Artificial Sequence: Synthetic oligonucleotide
  Antisense strand to SEQ ID NO: 2015990
uucaccacagucuuauaau

SEQ ID NO: 2015992 - RNA, 19 nt, Artificial Sequence
  Description of Artificial Sequence: Synthetic oligonucleotide
  Sense strand starting at position 3912 of SEQ ID NO: 1881073
uguggugaacacugaauau

SEQ ID NO: 2015993 - RNA, 19 nt, Artificial Sequence
  Description of Artificial Sequence: Synthetic oligonucleotide
  Antisense strand to SEQ ID NO: 2015992
auauucaguguucaccaca

SEQ ID NO: 2015994 - RNA, 19 nt, Artificial Sequence
  Description of Artificial Sequence: Synthetic oligonucleotide
  Sense strand starting at position 3923 of SEQ ID NO: 1881073
cugaauauaugugcuaaua

SEQ ID NO: 2015995 - RNA, 19 nt, Artificial Sequence
  Description of Artificial Sequence: Synthetic oligonucleotide
  Antisense strand to SEQ ID NO: 2015994
uauuagcacauauauucag

SEQ ID NO: 2015996 - RNA, 19 nt, Artificial Sequence
  Description of Artificial Sequence: Synthetic oligonucleotide
  Sense strand starting at position 3979 of SEQ ID NO: 1881073
uggaacuucuagucauaau

SEQ ID NO: 2015997 - RNA, 19 nt, Artificial Sequence
  Description of Artificial Sequence: Synthetic oligonucleotide
  Antisense strand to SEQ ID NO: 2015996
auuaugacuagaaguucca

SEQ ID NO: 2015998 - RNA, 19 nt, Artificial Sequence
  Description of Artificial Sequence: Synthetic oligonucleotide
  Sense strand starting at position 230 of SEQ ID NO: 1881074
gaauauaggccaugccaga

SEQ ID NO: 2015999 - RNA, 19 nt, Artificial Sequence
  Description of Artificial Sequence: Synthetic oligonucleotide
  Antisense strand to SEQ ID NO: 2015998
ucuggcauggccuauauuc

SEQ ID NO: 2016000 - RNA, 19 nt, Artificial Sequence
  Description of Artificial Sequence: Synthetic oligonucleotide
  Sense strand starting at position 300 of SEQ ID NO: 1881074
gauggaugcguggaucgau

SEQ ID NO: 2016001 - RNA, 19 nt, Artificial Sequence
  Description of Artificial Sequence: Synthetic oligonucleotide
  Antisense strand to SEQ ID NO: 2016000
aucgauccacgcauccauc

SEQ ID NO: 2016002 - RNA, 19 nt, Artificial Sequence
  Description of Artificial Sequence: Synthetic oligonucleotide
  Sense strand starting at position 308 of SEQ ID NO: 1881074
cguggaucgauggauagau

SEQ ID NO: 2016003 - RNA, 19 nt, Artificial Sequence
  Description of Artificial Sequence: Synthetic oligonucleotide
  Antisense strand to SEQ ID NO: 2016002
aucuauccaucgauccacg

SEQ ID NO: 2016004 - RNA, 19 nt, Artificial Sequence
  Description of Artificial Sequence: Synthetic oligonucleotide
  Sense strand starting at position 512 of SEQ ID NO: 1881074
cauagauuggcugguagua

SEQ ID NO: 2016005 - RNA, 19 nt, Artificial Sequence
  Description of Artificial Sequence: Synthetic oligonucleotide
  Antisense strand to SEQ ID NO: 2016004
uacuaccagccaaucuaug

SEQ ID NO: 2016006 - RNA, 19 nt, Artificial Sequence
  Description of Artificial Sequence: Synthetic oligonucleotide
  Sense strand starting at position 542 of SEQ ID NO: 1881074
aguguuauaagcuaaguag

SEQ ID NO: 2016007 - RNA, 19 nt, Artificial Sequence
  Description of Artificial Sequence: Synthetic oligonucleotide
  Antisense strand to SEQ ID NO: 2016006
cuacuuagcuuauaacacu

SEQ ID NO: 2016008 - RNA, 19 nt, Artificial Sequence
  Description of Artificial Sequence: Synthetic oligonucleotide
  Sense strand starting at position 597 of SEQ ID NO: 1881074
gcugaaauuccacaaagca

SEQ ID NO: 2016009 - RNA, 19 nt, Artificial Sequence
  Description of Artificial Sequence: Synthetic oligonucleotide
  Antisense strand to SEQ ID NO: 2016008
ugcuuuguggaauuucagc

SEQ ID NO: 2016010 - RNA, 19 nt, Artificial Sequence
  Description of Artificial Sequence: Synthetic oligonucleotide
  Sense strand starting at position 705 of SEQ ID NO: 1881074
caguaaucugugucacgcu

SEQ ID NO: 2016011 - RNA, 19 nt, Artificial Sequence
  Description of Artificial Sequence: Synthetic oligonucleotide
  Antisense strand to SEQ ID NO: 2016010
agcgugacacagauuacug

SEQ ID NO: 2016012 - RNA, 19 nt, Artificial Sequence
  Description of Artificial Sequence: Synthetic oligonucleotide
  Sense strand starting at position 796 of SEQ ID NO: 1881074
cugguuuaguuacuaagua

SEQ ID NO: 2016013 - RNA, 19 nt, Artificial Sequence
  Description of Artificial Sequence: Synthetic oligonucleotide
  Antisense strand to SEQ ID NO: 2016012
uacuuaguaacuaaaccag

SEQ ID NO: 2016014 - RNA, 19 nt, Artificial Sequence
  Description of Artificial Sequence: Synthetic oligonucleotide
  Sense strand starting at position 808 of SEQ ID NO: 1881074
cuaaguauuggccaauuau

SEQ ID NO: 2016015 - RNA, 19 nt, Artificial Sequence
  Description of Artificial Sequence: Synthetic oligonucleotide
  Antisense strand to SEQ ID NO: 2016014
auaauuggccaauacuuag

SEQ ID NO: 2016016 - RNA, 19 nt, Artificial Sequence
  Description of Artificial Sequence: Synthetic oligonucleotide
  Sense strand starting at position 838 of SEQ ID NO: 1881074
gggaaucgucaccaggacu

SEQ ID NO: 2016017 - RNA, 19 nt, Artificial Sequence
  Description of Artificial Sequence: Synthetic oligonucleotide
  Antisense strand to SEQ ID NO: 2016016
aguccuggugacgauuccc

SEQ ID NO: 2016018 - RNA, 19 nt, Artificial Sequence
  Description of Artificial Sequence: Synthetic oligonucleotide
  Sense strand starting at position 1097 of SEQ ID NO: 1881074
uuugaagucucaguccaaa

SEQ ID NO: 2016019 - RNA, 19 nt, Artificial Sequence
  Description of Artificial Sequence: Synthetic oligonucleotide
  Antisense strand to SEQ ID NO: 2016018
uuuggacugagacuucaaa

SEQ ID NO: 2016020 - RNA, 19 nt, Artificial Sequence
  Description of Artificial Sequence: Synthetic oligonucleotide
  Sense strand starting at position 1100 of SEQ ID NO: 1881074
gaagucucaguccaaaugu

SEQ ID NO: 2016021 - RNA, 19 nt, Artificial Sequence
  Description of Artificial Sequence: Synthetic oligonucleotide
  Antisense strand to SEQ ID NO: 2016020
acauuuggacugagacuuc

SEQ ID NO: 2016022 - RNA, 19 nt, Artificial Sequence
  Description of Artificial Sequence: Synthetic oligonucleotide
  Sense strand starting at position 1115 of SEQ ID NO: 1881074
augucaccuguguaagguu

SEQ ID NO: 2016023 - RNA, 19 nt, Artificial Sequence
  Description of Artificial Sequence: Synthetic oligonucleotide
  Antisense strand to SEQ ID NO: 2016022
aaccuuacacaggugacau

SEQ ID NO: 2016024 - RNA, 19 nt, Artificial Sequence
  Description of Artificial Sequence: Synthetic oligonucleotide
  Sense strand starting at position 1130 of SEQ ID NO: 1881074
gguuuauccugaccacucu

SEQ ID NO: 2016025 - RNA, 19 nt, Artificial Sequence
  Description of Artificial Sequence: Synthetic oligonucleotide
  Antisense strand to SEQ ID NO: 2016024
agaguggucaggauaaacc

SEQ ID NO: 2016026 - RNA, 19 nt, Artificial Sequence
  Description of Artificial Sequence: Synthetic oligonucleotide
  Sense strand starting at position 1231 of SEQ ID NO: 1881074
guuagauauugacuuguuu

SEQ ID NO: 2016027 - RNA, 19 nt, Artificial Sequence
  Description of Artificial Sequence: Synthetic oligonucleotide
  Antisense strand to SEQ ID NO: 2016026
aaacaagucaauaucuaac

SEQ ID NO: 2016028 - RNA, 19 nt, Artificial Sequence
  Description of Artificial Sequence: Synthetic oligonucleotide
  Sense strand starting at position 1646 of SEQ ID NO: 1881074
ucaguaacucccuguugaa

SEQ ID NO: 2016029 - RNA, 19 nt, Artificial Sequence
  Description of Artificial Sequence: Synthetic oligonucleotide
  Antisense strand to SEQ ID NO: 2016028
uucaacagggaguuacuga

SEQ ID NO: 2016030 - RNA, 19 nt, Artificial Sequence
  Description of Artificial Sequence: Synthetic oligonucleotide
  Sense strand starting at position 1858 of SEQ ID NO: 1881074
uggagacaauccuucuauc

SEQ ID NO: 2016031 - RNA, 19 nt, Artificial Sequence
  Description of Artificial Sequence: Synthetic oligonucleotide
  Antisense strand to SEQ ID NO: 2016030
gauagaaggauugucucca

SEQ ID NO: 2016032 - RNA, 19 nt, Artificial Sequence
  Description of Artificial Sequence: Synthetic oligonucleotide
  Sense strand starting at position 1872 of SEQ ID NO: 1881074
cuaucuuagggcugcaaca

SEQ ID NO: 2016033 - RNA, 19 nt, Artificial Sequence
  Description of Artificial Sequence: Synthetic oligonucleotide
  Antisense strand to SEQ ID NO: 2016032
uguugcagcccuaagauag

SEQ ID NO: 2016034 - RNA, 19 nt, Artificial Sequence
  Description of Artificial Sequence: Synthetic oligonucleotide
  Sense strand starting at position 1947 of SEQ ID NO: 1881074
ccuuaucuucuggguggaa

SEQ ID NO: 2016035 - RNA, 19 nt, Artificial Sequence
  Description of Artificial Sequence: Synthetic oligonucleotide
  Antisense strand to SEQ ID NO: 2016034
uuccacccagaagauaagg

SEQ ID NO: 2016036 - RNA, 19 nt, Artificial Sequence
  Description of Artificial Sequence: Synthetic oligonucleotide
  Sense strand starting at position 1948 of SEQ ID NO: 1881074
cuuaucuucuggguggaau

SEQ ID NO: 2016037 - RNA, 19 nt, Artificial Sequence
  Description of Artificial Sequence: Synthetic oligonucleotide
  Antisense strand to SEQ ID NO: 2016036
auuccacccagaagauaag

SEQ ID NO: 2016038 - RNA, 19 nt, Artificial Sequence
  Description of Artificial Sequence: Synthetic oligonucleotide
  Sense strand starting at position 1949 of SEQ ID NO: 1881074
uuaucuucuggguggaauu

SEQ ID NO: 2016039 - RNA, 19 nt, Artificial Sequence
  Description of Artificial Sequence: Synthetic oligonucleotide
  Antisense strand to SEQ ID NO: 2016038
aauuccacccagaagauaa

SEQ ID NO: 2016040 - RNA, 19 nt, Artificial Sequence
  Description of Artificial Sequence: Synthetic oligonucleotide
  Sense strand starting at position 1976 of SEQ ID NO: 1881074
aacggugucugagcagaaa

SEQ ID NO: 2016041 - RNA, 19 nt, Artificial Sequence
  Description of Artificial Sequence: Synthetic oligonucleotide
  Antisense strand to SEQ ID NO: 2016040
uuucugcucagacaccguu

SEQ ID NO: 2016042 - RNA, 19 nt, Artificial Sequence
  Description of Artificial Sequence: Synthetic oligonucleotide
  Sense strand starting at position 2194 of SEQ ID NO: 1881074
aguuucucugaguaaacag

SEQ ID NO: 2016043 - RNA, 19 nt, Artificial Sequence
  Description of Artificial Sequence: Synthetic oligonucleotide
  Antisense strand to SEQ ID NO: 2016042
cuguuuacucagagaaacu

SEQ ID NO: 2016044 - RNA, 19 nt, Artificial Sequence
  Description of Artificial Sequence: Synthetic oligonucleotide
  Sense strand starting at position 2213 of SEQ ID NO: 1881074
augauaaaucacuggcuag

SEQ ID NO: 2016045 - RNA, 19 nt, Artificial Sequence
  Description of Artificial Sequence: Synthetic oligonucleotide
  Antisense strand to SEQ ID NO: 2016044
cuagccagugauuuaucau

SEQ ID NO: 2016046 - RNA, 19 nt, Artificial Sequence
  Description of Artificial Sequence: Synthetic oligonucleotide
  Sense strand starting at position 2262 of SEQ ID NO: 1881074
ggagaucucaggcagagca

SEQ ID NO: 2016047 - RNA, 19 nt, Artificial Sequence
  Description of Artificial Sequence: Synthetic oligonucleotide
  Antisense strand to SEQ ID NO: 2016046
ugcucugccugagaucucc

SEQ ID NO: 2016048 - RNA, 19 nt, Artificial Sequence
  Description of Artificial Sequence: Synthetic oligonucleotide
  Sense strand starting at position 2501 of SEQ ID NO: 1881074
augggugacugagcuuaua

SEQ ID NO: 2016049 - RNA, 19 nt, Artificial Sequence
  Description of Artificial Sequence: Synthetic oligonucleotide
  Antisense strand to SEQ ID NO: 2016048
uauaagcucagucacccau

SEQ ID NO: 2016050 - RNA, 19 nt, Artificial Sequence
  Description of Artificial Sequence: Synthetic oligonucleotide
  Sense strand starting at position 2545 of SEQ ID NO: 1881074
cagauaggauuuggaggua

SEQ ID NO: 2016051 - RNA, 19 nt, Artificial Sequence
  Description of Artificial Sequence: Synthetic oligonucleotide
  Antisense strand to SEQ ID NO: 2016050
uaccuccaaauccuaucug

SEQ ID NO: 2016052 - RNA, 19 nt, Artificial Sequence
  Description of Artificial Sequence: Synthetic oligonucleotide
  Sense strand starting at position 2698 of SEQ ID NO: 1881074
ggcaucuguccacauggau

SEQ ID NO: 2016053 - RNA, 19 nt, Artificial Sequence
  Description of Artificial Sequence: Synthetic oligonucleotide
  Antisense strand to SEQ ID NO: 2016052
auccauguggacagaugcc

SEQ ID NO: 2016054 - RNA, 19 nt, Artificial Sequence
  Description of Artificial Sequence: Synthetic oligonucleotide
  Sense strand starting at position 2942 of SEQ ID NO: 1881074
agggaaacuugcccaaaug

SEQ ID NO: 2016055 - RNA, 19 nt, Artificial Sequence
  Description of Artificial Sequence: Synthetic oligonucleotide
  Antisense strand to SEQ ID NO: 2016054
cauuugggcaaguuucccu

SEQ ID NO: 2016056 - RNA, 19 nt, Artificial Sequence
  Description of Artificial Sequence: Synthetic oligonucleotide
  Sense strand starting at position 2943 of SEQ ID NO: 1881074
gggaaacuugcccaaaugu

SEQ ID NO: 2016057 - RNA, 19 nt, Artificial Sequence
  Description of Artificial Sequence: Synthetic oligonucleotide
  Antisense strand to SEQ ID NO: 2016056
acauuugggcaaguuuccc

SEQ ID NO: 2016058 - RNA, 19 nt, Artificial Sequence
  Description of Artificial Sequence: Synthetic oligonucleotide
  Sense strand starting at position 3347 of SEQ ID NO: 1881074
gaggaauuagcguggaaag

SEQ ID NO: 2016059 - RNA, 19 nt, Artificial Sequence
  Description of Artificial Sequence: Synthetic oligonucleotide
  Antisense strand to SEQ ID NO: 2016058
cuuuccacgcuaauuccuc

SEQ ID NO: 2016060 - RNA, 19 nt, Artificial Sequence
  Description of Artificial Sequence: Synthetic oligonucleotide
  Sense strand starting at position 3652 of SEQ ID NO: 1881074
agaauuaugggcuggcaaa

SEQ ID NO: 2016061 - RNA, 19 nt, Artificial Sequence
  Description of Artificial Sequence: Synthetic oligonucleotide
  Antisense strand to SEQ ID NO: 2016060
uuugccagcccauaauucu

SEQ ID NO: 2016062 - RNA, 19 nt, Artificial Sequence
  Description of Artificial Sequence: Synthetic oligonucleotide
  Sense strand starting at position 3653 of SEQ ID NO: 1881074
gaauuaugggcuggcaaag

SEQ ID NO: 2016063 - RNA, 19 nt, Artificial Sequence
  Description of Artificial Sequence: Synthetic oligonucleotide
  Antisense strand to SEQ ID NO: 2016062
cuuugccagcccauaauuc

SEQ ID NO: 2016064 - RNA, 19 nt, Artificial Sequence
  Description of Artificial Sequence: Synthetic oligonucleotide
  Sense strand starting at position 3680 of SEQ ID NO: 1881074
gcuaucaggcaucauccaa

SEQ ID NO: 2016065 - RNA, 19 nt, Artificial Sequence
  Description of Artificial Sequence: Synthetic oligonucleotide
  Antisense strand to SEQ ID NO: 2016064
uuggaugaugccugauagc

SEQ ID NO: 2016066 - RNA, 19 nt, Artificial Sequence
  Description of Artificial Sequence: Synthetic oligonucleotide
  Sense strand starting at position 3711 of SEQ ID NO: 1881074
auggccuuccuccaaauga

SEQ ID NO: 2016067 - RNA, 19 nt, Artificial Sequence
  Description of Artificial Sequence: Synthetic oligonucleotide
  Antisense strand to SEQ ID NO: 2016066
ucauuuggaggaaggccau

SEQ ID NO: 2016068 - RNA, 19 nt, Artificial Sequence
  Description of Artificial Sequence: Synthetic oligonucleotide
  Sense strand starting at position 3736 of SEQ ID NO: 1881074
acacaaauaucagauugga

SEQ ID NO: 2016069 - RNA, 19 nt, Artificial Sequence
  Description of Artificial Sequence: Synthetic oligonucleotide
  Antisense strand to SEQ ID NO: 2016068
uccaaucugauauuugugu

SEQ ID NO: 2016070 - RNA, 19 nt, Artificial Sequence
  Description of Artificial Sequence: Synthetic oligonucleotide
  Sense strand starting at position 3789 of SEQ ID NO: 1881074
ugaaauauggcguggaaca

SEQ ID NO: 2016071 - RNA, 19 nt, Artificial Sequence
  Description of Artificial Sequence: Synthetic oligonucleotide
  Antisense strand to SEQ ID NO: 2016070
uguuccacgccauauuuca

SEQ ID NO: 2016072 - RNA, 19 nt, Artificial Sequence
  Description of Artificial Sequence: Synthetic oligonucleotide
  Sense strand starting at position 3790 of SEQ ID NO: 1881074
gaaauauggcguggaacau

SEQ ID NO: 2016073 - RNA, 19 nt, Artificial Sequence
  Description of Artificial Sequence: Synthetic oligonucleotide
  Antisense strand to SEQ ID NO: 2016072
auguuccacgccauauuuc

SEQ ID NO: 2016074 - RNA, 19 nt, Artificial Sequence
  Description of Artificial Sequence: Synthetic oligonucleotide
  Sense strand starting at position 3791 of SEQ ID NO: 1881074
aaauauggcguggaacauu

SEQ ID NO: 2016075 - RNA, 19 nt, Artificial Sequence
  Description of Artificial Sequence: Synthetic oligonucleotide
  Antisense strand to SEQ ID NO: 2016074
aauguuccacgccauauuu

SEQ ID NO: 2016076 - RNA, 19 nt, Artificial Sequence
  Description of Artificial Sequence: Synthetic oligonucleotide
  Sense strand starting at position 3800 of SEQ ID NO: 1881074
guggaacauuuaugauaaa

SEQ ID NO: 2016077 - RNA, 19 nt, Artificial Sequence
  Description of Artificial Sequence: Synthetic oligonucleotide
  Antisense strand to SEQ ID NO: 2016076
uuuaucauaaauguuccac

SEQ ID NO: 2016078 - RNA, 19 nt, Artificial Sequence
  Description of Artificial Sequence: Synthetic oligonucleotide
  Sense strand starting at position 18 of SEQ ID NO: 1881076
ggacgacuccagggauuga

SEQ ID NO: 2016079 - RNA, 19 nt, Artificial Sequence
  Description of Artificial Sequence: Synthetic oligonucleotide
  Antisense strand to SEQ ID NO: 2016078
ucaaucccuggagucgucc

SEQ ID NO: 2016080 - RNA, 19 nt, Artificial Sequence
  Description of Artificial Sequence: Synthetic oligonucleotide
  Sense strand starting at position 137 of SEQ ID NO: 1881076
ucucuauuacccugugauu

SEQ ID NO: 2016081 - RNA, 19 nt, Artificial Sequence
  Description of Artificial Sequence: Synthetic oligonucleotide
  Antisense strand to SEQ ID NO: 2016080
aaucacaggguaauagaga

SEQ ID NO: 2016082 - RNA, 19 nt, Artificial Sequence
  Description of Artificial Sequence: Synthetic oligonucleotide
  Sense strand starting at position 171 of SEQ ID NO: 1881076
ucuaauuauuugcacagga

SEQ ID NO: 2016083 - RNA, 19 nt, Artificial Sequence
  Description of Artificial Sequence: Synthetic oligonucleotide
  Antisense strand to SEQ ID NO: 2016082
uccugugcaaauaauuaga

SEQ ID NO: 2016084 - RNA, 19 nt, Artificial Sequence
  Description of Artificial Sequence: Synthetic oligonucleotide
  Sense strand starting at position 185 of SEQ ID NO: 1881076
caggaauuccuguguuagg

SEQ ID NO: 2016085 - RNA, 19 nt, Artificial Sequence
  Description of Artificial Sequence: Synthetic oligonucleotide
  Antisense strand to SEQ ID NO: 2016084
ccuaacacaggaauuccug

SEQ ID NO: 2016086 - RNA, 19 nt, Artificial Sequence
  Description of Artificial Sequence: Synthetic oligonucleotide
  Sense strand starting at position 252 of SEQ ID NO: 1881076
ggaugacucuuaucuuuaa

SEQ ID NO: 2016087 - RNA, 19 nt, Artificial Sequence
  Description of Artificial Sequence: Synthetic oligonucleotide
  Antisense strand to SEQ ID NO: 2016086
uuaaagauaagagucaucc

SEQ ID NO: 2016088 - RNA, 19 nt, Artificial Sequence
  Description of Artificial Sequence: Synthetic oligonucleotide
  Sense strand starting at position 322 of SEQ ID NO: 1881076
ucacuuugccacugcugaa

SEQ ID NO: 2016089 - RNA, 19 nt, Artificial Sequence
  Description of Artificial Sequence: Synthetic oligonucleotide
  Antisense strand to SEQ ID NO: 2016088
uucagcaguggcaaaguga

SEQ ID NO: 2016090 - RNA, 19 nt, Artificial Sequence
  Description of Artificial Sequence: Synthetic oligonucleotide
  Sense strand starting at position 416 of SEQ ID NO: 1881076
ugauacgugcuacagauau

SEQ ID NO: 2016091 - RNA, 19 nt, Artificial Sequence
  Description of Artificial Sequence: Synthetic oligonucleotide
  Antisense strand to SEQ ID NO: 2016090
auaucuguagcacguauca

SEQ ID NO: 2016092 - RNA, 19 nt, Artificial Sequence
  Description of Artificial Sequence: Synthetic oligonucleotide
  Sense strand starting at position 481 of SEQ ID NO: 1881076
auguauuugccaugcuauu

SEQ ID NO: 2016093 - RNA, 19 nt, Artificial Sequence
  Description of Artificial Sequence: Synthetic oligonucleotide
  Antisense strand to SEQ ID NO: 2016092
aauagcauggcaaauacau

SEQ ID NO: 2016094 - RNA, 19 nt, Artificial Sequence
  Description of Artificial Sequence: Synthetic oligonucleotide
  Sense strand starting at position 645 of SEQ ID NO: 1881076
uacgcuauaagguguagau

SEQ ID NO: 2016095 - RNA, 19 nt, Artificial Sequence
  Description of Artificial Sequence: Synthetic oligonucleotide
  Antisense strand to SEQ ID NO: 2016094
aucuacaccuuauagcgua

SEQ ID NO: 2016096 - RNA, 19 nt, Artificial Sequence
  Description of Artificial Sequence: Synthetic oligonucleotide
  Sense strand starting at position 647 of SEQ ID NO: 1881076
cgcuauaagguguagaucu

SEQ ID NO: 2016097 - RNA, 19 nt, Artificial Sequence
  Description of Artificial Sequence: Synthetic oligonucleotide
  Antisense strand to SEQ ID NO: 2016096
agaucuacaccuuauagcg

SEQ ID NO: 2016098 - RNA, 19 nt, Artificial Sequence
  Description of Artificial Sequence: Synthetic oligonucleotide
  Sense strand starting at position 700 of SEQ ID NO: 1881076
cccagcucuguguauuaca

SEQ ID NO: 2016099 - RNA, 19 nt, Artificial Sequence
  Description of Artificial Sequence: Synthetic oligonucleotide
  Antisense strand to SEQ ID NO: 2016098
uguaauacacagagcuggg

SEQ ID NO: 2016100 - RNA, 19 nt, Artificial Sequence
  Description of Artificial Sequence: Synthetic oligonucleotide
  Sense strand starting at position 865 of SEQ ID NO: 1881076
cuuuguaaccucuauaguc

SEQ ID NO: 2016101 - RNA, 19 nt, Artificial Sequence
  Description of Artificial Sequence: Synthetic oligonucleotide
  Antisense strand to SEQ ID NO: 2016100
gacuauagagguuacaaag

SEQ ID NO: 2016102 - RNA, 19 nt, Artificial Sequence
  Description of Artificial Sequence: Synthetic oligonucleotide
  Sense strand starting at position 867 of SEQ ID NO: 1881076
uuguaaccucuauagucau

SEQ ID NO: 2016103 - RNA, 19 nt, Artificial Sequence
  Description of Artificial Sequence: Synthetic oligonucleotide
  Antisense strand to SEQ ID NO: 2016102
augacuauagagguuacaa

SEQ ID NO: 2016104 - RNA, 19 nt, Artificial Sequence
  Description of Artificial Sequence: Synthetic oligonucleotide
  Sense strand starting at position 1122 of SEQ ID NO: 1881076
gggcaaaucugauugaacc

SEQ ID NO: 2016105 - RNA, 19 nt, Artificial Sequence
  Description of Artificial Sequence: Synthetic oligonucleotide
  Antisense strand to SEQ ID NO: 2016104
gguucaaucagauuugccc

SEQ ID NO: 2016106 - RNA, 19 nt, Artificial Sequence
  Description of Artificial Sequence: Synthetic oligonucleotide
  Sense strand starting at position 1128 of SEQ ID NO: 1881076
aucugauugaaccgugaga

SEQ ID NO: 2016107 - RNA, 19 nt, Artificial Sequence
  Description of Artificial Sequence: Synthetic oligonucleotide
  Antisense strand to SEQ ID NO: 2016106
ucucacgguucaaucagau

SEQ ID NO: 2016108 - RNA, 19 nt, Artificial Sequence
  Description of Artificial Sequence: Synthetic oligonucleotide
  Sense strand starting at position 1130 of SEQ ID NO: 1881076
cugauugaaccgugagaug

SEQ ID NO: 2016109 - RNA, 19 nt, Artificial Sequence
  Description of Artificial Sequence: Synthetic oligonucleotide
  Antisense strand to SEQ ID NO: 2016108
caucucacgguucaaucag

SEQ ID NO: 2016110 - RNA, 19 nt, Artificial Sequence
  Description of Artificial Sequence: Synthetic oligonucleotide
  Sense strand starting at position 1162 of SEQ ID NO: 1881076
gaguuaacaguaugaaguc

SEQ ID NO: 2016111 - RNA, 19 nt, Artificial Sequence
  Description of Artificial Sequence: Synthetic oligonucleotide
  Antisense strand to SEQ ID NO: 2016110
gacuucauacuguuaacuc

SEQ ID NO: 2016112 - RNA, 19 nt, Artificial Sequence
  Description of Artificial Sequence: Synthetic oligonucleotide
  Sense strand starting at position 1226 of SEQ ID NO: 1881076
uauagaugugccuggauug

SEQ ID NO: 2016113 - RNA, 19 nt, Artificial Sequence
  Description of Artificial Sequence: Synthetic oligonucleotide
  Antisense strand to SEQ ID NO: 2016112
caauccaggcacaucuaua

SEQ ID NO: 2016114 - RNA, 19 nt, Artificial Sequence
  Description of Artificial Sequence: Synthetic oligonucleotide
  Sense strand starting at position 1227 of SEQ ID NO: 1881076
auagaugugccuggauuga

SEQ ID NO: 2016115 - RNA, 19 nt, Artificial Sequence
  Description of Artificial Sequence: Synthetic oligonucleotide
  Antisense strand to SEQ ID NO: 2016114
ucaauccaggcacaucuau

SEQ ID NO: 2016116 - RNA, 19 nt, Artificial Sequence
  Description of Artificial Sequence: Synthetic oligonucleotide
  Sense strand starting at position 1236 of SEQ ID NO: 1881076
ccuggauugaugcauguau

SEQ ID NO: 2016117 - RNA, 19 nt, Artificial Sequence
  Description of Artificial Sequence: Synthetic oligonucleotide
  Antisense strand to SEQ ID NO: 2016116
auacaugcaucaauccagg

SEQ ID NO: 2016118 - RNA, 19 nt, Artificial Sequence
  Description of Artificial Sequence: Synthetic oligonucleotide
  Sense strand starting at position 1330 of SEQ ID NO: 1881076
auaaauauguguguuugca

SEQ ID NO: 2016119 - RNA, 19 nt, Artificial Sequence
  Description of Artificial Sequence: Synthetic oligonucleotide
  Antisense strand to SEQ ID NO: 2016118
ugcaaacacacauauuuau

SEQ ID NO: 2016120 - RNA, 19 nt, Artificial Sequence
  Description of Artificial Sequence: Synthetic oligonucleotide
  Sense strand starting at position 1387 of SEQ ID NO: 1881076
uagcguugucugcugagac

SEQ ID NO: 2016121 - RNA, 19 nt, Artificial Sequence
  Description of Artificial Sequence: Synthetic oligonucleotide
  Antisense strand to SEQ ID NO: 2016120
gucucagcagacaacgcua

SEQ ID NO: 2016122 - RNA, 19 nt, Artificial Sequence
  Description of Artificial Sequence: Synthetic oligonucleotide
  Sense strand starting at position 1513 of SEQ ID NO: 1881076
gucugauuccaaggcagga

SEQ ID NO: 2016123 - RNA, 19 nt, Artificial Sequence
  Description of Artificial Sequence: Synthetic oligonucleotide
  Antisense strand to SEQ ID NO: 2016122
uccugccuuggaaucagac

SEQ ID NO: 2016124 - RNA, 19 nt, Artificial Sequence
  Description of Artificial Sequence: Synthetic oligonucleotide
  Sense strand starting at position 1552 of SEQ ID NO: 1881076
ggaacaucuuguguccuua

SEQ ID NO: 2016125 - RNA, 19 nt, Artificial Sequence
  Description of Artificial Sequence: Synthetic oligonucleotide
  Antisense strand to SEQ ID NO: 2016124
uaaggacacaagauguucc

SEQ ID NO: 2016126 - RNA, 19 nt, Artificial Sequence
  Description of Artificial Sequence: Synthetic oligonucleotide
  Sense strand starting at position 1685 of SEQ ID NO: 1881076
aagcauucuguagcucgua

SEQ ID NO: 2016127 - RNA, 19 nt, Artificial Sequence
  Description of Artificial Sequence: Synthetic oligonucleotide
  Antisense strand to SEQ ID NO: 2016126
uacgagcuacagaaugcuu

SEQ ID NO: 2016128 - RNA, 19 nt, Artificial Sequence
  Description of Artificial Sequence: Synthetic oligonucleotide
  Sense strand starting at position 2295 of SEQ ID NO: 1881076
cgccguuuccgcccaagaa

SEQ ID NO: 2016129 - RNA, 19 nt, Artificial Sequence
  Description of Artificial Sequence: Synthetic oligonucleotide
  Antisense strand to SEQ ID NO: 2016128
uucuugggcggaaacggcg

SEQ ID NO: 2016130 - RNA, 19 nt, Artificial Sequence
  Description of Artificial Sequence: Synthetic oligonucleotide
  Sense strand starting at position 2406 of SEQ ID NO: 1881076
gagacugucguaggauaca

SEQ ID NO: 2016131 - RNA, 19 nt, Artificial Sequence
  Description of Artificial Sequence: Synthetic oligonucleotide
  Antisense strand to SEQ ID NO: 2016130
uguauccuacgacagucuc

SEQ ID NO: 2016132 - RNA, 19 nt, Artificial Sequence
  Description of Artificial Sequence: Synthetic oligonucleotide
  Sense strand starting at position 2558 of SEQ ID NO: 1881076
agagcaagcucugcauauu

SEQ ID NO: 2016133 - RNA, 19 nt, Artificial Sequence
  Description of Artificial Sequence: Synthetic oligonucleotide
  Antisense strand to SEQ ID NO: 2016132
aauaugcagagcuugcucu

SEQ ID NO: 2016134 - RNA, 19 nt, Artificial Sequence
  Description of Artificial Sequence: Synthetic oligonucleotide
  Sense strand starting at position 2561 of SEQ ID NO: 1881076
gcaagcucugcauauuagu

SEQ ID NO: 2016135 - RNA, 19 nt, Artificial Sequence
  Description of Artificial Sequence: Synthetic oligonucleotide
  Antisense strand to SEQ ID NO: 2016134
acuaauaugcagagcuugc

SEQ ID NO: 2016136 - RNA, 19 nt, Artificial Sequence
  Description of Artificial Sequence: Synthetic oligonucleotide
  Sense strand starting at position 2575 of SEQ ID NO: 1881076
uuaguaccugugggauaua

SEQ ID NO: 2016137 - RNA, 19 nt, Artificial Sequence
  Description of Artificial Sequence: Synthetic oligonucleotide
  Antisense strand to SEQ ID NO: 2016136
uauaucccacagguacuaa

SEQ ID NO: 2016138 - RNA, 19 nt, Artificial Sequence
  Description of Artificial Sequence: Synthetic oligonucleotide
  Sense strand starting at position 2578 of SEQ ID NO: 1881076
guaccugugggauauacca

SEQ ID NO: 2016139 - RNA, 19 nt, Artificial Sequence
  Description of Artificial Sequence: Synthetic oligonucleotide
  Antisense strand to SEQ ID NO: 2016138
ugguauaucccacagguac

SEQ ID NO: 2016140 - RNA, 19 nt, Artificial Sequence
  Description of Artificial Sequence: Synthetic oligonucleotide
  Sense strand starting at position 2729 of SEQ ID NO: 1881076
ugggaauacuaauaagaga

SEQ ID NO: 2016141 - RNA, 19 nt, Artificial Sequence
  Description of Artificial Sequence: Synthetic oligonucleotide
  Antisense strand to SEQ ID NO: 2016140
ucucuuauuaguauuccca

SEQ ID NO: 2016142 - RNA, 19 nt, Artificial Sequence
  Description of Artificial Sequence: Synthetic oligonucleotide
  Sense strand starting at position 2851 of SEQ ID NO: 1881076
aaagcauugcaugaucagu

SEQ ID NO: 2016143 - RNA, 19 nt, Artificial Sequence
  Description of Artificial Sequence: Synthetic oligonucleotide
  Antisense strand to SEQ ID NO: 2016142
acugaucaugcaaugcuuu

SEQ ID NO: 2016144 - RNA, 19 nt, Artificial Sequence
  Description of Artificial Sequence: Synthetic oligonucleotide
  Sense strand starting at position 2853 of SEQ ID NO: 1881076
agcauugcaugaucaguca

SEQ ID NO: 2016145 - RNA, 19 nt, Artificial Sequence
  Description of Artificial Sequence: Synthetic oligonucleotide
  Antisense strand to SEQ ID NO: 2016144
ugacugaucaugcaaugcu

SEQ ID NO: 2016146 - RNA, 19 nt, Artificial Sequence
  Description of Artificial Sequence: Synthetic oligonucleotide
  Sense strand starting at position 2856 of SEQ ID NO: 1881076
auugcaugaucagucaguu

SEQ ID NO: 2016147 - RNA, 19 nt, Artificial Sequence
  Description of Artificial Sequence: Synthetic oligonucleotide
  Antisense strand to SEQ ID NO: 2016146
aacugacugaucaugcaau

SEQ ID NO: 2016148 - RNA, 19 nt, Artificial Sequence
  Description of Artificial Sequence: Synthetic oligonucleotide
  Sense strand starting at position 2906 of SEQ ID NO: 1881076
uggacaagauuccaagaaa

SEQ ID NO: 2016149 - RNA, 19 nt, Artificial Sequence
  Description of Artificial Sequence: Synthetic oligonucleotide
  Antisense strand to SEQ ID NO: 2016148
uuucuuggaaucuugucca

SEQ ID NO: 2016150 - RNA, 19 nt, Artificial Sequence
  Description of Artificial Sequence: Synthetic oligonucleotide
  Sense strand starting at position 3514 of SEQ ID NO: 1881076
auacguauacauugaccau

SEQ ID NO: 2016151 - RNA, 19 nt, Artificial Sequence
  Description of Artificial Sequence: Synthetic oligonucleotide
  Antisense strand to SEQ ID NO: 2016150
auggucaauguauacguau

SEQ ID NO: 2016152 - RNA, 19 nt, Artificial Sequence
  Description of Artificial Sequence: Synthetic oligonucleotide
  Sense strand starting at position 3517 of SEQ ID NO: 1881076
cguauacauugaccauaga

SEQ ID NO: 2016153 - RNA, 19 nt, Artificial Sequence
  Description of Artificial Sequence: Synthetic oligonucleotide
  Antisense strand to SEQ ID NO: 2016152
ucuauggucaauguauacg

SEQ ID NO: 2016154 - RNA, 19 nt, Artificial Sequence
  Description of Artificial Sequence: Synthetic oligonucleotide
  Sense strand starting at position 3922 of SEQ ID NO: 1881076
cuagaaauagcuggguaca

SEQ ID NO: 2016155 - RNA, 19 nt, Artificial Sequence
  Description of Artificial Sequence: Synthetic oligonucleotide
  Antisense strand to SEQ ID NO: 2016154
uguacccagcuauuucuag

SEQ ID NO: 2016156 - RNA, 19 nt, Artificial Sequence
  Description of Artificial Sequence: Synthetic oligonucleotide
  Sense strand starting at position 3924 of SEQ ID NO: 1881076
agaaauagcuggguacagu

SEQ ID NO: 2016157 - RNA, 19 nt, Artificial Sequence
  Description of Artificial Sequence: Synthetic oligonucleotide
  Antisense strand to SEQ ID NO: 2016156
acuguacccagcuauuucu

SEQ ID NO: 2016158 - RNA, 19 nt, Artificial Sequence
  Description of Artificial Sequence: Synthetic oligonucleotide
  Sense strand starting at position 94 of SEQ ID NO: 1881075
ucucuauuacccugugauu

SEQ ID NO: 2016159 - RNA, 19 nt, Artificial Sequence
  Description of Artificial Sequence: Synthetic oligonucleotide
  Antisense strand to SEQ ID NO: 2016158
aaucacaggguaauagaga

SEQ ID NO: 2016160 - RNA, 19 nt, Artificial Sequence
  Description of Artificial Sequence: Synthetic oligonucleotide
  Sense strand starting at position 128 of SEQ ID NO: 1881075
ucuaauuauuugcacagga

SEQ ID NO: 2016161 - RNA, 19 nt, Artificial Sequence
  Description of Artificial Sequence: Synthetic oligonucleotide
  Antisense strand to SEQ ID NO: 2016160
uccugugcaaauaauuaga

SEQ ID NO: 2016162 - RNA, 19 nt, Artificial Sequence
  Description of Artificial Sequence: Synthetic oligonucleotide
  Sense strand starting at position 142 of SEQ ID NO: 1881075
caggaauuccuguguuagg

SEQ ID NO: 2016163 - RNA, 19 nt, Artificial Sequence
  Description of Artificial Sequence: Synthetic oligonucleotide
  Antisense strand to SEQ ID NO: 2016162
ccuaacacaggaauuccug

SEQ ID NO: 2016164 - RNA, 19 nt, Artificial Sequence
  Description of Artificial Sequence: Synthetic oligonucleotide
  Sense strand starting at position 209 of SEQ ID NO: 1881075
ggaugacucuuaucuuuaa

SEQ ID NO: 2016165 - RNA, 19 nt, Artificial Sequence
  Description of Artificial Sequence: Synthetic oligonucleotide
  Antisense strand to SEQ ID NO: 2016164
uuaaagauaagagucaucc

SEQ ID NO: 2016166 - RNA, 19 nt, Artificial Sequence
  Description of Artificial Sequence: Synthetic oligonucleotide
  Sense strand starting at position 279 of SEQ ID NO: 1881075
ucacuuugccacugcugaa

SEQ ID NO: 2016167 - RNA, 19 nt, Artificial Sequence
  Description of Artificial Sequence: Synthetic oligonucleotide
  Antisense strand to SEQ ID NO: 2016166
uucagcaguggcaaaguga

SEQ ID NO: 2016168 - RNA, 19 nt, Artificial Sequence
  Description of Artificial Sequence: Synthetic oligonucleotide
  Sense strand starting at position 361 of SEQ ID NO: 1881075
auccuuuacccgugauacg

SEQ ID NO: 2016169 - RNA, 19 nt, Artificial Sequence
  Description of Artificial Sequence: Synthetic oligonucleotide
  Antisense strand to SEQ ID NO: 2016168
cguaucacggguaaaggau

SEQ ID NO: 2016170 - RNA, 19 nt, Artificial Sequence
  Description of Artificial Sequence: Synthetic oligonucleotide
  Sense strand starting at position 373 of SEQ ID NO: 1881075
ugauacgugcuacagauau

SEQ ID NO: 2016171 - RNA, 19 nt, Artificial Sequence
  Description of Artificial Sequence: Synthetic oligonucleotide
  Antisense strand to SEQ ID NO: 2016170
auaucuguagcacguauca

SEQ ID NO: 2016172 - RNA, 19 nt, Artificial Sequence
  Description of Artificial Sequence: Synthetic oligonucleotide
  Sense strand starting at position 438 of SEQ ID NO: 1881075
auguauuugccaugcuauu

SEQ ID NO: 2016173 - RNA, 19 nt, Artificial Sequence
  Description of Artificial Sequence: Synthetic oligonucleotide
  Antisense strand to SEQ ID NO: 2016172
aauagcauggcaaauacau

SEQ ID NO: 2016174 - RNA, 19 nt, Artificial Sequence
  Description of Artificial Sequence: Synthetic oligonucleotide
  Sense strand starting at position 602 of SEQ ID NO: 1881075
uacgcuauaagguguagau

SEQ ID NO: 2016175 - RNA, 19 nt, Artificial Sequence
  Description of Artificial Sequence: Synthetic oligonucleotide
  Antisense strand to SEQ ID NO: 2016174
aucuacaccuuauagcgua

SEQ ID NO: 2016176 - RNA, 19 nt, Artificial Sequence
  Description of Artificial Sequence: Synthetic oligonucleotide
  Sense strand starting at position 604 of SEQ ID NO: 1881075
cgcuauaagguguagaucu

SEQ ID NO: 2016177 - RNA, 19 nt, Artificial Sequence
  Description of Artificial Sequence: Synthetic oligonucleotide
  Antisense strand to SEQ ID NO: 2016176
agaucuacaccuuauagcg

SEQ ID NO: 2016178 - RNA, 19 nt, Artificial Sequence
  Description of Artificial Sequence: Synthetic oligonucleotide
  Sense strand starting at position 657 of SEQ ID NO: 1881075
cccagcucuguguauuaca

SEQ ID NO: 2016179 - RNA, 19 nt, Artificial Sequence
  Description of Artificial Sequence: Synthetic oligonucleotide
  Antisense strand to SEQ ID NO: 2016178
uguaauacacagagcuggg

SEQ ID NO: 2016180 - RNA, 19 nt, Artificial Sequence
  Description of Artificial Sequence: Synthetic oligonucleotide
  Sense strand starting at position 822 of SEQ ID NO: 1881075
cuuuguaaccucuauaguc

SEQ ID NO: 2016181 - RNA, 19 nt, Artificial Sequence
  Description of Artificial Sequence: Synthetic oligonucleotide
  Antisense strand to SEQ ID NO: 2016180
gacuauagagguuacaaag

SEQ ID NO: 2016182 - RNA, 19 nt, Artificial Sequence
  Description of Artificial Sequence: Synthetic oligonucleotide
  Sense strand starting at position 824 of SEQ ID NO: 1881075
uuguaaccucuauagucau

SEQ ID NO: 2016183 - RNA, 19 nt, Artificial Sequence
  Description of Artificial Sequence: Synthetic oligonucleotide
  Antisense strand to SEQ ID NO: 2016182
augacuauagagguuacaa

SEQ ID NO: 2016184 - RNA, 19 nt, Artificial Sequence
  Description of Artificial Sequence: Synthetic oligonucleotide
  Sense strand starting at position 1079 of SEQ ID NO: 1881075
gggcaaaucugauugaacc

SEQ ID NO: 2016185 - RNA, 19 nt, Artificial Sequence
  Description of Artificial Sequence: Synthetic oligonucleotide
  Antisense strand to SEQ ID NO: 2016184
gguucaaucagauuugccc

SEQ ID NO: 2016186 - RNA, 19 nt, Artificial Sequence
  Description of Artificial Sequence: Synthetic oligonucleotide
  Sense strand starting at position 1085 of SEQ ID NO: 1881075
aucugauugaaccgugaga

SEQ ID NO: 2016187 - RNA, 19 nt, Artificial Sequence
  Description of Artificial Sequence: Synthetic oligonucleotide
  Antisense strand to SEQ ID NO: 2016186
ucucacgguucaaucagau

SEQ ID NO: 2016188 - RNA, 19 nt, Artificial Sequence
  Description of Artificial Sequence: Synthetic oligonucleotide
  Sense strand starting at position 1087 of SEQ ID NO: 1881075
cugauugaaccgugagaug

SEQ ID NO: 2016189 - RNA, 19 nt, Artificial Sequence
  Description of Artificial Sequence: Synthetic oligonucleotide
  Antisense strand to SEQ ID NO: 2016188
caucucacgguucaaucag

SEQ ID NO: 2016190 - RNA, 19 nt, Artificial Sequence
  Description of Artificial Sequence: Synthetic oligonucleotide
  Sense strand starting at position 1119 of SEQ ID NO: 1881075
gaguuaacaguaugaaguc

SEQ ID NO: 2016191 - RNA, 19 nt, Artificial Sequence
  Description of Artificial Sequence: Synthetic oligonucleotide
  Antisense strand to SEQ ID NO: 2016190
gacuucauacuguuaacuc

SEQ ID NO: 2016192 - RNA, 19 nt, Artificial Sequence
  Description of Artificial Sequence: Synthetic oligonucleotide
  Sense strand starting at position 1183 of SEQ ID NO: 1881075
uauagaugugccuggauug

SEQ ID NO: 2016193 - RNA, 19 nt, Artificial Sequence
  Description of Artificial Sequence: Synthetic oligonucleotide
  Antisense strand to SEQ ID NO: 2016192
caauccaggcacaucuaua

SEQ ID NO: 2016194 - RNA, 19 nt, Artificial Sequence
  Description of Artificial Sequence: Synthetic oligonucleotide
  Sense strand starting at position 1184 of SEQ ID NO: 1881075
auagaugugccuggauuga

SEQ ID NO: 2016195 - RNA, 19 nt, Artificial Sequence
  Description of Artificial Sequence: Synthetic oligonucleotide
  Antisense strand to SEQ ID NO: 2016194
ucaauccaggcacaucuau

SEQ ID NO: 2016196 - RNA, 19 nt, Artificial Sequence
  Description of Artificial Sequence: Synthetic oligonucleotide
  Sense strand starting at position 1193 of SEQ ID NO: 1881075
ccuggauugaugcauguau

SEQ ID NO: 2016197 - RNA, 19 nt, Artificial Sequence
  Description of Artificial Sequence: Synthetic oligonucleotide
  Antisense strand to SEQ ID NO: 2016196
auacaugcaucaauccagg

SEQ ID NO: 2016198 - RNA, 19 nt, Artificial Sequence
  Description of Artificial Sequence: Synthetic oligonucleotide
  Sense strand starting at position 1287 of SEQ ID NO: 1881075
auaaauauguguguuugca

SEQ ID NO: 2016199 - RNA, 19 nt, Artificial Sequence
  Description of Artificial Sequence: Synthetic oligonucleotide
  Antisense strand to SEQ ID NO: 2016198
ugcaaacacacauauuuau

SEQ ID NO: 2016200 - RNA, 19 nt, Artificial Sequence
  Description of Artificial Sequence: Synthetic oligonucleotide
  Sense strand starting at position 1344 of SEQ ID NO: 1881075
uagcguugucugcugagac

SEQ ID NO: 2016201 - RNA, 19 nt, Artificial Sequence
  Description of Artificial Sequence: Synthetic oligonucleotide
  Antisense strand to SEQ ID NO: 2016200
gucucagcagacaacgcua

SEQ ID NO: 2016202 - RNA, 19 nt, Artificial Sequence
  Description of Artificial Sequence: Synthetic oligonucleotide
  Sense strand starting at position 1470 of SEQ ID NO: 1881075
gucugauuccaaggcagga

SEQ ID NO: 2016203 - RNA, 19 nt, Artificial Sequence
  Description of Artificial Sequence: Synthetic oligonucleotide
  Antisense strand to SEQ ID NO: 2016202
uccugccuuggaaucagac

SEQ ID NO: 2016204 - RNA, 19 nt, Artificial Sequence
  Description of Artificial Sequence: Synthetic oligonucleotide
  Sense strand starting at position 1509 of SEQ ID NO: 1881075
ggaacaucuuguguccuua

SEQ ID NO: 2016205 - RNA, 19 nt, Artificial Sequence
  Description of Artificial Sequence: Synthetic oligonucleotide
  Antisense strand to SEQ ID NO: 2016204
uaaggacacaagauguucc

SEQ ID NO: 2016206 - RNA, 19 nt, Artificial Sequence
  Description of Artificial Sequence: Synthetic oligonucleotide
  Sense strand starting at position 1642 of SEQ ID NO: 1881075
aagcauucuguagcucgua

SEQ ID NO: 2016207 - RNA, 19 nt, Artificial Sequence
  Description of Artificial Sequence: Synthetic oligonucleotide
  Antisense strand to SEQ ID NO: 2016206
uacgagcuacagaaugcuu

SEQ ID NO: 2016208 - RNA, 19 nt, Artificial Sequence
  Description of Artificial Sequence: Synthetic oligonucleotide
  Sense strand starting at position 2252 of SEQ ID NO: 1881075
cgccguuuccgcccaagaa

SEQ ID NO: 2016209 - RNA, 19 nt, Artificial Sequence
  Description of Artificial Sequence: Synthetic oligonucleotide
  Antisense strand to SEQ ID NO: 2016208
uucuugggcggaaacggcg

SEQ ID NO: 2016210 - RNA, 19 nt, Artificial Sequence
  Description of Artificial Sequence: Synthetic oligonucleotide
  Sense strand starting at position 2363 of SEQ ID NO: 1881075
gagacugucguaggauaca

SEQ ID NO: 2016211 - RNA, 19 nt, Artificial Sequence
  Description of Artificial Sequence: Synthetic oligonucleotide
  Antisense strand to SEQ ID NO: 2016210
uguauccuacgacagucuc

SEQ ID NO: 2016212 - RNA, 19 nt, Artificial Sequence
  Description of Artificial Sequence: Synthetic oligonucleotide
  Sense strand starting at position 2515 of SEQ ID NO: 1881075
agagcaagcucugcauauu

SEQ ID NO: 2016213 - RNA, 19 nt, Artificial Sequence
  Description of Artificial Sequence: Synthetic oligonucleotide
  Antisense strand to SEQ ID NO: 2016212
aauaugcagagcuugcucu

SEQ ID NO: 2016214 - RNA, 19 nt, Artificial Sequence
  Description of Artificial Sequence: Synthetic oligonucleotide
  Sense strand starting at position 2518 of SEQ ID NO: 1881075
gcaagcucugcauauuagu

SEQ ID NO: 2016215 - RNA, 19 nt, Artificial Sequence
  Description of Artificial Sequence: Synthetic oligonucleotide
  Antisense strand to SEQ ID NO: 2016214
acuaauaugcagagcuugc

SEQ ID NO: 2016216 - RNA, 19 nt, Artificial Sequence
  Description of Artificial Sequence: Synthetic oligonucleotide
  Sense strand starting at position 2532 of SEQ ID NO: 1881075
uuaguaccugugggauaua

SEQ ID NO: 2016217 - RNA, 19 nt, Artificial Sequence
  Description of Artificial Sequence: Synthetic oligonucleotide
  Antisense strand to SEQ ID NO: 2016216
uauaucccacagguacuaa

SEQ ID NO: 2016218 - RNA, 19 nt, Artificial Sequence
  Description of Artificial Sequence: Synthetic oligonucleotide
  Sense strand starting at position 2535 of SEQ ID NO: 1881075
guaccugugggauauacca

SEQ ID NO: 2016219 - RNA, 19 nt, Artificial Sequence
  Description of Artificial Sequence: Synthetic oligonucleotide
  Antisense strand to SEQ ID NO: 2016218
ugguauaucccacagguac

SEQ ID NO: 2016220 - RNA, 19 nt, Artificial Sequence
  Description of Artificial Sequence: Synthetic oligonucleotide
  Sense strand starting at position 2686 of SEQ ID NO: 1881075
ugggaauacuaauaagaga

SEQ ID NO: 2016221 - RNA, 19 nt, Artificial Sequence
  Description of Artificial Sequence: Synthetic oligonucleotide
  Antisense strand to SEQ ID NO: 2016220
ucucuuauuaguauuccca

SEQ ID NO: 2016222 - RNA, 19 nt, Artificial Sequence
  Description of Artificial Sequence: Synthetic oligonucleotide
  Sense strand starting at position 2808 of SEQ ID NO: 1881075
aaagcauugcaugaucagu

SEQ ID NO: 2016223 - RNA, 19 nt, Artificial Sequence
  Description of Artificial Sequence: Synthetic oligonucleotide
  Antisense strand to SEQ ID NO: 2016222
acugaucaugcaaugcuuu

SEQ ID NO: 2016224 - RNA, 19 nt, Artificial Sequence
  Description of Artificial Sequence: Synthetic oligonucleotide
  Sense strand starting at position 2810 of SEQ ID NO: 1881075
agcauugcaugaucaguca

SEQ ID NO: 2016225 - RNA, 19 nt, Artificial Sequence
  Description of Artificial Sequence: Synthetic oligonucleotide
  Antisense strand to SEQ ID NO: 2016224
ugacugaucaugcaaugcu

SEQ ID NO: 2016226 - RNA, 19 nt, Artificial Sequence
  Description of Artificial Sequence: Synthetic oligonucleotide
  Sense strand starting at position 2813 of SEQ ID NO: 1881075
auugcaugaucagucaguu

SEQ ID NO: 2016227 - RNA, 19 nt, Artificial Sequence
  Description of Artificial Sequence: Synthetic oligonucleotide
  Antisense strand to SEQ ID NO: 2016226
aacugacugaucaugcaau

SEQ ID NO: 2016228 - RNA, 19 nt, Artificial Sequence
  Description of Artificial Sequence: Synthetic oligonucleotide
  Sense strand starting at position 2863 of SEQ ID NO: 1881075
uggacaagauuccaagaaa

SEQ ID NO: 2016229 - RNA, 19 nt, Artificial Sequence
  Description of Artificial Sequence: Synthetic oligonucleotide
  Antisense strand to SEQ ID NO: 2016228
uuucuuggaaucuugucca

SEQ ID NO: 2016230 - RNA, 19 nt, Artificial Sequence
  Description of Artificial Sequence: Synthetic oligonucleotide
  Sense strand starting at position 3471 of SEQ ID NO: 1881075
auacguauacauugaccau

SEQ ID NO: 2016231 - RNA, 19 nt, Artificial Sequence
  Description of Artificial Sequence: Synthetic oligonucleotide
  Antisense strand to SEQ ID NO: 2016230
auggucaauguauacguau

SEQ ID NO: 2016232 - RNA, 19 nt, Artificial Sequence
  Description of Artificial Sequence: Synthetic oligonucleotide
  Sense strand starting at position 3474 of SEQ ID NO: 1881075
cguauacauugaccauaga

SEQ ID NO: 2016233 - RNA, 19 nt, Artificial Sequence
  Description of Artificial Sequence: Synthetic oligonucleotide
  Antisense strand to SEQ ID NO: 2016232
ucuauggucaauguauacg

SEQ ID NO: 2016234 - RNA, 19 nt, Artificial Sequence
  Description of Artificial Sequence: Synthetic oligonucleotide
  Sense strand starting at position 3879 of SEQ ID NO: 1881075
cuagaaauagcuggguaca

SEQ ID NO: 2016235 - RNA, 19 nt, Artificial Sequence
  Description of Artificial Sequence: Synthetic oligonucleotide
  Antisense strand to SEQ ID NO: 2016234
uguacccagcuauuucuag

SEQ ID NO: 2016236 - RNA, 19 nt, Artificial Sequence
  Description of Artificial Sequence: Synthetic oligonucleotide
  Sense strand starting at position 3881 of SEQ ID NO: 1881075
agaaauagcuggguacagu

SEQ ID NO: 2016237 - RNA, 19 nt, Artificial Sequence
  Description of Artificial Sequence: Synthetic oligonucleotide
  Antisense strand to SEQ ID NO: 2016236
acuguacccagcuauuucu

SEQ ID NO: 2016238 - RNA, 19 nt, Artificial Sequence
  Description of Artificial Sequence: Synthetic oligonucleotide
  Sense strand starting at position 713 of SEQ ID NO: 1881077
uggagaaccagguaugcuu

SEQ ID NO: 2016239 - RNA, 19 nt, Artificial Sequence
  Description of Artificial Sequence: Synthetic oligonucleotide
  Antisense strand to SEQ ID NO: 2016238
aagcauaccugguucucca

SEQ ID NO: 2016240 - RNA, 19 nt, Artificial Sequence
  Description of Artificial Sequence: Synthetic oligonucleotide
  Sense strand starting at position 1121 of SEQ ID NO: 1881077
guaugugggaguugaacaa

SEQ ID NO: 2016241 - RNA, 19 nt, Artificial Sequence
  Description of Artificial Sequence: Synthetic oligonucleotide
  Antisense strand to SEQ ID NO: 2016240
uuguucaacucccacauac

SEQ ID NO: 2016242 - RNA, 19 nt, Artificial Sequence
  Description of Artificial Sequence: Synthetic oligonucleotide
  Sense strand starting at position 1393 of SEQ ID NO: 1881077
gaaugaauaugagcugauu

SEQ ID NO: 2016243 - RNA, 19 nt, Artificial Sequence
  Description of Artificial Sequence: Synthetic oligonucleotide
  Antisense strand to SEQ ID NO: 2016242
aaucagcucauauucauuc

SEQ ID NO: 2016244 - RNA, 19 nt, Artificial Sequence
  Description of Artificial Sequence: Synthetic oligonucleotide
  Sense strand starting at position 1454 of SEQ ID NO: 1881077
caaggacagucuguaaagu

SEQ ID NO: 2016245 - RNA, 19 nt, Artificial Sequence
  Description of Artificial Sequence: Synthetic oligonucleotide
  Antisense strand to SEQ ID NO: 2016244
acuuuacagacuguccuug

SEQ ID NO: 2016246 - RNA, 19 nt, Artificial Sequence
  Description of Artificial Sequence: Synthetic oligonucleotide
  Sense strand starting at position 1763 of SEQ ID NO: 1881077
ugccauagucaguauauca

SEQ ID NO: 2016247 - RNA, 19 nt, Artificial Sequence
  Description of Artificial Sequence: Synthetic oligonucleotide
  Antisense strand to SEQ ID NO: 2016246
ugauauacugacuauggca

SEQ ID NO: 2016248 - RNA, 19 nt, Artificial Sequence
  Description of Artificial Sequence: Synthetic oligonucleotide
  Sense strand starting at position 1796 of SEQ ID NO: 1881077
ggugaagagggaugugauc

SEQ ID NO: 2016249 - RNA, 19 nt, Artificial Sequence
  Description of Artificial Sequence: Synthetic oligonucleotide
  Antisense strand to SEQ ID NO: 2016248
gaucacaucccucuucacc

SEQ ID NO: 2016250 - RNA, 19 nt, Artificial Sequence
  Description of Artificial Sequence: Synthetic oligonucleotide
  Sense strand starting at position 1798 of SEQ ID NO: 1881077
ugaagagggaugugaucuu

SEQ ID NO: 2016251 - RNA, 19 nt, Artificial Sequence
  Description of Artificial Sequence: Synthetic oligonucleotide
  Antisense strand to SEQ ID NO: 2016250
aagaucacaucccucuuca

SEQ ID NO: 2016252 - RNA, 19 nt, Artificial Sequence
  Description of Artificial Sequence: Synthetic oligonucleotide
  Sense strand starting at position 1993 of SEQ ID NO: 1881077
gaagucauugcacagcaga

SEQ ID NO: 2016253 - RNA, 19 nt, Artificial Sequence
  Description of Artificial Sequence: Synthetic oligonucleotide
  Antisense strand to SEQ ID NO: 2016252
ucugcugugcaaugacuuc

SEQ ID NO: 2016254 - RNA, 19 nt, Artificial Sequence
  Description of Artificial Sequence: Synthetic oligonucleotide
  Sense strand starting at position 2004 of SEQ ID NO: 1881077
acagcagaguugcugauaa

SEQ ID NO: 2016255 - RNA, 19 nt, Artificial Sequence
  Description of Artificial Sequence: Synthetic oligonucleotide
  Antisense strand to SEQ ID NO: 2016254
uuaucagcaacucugcugu

SEQ ID NO: 2016256 - RNA, 19 nt, Artificial Sequence
  Description of Artificial Sequence: Synthetic oligonucleotide
  Sense strand starting at position 2006 of SEQ ID NO: 1881077
agcagaguugcugauaaag

SEQ ID NO: 2016257 - RNA, 19 nt, Artificial Sequence
  Description of Artificial Sequence: Synthetic oligonucleotide
  Antisense strand to SEQ ID NO: 2016256
cuuuaucagcaacucugcu

SEQ ID NO: 2016258 - RNA, 19 nt, Artificial Sequence
  Description of Artificial Sequence: Synthetic oligonucleotide
  Sense strand starting at position 2109 of SEQ ID NO: 1881077
gucugaugugcgaggcaau

SEQ ID NO: 2016259 - RNA, 19 nt, Artificial Sequence
  Description of Artificial Sequence: Synthetic oligonucleotide
  Antisense strand to SEQ ID NO: 2016258
auugccucgcacaucagac

SEQ ID NO: 2016260 - RNA, 19 nt, Artificial Sequence
  Description of Artificial Sequence: Synthetic oligonucleotide
  Sense strand starting at position 2167 of SEQ ID NO: 1881077
cuagaaauaugagaaggau

SEQ ID NO: 2016261 - RNA, 19 nt, Artificial Sequence
  Description of Artificial Sequence: Synthetic oligonucleotide
  Antisense strand to SEQ ID NO: 2016260
auccuucucauauuucuag

SEQ ID NO: 2016262 - RNA, 19 nt, Artificial Sequence
  Description of Artificial Sequence: Synthetic oligonucleotide
  Sense strand starting at position 2281 of SEQ ID NO: 1881077
gguuauacuugggugaaau

SEQ ID NO: 2016263 - RNA, 19 nt, Artificial Sequence
  Description of Artificial Sequence: Synthetic oligonucleotide
  Antisense strand to SEQ ID NO: 2016262
auuucacccaaguauaacc

SEQ ID NO: 2016264 - RNA, 19 nt, Artificial Sequence
  Description of Artificial Sequence: Synthetic oligonucleotide
  Sense strand starting at position 2282 of SEQ ID NO: 1881077
guuauacuugggugaaaug

SEQ ID NO: 2016265 - RNA, 19 nt, Artificial Sequence
  Description of Artificial Sequence: Synthetic oligonucleotide
  Antisense strand to SEQ ID NO: 2016264
cauuucacccaaguauaac

SEQ ID NO: 2016266 - RNA, 19 nt, Artificial Sequence
  Description of Artificial Sequence: Synthetic oligonucleotide
  Sense strand starting at position 2283 of SEQ ID NO: 1881077
uuauacuugggugaaaugu

SEQ ID NO: 2016267 - RNA, 19 nt, Artificial Sequence
  Description of Artificial Sequence: Synthetic oligonucleotide
  Antisense strand to SEQ ID NO: 2016266
acauuucacccaaguauaa

SEQ ID NO: 2016268 - RNA, 19 nt, Artificial Sequence
  Description of Artificial Sequence: Synthetic oligonucleotide
  Sense strand starting at position 2294 of SEQ ID NO: 1881077
ugaaauguccuauguaaau

SEQ ID NO: 2016269 - RNA, 19 nt, Artificial Sequence
  Description of Artificial Sequence: Synthetic oligonucleotide
  Antisense strand to SEQ ID NO: 2016268
auuuacauaggacauuuca

SEQ ID NO: 2016270 - RNA, 19 nt, Artificial Sequence
  Description of Artificial Sequence: Synthetic oligonucleotide
  Sense strand starting at position 2371 of SEQ ID NO: 1881077
gaugacucaucuucuggua

SEQ ID NO: 2016271 - RNA, 19 nt, Artificial Sequence
  Description of Artificial Sequence: Synthetic oligonucleotide
  Antisense strand to SEQ ID NO: 2016270
uaccagaagaugagucauc

SEQ ID NO: 2016272 - RNA, 19 nt, Artificial Sequence
  Description of Artificial Sequence: Synthetic oligonucleotide
  Sense strand starting at position 2602 of SEQ ID NO: 1881077
uuggaugguugguuaacua

SEQ ID NO: 2016273 - RNA, 19 nt, Artificial Sequence
  Description of Artificial Sequence: Synthetic oligonucleotide
  Antisense strand to SEQ ID NO: 2016272
uaguuaaccaaccauccaa

SEQ ID NO: 2016274 - RNA, 19 nt, Artificial Sequence
  Description of Artificial Sequence: Synthetic oligonucleotide
  Sense strand starting at position 2610 of SEQ ID NO: 1881077
uugguuaacuaguuacuca

SEQ ID NO: 2016275 - RNA, 19 nt, Artificial Sequence
  Description of Artificial Sequence: Synthetic oligonucleotide
  Antisense strand to SEQ ID NO: 2016274
ugaguaacuaguuaaccaa

SEQ ID NO: 2016276 - RNA, 19 nt, Artificial Sequence
  Description of Artificial Sequence: Synthetic oligonucleotide
  Sense strand starting at position 2632 of SEQ ID NO: 1881077
guaagaugugggcaguaaa

SEQ ID NO: 2016277 - RNA, 19 nt, Artificial Sequence
  Description of Artificial Sequence: Synthetic oligonucleotide
  Antisense strand to SEQ ID NO: 2016276
uuuacugcccacaucuuac

SEQ ID NO: 2016278 - RNA, 19 nt, Artificial Sequence
  Description of Artificial Sequence: Synthetic oligonucleotide
  Sense strand starting at position 2635 of SEQ ID NO: 1881077
agaugugggcaguaaauau

SEQ ID NO: 2016279 - RNA, 19 nt, Artificial Sequence
  Description of Artificial Sequence: Synthetic oligonucleotide
  Antisense strand to SEQ ID NO: 2016278
auauuuacugcccacaucu

SEQ ID NO: 2016280 - RNA, 19 nt, Artificial Sequence
  Description of Artificial Sequence: Synthetic oligonucleotide
  Sense strand starting at position 2639 of SEQ ID NO: 1881077
gugggcaguaaauauuaca

SEQ ID NO: 2016281 - RNA, 19 nt, Artificial Sequence
  Description of Artificial Sequence: Synthetic oligonucleotide
  Antisense strand to SEQ ID NO: 2016280
uguaauauuuacugcccac

SEQ ID NO: 2016282 - RNA, 19 nt, Artificial Sequence
  Description of Artificial Sequence: Synthetic oligonucleotide
  Sense strand starting at position 2691 of SEQ ID NO: 1881077
gagcuaaggcgacaucauu

SEQ ID NO: 2016283 - RNA, 19 nt, Artificial Sequence
  Description of Artificial Sequence: Synthetic oligonucleotide
  Antisense strand to SEQ ID NO: 2016282
aaugaugucgccuuagcuc

SEQ ID NO: 2016284 - RNA, 19 nt, Artificial Sequence
  Description of Artificial Sequence: Synthetic oligonucleotide
  Sense strand starting at position 2851 of SEQ ID NO: 1881077
gauguagaauugucauauu

SEQ ID NO: 2016285 - RNA, 19 nt, Artificial Sequence
  Description of Artificial Sequence: Synthetic oligonucleotide
  Antisense strand to SEQ ID NO: 2016284
aauaugacaauucuacauc

SEQ ID NO: 2016286 - RNA, 19 nt, Artificial Sequence
  Description of Artificial Sequence: Synthetic oligonucleotide
  Sense strand starting at position 2885 of SEQ ID NO: 1881077
auaggugcuagguauagaa

SEQ ID NO: 2016287 - RNA, 19 nt, Artificial Sequence
  Description of Artificial Sequence: Synthetic oligonucleotide
  Antisense strand to SEQ ID NO: 2016286
uucuauaccuagcaccuau

SEQ ID NO: 2016288 - RNA, 19 nt, Artificial Sequence
  Description of Artificial Sequence: Synthetic oligonucleotide
  Sense strand starting at position 2887 of SEQ ID NO: 1881077
aggugcuagguauagaaau

SEQ ID NO: 2016289 - RNA, 19 nt, Artificial Sequence
  Description of Artificial Sequence: Synthetic oligonucleotide
  Antisense strand to SEQ ID NO: 2016288
auuucuauaccuagcaccu

SEQ ID NO: 2016290 - RNA, 19 nt, Artificial Sequence
  Description of Artificial Sequence: Synthetic oligonucleotide
  Sense strand starting at position 2989 of SEQ ID NO: 1881077
cuucuaaguguuuacuaug

SEQ ID NO: 2016291 - RNA, 19 nt, Artificial Sequence
  Description of Artificial Sequence: Synthetic oligonucleotide
  Antisense strand to SEQ ID NO: 2016290
cauaguaaacacuuagaag

SEQ ID NO: 2016292 - RNA, 19 nt, Artificial Sequence
  Description of Artificial Sequence: Synthetic oligonucleotide
  Sense strand starting at position 3070 of SEQ ID NO: 1881077
ggacauaggcuuuauggua

SEQ ID NO: 2016293 - RNA, 19 nt, Artificial Sequence
  Description of Artificial Sequence: Synthetic oligonucleotide
  Antisense strand to SEQ ID NO: 2016292
uaccauaaagccuaugucc

SEQ ID NO: 2016294 - RNA, 19 nt, Artificial Sequence
  Description of Artificial Sequence: Synthetic oligonucleotide
  Sense strand starting at position 3102 of SEQ ID NO: 1881077
agaggauuaugguauauuu

SEQ ID NO: 2016295 - RNA, 19 nt, Artificial Sequence
  Description of Artificial Sequence: Synthetic oligonucleotide
  Antisense strand to SEQ ID NO: 2016294
aaauauaccauaauccucu

SEQ ID NO: 2016296 - RNA, 19 nt, Artificial Sequence
  Description of Artificial Sequence: Synthetic oligonucleotide
  Sense strand starting at position 3180 of SEQ ID NO: 1881077
gaaccuguguauuccagaa

SEQ ID NO: 2016297 - RNA, 19 nt, Artificial Sequence
  Description of Artificial Sequence: Synthetic oligonucleotide
  Antisense strand to SEQ ID NO: 2016296
uucuggaauacacagguuc

SEQ ID NO: 2016298 - RNA, 19 nt, Artificial Sequence
  Description of Artificial Sequence: Synthetic oligonucleotide
  Sense strand starting at position 3184 of SEQ ID NO: 1881077
cuguguauuccagaaccua

SEQ ID NO: 2016299 - RNA, 19 nt, Artificial Sequence
  Description of Artificial Sequence: Synthetic oligonucleotide
  Antisense strand to SEQ ID NO: 2016298
uagguucuggaauacacag

SEQ ID NO: 2016300 - RNA, 19 nt, Artificial Sequence
  Description of Artificial Sequence: Synthetic oligonucleotide
  Sense strand starting at position 3718 of SEQ ID NO: 1881077
guguguauugugcucucau

SEQ ID NO: 2016301 - RNA, 19 nt, Artificial Sequence
  Description of Artificial Sequence: Synthetic oligonucleotide
  Antisense strand to SEQ ID NO: 2016300
augagagcacaauacacac

SEQ ID NO: 2016302 - RNA, 19 nt, Artificial Sequence
  Description of Artificial Sequence: Synthetic oligonucleotide
  Sense strand starting at position 3798 of SEQ ID NO: 1881077
cuuaaagcugaauaaguua

SEQ ID NO: 2016303 - RNA, 19 nt, Artificial Sequence
  Description of Artificial Sequence: Synthetic oligonucleotide
  Antisense strand to SEQ ID NO: 2016302
uaacuuauucagcuuuaag

SEQ ID NO: 2016304 - RNA, 19 nt, Artificial Sequence
  Description of Artificial Sequence: Synthetic oligonucleotide
  Sense strand starting at position 3840 of SEQ ID NO: 1881077
auuacugguuggccuuaaa

SEQ ID NO: 2016305 - RNA, 19 nt, Artificial Sequence
  Description of Artificial Sequence: Synthetic oligonucleotide
  Antisense strand to SEQ ID NO: 2016304
uuuaaggccaaccaguaau

SEQ ID NO: 2016306 - RNA, 19 nt, Artificial Sequence
  Description of Artificial Sequence: Synthetic oligonucleotide
  Sense strand starting at position 3843 of SEQ ID NO: 1881077
acugguuggccuuaaaguu

SEQ ID NO: 2016307 - RNA, 19 nt, Artificial Sequence
  Description of Artificial Sequence: Synthetic oligonucleotide
  Antisense strand to SEQ ID NO: 2016306
aacuuuaaggccaaccagu

SEQ ID NO: 2016308 - RNA, 19 nt, Artificial Sequence
  Description of Artificial Sequence: Synthetic oligonucleotide
  Sense strand starting at position 3853 of SEQ ID NO: 1881077
cuuaaaguuuagguucuaa

SEQ ID NO: 2016309 - RNA, 19 nt, Artificial Sequence
  Description of Artificial Sequence: Synthetic oligonucleotide
  Antisense strand to SEQ ID NO: 2016308
uuagaaccuaaacuuuaag

SEQ ID NO: 2016310 - RNA, 19 nt, Artificial Sequence
  Description of Artificial Sequence: Synthetic oligonucleotide
  Sense strand starting at position 3902 of SEQ ID NO: 1881077
acuuaucaggaauguugua

SEQ ID NO: 2016311 - RNA, 19 nt, Artificial Sequence
  Description of Artificial Sequence: Synthetic oligonucleotide
  Antisense strand to SEQ ID NO: 2016310
uacaacauuccugauaagu

SEQ ID NO: 2016312 - RNA, 19 nt, Artificial Sequence
  Description of Artificial Sequence: Synthetic oligonucleotide
  Sense strand starting at position 3909 of SEQ ID NO: 1881077
aggaauguuguaggagcua

SEQ ID NO: 2016313 - RNA, 19 nt, Artificial Sequence
  Description of Artificial Sequence: Synthetic oligonucleotide
  Antisense strand to SEQ ID NO: 2016312
uagcuccuacaacauuccu

SEQ ID NO: 2016314 - RNA, 19 nt, Artificial Sequence
  Description of Artificial Sequence: Synthetic oligonucleotide
  Sense strand starting at position 3914 of SEQ ID NO: 1881077
uguuguaggagcuagaaga

SEQ ID NO: 2016315 - RNA, 19 nt, Artificial Sequence
  Description of Artificial Sequence: Synthetic oligonucleotide
  Antisense strand to SEQ ID NO: 2016314
ucuucuagcuccuacaaca

SEQ ID NO: 2016316 - RNA, 19 nt, Artificial Sequence
  Description of Artificial Sequence: Synthetic oligonucleotide
  Sense strand starting at position 3930 of SEQ ID NO: 1881077
agaaauguuguuuagcuuu

SEQ ID NO: 2016317 - RNA, 19 nt, Artificial Sequence
  Description of Artificial Sequence: Synthetic oligonucleotide
  Antisense strand to SEQ ID NO: 2016316
aaagcuaaacaacauuucu

SEQ ID NO: 2016318 - RNA, 19 nt, Artificial Sequence
  Description of Artificial Sequence: Synthetic oligonucleotide
  Sense strand starting at position 129 of SEQ ID NO: 1881079
acaagagucucuggcuagu

SEQ ID NO: 2016319 - RNA, 19 nt, Artificial Sequence
  Description of Artificial Sequence: Synthetic oligonucleotide
  Antisense strand to SEQ ID NO: 2016318
acuagccagagacucuugu

SEQ ID NO: 2016320 - RNA, 19 nt, Artificial Sequence
  Description of Artificial Sequence: Synthetic oligonucleotide
  Sense strand starting at position 188 of SEQ ID NO: 1881079
ggugguauuucucugaguc

SEQ ID NO: 2016321 - RNA, 19 nt, Artificial Sequence
  Description of Artificial Sequence: Synthetic oligonucleotide
  Antisense strand to SEQ ID NO: 2016320
gacucagagaaauaccacc

SEQ ID NO: 2016322 - RNA, 19 nt, Artificial Sequence
  Description of Artificial Sequence: Synthetic oligonucleotide
  Sense strand starting at position 189 of SEQ ID NO: 1881079
gugguauuucucugagucu

SEQ ID NO: 2016323 - RNA, 19 nt, Artificial Sequence
  Description of Artificial Sequence: Synthetic oligonucleotide
  Antisense strand to SEQ ID NO: 2016322
agacucagagaaauaccac

SEQ ID NO: 2016324 - RNA, 19 nt, Artificial Sequence
  Description of Artificial Sequence: Synthetic oligonucleotide
  Sense strand starting at position 190 of SEQ ID NO: 1881079
ugguauuucucugagucug

SEQ ID NO: 2016325 - RNA, 19 nt, Artificial Sequence
  Description of Artificial Sequence: Synthetic oligonucleotide
  Antisense strand to SEQ ID NO: 2016324
cagacucagagaaauacca

SEQ ID NO: 2016326 - RNA, 19 nt, Artificial Sequence
  Description of Artificial Sequence: Synthetic oligonucleotide
  Sense strand starting at position 195 of SEQ ID NO: 1881079
uuucucugagucuggaaga

SEQ ID NO: 2016327 - RNA, 19 nt, Artificial Sequence
  Description of Artificial Sequence: Synthetic oligonucleotide
  Antisense strand to SEQ ID NO: 2016326
ucuuccagacucagagaaa

SEQ ID NO: 2016328 - RNA, 19 nt, Artificial Sequence
  Description of Artificial Sequence: Synthetic oligonucleotide
  Sense strand starting at position 256 of SEQ ID NO: 1881079
uggcuuagaucacaaccua

SEQ ID NO: 2016329 - RNA, 19 nt, Artificial Sequence
  Description of Artificial Sequence: Synthetic oligonucleotide
  Antisense strand to SEQ ID NO: 2016328
uagguugugaucuaagcca

SEQ ID NO: 2016330 - RNA, 19 nt, Artificial Sequence
  Description of Artificial Sequence: Synthetic oligonucleotide
  Sense strand starting at position 902 of SEQ ID NO: 1881079
agaucuaagagcuauuggu

SEQ ID NO: 2016331 - RNA, 19 nt, Artificial Sequence
  Description of Artificial Sequence: Synthetic oligonucleotide
  Antisense strand to SEQ ID NO: 2016330
accaauagcucuuagaucu

SEQ ID NO: 2016332 - RNA, 19 nt, Artificial Sequence
  Description of Artificial Sequence: Synthetic oligonucleotide
  Sense strand starting at position 1266 of SEQ ID NO: 1881079
uagcauauacagugaaagu

SEQ ID NO: 2016333 - RNA, 19 nt, Artificial Sequence
  Description of Artificial Sequence: Synthetic oligonucleotide
  Antisense strand to SEQ ID NO: 2016332
acuuucacuguauaugcua

SEQ ID NO: 2016334 - RNA, 19 nt, Artificial Sequence
  Description of Artificial Sequence: Synthetic oligonucleotide
  Sense strand starting at position 1341 of SEQ ID NO: 1881079
uuaugaauaccaugucugu

SEQ ID NO: 2016335 - RNA, 19 nt, Artificial Sequence
  Description of Artificial Sequence: Synthetic oligonucleotide
  Antisense strand to SEQ ID NO: 2016334
acagacaugguauucauaa

SEQ ID NO: 2016336 - RNA, 19 nt, Artificial Sequence
  Description of Artificial Sequence: Synthetic oligonucleotide
  Sense strand starting at position 1350 of SEQ ID NO: 1881079
ccaugucuguccuaaagga

SEQ ID NO: 2016337 - RNA, 19 nt, Artificial Sequence
  Description of Artificial Sequence: Synthetic oligonucleotide
  Antisense strand to SEQ ID NO: 2016336
uccuuuaggacagacaugg

SEQ ID NO: 2016338 - RNA, 19 nt, Artificial Sequence
  Description of Artificial Sequence: Synthetic oligonucleotide
  Sense strand starting at position 1378 of SEQ ID NO: 1881079
agaguacauuaaugagcaa

SEQ ID NO: 2016339 - RNA, 19 nt, Artificial Sequence
  Description of Artificial Sequence: Synthetic oligonucleotide
  Antisense strand to SEQ ID NO: 2016338
uugcucauuaauguacucu

SEQ ID NO: 2016340 - RNA, 19 nt, Artificial Sequence
  Description of Artificial Sequence: Synthetic oligonucleotide
  Sense strand starting at position 1381 of SEQ ID NO: 1881079
guacauuaaugagcaauaa

SEQ ID NO: 2016341 - RNA, 19 nt, Artificial Sequence
  Description of Artificial Sequence: Synthetic oligonucleotide
  Antisense strand to SEQ ID NO: 2016340
uuauugcucauuaauguac

SEQ ID NO: 2016342 - RNA, 19 nt, Artificial Sequence
  Description of Artificial Sequence: Synthetic oligonucleotide
  Sense strand starting at position 2623 of SEQ ID NO: 1881079
cuuugugugucugcgugua

SEQ ID NO: 2016343 - RNA, 19 nt, Artificial Sequence
  Description of Artificial Sequence: Synthetic oligonucleotide
  Antisense strand to SEQ ID NO: 2016342
uacacgcagacacacaaag

SEQ ID NO: 2016344 - RNA, 19 nt, Artificial Sequence
  Description of Artificial Sequence: Synthetic oligonucleotide
  Sense strand starting at position 2667 of SEQ ID NO: 1881079
guaugugucuguuugggag

SEQ ID NO: 2016345 - RNA, 19 nt, Artificial Sequence
  Description of Artificial Sequence: Synthetic oligonucleotide
  Antisense strand to SEQ ID NO: 2016344
cucccaaacagacacauac

SEQ ID NO: 2016346 - RNA, 19 nt, Artificial Sequence
  Description of Artificial Sequence: Synthetic oligonucleotide
  Sense strand starting at position 2731 of SEQ ID NO: 1881079
guaccuuuguccugggauc

SEQ ID NO: 2016347 - RNA, 19 nt, Artificial Sequence
  Description of Artificial Sequence: Synthetic oligonucleotide
  Antisense strand to SEQ ID NO: 2016346
gaucccaggacaaagguac

SEQ ID NO: 2016348 - RNA, 19 nt, Artificial Sequence
  Description of Artificial Sequence: Synthetic oligonucleotide
  Sense strand starting at position 2732 of SEQ ID NO: 1881079
uaccuuuguccugggauca

SEQ ID NO: 2016349 - RNA, 19 nt, Artificial Sequence
  Description of Artificial Sequence: Synthetic oligonucleotide
  Antisense strand to SEQ ID NO: 2016348
ugaucccaggacaaaggua

SEQ ID NO: 2016350 - RNA, 19 nt, Artificial Sequence
  Description of Artificial Sequence: Synthetic oligonucleotide
  Sense strand starting at position 2771 of SEQ ID NO: 1881079
gcgcgugggugucauaguu

SEQ ID NO: 2016351 - RNA, 19 nt, Artificial Sequence
  Description of Artificial Sequence: Synthetic oligonucleotide
  Antisense strand to SEQ ID NO: 2016350
aacuaugacacccacgcgc

SEQ ID NO: 2016352 - RNA, 19 nt, Artificial Sequence
  Description of Artificial Sequence: Synthetic oligonucleotide
  Sense strand starting at position 2779 of SEQ ID NO: 1881079
gugucauaguugccgugau

SEQ ID NO: 2016353 - RNA, 19 nt, Artificial Sequence
  Description of Artificial Sequence: Synthetic oligonucleotide
  Antisense strand to SEQ ID NO: 2016352
aucacggcaacuaugacac

SEQ ID NO: 2016354 - RNA, 19 nt, Artificial Sequence
  Description of Artificial Sequence: Synthetic oligonucleotide
  Sense strand starting at position 2780 of SEQ ID NO: 1881079
ugucauaguugccgugaua

SEQ ID NO: 2016355 - RNA, 19 nt, Artificial Sequence
  Description of Artificial Sequence: Synthetic oligonucleotide
  Antisense strand to SEQ ID NO: 2016354
uaucacggcaacuaugaca

SEQ ID NO: 2016356 - RNA, 19 nt, Artificial Sequence
  Description of Artificial Sequence: Synthetic oligonucleotide
  Sense strand starting at position 2783 of SEQ ID NO: 1881079
cauaguugccgugauaguc

SEQ ID NO: 2016357 - RNA, 19 nt, Artificial Sequence
  Description of Artificial Sequence: Synthetic oligonucleotide
  Antisense strand to SEQ ID NO: 2016356
gacuaucacggcaacuaug

SEQ ID NO: 2016358 - RNA, 19 nt, Artificial Sequence
  Description of Artificial Sequence: Synthetic oligonucleotide
  Sense strand starting at position 2814 of SEQ ID NO: 1881079
guguguggaucucguucau

SEQ ID NO: 2016359 - RNA, 19 nt, Artificial Sequence
  Description of Artificial Sequence: Synthetic oligonucleotide
  Antisense strand to SEQ ID NO: 2016358
augaacgagauccacacac

SEQ ID NO: 2016360 - RNA, 19 nt, Artificial Sequence
  Description of Artificial Sequence: Synthetic oligonucleotide
  Sense strand starting at position 2924 of SEQ ID NO: 1881079
gggagucuucgauauagcc

SEQ ID NO: 2016361 - RNA, 19 nt, Artificial Sequence
  Description of Artificial Sequence: Synthetic oligonucleotide
  Antisense strand to SEQ ID NO: 2016360
ggcuauaucgaagacuccc

SEQ ID NO: 2016362 - RNA, 19 nt, Artificial Sequence
  Description of Artificial Sequence: Synthetic oligonucleotide
  Sense strand starting at position 2931 of SEQ ID NO: 1881079
uucgauauagccuguuuga

SEQ ID NO: 2016363 - RNA, 19 nt, Artificial Sequence
  Description of Artificial Sequence: Synthetic oligonucleotide
  Antisense strand to SEQ ID NO: 2016362
ucaaacaggcuauaucgaa

SEQ ID NO: 2016364 - RNA, 19 nt, Artificial Sequence
  Description of Artificial Sequence: Synthetic oligonucleotide
  Sense strand starting at position 3059 of SEQ ID NO: 1881079
gcggcagagacuugaguaa

SEQ ID NO: 2016365 - RNA, 19 nt, Artificial Sequence
  Description of Artificial Sequence: Synthetic oligonucleotide
  Antisense strand to SEQ ID NO: 2016364
uuacucaagucucugccgc

SEQ ID NO: 2016366 - RNA, 19 nt, Artificial Sequence
  Description of Artificial Sequence: Synthetic oligonucleotide
  Sense strand starting at position 3139 of SEQ ID NO: 1881079
gcgugacuucuguguggau

SEQ ID NO: 2016367 - RNA, 19 nt, Artificial Sequence
  Description of Artificial Sequence: Synthetic oligonucleotide
  Antisense strand to SEQ ID NO: 2016366
auccacacagaagucacgc

SEQ ID NO: 2016368 - RNA, 19 nt, Artificial Sequence
  Description of Artificial Sequence: Synthetic oligonucleotide
  Sense strand starting at position 3242 of SEQ ID NO: 1881079
acccgagucuccgcucauu

SEQ ID NO: 2016369 - RNA, 19 nt, Artificial Sequence
  Description of Artificial Sequence: Synthetic oligonucleotide
  Antisense strand to SEQ ID NO: 2016368
aaugagcggagacucgggu

SEQ ID NO: 2016370 - RNA, 19 nt, Artificial Sequence
  Description of Artificial Sequence: Synthetic oligonucleotide
  Sense strand starting at position 3293 of SEQ ID NO: 1881079
acggaauucgucugaaucg

SEQ ID NO: 2016371 - RNA, 19 nt, Artificial Sequence
  Description of Artificial Sequence: Synthetic oligonucleotide
  Antisense strand to SEQ ID NO: 2016370
cgauucagacgaauuccgu

SEQ ID NO: 2016372 - RNA, 19 nt, Artificial Sequence
  Description of Artificial Sequence: Synthetic oligonucleotide
  Sense strand starting at position 3303 of SEQ ID NO: 1881079
ucugaaucgcucugggaug

SEQ ID NO: 2016373 - RNA, 19 nt, Artificial Sequence
  Description of Artificial Sequence: Synthetic oligonucleotide
  Antisense strand to SEQ ID NO: 2016372
caucccagagcgauucaga

SEQ ID NO: 2016374 - RNA, 19 nt, Artificial Sequence
  Description of Artificial Sequence: Synthetic oligonucleotide
  Sense strand starting at position 3304 of SEQ ID NO: 1881079
cugaaucgcucugggauga

SEQ ID NO: 2016375 - RNA, 19 nt, Artificial Sequence
  Description of Artificial Sequence: Synthetic oligonucleotide
  Antisense strand to SEQ ID NO: 2016374
ucaucccagagcgauucag

SEQ ID NO: 2016376 - RNA, 19 nt, Artificial Sequence
  Description of Artificial Sequence: Synthetic oligonucleotide
  Sense strand starting at position 3305 of SEQ ID NO: 1881079
ugaaucgcucugggaugaa

SEQ ID NO: 2016377 - RNA, 19 nt, Artificial Sequence
  Description of Artificial Sequence: Synthetic oligonucleotide
  Antisense strand to SEQ ID NO: 2016376
uucaucccagagcgauuca

SEQ ID NO: 2016378 - RNA, 19 nt, Artificial Sequence
  Description of Artificial Sequence: Synthetic oligonucleotide
  Sense strand starting at position 3308 of SEQ ID NO: 1881079
aucgcucugggaugaagua

SEQ ID NO: 2016379 - RNA, 19 nt, Artificial Sequence
  Description of Artificial Sequence: Synthetic oligonucleotide
  Antisense strand to SEQ ID NO: 2016378
uacuucaucccagagcgau

SEQ ID NO: 2016380 - RNA, 19 nt, Artificial Sequence
  Description of Artificial Sequence: Synthetic oligonucleotide
  Sense strand starting at position 3439 of SEQ ID NO: 1881079
guugguucuggaggcagaa

SEQ ID NO: 2016381 - RNA, 19 nt, Artificial Sequence
  Description of Artificial Sequence: Synthetic oligonucleotide
  Antisense strand to SEQ ID NO: 2016380
uucugccuccagaaccaac

SEQ ID NO: 2016382 - RNA, 19 nt, Artificial Sequence
  Description of Artificial Sequence: Synthetic oligonucleotide
  Sense strand starting at position 3781 of SEQ ID NO: 1881079
cggguuggcaagugauagu

SEQ ID NO: 2016383 - RNA, 19 nt, Artificial Sequence
  Description of Artificial Sequence: Synthetic oligonucleotide
  Antisense strand to SEQ ID NO: 2016382
acuaucacuugccaacccg

SEQ ID NO: 2016384 - RNA, 19 nt, Artificial Sequence
  Description of Artificial Sequence: Synthetic oligonucleotide
  Sense strand starting at position 3790 of SEQ ID NO: 1881079
aagugauagugagagaaga

SEQ ID NO: 2016385 - RNA, 19 nt, Artificial Sequence
  Description of Artificial Sequence: Synthetic oligonucleotide
  Antisense strand to SEQ ID NO: 2016384
ucuucucucacuaucacuu

SEQ ID NO: 2016386 - RNA, 19 nt, Artificial Sequence
  Description of Artificial Sequence: Synthetic oligonucleotide
  Sense strand starting at position 3813 of SEQ ID NO: 1881079
gaggaaucgagccgcagaa

SEQ ID NO: 2016387 - RNA, 19 nt, Artificial Sequence
  Description of Artificial Sequence: Synthetic oligonucleotide
  Antisense strand to SEQ ID NO: 2016386
uucugcggcucgauuccuc

SEQ ID NO: 2016388 - RNA, 19 nt, Artificial Sequence
  Description of Artificial Sequence: Synthetic oligonucleotide
  Sense strand starting at position 3952 of SEQ ID NO: 1881079
cuaagcuguugccugcaaa

SEQ ID NO: 2016389 - RNA, 19 nt, Artificial Sequence
  Description of Artificial Sequence: Synthetic oligonucleotide
  Antisense strand to SEQ ID NO: 2016388
uuugcaggcaacagcuuag

SEQ ID NO: 2016390 - RNA, 19 nt, Artificial Sequence
  Description of Artificial Sequence: Synthetic oligonucleotide
  Sense strand starting at position 19 of SEQ ID NO: 1881078
acaagagucucuggcuagu

SEQ ID NO: 2016391 - RNA, 19 nt, Artificial Sequence
  Description of Artificial Sequence: Synthetic oligonucleotide
  Antisense strand to SEQ ID NO: 2016390
acuagccagagacucuugu

SEQ ID NO: 2016392 - RNA, 19 nt, Artificial Sequence
  Description of Artificial Sequence: Synthetic oligonucleotide
  Sense strand starting at position 78 of SEQ ID NO: 1881078
ggugguauuucucugaguc

SEQ ID NO: 2016393 - RNA, 19 nt, Artificial Sequence
  Description of Artificial Sequence: Synthetic oligonucleotide
  Antisense strand to SEQ ID NO: 2016392
gacucagagaaauaccacc

SEQ ID NO: 2016394 - RNA, 19 nt, Artificial Sequence
  Description of Artificial Sequence: Synthetic oligonucleotide
  Sense strand starting at position 79 of SEQ ID NO: 1881078
gugguauuucucugagucu

SEQ ID NO: 2016395 - RNA, 19 nt, Artificial Sequence
  Description of Artificial Sequence: Synthetic oligonucleotide
  Antisense strand to SEQ ID NO: 2016394
agacucagagaaauaccac

SEQ ID NO: 2016396 - RNA, 19 nt, Artificial Sequence
  Description of Artificial Sequence: Synthetic oligonucleotide
  Sense strand starting at position 80 of SEQ ID NO: 1881078
ugguauuucucugagucug

SEQ ID NO: 2016397 - RNA, 19 nt, Artificial Sequence
  Description of Artificial Sequence: Synthetic oligonucleotide
  Antisense strand to SEQ ID NO: 2016396
cagacucagagaaauacca

SEQ ID NO: 2016398 - RNA, 19 nt, Artificial Sequence
  Description of Artificial Sequence: Synthetic oligonucleotide
  Sense strand starting at position 85 of SEQ ID NO: 1881078
uuucucugagucuggaaga

SEQ ID NO: 2016399 - RNA, 19 nt, Artificial Sequence
  Description of Artificial Sequence: Synthetic oligonucleotide
  Antisense strand to SEQ ID NO: 2016398
ucuuccagacucagagaaa

SEQ ID NO: 2016400 - RNA, 19 nt, Artificial Sequence
  Description of Artificial Sequence: Synthetic oligonucleotide
  Sense strand starting at position 146 of SEQ ID NO: 1881078
uggcuuagaucacaaccua

SEQ ID NO: 2016401 - RNA, 19 nt, Artificial Sequence
  Description of Artificial Sequence: Synthetic oligonucleotide
  Antisense strand to SEQ ID NO: 2016400
uagguugugaucuaagcca

SEQ ID NO: 2016402 - RNA, 19 nt, Artificial Sequence
  Description of Artificial Sequence: Synthetic oligonucleotide
  Sense strand starting at position 792 of SEQ ID NO: 1881078
agaucuaagagcuauuggu

SEQ ID NO: 2016403 - RNA, 19 nt, Artificial Sequence
  Description of Artificial Sequence: Synthetic oligonucleotide
  Antisense strand to SEQ ID NO: 2016402
accaauagcucuuagaucu

SEQ ID NO: 2016404 - RNA, 19 nt, Artificial Sequence
  Description of Artificial Sequence: Synthetic oligonucleotide
  Sense strand starting at position 1156 of SEQ ID NO: 1881078
uagcauauacagugaaagu

SEQ ID NO: 2016405 - RNA, 19 nt, Artificial Sequence
  Description of Artificial Sequence: Synthetic oligonucleotide
  Antisense strand to SEQ ID NO: 2016404
acuuucacuguauaugcua

SEQ ID NO: 2016406 - RNA, 19 nt, Artificial Sequence
  Description of Artificial Sequence: Synthetic oligonucleotide
  Sense strand starting at position 1231 of SEQ ID NO: 1881078
uuaugaauaccaugucugu

SEQ ID NO: 2016407 - RNA, 19 nt, Artificial Sequence
  Description of Artificial Sequence: Synthetic oligonucleotide
  Antisense strand to SEQ ID NO: 2016406
acagacaugguauucauaa

SEQ ID NO: 2016408 - RNA, 19 nt, Artificial Sequence
  Description of Artificial Sequence: Synthetic oligonucleotide
  Sense strand starting at position 1240 of SEQ ID NO: 1881078
ccaugucuguccuaaagga

SEQ ID NO: 2016409 - RNA, 19 nt, Artificial Sequence
  Description of Artificial Sequence: Synthetic oligonucleotide
  Antisense strand to SEQ ID NO: 2016408
uccuuuaggacagacaugg

SEQ ID NO: 2016410 - RNA, 19 nt, Artificial Sequence
  Description of Artificial Sequence: Synthetic oligonucleotide
  Sense strand starting at position 1268 of SEQ ID NO: 1881078
agaguacauuaaugagcaa

SEQ ID NO: 2016411 - RNA, 19 nt, Artificial Sequence
  Description of Artificial Sequence: Synthetic oligonucleotide
  Antisense strand to SEQ ID NO: 2016410
uugcucauuaauguacucu

SEQ ID NO: 2016412 - RNA, 19 nt, Artificial Sequence
  Description of Artificial Sequence: Synthetic oligonucleotide
  Sense strand starting at position 1271 of SEQ ID NO: 1881078
guacauuaaugagcaauaa

SEQ ID NO: 2016413 - RNA, 19 nt, Artificial Sequence
  Description of Artificial Sequence: Synthetic oligonucleotide
  Antisense strand to SEQ ID NO: 2016412
uuauugcucauuaauguac

SEQ ID NO: 2016414 - RNA, 19 nt, Artificial Sequence
  Description of Artificial Sequence: Synthetic oligonucleotide
  Sense strand starting at position 2513 of SEQ ID NO: 1881078
cuuugugugucugcgugua

SEQ ID NO: 2016415 - RNA, 19 nt, Artificial Sequence
  Description of Artificial Sequence: Synthetic oligonucleotide
  Antisense strand to SEQ ID NO: 2016414
uacacgcagacacacaaag

SEQ ID NO: 2016416 - RNA, 19 nt, Artificial Sequence
  Description of Artificial Sequence: Synthetic oligonucleotide
  Sense strand starting at position 2557 of SEQ ID NO: 1881078
guaugugucuguuugggag

SEQ ID NO: 2016417 - RNA, 19 nt, Artificial Sequence
  Description of Artificial Sequence: Synthetic oligonucleotide
  Antisense strand to SEQ ID NO: 2016416
cucccaaacagacacauac

SEQ ID NO: 2016418 - RNA, 19 nt, Artificial Sequence
  Description of Artificial Sequence: Synthetic oligonucleotide
  Sense strand starting at position 2621 of SEQ ID NO: 1881078
guaccuuuguccugggauc

SEQ ID NO: 2016419 - RNA, 19 nt, Artificial Sequence
  Description of Artificial Sequence: Synthetic oligonucleotide
  Antisense strand to SEQ ID NO: 2016418
gaucccaggacaaagguac

SEQ ID NO: 2016420 - RNA, 19 nt, Artificial Sequence
  Description of Artificial Sequence: Synthetic oligonucleotide
  Sense strand starting at position 2622 of SEQ ID NO: 1881078
uaccuuuguccugggauca

SEQ ID NO: 2016421 - RNA, 19 nt, Artificial Sequence
  Description of Artificial Sequence: Synthetic oligonucleotide
  Antisense strand to SEQ ID NO: 2016420
ugaucccaggacaaaggua

SEQ ID NO: 2016422 - RNA, 19 nt, Artificial Sequence
  Description of Artificial Sequence: Synthetic oligonucleotide
  Sense strand starting at position 2661 of SEQ ID NO: 1881078
gcgcgugggugucauaguu

SEQ ID NO: 2016423 - RNA, 19 nt, Artificial Sequence
  Description of Artificial Sequence: Synthetic oligonucleotide
  Antisense strand to SEQ ID NO: 2016422
aacuaugacacccacgcgc

SEQ ID NO: 2016424 - RNA, 19 nt, Artificial Sequence
  Description of Artificial Sequence: Synthetic oligonucleotide
  Sense strand starting at position 2669 of SEQ ID NO: 1881078
gugucauaguugccgugau

SEQ ID NO: 2016425 - RNA, 19 nt, Artificial Sequence
  Description of Artificial Sequence: Synthetic oligonucleotide
  Antisense strand to SEQ ID NO: 2016424
aucacggcaacuaugacac

SEQ ID NO: 2016426 - RNA, 19 nt, Artificial Sequence
  Description of Artificial Sequence: Synthetic oligonucleotide
  Sense strand starting at position 2670 of SEQ ID NO: 1881078
ugucauaguugccgugaua

SEQ ID NO: 2016427 - RNA, 19 nt, Artificial Sequence
  Description of Artificial Sequence: Synthetic oligonucleotide
  Antisense strand to SEQ ID NO: 2016426
uaucacggcaacuaugaca

SEQ ID NO: 2016428 - RNA, 19 nt, Artificial Sequence
  Description of Artificial Sequence: Synthetic oligonucleotide
  Sense strand starting at position 2673 of SEQ ID NO: 1881078
cauaguugccgugauaguc

SEQ ID NO: 2016429 - RNA, 19 nt, Artificial Sequence
  Description of Artificial Sequence: Synthetic oligonucleotide
  Antisense strand to SEQ ID NO: 2016428
gacuaucacggcaacuaug

SEQ ID NO: 2016430 - RNA, 19 nt, Artificial Sequence
  Description of Artificial Sequence: Synthetic oligonucleotide
  Sense strand starting at position 2704 of SEQ ID NO: 1881078
guguguggaucucguucau

SEQ ID NO: 2016431 - RNA, 19 nt, Artificial Sequence
  Description of Artificial Sequence: Synthetic oligonucleotide
  Antisense strand to SEQ ID NO: 2016430
augaacgagauccacacac

SEQ ID NO: 2016432 - RNA, 19 nt, Artificial Sequence
  Description of Artificial Sequence: Synthetic oligonucleotide
  Sense strand starting at position 2814 of SEQ ID NO: 1881078
gggagucuucgauauagcc

SEQ ID NO: 2016433 - RNA, 19 nt, Artificial Sequence
  Description of Artificial Sequence: Synthetic oligonucleotide
  Antisense strand to SEQ ID NO: 2016432
ggcuauaucgaagacuccc

SEQ ID NO: 2016434 - RNA, 19 nt, Artificial Sequence
  Description of Artificial Sequence: Synthetic oligonucleotide
  Sense strand starting at position 2821 of SEQ ID NO: 1881078
uucgauauagccuguuuga

SEQ ID NO: 2016435 - RNA, 19 nt, Artificial Sequence
  Description of Artificial Sequence: Synthetic oligonucleotide
  Antisense strand to SEQ ID NO: 2016434
ucaaacaggcuauaucgaa

SEQ ID NO: 2016436 - RNA, 19 nt, Artificial Sequence
  Description of Artificial Sequence: Synthetic oligonucleotide
  Sense strand starting at position 2949 of SEQ ID NO: 1881078
gcggcagagacuugaguaa

SEQ ID NO: 2016437 - RNA, 19 nt, Artificial Sequence
  Description of Artificial Sequence: Synthetic oligonucleotide
  Antisense strand to SEQ ID NO: 2016436
uuacucaagucucugccgc

SEQ ID NO: 2016438 - RNA, 19 nt, Artificial Sequence
  Description of Artificial Sequence: Synthetic oligonucleotide
  Sense strand starting at position 3029 of SEQ ID NO: 1881078
gcgugacuucuguguggau

SEQ ID NO: 2016439 - RNA, 19 nt, Artificial Sequence
  Description of Artificial Sequence: Synthetic oligonucleotide
  Antisense strand to SEQ ID NO: 2016438
auccacacagaagucacgc

SEQ ID NO: 2016440 - RNA, 19 nt, Artificial Sequence
  Description of Artificial Sequence: Synthetic oligonucleotide
  Sense strand starting at position 3132 of SEQ ID NO: 1881078
acccgagucuccgcucauu

SEQ ID NO: 2016441 - RNA, 19 nt, Artificial Sequence
  Description of Artificial Sequence: Synthetic oligonucleotide
  Antisense strand to SEQ ID NO: 2016440
aaugagcggagacucgggu

SEQ ID NO: 2016442 - RNA, 19 nt, Artificial Sequence
  Description of Artificial Sequence: Synthetic oligonucleotide
  Sense strand starting at position 3183 of SEQ ID NO: 1881078
acggaauucgucugaaucg

SEQ ID NO: 2016443 - RNA, 19 nt, Artificial Sequence
  Description of Artificial Sequence: Synthetic oligonucleotide
  Antisense strand to SEQ ID NO: 2016442
cgauucagacgaauuccgu

SEQ ID NO: 2016444 - RNA, 19 nt, Artificial Sequence
  Description of Artificial Sequence: Synthetic oligonucleotide
  Sense strand starting at position 3193 of SEQ ID NO: 1881078
ucugaaucgcucugggaug

SEQ ID NO: 2016445 - RNA, 19 nt, Artificial Sequence
  Description of Artificial Sequence: Synthetic oligonucleotide
  Antisense strand to SEQ ID NO: 2016444
caucccagagcgauucaga

SEQ ID NO: 2016446 - RNA, 19 nt, Artificial Sequence
  Description of Artificial Sequence: Synthetic oligonucleotide
  Sense strand starting at position 3194 of SEQ ID NO: 1881078
cugaaucgcucugggauga

SEQ ID NO: 2016447 - RNA, 19 nt, Artificial Sequence
  Description of Artificial Sequence: Synthetic oligonucleotide
  Antisense strand to SEQ ID NO: 2016446
ucaucccagagcgauucag

SEQ ID NO: 2016448 - RNA, 19 nt, Artificial Sequence
  Description of Artificial Sequence: Synthetic oligonucleotide
  Sense strand starting at position 3195 of SEQ ID NO: 1881078
ugaaucgcucugggaugaa

SEQ ID NO: 2016449 - RNA, 19 nt, Artificial Sequence
  Description of Artificial Sequence: Synthetic oligonucleotide
  Antisense strand to SEQ ID NO: 2016448
uucaucccagagcgauuca

SEQ ID NO: 2016450 - RNA, 19 nt, Artificial Sequence
  Description of Artificial Sequence: Synthetic oligonucleotide
  Sense strand starting at position 3198 of SEQ ID NO: 1881078
aucgcucugggaugaagua

SEQ ID NO: 2016451 - RNA, 19 nt, Artificial Sequence
  Description of Artificial Sequence: Synthetic oligonucleotide
  Antisense strand to SEQ ID NO: 2016450
uacuucaucccagagcgau

SEQ ID NO: 2016452 - RNA, 19 nt, Artificial Sequence
  Description of Artificial Sequence: Synthetic oligonucleotide
  Sense strand starting at position 3329 of SEQ ID NO: 1881078
guugguucuggaggcagaa

SEQ ID NO: 2016453 - RNA, 19 nt, Artificial Sequence
  Description of Artificial Sequence: Synthetic oligonucleotide
  Antisense strand to SEQ ID NO: 2016452
uucugccuccagaaccaac

SEQ ID NO: 2016454 - RNA, 19 nt, Artificial Sequence
  Description of Artificial Sequence: Synthetic oligonucleotide
  Sense strand starting at position 3671 of SEQ ID NO: 1881078
cggguuggcaagugauagu

SEQ ID NO: 2016455 - RNA, 19 nt, Artificial Sequence
  Description of Artificial Sequence: Synthetic oligonucleotide
  Antisense strand to SEQ ID NO: 2016454
acuaucacuugccaacccg

SEQ ID NO: 2016456 - RNA, 19 nt, Artificial Sequence
  Description of Artificial Sequence: Synthetic oligonucleotide
  Sense strand starting at position 3680 of SEQ ID NO: 1881078
aagugauagugagagaaga

SEQ ID NO: 2016457 - RNA, 19 nt, Artificial Sequence
  Description of Artificial Sequence: Synthetic oligonucleotide
  Antisense strand to SEQ ID NO: 2016456
ucuucucucacuaucacuu

SEQ ID NO: 2016458 - RNA, 19 nt, Artificial Sequence
  Description of Artificial Sequence: Synthetic oligonucleotide
  Sense strand starting at position 3703 of SEQ ID NO: 1881078
gaggaaucgagccgcagaa

SEQ ID NO: 2016459 - RNA, 19 nt, Artificial Sequence
  Description of Artificial Sequence: Synthetic oligonucleotide
  Antisense strand to SEQ ID NO: 2016458
uucugcggcucgauuccuc

SEQ ID NO: 2016460 - RNA, 19 nt, Artificial Sequence
  Description of Artificial Sequence: Synthetic oligonucleotide
  Sense strand starting at position 3842 of SEQ ID NO: 1881078
cuaagcuguugccugcaaa

SEQ ID NO: 2016461 - RNA, 19 nt, Artificial Sequence
  Description of Artificial Sequence: Synthetic oligonucleotide
  Antisense strand to SEQ ID NO: 2016460
uuugcaggcaacagcuuag

SEQ ID NO: 2016462 - RNA, 19 nt, Artificial Sequence
  Description of Artificial Sequence: Synthetic oligonucleotide
  Sense strand starting at position 439 of SEQ ID NO: 1881080
acgaguaacggagaugauu

SEQ ID NO: 2016463 - RNA, 19 nt, Artificial Sequence
  Description of Artificial Sequence: Synthetic oligonucleotide
  Antisense strand to SEQ ID NO: 2016462
aaucaucuccguuacucgu

SEQ ID NO: 2016464 - RNA, 19 nt, Artificial Sequence
  Description of Artificial Sequence: Synthetic oligonucleotide
  Sense strand starting at position 441 of SEQ ID NO: 1881080
gaguaacggagaugauuga

SEQ ID NO: 2016465 - RNA, 19 nt, Artificial Sequence
  Description of Artificial Sequence: Synthetic oligonucleotide
  Antisense strand to SEQ ID NO: 2016464
ucaaucaucuccguuacuc

SEQ ID NO: 2016466 - RNA, 19 nt, Artificial Sequence
  Description of Artificial Sequence: Synthetic oligonucleotide
  Sense strand starting at position 479 of SEQ ID NO: 1881080
ggcucuauuugucuuuaga

SEQ ID NO: 2016467 - RNA, 19 nt, Artificial Sequence
  Description of Artificial Sequence: Synthetic oligonucleotide
  Antisense strand to SEQ ID NO: 2016466
ucuaaagacaaauagagcc

SEQ ID NO: 2016468 - RNA, 19 nt, Artificial Sequence
  Description of Artificial Sequence: Synthetic oligonucleotide
  Sense strand starting at position 489 of SEQ ID NO: 1881080
gucuuuagacuauggcuca

SEQ ID NO: 2016469 - RNA, 19 nt, Artificial Sequence
  Description of Artificial Sequence: Synthetic oligonucleotide
  Antisense strand to SEQ ID NO: 2016468
ugagccauagucuaaagac

SEQ ID NO: 2016470 - RNA, 19 nt, Artificial Sequence
  Description of Artificial Sequence: Synthetic oligonucleotide
  Sense strand starting at position 521 of SEQ ID NO: 1881080
cuugaagugcuguguucua

SEQ ID NO: 2016471 - RNA, 19 nt, Artificial Sequence
  Description of Artificial Sequence: Synthetic oligonucleotide
  Antisense strand to SEQ ID NO: 2016470
uagaacacagcacuucaag

SEQ ID NO: 2016472 - RNA, 19 nt, Artificial Sequence
  Description of Artificial Sequence: Synthetic oligonucleotide
  Sense strand starting at position 526 of SEQ ID NO: 1881080
agugcuguguucuagcgau

SEQ ID NO: 2016473 - RNA, 19 nt, Artificial Sequence
  Description of Artificial Sequence: Synthetic oligonucleotide
  Antisense strand to SEQ ID NO: 2016472
aucgcuagaacacagcacu

SEQ ID NO: 2016474 - RNA, 19 nt, Artificial Sequence
  Description of Artificial Sequence: Synthetic oligonucleotide
  Sense strand starting at position 538 of SEQ ID NO: 1881080
uagcgauccucugaugaca

SEQ ID NO: 2016475 - RNA, 19 nt, Artificial Sequence
  Description of Artificial Sequence: Synthetic oligonucleotide
  Antisense strand to SEQ ID NO: 2016474
ugucaucagaggaucgcua

SEQ ID NO: 2016476 - RNA, 19 nt, Artificial Sequence
  Description of Artificial Sequence: Synthetic oligonucleotide
  Sense strand starting at position 540 of SEQ ID NO: 1881080
gcgauccucugaugacaca

SEQ ID NO: 2016477 - RNA, 19 nt, Artificial Sequence
  Description of Artificial Sequence: Synthetic oligonucleotide
  Antisense strand to SEQ ID NO: 2016476
ugugucaucagaggaucgc

SEQ ID NO: 2016478 - RNA, 19 nt, Artificial Sequence
  Description of Artificial Sequence: Synthetic oligonucleotide
  Sense strand starting at position 560 of SEQ ID NO: 1881080
gaaguaauaggcugcguga

SEQ ID NO: 2016479 - RNA, 19 nt, Artificial Sequence
  Description of Artificial Sequence: Synthetic oligonucleotide
  Antisense strand to SEQ ID NO: 2016478
ucacgcagccuauuacuuc

SEQ ID NO: 2016480 - RNA, 19 nt, Artificial Sequence
  Description of Artificial Sequence: Synthetic oligonucleotide
  Sense strand starting at position 562 of SEQ ID NO: 1881080
aguaauaggcugcgugacu

SEQ ID NO: 2016481 - RNA, 19 nt, Artificial Sequence
  Description of Artificial Sequence: Synthetic oligonucleotide
  Antisense strand to SEQ ID NO: 2016480
agucacgcagccuauuacu

SEQ ID NO: 2016482 - RNA, 19 nt, Artificial Sequence
  Description of Artificial Sequence: Synthetic oligonucleotide
  Sense strand starting at position 827 of SEQ ID NO: 1881080
cccagcuguccacaugaga

SEQ ID NO: 2016483 - RNA, 19 nt, Artificial Sequence
  Description of Artificial Sequence: Synthetic oligonucleotide
  Antisense strand to SEQ ID NO: 2016482
ucucauguggacagcuggg

SEQ ID NO: 2016484 - RNA, 19 nt, Artificial Sequence
  Description of Artificial Sequence: Synthetic oligonucleotide
  Sense strand starting at position 943 of SEQ ID NO: 1881080
aggguuggcgccuguagaa

SEQ ID NO: 2016485 - RNA, 19 nt, Artificial Sequence
  Description of Artificial Sequence: Synthetic oligonucleotide
  Antisense strand to SEQ ID NO: 2016484
uucuacaggcgccaacccu

SEQ ID NO: 2016486 - RNA, 19 nt, Artificial Sequence
  Description of Artificial Sequence: Synthetic oligonucleotide
  Sense strand starting at position 1284 of SEQ ID NO: 1881080
aucccuuacugauggacau

SEQ ID NO: 2016487 - RNA, 19 nt, Artificial Sequence
  Description of Artificial Sequence: Synthetic oligonucleotide
  Antisense strand to SEQ ID NO: 2016486
auguccaucaguaagggau

SEQ ID NO: 2016488 - RNA, 19 nt, Artificial Sequence
  Description of Artificial Sequence: Synthetic oligonucleotide
  Sense strand starting at position 1335 of SEQ ID NO: 1881080
ugaagaacuuuguggcaaa

SEQ ID NO: 2016489 - RNA, 19 nt, Artificial Sequence
  Description of Artificial Sequence: Synthetic oligonucleotide
  Antisense strand to SEQ ID NO: 2016488
uuugccacaaaguucuuca

SEQ ID NO: 2016490 - RNA, 19 nt, Artificial Sequence
  Description of Artificial Sequence: Synthetic oligonucleotide
  Sense strand starting at position 1336 of SEQ ID NO: 1881080
gaagaacuuuguggcaaac

SEQ ID NO: 2016491 - RNA, 19 nt, Artificial Sequence
  Description of Artificial Sequence: Synthetic oligonucleotide
  Antisense strand to SEQ ID NO: 2016490
guuugccacaaaguucuuc

SEQ ID NO: 2016492 - RNA, 19 nt, Artificial Sequence
  Description of Artificial Sequence: Synthetic oligonucleotide
  Sense strand starting at position 1419 of SEQ ID NO: 1881080
ugaggcagauucuagaauu

SEQ ID NO: 2016493 - RNA, 19 nt, Artificial Sequence
  Description of Artificial Sequence: Synthetic oligonucleotide
  Antisense strand to SEQ ID NO: 2016492
aauucuagaaucugccuca

SEQ ID NO: 2016494 - RNA, 19 nt, Artificial Sequence
  Description of Artificial Sequence: Synthetic oligonucleotide
  Sense strand starting at position 1429 of SEQ ID NO: 1881080
ucuagaauugcugagucua

SEQ ID NO: 2016495 - RNA, 19 nt, Artificial Sequence
  Description of Artificial Sequence: Synthetic oligonucleotide
  Antisense strand to SEQ ID NO: 2016494
uagacucagcaauucuaga

SEQ ID NO: 2016496 - RNA, 19 nt, Artificial Sequence
  Description of Artificial Sequence: Synthetic oligonucleotide
  Sense strand starting at position 1431 of SEQ ID NO: 1881080
uagaauugcugagucuaag

SEQ ID NO: 2016497 - RNA, 19 nt, Artificial Sequence
  Description of Artificial Sequence: Synthetic oligonucleotide
  Antisense strand to SEQ ID NO: 2016496
cuuagacucagcaauucua

SEQ ID NO: 2016498 - RNA, 19 nt, Artificial Sequence
  Description of Artificial Sequence: Synthetic oligonucleotide
  Sense strand starting at position 1437 of SEQ ID NO: 1881080
ugcugagucuaagggcaaa

SEQ ID NO: 2016499 - RNA, 19 nt, Artificial Sequence
  Description of Artificial Sequence: Synthetic oligonucleotide
  Antisense strand to SEQ ID NO: 2016498
uuugcccuuagacucagca

SEQ ID NO: 2016500 - RNA, 19 nt, Artificial Sequence
  Description of Artificial Sequence: Synthetic oligonucleotide
  Sense strand starting at position 1449 of SEQ ID NO: 1881080
gggcaaaugccaugucguu

SEQ ID NO: 2016501 - RNA, 19 nt, Artificial Sequence
  Description of Artificial Sequence: Synthetic oligonucleotide
  Antisense strand to SEQ ID NO: 2016500
aacgacauggcauuugccc

SEQ ID NO: 2016502 - RNA, 19 nt, Artificial Sequence
  Description of Artificial Sequence: Synthetic oligonucleotide
  Sense strand starting at position 1450 of SEQ ID NO: 1881080
ggcaaaugccaugucguuu

SEQ ID NO: 2016503 - RNA, 19 nt, Artificial Sequence
  Description of Artificial Sequence: Synthetic oligonucleotide
  Antisense strand to SEQ ID NO: 2016502
aaacgacauggcauuugcc

SEQ ID NO: 2016504 - RNA, 19 nt, Artificial Sequence
  Description of Artificial Sequence: Synthetic oligonucleotide
  Sense strand starting at position 1528 of SEQ ID NO: 1881080
guaugagaguccuuguacc

SEQ ID NO: 2016505 - RNA, 19 nt, Artificial Sequence
  Description of Artificial Sequence: Synthetic oligonucleotide
  Antisense strand to SEQ ID NO: 2016504
gguacaaggacucucauac

SEQ ID NO: 2016506 - RNA, 19 nt, Artificial Sequence
  Description of Artificial Sequence: Synthetic oligonucleotide
  Sense strand starting at position 1595 of SEQ ID NO: 1881080
ucacacaguugagaaauuu

SEQ ID NO: 2016507 - RNA, 19 nt, Artificial Sequence
  Description of Artificial Sequence: Synthetic oligonucleotide
  Antisense strand to SEQ ID NO: 2016506
aaauuucucaacuguguga

SEQ ID NO: 2016508 - RNA, 19 nt, Artificial Sequence
  Description of Artificial Sequence: Synthetic oligonucleotide
  Sense strand starting at position 2292 of SEQ ID NO: 1881080
aagacucugucucgaccaa

SEQ ID NO: 2016509 - RNA, 19 nt, Artificial Sequence
  Description of Artificial Sequence: Synthetic oligonucleotide
  Antisense strand to SEQ ID NO: 2016508
uuggucgagacagagucuu

SEQ ID NO: 2016510 - RNA, 19 nt, Artificial Sequence
  Description of Artificial Sequence: Synthetic oligonucleotide
  Sense strand starting at position 2296 of SEQ ID NO: 1881080
cucugucucgaccaagaaa

SEQ ID NO: 2016511 - RNA, 19 nt, Artificial Sequence
  Description of Artificial Sequence: Synthetic oligonucleotide
  Antisense strand to SEQ ID NO: 2016510
uuucuuggucgagacagag

SEQ ID NO: 2016512 - RNA, 19 nt, Artificial Sequence
  Description of Artificial Sequence: Synthetic oligonucleotide
  Sense strand starting at position 2494 of SEQ ID NO: 1881080
ggaaauaacugucauugcu

SEQ ID NO: 2016513 - RNA, 19 nt, Artificial Sequence
  Description of Artificial Sequence: Synthetic oligonucleotide
  Antisense strand to SEQ ID NO: 2016512
agcaaugacaguuauuucc

SEQ ID NO: 2016514 - RNA, 19 nt, Artificial Sequence
  Description of Artificial Sequence: Synthetic oligonucleotide
  Sense strand starting at position 2581 of SEQ ID NO: 1881080
gguuauuuaaaccggcagu

SEQ ID NO: 2016515 - RNA, 19 nt, Artificial Sequence
  Description of Artificial Sequence: Synthetic oligonucleotide
  Antisense strand to SEQ ID NO: 2016514
acugccgguuuaaauaacc

SEQ ID NO: 2016516 - RNA, 19 nt, Artificial Sequence
  Description of Artificial Sequence: Synthetic oligonucleotide
  Sense strand starting at position 2692 of SEQ ID NO: 1881080
cucagaucaucaguauuag

SEQ ID NO: 2016517 - RNA, 19 nt, Artificial Sequence
  Description of Artificial Sequence: Synthetic oligonucleotide
  Antisense strand to SEQ ID NO: 2016516
cuaauacugaugaucugag

SEQ ID NO: 2016518 - RNA, 19 nt, Artificial Sequence
  Description of Artificial Sequence: Synthetic oligonucleotide
  Sense strand starting at position 2724 of SEQ ID NO: 1881080
gggcauaaccuagauccuu

SEQ ID NO: 2016519 - RNA, 19 nt, Artificial Sequence
  Description of Artificial Sequence: Synthetic oligonucleotide
  Antisense strand to SEQ ID NO: 2016518
aaggaucuagguuaugccc

SEQ ID NO: 2016520 - RNA, 19 nt, Artificial Sequence
  Description of Artificial Sequence: Synthetic oligonucleotide
  Sense strand starting at position 2763 of SEQ ID NO: 1881080
ggauuccacuccuaugaga

SEQ ID NO: 2016521 - RNA, 19 nt, Artificial Sequence
  Description of Artificial Sequence: Synthetic oligonucleotide
  Antisense strand to SEQ ID NO: 2016520
ucucauaggaguggaaucc

SEQ ID NO: 2016522 - RNA, 19 nt, Artificial Sequence
  Description of Artificial Sequence: Synthetic oligonucleotide
  Sense strand starting at position 2843 of SEQ ID NO: 1881080
cggagcucacaauaaugau

SEQ ID NO: 2016523 - RNA, 19 nt, Artificial Sequence
  Description of Artificial Sequence: Synthetic oligonucleotide
  Antisense strand to SEQ ID NO: 2016522
aucauuauugugagcuccg

SEQ ID NO: 2016524 - RNA, 19 nt, Artificial Sequence
  Description of Artificial Sequence: Synthetic oligonucleotide
  Sense strand starting at position 2875 of SEQ ID NO: 1881080
gagcucacacaguaaugau

SEQ ID NO: 2016525 - RNA, 19 nt, Artificial Sequence
  Description of Artificial Sequence: Synthetic oligonucleotide
  Antisense strand to SEQ ID NO: 2016524
aucauuacugugugagcuc

SEQ ID NO: 2016526 - RNA, 19 nt, Artificial Sequence
  Description of Artificial Sequence: Synthetic oligonucleotide
  Sense strand starting at position 196 of SEQ ID NO: 1881081
ucacuugauuuguuugcua

SEQ ID NO: 2016527 - RNA, 19 nt, Artificial Sequence
  Description of Artificial Sequence: Synthetic oligonucleotide
  Antisense strand to SEQ ID NO: 2016526
uagcaaacaaaucaaguga

SEQ ID NO: 2016528 - RNA, 19 nt, Artificial Sequence
  Description of Artificial Sequence: Synthetic oligonucleotide
  Sense strand starting at position 198 of SEQ ID NO: 1881081
acuugauuuguuugcuauu

SEQ ID NO: 2016529 - RNA, 19 nt, Artificial Sequence
  Description of Artificial Sequence: Synthetic oligonucleotide
  Antisense strand to SEQ ID NO: 2016528
aauagcaaacaaaucaagu

SEQ ID NO: 2016530 - RNA, 19 nt, Artificial Sequence
  Description of Artificial Sequence: Synthetic oligonucleotide
  Sense strand starting at position 199 of SEQ ID NO: 1881081
cuugauuuguuugcuauua

SEQ ID NO: 2016531 - RNA, 19 nt, Artificial Sequence
  Description of Artificial Sequence: Synthetic oligonucleotide
  Antisense strand to SEQ ID NO: 2016530
uaauagcaaacaaaucaag

SEQ ID NO: 2016532 - RNA, 19 nt, Artificial Sequence
  Description of Artificial Sequence: Synthetic oligonucleotide
  Sense strand starting at position 319 of SEQ ID NO: 1881081
cugacauuagcaggauuaa

SEQ ID NO: 2016533 - RNA, 19 nt, Artificial Sequence
  Description of Artificial Sequence: Synthetic oligonucleotide
  Antisense strand to SEQ ID NO: 2016532
uuaauccugcuaaugucag

SEQ ID NO: 2016534 - RNA, 19 nt, Artificial Sequence
  Description of Artificial Sequence: Synthetic oligonucleotide
  Sense strand starting at position 548 of SEQ ID NO: 1881081
ccauauaaucugggauuau

SEQ ID NO: 2016535 - RNA, 19 nt, Artificial Sequence
  Description of Artificial Sequence: Synthetic oligonucleotide
  Antisense strand to SEQ ID NO: 2016534
auaaucccagauuauaugg

SEQ ID NO: 2016536 - RNA, 19 nt, Artificial Sequence
  Description of Artificial Sequence: Synthetic oligonucleotide
  Sense strand starting at position 755 of SEQ ID NO: 1881081
aaaugaauaugucuggauu

SEQ ID NO: 2016537 - RNA, 19 nt, Artificial Sequence
  Description of Artificial Sequence: Synthetic oligonucleotide
  Antisense strand to SEQ ID NO: 2016536
aauccagacauauucauuu

SEQ ID NO: 2016538 - RNA, 19 nt, Artificial Sequence
  Description of Artificial Sequence: Synthetic oligonucleotide
  Sense strand starting at position 756 of SEQ ID NO: 1881081
aaugaauaugucuggauuc

SEQ ID NO: 2016539 - RNA, 19 nt, Artificial Sequence
  Description of Artificial Sequence: Synthetic oligonucleotide
  Antisense strand to SEQ ID NO: 2016538
gaauccagacauauucauu

SEQ ID NO: 2016540 - RNA, 19 nt, Artificial Sequence
  Description of Artificial Sequence: Synthetic oligonucleotide
  Sense strand starting at position 758 of SEQ ID NO: 1881081
ugaauaugucuggauucuu

SEQ ID NO: 2016541 - RNA, 19 nt, Artificial Sequence
  Description of Artificial Sequence: Synthetic oligonucleotide
  Antisense strand to SEQ ID NO: 2016540
aagaauccagacauauuca

SEQ ID NO: 2016542 - RNA, 19 nt, Artificial Sequence
  Description of Artificial Sequence: Synthetic oligonucleotide
  Sense strand starting at position 763 of SEQ ID NO: 1881081
augucuggauucuuaucau

SEQ ID NO: 2016543 - RNA, 19 nt, Artificial Sequence
  Description of Artificial Sequence: Synthetic oligonucleotide
  Antisense strand to SEQ ID NO: 2016542
augauaagaauccagacau

SEQ ID NO: 2016544 - RNA, 19 nt, Artificial Sequence
  Description of Artificial Sequence: Synthetic oligonucleotide
  Sense strand starting at position 769 of SEQ ID NO: 1881081
ggauucuuaucauugacug

SEQ ID NO: 2016545 - RNA, 19 nt, Artificial Sequence
  Description of Artificial Sequence: Synthetic oligonucleotide
  Antisense strand to SEQ ID NO: 2016544
cagucaaugauaagaaucc

SEQ ID NO: 2016546 - RNA, 19 nt, Artificial Sequence
  Description of Artificial Sequence: Synthetic oligonucleotide
  Sense strand starting at position 813 of SEQ ID NO: 1881081
gguagcauucuuuacuaua

SEQ ID NO: 2016547 - RNA, 19 nt, Artificial Sequence
  Description of Artificial Sequence: Synthetic oligonucleotide
  Antisense strand to SEQ ID NO: 2016546
uauaguaaagaaugcuacc

SEQ ID NO: 2016548 - RNA, 19 nt, Artificial Sequence
  Description of Artificial Sequence: Synthetic oligonucleotide
  Sense strand starting at position 894 of SEQ ID NO: 1881081
guauacagacauuagucau

SEQ ID NO: 2016549 - RNA, 19 nt, Artificial Sequence
  Description of Artificial Sequence: Synthetic oligonucleotide
  Antisense strand to SEQ ID NO: 2016548
augacuaaugucuguauac

SEQ ID NO: 2016550 - RNA, 19 nt, Artificial Sequence
  Description of Artificial Sequence: Synthetic oligonucleotide
  Sense strand starting at position 900 of SEQ ID NO: 1881081
agacauuagucaucuucca

SEQ ID NO: 2016551 - RNA, 19 nt, Artificial Sequence
  Description of Artificial Sequence: Synthetic oligonucleotide
  Antisense strand to SEQ ID NO: 2016550
uggaagaugacuaaugucu

SEQ ID NO: 2016552 - RNA, 19 nt, Artificial Sequence
  Description of Artificial Sequence: Synthetic oligonucleotide
  Sense strand starting at position 946 of SEQ ID NO: 1881081
gguugcauauuuguuuaaa

SEQ ID NO: 2016553 - RNA, 19 nt, Artificial Sequence
  Description of Artificial Sequence: Synthetic oligonucleotide
  Antisense strand to SEQ ID NO: 2016552
uuuaaacaaauaugcaacc

SEQ ID NO: 2016554 - RNA, 19 nt, Artificial Sequence
  Description of Artificial Sequence: Synthetic oligonucleotide
  Sense strand starting at position 978 of SEQ ID NO: 1881081
ccugaaagcagugauagua

SEQ ID NO: 2016555 - RNA, 19 nt, Artificial Sequence
  Description of Artificial Sequence: Synthetic oligonucleotide
  Antisense strand to SEQ ID NO: 2016554
uacuaucacugcuuucagg

SEQ ID NO: 2016556 - RNA, 19 nt, Artificial Sequence
  Description of Artificial Sequence: Synthetic oligonucleotide
  Sense strand starting at position 1036 of SEQ ID NO: 1881081
gaaagcagauguuccauaa

SEQ ID NO: 2016557 - RNA, 19 nt, Artificial Sequence
  Description of Artificial Sequence: Synthetic oligonucleotide
  Antisense strand to SEQ ID NO: 2016556
uuauggaacaucugcuuuc

SEQ ID NO: 2016558 - RNA, 19 nt, Artificial Sequence
  Description of Artificial Sequence: Synthetic oligonucleotide
  Sense strand starting at position 1040 of SEQ ID NO: 1881081
gcagauguuccauaaauga

SEQ ID NO: 2016559 - RNA, 19 nt, Artificial Sequence
  Description of Artificial Sequence: Synthetic oligonucleotide
  Antisense strand to SEQ ID NO: 2016558
ucauuuauggaacaucugc

SEQ ID NO: 2016560 - RNA, 19 nt, Artificial Sequence
  Description of Artificial Sequence: Synthetic oligonucleotide
  Sense strand starting at position 1049 of SEQ ID NO: 1881081
ccauaaaugacuuaggcga

SEQ ID NO: 2016561 - RNA, 19 nt, Artificial Sequence
  Description of Artificial Sequence: Synthetic oligonucleotide
  Antisense strand to SEQ ID NO: 2016560
ucgccuaagucauuuaugg

SEQ ID NO: 2016562 - RNA, 19 nt, Artificial Sequence
  Description of Artificial Sequence: Synthetic oligonucleotide
  Sense strand starting at position 1063 of SEQ ID NO: 1881081
ggcgaagaacaugguucau

SEQ ID NO: 2016563 - RNA, 19 nt, Artificial Sequence
  Description of Artificial Sequence: Synthetic oligonucleotide
  Antisense strand to SEQ ID NO: 2016562
augaaccauguucuucgcc

SEQ ID NO: 2016564 - RNA, 19 nt, Artificial Sequence
  Description of Artificial Sequence: Synthetic oligonucleotide
  Sense strand starting at position 1078 of SEQ ID NO: 1881081
ucauuugugccggagccua

SEQ ID NO: 2016565 - RNA, 19 nt, Artificial Sequence
  Description of Artificial Sequence: Synthetic oligonucleotide
  Antisense strand to SEQ ID NO: 2016564
uaggcuccggcacaaauga

SEQ ID NO: 2016566 - RNA, 19 nt, Artificial Sequence
  Description of Artificial Sequence: Synthetic oligonucleotide
  Sense strand starting at position 1177 of SEQ ID NO: 1881081
augauuguucaaggugaag

SEQ ID NO: 2016567 - RNA, 19 nt, Artificial Sequence
  Description of Artificial Sequence: Synthetic oligonucleotide
  Antisense strand to SEQ ID NO: 2016566
cuucaccuugaacaaucau

SEQ ID NO: 2016568 - RNA, 19 nt, Artificial Sequence
  Description of Artificial Sequence: Synthetic oligonucleotide
  Sense strand starting at position 1191 of SEQ ID NO: 1881081
ugaagaaauugcuuaccac

SEQ ID NO: 2016569 - RNA, 19 nt, Artificial Sequence
  Description of Artificial Sequence: Synthetic oligonucleotide
  Antisense strand to SEQ ID NO: 2016568
gugguaagcaauuucuuca

SEQ ID NO: 2016570 - RNA, 19 nt, Artificial Sequence
  Description of Artificial Sequence: Synthetic oligonucleotide
  Sense strand starting at position 1248 of SEQ ID NO: 1881081
guccucaugccugaauuau

SEQ ID NO: 2016571 - RNA, 19 nt, Artificial Sequence
  Description of Artificial Sequence: Synthetic oligonucleotide
  Antisense strand to SEQ ID NO: 2016570
auaauucaggcaugaggac

SEQ ID NO: 2016572 - RNA, 19 nt, Artificial Sequence
  Description of Artificial Sequence: Synthetic oligonucleotide
  Sense strand starting at position 1318 of SEQ ID NO: 1881081
uguuccucaccugaaaguu

SEQ ID NO: 2016573 - RNA, 19 nt, Artificial Sequence
  Description of Artificial Sequence: Synthetic oligonucleotide
  Antisense strand to SEQ ID NO: 2016572
aacuuucaggugaggaaca

SEQ ID NO: 2016574 - RNA, 19 nt, Artificial Sequence
  Description of Artificial Sequence: Synthetic oligonucleotide
  Sense strand starting at position 1326 of SEQ ID NO: 1881081
accugaaaguuucuagaca

SEQ ID NO: 2016575 - RNA, 19 nt, Artificial Sequence
  Description of Artificial Sequence: Synthetic oligonucleotide
  Antisense strand to SEQ ID NO: 2016574
ugucuagaaacuuucaggu

SEQ ID NO: 2016576 - RNA, 19 nt, Artificial Sequence
  Description of Artificial Sequence: Synthetic oligonucleotide
  Sense strand starting at position 1345 of SEQ ID NO: 1881081
ggaagugagcacugacaga

SEQ ID NO: 2016577 - RNA, 19 nt, Artificial Sequence
  Description of Artificial Sequence: Synthetic oligonucleotide
  Antisense strand to SEQ ID NO: 2016576
ucugucagugcucacuucc

SEQ ID NO: 2016578 - RNA, 19 nt, Artificial Sequence
  Description of Artificial Sequence: Synthetic oligonucleotide
  Sense strand starting at position 1654 of SEQ ID NO: 1881081
accagaucagauugguaca

SEQ ID NO: 2016579 - RNA, 19 nt, Artificial Sequence
  Description of Artificial Sequence: Synthetic oligonucleotide
  Antisense strand to SEQ ID NO: 2016578
uguaccaaucugaucuggu

SEQ ID NO: 2016580 - RNA, 19 nt, Artificial Sequence
  Description of Artificial Sequence: Synthetic oligonucleotide
  Sense strand starting at position 1656 of SEQ ID NO: 1881081
cagaucagauugguacaau

SEQ ID NO: 2016581 - RNA, 19 nt, Artificial Sequence
  Description of Artificial Sequence: Synthetic oligonucleotide
  Antisense strand to SEQ ID NO: 2016580
auuguaccaaucugaucug

SEQ ID NO: 2016582 - RNA, 19 nt, Artificial Sequence
  Description of Artificial Sequence: Synthetic oligonucleotide
  Sense strand starting at position 1659 of SEQ ID NO: 1881081
aucagauugguacaauguu

SEQ ID NO: 2016583 - RNA, 19 nt, Artificial Sequence
  Description of Artificial Sequence: Synthetic oligonucleotide
  Antisense strand to SEQ ID NO: 2016582
aacauuguaccaaucugau

SEQ ID NO: 2016584 - RNA, 19 nt, Artificial Sequence
  Description of Artificial Sequence: Synthetic oligonucleotide
  Sense strand starting at position 1754 of SEQ ID NO: 1881081
gcuccauauuuguuuguuu

SEQ ID NO: 2016585 - RNA, 19 nt, Artificial Sequence
  Description of Artificial Sequence: Synthetic oligonucleotide
  Antisense strand to SEQ ID NO: 2016584
aaacaaacaaauauggagc

SEQ ID NO: 2016586 - RNA, 19 nt, Artificial Sequence
  Description of Artificial Sequence: Synthetic oligonucleotide
  Sense strand starting at position 2032 of SEQ ID NO: 1881081
guuccauauuucuaaagga

SEQ ID NO: 2016587 - RNA, 19 nt, Artificial Sequence
  Description of Artificial Sequence: Synthetic oligonucleotide
  Antisense strand to SEQ ID NO: 2016586
uccuuuagaaauauggaac

SEQ ID NO: 2016588 - RNA, 19 nt, Artificial Sequence
  Description of Artificial Sequence: Synthetic oligonucleotide
  Sense strand starting at position 2292 of SEQ ID NO: 1881081
guaaccaauuuguuauguu

SEQ ID NO: 2016589 - RNA, 19 nt, Artificial Sequence
  Description of Artificial Sequence: Synthetic oligonucleotide
  Antisense strand to SEQ ID NO: 2016588
aacauaacaaauugguuac

SEQ ID NO: 2016590 - RNA, 19 nt, Artificial Sequence
  Description of Artificial Sequence: Synthetic oligonucleotide
  Sense strand starting at position 2414 of SEQ ID NO: 1881081
agauauguucagugauggu

SEQ ID NO: 2016591 - RNA, 19 nt, Artificial Sequence
  Description of Artificial Sequence: Synthetic oligonucleotide
  Antisense strand to SEQ ID NO: 2016590
accaucacugaacauaucu

SEQ ID NO: 2016592 - RNA, 19 nt, Artificial Sequence
  Description of Artificial Sequence: Synthetic oligonucleotide
  Sense strand starting at position 2865 of SEQ ID NO: 1881081
uuuauuucuuagggauuuc

SEQ ID NO: 2016593 - RNA, 19 nt, Artificial Sequence
  Description of Artificial Sequence: Synthetic oligonucleotide
  Antisense strand to SEQ ID NO: 2016592
gaaaucccuaagaaauaaa

SEQ ID NO: 2016594 - RNA, 19 nt, Artificial Sequence
  Description of Artificial Sequence: Synthetic oligonucleotide
  Sense strand starting at position 2929 of SEQ ID NO: 1881081
aggugaugcauauagauuc

SEQ ID NO: 2016595 - RNA, 19 nt, Artificial Sequence
  Description of Artificial Sequence: Synthetic oligonucleotide
  Antisense strand to SEQ ID NO: 2016594
gaaucuauaugcaucaccu

SEQ ID NO: 2016596 - RNA, 19 nt, Artificial Sequence
  Description of Artificial Sequence: Synthetic oligonucleotide
  Sense strand starting at position 2995 of SEQ ID NO: 1881081
uuuaguauggaaugacuuu

SEQ ID NO: 2016597 - RNA, 19 nt, Artificial Sequence
  Description of Artificial Sequence: Synthetic oligonucleotide
  Antisense strand to SEQ ID NO: 2016596
aaagucauuccauacuaaa

SEQ ID NO: 2016598 - RNA, 19 nt, Artificial Sequence
  Description of Artificial Sequence: Synthetic oligonucleotide
  Sense strand starting at position 3059 of SEQ ID NO: 1881081
gguccauuugcuggaugca

SEQ ID NO: 2016599 - RNA, 19 nt, Artificial Sequence
  Description of Artificial Sequence: Synthetic oligonucleotide
  Antisense strand to SEQ ID NO: 2016598
ugcauccagcaaauggacc

SEQ ID NO: 2016600 - RNA, 19 nt, Artificial Sequence
  Description of Artificial Sequence: Synthetic oligonucleotide
  Sense strand starting at position 3408 of SEQ ID NO: 1881081
cugaaaugauuacaaagaa

SEQ ID NO: 2016601 - RNA, 19 nt, Artificial Sequence
  Description of Artificial Sequence: Synthetic oligonucleotide
  Antisense strand to SEQ ID NO: 2016600
uucuuuguaaucauuucag

SEQ ID NO: 2016602 - RNA, 19 nt, Artificial Sequence
  Description of Artificial Sequence: Synthetic oligonucleotide
  Sense strand starting at position 3481 of SEQ ID NO: 1881081
agguuuagccuuuagggaa

SEQ ID NO: 2016603 - RNA, 19 nt, Artificial Sequence
  Description of Artificial Sequence: Synthetic oligonucleotide
  Antisense strand to SEQ ID NO: 2016602
uucccuaaaggcuaaaccu

SEQ ID NO: 2016604 - RNA, 19 nt, Artificial Sequence
  Description of Artificial Sequence: Synthetic oligonucleotide
  Sense strand starting at position 3822 of SEQ ID NO: 1881081
cuacuuugggaccgagaaa

SEQ ID NO: 2016605 - RNA, 19 nt, Artificial Sequence
  Description of Artificial Sequence: Synthetic oligonucleotide
  Antisense strand to SEQ ID NO: 2016604
uuucucggucccaaaguag

SEQ ID NO: 2016606 - RNA, 19 nt, Artificial Sequence
  Description of Artificial Sequence: Synthetic oligonucleotide
  Sense strand starting at position 359 of SEQ ID NO: 1881082
gcacuagacccaugaaaga

SEQ ID NO: 2016607 - RNA, 19 nt, Artificial Sequence
  Description of Artificial Sequence: Synthetic oligonucleotide
  Antisense strand to SEQ ID NO: 2016606
ucuuucaugggucuagugc

SEQ ID NO: 2016608 - RNA, 19 nt, Artificial Sequence
  Description of Artificial Sequence: Synthetic oligonucleotide
  Sense strand starting at position 448 of SEQ ID NO: 1881082
ccacauggauuugauuauu

SEQ ID NO: 2016609 - RNA, 19 nt, Artificial Sequence
  Description of Artificial Sequence: Synthetic oligonucleotide
  Antisense strand to SEQ ID NO: 2016608
aauaaucaaauccaugugg

SEQ ID NO: 2016610 - RNA, 19 nt, Artificial Sequence
  Description of Artificial Sequence: Synthetic oligonucleotide
  Sense strand starting at position 569 of SEQ ID NO: 1881082
uaacuugcaguugauagua

SEQ ID NO: 2016611 - RNA, 19 nt, Artificial Sequence
  Description of Artificial Sequence: Synthetic oligonucleotide
  Antisense strand to SEQ ID NO: 2016610
uacuaucaacugcaaguua

SEQ ID NO: 2016612 - RNA, 19 nt, Artificial Sequence
  Description of Artificial Sequence: Synthetic oligonucleotide
  Sense strand starting at position 577 of SEQ ID NO: 1881082
aguugauaguacuugaaau

SEQ ID NO: 2016613 - RNA, 19 nt, Artificial Sequence
  Description of Artificial Sequence: Synthetic oligonucleotide
  Antisense strand to SEQ ID NO: 2016612
auuucaaguacuaucaacu

SEQ ID NO: 2016614 - RNA, 19 nt, Artificial Sequence
  Description of Artificial Sequence: Synthetic oligonucleotide
  Sense strand starting at position 578 of SEQ ID NO: 1881082
guugauaguacuugaaaug

SEQ ID NO: 2016615 - RNA, 19 nt, Artificial Sequence
  Description of Artificial Sequence: Synthetic oligonucleotide
  Antisense strand to SEQ ID NO: 2016614
cauuucaaguacuaucaac

SEQ ID NO: 2016616 - RNA, 19 nt, Artificial Sequence
  Description of Artificial Sequence: Synthetic oligonucleotide
  Sense strand starting at position 579 of SEQ ID NO: 1881082
uugauaguacuugaaaugu

SEQ ID NO: 2016617 - RNA, 19 nt, Artificial Sequence
  Description of Artificial Sequence: Synthetic oligonucleotide
  Antisense strand to SEQ ID NO: 2016616
acauuucaaguacuaucaa

SEQ ID NO: 2016618 - RNA, 19 nt, Artificial Sequence
  Description of Artificial Sequence: Synthetic oligonucleotide
  Sense strand starting at position 708 of SEQ ID NO: 1881082
augcaaacuugaucucaga

SEQ ID NO: 2016619 - RNA, 19 nt, Artificial Sequence
  Description of Artificial Sequence: Synthetic oligonucleotide
  Antisense strand to SEQ ID NO: 2016618
ucugagaucaaguuugcau

SEQ ID NO: 2016620 - RNA, 19 nt, Artificial Sequence
  Description of Artificial Sequence: Synthetic oligonucleotide
  Sense strand starting at position 1063 of SEQ ID NO: 1881082
agauguugccagcagauau

SEQ ID NO: 2016621 - RNA, 19 nt, Artificial Sequence
  Description of Artificial Sequence: Synthetic oligonucleotide
  Antisense strand to SEQ ID NO: 2016620
auaucugcuggcaacaucu

SEQ ID NO: 2016622 - RNA, 19 nt, Artificial Sequence
  Description of Artificial Sequence: Synthetic oligonucleotide
  Sense strand starting at position 1186 of SEQ ID NO: 1881082
gaaguaguuaaccagguga

SEQ ID NO: 2016623 - RNA, 19 nt, Artificial Sequence
  Description of Artificial Sequence: Synthetic oligonucleotide
  Antisense strand to SEQ ID NO: 2016622
ucaccugguuaacuacuuc

SEQ ID NO: 2016624 - RNA, 19 nt, Artificial Sequence
  Description of Artificial Sequence: Synthetic oligonucleotide
  Sense strand starting at position 1199 of SEQ ID NO: 1881082
aggugaucaauagguggaa

SEQ ID NO: 2016625 - RNA, 19 nt, Artificial Sequence
  Description of Artificial Sequence: Synthetic oligonucleotide
  Antisense strand to SEQ ID NO: 2016624
uuccaccuauugaucaccu

SEQ ID NO: 2016626 - RNA, 19 nt, Artificial Sequence
  Description of Artificial Sequence: Synthetic oligonucleotide
  Sense strand starting at position 1226 of SEQ ID NO: 1881082
guagaaauaugaguacuuu

SEQ ID NO: 2016627 - RNA, 19 nt, Artificial Sequence
  Description of Artificial Sequence: Synthetic oligonucleotide
  Antisense strand to SEQ ID NO: 2016626
aaaguacucauauuucuac

SEQ ID NO: 2016628 - RNA, 19 nt, Artificial Sequence
  Description of Artificial Sequence: Synthetic oligonucleotide
  Sense strand starting at position 1232 of SEQ ID NO: 1881082
auaugaguacuuuaagcag

SEQ ID NO: 2016629 - RNA, 19 nt, Artificial Sequence
  Description of Artificial Sequence: Synthetic oligonucleotide
  Antisense strand to SEQ ID NO: 2016628
cugcuuaaaguacucauau

SEQ ID NO: 2016630 - RNA, 19 nt, Artificial Sequence
  Description of Artificial Sequence: Synthetic oligonucleotide
  Sense strand starting at position 1235 of SEQ ID NO: 1881082
ugaguacuuuaagcagaug

SEQ ID NO: 2016631 - RNA, 19 nt, Artificial Sequence
  Description of Artificial Sequence: Synthetic oligonucleotide
  Antisense strand to SEQ ID NO: 2016630
caucugcuuaaaguacuca

SEQ ID NO: 2016632 - RNA, 19 nt, Artificial Sequence
  Description of Artificial Sequence: Synthetic oligonucleotide
  Sense strand starting at position 1425 of SEQ ID NO: 1881082
ugugaccuugucuaccaua

SEQ ID NO: 2016633 - RNA, 19 nt, Artificial Sequence
  Description of Artificial Sequence: Synthetic oligonucleotide
  Antisense strand to SEQ ID NO: 2016632
uaugguagacaaggucaca

SEQ ID NO: 2016634 - RNA, 19 nt, Artificial Sequence
  Description of Artificial Sequence: Synthetic oligonucleotide
  Sense strand starting at position 1463 of SEQ ID NO: 1881082
gggucuugacucugaacaa

SEQ ID NO: 2016635 - RNA, 19 nt, Artificial Sequence
  Description of Artificial Sequence: Synthetic oligonucleotide
  Antisense strand to SEQ ID NO: 2016634
uuguucagagucaagaccc

SEQ ID NO: 2016636 - RNA, 19 nt, Artificial Sequence
  Description of Artificial Sequence: Synthetic oligonucleotide
  Sense strand starting at position 1543 of SEQ ID NO: 1881082
ucauacaguccaugaagua

SEQ ID NO: 2016637 - RNA, 19 nt, Artificial Sequence
  Description of Artificial Sequence: Synthetic oligonucleotide
  Antisense strand to SEQ ID NO: 2016636
uacuucauggacuguauga

SEQ ID NO: 2016638 - RNA, 19 nt, Artificial Sequence
  Description of Artificial Sequence: Synthetic oligonucleotide
  Sense strand starting at position 1566 of SEQ ID NO: 1881082
gaagaagaccucugugguc

SEQ ID NO: 2016639 - RNA, 19 nt, Artificial Sequence
  Description of Artificial Sequence: Synthetic oligonucleotide
  Antisense strand to SEQ ID NO: 2016638
gaccacagaggucuucuuc

SEQ ID NO: 2016640 - RNA, 19 nt, Artificial Sequence
  Description of Artificial Sequence: Synthetic oligonucleotide
  Sense strand starting at position 1677 of SEQ ID NO: 1881082
acaggacagaguggugaau

SEQ ID NO: 2016641 - RNA, 19 nt, Artificial Sequence
  Description of Artificial Sequence: Synthetic oligonucleotide
  Antisense strand to SEQ ID NO: 2016640
auucaccacucuguccugu

SEQ ID NO: 2016642 - RNA, 19 nt, Artificial Sequence
  Description of Artificial Sequence: Synthetic oligonucleotide
  Sense strand starting at position 1747 of SEQ ID NO: 1881082
agaccugugcucuaaaugu

SEQ ID NO: 2016643 - RNA, 19 nt, Artificial Sequence
  Description of Artificial Sequence: Synthetic oligonucleotide
  Antisense strand to SEQ ID NO: 2016642
acauuuagagcacaggucu

SEQ ID NO: 2016644 - RNA, 19 nt, Artificial Sequence
  Description of Artificial Sequence: Synthetic oligonucleotide
  Sense strand starting at position 1993 of SEQ ID NO: 1881082
caguacuuggcugagaaug

SEQ ID NO: 2016645 - RNA, 19 nt, Artificial Sequence
  Description of Artificial Sequence: Synthetic oligonucleotide
  Antisense strand to SEQ ID NO: 2016644
cauucucagccaaguacug

SEQ ID NO: 2016646 - RNA, 19 nt, Artificial Sequence
  Description of Artificial Sequence: Synthetic oligonucleotide
  Sense strand starting at position 2090 of SEQ ID NO: 1881082
gcagaugacuguuuagaaa

SEQ ID NO: 2016647 - RNA, 19 nt, Artificial Sequence
  Description of Artificial Sequence: Synthetic oligonucleotide
  Antisense strand to SEQ ID NO: 2016646
uuucuaaacagucaucugc

SEQ ID NO: 2016648 - RNA, 19 nt, Artificial Sequence
  Description of Artificial Sequence: Synthetic oligonucleotide
  Sense strand starting at position 2113 of SEQ ID NO: 1881082
gccaauagauaaucucagu

SEQ ID NO: 2016649 - RNA, 19 nt, Artificial Sequence
  Description of Artificial Sequence: Synthetic oligonucleotide
  Antisense strand to SEQ ID NO: 2016648
acugagauuaucuauuggc

SEQ ID NO: 2016650 - RNA, 19 nt, Artificial Sequence
  Description of Artificial Sequence: Synthetic oligonucleotide
  Sense strand starting at position 2134 of SEQ ID NO: 1881082
uuacucuuggguuauuacu

SEQ ID NO: 2016651 - RNA, 19 nt, Artificial Sequence
  Description of Artificial Sequence: Synthetic oligonucleotide
  Antisense strand to SEQ ID NO: 2016650
aguaauaacccaagaguaa

SEQ ID NO: 2016652 - RNA, 19 nt, Artificial Sequence
  Description of Artificial Sequence: Synthetic oligonucleotide
  Sense strand starting at position 2142 of SEQ ID NO: 1881082
ggguuauuacuaggauagu

SEQ ID NO: 2016653 - RNA, 19 nt, Artificial Sequence
  Description of Artificial Sequence: Synthetic oligonucleotide
  Antisense strand to SEQ ID NO: 2016652
acuauccuaguaauaaccc

SEQ ID NO: 2016654 - RNA, 19 nt, Artificial Sequence
  Description of Artificial Sequence: Synthetic oligonucleotide
  Sense strand starting at position 2148 of SEQ ID NO: 1881082
uuacuaggauaguuccuaa

SEQ ID NO: 2016655 - RNA, 19 nt, Artificial Sequence
  Description of Artificial Sequence: Synthetic oligonucleotide
  Antisense strand to SEQ ID NO: 2016654
uuaggaacuauccuaguaa

SEQ ID NO: 2016656 - RNA, 19 nt, Artificial Sequence
  Description of Artificial Sequence: Synthetic oligonucleotide
  Sense strand starting at position 2151 of SEQ ID NO: 1881082
cuaggauaguuccuaaaga

SEQ ID NO: 2016657 - RNA, 19 nt, Artificial Sequence
  Description of Artificial Sequence: Synthetic oligonucleotide
  Antisense strand to SEQ ID NO: 2016656
ucuuuaggaacuauccuag

SEQ ID NO: 2016658 - RNA, 19 nt, Artificial Sequence
  Description of Artificial Sequence: Synthetic oligonucleotide
  Sense strand starting at position 2616 of SEQ ID NO: 1881082
ccaacauuggucgaucaga

SEQ ID NO: 2016659 - RNA, 19 nt, Artificial Sequence
  Description of Artificial Sequence: Synthetic oligonucleotide
  Antisense strand to SEQ ID NO: 2016658
ucugaucgaccaauguugg

SEQ ID NO: 2016660 - RNA, 19 nt, Artificial Sequence
  Description of Artificial Sequence: Synthetic oligonucleotide
  Sense strand starting at position 2731 of SEQ ID NO: 1881082
accacauauguccaugagu

SEQ ID NO: 2016661 - RNA, 19 nt, Artificial Sequence
  Description of Artificial Sequence: Synthetic oligonucleotide
  Antisense strand to SEQ ID NO: 2016660
acucauggacauauguggu

SEQ ID NO: 2016662 - RNA, 19 nt, Artificial Sequence
  Description of Artificial Sequence: Synthetic oligonucleotide
  Sense strand starting at position 2802 of SEQ ID NO: 1881082
ggaagagaagcugagcuuu

SEQ ID NO: 2016663 - RNA, 19 nt, Artificial Sequence
  Description of Artificial Sequence: Synthetic oligonucleotide
  Antisense strand to SEQ ID NO: 2016662
aaagcucagcuucucuucc

SEQ ID NO: 2016664 - RNA, 19 nt, Artificial Sequence
  Description of Artificial Sequence: Synthetic oligonucleotide
  Sense strand starting at position 2830 of SEQ ID NO: 1881082
gguagaaacuuucugaucu

SEQ ID NO: 2016665 - RNA, 19 nt, Artificial Sequence
  Description of Artificial Sequence: Synthetic oligonucleotide
  Antisense strand to SEQ ID NO: 2016664
agaucagaaaguuucuacc

SEQ ID NO: 2016666 - RNA, 19 nt, Artificial Sequence
  Description of Artificial Sequence: Synthetic oligonucleotide
  Sense strand starting at position 2871 of SEQ ID NO: 1881082
gcuccaggcccucaagaaa

SEQ ID NO: 2016667 - RNA, 19 nt, Artificial Sequence
  Description of Artificial Sequence: Synthetic oligonucleotide
  Antisense strand to SEQ ID NO: 2016666
uuucuugagggccuggagc

SEQ ID NO: 2016668 - RNA, 19 nt, Artificial Sequence
  Description of Artificial Sequence: Synthetic oligonucleotide
  Sense strand starting at position 3039 of SEQ ID NO: 1881082
gcccaaauucuuuagguua

SEQ ID NO: 2016669 - RNA, 19 nt, Artificial Sequence
  Description of Artificial Sequence: Synthetic oligonucleotide
  Antisense strand to SEQ ID NO: 2016668
uaaccuaaagaauuugggc

SEQ ID NO: 2016670 - RNA, 19 nt, Artificial Sequence
  Description of Artificial Sequence: Synthetic oligonucleotide
  Sense strand starting at position 3082 of SEQ ID NO: 1881082
agacccaucuguuugugaa

SEQ ID NO: 2016671 - RNA, 19 nt, Artificial Sequence
  Description of Artificial Sequence: Synthetic oligonucleotide
  Antisense strand to SEQ ID NO: 2016670
uucacaaacagaugggucu

SEQ ID NO: 2016672 - RNA, 19 nt, Artificial Sequence
  Description of Artificial Sequence: Synthetic oligonucleotide
  Sense strand starting at position 3105 of SEQ ID NO: 1881082
uuguguguuaaggacacaa

SEQ ID NO: 2016673 - RNA, 19 nt, Artificial Sequence
  Description of Artificial Sequence: Synthetic oligonucleotide
  Antisense strand to SEQ ID NO: 2016672
uuguguccuuaacacacaa

SEQ ID NO: 2016674 - RNA, 19 nt, Artificial Sequence
  Description of Artificial Sequence: Synthetic oligonucleotide
  Sense strand starting at position 3128 of SEQ ID NO: 1881082
auccaucagcccugaugau

SEQ ID NO: 2016675 - RNA, 19 nt, Artificial Sequence
  Description of Artificial Sequence: Synthetic oligonucleotide
  Antisense strand to SEQ ID NO: 2016674
aucaucagggcugauggau

SEQ ID NO: 2016676 - RNA, 19 nt, Artificial Sequence
  Description of Artificial Sequence: Synthetic oligonucleotide
  Sense strand starting at position 3293 of SEQ ID NO: 1881082
uguguuugccuuuauuuau

SEQ ID NO: 2016677 - RNA, 19 nt, Artificial Sequence
  Description of Artificial Sequence: Synthetic oligonucleotide
  Antisense strand to SEQ ID NO: 2016676
auaaauaaaggcaaacaca

SEQ ID NO: 2016678 - RNA, 19 nt, Artificial Sequence
  Description of Artificial Sequence: Synthetic oligonucleotide
  Sense strand starting at position 3296 of SEQ ID NO: 1881082
guuugccuuuauuuaucua

SEQ ID NO: 2016679 - RNA, 19 nt, Artificial Sequence
  Description of Artificial Sequence: Synthetic oligonucleotide
  Antisense strand to SEQ ID NO: 2016678
uagauaaauaaaggcaaac

SEQ ID NO: 2016680 - RNA, 19 nt, Artificial Sequence
  Description of Artificial Sequence: Synthetic oligonucleotide
  Sense strand starting at position 3595 of SEQ ID NO: 1881082
ggcccuagaucuccaaaug

SEQ ID NO: 2016681 - RNA, 19 nt, Artificial Sequence
  Description of Artificial Sequence: Synthetic oligonucleotide
  Antisense strand to SEQ ID NO: 2016680
cauuuggagaucuagggcc

SEQ ID NO: 2016682 - RNA, 19 nt, Artificial Sequence
  Description of Artificial Sequence: Synthetic oligonucleotide
  Sense strand starting at position 3674 of SEQ ID NO: 1881082
gggauccugaauuguacau

SEQ ID NO: 2016683 - RNA, 19 nt, Artificial Sequence
  Description of Artificial Sequence: Synthetic oligonucleotide
  Antisense strand to SEQ ID NO: 2016682
auguacaauucaggauccc

SEQ ID NO: 2016684 - RNA, 19 nt, Artificial Sequence
  Description of Artificial Sequence: Synthetic oligonucleotide
  Sense strand starting at position 3972 of SEQ ID NO: 1881082
uuaaguucucuugaagcau

SEQ ID NO: 2016685 - RNA, 19 nt, Artificial Sequence
  Description of Artificial Sequence: Synthetic oligonucleotide
  Antisense strand to SEQ ID NO: 2016684
augcuucaagagaacuuaa

SEQ ID NO: 2016686 - RNA, 19 nt, Artificial Sequence
  Description of Artificial Sequence: Synthetic oligonucleotide
  Sense strand starting at position 55 of SEQ ID NO: 1881083
ggaccaaauugagggauuu

SEQ ID NO: 2016687 - RNA, 19 nt, Artificial Sequence
  Description of Artificial Sequence: Synthetic oligonucleotide
  Antisense strand to SEQ ID NO: 2016686
aaaucccucaauuuggucc

SEQ ID NO: 2016688 - RNA, 19 nt, Artificial Sequence
  Description of Artificial Sequence: Synthetic oligonucleotide
  Sense strand starting at position 127 of SEQ ID NO: 1881083
uccauuugcugcuuaggga

SEQ ID NO: 2016689 - RNA, 19 nt, Artificial Sequence
  Description of Artificial Sequence: Synthetic oligonucleotide
  Antisense strand to SEQ ID NO: 2016688
ucccuaagcagcaaaugga

SEQ ID NO: 2016690 - RNA, 19 nt, Artificial Sequence
  Description of Artificial Sequence: Synthetic oligonucleotide
  Sense strand starting at position 397 of SEQ ID NO: 1881083
ucucaagaucauuaugugu

SEQ ID NO: 2016691 - RNA, 19 nt, Artificial Sequence
  Description of Artificial Sequence: Synthetic oligonucleotide
  Antisense strand to SEQ ID NO: 2016690
acacauaaugaucuugaga

SEQ ID NO: 2016692 - RNA, 19 nt, Artificial Sequence
  Description of Artificial Sequence: Synthetic oligonucleotide
  Sense strand starting at position 400 of SEQ ID NO: 1881083
caagaucauuaugugugaa

SEQ ID NO: 2016693 - RNA, 19 nt, Artificial Sequence
  Description of Artificial Sequence: Synthetic oligonucleotide
  Antisense strand to SEQ ID NO: 2016692
uucacacauaaugaucuug

SEQ ID NO: 2016694 - RNA, 19 nt, Artificial Sequence
  Description of Artificial Sequence: Synthetic oligonucleotide
  Sense strand starting at position 402 of SEQ ID NO: 1881083
agaucauuaugugugaaca

SEQ ID NO: 2016695 - RNA, 19 nt, Artificial Sequence
  Description of Artificial Sequence: Synthetic oligonucleotide
  Antisense strand to SEQ ID NO: 2016694
uguucacacauaaugaucu

SEQ ID NO: 2016696 - RNA, 19 nt, Artificial Sequence
  Description of Artificial Sequence: Synthetic oligonucleotide
  Sense strand starting at position 403 of SEQ ID NO: 1881083
gaucauuaugugugaacac

SEQ ID NO: 2016697 - RNA, 19 nt, Artificial Sequence
  Description of Artificial Sequence: Synthetic oligonucleotide
  Antisense strand to SEQ ID NO: 2016696
guguucacacauaaugauc

SEQ ID NO: 2016698 - RNA, 19 nt, Artificial Sequence
  Description of Artificial Sequence: Synthetic oligonucleotide
  Sense strand starting at position 410 of SEQ ID NO: 1881083
augugugaacacuagucaa

SEQ ID NO: 2016699 - RNA, 19 nt, Artificial Sequence
  Description of Artificial Sequence: Synthetic oligonucleotide
  Antisense strand to SEQ ID NO: 2016698
uugacuaguguucacacau

SEQ ID NO: 2016700 - RNA, 19 nt, Artificial Sequence
  Description of Artificial Sequence: Synthetic oligonucleotide
  Sense strand starting at position 413 of SEQ ID NO: 1881083
ugugaacacuagucaaacu

SEQ ID NO: 2016701 - RNA, 19 nt, Artificial Sequence
  Description of Artificial Sequence: Synthetic oligonucleotide
  Antisense strand to SEQ ID NO: 2016700
aguuugacuaguguucaca

SEQ ID NO: 2016702 - RNA, 19 nt, Artificial Sequence
  Description of Artificial Sequence: Synthetic oligonucleotide
  Sense strand starting at position 442 of SEQ ID NO: 1881083
aaaguaggaugaguuuaua

SEQ ID NO: 2016703 - RNA, 19 nt, Artificial Sequence
  Description of Artificial Sequence: Synthetic oligonucleotide
  Antisense strand to SEQ ID NO: 2016702
uauaaacucauccuacuuu

SEQ ID NO: 2016704 - RNA, 19 nt, Artificial Sequence
  Description of Artificial Sequence: Synthetic oligonucleotide
  Sense strand starting at position 445 of SEQ ID NO: 1881083
guaggaugaguuuauacuu

SEQ ID NO: 2016705 - RNA, 19 nt, Artificial Sequence
  Description of Artificial Sequence: Synthetic oligonucleotide
  Antisense strand to SEQ ID NO: 2016704
aaguauaaacucauccuac

SEQ ID NO: 2016706 - RNA, 19 nt, Artificial Sequence
  Description of Artificial Sequence: Synthetic oligonucleotide
  Sense strand starting at position 452 of SEQ ID NO: 1881083
gaguuuauacuuuacuggu

SEQ ID NO: 2016707 - RNA, 19 nt, Artificial Sequence
  Description of Artificial Sequence: Synthetic oligonucleotide
  Antisense strand to SEQ ID NO: 2016706
accaguaaaguauaaacuc

SEQ ID NO: 2016708 - RNA, 19 nt, Artificial Sequence
  Description of Artificial Sequence: Synthetic oligonucleotide
  Sense strand starting at position 608 of SEQ ID NO: 1881083
aggaaacauuuauaagcua

SEQ ID NO: 2016709 - RNA, 19 nt, Artificial Sequence
  Description of Artificial Sequence: Synthetic oligonucleotide
  Antisense strand to SEQ ID NO: 2016708
uagcuuauaaauguuuccu

SEQ ID NO: 2016710 - RNA, 19 nt, Artificial Sequence
  Description of Artificial Sequence: Synthetic oligonucleotide
  Sense strand starting at position 839 of SEQ ID NO: 1881083
aauauugaagucuaguguu

SEQ ID NO: 2016711 - RNA, 19 nt, Artificial Sequence
  Description of Artificial Sequence: Synthetic oligonucleotide
  Antisense strand to SEQ ID NO: 2016710
aacacuagacuucaauauu

SEQ ID NO: 2016712 - RNA, 19 nt, Artificial Sequence
  Description of Artificial Sequence: Synthetic oligonucleotide
  Sense strand starting at position 1096 of SEQ ID NO: 1881083
uuccuuggauuacuugaau

SEQ ID NO: 2016713 - RNA, 19 nt, Artificial Sequence
  Description of Artificial Sequence: Synthetic oligonucleotide
  Antisense strand to SEQ ID NO: 2016712
auucaaguaauccaaggaa

SEQ ID NO: 2016714 - RNA, 19 nt, Artificial Sequence
  Description of Artificial Sequence: Synthetic oligonucleotide
  Sense strand starting at position 1367 of SEQ ID NO: 1881083
uugucaugcguugacauuu

SEQ ID NO: 2016715 - RNA, 19 nt, Artificial Sequence
  Description of Artificial Sequence: Synthetic oligonucleotide
  Antisense strand to SEQ ID NO: 2016714
aaaugucaacgcaugacaa

SEQ ID NO: 2016716 - RNA, 19 nt, Artificial Sequence
  Description of Artificial Sequence: Synthetic oligonucleotide
  Sense strand starting at position 1397 of SEQ ID NO: 1881083
ggugaccaauuccuuaaua

SEQ ID NO: 2016717 - RNA, 19 nt, Artificial Sequence
  Description of Artificial Sequence: Synthetic oligonucleotide
  Antisense strand to SEQ ID NO: 2016716
uauuaaggaauuggucacc

SEQ ID NO: 2016718 - RNA, 19 nt, Artificial Sequence
  Description of Artificial Sequence: Synthetic oligonucleotide
  Sense strand starting at position 1408 of SEQ ID NO: 1881083
ccuuaauaacauggguuua

SEQ ID NO: 2016719 - RNA, 19 nt, Artificial Sequence
  Description of Artificial Sequence: Synthetic oligonucleotide
  Antisense strand to SEQ ID NO: 2016718
uaaacccauguuauuaagg

SEQ ID NO: 2016720 - RNA, 19 nt, Artificial Sequence
  Description of Artificial Sequence: Synthetic oligonucleotide
  Sense strand starting at position 1443 of SEQ ID NO: 1881083
cugauuguuccagauagua

SEQ ID NO: 2016721 - RNA, 19 nt, Artificial Sequence
  Description of Artificial Sequence: Synthetic oligonucleotide
  Antisense strand to SEQ ID NO: 2016720
uacuaucuggaacaaucag

SEQ ID NO: 2016722 - RNA, 19 nt, Artificial Sequence
  Description of Artificial Sequence: Synthetic oligonucleotide
  Sense strand starting at position 1575 of SEQ ID NO: 1881083
gggucucaguaauuaacaa

SEQ ID NO: 2016723 - RNA, 19 nt, Artificial Sequence
  Description of Artificial Sequence: Synthetic oligonucleotide
  Antisense strand to SEQ ID NO: 2016722
uuguuaauuacugagaccc

SEQ ID NO: 2016724 - RNA, 19 nt, Artificial Sequence
  Description of Artificial Sequence: Synthetic oligonucleotide
  Sense strand starting at position 1658 of SEQ ID NO: 1881083
cuggauacuuuaucaauug

SEQ ID NO: 2016725 - RNA, 19 nt, Artificial Sequence
  Description of Artificial Sequence: Synthetic oligonucleotide
  Antisense strand to SEQ ID NO: 2016724
caauugauaaaguauccag

SEQ ID NO: 2016726 - RNA, 19 nt, Artificial Sequence
  Description of Artificial Sequence: Synthetic oligonucleotide
  Sense strand starting at position 2111 of SEQ ID NO: 1881083
cccagaaauguuuagucca

SEQ ID NO: 2016727 - RNA, 19 nt, Artificial Sequence
  Description of Artificial Sequence: Synthetic oligonucleotide
  Antisense strand to SEQ ID NO: 2016726
uggacuaaacauuucuggg

SEQ ID NO: 2016728 - RNA, 19 nt, Artificial Sequence
  Description of Artificial Sequence: Synthetic oligonucleotide
  Sense strand starting at position 2113 of SEQ ID NO: 1881083
cagaaauguuuaguccaga

SEQ ID NO: 2016729 - RNA, 19 nt, Artificial Sequence
  Description of Artificial Sequence: Synthetic oligonucleotide
  Antisense strand to SEQ ID NO: 2016728
ucuggacuaaacauuucug

SEQ ID NO: 2016730 - RNA, 19 nt, Artificial Sequence
  Description of Artificial Sequence: Synthetic oligonucleotide
  Sense strand starting at position 2114 of SEQ ID NO: 1881083
agaaauguuuaguccagaa

SEQ ID NO: 2016731 - RNA, 19 nt, Artificial Sequence
  Description of Artificial Sequence: Synthetic oligonucleotide
  Antisense strand to SEQ ID NO: 2016730
uucuggacuaaacauuucu

SEQ ID NO: 2016732 - RNA, 19 nt, Artificial Sequence
  Description of Artificial Sequence: Synthetic oligonucleotide
  Sense strand starting at position 2118 of SEQ ID NO: 1881083
auguuuaguccagaaaugu

SEQ ID NO: 2016733 - RNA, 19 nt, Artificial Sequence
  Description of Artificial Sequence: Synthetic oligonucleotide
  Antisense strand to SEQ ID NO: 2016732
acauuucuggacuaaacau

SEQ ID NO: 2016734 - RNA, 19 nt, Artificial Sequence
  Description of Artificial Sequence: Synthetic oligonucleotide
  Sense strand starting at position 2160 of SEQ ID NO: 1881083
uuaaacaaggcaugucaua

SEQ ID NO: 2016735 - RNA, 19 nt, Artificial Sequence
  Description of Artificial Sequence: Synthetic oligonucleotide
  Antisense strand to SEQ ID NO: 2016734
uaugacaugccuuguuuaa

SEQ ID NO: 2016736 - RNA, 19 nt, Artificial Sequence
  Description of Artificial Sequence: Synthetic oligonucleotide
  Sense strand starting at position 2245 of SEQ ID NO: 1881083
agaguuauaccagggcaua

SEQ ID NO: 2016737 - RNA, 19 nt, Artificial Sequence
  Description of Artificial Sequence: Synthetic oligonucleotide
  Antisense strand to SEQ ID NO: 2016736
uaugcccugguauaacucu

SEQ ID NO: 2016738 - RNA, 19 nt, Artificial Sequence
  Description of Artificial Sequence: Synthetic oligonucleotide
  Sense strand starting at position 2246 of SEQ ID NO: 1881083
gaguuauaccagggcauag

SEQ ID NO: 2016739 - RNA, 19 nt, Artificial Sequence
  Description of Artificial Sequence: Synthetic oligonucleotide
  Antisense strand to SEQ ID NO: 2016738
cuaugcccugguauaacuc

SEQ ID NO: 2016740 - RNA, 19 nt, Artificial Sequence
  Description of Artificial Sequence: Synthetic oligonucleotide
  Sense strand starting at position 2467 of SEQ ID NO: 1881083
cuuugaaaugauuggcauu

SEQ ID NO: 2016741 - RNA, 19 nt, Artificial Sequence
  Description of Artificial Sequence: Synthetic oligonucleotide
  Antisense strand to SEQ ID NO: 2016740
aaugccaaucauuucaaag

SEQ ID NO: 2016742 - RNA, 19 nt, Artificial Sequence
  Description of Artificial Sequence: Synthetic oligonucleotide
  Sense strand starting at position 2498 of SEQ ID NO: 1881083
auccaugugcaauaagaug

SEQ ID NO: 2016743 - RNA, 19 nt, Artificial Sequence
  Description of Artificial Sequence: Synthetic oligonucleotide
  Antisense strand to SEQ ID NO: 2016742
caucuuauugcacauggau

SEQ ID NO: 2016744 - RNA, 19 nt, Artificial Sequence
  Description of Artificial Sequence: Synthetic oligonucleotide
  Sense strand starting at position 2807 of SEQ ID NO: 1881083
agcaacgacucuuuagaga

SEQ ID NO: 2016745 - RNA, 19 nt, Artificial Sequence
  Description of Artificial Sequence: Synthetic oligonucleotide
  Antisense strand to SEQ ID NO: 2016744
ucucuaaagagucguugcu

SEQ ID NO: 2016746 - RNA, 19 nt, Artificial Sequence
  Description of Artificial Sequence: Synthetic oligonucleotide
  Sense strand starting at position 2971 of SEQ ID NO: 1881083
guuauagaauuguuaucca

SEQ ID NO: 2016747 - RNA, 19 nt, Artificial Sequence
  Description of Artificial Sequence: Synthetic oligonucleotide
  Antisense strand to SEQ ID NO: 2016746
uggauaacaauucuauaac

SEQ ID NO: 2016748 - RNA, 19 nt, Artificial Sequence
  Description of Artificial Sequence: Synthetic oligonucleotide
  Sense strand starting at position 3204 of SEQ ID NO: 1881083
aacaaaugugggugggaau

SEQ ID NO: 2016749 - RNA, 19 nt, Artificial Sequence
  Description of Artificial Sequence: Synthetic oligonucleotide
  Antisense strand to SEQ ID NO: 2016748
auucccacccacauuuguu

SEQ ID NO: 2016750 - RNA, 19 nt, Artificial Sequence
  Description of Artificial Sequence: Synthetic oligonucleotide
  Sense strand starting at position 3241 of SEQ ID NO: 1881083
ucacuuauugcugauggua

SEQ ID NO: 2016751 - RNA, 19 nt, Artificial Sequence
  Description of Artificial Sequence: Synthetic oligonucleotide
  Antisense strand to SEQ ID NO: 2016750
uaccaucagcaauaaguga

SEQ ID NO: 2016752 - RNA, 19 nt, Artificial Sequence
  Description of Artificial Sequence: Synthetic oligonucleotide
  Sense strand starting at position 3368 of SEQ ID NO: 1881083
ggaguugaaccuuaugucu

SEQ ID NO: 2016753 - RNA, 19 nt, Artificial Sequence
  Description of Artificial Sequence: Synthetic oligonucleotide
  Antisense strand to SEQ ID NO: 2016752
agacauaagguucaacucc

SEQ ID NO: 2016754 - RNA, 19 nt, Artificial Sequence
  Description of Artificial Sequence: Synthetic oligonucleotide
  Sense strand starting at position 3704 of SEQ ID NO: 1881083
gugggaugaauaggcagau

SEQ ID NO: 2016755 - RNA, 19 nt, Artificial Sequence
  Description of Artificial Sequence: Synthetic oligonucleotide
  Antisense strand to SEQ ID NO: 2016754
aucugccuauucaucccac

SEQ ID NO: 2016756 - RNA, 19 nt, Artificial Sequence
  Description of Artificial Sequence: Synthetic oligonucleotide
  Sense strand starting at position 3757 of SEQ ID NO: 1881083
augauacuuugauugugaa

SEQ ID NO: 2016757 - RNA, 19 nt, Artificial Sequence
  Description of Artificial Sequence: Synthetic oligonucleotide
  Antisense strand to SEQ ID NO: 2016756
uucacaaucaaaguaucau

SEQ ID NO: 2016758 - RNA, 19 nt, Artificial Sequence
  Description of Artificial Sequence: Synthetic oligonucleotide
  Sense strand starting at position 3758 of SEQ ID NO: 1881083
ugauacuuugauugugaau

SEQ ID NO: 2016759 - RNA, 19 nt, Artificial Sequence
  Description of Artificial Sequence: Synthetic oligonucleotide
  Antisense strand to SEQ ID NO: 2016758
auucacaaucaaaguauca

SEQ ID NO: 2016760 - RNA, 19 nt, Artificial Sequence
  Description of Artificial Sequence: Synthetic oligonucleotide
  Sense strand starting at position 3794 of SEQ ID NO: 1881083
ugcccaagcccauagaaua

SEQ ID NO: 2016761 - RNA, 19 nt, Artificial Sequence
  Description of Artificial Sequence: Synthetic oligonucleotide
  Antisense strand to SEQ ID NO: 2016760
uauucuaugggcuugggca

SEQ ID NO: 2016762 - RNA, 19 nt, Artificial Sequence
  Description of Artificial Sequence: Synthetic oligonucleotide
  Sense strand starting at position 3840 of SEQ ID NO: 1881083
aacuauggauuugggauaa

SEQ ID NO: 2016763 - RNA, 19 nt, Artificial Sequence
  Description of Artificial Sequence: Synthetic oligonucleotide
  Antisense strand to SEQ ID NO: 2016762
uuaucccaaauccauaguu

SEQ ID NO: 2016764 - RNA, 19 nt, Artificial Sequence
  Description of Artificial Sequence: Synthetic oligonucleotide
  Sense strand starting at position 3975 of SEQ ID NO: 1881083
guuccuucuagagaggagu

SEQ ID NO: 2016765 - RNA, 19 nt, Artificial Sequence
  Description of Artificial Sequence: Synthetic oligonucleotide
  Antisense strand to SEQ ID NO: 2016764
acuccucucuagaaggaac

SEQ ID NO: 2016766 - RNA, 19 nt, Artificial Sequence
  Description of Artificial Sequence: Synthetic oligonucleotide
  Sense strand starting at position 62 of SEQ ID NO: 1881084
ccgcuauuagcugcuauua

SEQ ID NO: 2016767 - RNA, 19 nt, Artificial Sequence
  Description of Artificial Sequence: Synthetic oligonucleotide
  Antisense strand to SEQ ID NO: 2016766
uaauagcagcuaauagcgg

SEQ ID NO: 2016768 - RNA, 19 nt, Artificial Sequence
  Description of Artificial Sequence: Synthetic oligonucleotide
  Sense strand starting at position 63 of SEQ ID NO: 1881084
cgcuauuagcugcuauuau

SEQ ID NO: 2016769 - RNA, 19 nt, Artificial Sequence
  Description of Artificial Sequence: Synthetic oligonucleotide
  Antisense strand to SEQ ID NO: 2016768
auaauagcagcuaauagcg

SEQ ID NO: 2016770 - RNA, 19 nt, Artificial Sequence
  Description of Artificial Sequence: Synthetic oligonucleotide
  Sense strand starting at position 146 of SEQ ID NO: 1881084
ucugguugucuauaguuau

SEQ ID NO: 2016771 - RNA, 19 nt, Artificial Sequence
  Description of Artificial Sequence: Synthetic oligonucleotide
  Antisense strand to SEQ ID NO: 2016770
auaacuauagacaaccaga

SEQ ID NO: 2016772 - RNA, 19 nt, Artificial Sequence
  Description of Artificial Sequence: Synthetic oligonucleotide
  Sense strand starting at position 249 of SEQ ID NO: 1881084
ggcugugucagggaaauaa

SEQ ID NO: 2016773 - RNA, 19 nt, Artificial Sequence
  Description of Artificial Sequence: Synthetic oligonucleotide
  Antisense strand to SEQ ID NO: 2016772
uuauuucccugacacagcc

SEQ ID NO: 2016774 - RNA, 19 nt, Artificial Sequence
  Description of Artificial Sequence: Synthetic oligonucleotide
  Sense strand starting at position 370 of SEQ ID NO: 1881084
agauuagauuugcagauug

SEQ ID NO: 2016775 - RNA, 19 nt, Artificial Sequence
  Description of Artificial Sequence: Synthetic oligonucleotide
  Antisense strand to SEQ ID NO: 2016774
caaucugcaaaucuaaucu

SEQ ID NO: 2016776 - RNA, 19 nt, Artificial Sequence
  Description of Artificial Sequence: Synthetic oligonucleotide
  Sense strand starting at position 541 of SEQ ID NO: 1881084
aagguuguaucauugaagu

SEQ ID NO: 2016777 - RNA, 19 nt, Artificial Sequence
  Description of Artificial Sequence: Synthetic oligonucleotide
  Antisense strand to SEQ ID NO: 2016776
acuucaaugauacaaccuu

SEQ ID NO: 2016778 - RNA, 19 nt, Artificial Sequence
  Description of Artificial Sequence: Synthetic oligonucleotide
  Sense strand starting at position 560 of SEQ ID NO: 1881084
cgugcaugucagccuucua

SEQ ID NO: 2016779 - RNA, 19 nt, Artificial Sequence
  Description of Artificial Sequence: Synthetic oligonucleotide
  Antisense strand to SEQ ID NO: 2016778
uagaaggcugacaugcacg

SEQ ID NO: 2016780 - RNA, 19 nt, Artificial Sequence
  Description of Artificial Sequence: Synthetic oligonucleotide
  Sense strand starting at position 661 of SEQ ID NO: 1881084
guauuaaagccagacuugu

SEQ ID NO: 2016781 - RNA, 19 nt, Artificial Sequence
  Description of Artificial Sequence: Synthetic oligonucleotide
  Antisense strand to SEQ ID NO: 2016780
acaagucuggcuuuaauac

SEQ ID NO: 2016782 - RNA, 19 nt, Artificial Sequence
  Description of Artificial Sequence: Synthetic oligonucleotide
  Sense strand starting at position 794 of SEQ ID NO: 1881084
auuaauugaguuuggaucu

SEQ ID NO: 2016783 - RNA, 19 nt, Artificial Sequence
  Description of Artificial Sequence: Synthetic oligonucleotide
  Antisense strand to SEQ ID NO: 2016782
agauccaaacucaauuaau

SEQ ID NO: 2016784 - RNA, 19 nt, Artificial Sequence
  Description of Artificial Sequence: Synthetic oligonucleotide
  Sense strand starting at position 916 of SEQ ID NO: 1881084
agagcaguucuggauguaa

SEQ ID NO: 2016785 - RNA, 19 nt, Artificial Sequence
  Description of Artificial Sequence: Synthetic oligonucleotide
  Antisense strand to SEQ ID NO: 2016784
uuacauccagaacugcucu

SEQ ID NO: 2016786 - RNA, 19 nt, Artificial Sequence
  Description of Artificial Sequence: Synthetic oligonucleotide
  Sense strand starting at position 932 of SEQ ID NO: 1881084
uaagucuguuaaguaagau

SEQ ID NO: 2016787 - RNA, 19 nt, Artificial Sequence
  Description of Artificial Sequence: Synthetic oligonucleotide
  Antisense strand to SEQ ID NO: 2016786
aucuuacuuaacagacuua

SEQ ID NO: 2016788 - RNA, 19 nt, Artificial Sequence
  Description of Artificial Sequence: Synthetic oligonucleotide
  Sense strand starting at position 1022 of SEQ ID NO: 1881084
auuaauuguuguuuccaga

SEQ ID NO: 2016789 - RNA, 19 nt, Artificial Sequence
  Description of Artificial Sequence: Synthetic oligonucleotide
  Antisense strand to SEQ ID NO: 2016788
ucuggaaacaacaauuaau

SEQ ID NO: 2016790 - RNA, 19 nt, Artificial Sequence
  Description of Artificial Sequence: Synthetic oligonucleotide
  Sense strand starting at position 1103 of SEQ ID NO: 1881084
aacuucuaguugucaagga

SEQ ID NO: 2016791 - RNA, 19 nt, Artificial Sequence
  Description of Artificial Sequence: Synthetic oligonucleotide
  Antisense strand to SEQ ID NO: 2016790
uccuugacaacuagaaguu

SEQ ID NO: 2016792 - RNA, 19 nt, Artificial Sequence
  Description of Artificial Sequence: Synthetic oligonucleotide
  Sense strand starting at position 1107 of SEQ ID NO: 1881084
ucuaguugucaaggaaagu

SEQ ID NO: 2016793 - RNA, 19 nt, Artificial Sequence
  Description of Artificial Sequence: Synthetic oligonucleotide
  Antisense strand to SEQ ID NO: 2016792
acuuuccuugacaacuaga

SEQ ID NO: 2016794 - RNA, 19 nt, Artificial Sequence
  Description of Artificial Sequence: Synthetic oligonucleotide
  Sense strand starting at position 1108 of SEQ ID NO: 1881084
cuaguugucaaggaaagug

SEQ ID NO: 2016795 - RNA, 19 nt, Artificial Sequence
  Description of Artificial Sequence: Synthetic oligonucleotide
  Antisense strand to SEQ ID NO: 2016794
cacuuuccuugacaacuag

SEQ ID NO: 2016796 - RNA, 19 nt, Artificial Sequence
  Description of Artificial Sequence: Synthetic oligonucleotide
  Sense strand starting at position 1379 of SEQ ID NO: 1881084
gcauaaggaccuugccaau

SEQ ID NO: 2016797 - RNA, 19 nt, Artificial Sequence
  Description of Artificial Sequence: Synthetic oligonucleotide
  Antisense strand to SEQ ID NO: 2016796
auuggcaagguccuuaugc

SEQ ID NO: 2016798 - RNA, 19 nt, Artificial Sequence
  Description of Artificial Sequence: Synthetic oligonucleotide
  Sense strand starting at position 1480 of SEQ ID NO: 1881084
guggcacauuagguaugaa

SEQ ID NO: 2016799 - RNA, 19 nt, Artificial Sequence
  Description of Artificial Sequence: Synthetic oligonucleotide
  Antisense strand to SEQ ID NO: 2016798
uucauaccuaaugugccac

SEQ ID NO: 2016800 - RNA, 19 nt, Artificial Sequence
  Description of Artificial Sequence: Synthetic oligonucleotide
  Sense strand starting at position 1697 of SEQ ID NO: 1881084
uaacuuuguggaggugaua

SEQ ID NO: 2016801 - RNA, 19 nt, Artificial Sequence
  Description of Artificial Sequence: Synthetic oligonucleotide
  Antisense strand to SEQ ID NO: 2016800
uaucaccuccacaaaguua

SEQ ID NO: 2016802 - RNA, 19 nt, Artificial Sequence
  Description of Artificial Sequence: Synthetic oligonucleotide
  Sense strand starting at position 1700 of SEQ ID NO: 1881084
cuuuguggaggugauaaua

SEQ ID NO: 2016803 - RNA, 19 nt, Artificial Sequence
  Description of Artificial Sequence: Synthetic oligonucleotide
  Antisense strand to SEQ ID NO: 2016802
uauuaucaccuccacaaag

SEQ ID NO: 2016804 - RNA, 19 nt, Artificial Sequence
  Description of Artificial Sequence: Synthetic oligonucleotide
  Sense strand starting at position 1864 of SEQ ID NO: 1881084
auggaaaugugguccuuga

SEQ ID NO: 2016805 - RNA, 19 nt, Artificial Sequence
  Description of Artificial Sequence: Synthetic oligonucleotide
  Antisense strand to SEQ ID NO: 2016804
ucaaggaccacauuuccau

SEQ ID NO: 2016806 - RNA, 19 nt, Artificial Sequence
  Description of Artificial Sequence: Synthetic oligonucleotide
  Sense strand starting at position 1994 of SEQ ID NO: 1881084
uggcccauucccugaaaga

SEQ ID NO: 2016807 - RNA, 19 nt, Artificial Sequence
  Description of Artificial Sequence: Synthetic oligonucleotide
  Antisense strand to SEQ ID NO: 2016806
ucuuucagggaaugggcca

SEQ ID NO: 2016808 - RNA, 19 nt, Artificial Sequence
  Description of Artificial Sequence: Synthetic oligonucleotide
  Sense strand starting at position 2024 of SEQ ID NO: 1881084
gagagugguugugucagga

SEQ ID NO: 2016809 - RNA, 19 nt, Artificial Sequence
  Description of Artificial Sequence: Synthetic oligonucleotide
  Antisense strand to SEQ ID NO: 2016808
uccugacacaaccacucuc

SEQ ID NO: 2016810 - RNA, 19 nt, Artificial Sequence
  Description of Artificial Sequence: Synthetic oligonucleotide
  Sense strand starting at position 2037 of SEQ ID NO: 1881084
ucaggagauucucucugau

SEQ ID NO: 2016811 - RNA, 19 nt, Artificial Sequence
  Description of Artificial Sequence: Synthetic oligonucleotide
  Antisense strand to SEQ ID NO: 2016810
aucagagagaaucuccuga

SEQ ID NO: 2016812 - RNA, 19 nt, Artificial Sequence
  Description of Artificial Sequence: Synthetic oligonucleotide
  Sense strand starting at position 3145 of SEQ ID NO: 1881084
aggugacucucgaauggga

SEQ ID NO: 2016813 - RNA, 19 nt, Artificial Sequence
  Description of Artificial Sequence: Synthetic oligonucleotide
  Antisense strand to SEQ ID NO: 2016812
ucccauucgagagucaccu

SEQ ID NO: 2016814 - RNA, 19 nt, Artificial Sequence
  Description of Artificial Sequence: Synthetic oligonucleotide
  Sense strand starting at position 3188 of SEQ ID NO: 1881084
uggucucugagaugaguga

SEQ ID NO: 2016815 - RNA, 19 nt, Artificial Sequence
  Description of Artificial Sequence: Synthetic oligonucleotide
  Antisense strand to SEQ ID NO: 2016814
ucacucaucucagagacca

SEQ ID NO: 2016816 - RNA, 19 nt, Artificial Sequence
  Description of Artificial Sequence: Synthetic oligonucleotide
  Sense strand starting at position 3192 of SEQ ID NO: 1881084
cucugagaugagugacugu

SEQ ID NO: 2016817 - RNA, 19 nt, Artificial Sequence
  Description of Artificial Sequence: Synthetic oligonucleotide
  Antisense strand to SEQ ID NO: 2016816
acagucacucaucucagag

SEQ ID NO: 2016818 - RNA, 19 nt, Artificial Sequence
  Description of Artificial Sequence: Synthetic oligonucleotide
  Sense strand starting at position 3251 of SEQ ID NO: 1881084
auuguuucugcggaaggga

SEQ ID NO: 2016819 - RNA, 19 nt, Artificial Sequence
  Description of Artificial Sequence: Synthetic oligonucleotide
  Antisense strand to SEQ ID NO: 2016818
ucccuuccgcagaaacaau

SEQ ID NO: 2016820 - RNA, 19 nt, Artificial Sequence
  Description of Artificial Sequence: Synthetic oligonucleotide
  Sense strand starting at position 3271 of SEQ ID NO: 1881084
cugggaaagucuuccacca

SEQ ID NO: 2016821 - RNA, 19 nt, Artificial Sequence
  Description of Artificial Sequence: Synthetic oligonucleotide
  Antisense strand to SEQ ID NO: 2016820
ugguggaagacuuucccag

SEQ ID NO: 2016822 - RNA, 19 nt, Artificial Sequence
  Description of Artificial Sequence: Synthetic oligonucleotide
  Sense strand starting at position 3381 of SEQ ID NO: 1881084
gauuguguuaaagggugau

SEQ ID NO: 2016823 - RNA, 19 nt, Artificial Sequence
  Description of Artificial Sequence: Synthetic oligonucleotide
  Antisense strand to SEQ ID NO: 2016822
aucacccuuuaacacaauc

SEQ ID NO: 2016824 - RNA, 19 nt, Artificial Sequence
  Description of Artificial Sequence: Synthetic oligonucleotide
  Sense strand starting at position 3536 of SEQ ID NO: 1881084
gaccacuuaggauguuuaa

SEQ ID NO: 2016825 - RNA, 19 nt, Artificial Sequence
  Description of Artificial Sequence: Synthetic oligonucleotide
  Antisense strand to SEQ ID NO: 2016824
uuaaacauccuaagugguc

SEQ ID NO: 2016826 - RNA, 19 nt, Artificial Sequence
  Description of Artificial Sequence: Synthetic oligonucleotide
  Sense strand starting at position 3539 of SEQ ID NO: 1881084
cacuuaggauguuuaaaug

SEQ ID NO: 2016827 - RNA, 19 nt, Artificial Sequence
  Description of Artificial Sequence: Synthetic oligonucleotide
  Antisense strand to SEQ ID NO: 2016826
cauuuaaacauccuaagug

SEQ ID NO: 2016828 - RNA, 19 nt, Artificial Sequence
  Description of Artificial Sequence: Synthetic oligonucleotide
  Sense strand starting at position 3601 of SEQ ID NO: 1881084
uggaguagucaacgacuaa

SEQ ID NO: 2016829 - RNA, 19 nt, Artificial Sequence
  Description of Artificial Sequence: Synthetic oligonucleotide
  Antisense strand to SEQ ID NO: 2016828
uuagucguugacuacucca

SEQ ID NO: 2016830 - RNA, 19 nt, Artificial Sequence
  Description of Artificial Sequence: Synthetic oligonucleotide
  Sense strand starting at position 3602 of SEQ ID NO: 1881084
ggaguagucaacgacuaac

SEQ ID NO: 2016831 - RNA, 19 nt, Artificial Sequence
  Description of Artificial Sequence: Synthetic oligonucleotide
  Antisense strand to SEQ ID NO: 2016830
guuagucguugacuacucc

SEQ ID NO: 2016832 - RNA, 19 nt, Artificial Sequence
  Description of Artificial Sequence: Synthetic oligonucleotide
  Sense strand starting at position 3665 of SEQ ID NO: 1881084
agcugaagagucggaggau

SEQ ID NO: 2016833 - RNA, 19 nt, Artificial Sequence
  Description of Artificial Sequence: Synthetic oligonucleotide
  Antisense strand to SEQ ID NO: 2016832
auccuccgacucuucagcu

SEQ ID NO: 2016834 - RNA, 19 nt, Artificial Sequence
  Description of Artificial Sequence: Synthetic oligonucleotide
  Sense strand starting at position 3700 of SEQ ID NO: 1881084
aucguugucacacagguau

SEQ ID NO: 2016835 - RNA, 19 nt, Artificial Sequence
  Description of Artificial Sequence: Synthetic oligonucleotide
  Antisense strand to SEQ ID NO: 2016834
auaccugugugacaacgau

SEQ ID NO: 2016836 - RNA, 19 nt, Artificial Sequence
  Description of Artificial Sequence: Synthetic oligonucleotide
  Sense strand starting at position 3784 of SEQ ID NO: 1881084
uuauguaaucugggcauau

SEQ ID NO: 2016837 - RNA, 19 nt, Artificial Sequence
  Description of Artificial Sequence: Synthetic oligonucleotide
  Antisense strand to SEQ ID NO: 2016836
auaugcccagauuacauaa

SEQ ID NO: 2016838 - RNA, 19 nt, Artificial Sequence
  Description of Artificial Sequence: Synthetic oligonucleotide
  Sense strand starting at position 3785 of SEQ ID NO: 1881084
uauguaaucugggcauauu

SEQ ID NO: 2016839 - RNA, 19 nt, Artificial Sequence
  Description of Artificial Sequence: Synthetic oligonucleotide
  Antisense strand to SEQ ID NO: 2016838
aauaugcccagauuacaua

SEQ ID NO: 2016840 - RNA, 19 nt, Artificial Sequence
  Description of Artificial Sequence: Synthetic oligonucleotide
  Sense strand starting at position 3786 of SEQ ID NO: 1881084
auguaaucugggcauauug

SEQ ID NO: 2016841 - RNA, 19 nt, Artificial Sequence
  Description of Artificial Sequence: Synthetic oligonucleotide
  Antisense strand to SEQ ID NO: 2016840
caauaugcccagauuacau

SEQ ID NO: 2016842 - RNA, 19 nt, Artificial Sequence
  Description of Artificial Sequence: Synthetic oligonucleotide
  Sense strand starting at position 3788 of SEQ ID NO: 1881084
guaaucugggcauauugua

SEQ ID NO: 2016843 - RNA, 19 nt, Artificial Sequence
  Description of Artificial Sequence: Synthetic oligonucleotide
  Antisense strand to SEQ ID NO: 2016842
uacaauaugcccagauuac

SEQ ID NO: 2016844 - RNA, 19 nt, Artificial Sequence
  Description of Artificial Sequence: Synthetic oligonucleotide
  Sense strand starting at position 3964 of SEQ ID NO: 1881084
ucuguaaauugcuuuaaga

SEQ ID NO: 2016845 - RNA, 19 nt, Artificial Sequence
  Description of Artificial Sequence: Synthetic oligonucleotide
  Antisense strand to SEQ ID NO: 2016844
ucuuaaagcaauuuacaga

SEQ ID NO: 2016846 - RNA, 19 nt, Artificial Sequence
  Description of Artificial Sequence: Synthetic oligonucleotide
  Sense strand starting at position 159 of SEQ ID NO: 1881085
uuuaauaaacgguguugaa

SEQ ID NO: 2016847 - RNA, 19 nt, Artificial Sequence
  Description of Artificial Sequence: Synthetic oligonucleotide
  Antisense strand to SEQ ID NO: 2016846
uucaacaccguuuauuaaa

SEQ ID NO: 2016848 - RNA, 19 nt, Artificial Sequence
  Description of Artificial Sequence: Synthetic oligonucleotide
  Sense strand starting at position 517 of SEQ ID NO: 1881085
cagaaucuaccaggaaguu

SEQ ID NO: 2016849 - RNA, 19 nt, Artificial Sequence
  Description of Artificial Sequence: Synthetic oligonucleotide
  Antisense strand to SEQ ID NO: 2016848
aacuuccugguagauucug

SEQ ID NO: 2016850 - RNA, 19 nt, Artificial Sequence
  Description of Artificial Sequence: Synthetic oligonucleotide
  Sense strand starting at position 1049 of SEQ ID NO: 1881085
ggaauaauaggcggccaua

SEQ ID NO: 2016851 - RNA, 19 nt, Artificial Sequence
  Description of Artificial Sequence: Synthetic oligonucleotide
  Antisense strand to SEQ ID NO: 2016850
uauggccgccuauuauucc

SEQ ID NO: 2016852 - RNA, 19 nt, Artificial Sequence
  Description of Artificial Sequence: Synthetic oligonucleotide
  Sense strand starting at position 1515 of SEQ ID NO: 1881085
cacaguaccugguuaaaga

SEQ ID NO: 2016853 - RNA, 19 nt, Artificial Sequence
  Description of Artificial Sequence: Synthetic oligonucleotide
  Antisense strand to SEQ ID NO: 2016852
ucuuuaaccagguacugug

SEQ ID NO: 2016854 - RNA, 19 nt, Artificial Sequence
  Description of Artificial Sequence: Synthetic oligonucleotide
  Sense strand starting at position 1525 of SEQ ID NO: 1881085
gguuaaagaacaggcuuau

SEQ ID NO: 2016855 - RNA, 19 nt, Artificial Sequence
  Description of Artificial Sequence: Synthetic oligonucleotide
  Antisense strand to SEQ ID NO: 2016854
auaagccuguucuuuaacc

SEQ ID NO: 2016856 - RNA, 19 nt, Artificial Sequence
  Description of Artificial Sequence: Synthetic oligonucleotide
  Sense strand starting at position 1577 of SEQ ID NO: 1881085
agaaguacuccagaaugcu

SEQ ID NO: 2016857 - RNA, 19 nt, Artificial Sequence
  Description of Artificial Sequence: Synthetic oligonucleotide
  Antisense strand to SEQ ID NO: 2016856
agcauucuggaguacuucu

SEQ ID NO: 2016858 - RNA, 19 nt, Artificial Sequence
  Description of Artificial Sequence: Synthetic oligonucleotide
  Sense strand starting at position 1739 of SEQ ID NO: 1881085
uagggucauuuagguauuu

SEQ ID NO: 2016859 - RNA, 19 nt, Artificial Sequence
  Description of Artificial Sequence: Synthetic oligonucleotide
  Antisense strand to SEQ ID NO: 2016858
aaauaccuaaaugacccua

SEQ ID NO: 2016860 - RNA, 19 nt, Artificial Sequence
  Description of Artificial Sequence: Synthetic oligonucleotide
  Sense strand starting at position 2033 of SEQ ID NO: 1881085
gcauguugcagggaucauc

SEQ ID NO: 2016861 - RNA, 19 nt, Artificial Sequence
  Description of Artificial Sequence: Synthetic oligonucleotide
  Antisense strand to SEQ ID NO: 2016860
gaugaucccugcaacaugc

SEQ ID NO: 2016862 - RNA, 19 nt, Artificial Sequence
  Description of Artificial Sequence: Synthetic oligonucleotide
  Sense strand starting at position 2056 of SEQ ID NO: 1881085
guugcuaggcgaaguagaa

SEQ ID NO: 2016863 - RNA, 19 nt, Artificial Sequence
  Description of Artificial Sequence: Synthetic oligonucleotide
  Antisense strand to SEQ ID NO: 2016862
uucuacuucgccuagcaac

SEQ ID NO: 2016864 - RNA, 19 nt, Artificial Sequence
  Description of Artificial Sequence: Synthetic oligonucleotide
  Sense strand starting at position 2108 of SEQ ID NO: 1881085
uccuguuaaagcggaaaca

SEQ ID NO: 2016865 - RNA, 19 nt, Artificial Sequence
  Description of Artificial Sequence: Synthetic oligonucleotide
  Antisense strand to SEQ ID NO: 2016864
uguuuccgcuuuaacagga

SEQ ID NO: 2016866 - RNA, 19 nt, Artificial Sequence
  Description of Artificial Sequence: Synthetic oligonucleotide
  Sense strand starting at position 2109 of SEQ ID NO: 1881085
ccuguuaaagcggaaacau

SEQ ID NO: 2016867 - RNA, 19 nt, Artificial Sequence
  Description of Artificial Sequence: Synthetic oligonucleotide
  Antisense strand to SEQ ID NO: 2016866
auguuuccgcuuuaacagg

SEQ ID NO: 2016868 - RNA, 19 nt, Artificial Sequence
  Description of Artificial Sequence: Synthetic oligonucleotide
  Sense strand starting at position 2191 of SEQ ID NO: 1881085
agagcaauugcugauacaa

SEQ ID NO: 2016869 - RNA, 19 nt, Artificial Sequence
  Description of Artificial Sequence: Synthetic oligonucleotide
  Antisense strand to SEQ ID NO: 2016868
uuguaucagcaauugcucu

SEQ ID NO: 2016870 - RNA, 19 nt, Artificial Sequence
  Description of Artificial Sequence: Synthetic oligonucleotide
  Sense strand starting at position 2202 of SEQ ID NO: 1881085
ugauacaagugguccagau

SEQ ID NO: 2016871 - RNA, 19 nt, Artificial Sequence
  Description of Artificial Sequence: Synthetic oligonucleotide
  Antisense strand to SEQ ID NO: 2016870
aucuggaccacuuguauca

SEQ ID NO: 2016872 - RNA, 19 nt, Artificial Sequence
  Description of Artificial Sequence: Synthetic oligonucleotide
  Sense strand starting at position 2304 of SEQ ID NO: 1881085
ugcaacauauaguugaauu

SEQ ID NO: 2016873 - RNA, 19 nt, Artificial Sequence
  Description of Artificial Sequence: Synthetic oligonucleotide
  Antisense strand to SEQ ID NO: 2016872
aauucaacuauauguugca

SEQ ID NO: 2016874 - RNA, 19 nt, Artificial Sequence
  Description of Artificial Sequence: Synthetic oligonucleotide
  Sense strand starting at position 2314 of SEQ ID NO: 1881085
aguugaauucuagggcugu

SEQ ID NO: 2016875 - RNA, 19 nt, Artificial Sequence
  Description of Artificial Sequence: Synthetic oligonucleotide
  Antisense strand to SEQ ID NO: 2016874
acagcccuagaauucaacu

SEQ ID NO: 2016876 - RNA, 19 nt, Artificial Sequence
  Description of Artificial Sequence: Synthetic oligonucleotide
  Sense strand starting at position 2318 of SEQ ID NO: 1881085
gaauucuagggcuguacua

SEQ ID NO: 2016877 - RNA, 19 nt, Artificial Sequence
  Description of Artificial Sequence: Synthetic oligonucleotide
  Antisense strand to SEQ ID NO: 2016876
uaguacagcccuagaauuc

SEQ ID NO: 2016878 - RNA, 19 nt, Artificial Sequence
  Description of Artificial Sequence: Synthetic oligonucleotide
  Sense strand starting at position 2331 of SEQ ID NO: 1881085
guacuaggcccauagacaa

SEQ ID NO: 2016879 - RNA, 19 nt, Artificial Sequence
  Description of Artificial Sequence: Synthetic oligonucleotide
  Antisense strand to SEQ ID NO: 2016878
uugucuaugggccuaguac

SEQ ID NO: 2016880 - RNA, 19 nt, Artificial Sequence
  Description of Artificial Sequence: Synthetic oligonucleotide
  Sense strand starting at position 2467 of SEQ ID NO: 1881085
ccugucuucugcuuaggga

SEQ ID NO: 2016881 - RNA, 19 nt, Artificial Sequence
  Description of Artificial Sequence: Synthetic oligonucleotide
  Antisense strand to SEQ ID NO: 2016880
ucccuaagcagaagacagg

SEQ ID NO: 2016882 - RNA, 19 nt, Artificial Sequence
  Description of Artificial Sequence: Synthetic oligonucleotide
  Sense strand starting at position 2635 of SEQ ID NO: 1881085
augccauugccuugaagga

SEQ ID NO: 2016883 - RNA, 19 nt, Artificial Sequence
  Description of Artificial Sequence: Synthetic oligonucleotide
  Antisense strand to SEQ ID NO: 2016882
uccuucaaggcaauggcau

SEQ ID NO: 2016884 - RNA, 19 nt, Artificial Sequence
  Description of Artificial Sequence: Synthetic oligonucleotide
  Sense strand starting at position 2636 of SEQ ID NO: 1881085
ugccauugccuugaaggaa

SEQ ID NO: 2016885 - RNA, 19 nt, Artificial Sequence
  Description of Artificial Sequence: Synthetic oligonucleotide
  Antisense strand to SEQ ID NO: 2016884
uuccuucaaggcaauggca

SEQ ID NO: 2016886 - RNA, 19 nt, Artificial Sequence
  Description of Artificial Sequence: Synthetic oligonucleotide
  Sense strand starting at position 2701 of SEQ ID NO: 1881085
cagguauucccagguacua

SEQ ID NO: 2016887 - RNA, 19 nt, Artificial Sequence
  Description of Artificial Sequence: Synthetic oligonucleotide
  Antisense strand to SEQ ID NO: 2016886
uaguaccugggaauaccug

SEQ ID NO: 2016888 - RNA, 19 nt, Artificial Sequence
  Description of Artificial Sequence: Synthetic oligonucleotide
  Sense strand starting at position 2791 of SEQ ID NO: 1881085
acuccuucugauugagaga

SEQ ID NO: 2016889 - RNA, 19 nt, Artificial Sequence
  Description of Artificial Sequence: Synthetic oligonucleotide
  Antisense strand to SEQ ID NO: 2016888
ucucucaaucagaaggagu

SEQ ID NO: 2016890 - RNA, 19 nt, Artificial Sequence
  Description of Artificial Sequence: Synthetic oligonucleotide
  Sense strand starting at position 3078 of SEQ ID NO: 1881085
guggguguuggcuaugaag

SEQ ID NO: 2016891 - RNA, 19 nt, Artificial Sequence
  Description of Artificial Sequence: Synthetic oligonucleotide
  Antisense strand to SEQ ID NO: 2016890
cuucauagccaacacccac

SEQ ID NO: 2016892 - RNA, 19 nt, Artificial Sequence
  Description of Artificial Sequence: Synthetic oligonucleotide
  Sense strand starting at position 3080 of SEQ ID NO: 1881085
ggguguuggcuaugaagug

SEQ ID NO: 2016893 - RNA, 19 nt, Artificial Sequence
  Description of Artificial Sequence: Synthetic oligonucleotide
  Antisense strand to SEQ ID NO: 2016892
cacuucauagccaacaccc

SEQ ID NO: 2016894 - RNA, 19 nt, Artificial Sequence
  Description of Artificial Sequence: Synthetic oligonucleotide
  Sense strand starting at position 3094 of SEQ ID NO: 1881085
aagugagguuccucugucu

SEQ ID NO: 2016895 - RNA, 19 nt, Artificial Sequence
  Description of Artificial Sequence: Synthetic oligonucleotide
  Antisense strand to SEQ ID NO: 2016894
agacagaggaaccucacuu

SEQ ID NO: 2016896 - RNA, 19 nt, Artificial Sequence
  Description of Artificial Sequence: Synthetic oligonucleotide
  Sense strand starting at position 3100 of SEQ ID NO: 1881085
gguuccucugucuguagaa

SEQ ID NO: 2016897 - RNA, 19 nt, Artificial Sequence
  Description of Artificial Sequence: Synthetic oligonucleotide
  Antisense strand to SEQ ID NO: 2016896
uucuacagacagaggaacc

SEQ ID NO: 2016898 - RNA, 19 nt, Artificial Sequence
  Description of Artificial Sequence: Synthetic oligonucleotide
  Sense strand starting at position 3101 of SEQ ID NO: 1881085
guuccucugucuguagaaa

SEQ ID NO: 2016899 - RNA, 19 nt, Artificial Sequence
  Description of Artificial Sequence: Synthetic oligonucleotide
  Antisense strand to SEQ ID NO: 2016898
uuucuacagacagaggaac

SEQ ID NO: 2016900 - RNA, 19 nt, Artificial Sequence
  Description of Artificial Sequence: Synthetic oligonucleotide
  Sense strand starting at position 3135 of SEQ ID NO: 1881085
ggaagaacugcauguugca

SEQ ID NO: 2016901 - RNA, 19 nt, Artificial Sequence
  Description of Artificial Sequence: Synthetic oligonucleotide
  Antisense strand to SEQ ID NO: 2016900
ugcaacaugcaguucuucc

SEQ ID NO: 2016902 - RNA, 19 nt, Artificial Sequence
  Description of Artificial Sequence: Synthetic oligonucleotide
  Sense strand starting at position 3308 of SEQ ID NO: 1881085
uugguacuugcugauugua

SEQ ID NO: 2016903 - RNA, 19 nt, Artificial Sequence
  Description of Artificial Sequence: Synthetic oligonucleotide
  Antisense strand to SEQ ID NO: 2016902
uacaaucagcaaguaccaa

SEQ ID NO: 2016904 - RNA, 19 nt, Artificial Sequence
  Description of Artificial Sequence: Synthetic oligonucleotide
  Sense strand starting at position 3310 of SEQ ID NO: 1881085
gguacuugcugauuguaga

SEQ ID NO: 2016905 - RNA, 19 nt, Artificial Sequence
  Description of Artificial Sequence: Synthetic oligonucleotide
  Antisense strand to SEQ ID NO: 2016904
ucuacaaucagcaaguacc

SEQ ID NO: 2016906 - RNA, 19 nt, Artificial Sequence
  Description of Artificial Sequence: Synthetic oligonucleotide
  Sense strand starting at position 3443 of SEQ ID NO: 1881085
uggcuacagagguguuuau

SEQ ID NO: 2016907 - RNA, 19 nt, Artificial Sequence
  Description of Artificial Sequence: Synthetic oligonucleotide
  Antisense strand to SEQ ID NO: 2016906
auaaacaccucuguagcca

SEQ ID NO: 2016908 - RNA, 19 nt, Artificial Sequence
  Description of Artificial Sequence: Synthetic oligonucleotide
  Sense strand starting at position 3447 of SEQ ID NO: 1881085
uacagagguguuuauguca

SEQ ID NO: 2016909 - RNA, 19 nt, Artificial Sequence
  Description of Artificial Sequence: Synthetic oligonucleotide
  Antisense strand to SEQ ID NO: 2016908
ugacauaaacaccucugua

SEQ ID NO: 2016910 - RNA, 19 nt, Artificial Sequence
  Description of Artificial Sequence: Synthetic oligonucleotide
  Sense strand starting at position 3531 of SEQ ID NO: 1881085
agcucuuuaugguugagag

SEQ ID NO: 2016911 - RNA, 19 nt, Artificial Sequence
  Description of Artificial Sequence: Synthetic oligonucleotide
  Antisense strand to SEQ ID NO: 2016910
cucucaaccauaaagagcu

SEQ ID NO: 2016912 - RNA, 19 nt, Artificial Sequence
  Description of Artificial Sequence: Synthetic oligonucleotide
  Sense strand starting at position 3532 of SEQ ID NO: 1881085
gcucuuuaugguugagaga

SEQ ID NO: 2016913 - RNA, 19 nt, Artificial Sequence
  Description of Artificial Sequence: Synthetic oligonucleotide
  Antisense strand to SEQ ID NO: 2016912
ucucucaaccauaaagagc

SEQ ID NO: 2016914 - RNA, 19 nt, Artificial Sequence
  Description of Artificial Sequence: Synthetic oligonucleotide
  Sense strand starting at position 3558 of SEQ ID NO: 1881085
agggacugugccugguaau

SEQ ID NO: 2016915 - RNA, 19 nt, Artificial Sequence
  Description of Artificial Sequence: Synthetic oligonucleotide
  Antisense strand to SEQ ID NO: 2016914
auuaccaggcacagucccu

SEQ ID NO: 2016916 - RNA, 19 nt, Artificial Sequence
  Description of Artificial Sequence: Synthetic oligonucleotide
  Sense strand starting at position 3559 of SEQ ID NO: 1881085
gggacugugccugguaauc

SEQ ID NO: 2016917 - RNA, 19 nt, Artificial Sequence
  Description of Artificial Sequence: Synthetic oligonucleotide
  Antisense strand to SEQ ID NO: 2016916
gauuaccaggcacaguccc

SEQ ID NO: 2016918 - RNA, 19 nt, Artificial Sequence
  Description of Artificial Sequence: Synthetic oligonucleotide
  Sense strand starting at position 3674 of SEQ ID NO: 1881085
gcauaaacagcuuagauca

SEQ ID NO: 2016919 - RNA, 19 nt, Artificial Sequence
  Description of Artificial Sequence: Synthetic oligonucleotide
  Antisense strand to SEQ ID NO: 2016918
ugaucuaagcuguuuaugc

SEQ ID NO: 2016920 - RNA, 19 nt, Artificial Sequence
  Description of Artificial Sequence: Synthetic oligonucleotide
  Sense strand starting at position 3684 of SEQ ID NO: 1881085
cuuagaucacaucacguaa

SEQ ID NO: 2016921 - RNA, 19 nt, Artificial Sequence
  Description of Artificial Sequence: Synthetic oligonucleotide
  Antisense strand to SEQ ID NO: 2016920
uuacgugaugugaucuaag

SEQ ID NO: 2016922 - RNA, 19 nt, Artificial Sequence
  Description of Artificial Sequence: Synthetic oligonucleotide
  Sense strand starting at position 3698 of SEQ ID NO: 1881085
cguaaagcauucccaagaa

SEQ ID NO: 2016923 - RNA, 19 nt, Artificial Sequence
  Description of Artificial Sequence: Synthetic oligonucleotide
  Antisense strand to SEQ ID NO: 2016922
uucuugggaaugcuuuacg

SEQ ID NO: 2016924 - RNA, 19 nt, Artificial Sequence
  Description of Artificial Sequence: Synthetic oligonucleotide
  Sense strand starting at position 3914 of SEQ ID NO: 1881085
agcuguguuaaggaaauaa

SEQ ID NO: 2016925 - RNA, 19 nt, Artificial Sequence
  Description of Artificial Sequence: Synthetic oligonucleotide
  Antisense strand to SEQ ID NO: 2016924
uuauuuccuuaacacagcu

SEQ ID NO: 2016926 - RNA, 19 nt, Artificial Sequence
  Description of Artificial Sequence: Synthetic oligonucleotide
  Sense strand starting at position 10 of SEQ ID NO: 1881086
aguaguaaugaucauguua

SEQ ID NO: 2016927 - RNA, 19 nt, Artificial Sequence
  Description of Artificial Sequence: Synthetic oligonucleotide
  Antisense strand to SEQ ID NO: 2016926
uaacaugaucauuacuacu

SEQ ID NO: 2016928 - RNA, 19 nt, Artificial Sequence
  Description of Artificial Sequence: Synthetic oligonucleotide
  Sense strand starting at position 128 of SEQ ID NO: 1881086
cccagagugagauaugugu

SEQ ID NO: 2016929 - RNA, 19 nt, Artificial Sequence
  Description of Artificial Sequence: Synthetic oligonucleotide
  Antisense strand to SEQ ID NO: 2016928
acacauaucucacucuggg

SEQ ID NO: 2016930 - RNA, 19 nt, Artificial Sequence
  Description of Artificial Sequence: Synthetic oligonucleotide
  Sense strand starting at position 130 of SEQ ID NO: 1881086
cagagugagauauguguca

SEQ ID NO: 2016931 - RNA, 19 nt, Artificial Sequence
  Description of Artificial Sequence: Synthetic oligonucleotide
  Antisense strand to SEQ ID NO: 2016930
ugacacauaucucacucug

SEQ ID NO: 2016932 - RNA, 19 nt, Artificial Sequence
  Description of Artificial Sequence: Synthetic oligonucleotide
  Sense strand starting at position 135 of SEQ ID NO: 1881086
ugagauaugugucaggaaa

SEQ ID NO: 2016933 - RNA, 19 nt, Artificial Sequence
  Description of Artificial Sequence: Synthetic oligonucleotide
  Antisense strand to SEQ ID NO: 2016932
uuuccugacacauaucuca

SEQ ID NO: 2016934 - RNA, 19 nt, Artificial Sequence
  Description of Artificial Sequence: Synthetic oligonucleotide
  Sense strand starting at position 137 of SEQ ID NO: 1881086
agauaugugucaggaaauu

SEQ ID NO: 2016935 - RNA, 19 nt, Artificial Sequence
  Description of Artificial Sequence: Synthetic oligonucleotide
  Antisense strand to SEQ ID NO: 2016934
aauuuccugacacauaucu

SEQ ID NO: 2016936 - RNA, 19 nt, Artificial Sequence
  Description of Artificial Sequence: Synthetic oligonucleotide
  Sense strand starting at position 149 of SEQ ID NO: 1881086
ggaaauuggagcuguauag

SEQ ID NO: 2016937 - RNA, 19 nt, Artificial Sequence
  Description of Artificial Sequence: Synthetic oligonucleotide
  Antisense strand to SEQ ID NO: 2016936
cuauacagcuccaauuucc

SEQ ID NO: 2016938 - RNA, 19 nt, Artificial Sequence
  Description of Artificial Sequence: Synthetic oligonucleotide
  Sense strand starting at position 156 of SEQ ID NO: 1881086
ggagcuguauagucuuauu

SEQ ID NO: 2016939 - RNA, 19 nt, Artificial Sequence
  Description of Artificial Sequence: Synthetic oligonucleotide
  Antisense strand to SEQ ID NO: 2016938
aauaagacuauacagcucc

SEQ ID NO: 2016940 - RNA, 19 nt, Artificial Sequence
  Description of Artificial Sequence: Synthetic oligonucleotide
  Sense strand starting at position 338 of SEQ ID NO: 1881086
uugaucacggcucauagaa

SEQ ID NO: 2016941 - RNA, 19 nt, Artificial Sequence
  Description of Artificial Sequence: Synthetic oligonucleotide
  Antisense strand to SEQ ID NO: 2016940
uucuaugagccgugaucaa

SEQ ID NO: 2016942 - RNA, 19 nt, Artificial Sequence
  Description of Artificial Sequence: Synthetic oligonucleotide
  Sense strand starting at position 461 of SEQ ID NO: 1881086
gucucccuguguuguacaa

SEQ ID NO: 2016943 - RNA, 19 nt, Artificial Sequence
  Description of Artificial Sequence: Synthetic oligonucleotide
  Antisense strand to SEQ ID NO: 2016942
uuguacaacacagggagac

SEQ ID NO: 2016944 - RNA, 19 nt, Artificial Sequence
  Description of Artificial Sequence: Synthetic oligonucleotide
  Sense strand starting at position 463 of SEQ ID NO: 1881086
cucccuguguuguacaaau

SEQ ID NO: 2016945 - RNA, 19 nt, Artificial Sequence
  Description of Artificial Sequence: Synthetic oligonucleotide
  Antisense strand to SEQ ID NO: 2016944
auuuguacaacacagggag

SEQ ID NO: 2016946 - RNA, 19 nt, Artificial Sequence
  Description of Artificial Sequence: Synthetic oligonucleotide
  Sense strand starting at position 465 of SEQ ID NO: 1881086
cccuguguuguacaaauug

SEQ ID NO: 2016947 - RNA, 19 nt, Artificial Sequence
  Description of Artificial Sequence: Synthetic oligonucleotide
  Antisense strand to SEQ ID NO: 2016946
caauuuguacaacacaggg

SEQ ID NO: 2016948 - RNA, 19 nt, Artificial Sequence
  Description of Artificial Sequence: Synthetic oligonucleotide
  Sense strand starting at position 473 of SEQ ID NO: 1881086
uguacaaauuggucucaaa

SEQ ID NO: 2016949 - RNA, 19 nt, Artificial Sequence
  Description of Artificial Sequence: Synthetic oligonucleotide
  Antisense strand to SEQ ID NO: 2016948
uuugagaccaauuuguaca

SEQ ID NO: 2016950 - RNA, 19 nt, Artificial Sequence
  Description of Artificial Sequence: Synthetic oligonucleotide
  Sense strand starting at position 566 of SEQ ID NO: 1881086
gcccguuuauaauuuagua

SEQ ID NO: 2016951 - RNA, 19 nt, Artificial Sequence
  Description of Artificial Sequence: Synthetic oligonucleotide
  Antisense strand to SEQ ID NO: 2016950
uacuaaauuauaaacgggc

SEQ ID NO: 2016952 - RNA, 19 nt, Artificial Sequence
  Description of Artificial Sequence: Synthetic oligonucleotide
  Sense strand starting at position 597 of SEQ ID NO: 1881086
acuguccucuucguuaaau

SEQ ID NO: 2016953 - RNA, 19 nt, Artificial Sequence
  Description of Artificial Sequence: Synthetic oligonucleotide
  Antisense strand to SEQ ID NO: 2016952
auuuaacgaagaggacagu

SEQ ID NO: 2016954 - RNA, 19 nt, Artificial Sequence
  Description of Artificial Sequence: Synthetic oligonucleotide
  Sense strand starting at position 598 of SEQ ID NO: 1881086
cuguccucuucguuaaaua

SEQ ID NO: 2016955 - RNA, 19 nt, Artificial Sequence
  Description of Artificial Sequence: Synthetic oligonucleotide
  Antisense strand to SEQ ID NO: 2016954
uauuuaacgaagaggacag

SEQ ID NO: 2016956 - RNA, 19 nt, Artificial Sequence
  Description of Artificial Sequence: Synthetic oligonucleotide
  Sense strand starting at position 599 of SEQ ID NO: 1881086
uguccucuucguuaaauag

SEQ ID NO: 2016957 - RNA, 19 nt, Artificial Sequence
  Description of Artificial Sequence: Synthetic oligonucleotide
  Antisense strand to SEQ ID NO: 2016956
cuauuuaacgaagaggaca

SEQ ID NO: 2016958 - RNA, 19 nt, Artificial Sequence
  Description of Artificial Sequence: Synthetic oligonucleotide
  Sense strand starting at position 1104 of SEQ ID NO: 1881086
aaagcaaggucuuugagac

SEQ ID NO: 2016959 - RNA, 19 nt, Artificial Sequence
  Description of Artificial Sequence: Synthetic oligonucleotide
  Antisense strand to SEQ ID NO: 2016958
gucucaaagaccuugcuuu

SEQ ID NO: 2016960 - RNA, 19 nt, Artificial Sequence
  Description of Artificial Sequence: Synthetic oligonucleotide
  Sense strand starting at position 1177 of SEQ ID NO: 1881086
cugucaauguuagacauuu

SEQ ID NO: 2016961 - RNA, 19 nt, Artificial Sequence
  Description of Artificial Sequence: Synthetic oligonucleotide
  Antisense strand to SEQ ID NO: 2016960
aaaugucuaacauugacag

SEQ ID NO: 2016962 - RNA, 19 nt, Artificial Sequence
  Description of Artificial Sequence: Synthetic oligonucleotide
  Sense strand starting at position 1716 of SEQ ID NO: 1881086
cggaaaucauaacaaaguu

SEQ ID NO: 2016963 - RNA, 19 nt, Artificial Sequence
  Description of Artificial Sequence: Synthetic oligonucleotide
  Antisense strand to SEQ ID NO: 2016962
aacuuuguuaugauuuccg

SEQ ID NO: 2016964 - RNA, 19 nt, Artificial Sequence
  Description of Artificial Sequence: Synthetic oligonucleotide
  Sense strand starting at position 2040 of SEQ ID NO: 1881086
uguggcacuccgugaaauc

SEQ ID NO: 2016965 - RNA, 19 nt, Artificial Sequence
  Description of Artificial Sequence: Synthetic oligonucleotide
  Antisense strand to SEQ ID NO: 2016964
gauuucacggagugccaca

SEQ ID NO: 2016966 - RNA, 19 nt, Artificial Sequence
  Description of Artificial Sequence: Synthetic oligonucleotide
  Sense strand starting at position 2041 of SEQ ID NO: 1881086
guggcacuccgugaaauca

SEQ ID NO: 2016967 - RNA, 19 nt, Artificial Sequence
  Description of Artificial Sequence: Synthetic oligonucleotide
  Antisense strand to SEQ ID NO: 2016966
ugauuucacggagugccac

SEQ ID NO: 2016968 - RNA, 19 nt, Artificial Sequence
  Description of Artificial Sequence: Synthetic oligonucleotide
  Sense strand starting at position 2050 of SEQ ID NO: 1881086
cgugaaaucagacguuauc

SEQ ID NO: 2016969 - RNA, 19 nt, Artificial Sequence
  Description of Artificial Sequence: Synthetic oligonucleotide
  Antisense strand to SEQ ID NO: 2016968
gauaacgucugauuucacg

SEQ ID NO: 2016970 - RNA, 19 nt, Artificial Sequence
  Description of Artificial Sequence: Synthetic oligonucleotide
  Sense strand starting at position 2107 of SEQ ID NO: 1881086
cagcgucuggugcaagaaa

SEQ ID NO: 2016971 - RNA, 19 nt, Artificial Sequence
  Description of Artificial Sequence: Synthetic oligonucleotide
  Antisense strand to SEQ ID NO: 2016970
uuucuugcaccagacgcug

SEQ ID NO: 2016972 - RNA, 19 nt, Artificial Sequence
  Description of Artificial Sequence: Synthetic oligonucleotide
  Sense strand starting at position 2121 of SEQ ID NO: 1881086
agaaauugcucaggacuug

SEQ ID NO: 2016973 - RNA, 19 nt, Artificial Sequence
  Description of Artificial Sequence: Synthetic oligonucleotide
  Antisense strand to SEQ ID NO: 2016972
caaguccugagcaauuucu

SEQ ID NO: 2016974 - RNA, 19 nt, Artificial Sequence
  Description of Artificial Sequence: Synthetic oligonucleotide
  Sense strand starting at position 2173 of SEQ ID NO: 1881086
ggagcuuugcaggaggcaa

SEQ ID NO: 2016975 - RNA, 19 nt, Artificial Sequence
  Description of Artificial Sequence: Synthetic oligonucleotide
  Antisense strand to SEQ ID NO: 2016974
uugccuccugcaaagcucc

SEQ ID NO: 2016976 - RNA, 19 nt, Artificial Sequence
  Description of Artificial Sequence: Synthetic oligonucleotide
  Sense strand starting at position 2221 of SEQ ID NO: 1881086
gacagcaaccugugugcua

SEQ ID NO: 2016977 - RNA, 19 nt, Artificial Sequence
  Description of Artificial Sequence: Synthetic oligonucleotide
  Antisense strand to SEQ ID NO: 2016976
uagcacacagguugcuguc

SEQ ID NO: 2016978 - RNA, 19 nt, Artificial Sequence
  Description of Artificial Sequence: Synthetic oligonucleotide
  Sense strand starting at position 2252 of SEQ ID NO: 1881086
ggcuaacuauuaugccaaa

SEQ ID NO: 2016979 - RNA, 19 nt, Artificial Sequence
  Description of Artificial Sequence: Synthetic oligonucleotide
  Antisense strand to SEQ ID NO: 2016978
uuuggcauaauaguuagcc

SEQ ID NO: 2016980 - RNA, 19 nt, Artificial Sequence
  Description of Artificial Sequence: Synthetic oligonucleotide
  Sense strand starting at position 2688 of SEQ ID NO: 1881086
uccuguuauuggugguuau

SEQ ID NO: 2016981 - RNA, 19 nt, Artificial Sequence
  Description of Artificial Sequence: Synthetic oligonucleotide
  Antisense strand to SEQ ID NO: 2016980
auaaccaccaauaacagga

SEQ ID NO: 2016982 - RNA, 19 nt, Artificial Sequence
  Description of Artificial Sequence: Synthetic oligonucleotide
  Sense strand starting at position 2691 of SEQ ID NO: 1881086
uguuauuggugguuaugaa

SEQ ID NO: 2016983 - RNA, 19 nt, Artificial Sequence
  Description of Artificial Sequence: Synthetic oligonucleotide
  Antisense strand to SEQ ID NO: 2016982
uucauaaccaccaauaaca

SEQ ID NO: 2016984 - RNA, 19 nt, Artificial Sequence
  Description of Artificial Sequence: Synthetic oligonucleotide
  Sense strand starting at position 2692 of SEQ ID NO: 1881086
guuauuggugguuaugaag

SEQ ID NO: 2016985 - RNA, 19 nt, Artificial Sequence
  Description of Artificial Sequence: Synthetic oligonucleotide
  Antisense strand to SEQ ID NO: 2016984
cuucauaaccaccaauaac

SEQ ID NO: 2016986 - RNA, 19 nt, Artificial Sequence
  Description of Artificial Sequence: Synthetic oligonucleotide
  Sense strand starting at position 2698 of SEQ ID NO: 1881086
ggugguuaugaagguuaga

SEQ ID NO: 2016987 - RNA, 19 nt, Artificial Sequence
  Description of Artificial Sequence: Synthetic oligonucleotide
  Antisense strand to SEQ ID NO: 2016986
ucuaaccuucauaaccacc

SEQ ID NO: 2016988 - RNA, 19 nt, Artificial Sequence
  Description of Artificial Sequence: Synthetic oligonucleotide
  Sense strand starting at position 2740 of SEQ ID NO: 1881086
gauaccuaaguguaugauu

SEQ ID NO: 2016989 - RNA, 19 nt, Artificial Sequence
  Description of Artificial Sequence: Synthetic oligonucleotide
  Antisense strand to SEQ ID NO: 2016988
aaucauacacuuagguauc

SEQ ID NO: 2016990 - RNA, 19 nt, Artificial Sequence
  Description of Artificial Sequence: Synthetic oligonucleotide
  Sense strand starting at position 2745 of SEQ ID NO: 1881086
cuaaguguaugauugcaag

SEQ ID NO: 2016991 - RNA, 19 nt, Artificial Sequence
  Description of Artificial Sequence: Synthetic oligonucleotide
  Antisense strand to SEQ ID NO: 2016990
cuugcaaucauacacuuag

SEQ ID NO: 2016992 - RNA, 19 nt, Artificial Sequence
  Description of Artificial Sequence: Synthetic oligonucleotide
  Sense strand starting at position 2781 of SEQ ID NO: 1881086
gaaaucagguaauggcauu

SEQ ID NO: 2016993 - RNA, 19 nt, Artificial Sequence
  Description of Artificial Sequence: Synthetic oligonucleotide
  Antisense strand to SEQ ID NO: 2016992
aaugccauuaccugauuuc

SEQ ID NO: 2016994 - RNA, 19 nt, Artificial Sequence
  Description of Artificial Sequence: Synthetic oligonucleotide
  Sense strand starting at position 3430 of SEQ ID NO: 1881086
ugcugugcuguuccuguaa

SEQ ID NO: 2016995 - RNA, 19 nt, Artificial Sequence
  Description of Artificial Sequence: Synthetic oligonucleotide
  Antisense strand to SEQ ID NO: 2016994
uuacaggaacagcacagca

SEQ ID NO: 2016996 - RNA, 19 nt, Artificial Sequence
  Description of Artificial Sequence: Synthetic oligonucleotide
  Sense strand starting at position 3433 of SEQ ID NO: 1881086
ugugcuguuccuguaagua

SEQ ID NO: 2016997 - RNA, 19 nt, Artificial Sequence
  Description of Artificial Sequence: Synthetic oligonucleotide
  Antisense strand to SEQ ID NO: 2016996
uacuuacaggaacagcaca

SEQ ID NO: 2016998 - RNA, 19 nt, Artificial Sequence
  Description of Artificial Sequence: Synthetic oligonucleotide
  Sense strand starting at position 3441 of SEQ ID NO: 1881086
uccuguaaguaugcuauua

SEQ ID NO: 2016999 - RNA, 19 nt, Artificial Sequence
  Description of Artificial Sequence: Synthetic oligonucleotide
  Antisense strand to SEQ ID NO: 2016998
uaauagcauacuuacagga

SEQ ID NO: 2017000 - RNA, 19 nt, Artificial Sequence
  Description of Artificial Sequence: Synthetic oligonucleotide
  Sense strand starting at position 3443 of SEQ ID NO: 1881086
cuguaaguaugcuauuaaa

SEQ ID NO: 2017001 - RNA, 19 nt, Artificial Sequence
  Description of Artificial Sequence: Synthetic oligonucleotide
  Antisense strand to SEQ ID NO: 2017000
uuuaauagcauacuuacag

SEQ ID NO: 2017002 - RNA, 19 nt, Artificial Sequence
  Description of Artificial Sequence: Synthetic oligonucleotide
  Sense strand starting at position 3939 of SEQ ID NO: 1881086
ccuggcuaauguugugaaa

SEQ ID NO: 2017003 - RNA, 19 nt, Artificial Sequence
  Description of Artificial Sequence: Synthetic oligonucleotide
  Antisense strand to SEQ ID NO: 2017002
uuucacaacauuagccagg

SEQ ID NO: 2017004 - RNA, 19 nt, Artificial Sequence
  Description of Artificial Sequence: Synthetic oligonucleotide
  Sense strand starting at position 4 of SEQ ID NO: 1881087
ggaacagaguaucugucaa

SEQ ID NO: 2017005 - RNA, 19 nt, Artificial Sequence
  Description of Artificial Sequence: Synthetic oligonucleotide
  Antisense strand to SEQ ID NO: 2017004
uugacagauacucuguucc

SEQ ID NO: 2017006 - RNA, 19 nt, Artificial Sequence
  Description of Artificial Sequence: Synthetic oligonucleotide
  Sense strand starting at position 56 of SEQ ID NO: 1881087
ucaauuggugcucacuaca

SEQ ID NO: 2017007 - RNA, 19 nt, Artificial Sequence
  Description of Artificial Sequence: Synthetic oligonucleotide
  Antisense strand to SEQ ID NO: 2017006
uguagugagcaccaauuga

SEQ ID NO: 2017008 - RNA, 19 nt, Artificial Sequence
  Description of Artificial Sequence: Synthetic oligonucleotide
  Sense strand starting at position 143 of SEQ ID NO: 1881087
ucccgaguugggcagaaua

SEQ ID NO: 2017009 - RNA, 19 nt, Artificial Sequence
  Description of Artificial Sequence: Synthetic oligonucleotide
  Antisense strand to SEQ ID NO: 2017008
uauucugcccaacucggga

SEQ ID NO: 2017010 - RNA, 19 nt, Artificial Sequence
  Description of Artificial Sequence: Synthetic oligonucleotide
  Sense strand starting at position 145 of SEQ ID NO: 1881087
ccgaguugggcagaauaau

SEQ ID NO: 2017011 - RNA, 19 nt, Artificial Sequence
  Description of Artificial Sequence: Synthetic oligonucleotide
  Antisense strand to SEQ ID NO: 2017010
auuauucugcccaacucgg

SEQ ID NO: 2017012 - RNA, 19 nt, Artificial Sequence
  Description of Artificial Sequence: Synthetic oligonucleotide
  Sense strand starting at position 168 of SEQ ID NO: 1881087
uuagccugccuagaauauu

SEQ ID NO: 2017013 - RNA, 19 nt, Artificial Sequence
  Description of Artificial Sequence: Synthetic oligonucleotide
  Antisense strand to SEQ ID NO: 2017012
aauauucuaggcaggcuaa

SEQ ID NO: 2017014 - RNA, 19 nt, Artificial Sequence
  Description of Artificial Sequence: Synthetic oligonucleotide
  Sense strand starting at position 171 of SEQ ID NO: 1881087
gccugccuagaauauuaau

SEQ ID NO: 2017015 - RNA, 19 nt, Artificial Sequence
  Description of Artificial Sequence: Synthetic oligonucleotide
  Antisense strand to SEQ ID NO: 2017014
auuaauauucuaggcaggc

SEQ ID NO: 2017016 - RNA, 19 nt, Artificial Sequence
  Description of Artificial Sequence: Synthetic oligonucleotide
  Sense strand starting at position 240 of SEQ ID NO: 1881087
ggaugaguucaagguuauu

SEQ ID NO: 2017017 - RNA, 19 nt, Artificial Sequence
  Description of Artificial Sequence: Synthetic oligonucleotide
  Antisense strand to SEQ ID NO: 2017016
aauaaccuugaacucaucc

SEQ ID NO: 2017018 - RNA, 19 nt, Artificial Sequence
  Description of Artificial Sequence: Synthetic oligonucleotide
  Sense strand starting at position 414 of SEQ ID NO: 1881087
acaguaacucuguauacua

SEQ ID NO: 2017019 - RNA, 19 nt, Artificial Sequence
  Description of Artificial Sequence: Synthetic oligonucleotide
  Antisense strand to SEQ ID NO: 2017018
uaguauacagaguuacugu

SEQ ID NO: 2017020 - RNA, 19 nt, Artificial Sequence
  Description of Artificial Sequence: Synthetic oligonucleotide
  Sense strand starting at position 479 of SEQ ID NO: 1881087
gugaaauguacacacaugu

SEQ ID NO: 2017021 - RNA, 19 nt, Artificial Sequence
  Description of Artificial Sequence: Synthetic oligonucleotide
  Antisense strand to SEQ ID NO: 2017020
acauguguguacauuucac

SEQ ID NO: 2017022 - RNA, 19 nt, Artificial Sequence
  Description of Artificial Sequence: Synthetic oligonucleotide
  Sense strand starting at position 861 of SEQ ID NO: 1881087
gguggcauaccagaguuau

SEQ ID NO: 2017023 - RNA, 19 nt, Artificial Sequence
  Description of Artificial Sequence: Synthetic oligonucleotide
  Antisense strand to SEQ ID NO: 2017022
auaacucugguaugccacc

SEQ ID NO: 2017024 - RNA, 19 nt, Artificial Sequence
  Description of Artificial Sequence: Synthetic oligonucleotide
  Sense strand starting at position 867 of SEQ ID NO: 1881087
auaccagaguuauccaaug

SEQ ID NO: 2017025 - RNA, 19 nt, Artificial Sequence
  Description of Artificial Sequence: Synthetic oligonucleotide
  Antisense strand to SEQ ID NO: 2017024
cauuggauaacucugguau

SEQ ID NO: 2017026 - RNA, 19 nt, Artificial Sequence
  Description of Artificial Sequence: Synthetic oligonucleotide
  Sense strand starting at position 872 of SEQ ID NO: 1881087
agaguuauccaauggagcu

SEQ ID NO: 2017027 - RNA, 19 nt, Artificial Sequence
  Description of Artificial Sequence: Synthetic oligonucleotide
  Antisense strand to SEQ ID NO: 2017026
agcuccauuggauaacucu

SEQ ID NO: 2017028 - RNA, 19 nt, Artificial Sequence
  Description of Artificial Sequence: Synthetic oligonucleotide
  Sense strand starting at position 1128 of SEQ ID NO: 1881087
auggauuagucacucuuua

SEQ ID NO: 2017029 - RNA, 19 nt, Artificial Sequence
  Description of Artificial Sequence: Synthetic oligonucleotide
  Antisense strand to SEQ ID NO: 2017028
uaaagagugacuaauccau

SEQ ID NO: 2017030 - RNA, 19 nt, Artificial Sequence
  Description of Artificial Sequence: Synthetic oligonucleotide
  Sense strand starting at position 1188 of SEQ ID NO: 1881087
gcacucagagccuaauaau

SEQ ID NO: 2017031 - RNA, 19 nt, Artificial Sequence
  Description of Artificial Sequence: Synthetic oligonucleotide
  Antisense strand to SEQ ID NO: 2017030
auuauuaggcucugagugc

SEQ ID NO: 2017032 - RNA, 19 nt, Artificial Sequence
  Description of Artificial Sequence: Synthetic oligonucleotide
  Sense strand starting at position 1298 of SEQ ID NO: 1881087
gccuguauuucccuaucuu

SEQ ID NO: 2017033 - RNA, 19 nt, Artificial Sequence
  Description of Artificial Sequence: Synthetic oligonucleotide
  Antisense strand to SEQ ID NO: 2017032
aagauagggaaauacaggc

SEQ ID NO: 2017034 - RNA, 19 nt, Artificial Sequence
  Description of Artificial Sequence: Synthetic oligonucleotide
  Sense strand starting at position 1861 of SEQ ID NO: 1881087
agcugaaucuagucuacag

SEQ ID NO: 2017035 - RNA, 19 nt, Artificial Sequence
  Description of Artificial Sequence: Synthetic oligonucleotide
  Antisense strand to SEQ ID NO: 2017034
cuguagacuagauucagcu

SEQ ID NO: 2017036 - RNA, 19 nt, Artificial Sequence
  Description of Artificial Sequence: Synthetic oligonucleotide
  Sense strand starting at position 2078 of SEQ ID NO: 1881087
ggcaguuauauggaguuau

SEQ ID NO: 2017037 - RNA, 19 nt, Artificial Sequence
  Description of Artificial Sequence: Synthetic oligonucleotide
  Antisense strand to SEQ ID NO: 2017036
auaacuccauauaacugcc

SEQ ID NO: 2017038 - RNA, 19 nt, Artificial Sequence
  Description of Artificial Sequence: Synthetic oligonucleotide
  Sense strand starting at position 2082 of SEQ ID NO: 1881087
guuauauggaguuauaugu

SEQ ID NO: 2017039 - RNA, 19 nt, Artificial Sequence
  Description of Artificial Sequence: Synthetic oligonucleotide
  Antisense strand to SEQ ID NO: 2017038
acauauaacuccauauaac

SEQ ID NO: 2017040 - RNA, 19 nt, Artificial Sequence
  Description of Artificial Sequence: Synthetic oligonucleotide
  Sense strand starting at position 2365 of SEQ ID NO: 1881087
ggugcauugagagauucuu

SEQ ID NO: 2017041 - RNA, 19 nt, Artificial Sequence
  Description of Artificial Sequence: Synthetic oligonucleotide
  Antisense strand to SEQ ID NO: 2017040
aagaaucucucaaugcacc

SEQ ID NO: 2017042 - RNA, 19 nt, Artificial Sequence
  Description of Artificial Sequence: Synthetic oligonucleotide
  Sense strand starting at position 2373 of SEQ ID NO: 1881087
gagagauucuuauuagcau

SEQ ID NO: 2017043 - RNA, 19 nt, Artificial Sequence
  Description of Artificial Sequence: Synthetic oligonucleotide
  Antisense strand to SEQ ID NO: 2017042
augcuaauaagaaucucuc

SEQ ID NO: 2017044 - RNA, 19 nt, Artificial Sequence
  Description of Artificial Sequence: Synthetic oligonucleotide
  Sense strand starting at position 2402 of SEQ ID NO: 1881087
guuaauuucugccuuugag

SEQ ID NO: 2017045 - RNA, 19 nt, Artificial Sequence
  Description of Artificial Sequence: Synthetic oligonucleotide
  Antisense strand to SEQ ID NO: 2017044
cucaaaggcagaaauuaac

SEQ ID NO: 2017046 - RNA, 19 nt, Artificial Sequence
  Description of Artificial Sequence: Synthetic oligonucleotide
  Sense strand starting at position 2769 of SEQ ID NO: 1881087
uuaugugcauuucugguaa

SEQ ID NO: 2017047 - RNA, 19 nt, Artificial Sequence
  Description of Artificial Sequence: Synthetic oligonucleotide
  Antisense strand to SEQ ID NO: 2017046
uuaccagaaaugcacauaa

SEQ ID NO: 2017048 - RNA, 19 nt, Artificial Sequence
  Description of Artificial Sequence: Synthetic oligonucleotide
  Sense strand starting at position 2830 of SEQ ID NO: 1881087
uagugaugagcugaaaguu

SEQ ID NO: 2017049 - RNA, 19 nt, Artificial Sequence
  Description of Artificial Sequence: Synthetic oligonucleotide
  Antisense strand to SEQ ID NO: 2017048
aacuuucagcucaucacua

SEQ ID NO: 2017050 - RNA, 19 nt, Artificial Sequence
  Description of Artificial Sequence: Synthetic oligonucleotide
  Sense strand starting at position 2836 of SEQ ID NO: 1881087
ugagcugaaaguuguaaca

SEQ ID NO: 2017051 - RNA, 19 nt, Artificial Sequence
  Description of Artificial Sequence: Synthetic oligonucleotide
  Antisense strand to SEQ ID NO: 2017050
uguuacaacuuucagcuca

SEQ ID NO: 2017052 - RNA, 19 nt, Artificial Sequence
  Description of Artificial Sequence: Synthetic oligonucleotide
  Sense strand starting at position 2858 of SEQ ID NO: 1881087
accagucucccauauguua

SEQ ID NO: 2017053 - RNA, 19 nt, Artificial Sequence
  Description of Artificial Sequence: Synthetic oligonucleotide
  Antisense strand to SEQ ID NO: 2017052
uaacauaugggagacuggu

SEQ ID NO: 2017054 - RNA, 19 nt, Artificial Sequence
  Description of Artificial Sequence: Synthetic oligonucleotide
  Sense strand starting at position 2966 of SEQ ID NO: 1881087
aucucauuacgucaggaga

SEQ ID NO: 2017055 - RNA, 19 nt, Artificial Sequence
  Description of Artificial Sequence: Synthetic oligonucleotide
  Antisense strand to SEQ ID NO: 2017054
ucuccugacguaaugagau

SEQ ID NO: 2017056 - RNA, 19 nt, Artificial Sequence
  Description of Artificial Sequence: Synthetic oligonucleotide
  Sense strand starting at position 3168 of SEQ ID NO: 1881087
guacuuguaggugauuaaa

SEQ ID NO: 2017057 - RNA, 19 nt, Artificial Sequence
  Description of Artificial Sequence: Synthetic oligonucleotide
  Antisense strand to SEQ ID NO: 2017056
uuuaaucaccuacaaguac

SEQ ID NO: 2017058 - RNA, 19 nt, Artificial Sequence
  Description of Artificial Sequence: Synthetic oligonucleotide
  Sense strand starting at position 3170 of SEQ ID NO: 1881087
acuuguaggugauuaaaca

SEQ ID NO: 2017059 - RNA, 19 nt, Artificial Sequence
  Description of Artificial Sequence: Synthetic oligonucleotide
  Antisense strand to SEQ ID NO: 2017058
uguuuaaucaccuacaagu

SEQ ID NO: 2017060 - RNA, 19 nt, Artificial Sequence
  Description of Artificial Sequence: Synthetic oligonucleotide
  Sense strand starting at position 3171 of SEQ ID NO: 1881087
cuuguaggugauuaaacau

SEQ ID NO: 2017061 - RNA, 19 nt, Artificial Sequence
  Description of Artificial Sequence: Synthetic oligonucleotide
  Antisense strand to SEQ ID NO: 2017060
auguuuaaucaccuacaag

SEQ ID NO: 2017062 - RNA, 19 nt, Artificial Sequence
  Description of Artificial Sequence: Synthetic oligonucleotide
  Sense strand starting at position 3338 of SEQ ID NO: 1881087
uuuaacaauggcugaagau

SEQ ID NO: 2017063 - RNA, 19 nt, Artificial Sequence
  Description of Artificial Sequence: Synthetic oligonucleotide
  Antisense strand to SEQ ID NO: 2017062
aucuucagccauuguuaaa

SEQ ID NO: 2017064 - RNA, 19 nt, Artificial Sequence
  Description of Artificial Sequence: Synthetic oligonucleotide
  Sense strand starting at position 3347 of SEQ ID NO: 1881087
ggcugaagaugccugagaa

SEQ ID NO: 2017065 - RNA, 19 nt, Artificial Sequence
  Description of Artificial Sequence: Synthetic oligonucleotide
  Antisense strand to SEQ ID NO: 2017064
uucucaggcaucuucagcc

SEQ ID NO: 2017066 - RNA, 19 nt, Artificial Sequence
  Description of Artificial Sequence: Synthetic oligonucleotide
  Sense strand starting at position 3348 of SEQ ID NO: 1881087
gcugaagaugccugagaag

SEQ ID NO: 2017067 - RNA, 19 nt, Artificial Sequence
  Description of Artificial Sequence: Synthetic oligonucleotide
  Antisense strand to SEQ ID NO: 2017066
cuucucaggcaucuucagc

SEQ ID NO: 2017068 - RNA, 19 nt, Artificial Sequence
  Description of Artificial Sequence: Synthetic oligonucleotide
  Sense strand starting at position 3410 of SEQ ID NO: 1881087
guugcauaucaucauggau

SEQ ID NO: 2017069 - RNA, 19 nt, Artificial Sequence
  Description of Artificial Sequence: Synthetic oligonucleotide
  Antisense strand to SEQ ID NO: 2017068
auccaugaugauaugcaac

SEQ ID NO: 2017070 - RNA, 19 nt, Artificial Sequence
  Description of Artificial Sequence: Synthetic oligonucleotide
  Sense strand starting at position 3519 of SEQ ID NO: 1881087
guaugaguuccuuacccua

SEQ ID NO: 2017071 - RNA, 19 nt, Artificial Sequence
  Description of Artificial Sequence: Synthetic oligonucleotide
  Antisense strand to SEQ ID NO: 2017070
uaggguaaggaacucauac

SEQ ID NO: 2017072 - RNA, 19 nt, Artificial Sequence
  Description of Artificial Sequence: Synthetic oligonucleotide
  Sense strand starting at position 3521 of SEQ ID NO: 1881087
augaguuccuuacccuaga

SEQ ID NO: 2017073 - RNA, 19 nt, Artificial Sequence
  Description of Artificial Sequence: Synthetic oligonucleotide
  Antisense strand to SEQ ID NO: 2017072
ucuaggguaaggaacucau

SEQ ID NO: 2017074 - RNA, 19 nt, Artificial Sequence
  Description of Artificial Sequence: Synthetic oligonucleotide
  Sense strand starting at position 3522 of SEQ ID NO: 1881087
ugaguuccuuacccuagau

SEQ ID NO: 2017075 - RNA, 19 nt, Artificial Sequence
  Description of Artificial Sequence: Synthetic oligonucleotide
  Antisense strand to SEQ ID NO: 2017074
aucuaggguaaggaacuca

SEQ ID NO: 2017076 - RNA, 19 nt, Artificial Sequence
  Description of Artificial Sequence: Synthetic oligonucleotide
  Sense strand starting at position 3524 of SEQ ID NO: 1881087
aguuccuuacccuagauca

SEQ ID NO: 2017077 - RNA, 19 nt, Artificial Sequence
  Description of Artificial Sequence: Synthetic oligonucleotide
  Antisense strand to SEQ ID NO: 2017076
ugaucuaggguaaggaacu

SEQ ID NO: 2017078 - RNA, 19 nt, Artificial Sequence
  Description of Artificial Sequence: Synthetic oligonucleotide
  Sense strand starting at position 3697 of SEQ ID NO: 1881087
gauggaaaugacugcuucu

SEQ ID NO: 2017079 - RNA, 19 nt, Artificial Sequence
  Description of Artificial Sequence: Synthetic oligonucleotide
  Antisense strand to SEQ ID NO: 2017078
agaagcagucauuuccauc

SEQ ID NO: 2017080 - RNA, 19 nt, Artificial Sequence
  Description of Artificial Sequence: Synthetic oligonucleotide
  Sense strand starting at position 3901 of SEQ ID NO: 1881087
ugaccuguacaacaguaau

SEQ ID NO: 2017081 - RNA, 19 nt, Artificial Sequence
  Description of Artificial Sequence: Synthetic oligonucleotide
  Antisense strand to SEQ ID NO: 2017080
auuacuguuguacagguca

SEQ ID NO: 2017082 - RNA, 19 nt, Artificial Sequence
  Description of Artificial Sequence: Synthetic oligonucleotide
  Sense strand starting at position 3947 of SEQ ID NO: 1881087
aguugcuagauguaaagau

SEQ ID NO: 2017083 - RNA, 19 nt, Artificial Sequence
  Description of Artificial Sequence: Synthetic oligonucleotide
  Antisense strand to SEQ ID NO: 2017082
aucuuuacaucuagcaacu

SEQ ID NO: 2017084 - RNA, 19 nt, Artificial Sequence
  Description of Artificial Sequence: Synthetic oligonucleotide
  Sense strand starting at position 272 of SEQ ID NO: 1881088
uugugugauccuuaacaau

SEQ ID NO: 2017085 - RNA, 19 nt, Artificial Sequence
  Description of Artificial Sequence: Synthetic oligonucleotide
  Antisense strand to SEQ ID NO: 2017084
auuguuaaggaucacacaa

SEQ ID NO: 2017086 - RNA, 19 nt, Artificial Sequence
  Description of Artificial Sequence: Synthetic oligonucleotide
  Sense strand starting at position 409 of SEQ ID NO: 1881088
acuccagcagaguaaauau

SEQ ID NO: 2017087 - RNA, 19 nt, Artificial Sequence
  Description of Artificial Sequence: Synthetic oligonucleotide
  Antisense strand to SEQ ID NO: 2017086
auauuuacucugcuggagu

SEQ ID NO: 2017088 - RNA, 19 nt, Artificial Sequence
  Description of Artificial Sequence: Synthetic oligonucleotide
  Sense strand starting at position 431 of SEQ ID NO: 1881088
auaccagcacgguauaauu

SEQ ID NO: 2017089 - RNA, 19 nt, Artificial Sequence
  Description of Artificial Sequence: Synthetic oligonucleotide
  Antisense strand to SEQ ID NO: 2017088
aauuauaccgugcugguau

SEQ ID NO: 2017090 - RNA, 19 nt, Artificial Sequence
  Description of Artificial Sequence: Synthetic oligonucleotide
  Sense strand starting at position 516 of SEQ ID NO: 1881088
aagcuuaggguguaucuaa

SEQ ID NO: 2017091 - RNA, 19 nt, Artificial Sequence
  Description of Artificial Sequence: Synthetic oligonucleotide
  Antisense strand to SEQ ID NO: 2017090
uuagauacacccuaagcuu

SEQ ID NO: 2017092 - RNA, 19 nt, Artificial Sequence
  Description of Artificial Sequence: Synthetic oligonucleotide
  Sense strand starting at position 816 of SEQ ID NO: 1881088
cucagauggcauuaucugu

SEQ ID NO: 2017093 - RNA, 19 nt, Artificial Sequence
  Description of Artificial Sequence: Synthetic oligonucleotide
  Antisense strand to SEQ ID NO: 2017092
acagauaaugccaucugag

SEQ ID NO: 2017094 - RNA, 19 nt, Artificial Sequence
  Description of Artificial Sequence: Synthetic oligonucleotide
  Sense strand starting at position 1058 of SEQ ID NO: 1881088
gcauucuauuuggcccuaa

SEQ ID NO: 2017095 - RNA, 19 nt, Artificial Sequence
  Description of Artificial Sequence: Synthetic oligonucleotide
  Antisense strand to SEQ ID NO: 2017094
uuagggccaaauagaaugc

SEQ ID NO: 2017096 - RNA, 19 nt, Artificial Sequence
  Description of Artificial Sequence: Synthetic oligonucleotide
  Sense strand starting at position 1100 of SEQ ID NO: 1881088
gccucuguucugcugucaa

SEQ ID NO: 2017097 - RNA, 19 nt, Artificial Sequence
  Description of Artificial Sequence: Synthetic oligonucleotide
  Antisense strand to SEQ ID NO: 2017096
uugacagcagaacagaggc

SEQ ID NO: 2017098 - RNA, 19 nt, Artificial Sequence
  Description of Artificial Sequence: Synthetic oligonucleotide
  Sense strand starting at position 1131 of SEQ ID NO: 1881088
cuauuugcacagugcuuau

SEQ ID NO: 2017099 - RNA, 19 nt, Artificial Sequence
  Description of Artificial Sequence: Synthetic oligonucleotide
  Antisense strand to SEQ ID NO: 2017098
auaagcacugugcaaauag

SEQ ID NO: 2017100 - RNA, 19 nt, Artificial Sequence
  Description of Artificial Sequence: Synthetic oligonucleotide
  Sense strand starting at position 1221 of SEQ ID NO: 1881088
cucaucauucugcagauga

SEQ ID NO: 2017101 - RNA, 19 nt, Artificial Sequence
  Description of Artificial Sequence: Synthetic oligonucleotide
  Antisense strand to SEQ ID NO: 2017100
ucaucugcagaaugaugag

SEQ ID NO: 2017102 - RNA, 19 nt, Artificial Sequence
  Description of Artificial Sequence: Synthetic oligonucleotide
  Sense strand starting at position 1516 of SEQ ID NO: 1881088
aaagaucagcaugguaaua

SEQ ID NO: 2017103 - RNA, 19 nt, Artificial Sequence
  Description of Artificial Sequence: Synthetic oligonucleotide
  Antisense strand to SEQ ID NO: 2017102
uauuaccaugcugaucuuu

SEQ ID NO: 2017104 - RNA, 19 nt, Artificial Sequence
  Description of Artificial Sequence: Synthetic oligonucleotide
  Sense strand starting at position 1626 of SEQ ID NO: 1881088
uaugacagugcuuaucaga

SEQ ID NO: 2017105 - RNA, 19 nt, Artificial Sequence
  Description of Artificial Sequence: Synthetic oligonucleotide
  Antisense strand to SEQ ID NO: 2017104
ucugauaagcacugucaua

SEQ ID NO: 2017106 - RNA, 19 nt, Artificial Sequence
  Description of Artificial Sequence: Synthetic oligonucleotide
  Sense strand starting at position 1636 of SEQ ID NO: 1881088
cuuaucagaguguacuaua

SEQ ID NO: 2017107 - RNA, 19 nt, Artificial Sequence
  Description of Artificial Sequence: Synthetic oligonucleotide
  Antisense strand to SEQ ID NO: 2017106
uauaguacacucugauaag

SEQ ID NO: 2017108 - RNA, 19 nt, Artificial Sequence
  Description of Artificial Sequence: Synthetic oligonucleotide
  Sense strand starting at position 1668 of SEQ ID NO: 1881088
acguuuauuucccucuuau

SEQ ID NO: 2017109 - RNA, 19 nt, Artificial Sequence
  Description of Artificial Sequence: Synthetic oligonucleotide
  Antisense strand to SEQ ID NO: 2017108
auaagagggaaauaaacgu

SEQ ID NO: 2017110 - RNA, 19 nt, Artificial Sequence
  Description of Artificial Sequence: Synthetic oligonucleotide
  Sense strand starting at position 1689 of SEQ ID NO: 1881088
ugagaauguggucagaguc

SEQ ID NO: 2017111 - RNA, 19 nt, Artificial Sequence
  Description of Artificial Sequence: Synthetic oligonucleotide
  Antisense strand to SEQ ID NO: 2017110
gacucugaccacauucuca

SEQ ID NO: 2017112 - RNA, 19 nt, Artificial Sequence
  Description of Artificial Sequence: Synthetic oligonucleotide
  Sense strand starting at position 1763 of SEQ ID NO: 1881088
ucaaauaguguuggaugaa

SEQ ID NO: 2017113 - RNA, 19 nt, Artificial Sequence
  Description of Artificial Sequence: Synthetic oligonucleotide
  Antisense strand to SEQ ID NO: 2017112
uucauccaacacuauuuga

SEQ ID NO: 2017114 - RNA, 19 nt, Artificial Sequence
  Description of Artificial Sequence: Synthetic oligonucleotide
  Sense strand starting at position 1766 of SEQ ID NO: 1881088
aauaguguuggaugaauga

SEQ ID NO: 2017115 - RNA, 19 nt, Artificial Sequence
  Description of Artificial Sequence: Synthetic oligonucleotide
  Antisense strand to SEQ ID NO: 2017114
ucauucauccaacacuauu

SEQ ID NO: 2017116 - RNA, 19 nt, Artificial Sequence
  Description of Artificial Sequence: Synthetic oligonucleotide
  Sense strand starting at position 1783 of SEQ ID NO: 1881088
gagugaauugaaugcugaa

SEQ ID NO: 2017117 - RNA, 19 nt, Artificial Sequence
  Description of Artificial Sequence: Synthetic oligonucleotide
  Antisense strand to SEQ ID NO: 2017116
uucagcauucaauucacuc

SEQ ID NO: 2017118 - RNA, 19 nt, Artificial Sequence
  Description of Artificial Sequence: Synthetic oligonucleotide
  Sense strand starting at position 1878 of SEQ ID NO: 1881088
aguaaagugccuuaaggaa

SEQ ID NO: 2017119 - RNA, 19 nt, Artificial Sequence
  Description of Artificial Sequence: Synthetic oligonucleotide
  Antisense strand to SEQ ID NO: 2017118
uuccuuaaggcacuuuacu

SEQ ID NO: 2017120 - RNA, 19 nt, Artificial Sequence
  Description of Artificial Sequence: Synthetic oligonucleotide
  Sense strand starting at position 1899 of SEQ ID NO: 1881088
agaucuuuaccuggaucau

SEQ ID NO: 2017121 - RNA, 19 nt, Artificial Sequence
  Description of Artificial Sequence: Synthetic oligonucleotide
  Antisense strand to SEQ ID NO: 2017120
augauccagguaaagaucu

SEQ ID NO: 2017122 - RNA, 19 nt, Artificial Sequence
  Description of Artificial Sequence: Synthetic oligonucleotide
  Sense strand starting at position 1941 of SEQ ID NO: 1881088
ucagcuaaggacugauuga

SEQ ID NO: 2017123 - RNA, 19 nt, Artificial Sequence
  Description of Artificial Sequence: Synthetic oligonucleotide
  Antisense strand to SEQ ID NO: 2017122
ucaaucaguccuuagcuga

SEQ ID NO: 2017124 - RNA, 19 nt, Artificial Sequence
  Description of Artificial Sequence: Synthetic oligonucleotide
  Sense strand starting at position 2212 of SEQ ID NO: 1881088
ucauauaauugccuaugga

SEQ ID NO: 2017125 - RNA, 19 nt, Artificial Sequence
  Description of Artificial Sequence: Synthetic oligonucleotide
  Antisense strand to SEQ ID NO: 2017124
uccauaggcaauuauauga

SEQ ID NO: 2017126 - RNA, 19 nt, Artificial Sequence
  Description of Artificial Sequence: Synthetic oligonucleotide
  Sense strand starting at position 2234 of SEQ ID NO: 1881088
ucuauuauccgguaggaau

SEQ ID NO: 2017127 - RNA, 19 nt, Artificial Sequence
  Description of Artificial Sequence: Synthetic oligonucleotide
  Antisense strand to SEQ ID NO: 2017126
auuccuaccggauaauaga

SEQ ID NO: 2017128 - RNA, 19 nt, Artificial Sequence
  Description of Artificial Sequence: Synthetic oligonucleotide
  Sense strand starting at position 2245 of SEQ ID NO: 1881088
guaggaauacugcaauauu

SEQ ID NO: 2017129 - RNA, 19 nt, Artificial Sequence
  Description of Artificial Sequence: Synthetic oligonucleotide
  Antisense strand to SEQ ID NO: 2017128
aauauugcaguauuccuac

SEQ ID NO: 2017130 - RNA, 19 nt, Artificial Sequence
  Description of Artificial Sequence: Synthetic oligonucleotide
  Sense strand starting at position 2301 of SEQ ID NO: 1881088
ucuaacauguguuuaaaga

SEQ ID NO: 2017131 - RNA, 19 nt, Artificial Sequence
  Description of Artificial Sequence: Synthetic oligonucleotide
  Antisense strand to SEQ ID NO: 2017130
ucuuuaaacacauguuaga

SEQ ID NO: 2017132 - RNA, 19 nt, Artificial Sequence
  Description of Artificial Sequence: Synthetic oligonucleotide
  Sense strand starting at position 2325 of SEQ ID NO: 1881088
auggucuucugauuauuac

SEQ ID NO: 2017133 - RNA, 19 nt, Artificial Sequence
  Description of Artificial Sequence: Synthetic oligonucleotide
  Antisense strand to SEQ ID NO: 2017132
guaauaaucagaagaccau

SEQ ID NO: 2017134 - RNA, 19 nt, Artificial Sequence
  Description of Artificial Sequence: Synthetic oligonucleotide
  Sense strand starting at position 2326 of SEQ ID NO: 1881088
uggucuucugauuauuacu

SEQ ID NO: 2017135 - RNA, 19 nt, Artificial Sequence
  Description of Artificial Sequence: Synthetic oligonucleotide
  Antisense strand to SEQ ID NO: 2017134
aguaauaaucagaagacca

SEQ ID NO: 2017136 - RNA, 19 nt, Artificial Sequence
  Description of Artificial Sequence: Synthetic oligonucleotide
  Sense strand starting at position 2364 of SEQ ID NO: 1881088
aagaauacacagugauguu

SEQ ID NO: 2017137 - RNA, 19 nt, Artificial Sequence
  Description of Artificial Sequence: Synthetic oligonucleotide
  Antisense strand to SEQ ID NO: 2017136
aacaucacuguguauucuu

SEQ ID NO: 2017138 - RNA, 19 nt, Artificial Sequence
  Description of Artificial Sequence: Synthetic oligonucleotide
  Sense strand starting at position 2413 of SEQ ID NO: 1881088
acucuuacugaaggauauu

SEQ ID NO: 2017139 - RNA, 19 nt, Artificial Sequence
  Description of Artificial Sequence: Synthetic oligonucleotide
  Antisense strand to SEQ ID NO: 2017138
aauauccuucaguaagagu

SEQ ID NO: 2017140 - RNA, 19 nt, Artificial Sequence
  Description of Artificial Sequence: Synthetic oligonucleotide
  Sense strand starting at position 2636 of SEQ ID NO: 1881088
ggagccugaguuuauauau

SEQ ID NO: 2017141 - RNA, 19 nt, Artificial Sequence
  Description of Artificial Sequence: Synthetic oligonucleotide
  Antisense strand to SEQ ID NO: 2017140
auauauaaacucaggcucc

SEQ ID NO: 2017142 - RNA, 19 nt, Artificial Sequence
  Description of Artificial Sequence: Synthetic oligonucleotide
  Sense strand starting at position 2980 of SEQ ID NO: 1881088
ggauguacgagugaauuga

SEQ ID NO: 2017143 - RNA, 19 nt, Artificial Sequence
  Description of Artificial Sequence: Synthetic oligonucleotide
  Antisense strand to SEQ ID NO: 2017142
ucaauucacucguacaucc

SEQ ID NO: 2017144 - RNA, 19 nt, Artificial Sequence
  Description of Artificial Sequence: Synthetic oligonucleotide
  Sense strand starting at position 3105 of SEQ ID NO: 1881088
agaucuuuaccuggaacau

SEQ ID NO: 2017145 - RNA, 19 nt, Artificial Sequence
  Description of Artificial Sequence: Synthetic oligonucleotide
  Antisense strand to SEQ ID NO: 2017144
auguuccagguaaagaucu

SEQ ID NO: 2017146 - RNA, 19 nt, Artificial Sequence
  Description of Artificial Sequence: Synthetic oligonucleotide
  Sense strand starting at position 3141 of SEQ ID NO: 1881088
gacugugaugcugaauuaa

SEQ ID NO: 2017147 - RNA, 19 nt, Artificial Sequence
  Description of Artificial Sequence: Synthetic oligonucleotide
  Antisense strand to SEQ ID NO: 2017146
uuaauucagcaucacaguc

SEQ ID NO: 2017148 - RNA, 19 nt, Artificial Sequence
  Description of Artificial Sequence: Synthetic oligonucleotide
  Sense strand starting at position 3176 of SEQ ID NO: 1881088
uugugugucauggacaaca

SEQ ID NO: 2017149 - RNA, 19 nt, Artificial Sequence
  Description of Artificial Sequence: Synthetic oligonucleotide
  Antisense strand to SEQ ID NO: 2017148
uguuguccaugacacacaa

SEQ ID NO: 2017150 - RNA, 19 nt, Artificial Sequence
  Description of Artificial Sequence: Synthetic oligonucleotide
  Sense strand starting at position 3178 of SEQ ID NO: 1881088
gugugucauggacaacauu

SEQ ID NO: 2017151 - RNA, 19 nt, Artificial Sequence
  Description of Artificial Sequence: Synthetic oligonucleotide
  Antisense strand to SEQ ID NO: 2017150
aauguuguccaugacacac

SEQ ID NO: 2017152 - RNA, 19 nt, Artificial Sequence
  Description of Artificial Sequence: Synthetic oligonucleotide
  Sense strand starting at position 3292 of SEQ ID NO: 1881088
auuauaguucuguagguca

SEQ ID NO: 2017153 - RNA, 19 nt, Artificial Sequence
  Description of Artificial Sequence: Synthetic oligonucleotide
  Antisense strand to SEQ ID NO: 2017152
ugaccuacagaacuauaau

SEQ ID NO: 2017154 - RNA, 19 nt, Artificial Sequence
  Description of Artificial Sequence: Synthetic oligonucleotide
  Sense strand starting at position 3443 of SEQ ID NO: 1881088
auaagaucaaguggugagu

SEQ ID NO: 2017155 - RNA, 19 nt, Artificial Sequence
  Description of Artificial Sequence: Synthetic oligonucleotide
  Antisense strand to SEQ ID NO: 2017154
acucaccacuugaucuuau

SEQ ID NO: 2017156 - RNA, 19 nt, Artificial Sequence
  Description of Artificial Sequence: Synthetic oligonucleotide
  Sense strand starting at position 3446 of SEQ ID NO: 1881088
agaucaaguggugagucua

SEQ ID NO: 2017157 - RNA, 19 nt, Artificial Sequence
  Description of Artificial Sequence: Synthetic oligonucleotide
  Antisense strand to SEQ ID NO: 2017156
uagacucaccacuugaucu

SEQ ID NO: 2017158 - RNA, 19 nt, Artificial Sequence
  Description of Artificial Sequence: Synthetic oligonucleotide
  Sense strand starting at position 3457 of SEQ ID NO: 1881088
ugagucuacuaacuaguau

SEQ ID NO: 2017159 - RNA, 19 nt, Artificial Sequence
  Description of Artificial Sequence: Synthetic oligonucleotide
  Antisense strand to SEQ ID NO: 2017158
auacuaguuaguagacuca

SEQ ID NO: 2017160 - RNA, 19 nt, Artificial Sequence
  Description of Artificial Sequence: Synthetic oligonucleotide
  Sense strand starting at position 3551 of SEQ ID NO: 1881088
ugaguuccauugguaacaa

SEQ ID NO: 2017161 - RNA, 19 nt, Artificial Sequence
  Description of Artificial Sequence: Synthetic oligonucleotide
  Antisense strand to SEQ ID NO: 2017160
uuguuaccaauggaacuca

SEQ ID NO: 2017162 - RNA, 19 nt, Artificial Sequence
  Description of Artificial Sequence: Synthetic oligonucleotide
  Sense strand starting at position 3718 of SEQ ID NO: 1881088
uccuaaauuccugguacag

SEQ ID NO: 2017163 - RNA, 19 nt, Artificial Sequence
  Description of Artificial Sequence: Synthetic oligonucleotide
  Antisense strand to SEQ ID NO: 2017162
cuguaccaggaauuuagga

SEQ ID NO: 2017164 - RNA, 19 nt, Artificial Sequence
  Description of Artificial Sequence: Synthetic oligonucleotide
  Sense strand starting at position 28 of SEQ ID NO: 1881089
gggacuuuaagucaggguu

SEQ ID NO: 2017165 - RNA, 19 nt, Artificial Sequence
  Description of Artificial Sequence: Synthetic oligonucleotide
  Antisense strand to SEQ ID NO: 2017164
aacccugacuuaaaguccc

SEQ ID NO: 2017166 - RNA, 19 nt, Artificial Sequence
  Description of Artificial Sequence: Synthetic oligonucleotide
  Sense strand starting at position 34 of SEQ ID NO: 1881089
uuaagucaggguugaccua

SEQ ID NO: 2017167 - RNA, 19 nt, Artificial Sequence
  Description of Artificial Sequence: Synthetic oligonucleotide
  Antisense strand to SEQ ID NO: 2017166
uaggucaacccugacuuaa

SEQ ID NO: 2017168 - RNA, 19 nt, Artificial Sequence
  Description of Artificial Sequence: Synthetic oligonucleotide
  Sense strand starting at position 165 of SEQ ID NO: 1881089
acaguuuacuuguuaccaa

SEQ ID NO: 2017169 - RNA, 19 nt, Artificial Sequence
  Description of Artificial Sequence: Synthetic oligonucleotide
  Antisense strand to SEQ ID NO: 2017168
uugguaacaaguaaacugu

SEQ ID NO: 2017170 - RNA, 19 nt, Artificial Sequence
  Description of Artificial Sequence: Synthetic oligonucleotide
  Sense strand starting at position 197 of SEQ ID NO: 1881089
ucccgaagucuagguuaaa

SEQ ID NO: 2017171 - RNA, 19 nt, Artificial Sequence
  Description of Artificial Sequence: Synthetic oligonucleotide
  Antisense strand to SEQ ID NO: 2017170
uuuaaccuagacuucggga

SEQ ID NO: 2017172 - RNA, 19 nt, Artificial Sequence
  Description of Artificial Sequence: Synthetic oligonucleotide
  Sense strand starting at position 277 of SEQ ID NO: 1881089
ggcuaaugauggucuggau

SEQ ID NO: 2017173 - RNA, 19 nt, Artificial Sequence
  Description of Artificial Sequence: Synthetic oligonucleotide
  Antisense strand to SEQ ID NO: 2017172
auccagaccaucauuagcc

SEQ ID NO: 2017174 - RNA, 19 nt, Artificial Sequence
  Description of Artificial Sequence: Synthetic oligonucleotide
  Sense strand starting at position 326 of SEQ ID NO: 1881089
gggcacauaugucuuagaa

SEQ ID NO: 2017175 - RNA, 19 nt, Artificial Sequence
  Description of Artificial Sequence: Synthetic oligonucleotide
  Antisense strand to SEQ ID NO: 2017174
uucuaagacauaugugccc

SEQ ID NO: 2017176 - RNA, 19 nt, Artificial Sequence
  Description of Artificial Sequence: Synthetic oligonucleotide
  Sense strand starting at position 402 of SEQ ID NO: 1881089
auucuagagucucucugua

SEQ ID NO: 2017177 - RNA, 19 nt, Artificial Sequence
  Description of Artificial Sequence: Synthetic oligonucleotide
  Antisense strand to SEQ ID NO: 2017176
uacagagagacucuagaau

SEQ ID NO: 2017178 - RNA, 19 nt, Artificial Sequence
  Description of Artificial Sequence: Synthetic oligonucleotide
  Sense strand starting at position 404 of SEQ ID NO: 1881089
ucuagagucucucuguaau

SEQ ID NO: 2017179 - RNA, 19 nt, Artificial Sequence
  Description of Artificial Sequence: Synthetic oligonucleotide
  Antisense strand to SEQ ID NO: 2017178
auuacagagagacucuaga

SEQ ID NO: 2017180 - RNA, 19 nt, Artificial Sequence
  Description of Artificial Sequence: Synthetic oligonucleotide
  Sense strand starting at position 407 of SEQ ID NO: 1881089
agagucucucuguaauucu

SEQ ID NO: 2017181 - RNA, 19 nt, Artificial Sequence
  Description of Artificial Sequence: Synthetic oligonucleotide
  Antisense strand to SEQ ID NO: 2017180
agaauuacagagagacucu

SEQ ID NO: 2017182 - RNA, 19 nt, Artificial Sequence
  Description of Artificial Sequence: Synthetic oligonucleotide
  Sense strand starting at position 492 of SEQ ID NO: 1881089
aaguguugugaccacaauu

SEQ ID NO: 2017183 - RNA, 19 nt, Artificial Sequence
  Description of Artificial Sequence: Synthetic oligonucleotide
  Antisense strand to SEQ ID NO: 2017182
aauuguggucacaacacuu

SEQ ID NO: 2017184 - RNA, 19 nt, Artificial Sequence
  Description of Artificial Sequence: Synthetic oligonucleotide
  Sense strand starting at position 522 of SEQ ID NO: 1881089
cuaagaauuuccuagaguu

SEQ ID NO: 2017185 - RNA, 19 nt, Artificial Sequence
  Description of Artificial Sequence: Synthetic oligonucleotide
  Antisense strand to SEQ ID NO: 2017184
aacucuaggaaauucuuag

SEQ ID NO: 2017186 - RNA, 19 nt, Artificial Sequence
  Description of Artificial Sequence: Synthetic oligonucleotide
  Sense strand starting at position 637 of SEQ ID NO: 1881089
gcauuauaucuauaucguu

SEQ ID NO: 2017187 - RNA, 19 nt, Artificial Sequence
  Description of Artificial Sequence: Synthetic oligonucleotide
  Antisense strand to SEQ ID NO: 2017186
aacgauauagauauaaugc

SEQ ID NO: 2017188 - RNA, 19 nt, Artificial Sequence
  Description of Artificial Sequence: Synthetic oligonucleotide
  Sense strand starting at position 705 of SEQ ID NO: 1881089
uagaccuauccgcaaguga

SEQ ID NO: 2017189 - RNA, 19 nt, Artificial Sequence
  Description of Artificial Sequence: Synthetic oligonucleotide
  Antisense strand to SEQ ID NO: 2017188
ucacuugcggauaggucua

SEQ ID NO: 2017190 - RNA, 19 nt, Artificial Sequence
  Description of Artificial Sequence: Synthetic oligonucleotide
  Sense strand starting at position 761 of SEQ ID NO: 1881089
cucacauaguaucugguau

SEQ ID NO: 2017191 - RNA, 19 nt, Artificial Sequence
  Description of Artificial Sequence: Synthetic oligonucleotide
  Antisense strand to SEQ ID NO: 2017190
auaccagauacuaugugag

SEQ ID NO: 2017192 - RNA, 19 nt, Artificial Sequence
  Description of Artificial Sequence: Synthetic oligonucleotide
  Sense strand starting at position 767 of SEQ ID NO: 1881089
uaguaucugguauagucua

SEQ ID NO: 2017193 - RNA, 19 nt, Artificial Sequence
  Description of Artificial Sequence: Synthetic oligonucleotide
  Antisense strand to SEQ ID NO: 2017192
uagacuauaccagauacua

SEQ ID NO: 2017194 - RNA, 19 nt, Artificial Sequence
  Description of Artificial Sequence: Synthetic oligonucleotide
  Sense strand starting at position 775 of SEQ ID NO: 1881089
gguauagucuagucucaau

SEQ ID NO: 2017195 - RNA, 19 nt, Artificial Sequence
  Description of Artificial Sequence: Synthetic oligonucleotide
  Antisense strand to SEQ ID NO: 2017194
auugagacuagacuauacc

SEQ ID NO: 2017196 - RNA, 19 nt, Artificial Sequence
  Description of Artificial Sequence: Synthetic oligonucleotide
  Sense strand starting at position 977 of SEQ ID NO: 1881089
aauaacuuagauuggugau

SEQ ID NO: 2017197 - RNA, 19 nt, Artificial Sequence
  Description of Artificial Sequence: Synthetic oligonucleotide
  Antisense strand to SEQ ID NO: 2017196
aucaccaaucuaaguuauu

SEQ ID NO: 2017198 - RNA, 19 nt, Artificial Sequence
  Description of Artificial Sequence: Synthetic oligonucleotide
  Sense strand starting at position 1096 of SEQ ID NO: 1881089
cauaucuuccuguggauga

SEQ ID NO: 2017199 - RNA, 19 nt, Artificial Sequence
  Description of Artificial Sequence: Synthetic oligonucleotide
  Antisense strand to SEQ ID NO: 2017198
ucauccacaggaagauaug

SEQ ID NO: 2017200 - RNA, 19 nt, Artificial Sequence
  Description of Artificial Sequence: Synthetic oligonucleotide
  Sense strand starting at position 1248 of SEQ ID NO: 1881089
augagcuaauucuugagua

SEQ ID NO: 2017201 - RNA, 19 nt, Artificial Sequence
  Description of Artificial Sequence: Synthetic oligonucleotide
  Antisense strand to SEQ ID NO: 2017200
uacucaagaauuagcucau

SEQ ID NO: 2017202 - RNA, 19 nt, Artificial Sequence
  Description of Artificial Sequence: Synthetic oligonucleotide
  Sense strand starting at position 1250 of SEQ ID NO: 1881089
gagcuaauucuugaguauu

SEQ ID NO: 2017203 - RNA, 19 nt, Artificial Sequence
  Description of Artificial Sequence: Synthetic oligonucleotide
  Antisense strand to SEQ ID NO: 2017202
aauacucaagaauuagcuc

SEQ ID NO: 2017204 - RNA, 19 nt, Artificial Sequence
  Description of Artificial Sequence: Synthetic oligonucleotide
  Sense strand starting at position 1910 of SEQ ID NO: 1881089
acccuuaagcuagaauagu

SEQ ID NO: 2017205 - RNA, 19 nt, Artificial Sequence
  Description of Artificial Sequence: Synthetic oligonucleotide
  Antisense strand to SEQ ID NO: 2017204
acuauucuagcuuaagggu

SEQ ID NO: 2017206 - RNA, 19 nt, Artificial Sequence
  Description of Artificial Sequence: Synthetic oligonucleotide
  Sense strand starting at position 1919 of SEQ ID NO: 1881089
cuagaauaguucuugugac

SEQ ID NO: 2017207 - RNA, 19 nt, Artificial Sequence
  Description of Artificial Sequence: Synthetic oligonucleotide
  Antisense strand to SEQ ID NO: 2017206
gucacaagaacuauucuag

SEQ ID NO: 2017208 - RNA, 19 nt, Artificial Sequence
  Description of Artificial Sequence: Synthetic oligonucleotide
  Sense strand starting at position 2034 of SEQ ID NO: 1881089
ccaaucagaguucgacuau

SEQ ID NO: 2017209 - RNA, 19 nt, Artificial Sequence
  Description of Artificial Sequence: Synthetic oligonucleotide
  Antisense strand to SEQ ID NO: 2017208
auagucgaacucugauugg

SEQ ID NO: 2017210 - RNA, 19 nt, Artificial Sequence
  Description of Artificial Sequence: Synthetic oligonucleotide
  Sense strand starting at position 2044 of SEQ ID NO: 1881089
uucgacuaucuggaccaau

SEQ ID NO: 2017211 - RNA, 19 nt, Artificial Sequence
  Description of Artificial Sequence: Synthetic oligonucleotide
  Antisense strand to SEQ ID NO: 2017210
auugguccagauagucgaa

SEQ ID NO: 2017212 - RNA, 19 nt, Artificial Sequence
  Description of Artificial Sequence: Synthetic oligonucleotide
  Sense strand starting at position 2472 of SEQ ID NO: 1881089
uuccuuuauucuuuggaga

SEQ ID NO: 2017213 - RNA, 19 nt, Artificial Sequence
  Description of Artificial Sequence: Synthetic oligonucleotide
  Antisense strand to SEQ ID NO: 2017212
ucuccaaagaauaaaggaa

SEQ ID NO: 2017214 - RNA, 19 nt, Artificial Sequence
  Description of Artificial Sequence: Synthetic oligonucleotide
  Sense strand starting at position 2473 of SEQ ID NO: 1881089
uccuuuauucuuuggagag

SEQ ID NO: 2017215 - RNA, 19 nt, Artificial Sequence
  Description of Artificial Sequence: Synthetic oligonucleotide
  Antisense strand to SEQ ID NO: 2017214
cucuccaaagaauaaagga

SEQ ID NO: 2017216 - RNA, 19 nt, Artificial Sequence
  Description of Artificial Sequence: Synthetic oligonucleotide
  Sense strand starting at position 2477 of SEQ ID NO: 1881089
uuauucuuuggagagcaca

SEQ ID NO: 2017217 - RNA, 19 nt, Artificial Sequence
  Description of Artificial Sequence: Synthetic oligonucleotide
  Antisense strand to SEQ ID NO: 2017216
ugugcucuccaaagaauaa

SEQ ID NO: 2017218 - RNA, 19 nt, Artificial Sequence
  Description of Artificial Sequence: Synthetic oligonucleotide
  Sense strand starting at position 2531 of SEQ ID NO: 1881089
ugcagauugcguuucguag

SEQ ID NO: 2017219 - RNA, 19 nt, Artificial Sequence
  Description of Artificial Sequence: Synthetic oligonucleotide
  Antisense strand to SEQ ID NO: 2017218
cuacgaaacgcaaucugca

SEQ ID NO: 2017220 - RNA, 19 nt, Artificial Sequence
  Description of Artificial Sequence: Synthetic oligonucleotide
  Sense strand starting at position 2532 of SEQ ID NO: 1881089
gcagauugcguuucguaga

SEQ ID NO: 2017221 - RNA, 19 nt, Artificial Sequence
  Description of Artificial Sequence: Synthetic oligonucleotide
  Antisense strand to SEQ ID NO: 2017220
ucuacgaaacgcaaucugc

SEQ ID NO: 2017222 - RNA, 19 nt, Artificial Sequence
  Description of Artificial Sequence: Synthetic oligonucleotide
  Sense strand starting at position 3006 of SEQ ID NO: 1881089
uugugcauacugugaaaca

SEQ ID NO: 2017223 - RNA, 19 nt, Artificial Sequence
  Description of Artificial Sequence: Synthetic oligonucleotide
  Antisense strand to SEQ ID NO: 2017222
uguuucacaguaugcacaa

SEQ ID NO: 2017224 - RNA, 19 nt, Artificial Sequence
  Description of Artificial Sequence: Synthetic oligonucleotide
  Sense strand starting at position 3165 of SEQ ID NO: 1881089
acucuauuguguuccacua

SEQ ID NO: 2017225 - RNA, 19 nt, Artificial Sequence
  Description of Artificial Sequence: Synthetic oligonucleotide
  Antisense strand to SEQ ID NO: 2017224
uaguggaacacaauagagu

SEQ ID NO: 2017226 - RNA, 19 nt, Artificial Sequence
  Description of Artificial Sequence: Synthetic oligonucleotide
  Sense strand starting at position 3208 of SEQ ID NO: 1881089
acuauauggcagugauuau

SEQ ID NO: 2017227 - RNA, 19 nt, Artificial Sequence
  Description of Artificial Sequence: Synthetic oligonucleotide
  Antisense strand to SEQ ID NO: 2017226
auaaucacugccauauagu

SEQ ID NO: 2017228 - RNA, 19 nt, Artificial Sequence
  Description of Artificial Sequence: Synthetic oligonucleotide
  Sense strand starting at position 3259 of SEQ ID NO: 1881089
cgguaaguucuacaacuuu

SEQ ID NO: 2017229 - RNA, 19 nt, Artificial Sequence
  Description of Artificial Sequence: Synthetic oligonucleotide
  Antisense strand to SEQ ID NO: 2017228
aaaguuguagaacuuaccg

SEQ ID NO: 2017230 - RNA, 19 nt, Artificial Sequence
  Description of Artificial Sequence: Synthetic oligonucleotide
  Sense strand starting at position 3334 of SEQ ID NO: 1881089
uuagaaucagcuuguccaa

SEQ ID NO: 2017231 - RNA, 19 nt, Artificial Sequence
  Description of Artificial Sequence: Synthetic oligonucleotide
  Antisense strand to SEQ ID NO: 2017230
uuggacaagcugauucuaa

SEQ ID NO: 2017232 - RNA, 19 nt, Artificial Sequence
  Description of Artificial Sequence: Synthetic oligonucleotide
  Sense strand starting at position 3336 of SEQ ID NO: 1881089
agaaucagcuuguccaauu

SEQ ID NO: 2017233 - RNA, 19 nt, Artificial Sequence
  Description of Artificial Sequence: Synthetic oligonucleotide
  Antisense strand to SEQ ID NO: 2017232
aauuggacaagcugauucu

SEQ ID NO: 2017234 - RNA, 19 nt, Artificial Sequence
  Description of Artificial Sequence: Synthetic oligonucleotide
  Sense strand starting at position 3487 of SEQ ID NO: 1881089
ugggauacuagugggaauu

SEQ ID NO: 2017235 - RNA, 19 nt, Artificial Sequence
  Description of Artificial Sequence: Synthetic oligonucleotide
  Antisense strand to SEQ ID NO: 2017234
aauucccacuaguauccca

SEQ ID NO: 2017236 - RNA, 19 nt, Artificial Sequence
  Description of Artificial Sequence: Synthetic oligonucleotide
  Sense strand starting at position 3522 of SEQ ID NO: 1881089
guauaucaauuuggagaaa

SEQ ID NO: 2017237 - RNA, 19 nt, Artificial Sequence
  Description of Artificial Sequence: Synthetic oligonucleotide
  Antisense strand to SEQ ID NO: 2017236
uuucuccaaauugauauac

SEQ ID NO: 2017238 - RNA, 19 nt, Artificial Sequence
  Description of Artificial Sequence: Synthetic oligonucleotide
  Sense strand starting at position 3901 of SEQ ID NO: 1881089
auagaucaugucuagcaua

SEQ ID NO: 2017239 - RNA, 19 nt, Artificial Sequence
  Description of Artificial Sequence: Synthetic oligonucleotide
  Antisense strand to SEQ ID NO: 2017238
uaugcuagacaugaucuau

SEQ ID NO: 2017240 - RNA, 19 nt, Artificial Sequence
  Description of Artificial Sequence: Synthetic oligonucleotide
  Sense strand starting at position 3906 of SEQ ID NO: 1881089
ucaugucuagcauauagaa

SEQ ID NO: 2017241 - RNA, 19 nt, Artificial Sequence
  Description of Artificial Sequence: Synthetic oligonucleotide
  Antisense strand to SEQ ID NO: 2017240
uucuauaugcuagacauga

SEQ ID NO: 2017242 - RNA, 19 nt, Artificial Sequence
  Description of Artificial Sequence: Synthetic oligonucleotide
  Sense strand starting at position 3939 of SEQ ID NO: 1881089
guauaccucccuuguauuu

SEQ ID NO: 2017243 - RNA, 19 nt, Artificial Sequence
  Description of Artificial Sequence: Synthetic oligonucleotide
  Antisense strand to SEQ ID NO: 2017242
aaauacaagggagguauac

SEQ ID NO: 2017244 - RNA, 19 nt, Artificial Sequence
  Description of Artificial Sequence: Synthetic oligonucleotide
  Sense strand starting at position 7 of SEQ ID NO: 1881090
cccuuuauuugggagaaua

SEQ ID NO: 2017245 - RNA, 19 nt, Artificial Sequence
  Description of Artificial Sequence: Synthetic oligonucleotide
  Antisense strand to SEQ ID NO: 2017244
uauucucccaaauaaaggg

SEQ ID NO: 2017246 - RNA, 19 nt, Artificial Sequence
  Description of Artificial Sequence: Synthetic oligonucleotide
  Sense strand starting at position 28 of SEQ ID NO: 1881090
gaggaaauaucugucauac

SEQ ID NO: 2017247 - RNA, 19 nt, Artificial Sequence
  Description of Artificial Sequence: Synthetic oligonucleotide
  Antisense strand to SEQ ID NO: 2017246
guaugacagauauuuccuc

SEQ ID NO: 2017248 - RNA, 19 nt, Artificial Sequence
  Description of Artificial Sequence: Synthetic oligonucleotide
  Sense strand starting at position 39 of SEQ ID NO: 1881090
ugucauacuggucaucaau

SEQ ID NO: 2017249 - RNA, 19 nt, Artificial Sequence
  Description of Artificial Sequence: Synthetic oligonucleotide
  Antisense strand to SEQ ID NO: 2017248
auugaugaccaguaugaca

SEQ ID NO: 2017250 - RNA, 19 nt, Artificial Sequence
  Description of Artificial Sequence: Synthetic oligonucleotide
  Sense strand starting at position 107 of SEQ ID NO: 1881090
uuuagaagcuccucaaaug

SEQ ID NO: 2017251 - RNA, 19 nt, Artificial Sequence
  Description of Artificial Sequence: Synthetic oligonucleotide
  Antisense strand to SEQ ID NO: 2017250
cauuugaggagcuucuaaa

SEQ ID NO: 2017252 - RNA, 19 nt, Artificial Sequence
  Description of Artificial Sequence: Synthetic oligonucleotide
  Sense strand starting at position 241 of SEQ ID NO: 1881090
uccuuagggaaaugugaac

SEQ ID NO: 2017253 - RNA, 19 nt, Artificial Sequence
  Description of Artificial Sequence: Synthetic oligonucleotide
  Antisense strand to SEQ ID NO: 2017252
guucacauuucccuaagga

SEQ ID NO: 2017254 - RNA, 19 nt, Artificial Sequence
  Description of Artificial Sequence: Synthetic oligonucleotide
  Sense strand starting at position 447 of SEQ ID NO: 1881090
guuguauguacucaaacug

SEQ ID NO: 2017255 - RNA, 19 nt, Artificial Sequence
  Description of Artificial Sequence: Synthetic oligonucleotide
  Antisense strand to SEQ ID NO: 2017254
caguuugaguacauacaac

SEQ ID NO: 2017256 - RNA, 19 nt, Artificial Sequence
  Description of Artificial Sequence: Synthetic oligonucleotide
  Sense strand starting at position 457 of SEQ ID NO: 1881090
cucaaacugcaguaguaau

SEQ ID NO: 2017257 - RNA, 19 nt, Artificial Sequence
  Description of Artificial Sequence: Synthetic oligonucleotide
  Antisense strand to SEQ ID NO: 2017256
auuacuacugcaguuugag

SEQ ID NO: 2017258 - RNA, 19 nt, Artificial Sequence
  Description of Artificial Sequence: Synthetic oligonucleotide
  Sense strand starting at position 468 of SEQ ID NO: 1881090
guaguaaugagaugugaau

SEQ ID NO: 2017259 - RNA, 19 nt, Artificial Sequence
  Description of Artificial Sequence: Synthetic oligonucleotide
  Antisense strand to SEQ ID NO: 2017258
auucacaucucauuacuac

SEQ ID NO: 2017260 - RNA, 19 nt, Artificial Sequence
  Description of Artificial Sequence: Synthetic oligonucleotide
  Sense strand starting at position 470 of SEQ ID NO: 1881090
aguaaugagaugugaauau

SEQ ID NO: 2017261 - RNA, 19 nt, Artificial Sequence
  Description of Artificial Sequence: Synthetic oligonucleotide
  Antisense strand to SEQ ID NO: 2017260
auauucacaucucauuacu

SEQ ID NO: 2017262 - RNA, 19 nt, Artificial Sequence
  Description of Artificial Sequence: Synthetic oligonucleotide
  Sense strand starting at position 789 of SEQ ID NO: 1881090
uucuauagaucaguggguu

SEQ ID NO: 2017263 - RNA, 19 nt, Artificial Sequence
  Description of Artificial Sequence: Synthetic oligonucleotide
  Antisense strand to SEQ ID NO: 2017262
aacccacugaucuauagaa

SEQ ID NO: 2017264 - RNA, 19 nt, Artificial Sequence
  Description of Artificial Sequence: Synthetic oligonucleotide
  Sense strand starting at position 790 of SEQ ID NO: 1881090
ucuauagaucaguggguuu

SEQ ID NO: 2017265 - RNA, 19 nt, Artificial Sequence
  Description of Artificial Sequence: Synthetic oligonucleotide
  Antisense strand to SEQ ID NO: 2017264
aaacccacugaucuauaga

SEQ ID NO: 2017266 - RNA, 19 nt, Artificial Sequence
  Description of Artificial Sequence: Synthetic oligonucleotide
  Sense strand starting at position 927 of SEQ ID NO: 1881090
uccguauuugcuuaucagu

SEQ ID NO: 2017267 - RNA, 19 nt, Artificial Sequence
  Description of Artificial Sequence: Synthetic oligonucleotide
  Antisense strand to SEQ ID NO: 2017266
acugauaagcaaauacgga

SEQ ID NO: 2017268 - RNA, 19 nt, Artificial Sequence
  Description of Artificial Sequence: Synthetic oligonucleotide
  Sense strand starting at position 929 of SEQ ID NO: 1881090
cguauuugcuuaucaguuc

SEQ ID NO: 2017269 - RNA, 19 nt, Artificial Sequence
  Description of Artificial Sequence: Synthetic oligonucleotide
  Antisense strand to SEQ ID NO: 2017268
gaacugauaagcaaauacg

SEQ ID NO: 2017270 - RNA, 19 nt, Artificial Sequence
  Description of Artificial Sequence: Synthetic oligonucleotide
  Sense strand starting at position 1043 of SEQ ID NO: 1881090
uuagaauagugaccuagau

SEQ ID NO: 2017271 - RNA, 19 nt, Artificial Sequence
  Description of Artificial Sequence: Synthetic oligonucleotide
  Antisense strand to SEQ ID NO: 2017270
aucuaggucacuauucuaa

SEQ ID NO: 2017272 - RNA, 19 nt, Artificial Sequence
  Description of Artificial Sequence: Synthetic oligonucleotide
  Sense strand starting at position 1229 of SEQ ID NO: 1881090
uuaauuguuccugguauaa

SEQ ID NO: 2017273 - RNA, 19 nt, Artificial Sequence
  Description of Artificial Sequence: Synthetic oligonucleotide
  Antisense strand to SEQ ID NO: 2017272
uuauaccaggaacaauuaa

SEQ ID NO: 2017274 - RNA, 19 nt, Artificial Sequence
  Description of Artificial Sequence: Synthetic oligonucleotide
  Sense strand starting at position 1255 of SEQ ID NO: 1881090
auagguuucccacgggaua

SEQ ID NO: 2017275 - RNA, 19 nt, Artificial Sequence
  Description of Artificial Sequence: Synthetic oligonucleotide
  Antisense strand to SEQ ID NO: 2017274
uaucccgugggaaaccuau

SEQ ID NO: 2017276 - RNA, 19 nt, Artificial Sequence
  Description of Artificial Sequence: Synthetic oligonucleotide
  Sense strand starting at position 1256 of SEQ ID NO: 1881090
uagguuucccacgggauau

SEQ ID NO: 2017277 - RNA, 19 nt, Artificial Sequence
  Description of Artificial Sequence: Synthetic oligonucleotide
  Antisense strand to SEQ ID NO: 2017276
auaucccgugggaaaccua

SEQ ID NO: 2017278 - RNA, 19 nt, Artificial Sequence
  Description of Artificial Sequence: Synthetic oligonucleotide
  Sense strand starting at position 1257 of SEQ ID NO: 1881090
agguuucccacgggauauu

SEQ ID NO: 2017279 - RNA, 19 nt, Artificial Sequence
  Description of Artificial Sequence: Synthetic oligonucleotide
  Antisense strand to SEQ ID NO: 2017278
aauaucccgugggaaaccu

SEQ ID NO: 2017280 - RNA, 19 nt, Artificial Sequence
  Description of Artificial Sequence: Synthetic oligonucleotide
  Sense strand starting at position 1267 of SEQ ID NO: 1881090
cgggauauuucugaaucau

SEQ ID NO: 2017281 - RNA, 19 nt, Artificial Sequence
  Description of Artificial Sequence: Synthetic oligonucleotide
  Antisense strand to SEQ ID NO: 2017280
augauucagaaauaucccg

SEQ ID NO: 2017282 - RNA, 19 nt, Artificial Sequence
  Description of Artificial Sequence: Synthetic oligonucleotide
  Sense strand starting at position 1341 of SEQ ID NO: 1881090
cacacagaguauguguaau

SEQ ID NO: 2017283 - RNA, 19 nt, Artificial Sequence
  Description of Artificial Sequence: Synthetic oligonucleotide
  Antisense strand to SEQ ID NO: 2017282
auuacacauacucugugug

SEQ ID NO: 2017284 - RNA, 19 nt, Artificial Sequence
  Description of Artificial Sequence: Synthetic oligonucleotide
  Sense strand starting at position 1343 of SEQ ID NO: 1881090
cacagaguauguguaauuc

SEQ ID NO: 2017285 - RNA, 19 nt, Artificial Sequence
  Description of Artificial Sequence: Synthetic oligonucleotide
  Antisense strand to SEQ ID NO: 2017284
gaauuacacauacucugug

SEQ ID NO: 2017286 - RNA, 19 nt, Artificial Sequence
  Description of Artificial Sequence: Synthetic oligonucleotide
  Sense strand starting at position 1352 of SEQ ID NO: 1881090
uguguaauucugcaaacug

SEQ ID NO: 2017287 - RNA, 19 nt, Artificial Sequence
  Description of Artificial Sequence: Synthetic oligonucleotide
  Antisense strand to SEQ ID NO: 2017286
caguuugcagaauuacaca

SEQ ID NO: 2017288 - RNA, 19 nt, Artificial Sequence
  Description of Artificial Sequence: Synthetic oligonucleotide
  Sense strand starting at position 1571 of SEQ ID NO: 1881090
ggaagaacccugugauucc

SEQ ID NO: 2017289 - RNA, 19 nt, Artificial Sequence
  Description of Artificial Sequence: Synthetic oligonucleotide
  Antisense strand to SEQ ID NO: 2017288
ggaaucacaggguucuucc

SEQ ID NO: 2017290 - RNA, 19 nt, Artificial Sequence
  Description of Artificial Sequence: Synthetic oligonucleotide
  Sense strand starting at position 1637 of SEQ ID NO: 1881090
gguggcuugguauauuaaa

SEQ ID NO: 2017291 - RNA, 19 nt, Artificial Sequence
  Description of Artificial Sequence: Synthetic oligonucleotide
  Antisense strand to SEQ ID NO: 2017290
uuuaauauaccaagccacc

SEQ ID NO: 2017292 - RNA, 19 nt, Artificial Sequence
  Description of Artificial Sequence: Synthetic oligonucleotide
  Sense strand starting at position 2170 of SEQ ID NO: 1881090
guguuccgcggaagauuau

SEQ ID NO: 2017293 - RNA, 19 nt, Artificial Sequence
  Description of Artificial Sequence: Synthetic oligonucleotide
  Antisense strand to SEQ ID NO: 2017292
auaaucuuccgcggaacac

SEQ ID NO: 2017294 - RNA, 19 nt, Artificial Sequence
  Description of Artificial Sequence: Synthetic oligonucleotide
  Sense strand starting at position 2176 of SEQ ID NO: 1881090
cgcggaagauuauucuaga

SEQ ID NO: 2017295 - RNA, 19 nt, Artificial Sequence
  Description of Artificial Sequence: Synthetic oligonucleotide
  Antisense strand to SEQ ID NO: 2017294
ucuagaauaaucuuccgcg

SEQ ID NO: 2017296 - RNA, 19 nt, Artificial Sequence
  Description of Artificial Sequence: Synthetic oligonucleotide
  Sense strand starting at position 2177 of SEQ ID NO: 1881090
gcggaagauuauucuagac

SEQ ID NO: 2017297 - RNA, 19 nt, Artificial Sequence
  Description of Artificial Sequence: Synthetic oligonucleotide
  Antisense strand to SEQ ID NO: 2017296
gucuagaauaaucuuccgc

SEQ ID NO: 2017298 - RNA, 19 nt, Artificial Sequence
  Description of Artificial Sequence: Synthetic oligonucleotide
  Sense strand starting at position 2352 of SEQ ID NO: 1881090
ggcuuugggaaacgauauu

SEQ ID NO: 2017299 - RNA, 19 nt, Artificial Sequence
  Description of Artificial Sequence: Synthetic oligonucleotide
  Antisense strand to SEQ ID NO: 2017298
aauaucguuucccaaagcc

SEQ ID NO: 2017300 - RNA, 19 nt, Artificial Sequence
  Description of Artificial Sequence: Synthetic oligonucleotide
  Sense strand starting at position 2405 of SEQ ID NO: 1881090
ggaggauccucauaauuua

SEQ ID NO: 2017301 - RNA, 19 nt, Artificial Sequence
  Description of Artificial Sequence: Synthetic oligonucleotide
  Antisense strand to SEQ ID NO: 2017300
uaaauuaugaggauccucc

SEQ ID NO: 2017302 - RNA, 19 nt, Artificial Sequence
  Description of Artificial Sequence: Synthetic oligonucleotide
  Sense strand starting at position 2435 of SEQ ID NO: 1881090
aaggcuagaggguguaaua

SEQ ID NO: 2017303 - RNA, 19 nt, Artificial Sequence
  Description of Artificial Sequence: Synthetic oligonucleotide
  Antisense strand to SEQ ID NO: 2017302
uauuacacccucuagccuu

SEQ ID NO: 2017304 - RNA, 19 nt, Artificial Sequence
  Description of Artificial Sequence: Synthetic oligonucleotide
  Sense strand starting at position 2529 of SEQ ID NO: 1881090
augugaacuucucccgaca

SEQ ID NO: 2017305 - RNA, 19 nt, Artificial Sequence
  Description of Artificial Sequence: Synthetic oligonucleotide
  Antisense strand to SEQ ID NO: 2017304
ugucgggagaaguucacau

SEQ ID NO: 2017306 - RNA, 19 nt, Artificial Sequence
  Description of Artificial Sequence: Synthetic oligonucleotide
  Sense strand starting at position 2532 of SEQ ID NO: 1881090
ugaacuucucccgacauau

SEQ ID NO: 2017307 - RNA, 19 nt, Artificial Sequence
  Description of Artificial Sequence: Synthetic oligonucleotide
  Antisense strand to SEQ ID NO: 2017306
auaugucgggagaaguuca

SEQ ID NO: 2017308 - RNA, 19 nt, Artificial Sequence
  Description of Artificial Sequence: Synthetic oligonucleotide
  Sense strand starting at position 2547 of SEQ ID NO: 1881090
auauguuucccgcagauaa

SEQ ID NO: 2017309 - RNA, 19 nt, Artificial Sequence
  Description of Artificial Sequence: Synthetic oligonucleotide
  Antisense strand to SEQ ID NO: 2017308
uuaucugcgggaaacauau

SEQ ID NO: 2017310 - RNA, 19 nt, Artificial Sequence
  Description of Artificial Sequence: Synthetic oligonucleotide
  Sense strand starting at position 2566 of SEQ ID NO: 1881090
guaaacaaucuggacguga

SEQ ID NO: 2017311 - RNA, 19 nt, Artificial Sequence
  Description of Artificial Sequence: Synthetic oligonucleotide
  Antisense strand to SEQ ID NO: 2017310
ucacguccagauuguuuac

SEQ ID NO: 2017312 - RNA, 19 nt, Artificial Sequence
  Description of Artificial Sequence: Synthetic oligonucleotide
  Sense strand starting at position 2568 of SEQ ID NO: 1881090
aaacaaucuggacgugaaa

SEQ ID NO: 2017313 - RNA, 19 nt, Artificial Sequence
  Description of Artificial Sequence: Synthetic oligonucleotide
  Antisense strand to SEQ ID NO: 2017312
uuucacguccagauuguuu

SEQ ID NO: 2017314 - RNA, 19 nt, Artificial Sequence
  Description of Artificial Sequence: Synthetic oligonucleotide
  Sense strand starting at position 2570 of SEQ ID NO: 1881090
acaaucuggacgugaaaug

SEQ ID NO: 2017315 - RNA, 19 nt, Artificial Sequence
  Description of Artificial Sequence: Synthetic oligonucleotide
  Antisense strand to SEQ ID NO: 2017314
cauuucacguccagauugu

SEQ ID NO: 2017316 - RNA, 19 nt, Artificial Sequence
  Description of Artificial Sequence: Synthetic oligonucleotide
  Sense strand starting at position 2575 of SEQ ID NO: 1881090
cuggacgugaaauggaaau

SEQ ID NO: 2017317 - RNA, 19 nt, Artificial Sequence
  Description of Artificial Sequence: Synthetic oligonucleotide
  Antisense strand to SEQ ID NO: 2017316
auuuccauuucacguccag

SEQ ID NO: 2017318 - RNA, 19 nt, Artificial Sequence
  Description of Artificial Sequence: Synthetic oligonucleotide
  Sense strand starting at position 2754 of SEQ ID NO: 1881090
ccagaaaucccgcagggau

SEQ ID NO: 2017319 - RNA, 19 nt, Artificial Sequence
  Description of Artificial Sequence: Synthetic oligonucleotide
  Antisense strand to SEQ ID NO: 2017318
aucccugcgggauuucugg

SEQ ID NO: 2017320 - RNA, 19 nt, Artificial Sequence
  Description of Artificial Sequence: Synthetic oligonucleotide
  Sense strand starting at position 3099 of SEQ ID NO: 1881090
gguugucuggcgagaguuu

SEQ ID NO: 2017321 - RNA, 19 nt, Artificial Sequence
  Description of Artificial Sequence: Synthetic oligonucleotide
  Antisense strand to SEQ ID NO: 2017320
aaacucucgccagacaacc

SEQ ID NO: 2017322 - RNA, 19 nt, Artificial Sequence
  Description of Artificial Sequence: Synthetic oligonucleotide
  Sense strand starting at position 3149 of SEQ ID NO: 1881090
agcgcugaucguguaugaa

SEQ ID NO: 2017323 - RNA, 19 nt, Artificial Sequence
  Description of Artificial Sequence: Synthetic oligonucleotide
  Antisense strand to SEQ ID NO: 2017322
uucauacacgaucagcgcu

SEQ ID NO: 2017324 - RNA, 19 nt, Artificial Sequence
  Description of Artificial Sequence: Synthetic oligonucleotide
  Sense strand starting at position 386 of SEQ ID NO: 1881091
ugacuaacaguaugucuua

SEQ ID NO: 2017325 - RNA, 19 nt, Artificial Sequence
  Description of Artificial Sequence: Synthetic oligonucleotide
  Antisense strand to SEQ ID NO: 2017324
uaagacauacuguuaguca

SEQ ID NO: 2017326 - RNA, 19 nt, Artificial Sequence
  Description of Artificial Sequence: Synthetic oligonucleotide
  Sense strand starting at position 437 of SEQ ID NO: 1881091
gugaauaaaggauguaauu

SEQ ID NO: 2017327 - RNA, 19 nt, Artificial Sequence
  Description of Artificial Sequence: Synthetic oligonucleotide
  Antisense strand to SEQ ID NO: 2017326
aauuacauccuuuauucac

SEQ ID NO: 2017328 - RNA, 19 nt, Artificial Sequence
  Description of Artificial Sequence: Synthetic oligonucleotide
  Sense strand starting at position 701 of SEQ ID NO: 1881091
cucauuguccaguggaaca

SEQ ID NO: 2017329 - RNA, 19 nt, Artificial Sequence
  Description of Artificial Sequence: Synthetic oligonucleotide
  Antisense strand to SEQ ID NO: 2017328
uguuccacuggacaaugag

SEQ ID NO: 2017330 - RNA, 19 nt, Artificial Sequence
  Description of Artificial Sequence: Synthetic oligonucleotide
  Sense strand starting at position 807 of SEQ ID NO: 1881091
cggcaagauaaauagucaa

SEQ ID NO: 2017331 - RNA, 19 nt, Artificial Sequence
  Description of Artificial Sequence: Synthetic oligonucleotide
  Antisense strand to SEQ ID NO: 2017330
uugacuauuuaucuugccg

SEQ ID NO: 2017332 - RNA, 19 nt, Artificial Sequence
  Description of Artificial Sequence: Synthetic oligonucleotide
  Sense strand starting at position 814 of SEQ ID NO: 1881091
auaaauagucaaggguuau

SEQ ID NO: 2017333 - RNA, 19 nt, Artificial Sequence
  Description of Artificial Sequence: Synthetic oligonucleotide
  Antisense strand to SEQ ID NO: 2017332
auaacccuugacuauuuau

SEQ ID NO: 2017334 - RNA, 19 nt, Artificial Sequence
  Description of Artificial Sequence: Synthetic oligonucleotide
  Sense strand starting at position 828 of SEQ ID NO: 1881091
guuauuuggucaucacgcu

SEQ ID NO: 2017335 - RNA, 19 nt, Artificial Sequence
  Description of Artificial Sequence: Synthetic oligonucleotide
  Antisense strand to SEQ ID NO: 2017334
agcgugaugaccaaauaac

SEQ ID NO: 2017336 - RNA, 19 nt, Artificial Sequence
  Description of Artificial Sequence: Synthetic oligonucleotide
  Sense strand starting at position 946 of SEQ ID NO: 1881091
acaacaauagcuugaugau

SEQ ID NO: 2017337 - RNA, 19 nt, Artificial Sequence
  Description of Artificial Sequence: Synthetic oligonucleotide
  Antisense strand to SEQ ID NO: 2017336
aucaucaagcuauuguugu

SEQ ID NO: 2017338 - RNA, 19 nt, Artificial Sequence
  Description of Artificial Sequence: Synthetic oligonucleotide
  Sense strand starting at position 1128 of SEQ ID NO: 1881091
auagaacauucuguuaugu

SEQ ID NO: 2017339 - RNA, 19 nt, Artificial Sequence
  Description of Artificial Sequence: Synthetic oligonucleotide
  Antisense strand to SEQ ID NO: 2017338
acauaacagaauguucuau

SEQ ID NO: 2017340 - RNA, 19 nt, Artificial Sequence
  Description of Artificial Sequence: Synthetic oligonucleotide
  Sense strand starting at position 1205 of SEQ ID NO: 1881091
uggcauaacgucuugcuuu

SEQ ID NO: 2017341 - RNA, 19 nt, Artificial Sequence
  Description of Artificial Sequence: Synthetic oligonucleotide
  Antisense strand to SEQ ID NO: 2017340
aaagcaagacguuaugcca

SEQ ID NO: 2017342 - RNA, 19 nt, Artificial Sequence
  Description of Artificial Sequence: Synthetic oligonucleotide
  Sense strand starting at position 2242 of SEQ ID NO: 1881091
ucacaagugggcuaugaua

SEQ ID NO: 2017343 - RNA, 19 nt, Artificial Sequence
  Description of Artificial Sequence: Synthetic oligonucleotide
  Antisense strand to SEQ ID NO: 2017342
uaucauagcccacuuguga

SEQ ID NO: 2017344 - RNA, 19 nt, Artificial Sequence
  Description of Artificial Sequence: Synthetic oligonucleotide
  Sense strand starting at position 2244 of SEQ ID NO: 1881091
acaagugggcuaugauauc

SEQ ID NO: 2017345 - RNA, 19 nt, Artificial Sequence
  Description of Artificial Sequence: Synthetic oligonucleotide
  Antisense strand to SEQ ID NO: 2017344
gauaucauagcccacuugu

SEQ ID NO: 2017346 - RNA, 19 nt, Artificial Sequence
  Description of Artificial Sequence: Synthetic oligonucleotide
  Sense strand starting at position 2256 of SEQ ID NO: 1881091
ugauaucaugugggaacua

SEQ ID NO: 2017347 - RNA, 19 nt, Artificial Sequence
  Description of Artificial Sequence: Synthetic oligonucleotide
  Antisense strand to SEQ ID NO: 2017346
uaguucccacaugauauca

SEQ ID NO: 2017348 - RNA, 19 nt, Artificial Sequence
  Description of Artificial Sequence: Synthetic oligonucleotide
  Sense strand starting at position 2269 of SEQ ID NO: 1881091
gaacuauuugguugcaguu

SEQ ID NO: 2017349 - RNA, 19 nt, Artificial Sequence
  Description of Artificial Sequence: Synthetic oligonucleotide
  Antisense strand to SEQ ID NO: 2017348
aacugcaaccaaauaguuc

SEQ ID NO: 2017350 - RNA, 19 nt, Artificial Sequence
  Description of Artificial Sequence: Synthetic oligonucleotide
  Sense strand starting at position 2342 of SEQ ID NO: 1881091
cucagaaaggauuguuaau

SEQ ID NO: 2017351 - RNA, 19 nt, Artificial Sequence
  Description of Artificial Sequence: Synthetic oligonucleotide
  Antisense strand to SEQ ID NO: 2017350
auuaacaauccuuucugag

SEQ ID NO: 2017352 - RNA, 19 nt, Artificial Sequence
  Description of Artificial Sequence: Synthetic oligonucleotide
  Sense strand starting at position 2399 of SEQ ID NO: 1881091
agaagugagucaccaauga

SEQ ID NO: 2017353 - RNA, 19 nt, Artificial Sequence
  Description of Artificial Sequence: Synthetic oligonucleotide
  Antisense strand to SEQ ID NO: 2017352
ucauuggugacucacuucu

SEQ ID NO: 2017354 - RNA, 19 nt, Artificial Sequence
  Description of Artificial Sequence: Synthetic oligonucleotide
  Sense strand starting at position 2403 of SEQ ID NO: 1881091
gugagucaccaaugacaaa

SEQ ID NO: 2017355 - RNA, 19 nt, Artificial Sequence
  Description of Artificial Sequence: Synthetic oligonucleotide
  Antisense strand to SEQ ID NO: 2017354
uuugucauuggugacucac

SEQ ID NO: 2017356 - RNA, 19 nt, Artificial Sequence
  Description of Artificial Sequence: Synthetic oligonucleotide
  Sense strand starting at position 2414 of SEQ ID NO: 1881091
augacaaauuacguaucuu

SEQ ID NO: 2017357 - RNA, 19 nt, Artificial Sequence
  Description of Artificial Sequence: Synthetic oligonucleotide
  Antisense strand to SEQ ID NO: 2017356
aagauacguaauuugucau

SEQ ID NO: 2017358 - RNA, 19 nt, Artificial Sequence
  Description of Artificial Sequence: Synthetic oligonucleotide
  Sense strand starting at position 2424 of SEQ ID NO: 1881091
acguaucuuacgucucagu

SEQ ID NO: 2017359 - RNA, 19 nt, Artificial Sequence
  Description of Artificial Sequence: Synthetic oligonucleotide
  Antisense strand to SEQ ID NO: 2017358
acugagacguaagauacgu

SEQ ID NO: 2017360 - RNA, 19 nt, Artificial Sequence
  Description of Artificial Sequence: Synthetic oligonucleotide
  Sense strand starting at position 2464 of SEQ ID NO: 1881091
uuaguagguacuuaguaga

SEQ ID NO: 2017361 - RNA, 19 nt, Artificial Sequence
  Description of Artificial Sequence: Synthetic oligonucleotide
  Antisense strand to SEQ ID NO: 2017360
ucuacuaaguaccuacuaa

SEQ ID NO: 2017362 - RNA, 19 nt, Artificial Sequence
  Description of Artificial Sequence: Synthetic oligonucleotide
  Sense strand starting at position 2536 of SEQ ID NO: 1881091
augguuacaucugucaaag

SEQ ID NO: 2017363 - RNA, 19 nt, Artificial Sequence
  Description of Artificial Sequence: Synthetic oligonucleotide
  Antisense strand to SEQ ID NO: 2017362
cuuugacagauguaaccau

SEQ ID NO: 2017364 - RNA, 19 nt, Artificial Sequence
  Description of Artificial Sequence: Synthetic oligonucleotide
  Sense strand starting at position 2654 of SEQ ID NO: 1881091
ggguguuagagaggagagu

SEQ ID NO: 2017365 - RNA, 19 nt, Artificial Sequence
  Description of Artificial Sequence: Synthetic oligonucleotide
  Antisense strand to SEQ ID NO: 2017364
acucuccucucuaacaccc

SEQ ID NO: 2017366 - RNA, 19 nt, Artificial Sequence
  Description of Artificial Sequence: Synthetic oligonucleotide
  Sense strand starting at position 2723 of SEQ ID NO: 1881091
ggguucuauaaaggugaga

SEQ ID NO: 2017367 - RNA, 19 nt, Artificial Sequence
  Description of Artificial Sequence: Synthetic oligonucleotide
  Antisense strand to SEQ ID NO: 2017366
ucucaccuuuauagaaccc

SEQ ID NO: 2017368 - RNA, 19 nt, Artificial Sequence
  Description of Artificial Sequence: Synthetic oligonucleotide
  Sense strand starting at position 2728 of SEQ ID NO: 1881091
cuauaaaggugagauuucu

SEQ ID NO: 2017369 - RNA, 19 nt, Artificial Sequence
  Description of Artificial Sequence: Synthetic oligonucleotide
  Antisense strand to SEQ ID NO: 2017368
agaaaucucaccuuuauag

SEQ ID NO: 2017370 - RNA, 19 nt, Artificial Sequence
  Description of Artificial Sequence: Synthetic oligonucleotide
  Sense strand starting at position 2753 of SEQ ID NO: 1881091
cagggugacuuucuaauug

SEQ ID NO: 2017371 - RNA, 19 nt, Artificial Sequence
  Description of Artificial Sequence: Synthetic oligonucleotide
  Antisense strand to SEQ ID NO: 2017370
caauuagaaagucacccug

SEQ ID NO: 2017372 - RNA, 19 nt, Artificial Sequence
  Description of Artificial Sequence: Synthetic oligonucleotide
  Sense strand starting at position 2757 of SEQ ID NO: 1881091
gugacuuucuaauugaucu

SEQ ID NO: 2017373 - RNA, 19 nt, Artificial Sequence
  Description of Artificial Sequence: Synthetic oligonucleotide
  Antisense strand to SEQ ID NO: 2017372
agaucaauuagaaagucac

SEQ ID NO: 2017374 - RNA, 19 nt, Artificial Sequence
  Description of Artificial Sequence: Synthetic oligonucleotide
  Sense strand starting at position 2933 of SEQ ID NO: 1881091
ucaggaugguccuuuauga

SEQ ID NO: 2017375 - RNA, 19 nt, Artificial Sequence
  Description of Artificial Sequence: Synthetic oligonucleotide
  Antisense strand to SEQ ID NO: 2017374
ucauaaaggaccauccuga

SEQ ID NO: 2017376 - RNA, 19 nt, Artificial Sequence
  Description of Artificial Sequence: Synthetic oligonucleotide
  Sense strand starting at position 3182 of SEQ ID NO: 1881091
gugauauaaccucauaugu

SEQ ID NO: 2017377 - RNA, 19 nt, Artificial Sequence
  Description of Artificial Sequence: Synthetic oligonucleotide
  Antisense strand to SEQ ID NO: 2017376
acauaugagguuauaucac

SEQ ID NO: 2017378 - RNA, 19 nt, Artificial Sequence
  Description of Artificial Sequence: Synthetic oligonucleotide
  Sense strand starting at position 3204 of SEQ ID NO: 1881091
cgagaacucaucugaugca

SEQ ID NO: 2017379 - RNA, 19 nt, Artificial Sequence
  Description of Artificial Sequence: Synthetic oligonucleotide
  Antisense strand to SEQ ID NO: 2017378
ugcaucagaugaguucucg

SEQ ID NO: 2017380 - RNA, 19 nt, Artificial Sequence
  Description of Artificial Sequence: Synthetic oligonucleotide
  Sense strand starting at position 3310 of SEQ ID NO: 1881091
gauugauagcagugaagca

SEQ ID NO: 2017381 - RNA, 19 nt, Artificial Sequence
  Description of Artificial Sequence: Synthetic oligonucleotide
  Antisense strand to SEQ ID NO: 2017380
ugcuucacugcuaucaauc

SEQ ID NO: 2017382 - RNA, 19 nt, Artificial Sequence
  Description of Artificial Sequence: Synthetic oligonucleotide
  Sense strand starting at position 3311 of SEQ ID NO: 1881091
auugauagcagugaagcau

SEQ ID NO: 2017383 - RNA, 19 nt, Artificial Sequence
  Description of Artificial Sequence: Synthetic oligonucleotide
  Antisense strand to SEQ ID NO: 2017382
augcuucacugcuaucaau

SEQ ID NO: 2017384 - RNA, 19 nt, Artificial Sequence
  Description of Artificial Sequence: Synthetic oligonucleotide
  Sense strand starting at position 3320 of SEQ ID NO: 1881091
agugaagcauuguccuaaa

SEQ ID NO: 2017385 - RNA, 19 nt, Artificial Sequence
  Description of Artificial Sequence: Synthetic oligonucleotide
  Antisense strand to SEQ ID NO: 2017384
uuuaggacaaugcuucacu

SEQ ID NO: 2017386 - RNA, 19 nt, Artificial Sequence
  Description of Artificial Sequence: Synthetic oligonucleotide
  Sense strand starting at position 3429 of SEQ ID NO: 1881091
guggcuuugucuuuauuua

SEQ ID NO: 2017387 - RNA, 19 nt, Artificial Sequence
  Description of Artificial Sequence: Synthetic oligonucleotide
  Antisense strand to SEQ ID NO: 2017386
uaaauaaagacaaagccac

SEQ ID NO: 2017388 - RNA, 19 nt, Artificial Sequence
  Description of Artificial Sequence: Synthetic oligonucleotide
  Sense strand starting at position 3478 of SEQ ID NO: 1881091
aguauuaguggccauggga

SEQ ID NO: 2017389 - RNA, 19 nt, Artificial Sequence
  Description of Artificial Sequence: Synthetic oligonucleotide
  Antisense strand to SEQ ID NO: 2017388
ucccauggccacuaauacu

SEQ ID NO: 2017390 - RNA, 19 nt, Artificial Sequence
  Description of Artificial Sequence: Synthetic oligonucleotide
  Sense strand starting at position 3481 of SEQ ID NO: 1881091
auuaguggccaugggaaau

SEQ ID NO: 2017391 - RNA, 19 nt, Artificial Sequence
  Description of Artificial Sequence: Synthetic oligonucleotide
  Antisense strand to SEQ ID NO: 2017390
auuucccauggccacuaau

SEQ ID NO: 2017392 - RNA, 19 nt, Artificial Sequence
  Description of Artificial Sequence: Synthetic oligonucleotide
  Sense strand starting at position 3612 of SEQ ID NO: 1881091
uucuuauggcuuuaguaca

SEQ ID NO: 2017393 - RNA, 19 nt, Artificial Sequence
  Description of Artificial Sequence: Synthetic oligonucleotide
  Antisense strand to SEQ ID NO: 2017392
uguacuaaagccauaagaa

SEQ ID NO: 2017394 - RNA, 19 nt, Artificial Sequence
  Description of Artificial Sequence: Synthetic oligonucleotide
  Sense strand starting at position 3729 of SEQ ID NO: 1881091
uagagagccuucccauaug

SEQ ID NO: 2017395 - RNA, 19 nt, Artificial Sequence
  Description of Artificial Sequence: Synthetic oligonucleotide
  Antisense strand to SEQ ID NO: 2017394
cauaugggaaggcucucua

SEQ ID NO: 2017396 - RNA, 19 nt, Artificial Sequence
  Description of Artificial Sequence: Synthetic oligonucleotide
  Sense strand starting at position 3796 of SEQ ID NO: 1881091
ucaggaagcugauucuacu

SEQ ID NO: 2017397 - RNA, 19 nt, Artificial Sequence
  Description of Artificial Sequence: Synthetic oligonucleotide
  Antisense strand to SEQ ID NO: 2017396
aguagaaucagcuuccuga

SEQ ID NO: 2017398 - RNA, 19 nt, Artificial Sequence
  Description of Artificial Sequence: Synthetic oligonucleotide
  Sense strand starting at position 3840 of SEQ ID NO: 1881091
cauuguugacaucgaggaa

SEQ ID NO: 2017399 - RNA, 19 nt, Artificial Sequence
  Description of Artificial Sequence: Synthetic oligonucleotide
  Antisense strand to SEQ ID NO: 2017398
uuccucgaugucaacaaug

SEQ ID NO: 2017400 - RNA, 19 nt, Artificial Sequence
  Description of Artificial Sequence: Synthetic oligonucleotide
  Sense strand starting at position 3956 of SEQ ID NO: 1881091
cuuguuauauggcccaaga

SEQ ID NO: 2017401 - RNA, 19 nt, Artificial Sequence
  Description of Artificial Sequence: Synthetic oligonucleotide
  Antisense strand to SEQ ID NO: 2017400
ucuugggccauauaacaag

SEQ ID NO: 2017402 - RNA, 19 nt, Artificial Sequence
  Description of Artificial Sequence: Synthetic oligonucleotide
  Sense strand starting at position 3958 of SEQ ID NO: 1881091
uguuauauggcccaagaaa

SEQ ID NO: 2017403 - RNA, 19 nt, Artificial Sequence
  Description of Artificial Sequence: Synthetic oligonucleotide
  Antisense strand to SEQ ID NO: 2017402
uuucuugggccauauaaca

SEQ ID NO: 2017404 - RNA, 19 nt, Artificial Sequence
  Description of Artificial Sequence: Synthetic oligonucleotide
  Sense strand starting at position 96 of SEQ ID NO: 1881093
gccguaaucccagcacugu

SEQ ID NO: 2017405 - RNA, 19 nt, Artificial Sequence
  Description of Artificial Sequence: Synthetic oligonucleotide
  Antisense strand to SEQ ID NO: 2017404
acagugcugggauuacggc

SEQ ID NO: 2017406 - RNA, 19 nt, Artificial Sequence
  Description of Artificial Sequence: Synthetic oligonucleotide
  Sense strand starting at position 398 of SEQ ID NO: 1881093
uugccauugagauaaugug

SEQ ID NO: 2017407 - RNA, 19 nt, Artificial Sequence
  Description of Artificial Sequence: Synthetic oligonucleotide
  Antisense strand to SEQ ID NO: 2017406
cacauuaucucaauggcaa

SEQ ID NO: 2017408 - RNA, 19 nt, Artificial Sequence
  Description of Artificial Sequence: Synthetic oligonucleotide
  Sense strand starting at position 406 of SEQ ID NO: 1881093
gagauaaugugccucugac

SEQ ID NO: 2017409 - RNA, 19 nt, Artificial Sequence
  Description of Artificial Sequence: Synthetic oligonucleotide
  Antisense strand to SEQ ID NO: 2017408
gucagaggcacauuaucuc

SEQ ID NO: 2017410 - RNA, 19 nt, Artificial Sequence
  Description of Artificial Sequence: Synthetic oligonucleotide
  Sense strand starting at position 454 of SEQ ID NO: 1881093
uggcuuauauucucuauga

SEQ ID NO: 2017411 - RNA, 19 nt, Artificial Sequence
  Description of Artificial Sequence: Synthetic oligonucleotide
  Antisense strand to SEQ ID NO: 2017410
ucauagagaauauaagcca

SEQ ID NO: 2017412 - RNA, 19 nt, Artificial Sequence
  Description of Artificial Sequence: Synthetic oligonucleotide
  Sense strand starting at position 455 of SEQ ID NO: 1881093
ggcuuauauucucuaugag

SEQ ID NO: 2017413 - RNA, 19 nt, Artificial Sequence
  Description of Artificial Sequence: Synthetic oligonucleotide
  Antisense strand to SEQ ID NO: 2017412
cucauagagaauauaagcc

SEQ ID NO: 2017414 - RNA, 19 nt, Artificial Sequence
  Description of Artificial Sequence: Synthetic oligonucleotide
  Sense strand starting at position 467 of SEQ ID NO: 1881093
cuaugagagcauuaaaguu

SEQ ID NO: 2017415 - RNA, 19 nt, Artificial Sequence
  Description of Artificial Sequence: Synthetic oligonucleotide
  Antisense strand to SEQ ID NO: 2017414
aacuuuaaugcucucauag

SEQ ID NO: 2017416 - RNA, 19 nt, Artificial Sequence
  Description of Artificial Sequence: Synthetic oligonucleotide
  Sense strand starting at position 846 of SEQ ID NO: 1881093
aguaauauauucucgggua

SEQ ID NO: 2017417 - RNA, 19 nt, Artificial Sequence
  Description of Artificial Sequence: Synthetic oligonucleotide
  Antisense strand to SEQ ID NO: 2017416
uacccgagaauauauuacu

SEQ ID NO: 2017418 - RNA, 19 nt, Artificial Sequence
  Description of Artificial Sequence: Synthetic oligonucleotide
  Sense strand starting at position 848 of SEQ ID NO: 1881093
uaauauauucucggguaaa

SEQ ID NO: 2017419 - RNA, 19 nt, Artificial Sequence
  Description of Artificial Sequence: Synthetic oligonucleotide
  Antisense strand to SEQ ID NO: 2017418
uuuacccgagaauauauua

SEQ ID NO: 2017420 - RNA, 19 nt, Artificial Sequence
  Description of Artificial Sequence: Synthetic oligonucleotide
  Sense strand starting at position 899 of SEQ ID NO: 1881093
aagugaaaguccuucuuug

SEQ ID NO: 2017421 - RNA, 19 nt, Artificial Sequence
  Description of Artificial Sequence: Synthetic oligonucleotide
  Antisense strand to SEQ ID NO: 2017420
caaagaaggacuuucacuu

SEQ ID NO: 2017422 - RNA, 19 nt, Artificial Sequence
  Description of Artificial Sequence: Synthetic oligonucleotide
  Sense strand starting at position 942 of SEQ ID NO: 1881093
cccagaaguuaagaaucuu

SEQ ID NO: 2017423 - RNA, 19 nt, Artificial Sequence
  Description of Artificial Sequence: Synthetic oligonucleotide
  Antisense strand to SEQ ID NO: 2017422
aagauucuuaacuucuggg

SEQ ID NO: 2017424 - RNA, 19 nt, Artificial Sequence
  Description of Artificial Sequence: Synthetic oligonucleotide
  Sense strand starting at position 948 of SEQ ID NO: 1881093
aguuaagaaucuuuccaga

SEQ ID NO: 2017425 - RNA, 19 nt, Artificial Sequence
  Description of Artificial Sequence: Synthetic oligonucleotide
  Antisense strand to SEQ ID NO: 2017424
ucuggaaagauucuuaacu

SEQ ID NO: 2017426 - RNA, 19 nt, Artificial Sequence
  Description of Artificial Sequence: Synthetic oligonucleotide
  Sense strand starting at position 1048 of SEQ ID NO: 1881093
uuacauaaaugggaacgua

SEQ ID NO: 2017427 - RNA, 19 nt, Artificial Sequence
  Description of Artificial Sequence: Synthetic oligonucleotide
  Antisense strand to SEQ ID NO: 2017426
uacguucccauuuauguaa

SEQ ID NO: 2017428 - RNA, 19 nt, Artificial Sequence
  Description of Artificial Sequence: Synthetic oligonucleotide
  Sense strand starting at position 1188 of SEQ ID NO: 1881093
gaauguacugcguuuguuu

SEQ ID NO: 2017429 - RNA, 19 nt, Artificial Sequence
  Description of Artificial Sequence: Synthetic oligonucleotide
  Antisense strand to SEQ ID NO: 2017428
aaacaaacgcaguacauuc

SEQ ID NO: 2017430 - RNA, 19 nt, Artificial Sequence
  Description of Artificial Sequence: Synthetic oligonucleotide
  Sense strand starting at position 1189 of SEQ ID NO: 1881093
aauguacugcguuuguuua

SEQ ID NO: 2017431 - RNA, 19 nt, Artificial Sequence
  Description of Artificial Sequence: Synthetic oligonucleotide
  Antisense strand to SEQ ID NO: 2017430
uaaacaaacgcaguacauu

SEQ ID NO: 2017432 - RNA, 19 nt, Artificial Sequence
  Description of Artificial Sequence: Synthetic oligonucleotide
  Sense strand starting at position 1201 of SEQ ID NO: 1881093
uuguuuaagcaaugucuau

SEQ ID NO: 2017433 - RNA, 19 nt, Artificial Sequence
  Description of Artificial Sequence: Synthetic oligonucleotide
  Antisense strand to SEQ ID NO: 2017432
auagacauugcuuaaacaa

SEQ ID NO: 2017434 - RNA, 19 nt, Artificial Sequence
  Description of Artificial Sequence: Synthetic oligonucleotide
  Sense strand starting at position 1205 of SEQ ID NO: 1881093
uuaagcaaugucuauggau

SEQ ID NO: 2017435 - RNA, 19 nt, Artificial Sequence
  Description of Artificial Sequence: Synthetic oligonucleotide
  Antisense strand to SEQ ID NO: 2017434
auccauagacauugcuuaa

SEQ ID NO: 2017436 - RNA, 19 nt, Artificial Sequence
  Description of Artificial Sequence: Synthetic oligonucleotide
  Sense strand starting at position 1207 of SEQ ID NO: 1881093
aagcaaugucuauggauag

SEQ ID NO: 2017437 - RNA, 19 nt, Artificial Sequence
  Description of Artificial Sequence: Synthetic oligonucleotide
  Antisense strand to SEQ ID NO: 2017436
cuauccauagacauugcuu

SEQ ID NO: 2017438 - RNA, 19 nt, Artificial Sequence
  Description of Artificial Sequence: Synthetic oligonucleotide
  Sense strand starting at position 1363 of SEQ ID NO: 1881093
cagcaauaagagugcagau

SEQ ID NO: 2017439 - RNA, 19 nt, Artificial Sequence
  Description of Artificial Sequence: Synthetic oligonucleotide
  Antisense strand to SEQ ID NO: 2017438
aucugcacucuuauugcug

SEQ ID NO: 2017440 - RNA, 19 nt, Artificial Sequence
  Description of Artificial Sequence: Synthetic oligonucleotide
  Sense strand starting at position 1633 of SEQ ID NO: 1881093
cucuguauccgacaucaua

SEQ ID NO: 2017441 - RNA, 19 nt, Artificial Sequence
  Description of Artificial Sequence: Synthetic oligonucleotide
  Antisense strand to SEQ ID NO: 2017440
uaugaugucggauacagag

SEQ ID NO: 2017442 - RNA, 19 nt, Artificial Sequence
  Description of Artificial Sequence: Synthetic oligonucleotide
  Sense strand starting at position 1636 of SEQ ID NO: 1881093
uguauccgacaucauauua

SEQ ID NO: 2017443 - RNA, 19 nt, Artificial Sequence
  Description of Artificial Sequence: Synthetic oligonucleotide
  Antisense strand to SEQ ID NO: 2017442
uaauaugaugucggauaca

SEQ ID NO: 2017444 - RNA, 19 nt, Artificial Sequence
  Description of Artificial Sequence: Synthetic oligonucleotide
  Sense strand starting at position 1691 of SEQ ID NO: 1881093
gaaggaacucaccguguau

SEQ ID NO: 2017445 - RNA, 19 nt, Artificial Sequence
  Description of Artificial Sequence: Synthetic oligonucleotide
  Antisense strand to SEQ ID NO: 2017444
auacacggugaguuccuuc

SEQ ID NO: 2017446 - RNA, 19 nt, Artificial Sequence
  Description of Artificial Sequence: Synthetic oligonucleotide
  Sense strand starting at position 1754 of SEQ ID NO: 1881093
cauaccuggugaccugaaa

SEQ ID NO: 2017447 - RNA, 19 nt, Artificial Sequence
  Description of Artificial Sequence: Synthetic oligonucleotide
  Antisense strand to SEQ ID NO: 2017446
uuucaggucaccagguaug

SEQ ID NO: 2017448 - RNA, 19 nt, Artificial Sequence
  Description of Artificial Sequence: Synthetic oligonucleotide
  Sense strand starting at position 1814 of SEQ ID NO: 1881093
uugguuuaguuaccauuaa

SEQ ID NO: 2017449 - RNA, 19 nt, Artificial Sequence
  Description of Artificial Sequence: Synthetic oligonucleotide
  Antisense strand to SEQ ID NO: 2017448
uuaaugguaacuaaaccaa

SEQ ID NO: 2017450 - RNA, 19 nt, Artificial Sequence
  Description of Artificial Sequence: Synthetic oligonucleotide
  Sense strand starting at position 2001 of SEQ ID NO: 1881093
uagggaucacucugauauu

SEQ ID NO: 2017451 - RNA, 19 nt, Artificial Sequence
  Description of Artificial Sequence: Synthetic oligonucleotide
  Antisense strand to SEQ ID NO: 2017450
aauaucagagugaucccua

SEQ ID NO: 2017452 - RNA, 19 nt, Artificial Sequence
  Description of Artificial Sequence: Synthetic oligonucleotide
  Sense strand starting at position 2002 of SEQ ID NO: 1881093
agggaucacucugauauug

SEQ ID NO: 2017453 - RNA, 19 nt, Artificial Sequence
  Description of Artificial Sequence: Synthetic oligonucleotide
  Antisense strand to SEQ ID NO: 2017452
caauaucagagugaucccu

SEQ ID NO: 2017454 - RNA, 19 nt, Artificial Sequence
  Description of Artificial Sequence: Synthetic oligonucleotide
  Sense strand starting at position 2166 of SEQ ID NO: 1881093
uggugcauuucugcccaga

SEQ ID NO: 2017455 - RNA, 19 nt, Artificial Sequence
  Description of Artificial Sequence: Synthetic oligonucleotide
  Antisense strand to SEQ ID NO: 2017454
ucugggcagaaaugcacca

SEQ ID NO: 2017456 - RNA, 19 nt, Artificial Sequence
  Description of Artificial Sequence: Synthetic oligonucleotide
  Sense strand starting at position 2296 of SEQ ID NO: 1881093
cuagucaguacuggagaaa

SEQ ID NO: 2017457 - RNA, 19 nt, Artificial Sequence
  Description of Artificial Sequence: Synthetic oligonucleotide
  Antisense strand to SEQ ID NO: 2017456
uuucuccaguacugacuag

SEQ ID NO: 2017458 - RNA, 19 nt, Artificial Sequence
  Description of Artificial Sequence: Synthetic oligonucleotide
  Sense strand starting at position 2465 of SEQ ID NO: 1881093
acagcugaacucugauauc

SEQ ID NO: 2017459 - RNA, 19 nt, Artificial Sequence
  Description of Artificial Sequence: Synthetic oligonucleotide
  Antisense strand to SEQ ID NO: 2017458
gauaucagaguucagcugu

SEQ ID NO: 2017460 - RNA, 19 nt, Artificial Sequence
  Description of Artificial Sequence: Synthetic oligonucleotide
  Sense strand starting at position 2724 of SEQ ID NO: 1881093
guaguuaucgaccacacuu

SEQ ID NO: 2017461 - RNA, 19 nt, Artificial Sequence
  Description of Artificial Sequence: Synthetic oligonucleotide
  Antisense strand to SEQ ID NO: 2017460
aaguguggucgauaacuac

SEQ ID NO: 2017462 - RNA, 19 nt, Artificial Sequence
  Description of Artificial Sequence: Synthetic oligonucleotide
  Sense strand starting at position 2744 of SEQ ID NO: 1881093
ugguauaaucuauggcuag

SEQ ID NO: 2017463 - RNA, 19 nt, Artificial Sequence
  Description of Artificial Sequence: Synthetic oligonucleotide
  Antisense strand to SEQ ID NO: 2017462
cuagccauagauuauacca

SEQ ID NO: 2017464 - RNA, 19 nt, Artificial Sequence
  Description of Artificial Sequence: Synthetic oligonucleotide
  Sense strand starting at position 2767 of SEQ ID NO: 1881093
gggaucuacuaggccuuaa

SEQ ID NO: 2017465 - RNA, 19 nt, Artificial Sequence
  Description of Artificial Sequence: Synthetic oligonucleotide
  Antisense strand to SEQ ID NO: 2017464
uuaaggccuaguagauccc

SEQ ID NO: 2017466 - RNA, 19 nt, Artificial Sequence
  Description of Artificial Sequence: Synthetic oligonucleotide
  Sense strand starting at position 2876 of SEQ ID NO: 1881093
gcaacauagccuuaaagga

SEQ ID NO: 2017467 - RNA, 19 nt, Artificial Sequence
  Description of Artificial Sequence: Synthetic oligonucleotide
  Antisense strand to SEQ ID NO: 2017466
uccuuuaaggcuauguugc

SEQ ID NO: 2017468 - RNA, 19 nt, Artificial Sequence
  Description of Artificial Sequence: Synthetic oligonucleotide
  Sense strand starting at position 3003 of SEQ ID NO: 1881093
ggaagaugagugugcgaug

SEQ ID NO: 2017469 - RNA, 19 nt, Artificial Sequence
  Description of Artificial Sequence: Synthetic oligonucleotide
  Antisense strand to SEQ ID NO: 2017468
caucgcacacucaucuucc

SEQ ID NO: 2017470 - RNA, 19 nt, Artificial Sequence
  Description of Artificial Sequence: Synthetic oligonucleotide
  Sense strand starting at position 3004 of SEQ ID NO: 1881093
gaagaugagugugcgauga

SEQ ID NO: 2017471 - RNA, 19 nt, Artificial Sequence
  Description of Artificial Sequence: Synthetic oligonucleotide
  Antisense strand to SEQ ID NO: 2017470
ucaucgcacacucaucuuc

SEQ ID NO: 2017472 - RNA, 19 nt, Artificial Sequence
  Description of Artificial Sequence: Synthetic oligonucleotide
  Sense strand starting at position 3098 of SEQ ID NO: 1881093
agagcuugccugggaguga

SEQ ID NO: 2017473 - RNA, 19 nt, Artificial Sequence
  Description of Artificial Sequence: Synthetic oligonucleotide
  Antisense strand to SEQ ID NO: 2017472
ucacucccaggcaagcucu

SEQ ID NO: 2017474 - RNA, 19 nt, Artificial Sequence
  Description of Artificial Sequence: Synthetic oligonucleotide
  Sense strand starting at position 3184 of SEQ ID NO: 1881093
uuccuuaggucuuugccaa

SEQ ID NO: 2017475 - RNA, 19 nt, Artificial Sequence
  Description of Artificial Sequence: Synthetic oligonucleotide
  Antisense strand to SEQ ID NO: 2017474
uuggcaaagaccuaaggaa

SEQ ID NO: 2017476 - RNA, 19 nt, Artificial Sequence
  Description of Artificial Sequence: Synthetic oligonucleotide
  Sense strand starting at position 3663 of SEQ ID NO: 1881093
cuacaaaugcuaggaagau

SEQ ID NO: 2017477 - RNA, 19 nt, Artificial Sequence
  Description of Artificial Sequence: Synthetic oligonucleotide
  Antisense strand to SEQ ID NO: 2017476
aucuuccuagcauuuguag

SEQ ID NO: 2017478 - RNA, 19 nt, Artificial Sequence
  Description of Artificial Sequence: Synthetic oligonucleotide
  Sense strand starting at position 3785 of SEQ ID NO: 1881093
ggguaugaaugcccagauu

SEQ ID NO: 2017479 - RNA, 19 nt, Artificial Sequence
  Description of Artificial Sequence: Synthetic oligonucleotide
  Antisense strand to SEQ ID NO: 2017478
aaucugggcauucauaccc

SEQ ID NO: 2017480 - RNA, 19 nt, Artificial Sequence
  Description of Artificial Sequence: Synthetic oligonucleotide
  Sense strand starting at position 3865 of SEQ ID NO: 1881093
agaauuugauugcaugaau

SEQ ID NO: 2017481 - RNA, 19 nt, Artificial Sequence
  Description of Artificial Sequence: Synthetic oligonucleotide
  Antisense strand to SEQ ID NO: 2017480
auucaugcaaucaaauucu

SEQ ID NO: 2017482 - RNA, 19 nt, Artificial Sequence
  Description of Artificial Sequence: Synthetic oligonucleotide
  Sense strand starting at position 3889 of SEQ ID NO: 1881093
aaaggucuucuuugcaaga

SEQ ID NO: 2017483 - RNA, 19 nt, Artificial Sequence
  Description of Artificial Sequence: Synthetic oligonucleotide
  Antisense strand to SEQ ID NO: 2017482
ucuugcaaagaagaccuuu

SEQ ID NO: 2017484 - RNA, 19 nt, Artificial Sequence
  Description of Artificial Sequence: Synthetic oligonucleotide
  Sense strand starting at position 217 of SEQ ID NO: 1881092
uugccauugagauaaugug

SEQ ID NO: 2017485 - RNA, 19 nt, Artificial Sequence
  Description of Artificial Sequence: Synthetic oligonucleotide
  Antisense strand to SEQ ID NO: 2017484
cacauuaucucaauggcaa

SEQ ID NO: 2017486 - RNA, 19 nt, Artificial Sequence
  Description of Artificial Sequence: Synthetic oligonucleotide
  Sense strand starting at position 225 of SEQ ID NO: 1881092
gagauaaugugccucugac

SEQ ID NO: 2017487 - RNA, 19 nt, Artificial Sequence
  Description of Artificial Sequence: Synthetic oligonucleotide
  Antisense strand to SEQ ID NO: 2017486
gucagaggcacauuaucuc

SEQ ID NO: 2017488 - RNA, 19 nt, Artificial Sequence
  Description of Artificial Sequence: Synthetic oligonucleotide
  Sense strand starting at position 273 of SEQ ID NO: 1881092
uggcuuauauucucuauga

SEQ ID NO: 2017489 - RNA, 19 nt, Artificial Sequence
  Description of Artificial Sequence: Synthetic oligonucleotide
  Antisense strand to SEQ ID NO: 2017488
ucauagagaauauaagcca

SEQ ID NO: 2017490 - RNA, 19 nt, Artificial Sequence
  Description of Artificial Sequence: Synthetic oligonucleotide
  Sense strand starting at position 274 of SEQ ID NO: 1881092
ggcuuauauucucuaugag

SEQ ID NO: 2017491 - RNA, 19 nt, Artificial Sequence
  Description of Artificial Sequence: Synthetic oligonucleotide
  Antisense strand to SEQ ID NO: 2017490
cucauagagaauauaagcc

SEQ ID NO: 2017492 - RNA, 19 nt, Artificial Sequence
  Description of Artificial Sequence: Synthetic oligonucleotide
  Sense strand starting at position 286 of SEQ ID NO: 1881092
cuaugagagcauuaaaguu

SEQ ID NO: 2017493 - RNA, 19 nt, Artificial Sequence
  Description of Artificial Sequence: Synthetic oligonucleotide
  Antisense strand to SEQ ID NO: 2017492
aacuuuaaugcucucauag

SEQ ID NO: 2017494 - RNA, 19 nt, Artificial Sequence
  Description of Artificial Sequence: Synthetic oligonucleotide
  Sense strand starting at position 665 of SEQ ID NO: 1881092
aguaauauauucucgggua

SEQ ID NO: 2017495 - RNA, 19 nt, Artificial Sequence
  Description of Artificial Sequence: Synthetic oligonucleotide
  Antisense strand to SEQ ID NO: 2017494
uacccgagaauauauuacu

SEQ ID NO: 2017496 - RNA, 19 nt, Artificial Sequence
  Description of Artificial Sequence: Synthetic oligonucleotide
  Sense strand starting at position 667 of SEQ ID NO: 1881092
uaauauauucucggguaaa

SEQ ID NO: 2017497 - RNA, 19 nt, Artificial Sequence
  Description of Artificial Sequence: Synthetic oligonucleotide
  Antisense strand to SEQ ID NO: 2017496
uuuacccgagaauauauua

SEQ ID NO: 2017498 - RNA, 19 nt, Artificial Sequence
  Description of Artificial Sequence: Synthetic oligonucleotide
  Sense strand starting at position 718 of SEQ ID NO: 1881092
aagugaaaguccuucuuug

SEQ ID NO: 2017499 - RNA, 19 nt, Artificial Sequence
  Description of Artificial Sequence: Synthetic oligonucleotide
  Antisense strand to SEQ ID NO: 2017498
caaagaaggacuuucacuu

SEQ ID NO: 2017500 - RNA, 19 nt, Artificial Sequence
  Description of Artificial Sequence: Synthetic oligonucleotide
  Sense strand starting at position 767 of SEQ ID NO: 1881092
aguuaagaaucuuuccaga

SEQ ID NO: 2017501 - RNA, 19 nt, Artificial Sequence
  Description of Artificial Sequence: Synthetic oligonucleotide
  Antisense strand to SEQ ID NO: 2017500
ucuggaaagauucuuaacu

SEQ ID NO: 2017502 - RNA, 19 nt, Artificial Sequence
  Description of Artificial Sequence: Synthetic oligonucleotide
  Sense strand starting at position 1007 of SEQ ID NO: 1881092
gaauguacugcguuuguuu

SEQ ID NO: 2017503 - RNA, 19 nt, Artificial Sequence
  Description of Artificial Sequence: Synthetic oligonucleotide
  Antisense strand to SEQ ID NO: 2017502
aaacaaacgcaguacauuc

SEQ ID NO: 2017504 - RNA, 19 nt, Artificial Sequence
  Description of Artificial Sequence: Synthetic oligonucleotide
  Sense strand starting at position 1008 of SEQ ID NO: 1881092
aauguacugcguuuguuua

SEQ ID NO: 2017505 - RNA, 19 nt, Artificial Sequence
  Description of Artificial Sequence: Synthetic oligonucleotide
  Antisense strand to SEQ ID NO: 2017504
uaaacaaacgcaguacauu

SEQ ID NO: 2017506 - RNA, 19 nt, Artificial Sequence
  Description of Artificial Sequence: Synthetic oligonucleotide
  Sense strand starting at position 1024 of SEQ ID NO: 1881092
uuaagcaaugucuauggau

SEQ ID NO: 2017507 - RNA, 19 nt, Artificial Sequence
  Description of Artificial Sequence: Synthetic oligonucleotide
  Antisense strand to SEQ ID NO: 2017506
auccauagacauugcuuaa

SEQ ID NO: 2017508 - RNA, 19 nt, Artificial Sequence
  Description of Artificial Sequence: Synthetic oligonucleotide
  Sense strand starting at position 1026 of SEQ ID NO: 1881092
aagcaaugucuauggauag

SEQ ID NO: 2017509 - RNA, 19 nt, Artificial Sequence
  Description of Artificial Sequence: Synthetic oligonucleotide
  Antisense strand to SEQ ID NO: 2017508
cuauccauagacauugcuu

SEQ ID NO: 2017510 - RNA, 19 nt, Artificial Sequence
  Description of Artificial Sequence: Synthetic oligonucleotide
  Sense strand starting at position 1182 of SEQ ID NO: 1881092
cagcaauaagagugcagau

SEQ ID NO: 2017511 - RNA, 19 nt, Artificial Sequence
  Description of Artificial Sequence: Synthetic oligonucleotide
  Antisense strand to SEQ ID NO: 2017510
aucugcacucuuauugcug

SEQ ID NO: 2017512 - RNA, 19 nt, Artificial Sequence
  Description of Artificial Sequence: Synthetic oligonucleotide
  Sense strand starting at position 1452 of SEQ ID NO: 1881092
cucuguauccgacaucaua

SEQ ID NO: 2017513 - RNA, 19 nt, Artificial Sequence
  Description of Artificial Sequence: Synthetic oligonucleotide
  Antisense strand to SEQ ID NO: 2017512
uaugaugucggauacagag

SEQ ID NO: 2017514 - RNA, 19 nt, Artificial Sequence
  Description of Artificial Sequence: Synthetic oligonucleotide
  Sense strand starting at position 1455 of SEQ ID NO: 1881092
uguauccgacaucauauua

SEQ ID NO: 2017515 - RNA, 19 nt, Artificial Sequence
  Description of Artificial Sequence: Synthetic oligonucleotide
  Antisense strand to SEQ ID NO: 2017514
uaauaugaugucggauaca

SEQ ID NO: 2017516 - RNA, 19 nt, Artificial Sequence
  Description of Artificial Sequence: Synthetic oligonucleotide
  Sense strand starting at position 1510 of SEQ ID NO: 1881092
gaaggaacucaccguguau

SEQ ID NO: 2017517 - RNA, 19 nt, Artificial Sequence
  Description of Artificial Sequence: Synthetic oligonucleotide
  Antisense strand to SEQ ID NO: 2017516
auacacggugaguuccuuc

SEQ ID NO: 2017518 - RNA, 19 nt, Artificial Sequence
  Description of Artificial Sequence: Synthetic oligonucleotide
  Sense strand starting at position 1573 of SEQ ID NO: 1881092
cauaccuggugaccugaaa

SEQ ID NO: 2017519 - RNA, 19 nt, Artificial Sequence
  Description of Artificial Sequence: Synthetic oligonucleotide
  Antisense strand to SEQ ID NO: 2017518
uuucaggucaccagguaug

SEQ ID NO: 2017520 - RNA, 19 nt, Artificial Sequence
  Description of Artificial Sequence: Synthetic oligonucleotide
  Sense strand starting at position 1633 of SEQ ID NO: 1881092
uugguuuaguuaccauuaa

SEQ ID NO: 2017521 - RNA, 19 nt, Artificial Sequence
  Description of Artificial Sequence: Synthetic oligonucleotide
  Antisense strand to SEQ ID NO: 2017520
uuaaugguaacuaaaccaa

SEQ ID NO: 2017522 - RNA, 19 nt, Artificial Sequence
  Description of Artificial Sequence: Synthetic oligonucleotide
  Sense strand starting at position 1820 of SEQ ID NO: 1881092
uagggaucacucugauauu

SEQ ID NO: 2017523 - RNA, 19 nt, Artificial Sequence
  Description of Artificial Sequence: Synthetic oligonucleotide
  Antisense strand to SEQ ID NO: 2017522
aauaucagagugaucccua

SEQ ID NO: 2017524 - RNA, 19 nt, Artificial Sequence
  Description of Artificial Sequence: Synthetic oligonucleotide
  Sense strand starting at position 1985 of SEQ ID NO: 1881092
uggugcauuucugcccaga

SEQ ID NO: 2017525 - RNA, 19 nt, Artificial Sequence
  Description of Artificial Sequence: Synthetic oligonucleotide
  Antisense strand to SEQ ID NO: 2017524
ucugggcagaaaugcacca

SEQ ID NO: 2017526 - RNA, 19 nt, Artificial Sequence
  Description of Artificial Sequence: Synthetic oligonucleotide
  Sense strand starting at position 2115 of SEQ ID NO: 1881092
cuagucaguacuggagaaa

SEQ ID NO: 2017527 - RNA, 19 nt, Artificial Sequence
  Description of Artificial Sequence: Synthetic oligonucleotide
  Antisense strand to SEQ ID NO: 2017526
uuucuccaguacugacuag

SEQ ID NO: 2017528 - RNA, 19 nt, Artificial Sequence
  Description of Artificial Sequence: Synthetic oligonucleotide
  Sense strand starting at position 2284 of SEQ ID NO: 1881092
acagcugaacucugauauc

SEQ ID NO: 2017529 - RNA, 19 nt, Artificial Sequence
  Description of Artificial Sequence: Synthetic oligonucleotide
  Antisense strand to SEQ ID NO: 2017528
gauaucagaguucagcugu

SEQ ID NO: 2017530 - RNA, 19 nt, Artificial Sequence
  Description of Artificial Sequence: Synthetic oligonucleotide
  Sense strand starting at position 2543 of SEQ ID NO: 1881092
guaguuaucgaccacacuu

SEQ ID NO: 2017531 - RNA, 19 nt, Artificial Sequence
  Description of Artificial Sequence: Synthetic oligonucleotide
  Antisense strand to SEQ ID NO: 2017530
aaguguggucgauaacuac

SEQ ID NO: 2017532 - RNA, 19 nt, Artificial Sequence
  Description of Artificial Sequence: Synthetic oligonucleotide
  Sense strand starting at position 2563 of SEQ ID NO: 1881092
ugguauaaucuauggcuag

SEQ ID NO: 2017533 - RNA, 19 nt, Artificial Sequence
  Description of Artificial Sequence: Synthetic oligonucleotide
  Antisense strand to SEQ ID NO: 2017532
cuagccauagauuauacca

SEQ ID NO: 2017534 - RNA, 19 nt, Artificial Sequence
  Description of Artificial Sequence: Synthetic oligonucleotide
  Sense strand starting at position 2586 of SEQ ID NO: 1881092
gggaucuacuaggccuuaa

SEQ ID NO: 2017535 - RNA, 19 nt, Artificial Sequence
  Description of Artificial Sequence: Synthetic oligonucleotide
  Antisense strand to SEQ ID NO: 2017534
uuaaggccuaguagauccc

SEQ ID NO: 2017536 - RNA, 19 nt, Artificial Sequence
  Description of Artificial Sequence: Synthetic oligonucleotide
  Sense strand starting at position 2695 of SEQ ID NO: 1881092
gcaacauagccuuaaagga

SEQ ID NO: 2017537 - RNA, 19 nt, Artificial Sequence
  Description of Artificial Sequence: Synthetic oligonucleotide
  Antisense strand to SEQ ID NO: 2017536
uccuuuaaggcuauguugc

SEQ ID NO: 2017538 - RNA, 19 nt, Artificial Sequence
  Description of Artificial Sequence: Synthetic oligonucleotide
  Sense strand starting at position 2823 of SEQ ID NO: 1881092
gaagaugagugugcgauga

SEQ ID NO: 2017539 - RNA, 19 nt, Artificial Sequence
  Description of Artificial Sequence: Synthetic oligonucleotide
  Antisense strand to SEQ ID NO: 2017538
ucaucgcacacucaucuuc

SEQ ID NO: 2017540 - RNA, 19 nt, Artificial Sequence
  Description of Artificial Sequence: Synthetic oligonucleotide
  Sense strand starting at position 3482 of SEQ ID NO: 1881092
cuacaaaugcuaggaagau

SEQ ID NO: 2017541 - RNA, 19 nt, Artificial Sequence
  Description of Artificial Sequence: Synthetic oligonucleotide
  Antisense strand to SEQ ID NO: 2017540
aucuuccuagcauuuguag

SEQ ID NO: 2017542 - RNA, 19 nt, Artificial Sequence
  Description of Artificial Sequence: Synthetic oligonucleotide
  Sense strand starting at position 3604 of SEQ ID NO: 1881092
ggguaugaaugcccagauu

SEQ ID NO: 2017543 - RNA, 19 nt, Artificial Sequence
  Description of Artificial Sequence: Synthetic oligonucleotide
  Antisense strand to SEQ ID NO: 2017542
aaucugggcauucauaccc

SEQ ID NO: 2017544 - RNA, 19 nt, Artificial Sequence
  Description of Artificial Sequence: Synthetic oligonucleotide
  Sense strand starting at position 3684 of SEQ ID NO: 1881092
agaauuugauugcaugaau

SEQ ID NO: 2017545 - RNA, 19 nt, Artificial Sequence
  Description of Artificial Sequence: Synthetic oligonucleotide
  Antisense strand to SEQ ID NO: 2017544
auucaugcaaucaaauucu

SEQ ID NO: 2017546 - RNA, 19 nt, Artificial Sequence
  Description of Artificial Sequence: Synthetic oligonucleotide
  Sense strand starting at position 3708 of SEQ ID NO: 1881092
aaaggucuucuuugcaaga

SEQ ID NO: 2017547 - RNA, 19 nt, Artificial Sequence
  Description of Artificial Sequence: Synthetic oligonucleotide
  Antisense strand to SEQ ID NO: 2017546
ucuugcaaagaagaccuuu

SEQ ID NO: 2017548 - RNA, 19 nt, Artificial Sequence
  Description of Artificial Sequence: Synthetic oligonucleotide
  Sense strand starting at position 3819 of SEQ ID NO: 1881092
guacaauuccuaugggaca

SEQ ID NO: 2017549 - RNA, 19 nt, Artificial Sequence
  Description of Artificial Sequence: Synthetic oligonucleotide
  Antisense strand to SEQ ID NO: 2017548
ugucccauaggaauuguac

SEQ ID NO: 2017550 - RNA, 19 nt, Artificial Sequence
  Description of Artificial Sequence: Synthetic oligonucleotide
  Sense strand starting at position 3840 of SEQ ID NO: 1881092
gagaguuauuccucucugg

SEQ ID NO: 2017551 - RNA, 19 nt, Artificial Sequence
  Description of Artificial Sequence: Synthetic oligonucleotide
  Antisense strand to SEQ ID NO: 2017550
ccagagaggaauaacucuc

SEQ ID NO: 2017552 - RNA, 19 nt, Artificial Sequence
  Description of Artificial Sequence: Synthetic oligonucleotide
  Sense strand starting at position 3843 of SEQ ID NO: 1881092
aguuauuccucucuggaaa

SEQ ID NO: 2017553 - RNA, 19 nt, Artificial Sequence
  Description of Artificial Sequence: Synthetic oligonucleotide
  Antisense strand to SEQ ID NO: 2017552
uuuccagagaggaauaacu

SEQ ID NO: 2017554 - RNA, 19 nt, Artificial Sequence
  Description of Artificial Sequence: Synthetic oligonucleotide
  Sense strand starting at position 3844 of SEQ ID NO: 1881092
guuauuccucucuggaaag

SEQ ID NO: 2017555 - RNA, 19 nt, Artificial Sequence
  Description of Artificial Sequence: Synthetic oligonucleotide
  Antisense strand to SEQ ID NO: 2017554
cuuuccagagaggaauaac

SEQ ID NO: 2017556 - RNA, 19 nt, Artificial Sequence
  Description of Artificial Sequence: Synthetic oligonucleotide
  Sense strand starting at position 3917 of SEQ ID NO: 1881092
uuuaauaaggccugacauu

SEQ ID NO: 2017557 - RNA, 19 nt, Artificial Sequence
  Description of Artificial Sequence: Synthetic oligonucleotide
  Antisense strand to SEQ ID NO: 2017556
aaugucaggccuuauuaaa

SEQ ID NO: 2017558 - RNA, 19 nt, Artificial Sequence
  Description of Artificial Sequence: Synthetic oligonucleotide
  Sense strand starting at position 3927 of SEQ ID NO: 1881092
ccugacauuucugugccua

SEQ ID NO: 2017559 - RNA, 19 nt, Artificial Sequence
  Description of Artificial Sequence: Synthetic oligonucleotide
  Antisense strand to SEQ ID NO: 2017558
uaggcacagaaaugucagg

SEQ ID NO: 2017560 - RNA, 19 nt, Artificial Sequence
  Description of Artificial Sequence: Synthetic oligonucleotide
  Sense strand starting at position 3928 of SEQ ID NO: 1881092
cugacauuucugugccuaa

SEQ ID NO: 2017561 - RNA, 19 nt, Artificial Sequence
  Description of Artificial Sequence: Synthetic oligonucleotide
  Antisense strand to SEQ ID NO: 2017560
uuaggcacagaaaugucag

SEQ ID NO: 2017562 - RNA, 19 nt, Artificial Sequence
  Description of Artificial Sequence: Synthetic oligonucleotide
  Sense strand starting at position 3929 of SEQ ID NO: 1881092
ugacauuucugugccuaau

SEQ ID NO: 2017563 - RNA, 19 nt, Artificial Sequence
  Description of Artificial Sequence: Synthetic oligonucleotide
  Antisense strand to SEQ ID NO: 2017562
auuaggcacagaaauguca

SEQ ID NO: 2017564 - RNA, 19 nt, Artificial Sequence
  Description of Artificial Sequence: Synthetic oligonucleotide
  Sense strand starting at position 71 of SEQ ID NO: 1881094
ggucuauggucuguuccau

SEQ ID NO: 2017565 - RNA, 19 nt, Artificial Sequence
  Description of Artificial Sequence: Synthetic oligonucleotide
  Antisense strand to SEQ ID NO: 2017564
auggaacagaccauagacc

SEQ ID NO: 2017566 - RNA, 19 nt, Artificial Sequence
  Description of Artificial Sequence: Synthetic oligonucleotide
  Sense strand starting at position 270 of SEQ ID NO: 1881094
ccggaauuauuagagaaau

SEQ ID NO: 2017567 - RNA, 19 nt, Artificial Sequence
  Description of Artificial Sequence: Synthetic oligonucleotide
  Antisense strand to SEQ ID NO: 2017566
auuucucuaauaauuccgg

SEQ ID NO: 2017568 - RNA, 19 nt, Artificial Sequence
  Description of Artificial Sequence: Synthetic oligonucleotide
  Sense strand starting at position 382 of SEQ ID NO: 1881094
uccugacgacucugcuaaa

SEQ ID NO: 2017569 - RNA, 19 nt, Artificial Sequence
  Description of Artificial Sequence: Synthetic oligonucleotide
  Antisense strand to SEQ ID NO: 2017568
uuuagcagagucgucagga

SEQ ID NO: 2017570 - RNA, 19 nt, Artificial Sequence
  Description of Artificial Sequence: Synthetic oligonucleotide
  Sense strand starting at position 890 of SEQ ID NO: 1881094
agcuguaggcauuaaacua

SEQ ID NO: 2017571 - RNA, 19 nt, Artificial Sequence
  Description of Artificial Sequence: Synthetic oligonucleotide
  Antisense strand to SEQ ID NO: 2017570
uaguuuaaugccuacagcu

SEQ ID NO: 2017572 - RNA, 19 nt, Artificial Sequence
  Description of Artificial Sequence: Synthetic oligonucleotide
  Sense strand starting at position 2034 of SEQ ID NO: 1881094
ccauuauuacaggguugau

SEQ ID NO: 2017573 - RNA, 19 nt, Artificial Sequence
  Description of Artificial Sequence: Synthetic oligonucleotide
  Antisense strand to SEQ ID NO: 2017572
aucaacccuguaauaaugg

SEQ ID NO: 2017574 - RNA, 19 nt, Artificial Sequence
  Description of Artificial Sequence: Synthetic oligonucleotide
  Sense strand starting at position 2043 of SEQ ID NO: 1881094
caggguugaucucauaaag

SEQ ID NO: 2017575 - RNA, 19 nt, Artificial Sequence
  Description of Artificial Sequence: Synthetic oligonucleotide
  Antisense strand to SEQ ID NO: 2017574
cuuuaugagaucaacccug

SEQ ID NO: 2017576 - RNA, 19 nt, Artificial Sequence
  Description of Artificial Sequence: Synthetic oligonucleotide
  Sense strand starting at position 2167 of SEQ ID NO: 1881094
ucugcuuuggcugaaagaa

SEQ ID NO: 2017577 - RNA, 19 nt, Artificial Sequence
  Description of Artificial Sequence: Synthetic oligonucleotide
  Antisense strand to SEQ ID NO: 2017576
uucuuucagccaaagcaga

SEQ ID NO: 2017578 - RNA, 19 nt, Artificial Sequence
  Description of Artificial Sequence: Synthetic oligonucleotide
  Sense strand starting at position 2273 of SEQ ID NO: 1881094
gaaagaagccagcguaugu

SEQ ID NO: 2017579 - RNA, 19 nt, Artificial Sequence
  Description of Artificial Sequence: Synthetic oligonucleotide
  Antisense strand to SEQ ID NO: 2017578
acauacgcuggcuucuuuc

SEQ ID NO: 2017580 - RNA, 19 nt, Artificial Sequence
  Description of Artificial Sequence: Synthetic oligonucleotide
  Sense strand starting at position 2356 of SEQ ID NO: 1881094
acuggaaagucucuacuau

SEQ ID NO: 2017581 - RNA, 19 nt, Artificial Sequence
  Description of Artificial Sequence: Synthetic oligonucleotide
  Antisense strand to SEQ ID NO: 2017580
auaguagagacuuuccagu

SEQ ID NO: 2017582 - RNA, 19 nt, Artificial Sequence
  Description of Artificial Sequence: Synthetic oligonucleotide
  Sense strand starting at position 2395 of SEQ ID NO: 1881094
ggcccugggcucugauaau

SEQ ID NO: 2017583 - RNA, 19 nt, Artificial Sequence
  Description of Artificial Sequence: Synthetic oligonucleotide
  Antisense strand to SEQ ID NO: 2017582
auuaucagagcccagggcc

SEQ ID NO: 2017584 - RNA, 19 nt, Artificial Sequence
  Description of Artificial Sequence: Synthetic oligonucleotide
  Sense strand starting at position 2436 of SEQ ID NO: 1881094
ccagucuuaaagugagaga

SEQ ID NO: 2017585 - RNA, 19 nt, Artificial Sequence
  Description of Artificial Sequence: Synthetic oligonucleotide
  Antisense strand to SEQ ID NO: 2017584
ucucucacuuuaagacugg

SEQ ID NO: 2017586 - RNA, 19 nt, Artificial Sequence
  Description of Artificial Sequence: Synthetic oligonucleotide
  Sense strand starting at position 2447 of SEQ ID NO: 1881094
gugagagaagguugcuaau

SEQ ID NO: 2017587 - RNA, 19 nt, Artificial Sequence
  Description of Artificial Sequence: Synthetic oligonucleotide
  Antisense strand to SEQ ID NO: 2017586
auuagcaaccuucucucac

SEQ ID NO: 2017588 - RNA, 19 nt, Artificial Sequence
  Description of Artificial Sequence: Synthetic oligonucleotide
  Sense strand starting at position 2449 of SEQ ID NO: 1881094
gagagaagguugcuaaucu

SEQ ID NO: 2017589 - RNA, 19 nt, Artificial Sequence
  Description of Artificial Sequence: Synthetic oligonucleotide
  Antisense strand to SEQ ID NO: 2017588
agauuagcaaccuucucuc

SEQ ID NO: 2017590 - RNA, 19 nt, Artificial Sequence
  Description of Artificial Sequence: Synthetic oligonucleotide
  Sense strand starting at position 2456 of SEQ ID NO: 1881094
gguugcuaaucucuggaau

SEQ ID NO: 2017591 - RNA, 19 nt, Artificial Sequence
  Description of Artificial Sequence: Synthetic oligonucleotide
  Antisense strand to SEQ ID NO: 2017590
auuccagagauuagcaacc

SEQ ID NO: 2017592 - RNA, 19 nt, Artificial Sequence
  Description of Artificial Sequence: Synthetic oligonucleotide
  Sense strand starting at position 2457 of SEQ ID NO: 1881094
guugcuaaucucuggaauu

SEQ ID NO: 2017593 - RNA, 19 nt, Artificial Sequence
  Description of Artificial Sequence: Synthetic oligonucleotide
  Antisense strand to SEQ ID NO: 2017592
aauuccagagauuagcaac

SEQ ID NO: 2017594 - RNA, 19 nt, Artificial Sequence
  Description of Artificial Sequence: Synthetic oligonucleotide
  Sense strand starting at position 2459 of SEQ ID NO: 1881094
ugcuaaucucuggaauucu

SEQ ID NO: 2017595 - RNA, 19 nt, Artificial Sequence
  Description of Artificial Sequence: Synthetic oligonucleotide
  Antisense strand to SEQ ID NO: 2017594
agaauuccagagauuagca

SEQ ID NO: 2017596 - RNA, 19 nt, Artificial Sequence
  Description of Artificial Sequence: Synthetic oligonucleotide
  Sense strand starting at position 2468 of SEQ ID NO: 1881094
cuggaauucucccugcauu

SEQ ID NO: 2017597 - RNA, 19 nt, Artificial Sequence
  Description of Artificial Sequence: Synthetic oligonucleotide
  Antisense strand to SEQ ID NO: 2017596
aaugcagggagaauuccag

SEQ ID NO: 2017598 - RNA, 19 nt, Artificial Sequence
  Description of Artificial Sequence: Synthetic oligonucleotide
  Sense strand starting at position 2536 of SEQ ID NO: 1881094
ugucaaauuuacugucaga

SEQ ID NO: 2017599 - RNA, 19 nt, Artificial Sequence
  Description of Artificial Sequence: Synthetic oligonucleotide
  Antisense strand to SEQ ID NO: 2017598
ucugacaguaaauuugaca

SEQ ID NO: 2017600 - RNA, 19 nt, Artificial Sequence
  Description of Artificial Sequence: Synthetic oligonucleotide
  Sense strand starting at position 2581 of SEQ ID NO: 1881094
gccagagggccugacugau

SEQ ID NO: 2017601 - RNA, 19 nt, Artificial Sequence
  Description of Artificial Sequence: Synthetic oligonucleotide
  Antisense strand to SEQ ID NO: 2017600
aucagucaggcccucuggc

SEQ ID NO: 2017602 - RNA, 19 nt, Artificial Sequence
  Description of Artificial Sequence: Synthetic oligonucleotide
  Sense strand starting at position 2615 of SEQ ID NO: 1881094
uguuucuugcuuugaaaca

SEQ ID NO: 2017603 - RNA, 19 nt, Artificial Sequence
  Description of Artificial Sequence: Synthetic oligonucleotide
  Antisense strand to SEQ ID NO: 2017602
uguuucaaagcaagaaaca

SEQ ID NO: 2017604 - RNA, 19 nt, Artificial Sequence
  Description of Artificial Sequence: Synthetic oligonucleotide
  Sense strand starting at position 2635 of SEQ ID NO: 1881094
ccuucuccaugagaaagaa

SEQ ID NO: 2017605 - RNA, 19 nt, Artificial Sequence
  Description of Artificial Sequence: Synthetic oligonucleotide
  Antisense strand to SEQ ID NO: 2017604
uucuuucucauggagaagg

SEQ ID NO: 2017606 - RNA, 19 nt, Artificial Sequence
  Description of Artificial Sequence: Synthetic oligonucleotide
  Sense strand starting at position 2714 of SEQ ID NO: 1881094
acauacuagcuuuacguua

SEQ ID NO: 2017607 - RNA, 19 nt, Artificial Sequence
  Description of Artificial Sequence: Synthetic oligonucleotide
  Antisense strand to SEQ ID NO: 2017606
uaacguaaagcuaguaugu

SEQ ID NO: 2017608 - RNA, 19 nt, Artificial Sequence
  Description of Artificial Sequence: Synthetic oligonucleotide
  Sense strand starting at position 2809 of SEQ ID NO: 1881094
ggacacuauuuguagauac

SEQ ID NO: 2017609 - RNA, 19 nt, Artificial Sequence
  Description of Artificial Sequence: Synthetic oligonucleotide
  Antisense strand to SEQ ID NO: 2017608
guaucuacaaauagugucc

SEQ ID NO: 2017610 - RNA, 19 nt, Artificial Sequence
  Description of Artificial Sequence: Synthetic oligonucleotide
  Sense strand starting at position 2894 of SEQ ID NO: 1881094
ggaaauuucucugaucaaa

SEQ ID NO: 2017611 - RNA, 19 nt, Artificial Sequence
  Description of Artificial Sequence: Synthetic oligonucleotide
  Antisense strand to SEQ ID NO: 2017610
uuugaucagagaaauuucc

SEQ ID NO: 2017612 - RNA, 19 nt, Artificial Sequence
  Description of Artificial Sequence: Synthetic oligonucleotide
  Sense strand starting at position 2969 of SEQ ID NO: 1881094
ugagcuauuagagaaggcu

SEQ ID NO: 2017613 - RNA, 19 nt, Artificial Sequence
  Description of Artificial Sequence: Synthetic oligonucleotide
  Antisense strand to SEQ ID NO: 2017612
agccuucucuaauagcuca

SEQ ID NO: 2017614 - RNA, 19 nt, Artificial Sequence
  Description of Artificial Sequence: Synthetic oligonucleotide
  Sense strand starting at position 2972 of SEQ ID NO: 1881094
gcuauuagagaaggcucau

SEQ ID NO: 2017615 - RNA, 19 nt, Artificial Sequence
  Description of Artificial Sequence: Synthetic oligonucleotide
  Antisense strand to SEQ ID NO: 2017614
augagccuucucuaauagc

SEQ ID NO: 2017616 - RNA, 19 nt, Artificial Sequence
  Description of Artificial Sequence: Synthetic oligonucleotide
  Sense strand starting at position 3084 of SEQ ID NO: 1881094
gcucuucugguguaagaaa

SEQ ID NO: 2017617 - RNA, 19 nt, Artificial Sequence
  Description of Artificial Sequence: Synthetic oligonucleotide
  Antisense strand to SEQ ID NO: 2017616
uuucuuacaccagaagagc

SEQ ID NO: 2017618 - RNA, 19 nt, Artificial Sequence
  Description of Artificial Sequence: Synthetic oligonucleotide
  Sense strand starting at position 3116 of SEQ ID NO: 1881094
ucacuuguuccucaggaaa

SEQ ID NO: 2017619 - RNA, 19 nt, Artificial Sequence
  Description of Artificial Sequence: Synthetic oligonucleotide
  Antisense strand to SEQ ID NO: 2017618
uuuccugaggaacaaguga

SEQ ID NO: 2017620 - RNA, 19 nt, Artificial Sequence
  Description of Artificial Sequence: Synthetic oligonucleotide
  Sense strand starting at position 3168 of SEQ ID NO: 1881094
uuuaaaggucaugggcuua

SEQ ID NO: 2017621 - RNA, 19 nt, Artificial Sequence
  Description of Artificial Sequence: Synthetic oligonucleotide
  Antisense strand to SEQ ID NO: 2017620
uaagcccaugaccuuuaaa

SEQ ID NO: 2017622 - RNA, 19 nt, Artificial Sequence
  Description of Artificial Sequence: Synthetic oligonucleotide
  Sense strand starting at position 3200 of SEQ ID NO: 1881094
cagagugcucaccagaguu

SEQ ID NO: 2017623 - RNA, 19 nt, Artificial Sequence
  Description of Artificial Sequence: Synthetic oligonucleotide
  Antisense strand to SEQ ID NO: 2017622
aacucuggugagcacucug

SEQ ID NO: 2017624 - RNA, 19 nt, Artificial Sequence
  Description of Artificial Sequence: Synthetic oligonucleotide
  Sense strand starting at position 3202 of SEQ ID NO: 1881094
gagugcucaccagaguuua

SEQ ID NO: 2017625 - RNA, 19 nt, Artificial Sequence
  Description of Artificial Sequence: Synthetic oligonucleotide
  Antisense strand to SEQ ID NO: 2017624
uaaacucuggugagcacuc

SEQ ID NO: 2017626 - RNA, 19 nt, Artificial Sequence
  Description of Artificial Sequence: Synthetic oligonucleotide
  Sense strand starting at position 3227 of SEQ ID NO: 1881094
gccuaacuacugcagauua

SEQ ID NO: 2017627 - RNA, 19 nt, Artificial Sequence
  Description of Artificial Sequence: Synthetic oligonucleotide
  Antisense strand to SEQ ID NO: 2017626
uaaucugcaguaguuaggc

SEQ ID NO: 2017628 - RNA, 19 nt, Artificial Sequence
  Description of Artificial Sequence: Synthetic oligonucleotide
  Sense strand starting at position 3285 of SEQ ID NO: 1881094
aucugaaaugauuggguuu

SEQ ID NO: 2017629 - RNA, 19 nt, Artificial Sequence
  Description of Artificial Sequence: Synthetic oligonucleotide
  Antisense strand to SEQ ID NO: 2017628
aaacccaaucauuucagau

SEQ ID NO: 2017630 - RNA, 19 nt, Artificial Sequence
  Description of Artificial Sequence: Synthetic oligonucleotide
  Sense strand starting at position 3485 of SEQ ID NO: 1881094
accugcugcaggugagaau

SEQ ID NO: 2017631 - RNA, 19 nt, Artificial Sequence
  Description of Artificial Sequence: Synthetic oligonucleotide
  Antisense strand to SEQ ID NO: 2017630
auucucaccugcagcaggu

SEQ ID NO: 2017632 - RNA, 19 nt, Artificial Sequence
  Description of Artificial Sequence: Synthetic oligonucleotide
  Sense strand starting at position 3688 of SEQ ID NO: 1881094
uccuguuaaugucccacau

SEQ ID NO: 2017633 - RNA, 19 nt, Artificial Sequence
  Description of Artificial Sequence: Synthetic oligonucleotide
  Antisense strand to SEQ ID NO: 2017632
augugggacauuaacagga

SEQ ID NO: 2017634 - RNA, 19 nt, Artificial Sequence
  Description of Artificial Sequence: Synthetic oligonucleotide
  Sense strand starting at position 3755 of SEQ ID NO: 1881094
cuuugacucugacuguuaa

SEQ ID NO: 2017635 - RNA, 19 nt, Artificial Sequence
  Description of Artificial Sequence: Synthetic oligonucleotide
  Antisense strand to SEQ ID NO: 2017634
uuaacagucagagucaaag

SEQ ID NO: 2017636 - RNA, 19 nt, Artificial Sequence
  Description of Artificial Sequence: Synthetic oligonucleotide
  Sense strand starting at position 3756 of SEQ ID NO: 1881094
uuugacucugacuguuaaa

SEQ ID NO: 2017637 - RNA, 19 nt, Artificial Sequence
  Description of Artificial Sequence: Synthetic oligonucleotide
  Antisense strand to SEQ ID NO: 2017636
uuuaacagucagagucaaa

SEQ ID NO: 2017638 - RNA, 19 nt, Artificial Sequence
  Description of Artificial Sequence: Synthetic oligonucleotide
  Sense strand starting at position 3766 of SEQ ID NO: 1881094
acuguuaaaggucagggua

SEQ ID NO: 2017639 - RNA, 19 nt, Artificial Sequence
  Description of Artificial Sequence: Synthetic oligonucleotide
  Antisense strand to SEQ ID NO: 2017638
uacccugaccuuuaacagu

SEQ ID NO: 2017640 - RNA, 19 nt, Artificial Sequence
  Description of Artificial Sequence: Synthetic oligonucleotide
  Sense strand starting at position 3769 of SEQ ID NO: 1881094
guuaaaggucaggguaaca

SEQ ID NO: 2017641 - RNA, 19 nt, Artificial Sequence
  Description of Artificial Sequence: Synthetic oligonucleotide
  Antisense strand to SEQ ID NO: 2017640
uguuacccugaccuuuaac

SEQ ID NO: 2017642 - RNA, 19 nt, Artificial Sequence
  Description of Artificial Sequence: Synthetic oligonucleotide
  Sense strand starting at position 3800 of SEQ ID NO: 1881094
ugggaacaaucauagcuau

SEQ ID NO: 2017643 - RNA, 19 nt, Artificial Sequence
  Description of Artificial Sequence: Synthetic oligonucleotide
  Antisense strand to SEQ ID NO: 2017642
auagcuaugauuguuccca

SEQ ID NO: 2017644 - RNA, 19 nt, Artificial Sequence
  Description of Artificial Sequence: Synthetic oligonucleotide
  Sense strand starting at position 68 of SEQ ID NO: 1881096
ugugauagcuucuuacuac

SEQ ID NO: 2017645 - RNA, 19 nt, Artificial Sequence
  Description of Artificial Sequence: Synthetic oligonucleotide
  Antisense strand to SEQ ID NO: 2017644
guaguaagaagcuaucaca

SEQ ID NO: 2017646 - RNA, 19 nt, Artificial Sequence
  Description of Artificial Sequence: Synthetic oligonucleotide
  Sense strand starting at position 305 of SEQ ID NO: 1881096
ggcauacaccagugguaca

SEQ ID NO: 2017647 - RNA, 19 nt, Artificial Sequence
  Description of Artificial Sequence: Synthetic oligonucleotide
  Antisense strand to SEQ ID NO: 2017646
uguaccacugguguaugcc

SEQ ID NO: 2017648 - RNA, 19 nt, Artificial Sequence
  Description of Artificial Sequence: Synthetic oligonucleotide
  Sense strand starting at position 526 of SEQ ID NO: 1881096
uguggaugugccgagugaa

SEQ ID NO: 2017649 - RNA, 19 nt, Artificial Sequence
  Description of Artificial Sequence: Synthetic oligonucleotide
  Antisense strand to SEQ ID NO: 2017648
uucacucggcacauccaca

SEQ ID NO: 2017650 - RNA, 19 nt, Artificial Sequence
  Description of Artificial Sequence: Synthetic oligonucleotide
  Sense strand starting at position 527 of SEQ ID NO: 1881096
guggaugugccgagugaaa

SEQ ID NO: 2017651 - RNA, 19 nt, Artificial Sequence
  Description of Artificial Sequence: Synthetic oligonucleotide
  Antisense strand to SEQ ID NO: 2017650
uuucacucggcacauccac

SEQ ID NO: 2017652 - RNA, 19 nt, Artificial Sequence
  Description of Artificial Sequence: Synthetic oligonucleotide
  Sense strand starting at position 546 of SEQ ID NO: 1881096
agucaaaugucugccuaau

SEQ ID NO: 2017653 - RNA, 19 nt, Artificial Sequence
  Description of Artificial Sequence: Synthetic oligonucleotide
  Antisense strand to SEQ ID NO: 2017652
auuaggcagacauuugacu

SEQ ID NO: 2017654 - RNA, 19 nt, Artificial Sequence
  Description of Artificial Sequence: Synthetic oligonucleotide
  Sense strand starting at position 548 of SEQ ID NO: 1881096
ucaaaugucugccuaauag

SEQ ID NO: 2017655 - RNA, 19 nt, Artificial Sequence
  Description of Artificial Sequence: Synthetic oligonucleotide
  Antisense strand to SEQ ID NO: 2017654
cuauuaggcagacauuuga

SEQ ID NO: 2017656 - RNA, 19 nt, Artificial Sequence
  Description of Artificial Sequence: Synthetic oligonucleotide
  Sense strand starting at position 650 of SEQ ID NO: 1881096
ccuaauguccaguaggcua

SEQ ID NO: 2017657 - RNA, 19 nt, Artificial Sequence
  Description of Artificial Sequence: Synthetic oligonucleotide
  Antisense strand to SEQ ID NO: 2017656
uagccuacuggacauuagg

SEQ ID NO: 2017658 - RNA, 19 nt, Artificial Sequence
  Description of Artificial Sequence: Synthetic oligonucleotide
  Sense strand starting at position 655 of SEQ ID NO: 1881096
uguccaguaggcuauugaa

SEQ ID NO: 2017659 - RNA, 19 nt, Artificial Sequence
  Description of Artificial Sequence: Synthetic oligonucleotide
  Antisense strand to SEQ ID NO: 2017658
uucaauagccuacuggaca

SEQ ID NO: 2017660 - RNA, 19 nt, Artificial Sequence
  Description of Artificial Sequence: Synthetic oligonucleotide
  Sense strand starting at position 665 of SEQ ID NO: 1881096
gcuauugaacacuagcuau

SEQ ID NO: 2017661 - RNA, 19 nt, Artificial Sequence
  Description of Artificial Sequence: Synthetic oligonucleotide
  Antisense strand to SEQ ID NO: 2017660
auagcuaguguucaauagc

SEQ ID NO: 2017662 - RNA, 19 nt, Artificial Sequence
  Description of Artificial Sequence: Synthetic oligonucleotide
  Sense strand starting at position 1304 of SEQ ID NO: 1881096
ugugaugaagccuauggau

SEQ ID NO: 2017663 - RNA, 19 nt, Artificial Sequence
  Description of Artificial Sequence: Synthetic oligonucleotide
  Antisense strand to SEQ ID NO: 2017662
auccauaggcuucaucaca

SEQ ID NO: 2017664 - RNA, 19 nt, Artificial Sequence
  Description of Artificial Sequence: Synthetic oligonucleotide
  Sense strand starting at position 1448 of SEQ ID NO: 1881096
gguuaagaaucucugcaug

SEQ ID NO: 2017665 - RNA, 19 nt, Artificial Sequence
  Description of Artificial Sequence: Synthetic oligonucleotide
  Antisense strand to SEQ ID NO: 2017664
caugcagagauucuuaacc

SEQ ID NO: 2017666 - RNA, 19 nt, Artificial Sequence
  Description of Artificial Sequence: Synthetic oligonucleotide
  Sense strand starting at position 1451 of SEQ ID NO: 1881096
uaagaaucucugcaugggu

SEQ ID NO: 2017667 - RNA, 19 nt, Artificial Sequence
  Description of Artificial Sequence: Synthetic oligonucleotide
  Antisense strand to SEQ ID NO: 2017666
acccaugcagagauucuua

SEQ ID NO: 2017668 - RNA, 19 nt, Artificial Sequence
  Description of Artificial Sequence: Synthetic oligonucleotide
  Sense strand starting at position 1453 of SEQ ID NO: 1881096
agaaucucugcauggguaa

SEQ ID NO: 2017669 - RNA, 19 nt, Artificial Sequence
  Description of Artificial Sequence: Synthetic oligonucleotide
  Antisense strand to SEQ ID NO: 2017668
uuacccaugcagagauucu

SEQ ID NO: 2017670 - RNA, 19 nt, Artificial Sequence
  Description of Artificial Sequence: Synthetic oligonucleotide
  Sense strand starting at position 1454 of SEQ ID NO: 1881096
gaaucucugcauggguaaa

SEQ ID NO: 2017671 - RNA, 19 nt, Artificial Sequence
  Description of Artificial Sequence: Synthetic oligonucleotide
  Antisense strand to SEQ ID NO: 2017670
uuuacccaugcagagauuc

SEQ ID NO: 2017672 - RNA, 19 nt, Artificial Sequence
  Description of Artificial Sequence: Synthetic oligonucleotide
  Sense strand starting at position 1456 of SEQ ID NO: 1881096
aucucugcauggguaaauu

SEQ ID NO: 2017673 - RNA, 19 nt, Artificial Sequence
  Description of Artificial Sequence: Synthetic oligonucleotide
  Antisense strand to SEQ ID NO: 2017672
aauuuacccaugcagagau

SEQ ID NO: 2017674 - RNA, 19 nt, Artificial Sequence
  Description of Artificial Sequence: Synthetic oligonucleotide
  Sense strand starting at position 1659 of SEQ ID NO: 1881096
augcauguguacucacuua

SEQ ID NO: 2017675 - RNA, 19 nt, Artificial Sequence
  Description of Artificial Sequence: Synthetic oligonucleotide
  Antisense strand to SEQ ID NO: 2017674
uaagugaguacacaugcau

SEQ ID NO: 2017676 - RNA, 19 nt, Artificial Sequence
  Description of Artificial Sequence: Synthetic oligonucleotide
  Sense strand starting at position 1687 of SEQ ID NO: 1881096
acauauauguugccacaua

SEQ ID NO: 2017677 - RNA, 19 nt, Artificial Sequence
  Description of Artificial Sequence: Synthetic oligonucleotide
  Antisense strand to SEQ ID NO: 2017676
uauguggcaacauauaugu

SEQ ID NO: 2017678 - RNA, 19 nt, Artificial Sequence
  Description of Artificial Sequence: Synthetic oligonucleotide
  Sense strand starting at position 1746 of SEQ ID NO: 1881096
ugcagaucuuaggucacau

SEQ ID NO: 2017679 - RNA, 19 nt, Artificial Sequence
  Description of Artificial Sequence: Synthetic oligonucleotide
  Antisense strand to SEQ ID NO: 2017678
augugaccuaagaucugca

SEQ ID NO: 2017680 - RNA, 19 nt, Artificial Sequence
  Description of Artificial Sequence: Synthetic oligonucleotide
  Sense strand starting at position 1887 of SEQ ID NO: 1881096
ucauuaucucugcagggca

SEQ ID NO: 2017681 - RNA, 19 nt, Artificial Sequence
  Description of Artificial Sequence: Synthetic oligonucleotide
  Antisense strand to SEQ ID NO: 2017680
ugcccugcagagauaauga

SEQ ID NO: 2017682 - RNA, 19 nt, Artificial Sequence
  Description of Artificial Sequence: Synthetic oligonucleotide
  Sense strand starting at position 2004 of SEQ ID NO: 1881096
cccagagcucuugacguuu

SEQ ID NO: 2017683 - RNA, 19 nt, Artificial Sequence
  Description of Artificial Sequence: Synthetic oligonucleotide
  Antisense strand to SEQ ID NO: 2017682
aaacgucaagagcucuggg

SEQ ID NO: 2017684 - RNA, 19 nt, Artificial Sequence
  Description of Artificial Sequence: Synthetic oligonucleotide
  Sense strand starting at position 2231 of SEQ ID NO: 1881096
cuucuccaaugguuugaua

SEQ ID NO: 2017685 - RNA, 19 nt, Artificial Sequence
  Description of Artificial Sequence: Synthetic oligonucleotide
  Antisense strand to SEQ ID NO: 2017684
uaucaaaccauuggagaag

SEQ ID NO: 2017686 - RNA, 19 nt, Artificial Sequence
  Description of Artificial Sequence: Synthetic oligonucleotide
  Sense strand starting at position 2233 of SEQ ID NO: 1881096
ucuccaaugguuugauauu

SEQ ID NO: 2017687 - RNA, 19 nt, Artificial Sequence
  Description of Artificial Sequence: Synthetic oligonucleotide
  Antisense strand to SEQ ID NO: 2017686
aauaucaaaccauuggaga

SEQ ID NO: 2017688 - RNA, 19 nt, Artificial Sequence
  Description of Artificial Sequence: Synthetic oligonucleotide
  Sense strand starting at position 2240 of SEQ ID NO: 1881096
ugguuugauauugacguuu

SEQ ID NO: 2017689 - RNA, 19 nt, Artificial Sequence
  Description of Artificial Sequence: Synthetic oligonucleotide
  Antisense strand to SEQ ID NO: 2017688
aaacgucaauaucaaacca

SEQ ID NO: 2017690 - RNA, 19 nt, Artificial Sequence
  Description of Artificial Sequence: Synthetic oligonucleotide
  Sense strand starting at position 2295 of SEQ ID NO: 1881096
uucuccaucgcauguagaa

SEQ ID NO: 2017691 - RNA, 19 nt, Artificial Sequence
  Description of Artificial Sequence: Synthetic oligonucleotide
  Antisense strand to SEQ ID NO: 2017690
uucuacaugcgauggagaa

SEQ ID NO: 2017692 - RNA, 19 nt, Artificial Sequence
  Description of Artificial Sequence: Synthetic oligonucleotide
  Sense strand starting at position 2312 of SEQ ID NO: 1881096
aaagaugaugguugucuga

SEQ ID NO: 2017693 - RNA, 19 nt, Artificial Sequence
  Description of Artificial Sequence: Synthetic oligonucleotide
  Antisense strand to SEQ ID NO: 2017692
ucagacaaccaucaucuuu

SEQ ID NO: 2017694 - RNA, 19 nt, Artificial Sequence
  Description of Artificial Sequence: Synthetic oligonucleotide
  Sense strand starting at position 2314 of SEQ ID NO: 1881096
agaugaugguugucugaac

SEQ ID NO: 2017695 - RNA, 19 nt, Artificial Sequence
  Description of Artificial Sequence: Synthetic oligonucleotide
  Antisense strand to SEQ ID NO: 2017694
guucagacaaccaucaucu

SEQ ID NO: 2017696 - RNA, 19 nt, Artificial Sequence
  Description of Artificial Sequence: Synthetic oligonucleotide
  Sense strand starting at position 2315 of SEQ ID NO: 1881096
gaugaugguugucugaacu

SEQ ID NO: 2017697 - RNA, 19 nt, Artificial Sequence
  Description of Artificial Sequence: Synthetic oligonucleotide
  Antisense strand to SEQ ID NO: 2017696
aguucagacaaccaucauc

SEQ ID NO: 2017698 - RNA, 19 nt, Artificial Sequence
  Description of Artificial Sequence: Synthetic oligonucleotide
  Sense strand starting at position 2331 of SEQ ID NO: 1881096
acugguuccagguaaugga

SEQ ID NO: 2017699 - RNA, 19 nt, Artificial Sequence
  Description of Artificial Sequence: Synthetic oligonucleotide
  Antisense strand to SEQ ID NO: 2017698
uccauuaccuggaaccagu

SEQ ID NO: 2017700 - RNA, 19 nt, Artificial Sequence
  Description of Artificial Sequence: Synthetic oligonucleotide
  Sense strand starting at position 2379 of SEQ ID NO: 1881096
auguuauggauugaagugu

SEQ ID NO: 2017701 - RNA, 19 nt, Artificial Sequence
  Description of Artificial Sequence: Synthetic oligonucleotide
  Antisense strand to SEQ ID NO: 2017700
acacuucaauccauaacau

SEQ ID NO: 2017702 - RNA, 19 nt, Artificial Sequence
  Description of Artificial Sequence: Synthetic oligonucleotide
  Sense strand starting at position 2461 of SEQ ID NO: 1881096
uggagauaguguguuuacu

SEQ ID NO: 2017703 - RNA, 19 nt, Artificial Sequence
  Description of Artificial Sequence: Synthetic oligonucleotide
  Antisense strand to SEQ ID NO: 2017702
aguaaacacacuaucucca

SEQ ID NO: 2017704 - RNA, 19 nt, Artificial Sequence
  Description of Artificial Sequence: Synthetic oligonucleotide
  Sense strand starting at position 2463 of SEQ ID NO: 1881096
gagauaguguguuuacuga

SEQ ID NO: 2017705 - RNA, 19 nt, Artificial Sequence
  Description of Artificial Sequence: Synthetic oligonucleotide
  Antisense strand to SEQ ID NO: 2017704
ucaguaaacacacuaucuc

SEQ ID NO: 2017706 - RNA, 19 nt, Artificial Sequence
  Description of Artificial Sequence: Synthetic oligonucleotide
  Sense strand starting at position 2587 of SEQ ID NO: 1881096
uggagaagauggcuguauu

SEQ ID NO: 2017707 - RNA, 19 nt, Artificial Sequence
  Description of Artificial Sequence: Synthetic oligonucleotide
  Antisense strand to SEQ ID NO: 2017706
aauacagccaucuucucca

SEQ ID NO: 2017708 - RNA, 19 nt, Artificial Sequence
  Description of Artificial Sequence: Synthetic oligonucleotide
  Sense strand starting at position 2800 of SEQ ID NO: 1881096
cuuaucagaucuccugaga

SEQ ID NO: 2017709 - RNA, 19 nt, Artificial Sequence
  Description of Artificial Sequence: Synthetic oligonucleotide
  Antisense strand to SEQ ID NO: 2017708
ucucaggagaucugauaag

SEQ ID NO: 2017710 - RNA, 19 nt, Artificial Sequence
  Description of Artificial Sequence: Synthetic oligonucleotide
  Sense strand starting at position 3109 of SEQ ID NO: 1881096
ugcccuugagguugaaaca

SEQ ID NO: 2017711 - RNA, 19 nt, Artificial Sequence
  Description of Artificial Sequence: Synthetic oligonucleotide
  Antisense strand to SEQ ID NO: 2017710
uguuucaaccucaagggca

SEQ ID NO: 2017712 - RNA, 19 nt, Artificial Sequence
  Description of Artificial Sequence: Synthetic oligonucleotide
  Sense strand starting at position 3249 of SEQ ID NO: 1881096
guguucagucuucuguguu

SEQ ID NO: 2017713 - RNA, 19 nt, Artificial Sequence
  Description of Artificial Sequence: Synthetic oligonucleotide
  Antisense strand to SEQ ID NO: 2017712
aacacagaagacugaacac

SEQ ID NO: 2017714 - RNA, 19 nt, Artificial Sequence
  Description of Artificial Sequence: Synthetic oligonucleotide
  Sense strand starting at position 3280 of SEQ ID NO: 1881096
ugcauacucccauggacaa

SEQ ID NO: 2017715 - RNA, 19 nt, Artificial Sequence
  Description of Artificial Sequence: Synthetic oligonucleotide
  Antisense strand to SEQ ID NO: 2017714
uuguccaugggaguaugca

SEQ ID NO: 2017716 - RNA, 19 nt, Artificial Sequence
  Description of Artificial Sequence: Synthetic oligonucleotide
  Sense strand starting at position 3281 of SEQ ID NO: 1881096
gcauacucccauggacaaa

SEQ ID NO: 2017717 - RNA, 19 nt, Artificial Sequence
  Description of Artificial Sequence: Synthetic oligonucleotide
  Antisense strand to SEQ ID NO: 2017716
uuuguccaugggaguaugc

SEQ ID NO: 2017718 - RNA, 19 nt, Artificial Sequence
  Description of Artificial Sequence: Synthetic oligonucleotide
  Sense strand starting at position 3358 of SEQ ID NO: 1881096
gucugaaugcucuagaauu

SEQ ID NO: 2017719 - RNA, 19 nt, Artificial Sequence
  Description of Artificial Sequence: Synthetic oligonucleotide
  Antisense strand to SEQ ID NO: 2017718
aauucuagagcauucagac

SEQ ID NO: 2017720 - RNA, 19 nt, Artificial Sequence
  Description of Artificial Sequence: Synthetic oligonucleotide
  Sense strand starting at position 3511 of SEQ ID NO: 1881096
uuuaucaugcucuacaguu

SEQ ID NO: 2017721 - RNA, 19 nt, Artificial Sequence
  Description of Artificial Sequence: Synthetic oligonucleotide
  Antisense strand to SEQ ID NO: 2017720
aacuguagagcaugauaaa

SEQ ID NO: 2017722 - RNA, 19 nt, Artificial Sequence
  Description of Artificial Sequence: Synthetic oligonucleotide
  Sense strand starting at position 3621 of SEQ ID NO: 1881096
gucggaacuuguccaagau

SEQ ID NO: 2017723 - RNA, 19 nt, Artificial Sequence
  Description of Artificial Sequence: Synthetic oligonucleotide
  Antisense strand to SEQ ID NO: 2017722
aucuuggacaaguuccgac

SEQ ID NO: 2017724 - RNA, 19 nt, Artificial Sequence
  Description of Artificial Sequence: Synthetic oligonucleotide
  Sense strand starting at position 547 of SEQ ID NO: 1881095
ugugaugaagccuauggau

SEQ ID NO: 2017725 - RNA, 19 nt, Artificial Sequence
  Description of Artificial Sequence: Synthetic oligonucleotide
  Antisense strand to SEQ ID NO: 2017724
auccauaggcuucaucaca

SEQ ID NO: 2017726 - RNA, 19 nt, Artificial Sequence
  Description of Artificial Sequence: Synthetic oligonucleotide
  Sense strand starting at position 691 of SEQ ID NO: 1881095
gguuaagaaucucugcaug

SEQ ID NO: 2017727 - RNA, 19 nt, Artificial Sequence
  Description of Artificial Sequence: Synthetic oligonucleotide
  Antisense strand to SEQ ID NO: 2017726
caugcagagauucuuaacc

SEQ ID NO: 2017728 - RNA, 19 nt, Artificial Sequence
  Description of Artificial Sequence: Synthetic oligonucleotide
  Sense strand starting at position 694 of SEQ ID NO: 1881095
uaagaaucucugcaugggu

SEQ ID NO: 2017729 - RNA, 19 nt, Artificial Sequence
  Description of Artificial Sequence: Synthetic oligonucleotide
  Antisense strand to SEQ ID NO: 2017728
acccaugcagagauucuua

SEQ ID NO: 2017730 - RNA, 19 nt, Artificial Sequence
  Description of Artificial Sequence: Synthetic oligonucleotide
  Sense strand starting at position 696 of SEQ ID NO: 1881095
agaaucucugcauggguaa

SEQ ID NO: 2017731 - RNA, 19 nt, Artificial Sequence
  Description of Artificial Sequence: Synthetic oligonucleotide
  Antisense strand to SEQ ID NO: 2017730
uuacccaugcagagauucu

SEQ ID NO: 2017732 - RNA, 19 nt, Artificial Sequence
  Description of Artificial Sequence: Synthetic oligonucleotide
  Sense strand starting at position 697 of SEQ ID NO: 1881095
gaaucucugcauggguaaa

SEQ ID NO: 2017733 - RNA, 19 nt, Artificial Sequence
  Description of Artificial Sequence: Synthetic oligonucleotide
  Antisense strand to SEQ ID NO: 2017732
uuuacccaugcagagauuc

SEQ ID NO: 2017734 - RNA, 19 nt, Artificial Sequence
  Description of Artificial Sequence: Synthetic oligonucleotide
  Sense strand starting at position 699 of SEQ ID NO: 1881095
aucucugcauggguaaauu

SEQ ID NO: 2017735 - RNA, 19 nt, Artificial Sequence
  Description of Artificial Sequence: Synthetic oligonucleotide
  Antisense strand to SEQ ID NO: 2017734
aauuuacccaugcagagau

SEQ ID NO: 2017736 - RNA, 19 nt, Artificial Sequence
  Description of Artificial Sequence: Synthetic oligonucleotide
  Sense strand starting at position 930 of SEQ ID NO: 1881095
acauauauguugccacaua

SEQ ID NO: 2017737 - RNA, 19 nt, Artificial Sequence
  Description of Artificial Sequence: Synthetic oligonucleotide
  Antisense strand to SEQ ID NO: 2017736
uauguggcaacauauaugu

SEQ ID NO: 2017738 - RNA, 19 nt, Artificial Sequence
  Description of Artificial Sequence: Synthetic oligonucleotide
  Sense strand starting at position 989 of SEQ ID NO: 1881095
ugcagaucuuaggucacau

SEQ ID NO: 2017739 - RNA, 19 nt, Artificial Sequence
  Description of Artificial Sequence: Synthetic oligonucleotide
  Antisense strand to SEQ ID NO: 2017738
augugaccuaagaucugca

SEQ ID NO: 2017740 - RNA, 19 nt, Artificial Sequence
  Description of Artificial Sequence: Synthetic oligonucleotide
  Sense strand starting at position 1130 of SEQ ID NO: 1881095
ucauuaucucugcagggca

SEQ ID NO: 2017741 - RNA, 19 nt, Artificial Sequence
  Description of Artificial Sequence: Synthetic oligonucleotide
  Antisense strand to SEQ ID NO: 2017740
ugcccugcagagauaauga

SEQ ID NO: 2017742 - RNA, 19 nt, Artificial Sequence
  Description of Artificial Sequence: Synthetic oligonucleotide
  Sense strand starting at position 1247 of SEQ ID NO: 1881095
cccagagcucuugacguuu

SEQ ID NO: 2017743 - RNA, 19 nt, Artificial Sequence
  Description of Artificial Sequence: Synthetic oligonucleotide
  Antisense strand to SEQ ID NO: 2017742
aaacgucaagagcucuggg

SEQ ID NO: 2017744 - RNA, 19 nt, Artificial Sequence
  Description of Artificial Sequence: Synthetic oligonucleotide
  Sense strand starting at position 1474 of SEQ ID NO: 1881095
cuucuccaaugguuugaua

SEQ ID NO: 2017745 - RNA, 19 nt, Artificial Sequence
  Description of Artificial Sequence: Synthetic oligonucleotide
  Antisense strand to SEQ ID NO: 2017744
uaucaaaccauuggagaag

SEQ ID NO: 2017746 - RNA, 19 nt, Artificial Sequence
  Description of Artificial Sequence: Synthetic oligonucleotide
  Sense strand starting at position 1476 of SEQ ID NO: 1881095
ucuccaaugguuugauauu

SEQ ID NO: 2017747 - RNA, 19 nt, Artificial Sequence
  Description of Artificial Sequence: Synthetic oligonucleotide
  Antisense strand to SEQ ID NO: 2017746
aauaucaaaccauuggaga

SEQ ID NO: 2017748 - RNA, 19 nt, Artificial Sequence
  Description of Artificial Sequence: Synthetic oligonucleotide
  Sense strand starting at position 1483 of SEQ ID NO: 1881095
ugguuugauauugacguuu

SEQ ID NO: 2017749 - RNA, 19 nt, Artificial Sequence
  Description of Artificial Sequence: Synthetic oligonucleotide
  Antisense strand to SEQ ID NO: 2017748
aaacgucaauaucaaacca

SEQ ID NO: 2017750 - RNA, 19 nt, Artificial Sequence
  Description of Artificial Sequence: Synthetic oligonucleotide
  Sense strand starting at position 1555 of SEQ ID NO: 1881095
aaagaugaugguugucuga

SEQ ID NO: 2017751 - RNA, 19 nt, Artificial Sequence
  Description of Artificial Sequence: Synthetic oligonucleotide
  Antisense strand to SEQ ID NO: 2017750
ucagacaaccaucaucuuu

SEQ ID NO: 2017752 - RNA, 19 nt, Artificial Sequence
  Description of Artificial Sequence: Synthetic oligonucleotide
  Sense strand starting at position 1557 of SEQ ID NO: 1881095
agaugaugguugucugaac

SEQ ID NO: 2017753 - RNA, 19 nt, Artificial Sequence
  Description of Artificial Sequence: Synthetic oligonucleotide
  Antisense strand to SEQ ID NO: 2017752
guucagacaaccaucaucu

SEQ ID NO: 2017754 - RNA, 19 nt, Artificial Sequence
  Description of Artificial Sequence: Synthetic oligonucleotide
  Sense strand starting at position 1558 of SEQ ID NO: 1881095
gaugaugguugucugaacu

SEQ ID NO: 2017755 - RNA, 19 nt, Artificial Sequence
  Description of Artificial Sequence: Synthetic oligonucleotide
  Antisense strand to SEQ ID NO: 2017754
aguucagacaaccaucauc

SEQ ID NO: 2017756 - RNA, 19 nt, Artificial Sequence
  Description of Artificial Sequence: Synthetic oligonucleotide
  Sense strand starting at position 1574 of SEQ ID NO: 1881095
acugguuccagguaaugga

SEQ ID NO: 2017757 - RNA, 19 nt, Artificial Sequence
  Description of Artificial Sequence: Synthetic oligonucleotide
  Antisense strand to SEQ ID NO: 2017756
uccauuaccuggaaccagu

SEQ ID NO: 2017758 - RNA, 19 nt, Artificial Sequence
  Description of Artificial Sequence: Synthetic oligonucleotide
  Sense strand starting at position 1622 of SEQ ID NO: 1881095
auguuauggauugaagugu

SEQ ID NO: 2017759 - RNA, 19 nt, Artificial Sequence
  Description of Artificial Sequence: Synthetic oligonucleotide
  Antisense strand to SEQ ID NO: 2017758
acacuucaauccauaacau

SEQ ID NO: 2017760 - RNA, 19 nt, Artificial Sequence
  Description of Artificial Sequence: Synthetic oligonucleotide
  Sense strand starting at position 1704 of SEQ ID NO: 1881095
uggagauaguguguuuacu

SEQ ID NO: 2017761 - RNA, 19 nt, Artificial Sequence
  Description of Artificial Sequence: Synthetic oligonucleotide
  Antisense strand to SEQ ID NO: 2017760
aguaaacacacuaucucca

SEQ ID NO: 2017762 - RNA, 19 nt, Artificial Sequence
  Description of Artificial Sequence: Synthetic oligonucleotide
  Sense strand starting at position 1706 of SEQ ID NO: 1881095
gagauaguguguuuacuga

SEQ ID NO: 2017763 - RNA, 19 nt, Artificial Sequence
  Description of Artificial Sequence: Synthetic oligonucleotide
  Antisense strand to SEQ ID NO: 2017762
ucaguaaacacacuaucuc

SEQ ID NO: 2017764 - RNA, 19 nt, Artificial Sequence
  Description of Artificial Sequence: Synthetic oligonucleotide
  Sense strand starting at position 1830 of SEQ ID NO: 1881095
uggagaagauggcuguauu

SEQ ID NO: 2017765 - RNA, 19 nt, Artificial Sequence
  Description of Artificial Sequence: Synthetic oligonucleotide
  Antisense strand to SEQ ID NO: 2017764
aauacagccaucuucucca

SEQ ID NO: 2017766 - RNA, 19 nt, Artificial Sequence
  Description of Artificial Sequence: Synthetic oligonucleotide
  Sense strand starting at position 2043 of SEQ ID NO: 1881095
cuuaucagaucuccugaga

SEQ ID NO: 2017767 - RNA, 19 nt, Artificial Sequence
  Description of Artificial Sequence: Synthetic oligonucleotide
  Antisense strand to SEQ ID NO: 2017766
ucucaggagaucugauaag

SEQ ID NO: 2017768 - RNA, 19 nt, Artificial Sequence
  Description of Artificial Sequence: Synthetic oligonucleotide
  Sense strand starting at position 2352 of SEQ ID NO: 1881095
ugcccuugagguugaaaca

SEQ ID NO: 2017769 - RNA, 19 nt, Artificial Sequence
  Description of Artificial Sequence: Synthetic oligonucleotide
  Antisense strand to SEQ ID NO: 2017768
uguuucaaccucaagggca

SEQ ID NO: 2017770 - RNA, 19 nt, Artificial Sequence
  Description of Artificial Sequence: Synthetic oligonucleotide
  Sense strand starting at position 2492 of SEQ ID NO: 1881095
guguucagucuucuguguu

SEQ ID NO: 2017771 - RNA, 19 nt, Artificial Sequence
  Description of Artificial Sequence: Synthetic oligonucleotide
  Antisense strand to SEQ ID NO: 2017770
aacacagaagacugaacac

SEQ ID NO: 2017772 - RNA, 19 nt, Artificial Sequence
  Description of Artificial Sequence: Synthetic oligonucleotide
  Sense strand starting at position 2523 of SEQ ID NO: 1881095
ugcauacucccauggacaa

SEQ ID NO: 2017773 - RNA, 19 nt, Artificial Sequence
  Description of Artificial Sequence: Synthetic oligonucleotide
  Antisense strand to SEQ ID NO: 2017772
uuguccaugggaguaugca

SEQ ID NO: 2017774 - RNA, 19 nt, Artificial Sequence
  Description of Artificial Sequence: Synthetic oligonucleotide
  Sense strand starting at position 2524 of SEQ ID NO: 1881095
gcauacucccauggacaaa

SEQ ID NO: 2017775 - RNA, 19 nt, Artificial Sequence
  Description of Artificial Sequence: Synthetic oligonucleotide
  Antisense strand to SEQ ID NO: 2017774
uuuguccaugggaguaugc

SEQ ID NO: 2017776 - RNA, 19 nt, Artificial Sequence
  Description of Artificial Sequence: Synthetic oligonucleotide
  Sense strand starting at position 2601 of SEQ ID NO: 1881095
gucugaaugcucuagaauu

SEQ ID NO: 2017777 - RNA, 19 nt, Artificial Sequence
  Description of Artificial Sequence: Synthetic oligonucleotide
  Antisense strand to SEQ ID NO: 2017776
aauucuagagcauucagac

SEQ ID NO: 2017778 - RNA, 19 nt, Artificial Sequence
  Description of Artificial Sequence: Synthetic oligonucleotide
  Sense strand starting at position 2754 of SEQ ID NO: 1881095
uuuaucaugcucuacaguu

SEQ ID NO: 2017779 - RNA, 19 nt, Artificial Sequence
  Description of Artificial Sequence: Synthetic oligonucleotide
  Antisense strand to SEQ ID NO: 2017778
aacuguagagcaugauaaa

SEQ ID NO: 2017780 - RNA, 19 nt, Artificial Sequence
  Description of Artificial Sequence: Synthetic oligonucleotide
  Sense strand starting at position 2864 of SEQ ID NO: 1881095
gucggaacuuguccaagau

SEQ ID NO: 2017781 - RNA, 19 nt, Artificial Sequence
  Description of Artificial Sequence: Synthetic oligonucleotide
  Antisense strand to SEQ ID NO: 2017780
aucuuggacaaguuccgac

SEQ ID NO: 2017782 - RNA, 19 nt, Artificial Sequence
  Description of Artificial Sequence: Synthetic oligonucleotide
  Sense strand starting at position 3246 of SEQ ID NO: 1881095
auguguuugaaauaguucu

SEQ ID NO: 2017783 - RNA, 19 nt, Artificial Sequence
  Description of Artificial Sequence: Synthetic oligonucleotide
  Antisense strand to SEQ ID NO: 2017782
agaacuauuucaaacacau

SEQ ID NO: 2017784 - RNA, 19 nt, Artificial Sequence
  Description of Artificial Sequence: Synthetic oligonucleotide
  Sense strand starting at position 3253 of SEQ ID NO: 1881095
ugaaauaguucuuuguuuc

SEQ ID NO: 2017785 - RNA, 19 nt, Artificial Sequence
  Description of Artificial Sequence: Synthetic oligonucleotide
  Antisense strand to SEQ ID NO: 2017784
gaaacaaagaacuauuuca

SEQ ID NO: 2017786 - RNA, 19 nt, Artificial Sequence
  Description of Artificial Sequence: Synthetic oligonucleotide
  Sense strand starting at position 3267 of SEQ ID NO: 1881095
guuucuguagauuaaucac

SEQ ID NO: 2017787 - RNA, 19 nt, Artificial Sequence
  Description of Artificial Sequence: Synthetic oligonucleotide
  Antisense strand to SEQ ID NO: 2017786
gugauuaaucuacagaaac

SEQ ID NO: 2017788 - RNA, 19 nt, Artificial Sequence
  Description of Artificial Sequence: Synthetic oligonucleotide
  Sense strand starting at position 3443 of SEQ ID NO: 1881095
uuugcuauuguauauguca

SEQ ID NO: 2017789 - RNA, 19 nt, Artificial Sequence
  Description of Artificial Sequence: Synthetic oligonucleotide
  Antisense strand to SEQ ID NO: 2017788
ugacauauacaauagcaaa

SEQ ID NO: 2017790 - RNA, 19 nt, Artificial Sequence
  Description of Artificial Sequence: Synthetic oligonucleotide
  Sense strand starting at position 3650 of SEQ ID NO: 1881095
auccgagaugccuagaaug

SEQ ID NO: 2017791 - RNA, 19 nt, Artificial Sequence
  Description of Artificial Sequence: Synthetic oligonucleotide
  Antisense strand to SEQ ID NO: 2017790
cauucuaggcaucucggau

SEQ ID NO: 2017792 - RNA, 19 nt, Artificial Sequence
  Description of Artificial Sequence: Synthetic oligonucleotide
  Sense strand starting at position 3760 of SEQ ID NO: 1881095
augccagauccggaacuaa

SEQ ID NO: 2017793 - RNA, 19 nt, Artificial Sequence
  Description of Artificial Sequence: Synthetic oligonucleotide
  Antisense strand to SEQ ID NO: 2017792
uuaguuccggaucuggcau

SEQ ID NO: 2017794 - RNA, 19 nt, Artificial Sequence
  Description of Artificial Sequence: Synthetic oligonucleotide
  Sense strand starting at position 3934 of SEQ ID NO: 1881095
ggcucaauaauaggaguuu

SEQ ID NO: 2017795 - RNA, 19 nt, Artificial Sequence
  Description of Artificial Sequence: Synthetic oligonucleotide
  Antisense strand to SEQ ID NO: 2017794
aaacuccuauuauugagcc

SEQ ID NO: 2017796 - RNA, 19 nt, Artificial Sequence
  Description of Artificial Sequence: Synthetic oligonucleotide
  Sense strand starting at position 3964 of SEQ ID NO: 1881095
ugcauaaucugguugauua

SEQ ID NO: 2017797 - RNA, 19 nt, Artificial Sequence
  Description of Artificial Sequence: Synthetic oligonucleotide
  Antisense strand to SEQ ID NO: 2017796
uaaucaaccagauuaugca

SEQ ID NO: 2017798 - RNA, 19 nt, Artificial Sequence
  Description of Artificial Sequence: Synthetic oligonucleotide
  Sense strand starting at position 3965 of SEQ ID NO: 1881095
gcauaaucugguugauuag

SEQ ID NO: 2017799 - RNA, 19 nt, Artificial Sequence
  Description of Artificial Sequence: Synthetic oligonucleotide
  Antisense strand to SEQ ID NO: 2017798
cuaaucaaccagauuaugc

SEQ ID NO: 2017800 - RNA, 19 nt, Artificial Sequence
  Description of Artificial Sequence: Synthetic oligonucleotide
  Sense strand starting at position 3966 of SEQ ID NO: 1881095
cauaaucugguugauuagu

SEQ ID NO: 2017801 - RNA, 19 nt, Artificial Sequence
  Description of Artificial Sequence: Synthetic oligonucleotide
  Antisense strand to SEQ ID NO: 2017800
acuaaucaaccagauuaug

SEQ ID NO: 2017802 - RNA, 19 nt, Artificial Sequence
  Description of Artificial Sequence: Synthetic oligonucleotide
  Sense strand starting at position 3968 of SEQ ID NO: 1881095
uaaucugguugauuaguuu

SEQ ID NO: 2017803 - RNA, 19 nt, Artificial Sequence
  Description of Artificial Sequence: Synthetic oligonucleotide
  Antisense strand to SEQ ID NO: 2017802
aaacuaaucaaccagauua

SEQ ID NO: 2017804 - RNA, 19 nt, Artificial Sequence
  Description of Artificial Sequence: Synthetic oligonucleotide
  Sense strand starting at position 129 of SEQ ID NO: 1881097
auggaaccaccaugguaua

SEQ ID NO: 2017805 - RNA, 19 nt, Artificial Sequence
  Description of Artificial Sequence: Synthetic oligonucleotide
  Antisense strand to SEQ ID NO: 2017804
uauaccauggugguuccau

SEQ ID NO: 2017806 - RNA, 19 nt, Artificial Sequence
  Description of Artificial Sequence: Synthetic oligonucleotide
  Sense strand starting at position 140 of SEQ ID NO: 1881097
augguauaugcagaccauu

SEQ ID NO: 2017807 - RNA, 19 nt, Artificial Sequence
  Description of Artificial Sequence: Synthetic oligonucleotide
  Antisense strand to SEQ ID NO: 2017806
aauggucugcauauaccau

SEQ ID NO: 2017808 - RNA, 19 nt, Artificial Sequence
  Description of Artificial Sequence: Synthetic oligonucleotide
  Sense strand starting at position 143 of SEQ ID NO: 1881097
guauaugcagaccauuauu

SEQ ID NO: 2017809 - RNA, 19 nt, Artificial Sequence
  Description of Artificial Sequence: Synthetic oligonucleotide
  Antisense strand to SEQ ID NO: 2017808
aauaauggucugcauauac

SEQ ID NO: 2017810 - RNA, 19 nt, Artificial Sequence
  Description of Artificial Sequence: Synthetic oligonucleotide
  Sense strand starting at position 179 of SEQ ID NO: 1881097
aaugaaugacuguaugcau

SEQ ID NO: 2017811 - RNA, 19 nt, Artificial Sequence
  Description of Artificial Sequence: Synthetic oligonucleotide
  Antisense strand to SEQ ID NO: 2017810
augcauacagucauucauu

SEQ ID NO: 2017812 - RNA, 19 nt, Artificial Sequence
  Description of Artificial Sequence: Synthetic oligonucleotide
  Sense strand starting at position 182 of SEQ ID NO: 1881097
gaaugacuguaugcauauu

SEQ ID NO: 2017813 - RNA, 19 nt, Artificial Sequence
  Description of Artificial Sequence: Synthetic oligonucleotide
  Antisense strand to SEQ ID NO: 2017812
aauaugcauacagucauuc

SEQ ID NO: 2017814 - RNA, 19 nt, Artificial Sequence
  Description of Artificial Sequence: Synthetic oligonucleotide
  Sense strand starting at position 188 of SEQ ID NO: 1881097
cuguaugcauauuuaugua

SEQ ID NO: 2017815 - RNA, 19 nt, Artificial Sequence
  Description of Artificial Sequence: Synthetic oligonucleotide
  Antisense strand to SEQ ID NO: 2017814
uacauaaauaugcauacag

SEQ ID NO: 2017816 - RNA, 19 nt, Artificial Sequence
  Description of Artificial Sequence: Synthetic oligonucleotide
  Sense strand starting at position 217 of SEQ ID NO: 1881097
agcuaugcauuuguacaga

SEQ ID NO: 2017817 - RNA, 19 nt, Artificial Sequence
  Description of Artificial Sequence: Synthetic oligonucleotide
  Antisense strand to SEQ ID NO: 2017816
ucuguacaaaugcauagcu

SEQ ID NO: 2017818 - RNA, 19 nt, Artificial Sequence
  Description of Artificial Sequence: Synthetic oligonucleotide
  Sense strand starting at position 398 of SEQ ID NO: 1881097
gaguuaagugguuauggca

SEQ ID NO: 2017819 - RNA, 19 nt, Artificial Sequence
  Description of Artificial Sequence: Synthetic oligonucleotide
  Antisense strand to SEQ ID NO: 2017818
ugccauaaccacuuaacuc

SEQ ID NO: 2017820 - RNA, 19 nt, Artificial Sequence
  Description of Artificial Sequence: Synthetic oligonucleotide
  Sense strand starting at position 405 of SEQ ID NO: 1881097
gugguuauggcagagaaca

SEQ ID NO: 2017821 - RNA, 19 nt, Artificial Sequence
  Description of Artificial Sequence: Synthetic oligonucleotide
  Antisense strand to SEQ ID NO: 2017820
uguucucugccauaaccac

SEQ ID NO: 2017822 - RNA, 19 nt, Artificial Sequence
  Description of Artificial Sequence: Synthetic oligonucleotide
  Sense strand starting at position 487 of SEQ ID NO: 1881097
ugguuuauuccauagagca

SEQ ID NO: 2017823 - RNA, 19 nt, Artificial Sequence
  Description of Artificial Sequence: Synthetic oligonucleotide
  Antisense strand to SEQ ID NO: 2017822
ugcucuauggaauaaacca

SEQ ID NO: 2017824 - RNA, 19 nt, Artificial Sequence
  Description of Artificial Sequence: Synthetic oligonucleotide
  Sense strand starting at position 645 of SEQ ID NO: 1881097
ugugauuuauagccucauc

SEQ ID NO: 2017825 - RNA, 19 nt, Artificial Sequence
  Description of Artificial Sequence: Synthetic oligonucleotide
  Antisense strand to SEQ ID NO: 2017824
gaugaggcuauaaaucaca

SEQ ID NO: 2017826 - RNA, 19 nt, Artificial Sequence
  Description of Artificial Sequence: Synthetic oligonucleotide
  Sense strand starting at position 1008 of SEQ ID NO: 1881097
cugugaagucuccagauug

SEQ ID NO: 2017827 - RNA, 19 nt, Artificial Sequence
  Description of Artificial Sequence: Synthetic oligonucleotide
  Antisense strand to SEQ ID NO: 2017826
caaucuggagacuucacag

SEQ ID NO: 2017828 - RNA, 19 nt, Artificial Sequence
  Description of Artificial Sequence: Synthetic oligonucleotide
  Sense strand starting at position 1279 of SEQ ID NO: 1881097
cuaagaucguaacugagua

SEQ ID NO: 2017829 - RNA, 19 nt, Artificial Sequence
  Description of Artificial Sequence: Synthetic oligonucleotide
  Antisense strand to SEQ ID NO: 2017828
uacucaguuacgaucuuag

SEQ ID NO: 2017830 - RNA, 19 nt, Artificial Sequence
  Description of Artificial Sequence: Synthetic oligonucleotide
  Sense strand starting at position 1467 of SEQ ID NO: 1881097
uucugaagcuucuuuaaug

SEQ ID NO: 2017831 - RNA, 19 nt, Artificial Sequence
  Description of Artificial Sequence: Synthetic oligonucleotide
  Antisense strand to SEQ ID NO: 2017830
cauuaaagaagcuucagaa

SEQ ID NO: 2017832 - RNA, 19 nt, Artificial Sequence
  Description of Artificial Sequence: Synthetic oligonucleotide
  Sense strand starting at position 1514 of SEQ ID NO: 1881097
cuguguccuccauacacaa

SEQ ID NO: 2017833 - RNA, 19 nt, Artificial Sequence
  Description of Artificial Sequence: Synthetic oligonucleotide
  Antisense strand to SEQ ID NO: 2017832
uuguguauggaggacacag

SEQ ID NO: 2017834 - RNA, 19 nt, Artificial Sequence
  Description of Artificial Sequence: Synthetic oligonucleotide
  Sense strand starting at position 1910 of SEQ ID NO: 1881097
uguggugacuuaccagaaa

SEQ ID NO: 2017835 - RNA, 19 nt, Artificial Sequence
  Description of Artificial Sequence: Synthetic oligonucleotide
  Antisense strand to SEQ ID NO: 2017834
uuucugguaagucaccaca

SEQ ID NO: 2017836 - RNA, 19 nt, Artificial Sequence
  Description of Artificial Sequence: Synthetic oligonucleotide
  Sense strand starting at position 2132 of SEQ ID NO: 1881097
gcucucauuugugcacaua

SEQ ID NO: 2017837 - RNA, 19 nt, Artificial Sequence
  Description of Artificial Sequence: Synthetic oligonucleotide
  Antisense strand to SEQ ID NO: 2017836
uaugugcacaaaugagagc

SEQ ID NO: 2017838 - RNA, 19 nt, Artificial Sequence
  Description of Artificial Sequence: Synthetic oligonucleotide
  Sense strand starting at position 2336 of SEQ ID NO: 1881097
aggucuaagcaauauucuu

SEQ ID NO: 2017839 - RNA, 19 nt, Artificial Sequence
  Description of Artificial Sequence: Synthetic oligonucleotide
  Antisense strand to SEQ ID NO: 2017838
aagaauauugcuuagaccu

SEQ ID NO: 2017840 - RNA, 19 nt, Artificial Sequence
  Description of Artificial Sequence: Synthetic oligonucleotide
  Sense strand starting at position 2500 of SEQ ID NO: 1881097
uucuguauacauuacugau

SEQ ID NO: 2017841 - RNA, 19 nt, Artificial Sequence
  Description of Artificial Sequence: Synthetic oligonucleotide
  Antisense strand to SEQ ID NO: 2017840
aucaguaauguauacagaa

SEQ ID NO: 2017842 - RNA, 19 nt, Artificial Sequence
  Description of Artificial Sequence: Synthetic oligonucleotide
  Sense strand starting at position 2770 of SEQ ID NO: 1881097
aaacgaacgucuuuacaua

SEQ ID NO: 2017843 - RNA, 19 nt, Artificial Sequence
  Description of Artificial Sequence: Synthetic oligonucleotide
  Antisense strand to SEQ ID NO: 2017842
uauguaaagacguucguuu

SEQ ID NO: 2017844 - RNA, 19 nt, Artificial Sequence
  Description of Artificial Sequence: Synthetic oligonucleotide
  Sense strand starting at position 2832 of SEQ ID NO: 1881097
ugcagaucacugcaauucu

SEQ ID NO: 2017845 - RNA, 19 nt, Artificial Sequence
  Description of Artificial Sequence: Synthetic oligonucleotide
  Antisense strand to SEQ ID NO: 2017844
agaauugcagugaucugca

SEQ ID NO: 2017846 - RNA, 19 nt, Artificial Sequence
  Description of Artificial Sequence: Synthetic oligonucleotide
  Sense strand starting at position 2858 of SEQ ID NO: 1881097
aaaucacaucugggauugu

SEQ ID NO: 2017847 - RNA, 19 nt, Artificial Sequence
  Description of Artificial Sequence: Synthetic oligonucleotide
  Antisense strand to SEQ ID NO: 2017846
acaaucccagaugugauuu

SEQ ID NO: 2017848 - RNA, 19 nt, Artificial Sequence
  Description of Artificial Sequence: Synthetic oligonucleotide
  Sense strand starting at position 2867 of SEQ ID NO: 1881097
cugggauuguuccuuaauc

SEQ ID NO: 2017849 - RNA, 19 nt, Artificial Sequence
  Description of Artificial Sequence: Synthetic oligonucleotide
  Antisense strand to SEQ ID NO: 2017848
gauuaaggaacaaucccag

SEQ ID NO: 2017850 - RNA, 19 nt, Artificial Sequence
  Description of Artificial Sequence: Synthetic oligonucleotide
  Sense strand starting at position 2869 of SEQ ID NO: 1881097
gggauuguuccuuaaucga

SEQ ID NO: 2017851 - RNA, 19 nt, Artificial Sequence
  Description of Artificial Sequence: Synthetic oligonucleotide
  Antisense strand to SEQ ID NO: 2017850
ucgauuaaggaacaauccc

SEQ ID NO: 2017852 - RNA, 19 nt, Artificial Sequence
  Description of Artificial Sequence: Synthetic oligonucleotide
  Sense strand starting at position 2877 of SEQ ID NO: 1881097
uccuuaaucgaguaaauug

SEQ ID NO: 2017853 - RNA, 19 nt, Artificial Sequence
  Description of Artificial Sequence: Synthetic oligonucleotide
  Antisense strand to SEQ ID NO: 2017852
caauuuacucgauuaagga

SEQ ID NO: 2017854 - RNA, 19 nt, Artificial Sequence
  Description of Artificial Sequence: Synthetic oligonucleotide
  Sense strand starting at position 2922 of SEQ ID NO: 1881097
agcuuaauagcuuaaagag

SEQ ID NO: 2017855 - RNA, 19 nt, Artificial Sequence
  Description of Artificial Sequence: Synthetic oligonucleotide
  Antisense strand to SEQ ID NO: 2017854
cucuuuaagcuauuaagcu

SEQ ID NO: 2017856 - RNA, 19 nt, Artificial Sequence
  Description of Artificial Sequence: Synthetic oligonucleotide
  Sense strand starting at position 2970 of SEQ ID NO: 1881097
augaaagaauuggagagau

SEQ ID NO: 2017857 - RNA, 19 nt, Artificial Sequence
  Description of Artificial Sequence: Synthetic oligonucleotide
  Antisense strand to SEQ ID NO: 2017856
aucucuccaauucuuucau

SEQ ID NO: 2017858 - RNA, 19 nt, Artificial Sequence
  Description of Artificial Sequence: Synthetic oligonucleotide
  Sense strand starting at position 2983 of SEQ ID NO: 1881097
agagauuucuuagaugauu

SEQ ID NO: 2017859 - RNA, 19 nt, Artificial Sequence
  Description of Artificial Sequence: Synthetic oligonucleotide
  Antisense strand to SEQ ID NO: 2017858
aaucaucuaagaaaucucu

SEQ ID NO: 2017860 - RNA, 19 nt, Artificial Sequence
  Description of Artificial Sequence: Synthetic oligonucleotide
  Sense strand starting at position 3025 of SEQ ID NO: 1881097
cugagugaaguuuauaugu

SEQ ID NO: 2017861 - RNA, 19 nt, Artificial Sequence
  Description of Artificial Sequence: Synthetic oligonucleotide
  Antisense strand to SEQ ID NO: 2017860
acauauaaacuucacucag

SEQ ID NO: 2017862 - RNA, 19 nt, Artificial Sequence
  Description of Artificial Sequence: Synthetic oligonucleotide
  Sense strand starting at position 3030 of SEQ ID NO: 1881097
ugaaguuuauauguuagga

SEQ ID NO: 2017863 - RNA, 19 nt, Artificial Sequence
  Description of Artificial Sequence: Synthetic oligonucleotide
  Antisense strand to SEQ ID NO: 2017862
uccuaacauauaaacuuca

SEQ ID NO: 2017864 - RNA, 19 nt, Artificial Sequence
  Description of Artificial Sequence: Synthetic oligonucleotide
  Sense strand starting at position 3081 of SEQ ID NO: 1881097
gcaucugacuaauugaaag

SEQ ID NO: 2017865 - RNA, 19 nt, Artificial Sequence
  Description of Artificial Sequence: Synthetic oligonucleotide
  Antisense strand to SEQ ID NO: 2017864
cuuucaauuagucagaugc

SEQ ID NO: 2017866 - RNA, 19 nt, Artificial Sequence
  Description of Artificial Sequence: Synthetic oligonucleotide
  Sense strand starting at position 3126 of SEQ ID NO: 1881097
auccaauguuacuuaagga

SEQ ID NO: 2017867 - RNA, 19 nt, Artificial Sequence
  Description of Artificial Sequence: Synthetic oligonucleotide
  Antisense strand to SEQ ID NO: 2017866
uccuuaaguaacauuggau

SEQ ID NO: 2017868 - RNA, 19 nt, Artificial Sequence
  Description of Artificial Sequence: Synthetic oligonucleotide
  Sense strand starting at position 3286 of SEQ ID NO: 1881097
uguggaaaucaguauucua

SEQ ID NO: 2017869 - RNA, 19 nt, Artificial Sequence
  Description of Artificial Sequence: Synthetic oligonucleotide
  Antisense strand to SEQ ID NO: 2017868
uagaauacugauuuccaca

SEQ ID NO: 2017870 - RNA, 19 nt, Artificial Sequence
  Description of Artificial Sequence: Synthetic oligonucleotide
  Sense strand starting at position 3323 of SEQ ID NO: 1881097
gggaauugguucuuaucaa

SEQ ID NO: 2017871 - RNA, 19 nt, Artificial Sequence
  Description of Artificial Sequence: Synthetic oligonucleotide
  Antisense strand to SEQ ID NO: 2017870
uugauaagaaccaauuccc

SEQ ID NO: 2017872 - RNA, 19 nt, Artificial Sequence
  Description of Artificial Sequence: Synthetic oligonucleotide
  Sense strand starting at position 3391 of SEQ ID NO: 1881097
gaaauuaaagguugcaaga

SEQ ID NO: 2017873 - RNA, 19 nt, Artificial Sequence
  Description of Artificial Sequence: Synthetic oligonucleotide
  Antisense strand to SEQ ID NO: 2017872
ucuugcaaccuuuaauuuc

SEQ ID NO: 2017874 - RNA, 19 nt, Artificial Sequence
  Description of Artificial Sequence: Synthetic oligonucleotide
  Sense strand starting at position 3656 of SEQ ID NO: 1881097
ugacaagauuacuuuaagu

SEQ ID NO: 2017875 - RNA, 19 nt, Artificial Sequence
  Description of Artificial Sequence: Synthetic oligonucleotide
  Antisense strand to SEQ ID NO: 2017874
acuuaaaguaaucuuguca

SEQ ID NO: 2017876 - RNA, 19 nt, Artificial Sequence
  Description of Artificial Sequence: Synthetic oligonucleotide
  Sense strand starting at position 3746 of SEQ ID NO: 1881097
gugugaaaucuugaggcau

SEQ ID NO: 2017877 - RNA, 19 nt, Artificial Sequence
  Description of Artificial Sequence: Synthetic oligonucleotide
  Antisense strand to SEQ ID NO: 2017876
augccucaagauuucacac

SEQ ID NO: 2017878 - RNA, 19 nt, Artificial Sequence
  Description of Artificial Sequence: Synthetic oligonucleotide
  Sense strand starting at position 3760 of SEQ ID NO: 1881097
ggcauuacacccugaagag

SEQ ID NO: 2017879 - RNA, 19 nt, Artificial Sequence
  Description of Artificial Sequence: Synthetic oligonucleotide
  Antisense strand to SEQ ID NO: 2017878
cucuucaggguguaaugcc

SEQ ID NO: 2017880 - RNA, 19 nt, Artificial Sequence
  Description of Artificial Sequence: Synthetic oligonucleotide
  Sense strand starting at position 3813 of SEQ ID NO: 1881097
cuggaugucggaggaacaa

SEQ ID NO: 2017881 - RNA, 19 nt, Artificial Sequence
  Description of Artificial Sequence: Synthetic oligonucleotide
  Antisense strand to SEQ ID NO: 2017880
uuguuccuccgacauccag

SEQ ID NO: 2017882 - RNA, 19 nt, Artificial Sequence
  Description of Artificial Sequence: Synthetic oligonucleotide
  Sense strand starting at position 3962 of SEQ ID NO: 1881097
agguuugugaaucauguua

SEQ ID NO: 2017883 - RNA, 19 nt, Artificial Sequence
  Description of Artificial Sequence: Synthetic oligonucleotide
  Antisense strand to SEQ ID NO: 2017882
uaacaugauucacaaaccu

SEQ ID NO: 2017884 - RNA, 19 nt, Artificial Sequence
  Description of Artificial Sequence: Synthetic oligonucleotide
  Sense strand starting at position 25 of SEQ ID NO: 1881098
ugcauuaacuggucacuga

SEQ ID NO: 2017885 - RNA, 19 nt, Artificial Sequence
  Description of Artificial Sequence: Synthetic oligonucleotide
  Antisense strand to SEQ ID NO: 2017884
ucagugaccaguuaaugca

SEQ ID NO: 2017886 - RNA, 19 nt, Artificial Sequence
  Description of Artificial Sequence: Synthetic oligonucleotide
  Sense strand starting at position 133 of SEQ ID NO: 1881098
ccugaauacugacuacgua

SEQ ID NO: 2017887 - RNA, 19 nt, Artificial Sequence
  Description of Artificial Sequence: Synthetic oligonucleotide
  Antisense strand to SEQ ID NO: 2017886
uacguagucaguauucagg

SEQ ID NO: 2017888 - RNA, 19 nt, Artificial Sequence
  Description of Artificial Sequence: Synthetic oligonucleotide
  Sense strand starting at position 248 of SEQ ID NO: 1881098
gcaugacuugcccaaaguc

SEQ ID NO: 2017889 - RNA, 19 nt, Artificial Sequence
  Description of Artificial Sequence: Synthetic oligonucleotide
  Antisense strand to SEQ ID NO: 2017888
gacuuugggcaagucaugc

SEQ ID NO: 2017890 - RNA, 19 nt, Artificial Sequence
  Description of Artificial Sequence: Synthetic oligonucleotide
  Sense strand starting at position 287 of SEQ ID NO: 1881098
uuucgauguccagaugaaa

SEQ ID NO: 2017891 - RNA, 19 nt, Artificial Sequence
  Description of Artificial Sequence: Synthetic oligonucleotide
  Antisense strand to SEQ ID NO: 2017890
uuucaucuggacaucgaaa

SEQ ID NO: 2017892 - RNA, 19 nt, Artificial Sequence
  Description of Artificial Sequence: Synthetic oligonucleotide
  Sense strand starting at position 307 of SEQ ID NO: 1881098
gcuuuauucccacagaggu

SEQ ID NO: 2017893 - RNA, 19 nt, Artificial Sequence
  Description of Artificial Sequence: Synthetic oligonucleotide
  Antisense strand to SEQ ID NO: 2017892
accucugugggaauaaagc

SEQ ID NO: 2017894 - RNA, 19 nt, Artificial Sequence
  Description of Artificial Sequence: Synthetic oligonucleotide
  Sense strand starting at position 419 of SEQ ID NO: 1881098
gcaggcauucccuaaagag

SEQ ID NO: 2017895 - RNA, 19 nt, Artificial Sequence
  Description of Artificial Sequence: Synthetic oligonucleotide
  Antisense strand to SEQ ID NO: 2017894
cucuuuagggaaugccugc

SEQ ID NO: 2017896 - RNA, 19 nt, Artificial Sequence
  Description of Artificial Sequence: Synthetic oligonucleotide
  Sense strand starting at position 501 of SEQ ID NO: 1881098
guauuagaaucuccagaga

SEQ ID NO: 2017897 - RNA, 19 nt, Artificial Sequence
  Description of Artificial Sequence: Synthetic oligonucleotide
  Antisense strand to SEQ ID NO: 2017896
ucucuggagauucuaauac

SEQ ID NO: 2017898 - RNA, 19 nt, Artificial Sequence
  Description of Artificial Sequence: Synthetic oligonucleotide
  Sense strand starting at position 610 of SEQ ID NO: 1881098
ggagguguguccucaguga

SEQ ID NO: 2017899 - RNA, 19 nt, Artificial Sequence
  Description of Artificial Sequence: Synthetic oligonucleotide
  Antisense strand to SEQ ID NO: 2017898
ucacugaggacacaccucc

SEQ ID NO: 2017900 - RNA, 19 nt, Artificial Sequence
  Description of Artificial Sequence: Synthetic oligonucleotide
  Sense strand starting at position 612 of SEQ ID NO: 1881098
agguguguccucagugaug

SEQ ID NO: 2017901 - RNA, 19 nt, Artificial Sequence
  Description of Artificial Sequence: Synthetic oligonucleotide
  Antisense strand to SEQ ID NO: 2017900
caucacugaggacacaccu

SEQ ID NO: 2017902 - RNA, 19 nt, Artificial Sequence
  Description of Artificial Sequence: Synthetic oligonucleotide
  Sense strand starting at position 619 of SEQ ID NO: 1881098
uccucagugaugggaggua

SEQ ID NO: 2017903 - RNA, 19 nt, Artificial Sequence
  Description of Artificial Sequence: Synthetic oligonucleotide
  Antisense strand to SEQ ID NO: 2017902
uaccucccaucacugagga

SEQ ID NO: 2017904 - RNA, 19 nt, Artificial Sequence
  Description of Artificial Sequence: Synthetic oligonucleotide
  Sense strand starting at position 1245 of SEQ ID NO: 1881098
gaggaugcuugccuggaga

SEQ ID NO: 2017905 - RNA, 19 nt, Artificial Sequence
  Description of Artificial Sequence: Synthetic oligonucleotide
  Antisense strand to SEQ ID NO: 2017904
ucuccaggcaagcauccuc

SEQ ID NO: 2017906 - RNA, 19 nt, Artificial Sequence
  Description of Artificial Sequence: Synthetic oligonucleotide
  Sense strand starting at position 1247 of SEQ ID NO: 1881098
ggaugcuugccuggagaga

SEQ ID NO: 2017907 - RNA, 19 nt, Artificial Sequence
  Description of Artificial Sequence: Synthetic oligonucleotide
  Antisense strand to SEQ ID NO: 2017906
ucucuccaggcaagcaucc

SEQ ID NO: 2017908 - RNA, 19 nt, Artificial Sequence
  Description of Artificial Sequence: Synthetic oligonucleotide
  Sense strand starting at position 1248 of SEQ ID NO: 1881098
gaugcuugccuggagagaa

SEQ ID NO: 2017909 - RNA, 19 nt, Artificial Sequence
  Description of Artificial Sequence: Synthetic oligonucleotide
  Antisense strand to SEQ ID NO: 2017908
uucucuccaggcaagcauc

SEQ ID NO: 2017910 - RNA, 19 nt, Artificial Sequence
  Description of Artificial Sequence: Synthetic oligonucleotide
  Sense strand starting at position 1323 of SEQ ID NO: 1881098
ucgucauaccaagaaucac

SEQ ID NO: 2017911 - RNA, 19 nt, Artificial Sequence
  Description of Artificial Sequence: Synthetic oligonucleotide
  Antisense strand to SEQ ID NO: 2017910
gugauucuugguaugacga

SEQ ID NO: 2017912 - RNA, 19 nt, Artificial Sequence
  Description of Artificial Sequence: Synthetic oligonucleotide
  Sense strand starting at position 1333 of SEQ ID NO: 1881098
aagaaucaccacugugaug

SEQ ID NO: 2017913 - RNA, 19 nt, Artificial Sequence
  Description of Artificial Sequence: Synthetic oligonucleotide
  Antisense strand to SEQ ID NO: 2017912
caucacaguggugauucuu

SEQ ID NO: 2017914 - RNA, 19 nt, Artificial Sequence
  Description of Artificial Sequence: Synthetic oligonucleotide
  Sense strand starting at position 1335 of SEQ ID NO: 1881098
gaaucaccacugugauggu

SEQ ID NO: 2017915 - RNA, 19 nt, Artificial Sequence
  Description of Artificial Sequence: Synthetic oligonucleotide
  Antisense strand to SEQ ID NO: 2017914
accaucacaguggugauuc

SEQ ID NO: 2017916 - RNA, 19 nt, Artificial Sequence
  Description of Artificial Sequence: Synthetic oligonucleotide
  Sense strand starting at position 1483 of SEQ ID NO: 1881098
cacagagaagcuugugacu

SEQ ID NO: 2017917 - RNA, 19 nt, Artificial Sequence
  Description of Artificial Sequence: Synthetic oligonucleotide
  Antisense strand to SEQ ID NO: 2017916
agucacaagcuucucugug

SEQ ID NO: 2017918 - RNA, 19 nt, Artificial Sequence
  Description of Artificial Sequence: Synthetic oligonucleotide
  Sense strand starting at position 1648 of SEQ ID NO: 1881098
guguaauccucuccuacau

SEQ ID NO: 2017919 - RNA, 19 nt, Artificial Sequence
  Description of Artificial Sequence: Synthetic oligonucleotide
  Antisense strand to SEQ ID NO: 2017918
auguaggagaggauuacac

SEQ ID NO: 2017920 - RNA, 19 nt, Artificial Sequence
  Description of Artificial Sequence: Synthetic oligonucleotide
  Sense strand starting at position 1692 of SEQ ID NO: 1881098
cgcuuuagccaaugggaca

SEQ ID NO: 2017921 - RNA, 19 nt, Artificial Sequence
  Description of Artificial Sequence: Synthetic oligonucleotide
  Antisense strand to SEQ ID NO: 2017920
ugucccauuggcuaaagcg

SEQ ID NO: 2017922 - RNA, 19 nt, Artificial Sequence
  Description of Artificial Sequence: Synthetic oligonucleotide
  Sense strand starting at position 1917 of SEQ ID NO: 1881098
agcagaauugcccagccua

SEQ ID NO: 2017923 - RNA, 19 nt, Artificial Sequence
  Description of Artificial Sequence: Synthetic oligonucleotide
  Antisense strand to SEQ ID NO: 2017922
uaggcugggcaauucugcu

SEQ ID NO: 2017924 - RNA, 19 nt, Artificial Sequence
  Description of Artificial Sequence: Synthetic oligonucleotide
  Sense strand starting at position 1958 of SEQ ID NO: 1881098
aauuuagugugguuugagu

SEQ ID NO: 2017925 - RNA, 19 nt, Artificial Sequence
  Description of Artificial Sequence: Synthetic oligonucleotide
  Antisense strand to SEQ ID NO: 2017924
acucaaaccacacuaaauu

SEQ ID NO: 2017926 - RNA, 19 nt, Artificial Sequence
  Description of Artificial Sequence: Synthetic oligonucleotide
  Sense strand starting at position 1966 of SEQ ID NO: 1881098
gugguuugagugcauuaau

SEQ ID NO: 2017927 - RNA, 19 nt, Artificial Sequence
  Description of Artificial Sequence: Synthetic oligonucleotide
  Antisense strand to SEQ ID NO: 2017926
auuaaugcacucaaaccac

SEQ ID NO: 2017928 - RNA, 19 nt, Artificial Sequence
  Description of Artificial Sequence: Synthetic oligonucleotide
  Sense strand starting at position 1969 of SEQ ID NO: 1881098
guuugagugcauuaauaga

SEQ ID NO: 2017929 - RNA, 19 nt, Artificial Sequence
  Description of Artificial Sequence: Synthetic oligonucleotide
  Antisense strand to SEQ ID NO: 2017928
ucuauuaaugcacucaaac

SEQ ID NO: 2017930 - RNA, 19 nt, Artificial Sequence
  Description of Artificial Sequence: Synthetic oligonucleotide
  Sense strand starting at position 1983 of SEQ ID NO: 1881098
auagaucauugagacaaac

SEQ ID NO: 2017931 - RNA, 19 nt, Artificial Sequence
  Description of Artificial Sequence: Synthetic oligonucleotide
  Antisense strand to SEQ ID NO: 2017930
guuugucucaaugaucuau

SEQ ID NO: 2017932 - RNA, 19 nt, Artificial Sequence
  Description of Artificial Sequence: Synthetic oligonucleotide
  Sense strand starting at position 2004 of SEQ ID NO: 1881098
ucaaguguccaguaucuga

SEQ ID NO: 2017933 - RNA, 19 nt, Artificial Sequence
  Description of Artificial Sequence: Synthetic oligonucleotide
  Antisense strand to SEQ ID NO: 2017932
ucagauacuggacacuuga

SEQ ID NO: 2017934 - RNA, 19 nt, Artificial Sequence
  Description of Artificial Sequence: Synthetic oligonucleotide
  Sense strand starting at position 2034 of SEQ ID NO: 1881098
ugaccaaugcugugcagau

SEQ ID NO: 2017935 - RNA, 19 nt, Artificial Sequence
  Description of Artificial Sequence: Synthetic oligonucleotide
  Antisense strand to SEQ ID NO: 2017934
aucugcacagcauugguca

SEQ ID NO: 2017936 - RNA, 19 nt, Artificial Sequence
  Description of Artificial Sequence: Synthetic oligonucleotide
  Sense strand starting at position 2047 of SEQ ID NO: 1881098
gcagaugugacagagcaga

SEQ ID NO: 2017937 - RNA, 19 nt, Artificial Sequence
  Description of Artificial Sequence: Synthetic oligonucleotide
  Antisense strand to SEQ ID NO: 2017936
ucugcucugucacaucugc

SEQ ID NO: 2017938 - RNA, 19 nt, Artificial Sequence
  Description of Artificial Sequence: Synthetic oligonucleotide
  Sense strand starting at position 2135 of SEQ ID NO: 1881098
ugcucuggguuccugacau

SEQ ID NO: 2017939 - RNA, 19 nt, Artificial Sequence
  Description of Artificial Sequence: Synthetic oligonucleotide
  Antisense strand to SEQ ID NO: 2017938
augucaggaacccagagca

SEQ ID NO: 2017940 - RNA, 19 nt, Artificial Sequence
  Description of Artificial Sequence: Synthetic oligonucleotide
  Sense strand starting at position 2698 of SEQ ID NO: 1881098
gcaugcagccucgcauaua

SEQ ID NO: 2017941 - RNA, 19 nt, Artificial Sequence
  Description of Artificial Sequence: Synthetic oligonucleotide
  Antisense strand to SEQ ID NO: 2017940
uauaugcgaggcugcaugc

SEQ ID NO: 2017942 - RNA, 19 nt, Artificial Sequence
  Description of Artificial Sequence: Synthetic oligonucleotide
  Sense strand starting at position 2771 of SEQ ID NO: 1881098
gucauauagcuggacaggu

SEQ ID NO: 2017943 - RNA, 19 nt, Artificial Sequence
  Description of Artificial Sequence: Synthetic oligonucleotide
  Antisense strand to SEQ ID NO: 2017942
accuguccagcuauaugac

SEQ ID NO: 2017944 - RNA, 19 nt, Artificial Sequence
  Description of Artificial Sequence: Synthetic oligonucleotide
  Sense strand starting at position 3116 of SEQ ID NO: 1881098
cuggguuaauccuccacuu

SEQ ID NO: 2017945 - RNA, 19 nt, Artificial Sequence
  Description of Artificial Sequence: Synthetic oligonucleotide
  Antisense strand to SEQ ID NO: 2017944
aaguggaggauuaacccag

SEQ ID NO: 2017946 - RNA, 19 nt, Artificial Sequence
  Description of Artificial Sequence: Synthetic oligonucleotide
  Sense strand starting at position 3296 of SEQ ID NO: 1881098
caagucucaggaugcauaa

SEQ ID NO: 2017947 - RNA, 19 nt, Artificial Sequence
  Description of Artificial Sequence: Synthetic oligonucleotide
  Antisense strand to SEQ ID NO: 2017946
uuaugcauccugagacuug

SEQ ID NO: 2017948 - RNA, 19 nt, Artificial Sequence
  Description of Artificial Sequence: Synthetic oligonucleotide
  Sense strand starting at position 3305 of SEQ ID NO: 1881098
ggaugcauaauguggucaa

SEQ ID NO: 2017949 - RNA, 19 nt, Artificial Sequence
  Description of Artificial Sequence: Synthetic oligonucleotide
  Antisense strand to SEQ ID NO: 2017948
uugaccacauuaugcaucc

SEQ ID NO: 2017950 - RNA, 19 nt, Artificial Sequence
  Description of Artificial Sequence: Synthetic oligonucleotide
  Sense strand starting at position 3309 of SEQ ID NO: 1881098
gcauaauguggucaaguuc

SEQ ID NO: 2017951 - RNA, 19 nt, Artificial Sequence
  Description of Artificial Sequence: Synthetic oligonucleotide
  Antisense strand to SEQ ID NO: 2017950
gaacuugaccacauuaugc

SEQ ID NO: 2017952 - RNA, 19 nt, Artificial Sequence
  Description of Artificial Sequence: Synthetic oligonucleotide
  Sense strand starting at position 3484 of SEQ ID NO: 1881098
uugaaauucugcccuggag

SEQ ID NO: 2017953 - RNA, 19 nt, Artificial Sequence
  Description of Artificial Sequence: Synthetic oligonucleotide
  Antisense strand to SEQ ID NO: 2017952
cuccagggcagaauuucaa

SEQ ID NO: 2017954 - RNA, 19 nt, Artificial Sequence
  Description of Artificial Sequence: Synthetic oligonucleotide
  Sense strand starting at position 3486 of SEQ ID NO: 1881098
gaaauucugcccuggagag

SEQ ID NO: 2017955 - RNA, 19 nt, Artificial Sequence
  Description of Artificial Sequence: Synthetic oligonucleotide
  Antisense strand to SEQ ID NO: 2017954
cucuccagggcagaauuuc

SEQ ID NO: 2017956 - RNA, 19 nt, Artificial Sequence
  Description of Artificial Sequence: Synthetic oligonucleotide
  Sense strand starting at position 3732 of SEQ ID NO: 1881098
ccaagugcccuguaaacau

SEQ ID NO: 2017957 - RNA, 19 nt, Artificial Sequence
  Description of Artificial Sequence: Synthetic oligonucleotide
  Antisense strand to SEQ ID NO: 2017956
auguuuacagggcacuugg

SEQ ID NO: 2017958 - RNA, 19 nt, Artificial Sequence
  Description of Artificial Sequence: Synthetic oligonucleotide
  Sense strand starting at position 3830 of SEQ ID NO: 1881098
ggaucaaaugccugccaca

SEQ ID NO: 2017959 - RNA, 19 nt, Artificial Sequence
  Description of Artificial Sequence: Synthetic oligonucleotide
  Antisense strand to SEQ ID NO: 2017958
uguggcaggcauuugaucc

SEQ ID NO: 2017960 - RNA, 19 nt, Artificial Sequence
  Description of Artificial Sequence: Synthetic oligonucleotide
  Sense strand starting at position 3874 of SEQ ID NO: 1881098
aaggcaaguugaucacaga

SEQ ID NO: 2017961 - RNA, 19 nt, Artificial Sequence
  Description of Artificial Sequence: Synthetic oligonucleotide
  Antisense strand to SEQ ID NO: 2017960
ucugugaucaacuugccuu

SEQ ID NO: 2017962 - RNA, 19 nt, Artificial Sequence
  Description of Artificial Sequence: Synthetic oligonucleotide
  Sense strand starting at position 3979 of SEQ ID NO: 1881098
ggaguuugaguccagcaaa

SEQ ID NO: 2017963 - RNA, 19 nt, Artificial Sequence
  Description of Artificial Sequence: Synthetic oligonucleotide
  Antisense strand to SEQ ID NO: 2017962
uuugcuggacucaaacucc

SEQ ID NO: 2017964 - RNA, 19 nt, Artificial Sequence
  Description of Artificial Sequence: Synthetic oligonucleotide
  Sense strand starting at position 41 of SEQ ID NO: 1881099
cucauuuauuugggaguuu

SEQ ID NO: 2017965 - RNA, 19 nt, Artificial Sequence
  Description of Artificial Sequence: Synthetic oligonucleotide
  Antisense strand to SEQ ID NO: 2017964
aaacucccaaauaaaugag

SEQ ID NO: 2017966 - RNA, 19 nt, Artificial Sequence
  Description of Artificial Sequence: Synthetic oligonucleotide
  Sense strand starting at position 61 of SEQ ID NO: 1881099
guaagaaacguuugggaag

SEQ ID NO: 2017967 - RNA, 19 nt, Artificial Sequence
  Description of Artificial Sequence: Synthetic oligonucleotide
  Antisense strand to SEQ ID NO: 2017966
cuucccaaacguuucuuac

SEQ ID NO: 2017968 - RNA, 19 nt, Artificial Sequence
  Description of Artificial Sequence: Synthetic oligonucleotide
  Sense strand starting at position 94 of SEQ ID NO: 1881099
agaaacuacucagauuuga

SEQ ID NO: 2017969 - RNA, 19 nt, Artificial Sequence
  Description of Artificial Sequence: Synthetic oligonucleotide
  Antisense strand to SEQ ID NO: 2017968
ucaaaucugaguaguuucu

SEQ ID NO: 2017970 - RNA, 19 nt, Artificial Sequence
  Description of Artificial Sequence: Synthetic oligonucleotide
  Sense strand starting at position 318 of SEQ ID NO: 1881099
cugccugcucauuagagga

SEQ ID NO: 2017971 - RNA, 19 nt, Artificial Sequence
  Description of Artificial Sequence: Synthetic oligonucleotide
  Antisense strand to SEQ ID NO: 2017970
uccucuaaugagcaggcag

SEQ ID NO: 2017972 - RNA, 19 nt, Artificial Sequence
  Description of Artificial Sequence: Synthetic oligonucleotide
  Sense strand starting at position 345 of SEQ ID NO: 1881099
ucagaugcauugcuaacua

SEQ ID NO: 2017973 - RNA, 19 nt, Artificial Sequence
  Description of Artificial Sequence: Synthetic oligonucleotide
  Antisense strand to SEQ ID NO: 2017972
uaguuagcaaugcaucuga

SEQ ID NO: 2017974 - RNA, 19 nt, Artificial Sequence
  Description of Artificial Sequence: Synthetic oligonucleotide
  Sense strand starting at position 556 of SEQ ID NO: 1881099
cuuugucacccaggaugau

SEQ ID NO: 2017975 - RNA, 19 nt, Artificial Sequence
  Description of Artificial Sequence: Synthetic oligonucleotide
  Antisense strand to SEQ ID NO: 2017974
aucauccugggugacaaag

SEQ ID NO: 2017976 - RNA, 19 nt, Artificial Sequence
  Description of Artificial Sequence: Synthetic oligonucleotide
  Sense strand starting at position 873 of SEQ ID NO: 1881099
uuggguccuuuacuuagaa

SEQ ID NO: 2017977 - RNA, 19 nt, Artificial Sequence
  Description of Artificial Sequence: Synthetic oligonucleotide
  Antisense strand to SEQ ID NO: 2017976
uucuaaguaaaggacccaa

SEQ ID NO: 2017978 - RNA, 19 nt, Artificial Sequence
  Description of Artificial Sequence: Synthetic oligonucleotide
  Sense strand starting at position 1023 of SEQ ID NO: 1881099
gcuuguacagacuauccaa

SEQ ID NO: 2017979 - RNA, 19 nt, Artificial Sequence
  Description of Artificial Sequence: Synthetic oligonucleotide
  Antisense strand to SEQ ID NO: 2017978
uuggauagucuguacaagc

SEQ ID NO: 2017980 - RNA, 19 nt, Artificial Sequence
  Description of Artificial Sequence: Synthetic oligonucleotide
  Sense strand starting at position 1052 of SEQ ID NO: 1881099
ggaggaaagugcuccauca

SEQ ID NO: 2017981 - RNA, 19 nt, Artificial Sequence
  Description of Artificial Sequence: Synthetic oligonucleotide
  Antisense strand to SEQ ID NO: 2017980
ugauggagcacuuuccucc

SEQ ID NO: 2017982 - RNA, 19 nt, Artificial Sequence
  Description of Artificial Sequence: Synthetic oligonucleotide
  Sense strand starting at position 1141 of SEQ ID NO: 1881099
ggagcucaguuaccuguaa

SEQ ID NO: 2017983 - RNA, 19 nt, Artificial Sequence
  Description of Artificial Sequence: Synthetic oligonucleotide
  Antisense strand to SEQ ID NO: 2017982
uuacagguaacugagcucc

SEQ ID NO: 2017984 - RNA, 19 nt, Artificial Sequence
  Description of Artificial Sequence: Synthetic oligonucleotide
  Sense strand starting at position 1142 of SEQ ID NO: 1881099
gagcucaguuaccuguaaa

SEQ ID NO: 2017985 - RNA, 19 nt, Artificial Sequence
  Description of Artificial Sequence: Synthetic oligonucleotide
  Antisense strand to SEQ ID NO: 2017984
uuuacagguaacugagcuc

SEQ ID NO: 2017986 - RNA, 19 nt, Artificial Sequence
  Description of Artificial Sequence: Synthetic oligonucleotide
  Sense strand starting at position 1170 of SEQ ID NO: 1881099
aaugaauggucuuuaugga

SEQ ID NO: 2017987 - RNA, 19 nt, Artificial Sequence
  Description of Artificial Sequence: Synthetic oligonucleotide
  Antisense strand to SEQ ID NO: 2017986
uccauaaagaccauucauu

SEQ ID NO: 2017988 - RNA, 19 nt, Artificial Sequence
  Description of Artificial Sequence: Synthetic oligonucleotide
  Sense strand starting at position 1466 of SEQ ID NO: 1881099
augcuaaaugccuaucuga

SEQ ID NO: 2017989 - RNA, 19 nt, Artificial Sequence
  Description of Artificial Sequence: Synthetic oligonucleotide
  Antisense strand to SEQ ID NO: 2017988
ucagauaggcauuuagcau

SEQ ID NO: 2017990 - RNA, 19 nt, Artificial Sequence
  Description of Artificial Sequence: Synthetic oligonucleotide
  Sense strand starting at position 1770 of SEQ ID NO: 1881099
gagaaaguuuacuuugaua

SEQ ID NO: 2017991 - RNA, 19 nt, Artificial Sequence
  Description of Artificial Sequence: Synthetic oligonucleotide
  Antisense strand to SEQ ID NO: 2017990
uaucaaaguaaacuuucuc

SEQ ID NO: 2017992 - RNA, 19 nt, Artificial Sequence
  Description of Artificial Sequence: Synthetic oligonucleotide
  Sense strand starting at position 1772 of SEQ ID NO: 1881099
gaaaguuuacuuugauaug

SEQ ID NO: 2017993 - RNA, 19 nt, Artificial Sequence
  Description of Artificial Sequence: Synthetic oligonucleotide
  Antisense strand to SEQ ID NO: 2017992
cauaucaaaguaaacuuuc

SEQ ID NO: 2017994 - RNA, 19 nt, Artificial Sequence
  Description of Artificial Sequence: Synthetic oligonucleotide
  Sense strand starting at position 1782 of SEQ ID NO: 1881099
uuugauaugccauaugauu

SEQ ID NO: 2017995 - RNA, 19 nt, Artificial Sequence
  Description of Artificial Sequence: Synthetic oligonucleotide
  Antisense strand to SEQ ID NO: 2017994
aaucauauggcauaucaaa

SEQ ID NO: 2017996 - RNA, 19 nt, Artificial Sequence
  Description of Artificial Sequence: Synthetic oligonucleotide
  Sense strand starting at position 1788 of SEQ ID NO: 1881099
augccauaugauugaaaca

SEQ ID NO: 2017997 - RNA, 19 nt, Artificial Sequence
  Description of Artificial Sequence: Synthetic oligonucleotide
  Antisense strand to SEQ ID NO: 2017996
uguuucaaucauauggcau

SEQ ID NO: 2017998 - RNA, 19 nt, Artificial Sequence
  Description of Artificial Sequence: Synthetic oligonucleotide
  Sense strand starting at position 1829 of SEQ ID NO: 1881099
ggauuauacuccuuugcau

SEQ ID NO: 2017999 - RNA, 19 nt, Artificial Sequence
  Description of Artificial Sequence: Synthetic oligonucleotide
  Antisense strand to SEQ ID NO: 2017998
augcaaaggaguauaaucc

SEQ ID NO: 2018000 - RNA, 19 nt, Artificial Sequence
  Description of Artificial Sequence: Synthetic oligonucleotide
  Sense strand starting at position 1874 of SEQ ID NO: 1881099
ugguaaccuuugccuugaa

SEQ ID NO: 2018001 - RNA, 19 nt, Artificial Sequence
  Description of Artificial Sequence: Synthetic oligonucleotide
  Antisense strand to SEQ ID NO: 2018000
uucaaggcaaagguuacca

SEQ ID NO: 2018002 - RNA, 19 nt, Artificial Sequence
  Description of Artificial Sequence: Synthetic oligonucleotide
  Sense strand starting at position 1875 of SEQ ID NO: 1881099
gguaaccuuugccuugaaa

SEQ ID NO: 2018003 - RNA, 19 nt, Artificial Sequence
  Description of Artificial Sequence: Synthetic oligonucleotide
  Antisense strand to SEQ ID NO: 2018002
uuucaaggcaaagguuacc

SEQ ID NO: 2018004 - RNA, 19 nt, Artificial Sequence
  Description of Artificial Sequence: Synthetic oligonucleotide
  Sense strand starting at position 1940 of SEQ ID NO: 1881099
auaagaugccaguauggua

SEQ ID NO: 2018005 - RNA, 19 nt, Artificial Sequence
  Description of Artificial Sequence: Synthetic oligonucleotide
  Antisense strand to SEQ ID NO: 2018004
uaccauacuggcaucuuau

SEQ ID NO: 2018006 - RNA, 19 nt, Artificial Sequence
  Description of Artificial Sequence: Synthetic oligonucleotide
  Sense strand starting at position 2181 of SEQ ID NO: 1881099
agucaacgaucuuugaugu

SEQ ID NO: 2018007 - RNA, 19 nt, Artificial Sequence
  Description of Artificial Sequence: Synthetic oligonucleotide
  Antisense strand to SEQ ID NO: 2018006
acaucaaagaucguugacu

SEQ ID NO: 2018008 - RNA, 19 nt, Artificial Sequence
  Description of Artificial Sequence: Synthetic oligonucleotide
  Sense strand starting at position 2326 of SEQ ID NO: 1881099
cuccuuagucccugagaca

SEQ ID NO: 2018009 - RNA, 19 nt, Artificial Sequence
  Description of Artificial Sequence: Synthetic oligonucleotide
  Antisense strand to SEQ ID NO: 2018008
ugucucagggacuaaggag

SEQ ID NO: 2018010 - RNA, 19 nt, Artificial Sequence
  Description of Artificial Sequence: Synthetic oligonucleotide
  Sense strand starting at position 2558 of SEQ ID NO: 1881099
aagugcuacuuugugaaug

SEQ ID NO: 2018011 - RNA, 19 nt, Artificial Sequence
  Description of Artificial Sequence: Synthetic oligonucleotide
  Antisense strand to SEQ ID NO: 2018010
cauucacaaaguagcacuu

SEQ ID NO: 2018012 - RNA, 19 nt, Artificial Sequence
  Description of Artificial Sequence: Synthetic oligonucleotide
  Sense strand starting at position 2563 of SEQ ID NO: 1881099
cuacuuugugaaugcauga

SEQ ID NO: 2018013 - RNA, 19 nt, Artificial Sequence
  Description of Artificial Sequence: Synthetic oligonucleotide
  Antisense strand to SEQ ID NO: 2018012
ucaugcauucacaaaguag

SEQ ID NO: 2018014 - RNA, 19 nt, Artificial Sequence
  Description of Artificial Sequence: Synthetic oligonucleotide
  Sense strand starting at position 2568 of SEQ ID NO: 1881099
uugugaaugcaugaaugau

SEQ ID NO: 2018015 - RNA, 19 nt, Artificial Sequence
  Description of Artificial Sequence: Synthetic oligonucleotide
  Antisense strand to SEQ ID NO: 2018014
aucauucaugcauucacaa

SEQ ID NO: 2018016 - RNA, 19 nt, Artificial Sequence
  Description of Artificial Sequence: Synthetic oligonucleotide
  Sense strand starting at position 2766 of SEQ ID NO: 1881099
agcagagucugguucauga

SEQ ID NO: 2018017 - RNA, 19 nt, Artificial Sequence
  Description of Artificial Sequence: Synthetic oligonucleotide
  Antisense strand to SEQ ID NO: 2018016
ucaugaaccagacucugcu

SEQ ID NO: 2018018 - RNA, 19 nt, Artificial Sequence
  Description of Artificial Sequence: Synthetic oligonucleotide
  Sense strand starting at position 2967 of SEQ ID NO: 1881099
agacuuacguaucuagaga

SEQ ID NO: 2018019 - RNA, 19 nt, Artificial Sequence
  Description of Artificial Sequence: Synthetic oligonucleotide
  Antisense strand to SEQ ID NO: 2018018
ucucuagauacguaagucu

SEQ ID NO: 2018020 - RNA, 19 nt, Artificial Sequence
  Description of Artificial Sequence: Synthetic oligonucleotide
  Sense strand starting at position 2972 of SEQ ID NO: 1881099
uacguaucuagagaggagu

SEQ ID NO: 2018021 - RNA, 19 nt, Artificial Sequence
  Description of Artificial Sequence: Synthetic oligonucleotide
  Antisense strand to SEQ ID NO: 2018020
acuccucucuagauacgua

SEQ ID NO: 2018022 - RNA, 19 nt, Artificial Sequence
  Description of Artificial Sequence: Synthetic oligonucleotide
  Sense strand starting at position 2985 of SEQ ID NO: 1881099
aggaguagucaaugccuca

SEQ ID NO: 2018023 - RNA, 19 nt, Artificial Sequence
  Description of Artificial Sequence: Synthetic oligonucleotide
  Antisense strand to SEQ ID NO: 2018022
ugaggcauugacuacuccu

SEQ ID NO: 2018024 - RNA, 19 nt, Artificial Sequence
  Description of Artificial Sequence: Synthetic oligonucleotide
  Sense strand starting at position 3023 of SEQ ID NO: 1881099
aggcuuacuccuuguuaga

SEQ ID NO: 2018025 - RNA, 19 nt, Artificial Sequence
  Description of Artificial Sequence: Synthetic oligonucleotide
  Antisense strand to SEQ ID NO: 2018024
ucuaacaaggaguaagccu

SEQ ID NO: 2018026 - RNA, 19 nt, Artificial Sequence
  Description of Artificial Sequence: Synthetic oligonucleotide
  Sense strand starting at position 3025 of SEQ ID NO: 1881099
gcuuacuccuuguuagaag

SEQ ID NO: 2018027 - RNA, 19 nt, Artificial Sequence
  Description of Artificial Sequence: Synthetic oligonucleotide
  Antisense strand to SEQ ID NO: 2018026
cuucuaacaaggaguaagc

SEQ ID NO: 2018028 - RNA, 19 nt, Artificial Sequence
  Description of Artificial Sequence: Synthetic oligonucleotide
  Sense strand starting at position 3225 of SEQ ID NO: 1881099
gagucuuacugcucagaaa

SEQ ID NO: 2018029 - RNA, 19 nt, Artificial Sequence
  Description of Artificial Sequence: Synthetic oligonucleotide
  Antisense strand to SEQ ID NO: 2018028
uuucugagcaguaagacuc

SEQ ID NO: 2018030 - RNA, 19 nt, Artificial Sequence
  Description of Artificial Sequence: Synthetic oligonucleotide
  Sense strand starting at position 3614 of SEQ ID NO: 1881099
ugaucaguuccagaccacu

SEQ ID NO: 2018031 - RNA, 19 nt, Artificial Sequence
  Description of Artificial Sequence: Synthetic oligonucleotide
  Antisense strand to SEQ ID NO: 2018030
aguggucuggaacugauca

SEQ ID NO: 2018032 - RNA, 19 nt, Artificial Sequence
  Description of Artificial Sequence: Synthetic oligonucleotide
  Sense strand starting at position 3779 of SEQ ID NO: 1881099
uucguaagacuauaacugu

SEQ ID NO: 2018033 - RNA, 19 nt, Artificial Sequence
  Description of Artificial Sequence: Synthetic oligonucleotide
  Antisense strand to SEQ ID NO: 2018032
acaguuauagucuuacgaa

SEQ ID NO: 2018034 - RNA, 19 nt, Artificial Sequence
  Description of Artificial Sequence: Synthetic oligonucleotide
  Sense strand starting at position 3804 of SEQ ID NO: 1881099
uugugaucccgcuaaugga

SEQ ID NO: 2018035 - RNA, 19 nt, Artificial Sequence
  Description of Artificial Sequence: Synthetic oligonucleotide
  Antisense strand to SEQ ID NO: 2018034
uccauuagcgggaucacaa

SEQ ID NO: 2018036 - RNA, 19 nt, Artificial Sequence
  Description of Artificial Sequence: Synthetic oligonucleotide
  Sense strand starting at position 3873 of SEQ ID NO: 1881099
uguuaagaacaucgugauu

SEQ ID NO: 2018037 - RNA, 19 nt, Artificial Sequence
  Description of Artificial Sequence: Synthetic oligonucleotide
  Antisense strand to SEQ ID NO: 2018036
aaucacgauguucuuaaca

SEQ ID NO: 2018038 - RNA, 19 nt, Artificial Sequence
  Description of Artificial Sequence: Synthetic oligonucleotide
  Sense strand starting at position 3913 of SEQ ID NO: 1881099
gaagaucaaugaguucgga

SEQ ID NO: 2018039 - RNA, 19 nt, Artificial Sequence
  Description of Artificial Sequence: Synthetic oligonucleotide
  Antisense strand to SEQ ID NO: 2018038
uccgaacucauugaucuuc

SEQ ID NO: 2018040 - RNA, 19 nt, Artificial Sequence
  Description of Artificial Sequence: Synthetic oligonucleotide
  Sense strand starting at position 3916 of SEQ ID NO: 1881099
gaucaaugaguucggaaac

SEQ ID NO: 2018041 - RNA, 19 nt, Artificial Sequence
  Description of Artificial Sequence: Synthetic oligonucleotide
  Antisense strand to SEQ ID NO: 2018040
guuuccgaacucauugauc

SEQ ID NO: 2018042 - RNA, 19 nt, Artificial Sequence
  Description of Artificial Sequence: Synthetic oligonucleotide
  Sense strand starting at position 3981 of SEQ ID NO: 1881099
ggaggaagcucugcuauag

SEQ ID NO: 2018043 - RNA, 19 nt, Artificial Sequence
  Description of Artificial Sequence: Synthetic oligonucleotide
  Antisense strand to SEQ ID NO: 2018042
cuauagcagagcuuccucc

SEQ ID NO: 2018044 - RNA, 19 nt, Artificial Sequence
  Description of Artificial Sequence: Synthetic oligonucleotide
  Sense strand starting at position 100 of SEQ ID NO: 1881100
uguuguuauguacaacauu

SEQ ID NO: 2018045 - RNA, 19 nt, Artificial Sequence
  Description of Artificial Sequence: Synthetic oligonucleotide
  Antisense strand to SEQ ID NO: 2018044
aauguuguacauaacaaca

SEQ ID NO: 2018046 - RNA, 19 nt, Artificial Sequence
  Description of Artificial Sequence: Synthetic oligonucleotide
  Sense strand starting at position 301 of SEQ ID NO: 1881100
ccaaaugucugaccugaau

SEQ ID NO: 2018047 - RNA, 19 nt, Artificial Sequence
  Description of Artificial Sequence: Synthetic oligonucleotide
  Antisense strand to SEQ ID NO: 2018046
auucaggucagacauuugg

SEQ ID NO: 2018048 - RNA, 19 nt, Artificial Sequence
  Description of Artificial Sequence: Synthetic oligonucleotide
  Sense strand starting at position 396 of SEQ ID NO: 1881100
aucugaaggccuuacuaau

SEQ ID NO: 2018049 - RNA, 19 nt, Artificial Sequence
  Description of Artificial Sequence: Synthetic oligonucleotide
  Antisense strand to SEQ ID NO: 2018048
auuaguaaggccuucagau

SEQ ID NO: 2018050 - RNA, 19 nt, Artificial Sequence
  Description of Artificial Sequence: Synthetic oligonucleotide
  Sense strand starting at position 521 of SEQ ID NO: 1881100
ugccuaaccuagucauuug

SEQ ID NO: 2018051 - RNA, 19 nt, Artificial Sequence
  Description of Artificial Sequence: Synthetic oligonucleotide
  Antisense strand to SEQ ID NO: 2018050
caaaugacuagguuaggca

SEQ ID NO: 2018052 - RNA, 19 nt, Artificial Sequence
  Description of Artificial Sequence: Synthetic oligonucleotide
  Sense strand starting at position 540 of SEQ ID NO: 1881100
aauggcaacucuuugagga

SEQ ID NO: 2018053 - RNA, 19 nt, Artificial Sequence
  Description of Artificial Sequence: Synthetic oligonucleotide
  Antisense strand to SEQ ID NO: 2018052
uccucaaagaguugccauu

SEQ ID NO: 2018054 - RNA, 19 nt, Artificial Sequence
  Description of Artificial Sequence: Synthetic oligonucleotide
  Sense strand starting at position 561 of SEQ ID NO: 1881100
gggacucaauaguuucuaa

SEQ ID NO: 2018055 - RNA, 19 nt, Artificial Sequence
  Description of Artificial Sequence: Synthetic oligonucleotide
  Antisense strand to SEQ ID NO: 2018054
uuagaaacuauugaguccc

SEQ ID NO: 2018056 - RNA, 19 nt, Artificial Sequence
  Description of Artificial Sequence: Synthetic oligonucleotide
  Sense strand starting at position 858 of SEQ ID NO: 1881100
auauaaacucucggucaga

SEQ ID NO: 2018057 - RNA, 19 nt, Artificial Sequence
  Description of Artificial Sequence: Synthetic oligonucleotide
  Antisense strand to SEQ ID NO: 2018056
ucugaccgagaguuuauau

SEQ ID NO: 2018058 - RNA, 19 nt, Artificial Sequence
  Description of Artificial Sequence: Synthetic oligonucleotide
  Sense strand starting at position 859 of SEQ ID NO: 1881100
uauaaacucucggucagaa

SEQ ID NO: 2018059 - RNA, 19 nt, Artificial Sequence
  Description of Artificial Sequence: Synthetic oligonucleotide
  Antisense strand to SEQ ID NO: 2018058
uucugaccgagaguuuaua

SEQ ID NO: 2018060 - RNA, 19 nt, Artificial Sequence
  Description of Artificial Sequence: Synthetic oligonucleotide
  Sense strand starting at position 861 of SEQ ID NO: 1881100
uaaacucucggucagaacu

SEQ ID NO: 2018061 - RNA, 19 nt, Artificial Sequence
  Description of Artificial Sequence: Synthetic oligonucleotide
  Antisense strand to SEQ ID NO: 2018060
aguucugaccgagaguuua

SEQ ID NO: 2018062 - RNA, 19 nt, Artificial Sequence
  Description of Artificial Sequence: Synthetic oligonucleotide
  Sense strand starting at position 965 of SEQ ID NO: 1881100
auauaaucaccucggcaaa

SEQ ID NO: 2018063 - RNA, 19 nt, Artificial Sequence
  Description of Artificial Sequence: Synthetic oligonucleotide
  Antisense strand to SEQ ID NO: 2018062
uuugccgaggugauuauau

SEQ ID NO: 2018064 - RNA, 19 nt, Artificial Sequence
  Description of Artificial Sequence: Synthetic oligonucleotide
  Sense strand starting at position 967 of SEQ ID NO: 1881100
auaaucaccucggcaaaua

SEQ ID NO: 2018065 - RNA, 19 nt, Artificial Sequence
  Description of Artificial Sequence: Synthetic oligonucleotide
  Antisense strand to SEQ ID NO: 2018064
uauuugccgaggugauuau

SEQ ID NO: 2018066 - RNA, 19 nt, Artificial Sequence
  Description of Artificial Sequence: Synthetic oligonucleotide
  Sense strand starting at position 1047 of SEQ ID NO: 1881100
ugcacaacugaaugaaauu

SEQ ID NO: 2018067 - RNA, 19 nt, Artificial Sequence
  Description of Artificial Sequence: Synthetic oligonucleotide
  Antisense strand to SEQ ID NO: 2018066
aauuucauucaguugugca

SEQ ID NO: 2018068 - RNA, 19 nt, Artificial Sequence
  Description of Artificial Sequence: Synthetic oligonucleotide
  Sense strand starting at position 1127 of SEQ ID NO: 1881100
ugguaauggaucugcauac

SEQ ID NO: 2018069 - RNA, 19 nt, Artificial Sequence
  Description of Artificial Sequence: Synthetic oligonucleotide
  Antisense strand to SEQ ID NO: 2018068
guaugcagauccauuacca

SEQ ID NO: 2018070 - RNA, 19 nt, Artificial Sequence
  Description of Artificial Sequence: Synthetic oligonucleotide
  Sense strand starting at position 1128 of SEQ ID NO: 1881100
gguaauggaucugcauacu

SEQ ID NO: 2018071 - RNA, 19 nt, Artificial Sequence
  Description of Artificial Sequence: Synthetic oligonucleotide
  Antisense strand to SEQ ID NO: 2018070
aguaugcagauccauuacc

SEQ ID NO: 2018072 - RNA, 19 nt, Artificial Sequence
  Description of Artificial Sequence: Synthetic oligonucleotide
  Sense strand starting at position 1202 of SEQ ID NO: 1881100
gcacaugucuauuuguaau

SEQ ID NO: 2018073 - RNA, 19 nt, Artificial Sequence
  Description of Artificial Sequence: Synthetic oligonucleotide
  Antisense strand to SEQ ID NO: 2018072
auuacaaauagacaugugc

SEQ ID NO: 2018074 - RNA, 19 nt, Artificial Sequence
  Description of Artificial Sequence: Synthetic oligonucleotide
  Sense strand starting at position 1208 of SEQ ID NO: 1881100
gucuauuuguaaucauacg

SEQ ID NO: 2018075 - RNA, 19 nt, Artificial Sequence
  Description of Artificial Sequence: Synthetic oligonucleotide
  Antisense strand to SEQ ID NO: 2018074
cguaugauuacaaauagac

SEQ ID NO: 2018076 - RNA, 19 nt, Artificial Sequence
  Description of Artificial Sequence: Synthetic oligonucleotide
  Sense strand starting at position 1293 of SEQ ID NO: 1881100
uguacauaugcaugacaug

SEQ ID NO: 2018077 - RNA, 19 nt, Artificial Sequence
  Description of Artificial Sequence: Synthetic oligonucleotide
  Antisense strand to SEQ ID NO: 2018076
caugucaugcauauguaca

SEQ ID NO: 2018078 - RNA, 19 nt, Artificial Sequence
  Description of Artificial Sequence: Synthetic oligonucleotide
  Sense strand starting at position 1645 of SEQ ID NO: 1881100
gaaagauugugacucccaa

SEQ ID NO: 2018079 - RNA, 19 nt, Artificial Sequence
  Description of Artificial Sequence: Synthetic oligonucleotide
  Antisense strand to SEQ ID NO: 2018078
uugggagucacaaucuuuc

SEQ ID NO: 2018080 - RNA, 19 nt, Artificial Sequence
  Description of Artificial Sequence: Synthetic oligonucleotide
  Sense strand starting at position 1683 of SEQ ID NO: 1881100
acaugaaauggguguauac

SEQ ID NO: 2018081 - RNA, 19 nt, Artificial Sequence
  Description of Artificial Sequence: Synthetic oligonucleotide
  Antisense strand to SEQ ID NO: 2018080
guauacacccauuucaugu

SEQ ID NO: 2018082 - RNA, 19 nt, Artificial Sequence
  Description of Artificial Sequence: Synthetic oligonucleotide
  Sense strand starting at position 1767 of SEQ ID NO: 1881100
gaacaauuccauugaguag

SEQ ID NO: 2018083 - RNA, 19 nt, Artificial Sequence
  Description of Artificial Sequence: Synthetic oligonucleotide
  Antisense strand to SEQ ID NO: 2018082
cuacucaauggaauuguuc

SEQ ID NO: 2018084 - RNA, 19 nt, Artificial Sequence
  Description of Artificial Sequence: Synthetic oligonucleotide
  Sense strand starting at position 1782 of SEQ ID NO: 1881100
guaguuucuguugcacgua

SEQ ID NO: 2018085 - RNA, 19 nt, Artificial Sequence
  Description of Artificial Sequence: Synthetic oligonucleotide
  Antisense strand to SEQ ID NO: 2018084
uacgugcaacagaaacuac

SEQ ID NO: 2018086 - RNA, 19 nt, Artificial Sequence
  Description of Artificial Sequence: Synthetic oligonucleotide
  Sense strand starting at position 2354 of SEQ ID NO: 1881100
acucgucucaaaggaagau

SEQ ID NO: 2018087 - RNA, 19 nt, Artificial Sequence
  Description of Artificial Sequence: Synthetic oligonucleotide
  Antisense strand to SEQ ID NO: 2018086
aucuuccuuugagacgagu

SEQ ID NO: 2018088 - RNA, 19 nt, Artificial Sequence
  Description of Artificial Sequence: Synthetic oligonucleotide
  Sense strand starting at position 2512 of SEQ ID NO: 1881100
accuuaccucuggaaaugu

SEQ ID NO: 2018089 - RNA, 19 nt, Artificial Sequence
  Description of Artificial Sequence: Synthetic oligonucleotide
  Antisense strand to SEQ ID NO: 2018088
acauuuccagagguaaggu

SEQ ID NO: 2018090 - RNA, 19 nt, Artificial Sequence
  Description of Artificial Sequence: Synthetic oligonucleotide
  Sense strand starting at position 2559 of SEQ ID NO: 1881100
cugacuuuaguaugagaac

SEQ ID NO: 2018091 - RNA, 19 nt, Artificial Sequence
  Description of Artificial Sequence: Synthetic oligonucleotide
  Antisense strand to SEQ ID NO: 2018090
guucucauacuaaagucag

SEQ ID NO: 2018092 - RNA, 19 nt, Artificial Sequence
  Description of Artificial Sequence: Synthetic oligonucleotide
  Sense strand starting at position 2685 of SEQ ID NO: 1881100
gcuucuuucccuuaaagag

SEQ ID NO: 2018093 - RNA, 19 nt, Artificial Sequence
  Description of Artificial Sequence: Synthetic oligonucleotide
  Antisense strand to SEQ ID NO: 2018092
cucuuuaagggaaagaagc

SEQ ID NO: 2018094 - RNA, 19 nt, Artificial Sequence
  Description of Artificial Sequence: Synthetic oligonucleotide
  Sense strand starting at position 2700 of SEQ ID NO: 1881100
agagaauaauuugguauac

SEQ ID NO: 2018095 - RNA, 19 nt, Artificial Sequence
  Description of Artificial Sequence: Synthetic oligonucleotide
  Antisense strand to SEQ ID NO: 2018094
guauaccaaauuauucucu

SEQ ID NO: 2018096 - RNA, 19 nt, Artificial Sequence
  Description of Artificial Sequence: Synthetic oligonucleotide
  Sense strand starting at position 2702 of SEQ ID NO: 1881100
agaauaauuugguauaccu

SEQ ID NO: 2018097 - RNA, 19 nt, Artificial Sequence
  Description of Artificial Sequence: Synthetic oligonucleotide
  Antisense strand to SEQ ID NO: 2018096
agguauaccaaauuauucu

SEQ ID NO: 2018098 - RNA, 19 nt, Artificial Sequence
  Description of Artificial Sequence: Synthetic oligonucleotide
  Sense strand starting at position 2812 of SEQ ID NO: 1881100
ucauuaccugcagaugagu

SEQ ID NO: 2018099 - RNA, 19 nt, Artificial Sequence
  Description of Artificial Sequence: Synthetic oligonucleotide
  Antisense strand to SEQ ID NO: 2018098
acucaucugcagguaauga

SEQ ID NO: 2018100 - RNA, 19 nt, Artificial Sequence
  Description of Artificial Sequence: Synthetic oligonucleotide
  Sense strand starting at position 2860 of SEQ ID NO: 1881100
cuaucauugcaucacgauu

SEQ ID NO: 2018101 - RNA, 19 nt, Artificial Sequence
  Description of Artificial Sequence: Synthetic oligonucleotide
  Antisense strand to SEQ ID NO: 2018100
aaucgugaugcaaugauag

SEQ ID NO: 2018102 - RNA, 19 nt, Artificial Sequence
  Description of Artificial Sequence: Synthetic oligonucleotide
  Sense strand starting at position 2927 of SEQ ID NO: 1881100
ucagaaucuuauguagagu

SEQ ID NO: 2018103 - RNA, 19 nt, Artificial Sequence
  Description of Artificial Sequence: Synthetic oligonucleotide
  Antisense strand to SEQ ID NO: 2018102
acucuacauaagauucuga

SEQ ID NO: 2018104 - RNA, 19 nt, Artificial Sequence
  Description of Artificial Sequence: Synthetic oligonucleotide
  Sense strand starting at position 3003 of SEQ ID NO: 1881100
accagagauugauuaugca

SEQ ID NO: 2018105 - RNA, 19 nt, Artificial Sequence
  Description of Artificial Sequence: Synthetic oligonucleotide
  Antisense strand to SEQ ID NO: 2018104
ugcauaaucaaucucuggu

SEQ ID NO: 2018106 - RNA, 19 nt, Artificial Sequence
  Description of Artificial Sequence: Synthetic oligonucleotide
  Sense strand starting at position 3083 of SEQ ID NO: 1881100
gagaauguccggcagaaua

SEQ ID NO: 2018107 - RNA, 19 nt, Artificial Sequence
  Description of Artificial Sequence: Synthetic oligonucleotide
  Antisense strand to SEQ ID NO: 2018106
uauucugccggacauucuc

SEQ ID NO: 2018108 - RNA, 19 nt, Artificial Sequence
  Description of Artificial Sequence: Synthetic oligonucleotide
  Sense strand starting at position 3085 of SEQ ID NO: 1881100
gaauguccggcagaauaaa

SEQ ID NO: 2018109 - RNA, 19 nt, Artificial Sequence
  Description of Artificial Sequence: Synthetic oligonucleotide
  Antisense strand to SEQ ID NO: 2018108
uuuauucugccggacauuc

SEQ ID NO: 2018110 - RNA, 19 nt, Artificial Sequence
  Description of Artificial Sequence: Synthetic oligonucleotide
  Sense strand starting at position 3315 of SEQ ID NO: 1881100
agaugugucuaaccaaaua

SEQ ID NO: 2018111 - RNA, 19 nt, Artificial Sequence
  Description of Artificial Sequence: Synthetic oligonucleotide
  Antisense strand to SEQ ID NO: 2018110
uauuugguuagacacaucu

SEQ ID NO: 2018112 - RNA, 19 nt, Artificial Sequence
  Description of Artificial Sequence: Synthetic oligonucleotide
  Sense strand starting at position 3723 of SEQ ID NO: 1881100
uucugaaaggucuaaaguu

SEQ ID NO: 2018113 - RNA, 19 nt, Artificial Sequence
  Description of Artificial Sequence: Synthetic oligonucleotide
  Antisense strand to SEQ ID NO: 2018112
aacuuuagaccuuucagaa

SEQ ID NO: 2018114 - RNA, 19 nt, Artificial Sequence
  Description of Artificial Sequence: Synthetic oligonucleotide
  Sense strand starting at position 3794 of SEQ ID NO: 1881100
auagaaagauacuaaggaa

SEQ ID NO: 2018115 - RNA, 19 nt, Artificial Sequence
  Description of Artificial Sequence: Synthetic oligonucleotide
  Antisense strand to SEQ ID NO: 2018114
uuccuuaguaucuuucuau

SEQ ID NO: 2018116 - RNA, 19 nt, Artificial Sequence
  Description of Artificial Sequence: Synthetic oligonucleotide
  Sense strand starting at position 3809 of SEQ ID NO: 1881100
ggaaguaaaggauguuauu

SEQ ID NO: 2018117 - RNA, 19 nt, Artificial Sequence
  Description of Artificial Sequence: Synthetic oligonucleotide
  Antisense strand to SEQ ID NO: 2018116
aauaacauccuuuacuucc

SEQ ID NO: 2018118 - RNA, 19 nt, Artificial Sequence
  Description of Artificial Sequence: Synthetic oligonucleotide
  Sense strand starting at position 3870 of SEQ ID NO: 1881100
aguuuaagacaaugucaca

SEQ ID NO: 2018119 - RNA, 19 nt, Artificial Sequence
  Description of Artificial Sequence: Synthetic oligonucleotide
  Antisense strand to SEQ ID NO: 2018118
ugugacauugucuuaaacu

SEQ ID NO: 2018120 - RNA, 19 nt, Artificial Sequence
  Description of Artificial Sequence: Synthetic oligonucleotide
  Sense strand starting at position 3887 of SEQ ID NO: 1881100
caccgugaggucuaaagaa

SEQ ID NO: 2018121 - RNA, 19 nt, Artificial Sequence
  Description of Artificial Sequence: Synthetic oligonucleotide
  Antisense strand to SEQ ID NO: 2018120
uucuuuagaccucacggug

SEQ ID NO: 2018122 - RNA, 19 nt, Artificial Sequence
  Description of Artificial Sequence: Synthetic oligonucleotide
  Sense strand starting at position 3956 of SEQ ID NO: 1881100
gaagaucuguauuagauuu

SEQ ID NO: 2018123 - RNA, 19 nt, Artificial Sequence
  Description of Artificial Sequence: Synthetic oligonucleotide
  Antisense strand to SEQ ID NO: 2018122
aaaucuaauacagaucuuc

SEQ ID NO: 2018124 - RNA, 19 nt, Artificial Sequence
  Description of Artificial Sequence: Synthetic oligonucleotide
  Sense strand starting at position 83 of SEQ ID NO: 1881101
cagggacaauuaucuaagu

SEQ ID NO: 2018125 - RNA, 19 nt, Artificial Sequence
  Description of Artificial Sequence: Synthetic oligonucleotide
  Antisense strand to SEQ ID NO: 2018124
acuuagauaauugucccug

SEQ ID NO: 2018126 - RNA, 19 nt, Artificial Sequence
  Description of Artificial Sequence: Synthetic oligonucleotide
  Sense strand starting at position 84 of SEQ ID NO: 1881101
agggacaauuaucuaaguu

SEQ ID NO: 2018127 - RNA, 19 nt, Artificial Sequence
  Description of Artificial Sequence: Synthetic oligonucleotide
  Antisense strand to SEQ ID NO: 2018126
aacuuagauaauugucccu

SEQ ID NO: 2018128 - RNA, 19 nt, Artificial Sequence
  Description of Artificial Sequence: Synthetic oligonucleotide
  Sense strand starting at position 366 of SEQ ID NO: 1881101
cuaguuaauaauggugagu

SEQ ID NO: 2018129 - RNA, 19 nt, Artificial Sequence
  Description of Artificial Sequence: Synthetic oligonucleotide
  Antisense strand to SEQ ID NO: 2018128
acucaccauuauuaacuag

SEQ ID NO: 2018130 - RNA, 19 nt, Artificial Sequence
  Description of Artificial Sequence: Synthetic oligonucleotide
  Sense strand starting at position 380 of SEQ ID NO: 1881101
ugagucuccuagguuaaga

SEQ ID NO: 2018131 - RNA, 19 nt, Artificial Sequence
  Description of Artificial Sequence: Synthetic oligonucleotide
  Antisense strand to SEQ ID NO: 2018130
ucuuaaccuaggagacuca

SEQ ID NO: 2018132 - RNA, 19 nt, Artificial Sequence
  Description of Artificial Sequence: Synthetic oligonucleotide
  Sense strand starting at position 382 of SEQ ID NO: 1881101
agucuccuagguuaagaau

SEQ ID NO: 2018133 - RNA, 19 nt, Artificial Sequence
  Description of Artificial Sequence: Synthetic oligonucleotide
  Antisense strand to SEQ ID NO: 2018132
auucuuaaccuaggagacu

SEQ ID NO: 2018134 - RNA, 19 nt, Artificial Sequence
  Description of Artificial Sequence: Synthetic oligonucleotide
  Sense strand starting at position 562 of SEQ ID NO: 1881101
augacaaagcuauguuaca

SEQ ID NO: 2018135 - RNA, 19 nt, Artificial Sequence
  Description of Artificial Sequence: Synthetic oligonucleotide
  Antisense strand to SEQ ID NO: 2018134
uguaacauagcuuugucau

SEQ ID NO: 2018136 - RNA, 19 nt, Artificial Sequence
  Description of Artificial Sequence: Synthetic oligonucleotide
  Sense strand starting at position 632 of SEQ ID NO: 1881101
agucucucauagguagaua

SEQ ID NO: 2018137 - RNA, 19 nt, Artificial Sequence
  Description of Artificial Sequence: Synthetic oligonucleotide
  Antisense strand to SEQ ID NO: 2018136
uaucuaccuaugagagacu

SEQ ID NO: 2018138 - RNA, 19 nt, Artificial Sequence
  Description of Artificial Sequence: Synthetic oligonucleotide
  Sense strand starting at position 644 of SEQ ID NO: 1881101
guagauauugcauaauauc

SEQ ID NO: 2018139 - RNA, 19 nt, Artificial Sequence
  Description of Artificial Sequence: Synthetic oligonucleotide
  Antisense strand to SEQ ID NO: 2018138
gauauuaugcaauaucuac

SEQ ID NO: 2018140 - RNA, 19 nt, Artificial Sequence
  Description of Artificial Sequence: Synthetic oligonucleotide
  Sense strand starting at position 653 of SEQ ID NO: 1881101
gcauaauaucuacacguau

SEQ ID NO: 2018141 - RNA, 19 nt, Artificial Sequence
  Description of Artificial Sequence: Synthetic oligonucleotide
  Antisense strand to SEQ ID NO: 2018140
auacguguagauauuaugc

SEQ ID NO: 2018142 - RNA, 19 nt, Artificial Sequence
  Description of Artificial Sequence: Synthetic oligonucleotide
  Sense strand starting at position 914 of SEQ ID NO: 1881101
aguuauuucuaugaggauu

SEQ ID NO: 2018143 - RNA, 19 nt, Artificial Sequence
  Description of Artificial Sequence: Synthetic oligonucleotide
  Antisense strand to SEQ ID NO: 2018142
aauccucauagaaauaacu

SEQ ID NO: 2018144 - RNA, 19 nt, Artificial Sequence
  Description of Artificial Sequence: Synthetic oligonucleotide
  Sense strand starting at position 922 of SEQ ID NO: 1881101
cuaugaggauucucaucua

SEQ ID NO: 2018145 - RNA, 19 nt, Artificial Sequence
  Description of Artificial Sequence: Synthetic oligonucleotide
  Antisense strand to SEQ ID NO: 2018144
uagaugagaauccucauag

SEQ ID NO: 2018146 - RNA, 19 nt, Artificial Sequence
  Description of Artificial Sequence: Synthetic oligonucleotide
  Sense strand starting at position 925 of SEQ ID NO: 1881101
ugaggauucucaucuauca

SEQ ID NO: 2018147 - RNA, 19 nt, Artificial Sequence
  Description of Artificial Sequence: Synthetic oligonucleotide
  Antisense strand to SEQ ID NO: 2018146
ugauagaugagaauccuca

SEQ ID NO: 2018148 - RNA, 19 nt, Artificial Sequence
  Description of Artificial Sequence: Synthetic oligonucleotide
  Sense strand starting at position 971 of SEQ ID NO: 1881101
gguguaguaaauuauuaga

SEQ ID NO: 2018149 - RNA, 19 nt, Artificial Sequence
  Description of Artificial Sequence: Synthetic oligonucleotide
  Antisense strand to SEQ ID NO: 2018148
ucuaauaauuuacuacacc

SEQ ID NO: 2018150 - RNA, 19 nt, Artificial Sequence
  Description of Artificial Sequence: Synthetic oligonucleotide
  Sense strand starting at position 1378 of SEQ ID NO: 1881101
guuaucacuaucgggacaa

SEQ ID NO: 2018151 - RNA, 19 nt, Artificial Sequence
  Description of Artificial Sequence: Synthetic oligonucleotide
  Antisense strand to SEQ ID NO: 2018150
uugucccgauagugauaac

SEQ ID NO: 2018152 - RNA, 19 nt, Artificial Sequence
  Description of Artificial Sequence: Synthetic oligonucleotide
  Sense strand starting at position 1429 of SEQ ID NO: 1881101
gugagugaagucuauugau

SEQ ID NO: 2018153 - RNA, 19 nt, Artificial Sequence
  Description of Artificial Sequence: Synthetic oligonucleotide
  Antisense strand to SEQ ID NO: 2018152
aucaauagacuucacucac

SEQ ID NO: 2018154 - RNA, 19 nt, Artificial Sequence
  Description of Artificial Sequence: Synthetic oligonucleotide
  Sense strand starting at position 1482 of SEQ ID NO: 1881101
cuaccuugauuaguugaca

SEQ ID NO: 2018155 - RNA, 19 nt, Artificial Sequence
  Description of Artificial Sequence: Synthetic oligonucleotide
  Antisense strand to SEQ ID NO: 2018154
ugucaacuaaucaagguag

SEQ ID NO: 2018156 - RNA, 19 nt, Artificial Sequence
  Description of Artificial Sequence: Synthetic oligonucleotide
  Sense strand starting at position 1494 of SEQ ID NO: 1881101
guugacaagcuuugaaaga

SEQ ID NO: 2018157 - RNA, 19 nt, Artificial Sequence
  Description of Artificial Sequence: Synthetic oligonucleotide
  Antisense strand to SEQ ID NO: 2018156
ucuuucaaagcuugucaac

SEQ ID NO: 2018158 - RNA, 19 nt, Artificial Sequence
  Description of Artificial Sequence: Synthetic oligonucleotide
  Sense strand starting at position 1557 of SEQ ID NO: 1881101
cccuccuauguguauuaau

SEQ ID NO: 2018159 - RNA, 19 nt, Artificial Sequence
  Description of Artificial Sequence: Synthetic oligonucleotide
  Antisense strand to SEQ ID NO: 2018158
auuaauacacauaggaggg

SEQ ID NO: 2018160 - RNA, 19 nt, Artificial Sequence
  Description of Artificial Sequence: Synthetic oligonucleotide
  Sense strand starting at position 1780 of SEQ ID NO: 1881101
uugguuaaauguguauaga

SEQ ID NO: 2018161 - RNA, 19 nt, Artificial Sequence
  Description of Artificial Sequence: Synthetic oligonucleotide
  Antisense strand to SEQ ID NO: 2018160
ucuauacacauuuaaccaa

SEQ ID NO: 2018162 - RNA, 19 nt, Artificial Sequence
  Description of Artificial Sequence: Synthetic oligonucleotide
  Sense strand starting at position 1781 of SEQ ID NO: 1881101
ugguuaaauguguauagaa

SEQ ID NO: 2018163 - RNA, 19 nt, Artificial Sequence
  Description of Artificial Sequence: Synthetic oligonucleotide
  Antisense strand to SEQ ID NO: 2018162
uucuauacacauuuaacca

SEQ ID NO: 2018164 - RNA, 19 nt, Artificial Sequence
  Description of Artificial Sequence: Synthetic oligonucleotide
  Sense strand starting at position 1790 of SEQ ID NO: 1881101
guguauagaaauggaggua

SEQ ID NO: 2018165 - RNA, 19 nt, Artificial Sequence
  Description of Artificial Sequence: Synthetic oligonucleotide
  Antisense strand to SEQ ID NO: 2018164
uaccuccauuucuauacac

SEQ ID NO: 2018166 - RNA, 19 nt, Artificial Sequence
  Description of Artificial Sequence: Synthetic oligonucleotide
  Sense strand starting at position 1883 of SEQ ID NO: 1881101
agcaauucugaauguuaau

SEQ ID NO: 2018167 - RNA, 19 nt, Artificial Sequence
  Description of Artificial Sequence: Synthetic oligonucleotide
  Antisense strand to SEQ ID NO: 2018166
auuaacauucagaauugcu

SEQ ID NO: 2018168 - RNA, 19 nt, Artificial Sequence
  Description of Artificial Sequence: Synthetic oligonucleotide
  Sense strand starting at position 2371 of SEQ ID NO: 1881101
uccugaggccucuagucau

SEQ ID NO: 2018169 - RNA, 19 nt, Artificial Sequence
  Description of Artificial Sequence: Synthetic oligonucleotide
  Antisense strand to SEQ ID NO: 2018168
augacuagaggccucagga

SEQ ID NO: 2018170 - RNA, 19 nt, Artificial Sequence
  Description of Artificial Sequence: Synthetic oligonucleotide
  Sense strand starting at position 2381 of SEQ ID NO: 1881101
ucuagucaugcugaacuau

SEQ ID NO: 2018171 - RNA, 19 nt, Artificial Sequence
  Description of Artificial Sequence: Synthetic oligonucleotide
  Antisense strand to SEQ ID NO: 2018170
auaguucagcaugacuaga

SEQ ID NO: 2018172 - RNA, 19 nt, Artificial Sequence
  Description of Artificial Sequence: Synthetic oligonucleotide
  Sense strand starting at position 2518 of SEQ ID NO: 1881101
gguuaaaguugguugaaca

SEQ ID NO: 2018173 - RNA, 19 nt, Artificial Sequence
  Description of Artificial Sequence: Synthetic oligonucleotide
  Antisense strand to SEQ ID NO: 2018172
uguucaaccaacuuuaacc

SEQ ID NO: 2018174 - RNA, 19 nt, Artificial Sequence
  Description of Artificial Sequence: Synthetic oligonucleotide
  Sense strand starting at position 2519 of SEQ ID NO: 1881101
guuaaaguugguugaacag

SEQ ID NO: 2018175 - RNA, 19 nt, Artificial Sequence
  Description of Artificial Sequence: Synthetic oligonucleotide
  Antisense strand to SEQ ID NO: 2018174
cuguucaaccaacuuuaac

SEQ ID NO: 2018176 - RNA, 19 nt, Artificial Sequence
  Description of Artificial Sequence: Synthetic oligonucleotide
  Sense strand starting at position 2591 of SEQ ID NO: 1881101
gccuuauaagucuacaaag

SEQ ID NO: 2018177 - RNA, 19 nt, Artificial Sequence
  Description of Artificial Sequence: Synthetic oligonucleotide
  Antisense strand to SEQ ID NO: 2018176
cuuuguagacuuauaaggc

SEQ ID NO: 2018178 - RNA, 19 nt, Artificial Sequence
  Description of Artificial Sequence: Synthetic oligonucleotide
  Sense strand starting at position 2770 of SEQ ID NO: 1881101
gggaguuguggucaaggac

SEQ ID NO: 2018179 - RNA, 19 nt, Artificial Sequence
  Description of Artificial Sequence: Synthetic oligonucleotide
  Antisense strand to SEQ ID NO: 2018178
guccuugaccacaacuccc

SEQ ID NO: 2018180 - RNA, 19 nt, Artificial Sequence
  Description of Artificial Sequence: Synthetic oligonucleotide
  Sense strand starting at position 2939 of SEQ ID NO: 1881101
agaguauuugcccgacugu

SEQ ID NO: 2018181 - RNA, 19 nt, Artificial Sequence
  Description of Artificial Sequence: Synthetic oligonucleotide
  Antisense strand to SEQ ID NO: 2018180
acagucgggcaaauacucu

SEQ ID NO: 2018182 - RNA, 19 nt, Artificial Sequence
  Description of Artificial Sequence: Synthetic oligonucleotide
  Sense strand starting at position 2940 of SEQ ID NO: 1881101
gaguauuugcccgacugug

SEQ ID NO: 2018183 - RNA, 19 nt, Artificial Sequence
  Description of Artificial Sequence: Synthetic oligonucleotide
  Antisense strand to SEQ ID NO: 2018182
cacagucgggcaaauacuc

SEQ ID NO: 2018184 - RNA, 19 nt, Artificial Sequence
  Description of Artificial Sequence: Synthetic oligonucleotide
  Sense strand starting at position 3014 of SEQ ID NO: 1881101
ccucaaagucuguacaucu

SEQ ID NO: 2018185 - RNA, 19 nt, Artificial Sequence
  Description of Artificial Sequence: Synthetic oligonucleotide
  Antisense strand to SEQ ID NO: 2018184
agauguacagacuuugagg

SEQ ID NO: 2018186 - RNA, 19 nt, Artificial Sequence
  Description of Artificial Sequence: Synthetic oligonucleotide
  Sense strand starting at position 3095 of SEQ ID NO: 1881101
acaugacucuagcuaaaug

SEQ ID NO: 2018187 - RNA, 19 nt, Artificial Sequence
  Description of Artificial Sequence: Synthetic oligonucleotide
  Antisense strand to SEQ ID NO: 2018186
cauuuagcuagagucaugu

SEQ ID NO: 2018188 - RNA, 19 nt, Artificial Sequence
  Description of Artificial Sequence: Synthetic oligonucleotide
  Sense strand starting at position 3223 of SEQ ID NO: 1881101
ucugauuuguugcuuuauu

SEQ ID NO: 2018189 - RNA, 19 nt, Artificial Sequence
  Description of Artificial Sequence: Synthetic oligonucleotide
  Antisense strand to SEQ ID NO: 2018188
aauaaagcaacaaaucaga

SEQ ID NO: 2018190 - RNA, 19 nt, Artificial Sequence
  Description of Artificial Sequence: Synthetic oligonucleotide
  Sense strand starting at position 3224 of SEQ ID NO: 1881101
cugauuuguugcuuuauuc

SEQ ID NO: 2018191 - RNA, 19 nt, Artificial Sequence
  Description of Artificial Sequence: Synthetic oligonucleotide
  Antisense strand to SEQ ID NO: 2018190
gaauaaagcaacaaaucag

SEQ ID NO: 2018192 - RNA, 19 nt, Artificial Sequence
  Description of Artificial Sequence: Synthetic oligonucleotide
  Sense strand starting at position 3445 of SEQ ID NO: 1881101
aagugucaggagcaaguua

SEQ ID NO: 2018193 - RNA, 19 nt, Artificial Sequence
  Description of Artificial Sequence: Synthetic oligonucleotide
  Antisense strand to SEQ ID NO: 2018192
uaacuugcuccugacacuu

SEQ ID NO: 2018194 - RNA, 19 nt, Artificial Sequence
  Description of Artificial Sequence: Synthetic oligonucleotide
  Sense strand starting at position 3621 of SEQ ID NO: 1881101
cccugagcuccagaagcaa

SEQ ID NO: 2018195 - RNA, 19 nt, Artificial Sequence
  Description of Artificial Sequence: Synthetic oligonucleotide
  Antisense strand to SEQ ID NO: 2018194
uugcuucuggagcucaggg

SEQ ID NO: 2018196 - RNA, 19 nt, Artificial Sequence
  Description of Artificial Sequence: Synthetic oligonucleotide
  Sense strand starting at position 3857 of SEQ ID NO: 1881101
aaagaagcuguuuaguaca

SEQ ID NO: 2018197 - RNA, 19 nt, Artificial Sequence
  Description of Artificial Sequence: Synthetic oligonucleotide
  Antisense strand to SEQ ID NO: 2018196
uguacuaaacagcuucuuu

SEQ ID NO: 2018198 - RNA, 19 nt, Artificial Sequence
  Description of Artificial Sequence: Synthetic oligonucleotide
  Sense strand starting at position 3894 of SEQ ID NO: 1881101
acuccacugcuauaagaug

SEQ ID NO: 2018199 - RNA, 19 nt, Artificial Sequence
  Description of Artificial Sequence: Synthetic oligonucleotide
  Antisense strand to SEQ ID NO: 2018198
caucuuauagcaguggagu

SEQ ID NO: 2018200 - RNA, 19 nt, Artificial Sequence
  Description of Artificial Sequence: Synthetic oligonucleotide
  Sense strand starting at position 3906 of SEQ ID NO: 1881101
uaagaugucuucccaguag

SEQ ID NO: 2018201 - RNA, 19 nt, Artificial Sequence
  Description of Artificial Sequence: Synthetic oligonucleotide
  Antisense strand to SEQ ID NO: 2018200
cuacugggaagacaucuua

SEQ ID NO: 2018202 - RNA, 19 nt, Artificial Sequence
  Description of Artificial Sequence: Synthetic oligonucleotide
  Sense strand starting at position 3915 of SEQ ID NO: 1881101
uucccaguagacugauuau

SEQ ID NO: 2018203 - RNA, 19 nt, Artificial Sequence
  Description of Artificial Sequence: Synthetic oligonucleotide
  Antisense strand to SEQ ID NO: 2018202
auaaucagucuacugggaa

SEQ ID NO: 2018204 - RNA, 19 nt, Artificial Sequence
  Description of Artificial Sequence: Synthetic oligonucleotide
  Sense strand starting at position 35 of SEQ ID NO: 1881102
agauuaaccugauucugca

SEQ ID NO: 2018205 - RNA, 19 nt, Artificial Sequence
  Description of Artificial Sequence: Synthetic oligonucleotide
  Antisense strand to SEQ ID NO: 2018204
ugcagaaucagguuaaucu

SEQ ID NO: 2018206 - RNA, 19 nt, Artificial Sequence
  Description of Artificial Sequence: Synthetic oligonucleotide
  Sense strand starting at position 44 of SEQ ID NO: 1881102
ugauucugcaugcaggaau

SEQ ID NO: 2018207 - RNA, 19 nt, Artificial Sequence
  Description of Artificial Sequence: Synthetic oligonucleotide
  Antisense strand to SEQ ID NO: 2018206
auuccugcaugcagaauca

SEQ ID NO: 2018208 - RNA, 19 nt, Artificial Sequence
  Description of Artificial Sequence: Synthetic oligonucleotide
  Sense strand starting at position 47 of SEQ ID NO: 1881102
uucugcaugcaggaauaaa

SEQ ID NO: 2018209 - RNA, 19 nt, Artificial Sequence
  Description of Artificial Sequence: Synthetic oligonucleotide
  Antisense strand to SEQ ID NO: 2018208
uuuauuccugcaugcagaa

SEQ ID NO: 2018210 - RNA, 19 nt, Artificial Sequence
  Description of Artificial Sequence: Synthetic oligonucleotide
  Sense strand starting at position 184 of SEQ ID NO: 1881102
cucagaggauuuggaauau

SEQ ID NO: 2018211 - RNA, 19 nt, Artificial Sequence
  Description of Artificial Sequence: Synthetic oligonucleotide
  Antisense strand to SEQ ID NO: 2018210
auauuccaaauccucugag

SEQ ID NO: 2018212 - RNA, 19 nt, Artificial Sequence
  Description of Artificial Sequence: Synthetic oligonucleotide
  Sense strand starting at position 394 of SEQ ID NO: 1881102
uggcuucuacuugauacaa

SEQ ID NO: 2018213 - RNA, 19 nt, Artificial Sequence
  Description of Artificial Sequence: Synthetic oligonucleotide
  Antisense strand to SEQ ID NO: 2018212
uuguaucaaguagaagcca

SEQ ID NO: 2018214 - RNA, 19 nt, Artificial Sequence
  Description of Artificial Sequence: Synthetic oligonucleotide
  Sense strand starting at position 596 of SEQ ID NO: 1881102
auggauuucugcugaauuu

SEQ ID NO: 2018215 - RNA, 19 nt, Artificial Sequence
  Description of Artificial Sequence: Synthetic oligonucleotide
  Antisense strand to SEQ ID NO: 2018214
aaauucagcagaaauccau

SEQ ID NO: 2018216 - RNA, 19 nt, Artificial Sequence
  Description of Artificial Sequence: Synthetic oligonucleotide
  Sense strand starting at position 624 of SEQ ID NO: 1881102
ugagaagcacuguauauac

SEQ ID NO: 2018217 - RNA, 19 nt, Artificial Sequence
  Description of Artificial Sequence: Synthetic oligonucleotide
  Antisense strand to SEQ ID NO: 2018216
guauauacagugcuucuca

SEQ ID NO: 2018218 - RNA, 19 nt, Artificial Sequence
  Description of Artificial Sequence: Synthetic oligonucleotide
  Sense strand starting at position 713 of SEQ ID NO: 1881102
gagaaagaauuggaagaga

SEQ ID NO: 2018219 - RNA, 19 nt, Artificial Sequence
  Description of Artificial Sequence: Synthetic oligonucleotide
  Antisense strand to SEQ ID NO: 2018218
ucucuuccaauucuuucuc

SEQ ID NO: 2018220 - RNA, 19 nt, Artificial Sequence
  Description of Artificial Sequence: Synthetic oligonucleotide
  Sense strand starting at position 966 of SEQ ID NO: 1881102
gcggcuuuagcucuuguau

SEQ ID NO: 2018221 - RNA, 19 nt, Artificial Sequence
  Description of Artificial Sequence: Synthetic oligonucleotide
  Antisense strand to SEQ ID NO: 2018220
auacaagagcuaaagccgc

SEQ ID NO: 2018222 - RNA, 19 nt, Artificial Sequence
  Description of Artificial Sequence: Synthetic oligonucleotide
  Sense strand starting at position 967 of SEQ ID NO: 1881102
cggcuuuagcucuuguauc

SEQ ID NO: 2018223 - RNA, 19 nt, Artificial Sequence
  Description of Artificial Sequence: Synthetic oligonucleotide
  Antisense strand to SEQ ID NO: 2018222
gauacaagagcuaaagccg

SEQ ID NO: 2018224 - RNA, 19 nt, Artificial Sequence
  Description of Artificial Sequence: Synthetic oligonucleotide
  Sense strand starting at position 1201 of SEQ ID NO: 1881102
aucacaaguacgugaagaa

SEQ ID NO: 2018225 - RNA, 19 nt, Artificial Sequence
  Description of Artificial Sequence: Synthetic oligonucleotide
  Antisense strand to SEQ ID NO: 2018224
uucuucacguacuugugau

SEQ ID NO: 2018226 - RNA, 19 nt, Artificial Sequence
  Description of Artificial Sequence: Synthetic oligonucleotide
  Sense strand starting at position 1263 of SEQ ID NO: 1881102
cuuggagcaguuuauaaau

SEQ ID NO: 2018227 - RNA, 19 nt, Artificial Sequence
  Description of Artificial Sequence: Synthetic oligonucleotide
  Antisense strand to SEQ ID NO: 2018226
auuuauaaacugcuccaag

SEQ ID NO: 2018228 - RNA, 19 nt, Artificial Sequence
  Description of Artificial Sequence: Synthetic oligonucleotide
  Sense strand starting at position 1389 of SEQ ID NO: 1881102
auggaaauuuguuacuuga

SEQ ID NO: 2018229 - RNA, 19 nt, Artificial Sequence
  Description of Artificial Sequence: Synthetic oligonucleotide
  Antisense strand to SEQ ID NO: 2018228
ucaaguaacaaauuuccau

SEQ ID NO: 2018230 - RNA, 19 nt, Artificial Sequence
  Description of Artificial Sequence: Synthetic oligonucleotide
  Sense strand starting at position 1397 of SEQ ID NO: 1881102
uuguuacuugagcauaaga

SEQ ID NO: 2018231 - RNA, 19 nt, Artificial Sequence
  Description of Artificial Sequence: Synthetic oligonucleotide
  Antisense strand to SEQ ID NO: 2018230
ucuuaugcucaaguaacaa

SEQ ID NO: 2018232 - RNA, 19 nt, Artificial Sequence
  Description of Artificial Sequence: Synthetic oligonucleotide
  Sense strand starting at position 1421 of SEQ ID NO: 1881102
uuugauaugccucaugaau

SEQ ID NO: 2018233 - RNA, 19 nt, Artificial Sequence
  Description of Artificial Sequence: Synthetic oligonucleotide
  Antisense strand to SEQ ID NO: 2018232
auucaugaggcauaucaaa

SEQ ID NO: 2018234 - RNA, 19 nt, Artificial Sequence
  Description of Artificial Sequence: Synthetic oligonucleotide
  Sense strand starting at position 1430 of SEQ ID NO: 1881102
ccucaugaauugguuaaga

SEQ ID NO: 2018235 - RNA, 19 nt, Artificial Sequence
  Description of Artificial Sequence: Synthetic oligonucleotide
  Antisense strand to SEQ ID NO: 2018234
ucuuaaccaauucaugagg

SEQ ID NO: 2018236 - RNA, 19 nt, Artificial Sequence
  Description of Artificial Sequence: Synthetic oligonucleotide
  Sense strand starting at position 1529 of SEQ ID NO: 1881102
uacuuaggguuucucugaa

SEQ ID NO: 2018237 - RNA, 19 nt, Artificial Sequence
  Description of Artificial Sequence: Synthetic oligonucleotide
  Antisense strand to SEQ ID NO: 2018236
uucagagaaacccuaagua

SEQ ID NO: 2018238 - RNA, 19 nt, Artificial Sequence
  Description of Artificial Sequence: Synthetic oligonucleotide
  Sense strand starting at position 1570 of SEQ ID NO: 1881102
gggacuaugucacucaaau

SEQ ID NO: 2018239 - RNA, 19 nt, Artificial Sequence
  Description of Artificial Sequence: Synthetic oligonucleotide
  Antisense strand to SEQ ID NO: 2018238
auuugagugacauaguccc

SEQ ID NO: 2018240 - RNA, 19 nt, Artificial Sequence
  Description of Artificial Sequence: Synthetic oligonucleotide
  Sense strand starting at position 1617 of SEQ ID NO: 1881102
uagacuuugcugcaaggga

SEQ ID NO: 2018241 - RNA, 19 nt, Artificial Sequence
  Description of Artificial Sequence: Synthetic oligonucleotide
  Antisense strand to SEQ ID NO: 2018240
ucccuugcagcaaagucua

SEQ ID NO: 2018242 - RNA, 19 nt, Artificial Sequence
  Description of Artificial Sequence: Synthetic oligonucleotide
  Sense strand starting at position 1666 of SEQ ID NO: 1881102
cuccauuguccagggaaag

SEQ ID NO: 2018243 - RNA, 19 nt, Artificial Sequence
  Description of Artificial Sequence: Synthetic oligonucleotide
  Antisense strand to SEQ ID NO: 2018242
cuuucccuggacaauggag

SEQ ID NO: 2018244 - RNA, 19 nt, Artificial Sequence
  Description of Artificial Sequence: Synthetic oligonucleotide
  Sense strand starting at position 1667 of SEQ ID NO: 1881102
uccauuguccagggaaaga

SEQ ID NO: 2018245 - RNA, 19 nt, Artificial Sequence
  Description of Artificial Sequence: Synthetic oligonucleotide
  Antisense strand to SEQ ID NO: 2018244
ucuuucccuggacaaugga

SEQ ID NO: 2018246 - RNA, 19 nt, Artificial Sequence
  Description of Artificial Sequence: Synthetic oligonucleotide
  Sense strand starting at position 1780 of SEQ ID NO: 1881102
gcaucauuggauggaaaca

SEQ ID NO: 2018247 - RNA, 19 nt, Artificial Sequence
  Description of Artificial Sequence: Synthetic oligonucleotide
  Antisense strand to SEQ ID NO: 2018246
uguuuccauccaaugaugc

SEQ ID NO: 2018248 - RNA, 19 nt, Artificial Sequence
  Description of Artificial Sequence: Synthetic oligonucleotide
  Sense strand starting at position 1848 of SEQ ID NO: 1881102
guaugaugauuauucccaa

SEQ ID NO: 2018249 - RNA, 19 nt, Artificial Sequence
  Description of Artificial Sequence: Synthetic oligonucleotide
  Antisense strand to SEQ ID NO: 2018248
uugggaauaaucaucauac

SEQ ID NO: 2018250 - RNA, 19 nt, Artificial Sequence
  Description of Artificial Sequence: Synthetic oligonucleotide
  Sense strand starting at position 1851 of SEQ ID NO: 1881102
ugaugauuauucccaaguu

SEQ ID NO: 2018251 - RNA, 19 nt, Artificial Sequence
  Description of Artificial Sequence: Synthetic oligonucleotide
  Antisense strand to SEQ ID NO: 2018250
aacuugggaauaaucauca

SEQ ID NO: 2018252 - RNA, 19 nt, Artificial Sequence
  Description of Artificial Sequence: Synthetic oligonucleotide
  Sense strand starting at position 2069 of SEQ ID NO: 1881102
uuucuuucuguguaauaga

SEQ ID NO: 2018253 - RNA, 19 nt, Artificial Sequence
  Description of Artificial Sequence: Synthetic oligonucleotide
  Antisense strand to SEQ ID NO: 2018252
ucuauuacacagaaagaaa

SEQ ID NO: 2018254 - RNA, 19 nt, Artificial Sequence
  Description of Artificial Sequence: Synthetic oligonucleotide
  Sense strand starting at position 2191 of SEQ ID NO: 1881102
gggauauacgcugaagcca

SEQ ID NO: 2018255 - RNA, 19 nt, Artificial Sequence
  Description of Artificial Sequence: Synthetic oligonucleotide
  Antisense strand to SEQ ID NO: 2018254
uggcuucagcguauauccc

SEQ ID NO: 2018256 - RNA, 19 nt, Artificial Sequence
  Description of Artificial Sequence: Synthetic oligonucleotide
  Sense strand starting at position 2354 of SEQ ID NO: 1881102
guacuagauguuuacucaa

SEQ ID NO: 2018257 - RNA, 19 nt, Artificial Sequence
  Description of Artificial Sequence: Synthetic oligonucleotide
  Antisense strand to SEQ ID NO: 2018256
uugaguaaacaucuaguac

SEQ ID NO: 2018258 - RNA, 19 nt, Artificial Sequence
  Description of Artificial Sequence: Synthetic oligonucleotide
  Sense strand starting at position 2356 of SEQ ID NO: 1881102
acuagauguuuacucaaga

SEQ ID NO: 2018259 - RNA, 19 nt, Artificial Sequence
  Description of Artificial Sequence: Synthetic oligonucleotide
  Antisense strand to SEQ ID NO: 2018258
ucuugaguaaacaucuagu

SEQ ID NO: 2018260 - RNA, 19 nt, Artificial Sequence
  Description of Artificial Sequence: Synthetic oligonucleotide
  Sense strand starting at position 2357 of SEQ ID NO: 1881102
cuagauguuuacucaagag

SEQ ID NO: 2018261 - RNA, 19 nt, Artificial Sequence
  Description of Artificial Sequence: Synthetic oligonucleotide
  Antisense strand to SEQ ID NO: 2018260
cucuugaguaaacaucuag

SEQ ID NO: 2018262 - RNA, 19 nt, Artificial Sequence
  Description of Artificial Sequence: Synthetic oligonucleotide
  Sense strand starting at position 2600 of SEQ ID NO: 1881102
aaauguuaugcugaguuaa

SEQ ID NO: 2018263 - RNA, 19 nt, Artificial Sequence
  Description of Artificial Sequence: Synthetic oligonucleotide
  Antisense strand to SEQ ID NO: 2018262
uuaacucagcauaacauuu

SEQ ID NO: 2018264 - RNA, 19 nt, Artificial Sequence
  Description of Artificial Sequence: Synthetic oligonucleotide
  Sense strand starting at position 2634 of SEQ ID NO: 1881102
gagaguacaaauuguguga

SEQ ID NO: 2018265 - RNA, 19 nt, Artificial Sequence
  Description of Artificial Sequence: Synthetic oligonucleotide
  Antisense strand to SEQ ID NO: 2018264
ucacacaauuuguacucuc

SEQ ID NO: 2018266 - RNA, 19 nt, Artificial Sequence
  Description of Artificial Sequence: Synthetic oligonucleotide
  Sense strand starting at position 2733 of SEQ ID NO: 1881102
ggugggugaggguauugau

SEQ ID NO: 2018267 - RNA, 19 nt, Artificial Sequence
  Description of Artificial Sequence: Synthetic oligonucleotide
  Antisense strand to SEQ ID NO: 2018266
aucaauacccucacccacc

SEQ ID NO: 2018268 - RNA, 19 nt, Artificial Sequence
  Description of Artificial Sequence: Synthetic oligonucleotide
  Sense strand starting at position 2827 of SEQ ID NO: 1881102
cuucauguaggugagagua

SEQ ID NO: 2018269 - RNA, 19 nt, Artificial Sequence
  Description of Artificial Sequence: Synthetic oligonucleotide
  Antisense strand to SEQ ID NO: 2018268
uacucucaccuacaugaag

SEQ ID NO: 2018270 - RNA, 19 nt, Artificial Sequence
  Description of Artificial Sequence: Synthetic oligonucleotide
  Sense strand starting at position 2875 of SEQ ID NO: 1881102
acuuuauaggauuguagau

SEQ ID NO: 2018271 - RNA, 19 nt, Artificial Sequence
  Description of Artificial Sequence: Synthetic oligonucleotide
  Antisense strand to SEQ ID NO: 2018270
aucuacaauccuauaaagu

SEQ ID NO: 2018272 - RNA, 19 nt, Artificial Sequence
  Description of Artificial Sequence: Synthetic oligonucleotide
  Sense strand starting at position 2968 of SEQ ID NO: 1881102
guaguaguuacacagacau

SEQ ID NO: 2018273 - RNA, 19 nt, Artificial Sequence
  Description of Artificial Sequence: Synthetic oligonucleotide
  Antisense strand to SEQ ID NO: 2018272
augucuguguaacuacuac

SEQ ID NO: 2018274 - RNA, 19 nt, Artificial Sequence
  Description of Artificial Sequence: Synthetic oligonucleotide
  Sense strand starting at position 3103 of SEQ ID NO: 1881102
aguacagaccaaugguaau

SEQ ID NO: 2018275 - RNA, 19 nt, Artificial Sequence
  Description of Artificial Sequence: Synthetic oligonucleotide
  Antisense strand to SEQ ID NO: 2018274
auuaccauuggucuguacu

SEQ ID NO: 2018276 - RNA, 19 nt, Artificial Sequence
  Description of Artificial Sequence: Synthetic oligonucleotide
  Sense strand starting at position 3437 of SEQ ID NO: 1881102
aaaguuuauccacgaugau

SEQ ID NO: 2018277 - RNA, 19 nt, Artificial Sequence
  Description of Artificial Sequence: Synthetic oligonucleotide
  Antisense strand to SEQ ID NO: 2018276
aucaucguggauaaacuuu

SEQ ID NO: 2018278 - RNA, 19 nt, Artificial Sequence
  Description of Artificial Sequence: Synthetic oligonucleotide
  Sense strand starting at position 3438 of SEQ ID NO: 1881102
aaguuuauccacgaugauc

SEQ ID NO: 2018279 - RNA, 19 nt, Artificial Sequence
  Description of Artificial Sequence: Synthetic oligonucleotide
  Antisense strand to SEQ ID NO: 2018278
gaucaucguggauaaacuu

SEQ ID NO: 2018280 - RNA, 19 nt, Artificial Sequence
  Description of Artificial Sequence: Synthetic oligonucleotide
  Sense strand starting at position 3619 of SEQ ID NO: 1881102
ucaauaaacuagguaugca

SEQ ID NO: 2018281 - RNA, 19 nt, Artificial Sequence
  Description of Artificial Sequence: Synthetic oligonucleotide
  Antisense strand to SEQ ID NO: 2018280
ugcauaccuaguuuauuga

SEQ ID NO: 2018282 - RNA, 19 nt, Artificial Sequence
  Description of Artificial Sequence: Synthetic oligonucleotide
  Sense strand starting at position 3627 of SEQ ID NO: 1881102
cuagguaugcauggaacau

SEQ ID NO: 2018283 - RNA, 19 nt, Artificial Sequence
  Description of Artificial Sequence: Synthetic oligonucleotide
  Antisense strand to SEQ ID NO: 2018282
auguuccaugcauaccuag

SEQ ID NO: 2018284 - RNA, 19 nt, Artificial Sequence
  Description of Artificial Sequence: Synthetic oligonucleotide
  Sense strand starting at position 79 of SEQ ID NO: 1881103
ugaauaagauucuuguuuc

SEQ ID NO: 2018285 - RNA, 19 nt, Artificial Sequence
  Description of Artificial Sequence: Synthetic oligonucleotide
  Antisense strand to SEQ ID NO: 2018284
gaaacaagaaucuuauuca

SEQ ID NO: 2018286 - RNA, 19 nt, Artificial Sequence
  Description of Artificial Sequence: Synthetic oligonucleotide
  Sense strand starting at position 102 of SEQ ID NO: 1881103
uuugcagaaaugugauuga

SEQ ID NO: 2018287 - RNA, 19 nt, Artificial Sequence
  Description of Artificial Sequence: Synthetic oligonucleotide
  Antisense strand to SEQ ID NO: 2018286
ucaaucacauuucugcaaa

SEQ ID NO: 2018288 - RNA, 19 nt, Artificial Sequence
  Description of Artificial Sequence: Synthetic oligonucleotide
  Sense strand starting at position 105 of SEQ ID NO: 1881103
gcagaaaugugauugaaga

SEQ ID NO: 2018289 - RNA, 19 nt, Artificial Sequence
  Description of Artificial Sequence: Synthetic oligonucleotide
  Antisense strand to SEQ ID NO: 2018288
ucuucaaucacauuucugc

SEQ ID NO: 2018290 - RNA, 19 nt, Artificial Sequence
  Description of Artificial Sequence: Synthetic oligonucleotide
  Sense strand starting at position 541 of SEQ ID NO: 1881103
gucugaacucacgagguca

SEQ ID NO: 2018291 - RNA, 19 nt, Artificial Sequence
  Description of Artificial Sequence: Synthetic oligonucleotide
  Antisense strand to SEQ ID NO: 2018290
ugaccucgugaguucagac

SEQ ID NO: 2018292 - RNA, 19 nt, Artificial Sequence
  Description of Artificial Sequence: Synthetic oligonucleotide
  Sense strand starting at position 557 of SEQ ID NO: 1881103
ucaagaacugccugacaac

SEQ ID NO: 2018293 - RNA, 19 nt, Artificial Sequence
  Description of Artificial Sequence: Synthetic oligonucleotide
  Antisense strand to SEQ ID NO: 2018292
guugucaggcaguucuuga

SEQ ID NO: 2018294 - RNA, 19 nt, Artificial Sequence
  Description of Artificial Sequence: Synthetic oligonucleotide
  Sense strand starting at position 966 of SEQ ID NO: 1881103
uuuacaauucugcacggaa

SEQ ID NO: 2018295 - RNA, 19 nt, Artificial Sequence
  Description of Artificial Sequence: Synthetic oligonucleotide
  Antisense strand to SEQ ID NO: 2018294
uuccgugcagaauuguaaa

SEQ ID NO: 2018296 - RNA, 19 nt, Artificial Sequence
  Description of Artificial Sequence: Synthetic oligonucleotide
  Sense strand starting at position 969 of SEQ ID NO: 1881103
acaauucugcacggaacua

SEQ ID NO: 2018297 - RNA, 19 nt, Artificial Sequence
  Description of Artificial Sequence: Synthetic oligonucleotide
  Antisense strand to SEQ ID NO: 2018296
uaguuccgugcagaauugu

SEQ ID NO: 2018298 - RNA, 19 nt, Artificial Sequence
  Description of Artificial Sequence: Synthetic oligonucleotide
  Sense strand starting at position 1068 of SEQ ID NO: 1881103
ucuugacacuguuugagau

SEQ ID NO: 2018299 - RNA, 19 nt, Artificial Sequence
  Description of Artificial Sequence: Synthetic oligonucleotide
  Antisense strand to SEQ ID NO: 2018298
aucucaaacagugucaaga

SEQ ID NO: 2018300 - RNA, 19 nt, Artificial Sequence
  Description of Artificial Sequence: Synthetic oligonucleotide
  Sense strand starting at position 1069 of SEQ ID NO: 1881103
cuugacacuguuugagaua

SEQ ID NO: 2018301 - RNA, 19 nt, Artificial Sequence
  Description of Artificial Sequence: Synthetic oligonucleotide
  Antisense strand to SEQ ID NO: 2018300
uaucucaaacagugucaag

SEQ ID NO: 2018302 - RNA, 19 nt, Artificial Sequence
  Description of Artificial Sequence: Synthetic oligonucleotide
  Sense strand starting at position 1270 of SEQ ID NO: 1881103
aagugagagccagguuaua

SEQ ID NO: 2018303 - RNA, 19 nt, Artificial Sequence
  Description of Artificial Sequence: Synthetic oligonucleotide
  Antisense strand to SEQ ID NO: 2018302
uauaaccuggcucucacuu

SEQ ID NO: 2018304 - RNA, 19 nt, Artificial Sequence
  Description of Artificial Sequence: Synthetic oligonucleotide
  Sense strand starting at position 1360 of SEQ ID NO: 1881103
uuaucagcauguuugagaa

SEQ ID NO: 2018305 - RNA, 19 nt, Artificial Sequence
  Description of Artificial Sequence: Synthetic oligonucleotide
  Antisense strand to SEQ ID NO: 2018304
uucucaaacaugcugauaa

SEQ ID NO: 2018306 - RNA, 19 nt, Artificial Sequence
  Description of Artificial Sequence: Synthetic oligonucleotide
  Sense strand starting at position 1383 of SEQ ID NO: 1881103
uuacgagacagcugugaaa

SEQ ID NO: 2018307 - RNA, 19 nt, Artificial Sequence
  Description of Artificial Sequence: Synthetic oligonucleotide
  Antisense strand to SEQ ID NO: 2018306
uuucacagcugucucguaa

SEQ ID NO: 2018308 - RNA, 19 nt, Artificial Sequence
  Description of Artificial Sequence: Synthetic oligonucleotide
  Sense strand starting at position 1446 of SEQ ID NO: 1881103
ucuaauuuguggcuuuaau

SEQ ID NO: 2018309 - RNA, 19 nt, Artificial Sequence
  Description of Artificial Sequence: Synthetic oligonucleotide
  Antisense strand to SEQ ID NO: 2018308
auuaaagccacaaauuaga

SEQ ID NO: 2018310 - RNA, 19 nt, Artificial Sequence
  Description of Artificial Sequence: Synthetic oligonucleotide
  Sense strand starting at position 1458 of SEQ ID NO: 1881103
cuuuaaugagcugguauaa

SEQ ID NO: 2018311 - RNA, 19 nt, Artificial Sequence
  Description of Artificial Sequence: Synthetic oligonucleotide
  Antisense strand to SEQ ID NO: 2018310
uuauaccagcucauuaaag

SEQ ID NO: 2018312 - RNA, 19 nt, Artificial Sequence
  Description of Artificial Sequence: Synthetic oligonucleotide
  Sense strand starting at position 1567 of SEQ ID NO: 1881103
acaaaugcuuucuugaaga

SEQ ID NO: 2018313 - RNA, 19 nt, Artificial Sequence
  Description of Artificial Sequence: Synthetic oligonucleotide
  Antisense strand to SEQ ID NO: 2018312
ucuucaagaaagcauuugu

SEQ ID NO: 2018314 - RNA, 19 nt, Artificial Sequence
  Description of Artificial Sequence: Synthetic oligonucleotide
  Sense strand starting at position 1569 of SEQ ID NO: 1881103
aaaugcuuucuugaagagu

SEQ ID NO: 2018315 - RNA, 19 nt, Artificial Sequence
  Description of Artificial Sequence: Synthetic oligonucleotide
  Antisense strand to SEQ ID NO: 2018314
acucuucaagaaagcauuu

SEQ ID NO: 2018316 - RNA, 19 nt, Artificial Sequence
  Description of Artificial Sequence: Synthetic oligonucleotide
  Sense strand starting at position 1666 of SEQ ID NO: 1881103
uugcauuuguaaccaggua

SEQ ID NO: 2018317 - RNA, 19 nt, Artificial Sequence
  Description of Artificial Sequence: Synthetic oligonucleotide
  Antisense strand to SEQ ID NO: 2018316
uaccugguuacaaaugcaa

SEQ ID NO: 2018318 - RNA, 19 nt, Artificial Sequence
  Description of Artificial Sequence: Synthetic oligonucleotide
  Sense strand starting at position 1755 of SEQ ID NO: 1881103
gacuuuaugucucuaaagg

SEQ ID NO: 2018319 - RNA, 19 nt, Artificial Sequence
  Description of Artificial Sequence: Synthetic oligonucleotide
  Antisense strand to SEQ ID NO: 2018318
ccuuuagagacauaaaguc

SEQ ID NO: 2018320 - RNA, 19 nt, Artificial Sequence
  Description of Artificial Sequence: Synthetic oligonucleotide
  Sense strand starting at position 2060 of SEQ ID NO: 1881103
gagguauuguuaccaaucu

SEQ ID NO: 2018321 - RNA, 19 nt, Artificial Sequence
  Description of Artificial Sequence: Synthetic oligonucleotide
  Antisense strand to SEQ ID NO: 2018320
agauugguaacaauaccuc

SEQ ID NO: 2018322 - RNA, 19 nt, Artificial Sequence
  Description of Artificial Sequence: Synthetic oligonucleotide
  Sense strand starting at position 2115 of SEQ ID NO: 1881103
gcagcuuuaacagggauca

SEQ ID NO: 2018323 - RNA, 19 nt, Artificial Sequence
  Description of Artificial Sequence: Synthetic oligonucleotide
  Antisense strand to SEQ ID NO: 2018322
ugaucccuguuaaagcugc

SEQ ID NO: 2018324 - RNA, 19 nt, Artificial Sequence
  Description of Artificial Sequence: Synthetic oligonucleotide
  Sense strand starting at position 2125 of SEQ ID NO: 1881103
cagggaucauuguuucuag

SEQ ID NO: 2018325 - RNA, 19 nt, Artificial Sequence
  Description of Artificial Sequence: Synthetic oligonucleotide
  Antisense strand to SEQ ID NO: 2018324
cuagaaacaaugaucccug

SEQ ID NO: 2018326 - RNA, 19 nt, Artificial Sequence
  Description of Artificial Sequence: Synthetic oligonucleotide
  Sense strand starting at position 2128 of SEQ ID NO: 1881103
ggaucauuguuucuaggga

SEQ ID NO: 2018327 - RNA, 19 nt, Artificial Sequence
  Description of Artificial Sequence: Synthetic oligonucleotide
  Antisense strand to SEQ ID NO: 2018326
ucccuagaaacaaugaucc

SEQ ID NO: 2018328 - RNA, 19 nt, Artificial Sequence
  Description of Artificial Sequence: Synthetic oligonucleotide
  Sense strand starting at position 2133 of SEQ ID NO: 1881103
auuguuucuagggaguugu

SEQ ID NO: 2018329 - RNA, 19 nt, Artificial Sequence
  Description of Artificial Sequence: Synthetic oligonucleotide
  Antisense strand to SEQ ID NO: 2018328
acaacucccuagaaacaau

SEQ ID NO: 2018330 - RNA, 19 nt, Artificial Sequence
  Description of Artificial Sequence: Synthetic oligonucleotide
  Sense strand starting at position 2141 of SEQ ID NO: 1881103
uagggaguugucuaaacug

SEQ ID NO: 2018331 - RNA, 19 nt, Artificial Sequence
  Description of Artificial Sequence: Synthetic oligonucleotide
  Antisense strand to SEQ ID NO: 2018330
caguuuagacaacucccua

SEQ ID NO: 2018332 - RNA, 19 nt, Artificial Sequence
  Description of Artificial Sequence: Synthetic oligonucleotide
  Sense strand starting at position 2148 of SEQ ID NO: 1881103
uugucuaaacugugauaua

SEQ ID NO: 2018333 - RNA, 19 nt, Artificial Sequence
  Description of Artificial Sequence: Synthetic oligonucleotide
  Antisense strand to SEQ ID NO: 2018332
uauaucacaguuuagacaa

SEQ ID NO: 2018334 - RNA, 19 nt, Artificial Sequence
  Description of Artificial Sequence: Synthetic oligonucleotide
  Sense strand starting at position 2218 of SEQ ID NO: 1881103
auagcaucccuggaagguu

SEQ ID NO: 2018335 - RNA, 19 nt, Artificial Sequence
  Description of Artificial Sequence: Synthetic oligonucleotide
  Antisense strand to SEQ ID NO: 2018334
aaccuuccagggaugcuau

SEQ ID NO: 2018336 - RNA, 19 nt, Artificial Sequence
  Description of Artificial Sequence: Synthetic oligonucleotide
  Sense strand starting at position 2238 of SEQ ID NO: 1881103
gcugucuucggguuccauu

SEQ ID NO: 2018337 - RNA, 19 nt, Artificial Sequence
  Description of Artificial Sequence: Synthetic oligonucleotide
  Antisense strand to SEQ ID NO: 2018336
aauggaacccgaagacagc

SEQ ID NO: 2018338 - RNA, 19 nt, Artificial Sequence
  Description of Artificial Sequence: Synthetic oligonucleotide
  Sense strand starting at position 2295 of SEQ ID NO: 1881103
guuauacuugugcaauaua

SEQ ID NO: 2018339 - RNA, 19 nt, Artificial Sequence
  Description of Artificial Sequence: Synthetic oligonucleotide
  Antisense strand to SEQ ID NO: 2018338
uauauugcacaaguauaac

SEQ ID NO: 2018340 - RNA, 19 nt, Artificial Sequence
  Description of Artificial Sequence: Synthetic oligonucleotide
  Sense strand starting at position 2372 of SEQ ID NO: 1881103
auccaauucuugcuugaag

SEQ ID NO: 2018341 - RNA, 19 nt, Artificial Sequence
  Description of Artificial Sequence: Synthetic oligonucleotide
  Antisense strand to SEQ ID NO: 2018340
cuucaagcaagaauuggau

SEQ ID NO: 2018342 - RNA, 19 nt, Artificial Sequence
  Description of Artificial Sequence: Synthetic oligonucleotide
  Sense strand starting at position 2508 of SEQ ID NO: 1881103
aggaguauauguguacuua

SEQ ID NO: 2018343 - RNA, 19 nt, Artificial Sequence
  Description of Artificial Sequence: Synthetic oligonucleotide
  Antisense strand to SEQ ID NO: 2018342
uaaguacacauauacuccu

SEQ ID NO: 2018344 - RNA, 19 nt, Artificial Sequence
  Description of Artificial Sequence: Synthetic oligonucleotide
  Sense strand starting at position 2509 of SEQ ID NO: 1881103
ggaguauauguguacuuac

SEQ ID NO: 2018345 - RNA, 19 nt, Artificial Sequence
  Description of Artificial Sequence: Synthetic oligonucleotide
  Antisense strand to SEQ ID NO: 2018344
guaaguacacauauacucc

SEQ ID NO: 2018346 - RNA, 19 nt, Artificial Sequence
  Description of Artificial Sequence: Synthetic oligonucleotide
  Sense strand starting at position 2568 of SEQ ID NO: 1881103
cauagauagcacugugaau

SEQ ID NO: 2018347 - RNA, 19 nt, Artificial Sequence
  Description of Artificial Sequence: Synthetic oligonucleotide
  Antisense strand to SEQ ID NO: 2018346
auucacagugcuaucuaug

SEQ ID NO: 2018348 - RNA, 19 nt, Artificial Sequence
  Description of Artificial Sequence: Synthetic oligonucleotide
  Sense strand starting at position 2610 of SEQ ID NO: 1881103
acgaauguccucuaaacuu

SEQ ID NO: 2018349 - RNA, 19 nt, Artificial Sequence
  Description of Artificial Sequence: Synthetic oligonucleotide
  Antisense strand to SEQ ID NO: 2018348
aaguuuagaggacauucgu

SEQ ID NO: 2018350 - RNA, 19 nt, Artificial Sequence
  Description of Artificial Sequence: Synthetic oligonucleotide
  Sense strand starting at position 2924 of SEQ ID NO: 1881103
ugacaaauguuagacauuu

SEQ ID NO: 2018351 - RNA, 19 nt, Artificial Sequence
  Description of Artificial Sequence: Synthetic oligonucleotide
  Antisense strand to SEQ ID NO: 2018350
aaaugucuaacauuuguca

SEQ ID NO: 2018352 - RNA, 19 nt, Artificial Sequence
  Description of Artificial Sequence: Synthetic oligonucleotide
  Sense strand starting at position 2995 of SEQ ID NO: 1881103
uguguaugccuauaaacua

SEQ ID NO: 2018353 - RNA, 19 nt, Artificial Sequence
  Description of Artificial Sequence: Synthetic oligonucleotide
  Antisense strand to SEQ ID NO: 2018352
uaguuuauaggcauacaca

SEQ ID NO: 2018354 - RNA, 19 nt, Artificial Sequence
  Description of Artificial Sequence: Synthetic oligonucleotide
  Sense strand starting at position 3053 of SEQ ID NO: 1881103
uuaagcauccugggaacuu

SEQ ID NO: 2018355 - RNA, 19 nt, Artificial Sequence
  Description of Artificial Sequence: Synthetic oligonucleotide
  Antisense strand to SEQ ID NO: 2018354
aaguucccaggaugcuuaa

SEQ ID NO: 2018356 - RNA, 19 nt, Artificial Sequence
  Description of Artificial Sequence: Synthetic oligonucleotide
  Sense strand starting at position 3219 of SEQ ID NO: 1881103
ucugacuuugcuuagaauu

SEQ ID NO: 2018357 - RNA, 19 nt, Artificial Sequence
  Description of Artificial Sequence: Synthetic oligonucleotide
  Antisense strand to SEQ ID NO: 2018356
aauucuaagcaaagucaga

SEQ ID NO: 2018358 - RNA, 19 nt, Artificial Sequence
  Description of Artificial Sequence: Synthetic oligonucleotide
  Sense strand starting at position 3627 of SEQ ID NO: 1881103
cagggagucagugauugca

SEQ ID NO: 2018359 - RNA, 19 nt, Artificial Sequence
  Description of Artificial Sequence: Synthetic oligonucleotide
  Antisense strand to SEQ ID NO: 2018358
ugcaaucacugacucccug

SEQ ID NO: 2018360 - RNA, 19 nt, Artificial Sequence
  Description of Artificial Sequence: Synthetic oligonucleotide
  Sense strand starting at position 3871 of SEQ ID NO: 1881103
cccagucuaguagaugauu

SEQ ID NO: 2018361 - RNA, 19 nt, Artificial Sequence
  Description of Artificial Sequence: Synthetic oligonucleotide
  Antisense strand to SEQ ID NO: 2018360
aaucaucuacuagacuggg

SEQ ID NO: 2018362 - RNA, 19 nt, Artificial Sequence
  Description of Artificial Sequence: Synthetic oligonucleotide
  Sense strand starting at position 3945 of SEQ ID NO: 1881103
ucgccuaaacaaugagaaa

SEQ ID NO: 2018363 - RNA, 19 nt, Artificial Sequence
  Description of Artificial Sequence: Synthetic oligonucleotide
  Antisense strand to SEQ ID NO: 2018362
uuucucauuguuuaggcga

SEQ ID NO: 2018364 - RNA, 19 nt, Artificial Sequence
  Description of Artificial Sequence: Synthetic oligonucleotide
  Sense strand starting at position 201 of SEQ ID NO: 1881104
acuuaagagcuuuggagaa

SEQ ID NO: 2018365 - RNA, 19 nt, Artificial Sequence
  Description of Artificial Sequence: Synthetic oligonucleotide
  Antisense strand to SEQ ID NO: 2018364
uucuccaaagcucuuaagu

SEQ ID NO: 2018366 - RNA, 19 nt, Artificial Sequence
  Description of Artificial Sequence: Synthetic oligonucleotide
  Sense strand starting at position 203 of SEQ ID NO: 1881104
uuaagagcuuuggagaaau

SEQ ID NO: 2018367 - RNA, 19 nt, Artificial Sequence
  Description of Artificial Sequence: Synthetic oligonucleotide
  Antisense strand to SEQ ID NO: 2018366
auuucuccaaagcucuuaa

SEQ ID NO: 2018368 - RNA, 19 nt, Artificial Sequence
  Description of Artificial Sequence: Synthetic oligonucleotide
  Sense strand starting at position 213 of SEQ ID NO: 1881104
uggagaaaucccgagggcu

SEQ ID NO: 2018369 - RNA, 19 nt, Artificial Sequence
  Description of Artificial Sequence: Synthetic oligonucleotide
  Antisense strand to SEQ ID NO: 2018368
agcccucgggauuucucca

SEQ ID NO: 2018370 - RNA, 19 nt, Artificial Sequence
  Description of Artificial Sequence: Synthetic oligonucleotide
  Sense strand starting at position 531 of SEQ ID NO: 1881104
ugcuuucucugcuugagac

SEQ ID NO: 2018371 - RNA, 19 nt, Artificial Sequence
  Description of Artificial Sequence: Synthetic oligonucleotide
  Antisense strand to SEQ ID NO: 2018370
gucucaagcagagaaagca

SEQ ID NO: 2018372 - RNA, 19 nt, Artificial Sequence
  Description of Artificial Sequence: Synthetic oligonucleotide
  Sense strand starting at position 588 of SEQ ID NO: 1881104
ggagccucugccugaugaa

SEQ ID NO: 2018373 - RNA, 19 nt, Artificial Sequence
  Description of Artificial Sequence: Synthetic oligonucleotide
  Antisense strand to SEQ ID NO: 2018372
uucaucaggcagaggcucc

SEQ ID NO: 2018374 - RNA, 19 nt, Artificial Sequence
  Description of Artificial Sequence: Synthetic oligonucleotide
  Sense strand starting at position 605 of SEQ ID NO: 1881104
aagcaaaggcucuguccau

SEQ ID NO: 2018375 - RNA, 19 nt, Artificial Sequence
  Description of Artificial Sequence: Synthetic oligonucleotide
  Antisense strand to SEQ ID NO: 2018374
auggacagagccuuugcuu

SEQ ID NO: 2018376 - RNA, 19 nt, Artificial Sequence
  Description of Artificial Sequence: Synthetic oligonucleotide
  Sense strand starting at position 606 of SEQ ID NO: 1881104
agcaaaggcucuguccaua

SEQ ID NO: 2018377 - RNA, 19 nt, Artificial Sequence
  Description of Artificial Sequence: Synthetic oligonucleotide
  Antisense strand to SEQ ID NO: 2018376
uauggacagagccuuugcu

SEQ ID NO: 2018378 - RNA, 19 nt, Artificial Sequence
  Description of Artificial Sequence: Synthetic oligonucleotide
  Sense strand starting at position 611 of SEQ ID NO: 1881104
aggcucuguccauauuacu

SEQ ID NO: 2018379 - RNA, 19 nt, Artificial Sequence
  Description of Artificial Sequence: Synthetic oligonucleotide
  Antisense strand to SEQ ID NO: 2018378
aguaauauggacagagccu

SEQ ID NO: 2018380 - RNA, 19 nt, Artificial Sequence
  Description of Artificial Sequence: Synthetic oligonucleotide
  Sense strand starting at position 723 of SEQ ID NO: 1881104
uccuaaguguuagccauau

SEQ ID NO: 2018381 - RNA, 19 nt, Artificial Sequence
  Description of Artificial Sequence: Synthetic oligonucleotide
  Antisense strand to SEQ ID NO: 2018380
auauggcuaacacuuagga

SEQ ID NO: 2018382 - RNA, 19 nt, Artificial Sequence
  Description of Artificial Sequence: Synthetic oligonucleotide
  Sense strand starting at position 727 of SEQ ID NO: 1881104
aaguguuagccauaugauu

SEQ ID NO: 2018383 - RNA, 19 nt, Artificial Sequence
  Description of Artificial Sequence: Synthetic oligonucleotide
  Antisense strand to SEQ ID NO: 2018382
aaucauauggcuaacacuu

SEQ ID NO: 2018384 - RNA, 19 nt, Artificial Sequence
  Description of Artificial Sequence: Synthetic oligonucleotide
  Sense strand starting at position 1457 of SEQ ID NO: 1881104
agucaucuaucccaucaga

SEQ ID NO: 2018385 - RNA, 19 nt, Artificial Sequence
  Description of Artificial Sequence: Synthetic oligonucleotide
  Antisense strand to SEQ ID NO: 2018384
ucugaugggauagaugacu

SEQ ID NO: 2018386 - RNA, 19 nt, Artificial Sequence
  Description of Artificial Sequence: Synthetic oligonucleotide
  Sense strand starting at position 1495 of SEQ ID NO: 1881104
cccuaauccgccugggaga

SEQ ID NO: 2018387 - RNA, 19 nt, Artificial Sequence
  Description of Artificial Sequence: Synthetic oligonucleotide
  Antisense strand to SEQ ID NO: 2018386
ucucccaggcggauuaggg

SEQ ID NO: 2018388 - RNA, 19 nt, Artificial Sequence
  Description of Artificial Sequence: Synthetic oligonucleotide
  Sense strand starting at position 1496 of SEQ ID NO: 1881104
ccuaauccgccugggagaa

SEQ ID NO: 2018389 - RNA, 19 nt, Artificial Sequence
  Description of Artificial Sequence: Synthetic oligonucleotide
  Antisense strand to SEQ ID NO: 2018388
uucucccaggcggauuagg

SEQ ID NO: 2018390 - RNA, 19 nt, Artificial Sequence
  Description of Artificial Sequence: Synthetic oligonucleotide
  Sense strand starting at position 1550 of SEQ ID NO: 1881104
cgcggaagcauggaucuua

SEQ ID NO: 2018391 - RNA, 19 nt, Artificial Sequence
  Description of Artificial Sequence: Synthetic oligonucleotide
  Antisense strand to SEQ ID NO: 2018390
uaagauccaugcuuccgcg

SEQ ID NO: 2018392 - RNA, 19 nt, Artificial Sequence
  Description of Artificial Sequence: Synthetic oligonucleotide
  Sense strand starting at position 1558 of SEQ ID NO: 1881104
cauggaucuuaauucguua

SEQ ID NO: 2018393 - RNA, 19 nt, Artificial Sequence
  Description of Artificial Sequence: Synthetic oligonucleotide
  Antisense strand to SEQ ID NO: 2018392
uaacgaauuaagauccaug

SEQ ID NO: 2018394 - RNA, 19 nt, Artificial Sequence
  Description of Artificial Sequence: Synthetic oligonucleotide
  Sense strand starting at position 1720 of SEQ ID NO: 1881104
agcagucacuucucacauu

SEQ ID NO: 2018395 - RNA, 19 nt, Artificial Sequence
  Description of Artificial Sequence: Synthetic oligonucleotide
  Antisense strand to SEQ ID NO: 2018394
aaugugagaagugacugcu

SEQ ID NO: 2018396 - RNA, 19 nt, Artificial Sequence
  Description of Artificial Sequence: Synthetic oligonucleotide
  Sense strand starting at position 1721 of SEQ ID NO: 1881104
gcagucacuucucacauuu

SEQ ID NO: 2018397 - RNA, 19 nt, Artificial Sequence
  Description of Artificial Sequence: Synthetic oligonucleotide
  Antisense strand to SEQ ID NO: 2018396
aaaugugagaagugacugc

SEQ ID NO: 2018398 - RNA, 19 nt, Artificial Sequence
  Description of Artificial Sequence: Synthetic oligonucleotide
  Sense strand starting at position 1786 of SEQ ID NO: 1881104
aucuauuaauguuuggaac

SEQ ID NO: 2018399 - RNA, 19 nt, Artificial Sequence
  Description of Artificial Sequence: Synthetic oligonucleotide
  Antisense strand to SEQ ID NO: 2018398
guuccaaacauuaauagau

SEQ ID NO: 2018400 - RNA, 19 nt, Artificial Sequence
  Description of Artificial Sequence: Synthetic oligonucleotide
  Sense strand starting at position 1787 of SEQ ID NO: 1881104
ucuauuaauguuuggaaca

SEQ ID NO: 2018401 - RNA, 19 nt, Artificial Sequence
  Description of Artificial Sequence: Synthetic oligonucleotide
  Antisense strand to SEQ ID NO: 2018400
uguuccaaacauuaauaga

SEQ ID NO: 2018402 - RNA, 19 nt, Artificial Sequence
  Description of Artificial Sequence: Synthetic oligonucleotide
  Sense strand starting at position 1801 of SEQ ID NO: 1881104
gaacaaacucuuggcuguu

SEQ ID NO: 2018403 - RNA, 19 nt, Artificial Sequence
  Description of Artificial Sequence: Synthetic oligonucleotide
  Antisense strand to SEQ ID NO: 2018402
aacagccaagaguuuguuc

SEQ ID NO: 2018404 - RNA, 19 nt, Artificial Sequence
  Description of Artificial Sequence: Synthetic oligonucleotide
  Sense strand starting at position 1803 of SEQ ID NO: 1881104
acaaacucuuggcuguuau

SEQ ID NO: 2018405 - RNA, 19 nt, Artificial Sequence
  Description of Artificial Sequence: Synthetic oligonucleotide
  Antisense strand to SEQ ID NO: 2018404
auaacagccaagaguuugu

SEQ ID NO: 2018406 - RNA, 19 nt, Artificial Sequence
  Description of Artificial Sequence: Synthetic oligonucleotide
  Sense strand starting at position 1813 of SEQ ID NO: 1881104
ggcuguuauaguugacuca

SEQ ID NO: 2018407 - RNA, 19 nt, Artificial Sequence
  Description of Artificial Sequence: Synthetic oligonucleotide
  Antisense strand to SEQ ID NO: 2018406
ugagucaacuauaacagcc

SEQ ID NO: 2018408 - RNA, 19 nt, Artificial Sequence
  Description of Artificial Sequence: Synthetic oligonucleotide
  Sense strand starting at position 1814 of SEQ ID NO: 1881104
gcuguuauaguugacucaa

SEQ ID NO: 2018409 - RNA, 19 nt, Artificial Sequence
  Description of Artificial Sequence: Synthetic oligonucleotide
  Antisense strand to SEQ ID NO: 2018408
uugagucaacuauaacagc

SEQ ID NO: 2018410 - RNA, 19 nt, Artificial Sequence
  Description of Artificial Sequence: Synthetic oligonucleotide
  Sense strand starting at position 1881 of SEQ ID NO: 1881104
cuaguacaacuguguauga

SEQ ID NO: 2018411 - RNA, 19 nt, Artificial Sequence
  Description of Artificial Sequence: Synthetic oligonucleotide
  Antisense strand to SEQ ID NO: 2018410
ucauacacaguuguacuag

SEQ ID NO: 2018412 - RNA, 19 nt, Artificial Sequence
  Description of Artificial Sequence: Synthetic oligonucleotide
  Sense strand starting at position 1890 of SEQ ID NO: 1881104
cuguguaugagguagaaua

SEQ ID NO: 2018413 - RNA, 19 nt, Artificial Sequence
  Description of Artificial Sequence: Synthetic oligonucleotide
  Antisense strand to SEQ ID NO: 2018412
uauucuaccucauacacag

SEQ ID NO: 2018414 - RNA, 19 nt, Artificial Sequence
  Description of Artificial Sequence: Synthetic oligonucleotide
  Sense strand starting at position 1892 of SEQ ID NO: 1881104
guguaugagguagaauaca

SEQ ID NO: 2018415 - RNA, 19 nt, Artificial Sequence
  Description of Artificial Sequence: Synthetic oligonucleotide
  Antisense strand to SEQ ID NO: 2018414
uguauucuaccucauacac

SEQ ID NO: 2018416 - RNA, 19 nt, Artificial Sequence
  Description of Artificial Sequence: Synthetic oligonucleotide
  Sense strand starting at position 1983 of SEQ ID NO: 1881104
agucuuucugcugacguua

SEQ ID NO: 2018417 - RNA, 19 nt, Artificial Sequence
  Description of Artificial Sequence: Synthetic oligonucleotide
  Antisense strand to SEQ ID NO: 2018416
uaacgucagcagaaagacu

SEQ ID NO: 2018418 - RNA, 19 nt, Artificial Sequence
  Description of Artificial Sequence: Synthetic oligonucleotide
  Sense strand starting at position 2188 of SEQ ID NO: 1881104
aauaaagaaguccguguua

SEQ ID NO: 2018419 - RNA, 19 nt, Artificial Sequence
  Description of Artificial Sequence: Synthetic oligonucleotide
  Antisense strand to SEQ ID NO: 2018418
uaacacggacuucuuuauu

SEQ ID NO: 2018420 - RNA, 19 nt, Artificial Sequence
  Description of Artificial Sequence: Synthetic oligonucleotide
  Sense strand starting at position 2190 of SEQ ID NO: 1881104
uaaagaaguccguguuaaa

SEQ ID NO: 2018421 - RNA, 19 nt, Artificial Sequence
  Description of Artificial Sequence: Synthetic oligonucleotide
  Antisense strand to SEQ ID NO: 2018420
uuuaacacggacuucuuua

SEQ ID NO: 2018422 - RNA, 19 nt, Artificial Sequence
  Description of Artificial Sequence: Synthetic oligonucleotide
  Sense strand starting at position 2282 of SEQ ID NO: 1881104
ugcucuaguucucucuaga

SEQ ID NO: 2018423 - RNA, 19 nt, Artificial Sequence
  Description of Artificial Sequence: Synthetic oligonucleotide
  Antisense strand to SEQ ID NO: 2018422
ucuagagagaacuagagca

SEQ ID NO: 2018424 - RNA, 19 nt, Artificial Sequence
  Description of Artificial Sequence: Synthetic oligonucleotide
  Sense strand starting at position 2517 of SEQ ID NO: 1881104
caggacuugcaucgaaaga

SEQ ID NO: 2018425 - RNA, 19 nt, Artificial Sequence
  Description of Artificial Sequence: Synthetic oligonucleotide
  Antisense strand to SEQ ID NO: 2018424
ucuuucgaugcaaguccug

SEQ ID NO: 2018426 - RNA, 19 nt, Artificial Sequence
  Description of Artificial Sequence: Synthetic oligonucleotide
  Sense strand starting at position 2765 of SEQ ID NO: 1881104
cccgguugcccggugaauu

SEQ ID NO: 2018427 - RNA, 19 nt, Artificial Sequence
  Description of Artificial Sequence: Synthetic oligonucleotide
  Antisense strand to SEQ ID NO: 2018426
aauucaccgggcaaccggg

SEQ ID NO: 2018428 - RNA, 19 nt, Artificial Sequence
  Description of Artificial Sequence: Synthetic oligonucleotide
  Sense strand starting at position 2766 of SEQ ID NO: 1881104
ccgguugcccggugaauuu

SEQ ID NO: 2018429 - RNA, 19 nt, Artificial Sequence
  Description of Artificial Sequence: Synthetic oligonucleotide
  Antisense strand to SEQ ID NO: 2018428
aaauucaccgggcaaccgg

SEQ ID NO: 2018430 - RNA, 19 nt, Artificial Sequence
  Description of Artificial Sequence: Synthetic oligonucleotide
  Sense strand starting at position 3041 of SEQ ID NO: 1881104
agaggguucgcggagcaaa

SEQ ID NO: 2018431 - RNA, 19 nt, Artificial Sequence
  Description of Artificial Sequence: Synthetic oligonucleotide
  Antisense strand to SEQ ID NO: 2018430
uuugcuccgcgaacccucu

SEQ ID NO: 2018432 - RNA, 19 nt, Artificial Sequence
  Description of Artificial Sequence: Synthetic oligonucleotide
  Sense strand starting at position 3042 of SEQ ID NO: 1881104
gaggguucgcggagcaaac

SEQ ID NO: 2018433 - RNA, 19 nt, Artificial Sequence
  Description of Artificial Sequence: Synthetic oligonucleotide
  Antisense strand to SEQ ID NO: 2018432
guuugcuccgcgaacccuc

SEQ ID NO: 2018434 - RNA, 19 nt, Artificial Sequence
  Description of Artificial Sequence: Synthetic oligonucleotide
  Sense strand starting at position 3238 of SEQ ID NO: 1881104
gcccuuuccgcggugaauu

SEQ ID NO: 2018435 - RNA, 19 nt, Artificial Sequence
  Description of Artificial Sequence: Synthetic oligonucleotide
  Antisense strand to SEQ ID NO: 2018434
aauucaccgcggaaagggc

SEQ ID NO: 2018436 - RNA, 19 nt, Artificial Sequence
  Description of Artificial Sequence: Synthetic oligonucleotide
  Sense strand starting at position 3239 of SEQ ID NO: 1881104
cccuuuccgcggugaauuu

SEQ ID NO: 2018437 - RNA, 19 nt, Artificial Sequence
  Description of Artificial Sequence: Synthetic oligonucleotide
  Antisense strand to SEQ ID NO: 2018436
aaauucaccgcggaaaggg

SEQ ID NO: 2018438 - RNA, 19 nt, Artificial Sequence
  Description of Artificial Sequence: Synthetic oligonucleotide
  Sense strand starting at position 3573 of SEQ ID NO: 1881104
cagagaucgaggcgcgaau

SEQ ID NO: 2018439 - RNA, 19 nt, Artificial Sequence
  Description of Artificial Sequence: Synthetic oligonucleotide
  Antisense strand to SEQ ID NO: 2018438
auucgcgccucgaucucug

SEQ ID NO: 2018440 - RNA, 19 nt, Artificial Sequence
  Description of Artificial Sequence: Synthetic oligonucleotide
  Sense strand starting at position 3610 of SEQ ID NO: 1881104
ugucguggucccaguaaga

SEQ ID NO: 2018441 - RNA, 19 nt, Artificial Sequence
  Description of Artificial Sequence: Synthetic oligonucleotide
  Antisense strand to SEQ ID NO: 2018440
ucuuacugggaccacgaca

SEQ ID NO: 2018442 - RNA, 19 nt, Artificial Sequence
  Description of Artificial Sequence: Synthetic oligonucleotide
  Sense strand starting at position 3621 of SEQ ID NO: 1881104
caguaagagcaaugcauca

SEQ ID NO: 2018443 - RNA, 19 nt, Artificial Sequence
  Description of Artificial Sequence: Synthetic oligonucleotide
  Antisense strand to SEQ ID NO: 2018442
ugaugcauugcucuuacug

SEQ ID NO: 2018444 - RNA, 19 nt, Artificial Sequence
  Description of Artificial Sequence: Synthetic oligonucleotide
  Sense strand starting at position 40 of SEQ ID NO: 1881105
gaguuuggaucugcucuga

SEQ ID NO: 2018445 - RNA, 19 nt, Artificial Sequence
  Description of Artificial Sequence: Synthetic oligonucleotide
  Antisense strand to SEQ ID NO: 2018444
ucagagcagauccaaacuc

SEQ ID NO: 2018446 - RNA, 19 nt, Artificial Sequence
  Description of Artificial Sequence: Synthetic oligonucleotide
  Sense strand starting at position 525 of SEQ ID NO: 1881105
cccagugggcguuugcuaa

SEQ ID NO: 2018447 - RNA, 19 nt, Artificial Sequence
  Description of Artificial Sequence: Synthetic oligonucleotide
  Antisense strand to SEQ ID NO: 2018446
uuagcaaacgcccacuggg

SEQ ID NO: 2018448 - RNA, 19 nt, Artificial Sequence
  Description of Artificial Sequence: Synthetic oligonucleotide
  Sense strand starting at position 650 of SEQ ID NO: 1881105
ucugcaauccuaggugaca

SEQ ID NO: 2018449 - RNA, 19 nt, Artificial Sequence
  Description of Artificial Sequence: Synthetic oligonucleotide
  Antisense strand to SEQ ID NO: 2018448
ugucaccuaggauugcaga

SEQ ID NO: 2018450 - RNA, 19 nt, Artificial Sequence
  Description of Artificial Sequence: Synthetic oligonucleotide
  Sense strand starting at position 872 of SEQ ID NO: 1881105
gucugugugaaucagaucu

SEQ ID NO: 2018451 - RNA, 19 nt, Artificial Sequence
  Description of Artificial Sequence: Synthetic oligonucleotide
  Antisense strand to SEQ ID NO: 2018450
agaucugauucacacagac

SEQ ID NO: 2018452 - RNA, 19 nt, Artificial Sequence
  Description of Artificial Sequence: Synthetic oligonucleotide
  Sense strand starting at position 1674 of SEQ ID NO: 1881105
cauccugaggguugggaau

SEQ ID NO: 2018453 - RNA, 19 nt, Artificial Sequence
  Description of Artificial Sequence: Synthetic oligonucleotide
  Antisense strand to SEQ ID NO: 2018452
auucccaacccucaggaug

SEQ ID NO: 2018454 - RNA, 19 nt, Artificial Sequence
  Description of Artificial Sequence: Synthetic oligonucleotide
  Sense strand starting at position 1811 of SEQ ID NO: 1881105
gggccagacucucuuucuu

SEQ ID NO: 2018455 - RNA, 19 nt, Artificial Sequence
  Description of Artificial Sequence: Synthetic oligonucleotide
  Antisense strand to SEQ ID NO: 2018454
aagaaagagagucuggccc

SEQ ID NO: 2018456 - RNA, 19 nt, Artificial Sequence
  Description of Artificial Sequence: Synthetic oligonucleotide
  Sense strand starting at position 2022 of SEQ ID NO: 1881105
acucuaagaugguccuagu

SEQ ID NO: 2018457 - RNA, 19 nt, Artificial Sequence
  Description of Artificial Sequence: Synthetic oligonucleotide
  Antisense strand to SEQ ID NO: 2018456
acuaggaccaucuuagagu

SEQ ID NO: 2018458 - RNA, 19 nt, Artificial Sequence
  Description of Artificial Sequence: Synthetic oligonucleotide
  Sense strand starting at position 2036 of SEQ ID NO: 1881105
cuaguuacucccugauugu

SEQ ID NO: 2018459 - RNA, 19 nt, Artificial Sequence
  Description of Artificial Sequence: Synthetic oligonucleotide
  Antisense strand to SEQ ID NO: 2018458
acaaucagggaguaacuag

SEQ ID NO: 2018460 - RNA, 19 nt, Artificial Sequence
  Description of Artificial Sequence: Synthetic oligonucleotide
  Sense strand starting at position 2039 of SEQ ID NO: 1881105
guuacucccugauugucua

SEQ ID NO: 2018461 - RNA, 19 nt, Artificial Sequence
  Description of Artificial Sequence: Synthetic oligonucleotide
  Antisense strand to SEQ ID NO: 2018460
uagacaaucagggaguaac

SEQ ID NO: 2018462 - RNA, 19 nt, Artificial Sequence
  Description of Artificial Sequence: Synthetic oligonucleotide
  Sense strand starting at position 2051 of SEQ ID NO: 1881105
uugucuauccucugacuca

SEQ ID NO: 2018463 - RNA, 19 nt, Artificial Sequence
  Description of Artificial Sequence: Synthetic oligonucleotide
  Antisense strand to SEQ ID NO: 2018462
ugagucagaggauagacaa

SEQ ID NO: 2018464 - RNA, 19 nt, Artificial Sequence
  Description of Artificial Sequence: Synthetic oligonucleotide
  Sense strand starting at position 2062 of SEQ ID NO: 1881105
cugacucacccgugaucua

SEQ ID NO: 2018465 - RNA, 19 nt, Artificial Sequence
  Description of Artificial Sequence: Synthetic oligonucleotide
  Antisense strand to SEQ ID NO: 2018464
uagaucacgggugagucag

SEQ ID NO: 2018466 - RNA, 19 nt, Artificial Sequence
  Description of Artificial Sequence: Synthetic oligonucleotide
  Sense strand starting at position 2063 of SEQ ID NO: 1881105
ugacucacccgugaucuaa

SEQ ID NO: 2018467 - RNA, 19 nt, Artificial Sequence
  Description of Artificial Sequence: Synthetic oligonucleotide
  Antisense strand to SEQ ID NO: 2018466
uuagaucacgggugaguca

SEQ ID NO: 2018468 - RNA, 19 nt, Artificial Sequence
  Description of Artificial Sequence: Synthetic oligonucleotide
  Sense strand starting at position 2065 of SEQ ID NO: 1881105
acucacccgugaucuaaua

SEQ ID NO: 2018469 - RNA, 19 nt, Artificial Sequence
  Description of Artificial Sequence: Synthetic oligonucleotide
  Antisense strand to SEQ ID NO: 2018468
uauuagaucacgggugagu

SEQ ID NO: 2018470 - RNA, 19 nt, Artificial Sequence
  Description of Artificial Sequence: Synthetic oligonucleotide
  Sense strand starting at position 2241 of SEQ ID NO: 1881105
caaagagccuggcugaaua

SEQ ID NO: 2018471 - RNA, 19 nt, Artificial Sequence
  Description of Artificial Sequence: Synthetic oligonucleotide
  Antisense strand to SEQ ID NO: 2018470
uauucagccaggcucuuug

SEQ ID NO: 2018472 - RNA, 19 nt, Artificial Sequence
  Description of Artificial Sequence: Synthetic oligonucleotide
  Sense strand starting at position 2243 of SEQ ID NO: 1881105
aagagccuggcugaauauu

SEQ ID NO: 2018473 - RNA, 19 nt, Artificial Sequence
  Description of Artificial Sequence: Synthetic oligonucleotide
  Antisense strand to SEQ ID NO: 2018472
aauauucagccaggcucuu

SEQ ID NO: 2018474 - RNA, 19 nt, Artificial Sequence
  Description of Artificial Sequence: Synthetic oligonucleotide
  Sense strand starting at position 2258 of SEQ ID NO: 1881105
uauugugcccgugaagaca

SEQ ID NO: 2018475 - RNA, 19 nt, Artificial Sequence
  Description of Artificial Sequence: Synthetic oligonucleotide
  Antisense strand to SEQ ID NO: 2018474
ugucuucacgggcacaaua

SEQ ID NO: 2018476 - RNA, 19 nt, Artificial Sequence
  Description of Artificial Sequence: Synthetic oligonucleotide
  Sense strand starting at position 2410 of SEQ ID NO: 1881105
gagcccuugcuauagcaua

SEQ ID NO: 2018477 - RNA, 19 nt, Artificial Sequence
  Description of Artificial Sequence: Synthetic oligonucleotide
  Antisense strand to SEQ ID NO: 2018476
uaugcuauagcaagggcuc

SEQ ID NO: 2018478 - RNA, 19 nt, Artificial Sequence
  Description of Artificial Sequence: Synthetic oligonucleotide
  Sense strand starting at position 2506 of SEQ ID NO: 1881105
gagccucugcucuggagau

SEQ ID NO: 2018479 - RNA, 19 nt, Artificial Sequence
  Description of Artificial Sequence: Synthetic oligonucleotide
  Antisense strand to SEQ ID NO: 2018478
aucuccagagcagaggcuc

SEQ ID NO: 2018480 - RNA, 19 nt, Artificial Sequence
  Description of Artificial Sequence: Synthetic oligonucleotide
  Sense strand starting at position 2533 of SEQ ID NO: 1881105
gcagacaaaugccuccuua

SEQ ID NO: 2018481 - RNA, 19 nt, Artificial Sequence
  Description of Artificial Sequence: Synthetic oligonucleotide
  Antisense strand to SEQ ID NO: 2018480
uaaggaggcauuugucugc

SEQ ID NO: 2018482 - RNA, 19 nt, Artificial Sequence
  Description of Artificial Sequence: Synthetic oligonucleotide
  Sense strand starting at position 2581 of SEQ ID NO: 1881105
ggagacagcguucacucau

SEQ ID NO: 2018483 - RNA, 19 nt, Artificial Sequence
  Description of Artificial Sequence: Synthetic oligonucleotide
  Antisense strand to SEQ ID NO: 2018482
augagugaacgcugucucc

SEQ ID NO: 2018484 - RNA, 19 nt, Artificial Sequence
  Description of Artificial Sequence: Synthetic oligonucleotide
  Sense strand starting at position 2653 of SEQ ID NO: 1881105
gauuucuagugguaccaag

SEQ ID NO: 2018485 - RNA, 19 nt, Artificial Sequence
  Description of Artificial Sequence: Synthetic oligonucleotide
  Antisense strand to SEQ ID NO: 2018484
cuugguaccacuagaaauc

SEQ ID NO: 2018486 - RNA, 19 nt, Artificial Sequence
  Description of Artificial Sequence: Synthetic oligonucleotide
  Sense strand starting at position 2706 of SEQ ID NO: 1881105
cacagucuuguguggagau

SEQ ID NO: 2018487 - RNA, 19 nt, Artificial Sequence
  Description of Artificial Sequence: Synthetic oligonucleotide
  Antisense strand to SEQ ID NO: 2018486
aucuccacacaagacugug

SEQ ID NO: 2018488 - RNA, 19 nt, Artificial Sequence
  Description of Artificial Sequence: Synthetic oligonucleotide
  Sense strand starting at position 2708 of SEQ ID NO: 1881105
cagucuuguguggagauaa

SEQ ID NO: 2018489 - RNA, 19 nt, Artificial Sequence
  Description of Artificial Sequence: Synthetic oligonucleotide
  Antisense strand to SEQ ID NO: 2018488
uuaucuccacacaagacug

SEQ ID NO: 2018490 - RNA, 19 nt, Artificial Sequence
  Description of Artificial Sequence: Synthetic oligonucleotide
  Sense strand starting at position 2741 of SEQ ID NO: 1881105
uucagauugcggugaaauc

SEQ ID NO: 2018491 - RNA, 19 nt, Artificial Sequence
  Description of Artificial Sequence: Synthetic oligonucleotide
  Antisense strand to SEQ ID NO: 2018490
gauuucaccgcaaucugaa

SEQ ID NO: 2018492 - RNA, 19 nt, Artificial Sequence
  Description of Artificial Sequence: Synthetic oligonucleotide
  Sense strand starting at position 2742 of SEQ ID NO: 1881105
ucagauugcggugaaaucu

SEQ ID NO: 2018493 - RNA, 19 nt, Artificial Sequence
  Description of Artificial Sequence: Synthetic oligonucleotide
  Antisense strand to SEQ ID NO: 2018492
agauuucaccgcaaucuga

SEQ ID NO: 2018494 - RNA, 19 nt, Artificial Sequence
  Description of Artificial Sequence: Synthetic oligonucleotide
  Sense strand starting at position 2754 of SEQ ID NO: 1881105
gaaaucucccaacgacugu

SEQ ID NO: 2018495 - RNA, 19 nt, Artificial Sequence
  Description of Artificial Sequence: Synthetic oligonucleotide
  Antisense strand to SEQ ID NO: 2018494
acagucguugggagauuuc

SEQ ID NO: 2018496 - RNA, 19 nt, Artificial Sequence
  Description of Artificial Sequence: Synthetic oligonucleotide
  Sense strand starting at position 2856 of SEQ ID NO: 1881105
gagggacaucucugaguuc

SEQ ID NO: 2018497 - RNA, 19 nt, Artificial Sequence
  Description of Artificial Sequence: Synthetic oligonucleotide
  Antisense strand to SEQ ID NO: 2018496
gaacucagagaugucccuc

SEQ ID NO: 2018498 - RNA, 19 nt, Artificial Sequence
  Description of Artificial Sequence: Synthetic oligonucleotide
  Sense strand starting at position 2859 of SEQ ID NO: 1881105
ggacaucucugaguuccca

SEQ ID NO: 2018499 - RNA, 19 nt, Artificial Sequence
  Description of Artificial Sequence: Synthetic oligonucleotide
  Antisense strand to SEQ ID NO: 2018498
ugggaacucagagaugucc

SEQ ID NO: 2018500 - RNA, 19 nt, Artificial Sequence
  Description of Artificial Sequence: Synthetic oligonucleotide
  Sense strand starting at position 2868 of SEQ ID NO: 1881105
ugaguucccagccagagaa

SEQ ID NO: 2018501 - RNA, 19 nt, Artificial Sequence
  Description of Artificial Sequence: Synthetic oligonucleotide
  Antisense strand to SEQ ID NO: 2018500
uucucuggcugggaacuca

SEQ ID NO: 2018502 - RNA, 19 nt, Artificial Sequence
  Description of Artificial Sequence: Synthetic oligonucleotide
  Sense strand starting at position 3139 of SEQ ID NO: 1881105
gccagcuuucagggaagua

SEQ ID NO: 2018503 - RNA, 19 nt, Artificial Sequence
  Description of Artificial Sequence: Synthetic oligonucleotide
  Antisense strand to SEQ ID NO: 2018502
uacuucccugaaagcuggc

SEQ ID NO: 2018504 - RNA, 19 nt, Artificial Sequence
  Description of Artificial Sequence: Synthetic oligonucleotide
  Sense strand starting at position 3149 of SEQ ID NO: 1881105
agggaaguaggauguuacu

SEQ ID NO: 2018505 - RNA, 19 nt, Artificial Sequence
  Description of Artificial Sequence: Synthetic oligonucleotide
  Antisense strand to SEQ ID NO: 2018504
aguaacauccuacuucccu

SEQ ID NO: 2018506 - RNA, 19 nt, Artificial Sequence
  Description of Artificial Sequence: Synthetic oligonucleotide
  Sense strand starting at position 3259 of SEQ ID NO: 1881105
augagugaguguucacaga

SEQ ID NO: 2018507 - RNA, 19 nt, Artificial Sequence
  Description of Artificial Sequence: Synthetic oligonucleotide
  Antisense strand to SEQ ID NO: 2018506
ucugugaacacucacucau

SEQ ID NO: 2018508 - RNA, 19 nt, Artificial Sequence
  Description of Artificial Sequence: Synthetic oligonucleotide
  Sense strand starting at position 3410 of SEQ ID NO: 1881105
uuggacucucuugaucauu

SEQ ID NO: 2018509 - RNA, 19 nt, Artificial Sequence
  Description of Artificial Sequence: Synthetic oligonucleotide
  Antisense strand to SEQ ID NO: 2018508
aaugaucaagagaguccaa

SEQ ID NO: 2018510 - RNA, 19 nt, Artificial Sequence
  Description of Artificial Sequence: Synthetic oligonucleotide
  Sense strand starting at position 3412 of SEQ ID NO: 1881105
ggacucucuugaucauuau

SEQ ID NO: 2018511 - RNA, 19 nt, Artificial Sequence
  Description of Artificial Sequence: Synthetic oligonucleotide
  Antisense strand to SEQ ID NO: 2018510
auaaugaucaagagagucc

SEQ ID NO: 2018512 - RNA, 19 nt, Artificial Sequence
  Description of Artificial Sequence: Synthetic oligonucleotide
  Sense strand starting at position 3532 of SEQ ID NO: 1881105
ggaaguugcaacgauaaua

SEQ ID NO: 2018513 - RNA, 19 nt, Artificial Sequence
  Description of Artificial Sequence: Synthetic oligonucleotide
  Antisense strand to SEQ ID NO: 2018512
uauuaucguugcaacuucc

SEQ ID NO: 2018514 - RNA, 19 nt, Artificial Sequence
  Description of Artificial Sequence: Synthetic oligonucleotide
  Sense strand starting at position 3552 of SEQ ID NO: 1881105
aaagaaguccuuugauguc

SEQ ID NO: 2018515 - RNA, 19 nt, Artificial Sequence
  Description of Artificial Sequence: Synthetic oligonucleotide
  Antisense strand to SEQ ID NO: 2018514
gacaucaaaggacuucuuu

SEQ ID NO: 2018516 - RNA, 19 nt, Artificial Sequence
  Description of Artificial Sequence: Synthetic oligonucleotide
  Sense strand starting at position 3592 of SEQ ID NO: 1881105
guaacaucuuauguagcua

SEQ ID NO: 2018517 - RNA, 19 nt, Artificial Sequence
  Description of Artificial Sequence: Synthetic oligonucleotide
  Antisense strand to SEQ ID NO: 2018516
uagcuacauaagauguuac

SEQ ID NO: 2018518 - RNA, 19 nt, Artificial Sequence
  Description of Artificial Sequence: Synthetic oligonucleotide
  Sense strand starting at position 3653 of SEQ ID NO: 1881105
uguugaauucuaugucauu

SEQ ID NO: 2018519 - RNA, 19 nt, Artificial Sequence
  Description of Artificial Sequence: Synthetic oligonucleotide
  Antisense strand to SEQ ID NO: 2018518
aaugacauagaauucaaca

SEQ ID NO: 2018520 - RNA, 19 nt, Artificial Sequence
  Description of Artificial Sequence: Synthetic oligonucleotide
  Sense strand starting at position 3822 of SEQ ID NO: 1881105
ucauguagcaggugacaga

SEQ ID NO: 2018521 - RNA, 19 nt, Artificial Sequence
  Description of Artificial Sequence: Synthetic oligonucleotide
  Antisense strand to SEQ ID NO: 2018520
ucugucaccugcuacauga

SEQ ID NO: 2018522 - RNA, 19 nt, Artificial Sequence
  Description of Artificial Sequence: Synthetic oligonucleotide
  Sense strand starting at position 3940 of SEQ ID NO: 1881105
gaagaaaugucagauacag

SEQ ID NO: 2018523 - RNA, 19 nt, Artificial Sequence
  Description of Artificial Sequence: Synthetic oligonucleotide
  Antisense strand to SEQ ID NO: 2018522
cuguaucugacauuucuuc

SEQ ID NO: 2018524 - RNA, 19 nt, Artificial Sequence
  Description of Artificial Sequence: Synthetic oligonucleotide
  Sense strand starting at position 339 of SEQ ID NO: 1881106
gugcuauugcuccaacuau

SEQ ID NO: 2018525 - RNA, 19 nt, Artificial Sequence
  Description of Artificial Sequence: Synthetic oligonucleotide
  Antisense strand to SEQ ID NO: 2018524
auaguuggagcaauagcac

SEQ ID NO: 2018526 - RNA, 19 nt, Artificial Sequence
  Description of Artificial Sequence: Synthetic oligonucleotide
  Sense strand starting at position 382 of SEQ ID NO: 1881106
aagcauauggucugguuua

SEQ ID NO: 2018527 - RNA, 19 nt, Artificial Sequence
  Description of Artificial Sequence: Synthetic oligonucleotide
  Antisense strand to SEQ ID NO: 2018526
uaaaccagaccauaugcuu

SEQ ID NO: 2018528 - RNA, 19 nt, Artificial Sequence
  Description of Artificial Sequence: Synthetic oligonucleotide
  Sense strand starting at position 495 of SEQ ID NO: 1881106
cuuaauguugguuggcaua

SEQ ID NO: 2018529 - RNA, 19 nt, Artificial Sequence
  Description of Artificial Sequence: Synthetic oligonucleotide
  Antisense strand to SEQ ID NO: 2018528
uaugccaaccaacauuaag

SEQ ID NO: 2018530 - RNA, 19 nt, Artificial Sequence
  Description of Artificial Sequence: Synthetic oligonucleotide
  Sense strand starting at position 506 of SEQ ID NO: 1881106
uuggcauaggcaugauucu

SEQ ID NO: 2018531 - RNA, 19 nt, Artificial Sequence
  Description of Artificial Sequence: Synthetic oligonucleotide
  Antisense strand to SEQ ID NO: 2018530
agaaucaugccuaugccaa

SEQ ID NO: 2018532 - RNA, 19 nt, Artificial Sequence
  Description of Artificial Sequence: Synthetic oligonucleotide
  Sense strand starting at position 507 of SEQ ID NO: 1881106
uggcauaggcaugauucua

SEQ ID NO: 2018533 - RNA, 19 nt, Artificial Sequence
  Description of Artificial Sequence: Synthetic oligonucleotide
  Antisense strand to SEQ ID NO: 2018532
uagaaucaugccuaugcca

SEQ ID NO: 2018534 - RNA, 19 nt, Artificial Sequence
  Description of Artificial Sequence: Synthetic oligonucleotide
  Sense strand starting at position 548 of SEQ ID NO: 1881106
ggcugagaugaguaguauc

SEQ ID NO: 2018535 - RNA, 19 nt, Artificial Sequence
  Description of Artificial Sequence: Synthetic oligonucleotide
  Antisense strand to SEQ ID NO: 2018534
gauacuacucaucucagcc

SEQ ID NO: 2018536 - RNA, 19 nt, Artificial Sequence
  Description of Artificial Sequence: Synthetic oligonucleotide
  Sense strand starting at position 559 of SEQ ID NO: 1881106
guaguaucagugcacccaa

SEQ ID NO: 2018537 - RNA, 19 nt, Artificial Sequence
  Description of Artificial Sequence: Synthetic oligonucleotide
  Antisense strand to SEQ ID NO: 2018536
uugggugcacugauacuac

SEQ ID NO: 2018538 - RNA, 19 nt, Artificial Sequence
  Description of Artificial Sequence: Synthetic oligonucleotide
  Sense strand starting at position 576 of SEQ ID NO: 1881106
aaugaagggcucugacaca

SEQ ID NO: 2018539 - RNA, 19 nt, Artificial Sequence
  Description of Artificial Sequence: Synthetic oligonucleotide
  Antisense strand to SEQ ID NO: 2018538
ugugucagagcccuucauu

SEQ ID NO: 2018540 - RNA, 19 nt, Artificial Sequence
  Description of Artificial Sequence: Synthetic oligonucleotide
  Sense strand starting at position 777 of SEQ ID NO: 1881106
agauuccuggugugaaauu

SEQ ID NO: 2018541 - RNA, 19 nt, Artificial Sequence
  Description of Artificial Sequence: Synthetic oligonucleotide
  Antisense strand to SEQ ID NO: 2018540
aauuucacaccaggaaucu

SEQ ID NO: 2018542 - RNA, 19 nt, Artificial Sequence
  Description of Artificial Sequence: Synthetic oligonucleotide
  Sense strand starting at position 786 of SEQ ID NO: 1881106
gugugaaauucucuugagc

SEQ ID NO: 2018543 - RNA, 19 nt, Artificial Sequence
  Description of Artificial Sequence: Synthetic oligonucleotide
  Antisense strand to SEQ ID NO: 2018542
gcucaagagaauuucacac

SEQ ID NO: 2018544 - RNA, 19 nt, Artificial Sequence
  Description of Artificial Sequence: Synthetic oligonucleotide
  Sense strand starting at position 789 of SEQ ID NO: 1881106
ugaaauucucuugagcuuc

SEQ ID NO: 2018545 - RNA, 19 nt, Artificial Sequence
  Description of Artificial Sequence: Synthetic oligonucleotide
  Antisense strand to SEQ ID NO: 2018544
gaagcucaagagaauuuca

SEQ ID NO: 2018546 - RNA, 19 nt, Artificial Sequence
  Description of Artificial Sequence: Synthetic oligonucleotide
  Sense strand starting at position 930 of SEQ ID NO: 1881106
ggacccaugcagcauaauu

SEQ ID NO: 2018547 - RNA, 19 nt, Artificial Sequence
  Description of Artificial Sequence: Synthetic oligonucleotide
  Antisense strand to SEQ ID NO: 2018546
aauuaugcugcaugggucc

SEQ ID NO: 2018548 - RNA, 19 nt, Artificial Sequence
  Description of Artificial Sequence: Synthetic oligonucleotide
  Sense strand starting at position 956 of SEQ ID NO: 1881106
aaugacuagcuguguuaaa

SEQ ID NO: 2018549 - RNA, 19 nt, Artificial Sequence
  Description of Artificial Sequence: Synthetic oligonucleotide
  Antisense strand to SEQ ID NO: 2018548
uuuaacacagcuagucauu

SEQ ID NO: 2018550 - RNA, 19 nt, Artificial Sequence
  Description of Artificial Sequence: Synthetic oligonucleotide
  Sense strand starting at position 957 of SEQ ID NO: 1881106
augacuagcuguguuaaag

SEQ ID NO: 2018551 - RNA, 19 nt, Artificial Sequence
  Description of Artificial Sequence: Synthetic oligonucleotide
  Antisense strand to SEQ ID NO: 2018550
cuuuaacacagcuagucau

SEQ ID NO: 2018552 - RNA, 19 nt, Artificial Sequence
  Description of Artificial Sequence: Synthetic oligonucleotide
  Sense strand starting at position 1043 of SEQ ID NO: 1881106
ggucaaucugucggguaau

SEQ ID NO: 2018553 - RNA, 19 nt, Artificial Sequence
  Description of Artificial Sequence: Synthetic oligonucleotide
  Antisense strand to SEQ ID NO: 2018552
auuacccgacagauugacc

SEQ ID NO: 2018554 - RNA, 19 nt, Artificial Sequence
  Description of Artificial Sequence: Synthetic oligonucleotide
  Sense strand starting at position 1046 of SEQ ID NO: 1881106
caaucugucggguaauuau

SEQ ID NO: 2018555 - RNA, 19 nt, Artificial Sequence
  Description of Artificial Sequence: Synthetic oligonucleotide
  Antisense strand to SEQ ID NO: 2018554
auaauuacccgacagauug

SEQ ID NO: 2018556 - RNA, 19 nt, Artificial Sequence
  Description of Artificial Sequence: Synthetic oligonucleotide
  Sense strand starting at position 1080 of SEQ ID NO: 1881106
ucaggauaguuuccauaug

SEQ ID NO: 2018557 - RNA, 19 nt, Artificial Sequence
  Description of Artificial Sequence: Synthetic oligonucleotide
  Antisense strand to SEQ ID NO: 2018556
cauauggaaacuauccuga

SEQ ID NO: 2018558 - RNA, 19 nt, Artificial Sequence
  Description of Artificial Sequence: Synthetic oligonucleotide
  Sense strand starting at position 1108 of SEQ ID NO: 1881106
gccucagagcaauauccua

SEQ ID NO: 2018559 - RNA, 19 nt, Artificial Sequence
  Description of Artificial Sequence: Synthetic oligonucleotide
  Antisense strand to SEQ ID NO: 2018558
uaggauauugcucugaggc

SEQ ID NO: 2018560 - RNA, 19 nt, Artificial Sequence
  Description of Artificial Sequence: Synthetic oligonucleotide
  Sense strand starting at position 1215 of SEQ ID NO: 1881106
ccaaguguccugggaacag

SEQ ID NO: 2018561 - RNA, 19 nt, Artificial Sequence
  Description of Artificial Sequence: Synthetic oligonucleotide
  Antisense strand to SEQ ID NO: 2018560
cuguucccaggacacuugg

SEQ ID NO: 2018562 - RNA, 19 nt, Artificial Sequence
  Description of Artificial Sequence: Synthetic oligonucleotide
  Sense strand starting at position 1316 of SEQ ID NO: 1881106
cuuacaguuucucuguuua

SEQ ID NO: 2018563 - RNA, 19 nt, Artificial Sequence
  Description of Artificial Sequence: Synthetic oligonucleotide
  Antisense strand to SEQ ID NO: 2018562
uaaacagagaaacuguaag

SEQ ID NO: 2018564 - RNA, 19 nt, Artificial Sequence
  Description of Artificial Sequence: Synthetic oligonucleotide
  Sense strand starting at position 1780 of SEQ ID NO: 1881106
gcaucuuaucuaggacuca

SEQ ID NO: 2018565 - RNA, 19 nt, Artificial Sequence
  Description of Artificial Sequence: Synthetic oligonucleotide
  Antisense strand to SEQ ID NO: 2018564
ugaguccuagauaagaugc

SEQ ID NO: 2018566 - RNA, 19 nt, Artificial Sequence
  Description of Artificial Sequence: Synthetic oligonucleotide
  Sense strand starting at position 2107 of SEQ ID NO: 1881106
ggcaccuagcauugaaaug

SEQ ID NO: 2018567 - RNA, 19 nt, Artificial Sequence
  Description of Artificial Sequence: Synthetic oligonucleotide
  Antisense strand to SEQ ID NO: 2018566
cauuucaaugcuaggugcc

SEQ ID NO: 2018568 - RNA, 19 nt, Artificial Sequence
  Description of Artificial Sequence: Synthetic oligonucleotide
  Sense strand starting at position 2144 of SEQ ID NO: 1881106
ccaggugagcuuggaagaa

SEQ ID NO: 2018569 - RNA, 19 nt, Artificial Sequence
  Description of Artificial Sequence: Synthetic oligonucleotide
  Antisense strand to SEQ ID NO: 2018568
uucuuccaagcucaccugg

SEQ ID NO: 2018570 - RNA, 19 nt, Artificial Sequence
  Description of Artificial Sequence: Synthetic oligonucleotide
  Sense strand starting at position 2168 of SEQ ID NO: 1881106
ucguaccucagauguugau

SEQ ID NO: 2018571 - RNA, 19 nt, Artificial Sequence
  Description of Artificial Sequence: Synthetic oligonucleotide
  Antisense strand to SEQ ID NO: 2018570
aucaacaucugagguacga

SEQ ID NO: 2018572 - RNA, 19 nt, Artificial Sequence
  Description of Artificial Sequence: Synthetic oligonucleotide
  Sense strand starting at position 2184 of SEQ ID NO: 1881106
gauuacagccuuugggaca

SEQ ID NO: 2018573 - RNA, 19 nt, Artificial Sequence
  Description of Artificial Sequence: Synthetic oligonucleotide
  Antisense strand to SEQ ID NO: 2018572
ugucccaaaggcuguaauc

SEQ ID NO: 2018574 - RNA, 19 nt, Artificial Sequence
  Description of Artificial Sequence: Synthetic oligonucleotide
  Sense strand starting at position 2189 of SEQ ID NO: 1881106
cagccuuugggacauugau

SEQ ID NO: 2018575 - RNA, 19 nt, Artificial Sequence
  Description of Artificial Sequence: Synthetic oligonucleotide
  Antisense strand to SEQ ID NO: 2018574
aucaaugucccaaaggcug

SEQ ID NO: 2018576 - RNA, 19 nt, Artificial Sequence
  Description of Artificial Sequence: Synthetic oligonucleotide
  Sense strand starting at position 2198 of SEQ ID NO: 1881106
ggacauugaucagaagauc

SEQ ID NO: 2018577 - RNA, 19 nt, Artificial Sequence
  Description of Artificial Sequence: Synthetic oligonucleotide
  Antisense strand to SEQ ID NO: 2018576
gaucuucugaucaaugucc

SEQ ID NO: 2018578 - RNA, 19 nt, Artificial Sequence
  Description of Artificial Sequence: Synthetic oligonucleotide
  Sense strand starting at position 2209 of SEQ ID NO: 1881106
agaagaucugguuaagcuu

SEQ ID NO: 2018579 - RNA, 19 nt, Artificial Sequence
  Description of Artificial Sequence: Synthetic oligonucleotide
  Antisense strand to SEQ ID NO: 2018578
aagcuuaaccagaucuucu

SEQ ID NO: 2018580 - RNA, 19 nt, Artificial Sequence
  Description of Artificial Sequence: Synthetic oligonucleotide
  Sense strand starting at position 2223 of SEQ ID NO: 1881106
agcuucugaccauggaaau

SEQ ID NO: 2018581 - RNA, 19 nt, Artificial Sequence
  Description of Artificial Sequence: Synthetic oligonucleotide
  Antisense strand to SEQ ID NO: 2018580
auuuccauggucagaagcu

SEQ ID NO: 2018582 - RNA, 19 nt, Artificial Sequence
  Description of Artificial Sequence: Synthetic oligonucleotide
  Sense strand starting at position 2224 of SEQ ID NO: 1881106
gcuucugaccauggaaaug

SEQ ID NO: 2018583 - RNA, 19 nt, Artificial Sequence
  Description of Artificial Sequence: Synthetic oligonucleotide
  Antisense strand to SEQ ID NO: 2018582
cauuuccauggucagaagc

SEQ ID NO: 2018584 - RNA, 19 nt, Artificial Sequence
  Description of Artificial Sequence: Synthetic oligonucleotide
  Sense strand starting at position 2638 of SEQ ID NO: 1881106
aagcaaugucuacagcaga

SEQ ID NO: 2018585 - RNA, 19 nt, Artificial Sequence
  Description of Artificial Sequence: Synthetic oligonucleotide
  Antisense strand to SEQ ID NO: 2018584
ucugcuguagacauugcuu

SEQ ID NO: 2018586 - RNA, 19 nt, Artificial Sequence
  Description of Artificial Sequence: Synthetic oligonucleotide
  Sense strand starting at position 2691 of SEQ ID NO: 1881106
cuugcuucccuaggauacu

SEQ ID NO: 2018587 - RNA, 19 nt, Artificial Sequence
  Description of Artificial Sequence: Synthetic oligonucleotide
  Antisense strand to SEQ ID NO: 2018586
aguauccuagggaagcaag

SEQ ID NO: 2018588 - RNA, 19 nt, Artificial Sequence
  Description of Artificial Sequence: Synthetic oligonucleotide
  Sense strand starting at position 2702 of SEQ ID NO: 1881106
aggauacuuuagccuuaca

SEQ ID NO: 2018589 - RNA, 19 nt, Artificial Sequence
  Description of Artificial Sequence: Synthetic oligonucleotide
  Antisense strand to SEQ ID NO: 2018588
uguaaggcuaaaguauccu

SEQ ID NO: 2018590 - RNA, 19 nt, Artificial Sequence
  Description of Artificial Sequence: Synthetic oligonucleotide
  Sense strand starting at position 2746 of SEQ ID NO: 1881106
ggaugaucaugcccaugga

SEQ ID NO: 2018591 - RNA, 19 nt, Artificial Sequence
  Description of Artificial Sequence: Synthetic oligonucleotide
  Antisense strand to SEQ ID NO: 2018590
uccaugggcaugaucaucc

SEQ ID NO: 2018592 - RNA, 19 nt, Artificial Sequence
  Description of Artificial Sequence: Synthetic oligonucleotide
  Sense strand starting at position 2749 of SEQ ID NO: 1881106
ugaucaugcccauggaaug

SEQ ID NO: 2018593 - RNA, 19 nt, Artificial Sequence
  Description of Artificial Sequence: Synthetic oligonucleotide
  Antisense strand to SEQ ID NO: 2018592
cauuccaugggcaugauca

SEQ ID NO: 2018594 - RNA, 19 nt, Artificial Sequence
  Description of Artificial Sequence: Synthetic oligonucleotide
  Sense strand starting at position 2768 of SEQ ID NO: 1881106
gggccaaucugaccuaagu

SEQ ID NO: 2018595 - RNA, 19 nt, Artificial Sequence
  Description of Artificial Sequence: Synthetic oligonucleotide
  Antisense strand to SEQ ID NO: 2018594
acuuaggucagauuggccc

SEQ ID NO: 2018596 - RNA, 19 nt, Artificial Sequence
  Description of Artificial Sequence: Synthetic oligonucleotide
  Sense strand starting at position 2911 of SEQ ID NO: 1881106
augccugaccauuggagau

SEQ ID NO: 2018597 - RNA, 19 nt, Artificial Sequence
  Description of Artificial Sequence: Synthetic oligonucleotide
  Antisense strand to SEQ ID NO: 2018596
aucuccaauggucaggcau

SEQ ID NO: 2018598 - RNA, 19 nt, Artificial Sequence
  Description of Artificial Sequence: Synthetic oligonucleotide
  Sense strand starting at position 3151 of SEQ ID NO: 1881106
ccgugacaccauugucaau

SEQ ID NO: 2018599 - RNA, 19 nt, Artificial Sequence
  Description of Artificial Sequence: Synthetic oligonucleotide
  Antisense strand to SEQ ID NO: 2018598
auugacaauggugucacgg

SEQ ID NO: 2018600 - RNA, 19 nt, Artificial Sequence
  Description of Artificial Sequence: Synthetic oligonucleotide
  Sense strand starting at position 3920 of SEQ ID NO: 1881106
gcugaaauggcugacguga

SEQ ID NO: 2018601 - RNA, 19 nt, Artificial Sequence
  Description of Artificial Sequence: Synthetic oligonucleotide
  Antisense strand to SEQ ID NO: 2018600
ucacgucagccauuucagc

SEQ ID NO: 2018602 - RNA, 19 nt, Artificial Sequence
  Description of Artificial Sequence: Synthetic oligonucleotide
  Sense strand starting at position 3929 of SEQ ID NO: 1881106
gcugacgugacagaaauau

SEQ ID NO: 2018603 - RNA, 19 nt, Artificial Sequence
  Description of Artificial Sequence: Synthetic oligonucleotide
  Antisense strand to SEQ ID NO: 2018602
auauuucugucacgucagc

SEQ ID NO: 2018604 - RNA, 19 nt, Artificial Sequence
  Description of Artificial Sequence: Synthetic oligonucleotide
  Sense strand starting at position 17 of SEQ ID NO: 1881107
caguucugguuuccacaga

SEQ ID NO: 2018605 - RNA, 19 nt, Artificial Sequence
  Description of Artificial Sequence: Synthetic oligonucleotide
  Antisense strand to SEQ ID NO: 2018604
ucuguggaaaccagaacug

SEQ ID NO: 2018606 - RNA, 19 nt, Artificial Sequence
  Description of Artificial Sequence: Synthetic oligonucleotide
  Sense strand starting at position 18 of SEQ ID NO: 1881107
aguucugguuuccacagau

SEQ ID NO: 2018607 - RNA, 19 nt, Artificial Sequence
  Description of Artificial Sequence: Synthetic oligonucleotide
  Antisense strand to SEQ ID NO: 2018606
aucuguggaaaccagaacu

SEQ ID NO: 2018608 - RNA, 19 nt, Artificial Sequence
  Description of Artificial Sequence: Synthetic oligonucleotide
  Sense strand starting at position 60 of SEQ ID NO: 1881107
ggaguccugcuguauucuu

SEQ ID NO: 2018609 - RNA, 19 nt, Artificial Sequence
  Description of Artificial Sequence: Synthetic oligonucleotide
  Antisense strand to SEQ ID NO: 2018608
aagaauacagcaggacucc

SEQ ID NO: 2018610 - RNA, 19 nt, Artificial Sequence
  Description of Artificial Sequence: Synthetic oligonucleotide
  Sense strand starting at position 78 of SEQ ID NO: 1881107
ucaccagacuugucucaga

SEQ ID NO: 2018611 - RNA, 19 nt, Artificial Sequence
  Description of Artificial Sequence: Synthetic oligonucleotide
  Antisense strand to SEQ ID NO: 2018610
ucugagacaagucugguga

SEQ ID NO: 2018612 - RNA, 19 nt, Artificial Sequence
  Description of Artificial Sequence: Synthetic oligonucleotide
  Sense strand starting at position 81 of SEQ ID NO: 1881107
ccagacuugucucagagca

SEQ ID NO: 2018613 - RNA, 19 nt, Artificial Sequence
  Description of Artificial Sequence: Synthetic oligonucleotide
  Antisense strand to SEQ ID NO: 2018612
ugcucugagacaagucugg

SEQ ID NO: 2018614 - RNA, 19 nt, Artificial Sequence
  Description of Artificial Sequence: Synthetic oligonucleotide
  Sense strand starting at position 276 of SEQ ID NO: 1881107
caaagccuuucggaaugaa

SEQ ID NO: 2018615 - RNA, 19 nt, Artificial Sequence
  Description of Artificial Sequence: Synthetic oligonucleotide
  Antisense strand to SEQ ID NO: 2018614
uucauuccgaaaggcuuug

SEQ ID NO: 2018616 - RNA, 19 nt, Artificial Sequence
  Description of Artificial Sequence: Synthetic oligonucleotide
  Sense strand starting at position 279 of SEQ ID NO: 1881107
agccuuucggaaugaaucu

SEQ ID NO: 2018617 - RNA, 19 nt, Artificial Sequence
  Description of Artificial Sequence: Synthetic oligonucleotide
  Antisense strand to SEQ ID NO: 2018616
agauucauuccgaaaggcu

SEQ ID NO: 2018618 - RNA, 19 nt, Artificial Sequence
  Description of Artificial Sequence: Synthetic oligonucleotide
  Sense strand starting at position 286 of SEQ ID NO: 1881107
cggaaugaaucucccaguu

SEQ ID NO: 2018619 - RNA, 19 nt, Artificial Sequence
  Description of Artificial Sequence: Synthetic oligonucleotide
  Antisense strand to SEQ ID NO: 2018618
aacugggagauucauuccg

SEQ ID NO: 2018620 - RNA, 19 nt, Artificial Sequence
  Description of Artificial Sequence: Synthetic oligonucleotide
  Sense strand starting at position 1085 of SEQ ID NO: 1881107
ucgugaggucaguaguuca

SEQ ID NO: 2018621 - RNA, 19 nt, Artificial Sequence
  Description of Artificial Sequence: Synthetic oligonucleotide
  Antisense strand to SEQ ID NO: 2018620
ugaacuacugaccucacga

SEQ ID NO: 2018622 - RNA, 19 nt, Artificial Sequence
  Description of Artificial Sequence: Synthetic oligonucleotide
  Sense strand starting at position 1413 of SEQ ID NO: 1881107
aucuauucgagucgagagu

SEQ ID NO: 2018623 - RNA, 19 nt, Artificial Sequence
  Description of Artificial Sequence: Synthetic oligonucleotide
  Antisense strand to SEQ ID NO: 2018622
acucucgacucgaauagau

SEQ ID NO: 2018624 - RNA, 19 nt, Artificial Sequence
  Description of Artificial Sequence: Synthetic oligonucleotide
  Sense strand starting at position 1414 of SEQ ID NO: 1881107
ucuauucgagucgagagua

SEQ ID NO: 2018625 - RNA, 19 nt, Artificial Sequence
  Description of Artificial Sequence: Synthetic oligonucleotide
  Antisense strand to SEQ ID NO: 2018624
uacucucgacucgaauaga

SEQ ID NO: 2018626 - RNA, 19 nt, Artificial Sequence
  Description of Artificial Sequence: Synthetic oligonucleotide
  Sense strand starting at position 1422 of SEQ ID NO: 1881107
agucgagaguauucaguua

SEQ ID NO: 2018627 - RNA, 19 nt, Artificial Sequence
  Description of Artificial Sequence: Synthetic oligonucleotide
  Antisense strand to SEQ ID NO: 2018626
uaacugaauacucucgacu

SEQ ID NO: 2018628 - RNA, 19 nt, Artificial Sequence
  Description of Artificial Sequence: Synthetic oligonucleotide
  Sense strand starting at position 1436 of SEQ ID NO: 1881107
aguuaucagccucagaaau

SEQ ID NO: 2018629 - RNA, 19 nt, Artificial Sequence
  Description of Artificial Sequence: Synthetic oligonucleotide
  Antisense strand to SEQ ID NO: 2018628
auuucugaggcugauaacu

SEQ ID NO: 2018630 - RNA, 19 nt, Artificial Sequence
  Description of Artificial Sequence: Synthetic oligonucleotide
  Sense strand starting at position 1596 of SEQ ID NO: 1881107
ucuggugcuaggugugaga

SEQ ID NO: 2018631 - RNA, 19 nt, Artificial Sequence
  Description of Artificial Sequence: Synthetic oligonucleotide
  Antisense strand to SEQ ID NO: 2018630
ucucacaccuagcaccaga

SEQ ID NO: 2018632 - RNA, 19 nt, Artificial Sequence
  Description of Artificial Sequence: Synthetic oligonucleotide
  Sense strand starting at position 1614 of SEQ ID NO: 1881107
accacagccuuucuggaaa

SEQ ID NO: 2018633 - RNA, 19 nt, Artificial Sequence
  Description of Artificial Sequence: Synthetic oligonucleotide
  Antisense strand to SEQ ID NO: 2018632
uuuccagaaaggcuguggu

SEQ ID NO: 2018634 - RNA, 19 nt, Artificial Sequence
  Description of Artificial Sequence: Synthetic oligonucleotide
  Sense strand starting at position 1891 of SEQ ID NO: 1881107
gugggagccucuuccugaa

SEQ ID NO: 2018635 - RNA, 19 nt, Artificial Sequence
  Description of Artificial Sequence: Synthetic oligonucleotide
  Antisense strand to SEQ ID NO: 2018634
uucaggaagaggcucccac

SEQ ID NO: 2018636 - RNA, 19 nt, Artificial Sequence
  Description of Artificial Sequence: Synthetic oligonucleotide
  Sense strand starting at position 1946 of SEQ ID NO: 1881107
uuuauuguccauugucuca

SEQ ID NO: 2018637 - RNA, 19 nt, Artificial Sequence
  Description of Artificial Sequence: Synthetic oligonucleotide
  Antisense strand to SEQ ID NO: 2018636
ugagacaauggacaauaaa

SEQ ID NO: 2018638 - RNA, 19 nt, Artificial Sequence
  Description of Artificial Sequence: Synthetic oligonucleotide
  Sense strand starting at position 1991 of SEQ ID NO: 1881107
cccaauugcucggguggau

SEQ ID NO: 2018639 - RNA, 19 nt, Artificial Sequence
  Description of Artificial Sequence: Synthetic oligonucleotide
  Antisense strand to SEQ ID NO: 2018638
auccacccgagcaauuggg

SEQ ID NO: 2018640 - RNA, 19 nt, Artificial Sequence
  Description of Artificial Sequence: Synthetic oligonucleotide
  Sense strand starting at position 1994 of SEQ ID NO: 1881107
aauugcucggguggauuaa

SEQ ID NO: 2018641 - RNA, 19 nt, Artificial Sequence
  Description of Artificial Sequence: Synthetic oligonucleotide
  Antisense strand to SEQ ID NO: 2018640
uuaauccacccgagcaauu

SEQ ID NO: 2018642 - RNA, 19 nt, Artificial Sequence
  Description of Artificial Sequence: Synthetic oligonucleotide
  Sense strand starting at position 1995 of SEQ ID NO: 1881107
auugcucggguggauuaau

SEQ ID NO: 2018643 - RNA, 19 nt, Artificial Sequence
  Description of Artificial Sequence: Synthetic oligonucleotide
  Antisense strand to SEQ ID NO: 2018642
auuaauccacccgagcaau

SEQ ID NO: 2018644 - RNA, 19 nt, Artificial Sequence
  Description of Artificial Sequence: Synthetic oligonucleotide
  Sense strand starting at position 2292 of SEQ ID NO: 1881107
agcaaugugucuucucuuu

SEQ ID NO: 2018645 - RNA, 19 nt, Artificial Sequence
  Description of Artificial Sequence: Synthetic oligonucleotide
  Antisense strand to SEQ ID NO: 2018644
aaagagaagacacauugcu

SEQ ID NO: 2018646 - RNA, 19 nt, Artificial Sequence
  Description of Artificial Sequence: Synthetic oligonucleotide
  Sense strand starting at position 2301 of SEQ ID NO: 1881107
ucuucucuuugguugggaa

SEQ ID NO: 2018647 - RNA, 19 nt, Artificial Sequence
  Description of Artificial Sequence: Synthetic oligonucleotide
  Antisense strand to SEQ ID NO: 2018646
uucccaaccaaagagaaga

SEQ ID NO: 2018648 - RNA, 19 nt, Artificial Sequence
  Description of Artificial Sequence: Synthetic oligonucleotide
  Sense strand starting at position 2302 of SEQ ID NO: 1881107
cuucucuuugguugggaau

SEQ ID NO: 2018649 - RNA, 19 nt, Artificial Sequence
  Description of Artificial Sequence: Synthetic oligonucleotide
  Antisense strand to SEQ ID NO: 2018648
auucccaaccaaagagaag

SEQ ID NO: 2018650 - RNA, 19 nt, Artificial Sequence
  Description of Artificial Sequence: Synthetic oligonucleotide
  Sense strand starting at position 2374 of SEQ ID NO: 1881107
ugaagaucgugagucccau

SEQ ID NO: 2018651 - RNA, 19 nt, Artificial Sequence
  Description of Artificial Sequence: Synthetic oligonucleotide
  Antisense strand to SEQ ID NO: 2018650
augggacucacgaucuuca

SEQ ID NO: 2018652 - RNA, 19 nt, Artificial Sequence
  Description of Artificial Sequence: Synthetic oligonucleotide
  Sense strand starting at position 2430 of SEQ ID NO: 1881107
uacacaggucgcgaaugaa

SEQ ID NO: 2018653 - RNA, 19 nt, Artificial Sequence
  Description of Artificial Sequence: Synthetic oligonucleotide
  Antisense strand to SEQ ID NO: 2018652
uucauucgcgaccugugua

SEQ ID NO: 2018654 - RNA, 19 nt, Artificial Sequence
  Description of Artificial Sequence: Synthetic oligonucleotide
  Sense strand starting at position 2516 of SEQ ID NO: 1881107
aacgaaagcuugugacuga

SEQ ID NO: 2018655 - RNA, 19 nt, Artificial Sequence
  Description of Artificial Sequence: Synthetic oligonucleotide
  Antisense strand to SEQ ID NO: 2018654
ucagucacaagcuuucguu

SEQ ID NO: 2018656 - RNA, 19 nt, Artificial Sequence
  Description of Artificial Sequence: Synthetic oligonucleotide
  Sense strand starting at position 2645 of SEQ ID NO: 1881107
ccugccaugccuugaagua

SEQ ID NO: 2018657 - RNA, 19 nt, Artificial Sequence
  Description of Artificial Sequence: Synthetic oligonucleotide
  Antisense strand to SEQ ID NO: 2018656
uacuucaaggcauggcagg

SEQ ID NO: 2018658 - RNA, 19 nt, Artificial Sequence
  Description of Artificial Sequence: Synthetic oligonucleotide
  Sense strand starting at position 2646 of SEQ ID NO: 1881107
cugccaugccuugaaguaa

SEQ ID NO: 2018659 - RNA, 19 nt, Artificial Sequence
  Description of Artificial Sequence: Synthetic oligonucleotide
  Antisense strand to SEQ ID NO: 2018658
uuacuucaaggcauggcag

SEQ ID NO: 2018660 - RNA, 19 nt, Artificial Sequence
  Description of Artificial Sequence: Synthetic oligonucleotide
  Sense strand starting at position 2669 of SEQ ID NO: 1881107
gaccuuguguggccacauu

SEQ ID NO: 2018661 - RNA, 19 nt, Artificial Sequence
  Description of Artificial Sequence: Synthetic oligonucleotide
  Antisense strand to SEQ ID NO: 2018660
aauguggccacacaagguc

SEQ ID NO: 2018662 - RNA, 19 nt, Artificial Sequence
  Description of Artificial Sequence: Synthetic oligonucleotide
  Sense strand starting at position 2691 of SEQ ID NO: 1881107
ccuuguuaguaacucagaa

SEQ ID NO: 2018663 - RNA, 19 nt, Artificial Sequence
  Description of Artificial Sequence: Synthetic oligonucleotide
  Antisense strand to SEQ ID NO: 2018662
uucugaguuacuaacaagg

SEQ ID NO: 2018664 - RNA, 19 nt, Artificial Sequence
  Description of Artificial Sequence: Synthetic oligonucleotide
  Sense strand starting at position 2695 of SEQ ID NO: 1881107
guuaguaacucagaagaua

SEQ ID NO: 2018665 - RNA, 19 nt, Artificial Sequence
  Description of Artificial Sequence: Synthetic oligonucleotide
  Antisense strand to SEQ ID NO: 2018664
uaucuucugaguuacuaac

SEQ ID NO: 2018666 - RNA, 19 nt, Artificial Sequence
  Description of Artificial Sequence: Synthetic oligonucleotide
  Sense strand starting at position 3033 of SEQ ID NO: 1881107
gaggaagaauucuggaguc

SEQ ID NO: 2018667 - RNA, 19 nt, Artificial Sequence
  Description of Artificial Sequence: Synthetic oligonucleotide
  Antisense strand to SEQ ID NO: 2018666
gacuccagaauucuuccuc

SEQ ID NO: 2018668 - RNA, 19 nt, Artificial Sequence
  Description of Artificial Sequence: Synthetic oligonucleotide
  Sense strand starting at position 3105 of SEQ ID NO: 1881107
guaggauggcuccaaguca

SEQ ID NO: 2018669 - RNA, 19 nt, Artificial Sequence
  Description of Artificial Sequence: Synthetic oligonucleotide
  Antisense strand to SEQ ID NO: 2018668
ugacuuggagccauccuac

SEQ ID NO: 2018670 - RNA, 19 nt, Artificial Sequence
  Description of Artificial Sequence: Synthetic oligonucleotide
  Sense strand starting at position 3206 of SEQ ID NO: 1881107
uuauuuguuugcuggagac

SEQ ID NO: 2018671 - RNA, 19 nt, Artificial Sequence
  Description of Artificial Sequence: Synthetic oligonucleotide
  Antisense strand to SEQ ID NO: 2018670
gucuccagcaaacaaauaa

SEQ ID NO: 2018672 - RNA, 19 nt, Artificial Sequence
  Description of Artificial Sequence: Synthetic oligonucleotide
  Sense strand starting at position 3509 of SEQ ID NO: 1881107
acuuguguacuccaccaaa

SEQ ID NO: 2018673 - RNA, 19 nt, Artificial Sequence
  Description of Artificial Sequence: Synthetic oligonucleotide
  Antisense strand to SEQ ID NO: 2018672
uuugguggaguacacaagu

SEQ ID NO: 2018674 - RNA, 19 nt, Artificial Sequence
  Description of Artificial Sequence: Synthetic oligonucleotide
  Sense strand starting at position 3540 of SEQ ID NO: 1881107
cccugacuucgguggcuua

SEQ ID NO: 2018675 - RNA, 19 nt, Artificial Sequence
  Description of Artificial Sequence: Synthetic oligonucleotide
  Antisense strand to SEQ ID NO: 2018674
uaagccaccgaagucaggg

SEQ ID NO: 2018676 - RNA, 19 nt, Artificial Sequence
  Description of Artificial Sequence: Synthetic oligonucleotide
  Sense strand starting at position 3543 of SEQ ID NO: 1881107
ugacuucgguggcuuaaga

SEQ ID NO: 2018677 - RNA, 19 nt, Artificial Sequence
  Description of Artificial Sequence: Synthetic oligonucleotide
  Antisense strand to SEQ ID NO: 2018676
ucuuaagccaccgaaguca

SEQ ID NO: 2018678 - RNA, 19 nt, Artificial Sequence
  Description of Artificial Sequence: Synthetic oligonucleotide
  Sense strand starting at position 3964 of SEQ ID NO: 1881107
gaugaauaauucgcucuga

SEQ ID NO: 2018679 - RNA, 19 nt, Artificial Sequence
  Description of Artificial Sequence: Synthetic oligonucleotide
  Antisense strand to SEQ ID NO: 2018678
ucagagcgaauuauucauc

SEQ ID NO: 2018680 - RNA, 19 nt, Artificial Sequence
  Description of Artificial Sequence: Synthetic oligonucleotide
  Sense strand starting at position 3965 of SEQ ID NO: 1881107
augaauaauucgcucugaa

SEQ ID NO: 2018681 - RNA, 19 nt, Artificial Sequence
  Description of Artificial Sequence: Synthetic oligonucleotide
  Antisense strand to SEQ ID NO: 2018680
uucagagcgaauuauucau

SEQ ID NO: 2018682 - RNA, 19 nt, Artificial Sequence
  Description of Artificial Sequence: Synthetic oligonucleotide
  Sense strand starting at position 3969 of SEQ ID NO: 1881107
auaauucgcucugaaagaa

SEQ ID NO: 2018683 - RNA, 19 nt, Artificial Sequence
  Description of Artificial Sequence: Synthetic oligonucleotide
  Antisense strand to SEQ ID NO: 2018682
uucuuucagagcgaauuau

SEQ ID NO: 2018684 - RNA, 19 nt, Artificial Sequence
  Description of Artificial Sequence: Synthetic oligonucleotide
  Sense strand starting at position 49 of SEQ ID NO: 1881108
aggauaacacauugcauua

SEQ ID NO: 2018685 - RNA, 19 nt, Artificial Sequence
  Description of Artificial Sequence: Synthetic oligonucleotide
  Antisense strand to SEQ ID NO: 2018684
uaaugcaauguguuauccu

SEQ ID NO: 2018686 - RNA, 19 nt, Artificial Sequence
  Description of Artificial Sequence: Synthetic oligonucleotide
  Sense strand starting at position 95 of SEQ ID NO: 1881108
uggacauuaagauguaggu

SEQ ID NO: 2018687 - RNA, 19 nt, Artificial Sequence
  Description of Artificial Sequence: Synthetic oligonucleotide
  Antisense strand to SEQ ID NO: 2018686
accuacaucuuaaugucca

SEQ ID NO: 2018688 - RNA, 19 nt, Artificial Sequence
  Description of Artificial Sequence: Synthetic oligonucleotide
  Sense strand starting at position 99 of SEQ ID NO: 1881108
cauuaagauguaggucuau

SEQ ID NO: 2018689 - RNA, 19 nt, Artificial Sequence
  Description of Artificial Sequence: Synthetic oligonucleotide
  Antisense strand to SEQ ID NO: 2018688
auagaccuacaucuuaaug

SEQ ID NO: 2018690 - RNA, 19 nt, Artificial Sequence
  Description of Artificial Sequence: Synthetic oligonucleotide
  Sense strand starting at position 168 of SEQ ID NO: 1881108
agcucagauuaucagauuu

SEQ ID NO: 2018691 - RNA, 19 nt, Artificial Sequence
  Description of Artificial Sequence: Synthetic oligonucleotide
  Antisense strand to SEQ ID NO: 2018690
aaaucugauaaucugagcu

SEQ ID NO: 2018692 - RNA, 19 nt, Artificial Sequence
  Description of Artificial Sequence: Synthetic oligonucleotide
  Sense strand starting at position 208 of SEQ ID NO: 1881108
ggcauuucuguuggcauca

SEQ ID NO: 2018693 - RNA, 19 nt, Artificial Sequence
  Description of Artificial Sequence: Synthetic oligonucleotide
  Antisense strand to SEQ ID NO: 2018692
ugaugccaacagaaaugcc

SEQ ID NO: 2018694 - RNA, 19 nt, Artificial Sequence
  Description of Artificial Sequence: Synthetic oligonucleotide
  Sense strand starting at position 213 of SEQ ID NO: 1881108
uucuguuggcaucacagaa

SEQ ID NO: 2018695 - RNA, 19 nt, Artificial Sequence
  Description of Artificial Sequence: Synthetic oligonucleotide
  Antisense strand to SEQ ID NO: 2018694
uucugugaugccaacagaa

SEQ ID NO: 2018696 - RNA, 19 nt, Artificial Sequence
  Description of Artificial Sequence: Synthetic oligonucleotide
  Sense strand starting at position 386 of SEQ ID NO: 1881108
gcaggaauuaaaugguuua

SEQ ID NO: 2018697 - RNA, 19 nt, Artificial Sequence
  Description of Artificial Sequence: Synthetic oligonucleotide
  Antisense strand to SEQ ID NO: 2018696
uaaaccauuuaauuccugc

SEQ ID NO: 2018698 - RNA, 19 nt, Artificial Sequence
  Description of Artificial Sequence: Synthetic oligonucleotide
  Sense strand starting at position 389 of SEQ ID NO: 1881108
ggaauuaaaugguuuaagu

SEQ ID NO: 2018699 - RNA, 19 nt, Artificial Sequence
  Description of Artificial Sequence: Synthetic oligonucleotide
  Antisense strand to SEQ ID NO: 2018698
acuuaaaccauuuaauucc

SEQ ID NO: 2018700 - RNA, 19 nt, Artificial Sequence
  Description of Artificial Sequence: Synthetic oligonucleotide
  Sense strand starting at position 478 of SEQ ID NO: 1881108
ucaacuuauguuugcaaag

SEQ ID NO: 2018701 - RNA, 19 nt, Artificial Sequence
  Description of Artificial Sequence: Synthetic oligonucleotide
  Antisense strand to SEQ ID NO: 2018700
cuuugcaaacauaaguuga

SEQ ID NO: 2018702 - RNA, 19 nt, Artificial Sequence
  Description of Artificial Sequence: Synthetic oligonucleotide
  Sense strand starting at position 504 of SEQ ID NO: 1881108
uaagauugaguuuguaaug

SEQ ID NO: 2018703 - RNA, 19 nt, Artificial Sequence
  Description of Artificial Sequence: Synthetic oligonucleotide
  Antisense strand to SEQ ID NO: 2018702
cauuacaaacucaaucuua

SEQ ID NO: 2018704 - RNA, 19 nt, Artificial Sequence
  Description of Artificial Sequence: Synthetic oligonucleotide
  Sense strand starting at position 865 of SEQ ID NO: 1881108
cugagaacuuagguucuua

SEQ ID NO: 2018705 - RNA, 19 nt, Artificial Sequence
  Description of Artificial Sequence: Synthetic oligonucleotide
  Antisense strand to SEQ ID NO: 2018704
uaagaaccuaaguucucag

SEQ ID NO: 2018706 - RNA, 19 nt, Artificial Sequence
  Description of Artificial Sequence: Synthetic oligonucleotide
  Sense strand starting at position 869 of SEQ ID NO: 1881108
gaacuuagguucuuagguu

SEQ ID NO: 2018707 - RNA, 19 nt, Artificial Sequence
  Description of Artificial Sequence: Synthetic oligonucleotide
  Antisense strand to SEQ ID NO: 2018706
aaccuaagaaccuaaguuc

SEQ ID NO: 2018708 - RNA, 19 nt, Artificial Sequence
  Description of Artificial Sequence: Synthetic oligonucleotide
  Sense strand starting at position 876 of SEQ ID NO: 1881108
gguucuuagguuuaucaua

SEQ ID NO: 2018709 - RNA, 19 nt, Artificial Sequence
  Description of Artificial Sequence: Synthetic oligonucleotide
  Antisense strand to SEQ ID NO: 2018708
uaugauaaaccuaagaacc

SEQ ID NO: 2018710 - RNA, 19 nt, Artificial Sequence
  Description of Artificial Sequence: Synthetic oligonucleotide
  Sense strand starting at position 878 of SEQ ID NO: 1881108
uucuuagguuuaucauaca

SEQ ID NO: 2018711 - RNA, 19 nt, Artificial Sequence
  Description of Artificial Sequence: Synthetic oligonucleotide
  Antisense strand to SEQ ID NO: 2018710
uguaugauaaaccuaagaa

SEQ ID NO: 2018712 - RNA, 19 nt, Artificial Sequence
  Description of Artificial Sequence: Synthetic oligonucleotide
  Sense strand starting at position 906 of SEQ ID NO: 1881108
gcacaucuucugggaauug

SEQ ID NO: 2018713 - RNA, 19 nt, Artificial Sequence
  Description of Artificial Sequence: Synthetic oligonucleotide
  Antisense strand to SEQ ID NO: 2018712
caauucccagaagaugugc

SEQ ID NO: 2018714 - RNA, 19 nt, Artificial Sequence
  Description of Artificial Sequence: Synthetic oligonucleotide
  Sense strand starting at position 911 of SEQ ID NO: 1881108
ucuucugggaauugaguua

SEQ ID NO: 2018715 - RNA, 19 nt, Artificial Sequence
  Description of Artificial Sequence: Synthetic oligonucleotide
  Antisense strand to SEQ ID NO: 2018714
uaacucaauucccagaaga

SEQ ID NO: 2018716 - RNA, 19 nt, Artificial Sequence
  Description of Artificial Sequence: Synthetic oligonucleotide
  Sense strand starting at position 997 of SEQ ID NO: 1881108
ggguuuguccaugaugcua

SEQ ID NO: 2018717 - RNA, 19 nt, Artificial Sequence
  Description of Artificial Sequence: Synthetic oligonucleotide
  Antisense strand to SEQ ID NO: 2018716
uagcaucauggacaaaccc

SEQ ID NO: 2018718 - RNA, 19 nt, Artificial Sequence
  Description of Artificial Sequence: Synthetic oligonucleotide
  Sense strand starting at position 1046 of SEQ ID NO: 1881108
uguagcaaucauugauuga

SEQ ID NO: 2018719 - RNA, 19 nt, Artificial Sequence
  Description of Artificial Sequence: Synthetic oligonucleotide
  Antisense strand to SEQ ID NO: 2018718
ucaaucaaugauugcuaca

SEQ ID NO: 2018720 - RNA, 19 nt, Artificial Sequence
  Description of Artificial Sequence: Synthetic oligonucleotide
  Sense strand starting at position 1047 of SEQ ID NO: 1881108
guagcaaucauugauugag

SEQ ID NO: 2018721 - RNA, 19 nt, Artificial Sequence
  Description of Artificial Sequence: Synthetic oligonucleotide
  Antisense strand to SEQ ID NO: 2018720
cucaaucaaugauugcuac

SEQ ID NO: 2018722 - RNA, 19 nt, Artificial Sequence
  Description of Artificial Sequence: Synthetic oligonucleotide
  Sense strand starting at position 1050 of SEQ ID NO: 1881108
gcaaucauugauugagucu

SEQ ID NO: 2018723 - RNA, 19 nt, Artificial Sequence
  Description of Artificial Sequence: Synthetic oligonucleotide
  Antisense strand to SEQ ID NO: 2018722
agacucaaucaaugauugc

SEQ ID NO: 2018724 - RNA, 19 nt, Artificial Sequence
  Description of Artificial Sequence: Synthetic oligonucleotide
  Sense strand starting at position 1174 of SEQ ID NO: 1881108
uuaauaaacugggugacau

SEQ ID NO: 2018725 - RNA, 19 nt, Artificial Sequence
  Description of Artificial Sequence: Synthetic oligonucleotide
  Antisense strand to SEQ ID NO: 2018724
augucacccaguuuauuaa

SEQ ID NO: 2018726 - RNA, 19 nt, Artificial Sequence
  Description of Artificial Sequence: Synthetic oligonucleotide
  Sense strand starting at position 1665 of SEQ ID NO: 1881108
gcucucaaccgaugggaga

SEQ ID NO: 2018727 - RNA, 19 nt, Artificial Sequence
  Description of Artificial Sequence: Synthetic oligonucleotide
  Antisense strand to SEQ ID NO: 2018726
ucucccaucgguugagagc

SEQ ID NO: 2018728 - RNA, 19 nt, Artificial Sequence
  Description of Artificial Sequence: Synthetic oligonucleotide
  Sense strand starting at position 2284 of SEQ ID NO: 1881108
gacuuauagugagcacauu

SEQ ID NO: 2018729 - RNA, 19 nt, Artificial Sequence
  Description of Artificial Sequence: Synthetic oligonucleotide
  Antisense strand to SEQ ID NO: 2018728
aaugugcucacuauaaguc

SEQ ID NO: 2018730 - RNA, 19 nt, Artificial Sequence
  Description of Artificial Sequence: Synthetic oligonucleotide
  Sense strand starting at position 2310 of SEQ ID NO: 1881108
uugucacaaucuuugggau

SEQ ID NO: 2018731 - RNA, 19 nt, Artificial Sequence
  Description of Artificial Sequence: Synthetic oligonucleotide
  Antisense strand to SEQ ID NO: 2018730
aucccaaagauugugacaa

SEQ ID NO: 2018732 - RNA, 19 nt, Artificial Sequence
  Description of Artificial Sequence: Synthetic oligonucleotide
  Sense strand starting at position 2688 of SEQ ID NO: 1881108
ugcugaacauguccaucaa

SEQ ID NO: 2018733 - RNA, 19 nt, Artificial Sequence
  Description of Artificial Sequence: Synthetic oligonucleotide
  Antisense strand to SEQ ID NO: 2018732
uugauggacauguucagca

SEQ ID NO: 2018734 - RNA, 19 nt, Artificial Sequence
  Description of Artificial Sequence: Synthetic oligonucleotide
  Sense strand starting at position 2689 of SEQ ID NO: 1881108
gcugaacauguccaucaaa

SEQ ID NO: 2018735 - RNA, 19 nt, Artificial Sequence
  Description of Artificial Sequence: Synthetic oligonucleotide
  Antisense strand to SEQ ID NO: 2018734
uuugauggacauguucagc

SEQ ID NO: 2018736 - RNA, 19 nt, Artificial Sequence
  Description of Artificial Sequence: Synthetic oligonucleotide
  Sense strand starting at position 2734 of SEQ ID NO: 1881108
gaggaaagauuaggcauuu

SEQ ID NO: 2018737 - RNA, 19 nt, Artificial Sequence
  Description of Artificial Sequence: Synthetic oligonucleotide
  Antisense strand to SEQ ID NO: 2018736
aaaugccuaaucuuuccuc

SEQ ID NO: 2018738 - RNA, 19 nt, Artificial Sequence
  Description of Artificial Sequence: Synthetic oligonucleotide
  Sense strand starting at position 2743 of SEQ ID NO: 1881108
uuaggcauuuaccaagaua

SEQ ID NO: 2018739 - RNA, 19 nt, Artificial Sequence
  Description of Artificial Sequence: Synthetic oligonucleotide
  Antisense strand to SEQ ID NO: 2018738
uaucuugguaaaugccuaa

SEQ ID NO: 2018740 - RNA, 19 nt, Artificial Sequence
  Description of Artificial Sequence: Synthetic oligonucleotide
  Sense strand starting at position 2756 of SEQ ID NO: 1881108
aagauaacccaggguuucu

SEQ ID NO: 2018741 - RNA, 19 nt, Artificial Sequence
  Description of Artificial Sequence: Synthetic oligonucleotide
  Antisense strand to SEQ ID NO: 2018740
agaaacccuggguuaucuu

SEQ ID NO: 2018742 - RNA, 19 nt, Artificial Sequence
  Description of Artificial Sequence: Synthetic oligonucleotide
  Sense strand starting at position 2786 of SEQ ID NO: 1881108
ggucccaucugauuaauga

SEQ ID NO: 2018743 - RNA, 19 nt, Artificial Sequence
  Description of Artificial Sequence: Synthetic oligonucleotide
  Antisense strand to SEQ ID NO: 2018742
ucauuaaucagaugggacc

SEQ ID NO: 2018744 - RNA, 19 nt, Artificial Sequence
  Description of Artificial Sequence: Synthetic oligonucleotide
  Sense strand starting at position 2862 of SEQ ID NO: 1881108
ucaauauacggacauguau

SEQ ID NO: 2018745 - RNA, 19 nt, Artificial Sequence
  Description of Artificial Sequence: Synthetic oligonucleotide
  Antisense strand to SEQ ID NO: 2018744
auacauguccguauauuga

SEQ ID NO: 2018746 - RNA, 19 nt, Artificial Sequence
  Description of Artificial Sequence: Synthetic oligonucleotide
  Sense strand starting at position 3115 of SEQ ID NO: 1881108
agagucuaauaguugagua

SEQ ID NO: 2018747 - RNA, 19 nt, Artificial Sequence
  Description of Artificial Sequence: Synthetic oligonucleotide
  Antisense strand to SEQ ID NO: 2018746
uacucaacuauuagacucu

SEQ ID NO: 2018748 - RNA, 19 nt, Artificial Sequence
  Description of Artificial Sequence: Synthetic oligonucleotide
  Sense strand starting at position 3117 of SEQ ID NO: 1881108
agucuaauaguugaguaaa

SEQ ID NO: 2018749 - RNA, 19 nt, Artificial Sequence
  Description of Artificial Sequence: Synthetic oligonucleotide
  Antisense strand to SEQ ID NO: 2018748
uuuacucaacuauuagacu

SEQ ID NO: 2018750 - RNA, 19 nt, Artificial Sequence
  Description of Artificial Sequence: Synthetic oligonucleotide
  Sense strand starting at position 3119 of SEQ ID NO: 1881108
ucuaauaguugaguaaacu

SEQ ID NO: 2018751 - RNA, 19 nt, Artificial Sequence
  Description of Artificial Sequence: Synthetic oligonucleotide
  Antisense strand to SEQ ID NO: 2018750
aguuuacucaacuauuaga

SEQ ID NO: 2018752 - RNA, 19 nt, Artificial Sequence
  Description of Artificial Sequence: Synthetic oligonucleotide
  Sense strand starting at position 3384 of SEQ ID NO: 1881108
aggaguugugagcauugca

SEQ ID NO: 2018753 - RNA, 19 nt, Artificial Sequence
  Description of Artificial Sequence: Synthetic oligonucleotide
  Antisense strand to SEQ ID NO: 2018752
ugcaaugcucacaacuccu

SEQ ID NO: 2018754 - RNA, 19 nt, Artificial Sequence
  Description of Artificial Sequence: Synthetic oligonucleotide
  Sense strand starting at position 3522 of SEQ ID NO: 1881108
cguagauaaauuuguguca

SEQ ID NO: 2018755 - RNA, 19 nt, Artificial Sequence
  Description of Artificial Sequence: Synthetic oligonucleotide
  Antisense strand to SEQ ID NO: 2018754
ugacacaaauuuaucuacg

SEQ ID NO: 2018756 - RNA, 19 nt, Artificial Sequence
  Description of Artificial Sequence: Synthetic oligonucleotide
  Sense strand starting at position 3527 of SEQ ID NO: 1881108
auaaauuugugucauggga

SEQ ID NO: 2018757 - RNA, 19 nt, Artificial Sequence
  Description of Artificial Sequence: Synthetic oligonucleotide
  Antisense strand to SEQ ID NO: 2018756
ucccaugacacaaauuuau

SEQ ID NO: 2018758 - RNA, 19 nt, Artificial Sequence
  Description of Artificial Sequence: Synthetic oligonucleotide
  Sense strand starting at position 3638 of SEQ ID NO: 1881108
cucugaaaggcucagugua

SEQ ID NO: 2018759 - RNA, 19 nt, Artificial Sequence
  Description of Artificial Sequence: Synthetic oligonucleotide
  Antisense strand to SEQ ID NO: 2018758
uacacugagccuuucagag

SEQ ID NO: 2018760 - RNA, 19 nt, Artificial Sequence
  Description of Artificial Sequence: Synthetic oligonucleotide
  Sense strand starting at position 3967 of SEQ ID NO: 1881108
uggguauauacugagcaau

SEQ ID NO: 2018761 - RNA, 19 nt, Artificial Sequence
  Description of Artificial Sequence: Synthetic oligonucleotide
  Antisense strand to SEQ ID NO: 2018760
auugcucaguauauaccca

SEQ ID NO: 2018762 - RNA, 19 nt, Artificial Sequence
  Description of Artificial Sequence: Synthetic oligonucleotide
  Sense strand starting at position 3973 of SEQ ID NO: 1881108
uauacugagcaaugggauu

SEQ ID NO: 2018763 - RNA, 19 nt, Artificial Sequence
  Description of Artificial Sequence: Synthetic oligonucleotide
  Antisense strand to SEQ ID NO: 2018762
aaucccauugcucaguaua

SEQ ID NO: 2018764 - RNA, 19 nt, Artificial Sequence
  Description of Artificial Sequence: Synthetic oligonucleotide
  Sense strand starting at position 389 of SEQ ID NO: 1881109
acauguucccaguacaaag

SEQ ID NO: 2018765 - RNA, 19 nt, Artificial Sequence
  Description of Artificial Sequence: Synthetic oligonucleotide
  Antisense strand to SEQ ID NO: 2018764
cuuuguacugggaacaugu

SEQ ID NO: 2018766 - RNA, 19 nt, Artificial Sequence
  Description of Artificial Sequence: Synthetic oligonucleotide
  Sense strand starting at position 491 of SEQ ID NO: 1881109
auguacaaucaugauguau

SEQ ID NO: 2018767 - RNA, 19 nt, Artificial Sequence
  Description of Artificial Sequence: Synthetic oligonucleotide
  Antisense strand to SEQ ID NO: 2018766
auacaucaugauuguacau

SEQ ID NO: 2018768 - RNA, 19 nt, Artificial Sequence
  Description of Artificial Sequence: Synthetic oligonucleotide
  Sense strand starting at position 651 of SEQ ID NO: 1881109
agaaauaggucaucccuca

SEQ ID NO: 2018769 - RNA, 19 nt, Artificial Sequence
  Description of Artificial Sequence: Synthetic oligonucleotide
  Antisense strand to SEQ ID NO: 2018768
ugagggaugaccuauuucu

SEQ ID NO: 2018770 - RNA, 19 nt, Artificial Sequence
  Description of Artificial Sequence: Synthetic oligonucleotide
  Sense strand starting at position 694 of SEQ ID NO: 1881109
agcccuuuccaggaauaug

SEQ ID NO: 2018771 - RNA, 19 nt, Artificial Sequence
  Description of Artificial Sequence: Synthetic oligonucleotide
  Antisense strand to SEQ ID NO: 2018770
cauauuccuggaaagggcu

SEQ ID NO: 2018772 - RNA, 19 nt, Artificial Sequence
  Description of Artificial Sequence: Synthetic oligonucleotide
  Sense strand starting at position 731 of SEQ ID NO: 1881109
caggaucccuggcugagau

SEQ ID NO: 2018773 - RNA, 19 nt, Artificial Sequence
  Description of Artificial Sequence: Synthetic oligonucleotide
  Antisense strand to SEQ ID NO: 2018772
aucucagccagggauccug

SEQ ID NO: 2018774 - RNA, 19 nt, Artificial Sequence
  Description of Artificial Sequence: Synthetic oligonucleotide
  Sense strand starting at position 732 of SEQ ID NO: 1881109
aggaucccuggcugagauu

SEQ ID NO: 2018775 - RNA, 19 nt, Artificial Sequence
  Description of Artificial Sequence: Synthetic oligonucleotide
  Antisense strand to SEQ ID NO: 2018774
aaucucagccagggauccu

SEQ ID NO: 2018776 - RNA, 19 nt, Artificial Sequence
  Description of Artificial Sequence: Synthetic oligonucleotide
  Sense strand starting at position 763 of SEQ ID NO: 1881109
agaugaugauaagaacuaa

SEQ ID NO: 2018777 - RNA, 19 nt, Artificial Sequence
  Description of Artificial Sequence: Synthetic oligonucleotide
  Antisense strand to SEQ ID NO: 2018776
uuaguucuuaucaucaucu

SEQ ID NO: 2018778 - RNA, 19 nt, Artificial Sequence
  Description of Artificial Sequence: Synthetic oligonucleotide
  Sense strand starting at position 1008 of SEQ ID NO: 1881109
guauucucucuaggauaaa

SEQ ID NO: 2018779 - RNA, 19 nt, Artificial Sequence
  Description of Artificial Sequence: Synthetic oligonucleotide
  Antisense strand to SEQ ID NO: 2018778
uuuauccuagagagaauac

SEQ ID NO: 2018780 - RNA, 19 nt, Artificial Sequence
  Description of Artificial Sequence: Synthetic oligonucleotide
  Sense strand starting at position 1061 of SEQ ID NO: 1881109
gggaaaugccucuggaauc

SEQ ID NO: 2018781 - RNA, 19 nt, Artificial Sequence
  Description of Artificial Sequence: Synthetic oligonucleotide
  Antisense strand to SEQ ID NO: 2018780
gauuccagaggcauuuccc

SEQ ID NO: 2018782 - RNA, 19 nt, Artificial Sequence
  Description of Artificial Sequence: Synthetic oligonucleotide
  Sense strand starting at position 1163 of SEQ ID NO: 1881109
gucuuauaagaguaguuau

SEQ ID NO: 2018783 - RNA, 19 nt, Artificial Sequence
  Description of Artificial Sequence: Synthetic oligonucleotide
  Antisense strand to SEQ ID NO: 2018782
auaacuacucuuauaagac

SEQ ID NO: 2018784 - RNA, 19 nt, Artificial Sequence
  Description of Artificial Sequence: Synthetic oligonucleotide
  Sense strand starting at position 1178 of SEQ ID NO: 1881109
uuauguuaugcguugcaag

SEQ ID NO: 2018785 - RNA, 19 nt, Artificial Sequence
  Description of Artificial Sequence: Synthetic oligonucleotide
  Antisense strand to SEQ ID NO: 2018784
cuugcaacgcauaacauaa

SEQ ID NO: 2018786 - RNA, 19 nt, Artificial Sequence
  Description of Artificial Sequence: Synthetic oligonucleotide
  Sense strand starting at position 1217 of SEQ ID NO: 1881109
ugugaacucagauggaauc

SEQ ID NO: 2018787 - RNA, 19 nt, Artificial Sequence
  Description of Artificial Sequence: Synthetic oligonucleotide
  Antisense strand to SEQ ID NO: 2018786
gauuccaucugaguucaca

SEQ ID NO: 2018788 - RNA, 19 nt, Artificial Sequence
  Description of Artificial Sequence: Synthetic oligonucleotide
  Sense strand starting at position 1408 of SEQ ID NO: 1881109
uggaccaguuauucugauu

SEQ ID NO: 2018789 - RNA, 19 nt, Artificial Sequence
  Description of Artificial Sequence: Synthetic oligonucleotide
  Antisense strand to SEQ ID NO: 2018788
aaucagaauaacuggucca

SEQ ID NO: 2018790 - RNA, 19 nt, Artificial Sequence
  Description of Artificial Sequence: Synthetic oligonucleotide
  Sense strand starting at position 1506 of SEQ ID NO: 1881109
acaggagcaucucuaagau

SEQ ID NO: 2018791 - RNA, 19 nt, Artificial Sequence
  Description of Artificial Sequence: Synthetic oligonucleotide
  Antisense strand to SEQ ID NO: 2018790
aucuuagagaugcuccugu

SEQ ID NO: 2018792 - RNA, 19 nt, Artificial Sequence
  Description of Artificial Sequence: Synthetic oligonucleotide
  Sense strand starting at position 1536 of SEQ ID NO: 1881109
uuucuugcucauggaauaa

SEQ ID NO: 2018793 - RNA, 19 nt, Artificial Sequence
  Description of Artificial Sequence: Synthetic oligonucleotide
  Antisense strand to SEQ ID NO: 2018792
uuauuccaugagcaagaaa

SEQ ID NO: 2018794 - RNA, 19 nt, Artificial Sequence
  Description of Artificial Sequence: Synthetic oligonucleotide
  Sense strand starting at position 1556 of SEQ ID NO: 1881109
aaggauuuauguuaaagca

SEQ ID NO: 2018795 - RNA, 19 nt, Artificial Sequence
  Description of Artificial Sequence: Synthetic oligonucleotide
  Antisense strand to SEQ ID NO: 2018794
ugcuuuaacauaaauccuu

SEQ ID NO: 2018796 - RNA, 19 nt, Artificial Sequence
  Description of Artificial Sequence: Synthetic oligonucleotide
  Sense strand starting at position 1589 of SEQ ID NO: 1881109
aguuuaauacuuuacgaac

SEQ ID NO: 2018797 - RNA, 19 nt, Artificial Sequence
  Description of Artificial Sequence: Synthetic oligonucleotide
  Antisense strand to SEQ ID NO: 2018796
guucguaaaguauuaaacu

SEQ ID NO: 2018798 - RNA, 19 nt, Artificial Sequence
  Description of Artificial Sequence: Synthetic oligonucleotide
  Sense strand starting at position 1662 of SEQ ID NO: 1881109
ggagaacucgcccagguuu

SEQ ID NO: 2018799 - RNA, 19 nt, Artificial Sequence
  Description of Artificial Sequence: Synthetic oligonucleotide
  Antisense strand to SEQ ID NO: 2018798
aaaccugggcgaguucucc

SEQ ID NO: 2018800 - RNA, 19 nt, Artificial Sequence
  Description of Artificial Sequence: Synthetic oligonucleotide
  Sense strand starting at position 1767 of SEQ ID NO: 1881109
gagcacagcucagcauuua

SEQ ID NO: 2018801 - RNA, 19 nt, Artificial Sequence
  Description of Artificial Sequence: Synthetic oligonucleotide
  Antisense strand to SEQ ID NO: 2018800
uaaaugcugagcugugcuc

SEQ ID NO: 2018802 - RNA, 19 nt, Artificial Sequence
  Description of Artificial Sequence: Synthetic oligonucleotide
  Sense strand starting at position 1779 of SEQ ID NO: 1881109
gcauuuauuucuggaucca

SEQ ID NO: 2018803 - RNA, 19 nt, Artificial Sequence
  Description of Artificial Sequence: Synthetic oligonucleotide
  Antisense strand to SEQ ID NO: 2018802
uggauccagaaauaaaugc

SEQ ID NO: 2018804 - RNA, 19 nt, Artificial Sequence
  Description of Artificial Sequence: Synthetic oligonucleotide
  Sense strand starting at position 2328 of SEQ ID NO: 1881109
uggaaagcuguuuguauuu

SEQ ID NO: 2018805 - RNA, 19 nt, Artificial Sequence
  Description of Artificial Sequence: Synthetic oligonucleotide
  Antisense strand to SEQ ID NO: 2018804
aaauacaaacagcuuucca

SEQ ID NO: 2018806 - RNA, 19 nt, Artificial Sequence
  Description of Artificial Sequence: Synthetic oligonucleotide
  Sense strand starting at position 2460 of SEQ ID NO: 1881109
gggaauacauguuugagcu

SEQ ID NO: 2018807 - RNA, 19 nt, Artificial Sequence
  Description of Artificial Sequence: Synthetic oligonucleotide
  Antisense strand to SEQ ID NO: 2018806
agcucaaacauguauuccc

SEQ ID NO: 2018808 - RNA, 19 nt, Artificial Sequence
  Description of Artificial Sequence: Synthetic oligonucleotide
  Sense strand starting at position 2461 of SEQ ID NO: 1881109
ggaauacauguuugagcua

SEQ ID NO: 2018809 - RNA, 19 nt, Artificial Sequence
  Description of Artificial Sequence: Synthetic oligonucleotide
  Antisense strand to SEQ ID NO: 2018808
uagcucaaacauguauucc

SEQ ID NO: 2018810 - RNA, 19 nt, Artificial Sequence
  Description of Artificial Sequence: Synthetic oligonucleotide
  Sense strand starting at position 2464 of SEQ ID NO: 1881109
auacauguuugagcuaaca

SEQ ID NO: 2018811 - RNA, 19 nt, Artificial Sequence
  Description of Artificial Sequence: Synthetic oligonucleotide
  Antisense strand to SEQ ID NO: 2018810
uguuagcucaaacauguau

SEQ ID NO: 2018812 - RNA, 19 nt, Artificial Sequence
  Description of Artificial Sequence: Synthetic oligonucleotide
  Sense strand starting at position 2768 of SEQ ID NO: 1881109
gaaaucuuauggucuguaa

SEQ ID NO: 2018813 - RNA, 19 nt, Artificial Sequence
  Description of Artificial Sequence: Synthetic oligonucleotide
  Antisense strand to SEQ ID NO: 2018812
uuacagaccauaagauuuc

SEQ ID NO: 2018814 - RNA, 19 nt, Artificial Sequence
  Description of Artificial Sequence: Synthetic oligonucleotide
  Sense strand starting at position 2770 of SEQ ID NO: 1881109
aaucuuauggucuguaaag

SEQ ID NO: 2018815 - RNA, 19 nt, Artificial Sequence
  Description of Artificial Sequence: Synthetic oligonucleotide
  Antisense strand to SEQ ID NO: 2018814
cuuuacagaccauaagauu

SEQ ID NO: 2018816 - RNA, 19 nt, Artificial Sequence
  Description of Artificial Sequence: Synthetic oligonucleotide
  Sense strand starting at position 2772 of SEQ ID NO: 1881109
ucuuauggucuguaaagga

SEQ ID NO: 2018817 - RNA, 19 nt, Artificial Sequence
  Description of Artificial Sequence: Synthetic oligonucleotide
  Antisense strand to SEQ ID NO: 2018816
uccuuuacagaccauaaga

SEQ ID NO: 2018818 - RNA, 19 nt, Artificial Sequence
  Description of Artificial Sequence: Synthetic oligonucleotide
  Sense strand starting at position 2835 of SEQ ID NO: 1881109
aaggguugagagcauguaa

SEQ ID NO: 2018819 - RNA, 19 nt, Artificial Sequence
  Description of Artificial Sequence: Synthetic oligonucleotide
  Antisense strand to SEQ ID NO: 2018818
uuacaugcucucaacccuu

SEQ ID NO: 2018820 - RNA, 19 nt, Artificial Sequence
  Description of Artificial Sequence: Synthetic oligonucleotide
  Sense strand starting at position 3065 of SEQ ID NO: 1881109
ccagaaggucauggguaaa

SEQ ID NO: 2018821 - RNA, 19 nt, Artificial Sequence
  Description of Artificial Sequence: Synthetic oligonucleotide
  Antisense strand to SEQ ID NO: 2018820
uuuacccaugaccuucugg

SEQ ID NO: 2018822 - RNA, 19 nt, Artificial Sequence
  Description of Artificial Sequence: Synthetic oligonucleotide
  Sense strand starting at position 3217 of SEQ ID NO: 1881109
ggcuuuacagaucgggaaa

SEQ ID NO: 2018823 - RNA, 19 nt, Artificial Sequence
  Description of Artificial Sequence: Synthetic oligonucleotide
  Antisense strand to SEQ ID NO: 2018822
uuucccgaucuguaaagcc

SEQ ID NO: 2018824 - RNA, 19 nt, Artificial Sequence
  Description of Artificial Sequence: Synthetic oligonucleotide
  Sense strand starting at position 3218 of SEQ ID NO: 1881109
gcuuuacagaucgggaaac

SEQ ID NO: 2018825 - RNA, 19 nt, Artificial Sequence
  Description of Artificial Sequence: Synthetic oligonucleotide
  Antisense strand to SEQ ID NO: 2018824
guuucccgaucuguaaagc

SEQ ID NO: 2018826 - RNA, 19 nt, Artificial Sequence
  Description of Artificial Sequence: Synthetic oligonucleotide
  Sense strand starting at position 3250 of SEQ ID NO: 1881109
cacagagaguugguucuaa

SEQ ID NO: 2018827 - RNA, 19 nt, Artificial Sequence
  Description of Artificial Sequence: Synthetic oligonucleotide
  Antisense strand to SEQ ID NO: 2018826
uuagaaccaacucucugug

SEQ ID NO: 2018828 - RNA, 19 nt, Artificial Sequence
  Description of Artificial Sequence: Synthetic oligonucleotide
  Sense strand starting at position 3426 of SEQ ID NO: 1881109
ggauacugacacugugagu

SEQ ID NO: 2018829 - RNA, 19 nt, Artificial Sequence
  Description of Artificial Sequence: Synthetic oligonucleotide
  Antisense strand to SEQ ID NO: 2018828
acucacagugucaguaucc

SEQ ID NO: 2018830 - RNA, 19 nt, Artificial Sequence
  Description of Artificial Sequence: Synthetic oligonucleotide
  Sense strand starting at position 3431 of SEQ ID NO: 1881109
cugacacugugaguuaauu

SEQ ID NO: 2018831 - RNA, 19 nt, Artificial Sequence
  Description of Artificial Sequence: Synthetic oligonucleotide
  Antisense strand to SEQ ID NO: 2018830
aauuaacucacagugucag

SEQ ID NO: 2018832 - RNA, 19 nt, Artificial Sequence
  Description of Artificial Sequence: Synthetic oligonucleotide
  Sense strand starting at position 3488 of SEQ ID NO: 1881109
uuuagucuugaagggcaaa

SEQ ID NO: 2018833 - RNA, 19 nt, Artificial Sequence
  Description of Artificial Sequence: Synthetic oligonucleotide
  Antisense strand to SEQ ID NO: 2018832
uuugcccuucaagacuaaa

SEQ ID NO: 2018834 - RNA, 19 nt, Artificial Sequence
  Description of Artificial Sequence: Synthetic oligonucleotide
  Sense strand starting at position 3499 of SEQ ID NO: 1881109
agggcaaagucuuccuuaa

SEQ ID NO: 2018835 - RNA, 19 nt, Artificial Sequence
  Description of Artificial Sequence: Synthetic oligonucleotide
  Antisense strand to SEQ ID NO: 2018834
uuaaggaagacuuugcccu

SEQ ID NO: 2018836 - RNA, 19 nt, Artificial Sequence
  Description of Artificial Sequence: Synthetic oligonucleotide
  Sense strand starting at position 3630 of SEQ ID NO: 1881109
guagcugugcucuucugua

SEQ ID NO: 2018837 - RNA, 19 nt, Artificial Sequence
  Description of Artificial Sequence: Synthetic oligonucleotide
  Antisense strand to SEQ ID NO: 2018836
uacagaagagcacagcuac

SEQ ID NO: 2018838 - RNA, 19 nt, Artificial Sequence
  Description of Artificial Sequence: Synthetic oligonucleotide
  Sense strand starting at position 3677 of SEQ ID NO: 1881109
uccaguggauccuucuaaa

SEQ ID NO: 2018839 - RNA, 19 nt, Artificial Sequence
  Description of Artificial Sequence: Synthetic oligonucleotide
  Antisense strand to SEQ ID NO: 2018838
uuuagaaggauccacugga

SEQ ID NO: 2018840 - RNA, 19 nt, Artificial Sequence
  Description of Artificial Sequence: Synthetic oligonucleotide
  Sense strand starting at position 3689 of SEQ ID NO: 1881109
uucuaaauguggguaccaa

SEQ ID NO: 2018841 - RNA, 19 nt, Artificial Sequence
  Description of Artificial Sequence: Synthetic oligonucleotide
  Antisense strand to SEQ ID NO: 2018840
uugguacccacauuuagaa

SEQ ID NO: 2018842 - RNA, 19 nt, Artificial Sequence
  Description of Artificial Sequence: Synthetic oligonucleotide
  Sense strand starting at position 3846 of SEQ ID NO: 1881109
cuaccuaguagugaguuau

SEQ ID NO: 2018843 - RNA, 19 nt, Artificial Sequence
  Description of Artificial Sequence: Synthetic oligonucleotide
  Antisense strand to SEQ ID NO: 2018842
auaacucacuacuagguag

SEQ ID NO: 2018844 - RNA, 19 nt, Artificial Sequence
  Description of Artificial Sequence: Synthetic oligonucleotide
  Sense strand starting at position 80 of SEQ ID NO: 1881110
ggagggaacgucuggagau

SEQ ID NO: 2018845 - RNA, 19 nt, Artificial Sequence
  Description of Artificial Sequence: Synthetic oligonucleotide
  Antisense strand to SEQ ID NO: 2018844
aucuccagacguucccucc

SEQ ID NO: 2018846 - RNA, 19 nt, Artificial Sequence
  Description of Artificial Sequence: Synthetic oligonucleotide
  Sense strand starting at position 150 of SEQ ID NO: 1881110
ggauacauuuguggcauuu

SEQ ID NO: 2018847 - RNA, 19 nt, Artificial Sequence
  Description of Artificial Sequence: Synthetic oligonucleotide
  Antisense strand to SEQ ID NO: 2018846
aaaugccacaaauguaucc

SEQ ID NO: 2018848 - RNA, 19 nt, Artificial Sequence
  Description of Artificial Sequence: Synthetic oligonucleotide
  Sense strand starting at position 226 of SEQ ID NO: 1881110
ugcggaauggcugaaagua

SEQ ID NO: 2018849 - RNA, 19 nt, Artificial Sequence
  Description of Artificial Sequence: Synthetic oligonucleotide
  Antisense strand to SEQ ID NO: 2018848
uacuuucagccauuccgca

SEQ ID NO: 2018850 - RNA, 19 nt, Artificial Sequence
  Description of Artificial Sequence: Synthetic oligonucleotide
  Sense strand starting at position 276 of SEQ ID NO: 1881110
agguguuaaagcuagguga

SEQ ID NO: 2018851 - RNA, 19 nt, Artificial Sequence
  Description of Artificial Sequence: Synthetic oligonucleotide
  Antisense strand to SEQ ID NO: 2018850
ucaccuagcuuuaacaccu

SEQ ID NO: 2018852 - RNA, 19 nt, Artificial Sequence
  Description of Artificial Sequence: Synthetic oligonucleotide
  Sense strand starting at position 329 of SEQ ID NO: 1881110
uuguuuguaccggcguaau

SEQ ID NO: 2018853 - RNA, 19 nt, Artificial Sequence
  Description of Artificial Sequence: Synthetic oligonucleotide
  Antisense strand to SEQ ID NO: 2018852
auuacgccgguacaaacaa

SEQ ID NO: 2018854 - RNA, 19 nt, Artificial Sequence
  Description of Artificial Sequence: Synthetic oligonucleotide
  Sense strand starting at position 331 of SEQ ID NO: 1881110
guuuguaccggcguaauaa

SEQ ID NO: 2018855 - RNA, 19 nt, Artificial Sequence
  Description of Artificial Sequence: Synthetic oligonucleotide
  Antisense strand to SEQ ID NO: 2018854
uuauuacgccgguacaaac

SEQ ID NO: 2018856 - RNA, 19 nt, Artificial Sequence
  Description of Artificial Sequence: Synthetic oligonucleotide
  Sense strand starting at position 368 of SEQ ID NO: 1881110
acaggcuuuaguugagaac

SEQ ID NO: 2018857 - RNA, 19 nt, Artificial Sequence
  Description of Artificial Sequence: Synthetic oligonucleotide
  Antisense strand to SEQ ID NO: 2018856
guucucaacuaaagccugu

SEQ ID NO: 2018858 - RNA, 19 nt, Artificial Sequence
  Description of Artificial Sequence: Synthetic oligonucleotide
  Sense strand starting at position 747 of SEQ ID NO: 1881110
ggcucacuugguuaugaag

SEQ ID NO: 2018859 - RNA, 19 nt, Artificial Sequence
  Description of Artificial Sequence: Synthetic oligonucleotide
  Antisense strand to SEQ ID NO: 2018858
cuucauaaccaagugagcc

SEQ ID NO: 2018860 - RNA, 19 nt, Artificial Sequence
  Description of Artificial Sequence: Synthetic oligonucleotide
  Sense strand starting at position 753 of SEQ ID NO: 1881110
cuugguuaugaagaguaug

SEQ ID NO: 2018861 - RNA, 19 nt, Artificial Sequence
  Description of Artificial Sequence: Synthetic oligonucleotide
  Antisense strand to SEQ ID NO: 2018860
cauacucuucauaaccaag

SEQ ID NO: 2018862 - RNA, 19 nt, Artificial Sequence
  Description of Artificial Sequence: Synthetic oligonucleotide
  Sense strand starting at position 756 of SEQ ID NO: 1881110
gguuaugaagaguaugcau

SEQ ID NO: 2018863 - RNA, 19 nt, Artificial Sequence
  Description of Artificial Sequence: Synthetic oligonucleotide
  Antisense strand to SEQ ID NO: 2018862
augcauacucuucauaacc

SEQ ID NO: 2018864 - RNA, 19 nt, Artificial Sequence
  Description of Artificial Sequence: Synthetic oligonucleotide
  Sense strand starting at position 759 of SEQ ID NO: 1881110
uaugaagaguaugcaugua

SEQ ID NO: 2018865 - RNA, 19 nt, Artificial Sequence
  Description of Artificial Sequence: Synthetic oligonucleotide
  Antisense strand to SEQ ID NO: 2018864
uacaugcauacucuucaua

SEQ ID NO: 2018866 - RNA, 19 nt, Artificial Sequence
  Description of Artificial Sequence: Synthetic oligonucleotide
  Sense strand starting at position 800 of SEQ ID NO: 1881110
aaaugagugucuuuagauu

SEQ ID NO: 2018867 - RNA, 19 nt, Artificial Sequence
  Description of Artificial Sequence: Synthetic oligonucleotide
  Antisense strand to SEQ ID NO: 2018866
aaucuaaagacacucauuu

SEQ ID NO: 2018868 - RNA, 19 nt, Artificial Sequence
  Description of Artificial Sequence: Synthetic oligonucleotide
  Sense strand starting at position 823 of SEQ ID NO: 1881110
ggcugaauugaacaugugu

SEQ ID NO: 2018869 - RNA, 19 nt, Artificial Sequence
  Description of Artificial Sequence: Synthetic oligonucleotide
  Antisense strand to SEQ ID NO: 2018868
acacauguucaauucagcc

SEQ ID NO: 2018870 - RNA, 19 nt, Artificial Sequence
  Description of Artificial Sequence: Synthetic oligonucleotide
  Sense strand starting at position 890 of SEQ ID NO: 1881110
gaauauggauuaucgugga

SEQ ID NO: 2018871 - RNA, 19 nt, Artificial Sequence
  Description of Artificial Sequence: Synthetic oligonucleotide
  Antisense strand to SEQ ID NO: 2018870
uccacgauaauccauauuc

SEQ ID NO: 2018872 - RNA, 19 nt, Artificial Sequence
  Description of Artificial Sequence: Synthetic oligonucleotide
  Sense strand starting at position 894 of SEQ ID NO: 1881110
auggauuaucguggaccca

SEQ ID NO: 2018873 - RNA, 19 nt, Artificial Sequence
  Description of Artificial Sequence: Synthetic oligonucleotide
  Antisense strand to SEQ ID NO: 2018872
uggguccacgauaauccau

SEQ ID NO: 2018874 - RNA, 19 nt, Artificial Sequence
  Description of Artificial Sequence: Synthetic oligonucleotide
  Sense strand starting at position 1039 of SEQ ID NO: 1881110
gguuaaaugccaggaggga

SEQ ID NO: 2018875 - RNA, 19 nt, Artificial Sequence
  Description of Artificial Sequence: Synthetic oligonucleotide
  Antisense strand to SEQ ID NO: 2018874
ucccuccuggcauuuaacc

SEQ ID NO: 2018876 - RNA, 19 nt, Artificial Sequence
  Description of Artificial Sequence: Synthetic oligonucleotide
  Sense strand starting at position 1457 of SEQ ID NO: 1881110
gcggcaauccguguuguac

SEQ ID NO: 2018877 - RNA, 19 nt, Artificial Sequence
  Description of Artificial Sequence: Synthetic oligonucleotide
  Antisense strand to SEQ ID NO: 2018876
guacaacacggauugccgc

SEQ ID NO: 2018878 - RNA, 19 nt, Artificial Sequence
  Description of Artificial Sequence: Synthetic oligonucleotide
  Sense strand starting at position 1492 of SEQ ID NO: 1881110
cugugaugcacgcucaagu

SEQ ID NO: 2018879 - RNA, 19 nt, Artificial Sequence
  Description of Artificial Sequence: Synthetic oligonucleotide
  Antisense strand to SEQ ID NO: 2018878
acuugagcgugcaucacag

SEQ ID NO: 2018880 - RNA, 19 nt, Artificial Sequence
  Description of Artificial Sequence: Synthetic oligonucleotide
  Sense strand starting at position 1493 of SEQ ID NO: 1881110
ugugaugcacgcucaaguu

SEQ ID NO: 2018881 - RNA, 19 nt, Artificial Sequence
  Description of Artificial Sequence: Synthetic oligonucleotide
  Antisense strand to SEQ ID NO: 2018880
aacuugagcgugcaucaca

SEQ ID NO: 2018882 - RNA, 19 nt, Artificial Sequence
  Description of Artificial Sequence: Synthetic oligonucleotide
  Sense strand starting at position 1714 of SEQ ID NO: 1881110
gggugacuuuacccugaga

SEQ ID NO: 2018883 - RNA, 19 nt, Artificial Sequence
  Description of Artificial Sequence: Synthetic oligonucleotide
  Antisense strand to SEQ ID NO: 2018882
ucucaggguaaagucaccc

SEQ ID NO: 2018884 - RNA, 19 nt, Artificial Sequence
  Description of Artificial Sequence: Synthetic oligonucleotide
  Sense strand starting at position 1716 of SEQ ID NO: 1881110
gugacuuuacccugagagg

SEQ ID NO: 2018885 - RNA, 19 nt, Artificial Sequence
  Description of Artificial Sequence: Synthetic oligonucleotide
  Antisense strand to SEQ ID NO: 2018884
ccucucaggguaaagucac

SEQ ID NO: 2018886 - RNA, 19 nt, Artificial Sequence
  Description of Artificial Sequence: Synthetic oligonucleotide
  Sense strand starting at position 2297 of SEQ ID NO: 1881110
uguuuagacguacauacaa

SEQ ID NO: 2018887 - RNA, 19 nt, Artificial Sequence
  Description of Artificial Sequence: Synthetic oligonucleotide
  Antisense strand to SEQ ID NO: 2018886
uuguauguacgucuaaaca

SEQ ID NO: 2018888 - RNA, 19 nt, Artificial Sequence
  Description of Artificial Sequence: Synthetic oligonucleotide
  Sense strand starting at position 2336 of SEQ ID NO: 1881110
uguaguccucuguaugaaa

SEQ ID NO: 2018889 - RNA, 19 nt, Artificial Sequence
  Description of Artificial Sequence: Synthetic oligonucleotide
  Antisense strand to SEQ ID NO: 2018888
uuucauacagaggacuaca

SEQ ID NO: 2018890 - RNA, 19 nt, Artificial Sequence
  Description of Artificial Sequence: Synthetic oligonucleotide
  Sense strand starting at position 2375 of SEQ ID NO: 1881110
uuuacuuauccugagucac

SEQ ID NO: 2018891 - RNA, 19 nt, Artificial Sequence
  Description of Artificial Sequence: Synthetic oligonucleotide
  Antisense strand to SEQ ID NO: 2018890
gugacucaggauaaguaaa

SEQ ID NO: 2018892 - RNA, 19 nt, Artificial Sequence
  Description of Artificial Sequence: Synthetic oligonucleotide
  Sense strand starting at position 2498 of SEQ ID NO: 1881110
gccacugcaccugagauaa

SEQ ID NO: 2018893 - RNA, 19 nt, Artificial Sequence
  Description of Artificial Sequence: Synthetic oligonucleotide
  Antisense strand to SEQ ID NO: 2018892
uuaucucaggugcaguggc

SEQ ID NO: 2018894 - RNA, 19 nt, Artificial Sequence
  Description of Artificial Sequence: Synthetic oligonucleotide
  Sense strand starting at position 2535 of SEQ ID NO: 1881110
aggaaaccuugccuucgaa

SEQ ID NO: 2018895 - RNA, 19 nt, Artificial Sequence
  Description of Artificial Sequence: Synthetic oligonucleotide
  Antisense strand to SEQ ID NO: 2018894
uucgaaggcaagguuuccu

SEQ ID NO: 2018896 - RNA, 19 nt, Artificial Sequence
  Description of Artificial Sequence: Synthetic oligonucleotide
  Sense strand starting at position 2551 of SEQ ID NO: 1881110
gaaacugagccgugaggaa

SEQ ID NO: 2018897 - RNA, 19 nt, Artificial Sequence
  Description of Artificial Sequence: Synthetic oligonucleotide
  Antisense strand to SEQ ID NO: 2018896
uuccucacggcucaguuuc

SEQ ID NO: 2018898 - RNA, 19 nt, Artificial Sequence
  Description of Artificial Sequence: Synthetic oligonucleotide
  Sense strand starting at position 2591 of SEQ ID NO: 1881110
gacaaaucccaguggcuca

SEQ ID NO: 2018899 - RNA, 19 nt, Artificial Sequence
  Description of Artificial Sequence: Synthetic oligonucleotide
  Antisense strand to SEQ ID NO: 2018898
ugagccacugggauuuguc

SEQ ID NO: 2018900 - RNA, 19 nt, Artificial Sequence
  Description of Artificial Sequence: Synthetic oligonucleotide
  Sense strand starting at position 2677 of SEQ ID NO: 1881110
gcuacuauacugggaaaug

SEQ ID NO: 2018901 - RNA, 19 nt, Artificial Sequence
  Description of Artificial Sequence: Synthetic oligonucleotide
  Antisense strand to SEQ ID NO: 2018900
cauuucccaguauaguagc

SEQ ID NO: 2018902 - RNA, 19 nt, Artificial Sequence
  Description of Artificial Sequence: Synthetic oligonucleotide
  Sense strand starting at position 2802 of SEQ ID NO: 1881110
acuaaauguguguaucauc

SEQ ID NO: 2018903 - RNA, 19 nt, Artificial Sequence
  Description of Artificial Sequence: Synthetic oligonucleotide
  Antisense strand to SEQ ID NO: 2018902
gaugauacacacauuuagu

SEQ ID NO: 2018904 - RNA, 19 nt, Artificial Sequence
  Description of Artificial Sequence: Synthetic oligonucleotide
  Sense strand starting at position 2958 of SEQ ID NO: 1881110
uaguguuaugcugaggaaa

SEQ ID NO: 2018905 - RNA, 19 nt, Artificial Sequence
  Description of Artificial Sequence: Synthetic oligonucleotide
  Antisense strand to SEQ ID NO: 2018904
uuuccucagcauaacacua

SEQ ID NO: 2018906 - RNA, 19 nt, Artificial Sequence
  Description of Artificial Sequence: Synthetic oligonucleotide
  Sense strand starting at position 3290 of SEQ ID NO: 1881110
guuucaaugguguagugga

SEQ ID NO: 2018907 - RNA, 19 nt, Artificial Sequence
  Description of Artificial Sequence: Synthetic oligonucleotide
  Antisense strand to SEQ ID NO: 2018906
uccacuacaccauugaaac

SEQ ID NO: 2018908 - RNA, 19 nt, Artificial Sequence
  Description of Artificial Sequence: Synthetic oligonucleotide
  Sense strand starting at position 3297 of SEQ ID NO: 1881110
ugguguaguggacaaguua

SEQ ID NO: 2018909 - RNA, 19 nt, Artificial Sequence
  Description of Artificial Sequence: Synthetic oligonucleotide
  Antisense strand to SEQ ID NO: 2018908
uaacuuguccacuacacca

SEQ ID NO: 2018910 - RNA, 19 nt, Artificial Sequence
  Description of Artificial Sequence: Synthetic oligonucleotide
  Sense strand starting at position 3446 of SEQ ID NO: 1881110
ugcaucaucucaguaagga

SEQ ID NO: 2018911 - RNA, 19 nt, Artificial Sequence
  Description of Artificial Sequence: Synthetic oligonucleotide
  Antisense strand to SEQ ID NO: 2018910
uccuuacugagaugaugca

SEQ ID NO: 2018912 - RNA, 19 nt, Artificial Sequence
  Description of Artificial Sequence: Synthetic oligonucleotide
  Sense strand starting at position 3447 of SEQ ID NO: 1881110
gcaucaucucaguaaggaa

SEQ ID NO: 2018913 - RNA, 19 nt, Artificial Sequence
  Description of Artificial Sequence: Synthetic oligonucleotide
  Antisense strand to SEQ ID NO: 2018912
uuccuuacugagaugaugc

SEQ ID NO: 2018914 - RNA, 19 nt, Artificial Sequence
  Description of Artificial Sequence: Synthetic oligonucleotide
  Sense strand starting at position 3510 of SEQ ID NO: 1881110
aguuacucgaguuaaaguc

SEQ ID NO: 2018915 - RNA, 19 nt, Artificial Sequence
  Description of Artificial Sequence: Synthetic oligonucleotide
  Antisense strand to SEQ ID NO: 2018914
gacuuuaacucgaguaacu

SEQ ID NO: 2018916 - RNA, 19 nt, Artificial Sequence
  Description of Artificial Sequence: Synthetic oligonucleotide
  Sense strand starting at position 3650 of SEQ ID NO: 1881110
cauggauauguccacaggu

SEQ ID NO: 2018917 - RNA, 19 nt, Artificial Sequence
  Description of Artificial Sequence: Synthetic oligonucleotide
  Antisense strand to SEQ ID NO: 2018916
accuguggacauauccaug

SEQ ID NO: 2018918 - RNA, 19 nt, Artificial Sequence
  Description of Artificial Sequence: Synthetic oligonucleotide
  Sense strand starting at position 3652 of SEQ ID NO: 1881110
uggauauguccacagguua

SEQ ID NO: 2018919 - RNA, 19 nt, Artificial Sequence
  Description of Artificial Sequence: Synthetic oligonucleotide
  Antisense strand to SEQ ID NO: 2018918
uaaccuguggacauaucca

SEQ ID NO: 2018920 - RNA, 19 nt, Artificial Sequence
  Description of Artificial Sequence: Synthetic oligonucleotide
  Sense strand starting at position 3837 of SEQ ID NO: 1881110
cugggaugccauugggauu

SEQ ID NO: 2018921 - RNA, 19 nt, Artificial Sequence
  Description of Artificial Sequence: Synthetic oligonucleotide
  Antisense strand to SEQ ID NO: 2018920
aaucccaauggcaucccag

SEQ ID NO: 2018922 - RNA, 19 nt, Artificial Sequence
  Description of Artificial Sequence: Synthetic oligonucleotide
  Sense strand starting at position 3857 of SEQ ID NO: 1881110
gaaauaaucugagcuggug

SEQ ID NO: 2018923 - RNA, 19 nt, Artificial Sequence
  Description of Artificial Sequence: Synthetic oligonucleotide
  Antisense strand to SEQ ID NO: 2018922
caccagcucagauuauuuc

SEQ ID NO: 2018924 - RNA, 19 nt, Artificial Sequence
  Description of Artificial Sequence: Synthetic oligonucleotide
  Sense strand starting at position 188 of SEQ ID NO: 1881111
agcucaucuuuauuguuua

SEQ ID NO: 2018925 - RNA, 19 nt, Artificial Sequence
  Description of Artificial Sequence: Synthetic oligonucleotide
  Antisense strand to SEQ ID NO: 2018924
uaaacaauaaagaugagcu

SEQ ID NO: 2018926 - RNA, 19 nt, Artificial Sequence
  Description of Artificial Sequence: Synthetic oligonucleotide
  Sense strand starting at position 278 of SEQ ID NO: 1881111
uuuccauuaugagaacugu

SEQ ID NO: 2018927 - RNA, 19 nt, Artificial Sequence
  Description of Artificial Sequence: Synthetic oligonucleotide
  Antisense strand to SEQ ID NO: 2018926
acaguucucauaauggaaa

SEQ ID NO: 2018928 - RNA, 19 nt, Artificial Sequence
  Description of Artificial Sequence: Synthetic oligonucleotide
  Sense strand starting at position 311 of SEQ ID NO: 1881111
acaccucauggcugaauua

SEQ ID NO: 2018929 - RNA, 19 nt, Artificial Sequence
  Description of Artificial Sequence: Synthetic oligonucleotide
  Antisense strand to SEQ ID NO: 2018928
uaauucagccaugaggugu

SEQ ID NO: 2018930 - RNA, 19 nt, Artificial Sequence
  Description of Artificial Sequence: Synthetic oligonucleotide
  Sense strand starting at position 355 of SEQ ID NO: 1881111
uguagaaucuucugcuguu

SEQ ID NO: 2018931 - RNA, 19 nt, Artificial Sequence
  Description of Artificial Sequence: Synthetic oligonucleotide
  Antisense strand to SEQ ID NO: 2018930
aacagcagaagauucuaca

SEQ ID NO: 2018932 - RNA, 19 nt, Artificial Sequence
  Description of Artificial Sequence: Synthetic oligonucleotide
  Sense strand starting at position 356 of SEQ ID NO: 1881111
guagaaucuucugcuguuu

SEQ ID NO: 2018933 - RNA, 19 nt, Artificial Sequence
  Description of Artificial Sequence: Synthetic oligonucleotide
  Antisense strand to SEQ ID NO: 2018932
aaacagcagaagauucuac

SEQ ID NO: 2018934 - RNA, 19 nt, Artificial Sequence
  Description of Artificial Sequence: Synthetic oligonucleotide
  Sense strand starting at position 378 of SEQ ID NO: 1881111
aaucaagucugauugauug

SEQ ID NO: 2018935 - RNA, 19 nt, Artificial Sequence
  Description of Artificial Sequence: Synthetic oligonucleotide
  Antisense strand to SEQ ID NO: 2018934
caaucaaucagacuugauu

SEQ ID NO: 2018936 - RNA, 19 nt, Artificial Sequence
  Description of Artificial Sequence: Synthetic oligonucleotide
  Sense strand starting at position 382 of SEQ ID NO: 1881111
aagucugauugauugguga

SEQ ID NO: 2018937 - RNA, 19 nt, Artificial Sequence
  Description of Artificial Sequence: Synthetic oligonucleotide
  Antisense strand to SEQ ID NO: 2018936
ucaccaaucaaucagacuu

SEQ ID NO: 2018938 - RNA, 19 nt, Artificial Sequence
  Description of Artificial Sequence: Synthetic oligonucleotide
  Sense strand starting at position 384 of SEQ ID NO: 1881111
gucugauugauuggugaua

SEQ ID NO: 2018939 - RNA, 19 nt, Artificial Sequence
  Description of Artificial Sequence: Synthetic oligonucleotide
  Antisense strand to SEQ ID NO: 2018938
uaucaccaaucaaucagac

SEQ ID NO: 2018940 - RNA, 19 nt, Artificial Sequence
  Description of Artificial Sequence: Synthetic oligonucleotide
  Sense strand starting at position 385 of SEQ ID NO: 1881111
ucugauugauuggugauau

SEQ ID NO: 2018941 - RNA, 19 nt, Artificial Sequence
  Description of Artificial Sequence: Synthetic oligonucleotide
  Antisense strand to SEQ ID NO: 2018940
auaucaccaaucaaucaga

SEQ ID NO: 2018942 - RNA, 19 nt, Artificial Sequence
  Description of Artificial Sequence: Synthetic oligonucleotide
  Sense strand starting at position 386 of SEQ ID NO: 1881111
cugauugauuggugauaug

SEQ ID NO: 2018943 - RNA, 19 nt, Artificial Sequence
  Description of Artificial Sequence: Synthetic oligonucleotide
  Antisense strand to SEQ ID NO: 2018942
cauaucaccaaucaaucag

SEQ ID NO: 2018944 - RNA, 19 nt, Artificial Sequence
  Description of Artificial Sequence: Synthetic oligonucleotide
  Sense strand starting at position 389 of SEQ ID NO: 1881111
auugauuggugauaugaau

SEQ ID NO: 2018945 - RNA, 19 nt, Artificial Sequence
  Description of Artificial Sequence: Synthetic oligonucleotide
  Antisense strand to SEQ ID NO: 2018944
auucauaucaccaaucaau

SEQ ID NO: 2018946 - RNA, 19 nt, Artificial Sequence
  Description of Artificial Sequence: Synthetic oligonucleotide
  Sense strand starting at position 397 of SEQ ID NO: 1881111
gugauaugaauguaugggu

SEQ ID NO: 2018947 - RNA, 19 nt, Artificial Sequence
  Description of Artificial Sequence: Synthetic oligonucleotide
  Antisense strand to SEQ ID NO: 2018946
acccauacauucauaucac

SEQ ID NO: 2018948 - RNA, 19 nt, Artificial Sequence
  Description of Artificial Sequence: Synthetic oligonucleotide
  Sense strand starting at position 400 of SEQ ID NO: 1881111
auaugaauguauggguaga

SEQ ID NO: 2018949 - RNA, 19 nt, Artificial Sequence
  Description of Artificial Sequence: Synthetic oligonucleotide
  Antisense strand to SEQ ID NO: 2018948
ucuacccauacauucauau

SEQ ID NO: 2018950 - RNA, 19 nt, Artificial Sequence
  Description of Artificial Sequence: Synthetic oligonucleotide
  Sense strand starting at position 402 of SEQ ID NO: 1881111
augaauguauggguagaua

SEQ ID NO: 2018951 - RNA, 19 nt, Artificial Sequence
  Description of Artificial Sequence: Synthetic oligonucleotide
  Antisense strand to SEQ ID NO: 2018950
uaucuacccauacauucau

SEQ ID NO: 2018952 - RNA, 19 nt, Artificial Sequence
  Description of Artificial Sequence: Synthetic oligonucleotide
  Sense strand starting at position 413 of SEQ ID NO: 1881111
gguagauauuuagaaauag

SEQ ID NO: 2018953 - RNA, 19 nt, Artificial Sequence
  Description of Artificial Sequence: Synthetic oligonucleotide
  Antisense strand to SEQ ID NO: 2018952
cuauuucuaaauaucuacc

SEQ ID NO: 2018954 - RNA, 19 nt, Artificial Sequence
  Description of Artificial Sequence: Synthetic oligonucleotide
  Sense strand starting at position 464 of SEQ ID NO: 1881111
ccauaugccuguugucauu

SEQ ID NO: 2018955 - RNA, 19 nt, Artificial Sequence
  Description of Artificial Sequence: Synthetic oligonucleotide
  Antisense strand to SEQ ID NO: 2018954
aaugacaacaggcauaugg

SEQ ID NO: 2018956 - RNA, 19 nt, Artificial Sequence
  Description of Artificial Sequence: Synthetic oligonucleotide
  Sense strand starting at position 518 of SEQ ID NO: 1881111
ucugccuauugucguuauu

SEQ ID NO: 2018957 - RNA, 19 nt, Artificial Sequence
  Description of Artificial Sequence: Synthetic oligonucleotide
  Antisense strand to SEQ ID NO: 2018956
aauaacgacaauaggcaga

SEQ ID NO: 2018958 - RNA, 19 nt, Artificial Sequence
  Description of Artificial Sequence: Synthetic oligonucleotide
  Sense strand starting at position 521 of SEQ ID NO: 1881111
gccuauugucguuauugcu

SEQ ID NO: 2018959 - RNA, 19 nt, Artificial Sequence
  Description of Artificial Sequence: Synthetic oligonucleotide
  Antisense strand to SEQ ID NO: 2018958
agcaauaacgacaauaggc

SEQ ID NO: 2018960 - RNA, 19 nt, Artificial Sequence
  Description of Artificial Sequence: Synthetic oligonucleotide
  Sense strand starting at position 572 of SEQ ID NO: 1881111
gccuguugucguuauugau

SEQ ID NO: 2018961 - RNA, 19 nt, Artificial Sequence
  Description of Artificial Sequence: Synthetic oligonucleotide
  Antisense strand to SEQ ID NO: 2018960
aucaauaacgacaacaggc

SEQ ID NO: 2018962 - RNA, 19 nt, Artificial Sequence
  Description of Artificial Sequence: Synthetic oligonucleotide
  Sense strand starting at position 623 of SEQ ID NO: 1881111
gccuguugucauuauugau

SEQ ID NO: 2018963 - RNA, 19 nt, Artificial Sequence
  Description of Artificial Sequence: Synthetic oligonucleotide
  Antisense strand to SEQ ID NO: 2018962
aucaauaaugacaacaggc

SEQ ID NO: 2018964 - RNA, 19 nt, Artificial Sequence
  Description of Artificial Sequence: Synthetic oligonucleotide
  Sense strand starting at position 668 of SEQ ID NO: 1881111
ccgucugccuguugucauu

SEQ ID NO: 2018965 - RNA, 19 nt, Artificial Sequence
  Description of Artificial Sequence: Synthetic oligonucleotide
  Antisense strand to SEQ ID NO: 2018964
aaugacaacaggcagacgg

SEQ ID NO: 2018966 - RNA, 19 nt, Artificial Sequence
  Description of Artificial Sequence: Synthetic oligonucleotide
  Sense strand starting at position 670 of SEQ ID NO: 1881111
gucugccuguugucauuau

SEQ ID NO: 2018967 - RNA, 19 nt, Artificial Sequence
  Description of Artificial Sequence: Synthetic oligonucleotide
  Antisense strand to SEQ ID NO: 2018966
auaaugacaacaggcagac

SEQ ID NO: 2018968 - RNA, 19 nt, Artificial Sequence
  Description of Artificial Sequence: Synthetic oligonucleotide
  Sense strand starting at position 674 of SEQ ID NO: 1881111
gccuguugucauuauuaau

SEQ ID NO: 2018969 - RNA, 19 nt, Artificial Sequence
  Description of Artificial Sequence: Synthetic oligonucleotide
  Antisense strand to SEQ ID NO: 2018968
auuaauaaugacaacaggc

SEQ ID NO: 2018970 - RNA, 19 nt, Artificial Sequence
  Description of Artificial Sequence: Synthetic oligonucleotide
  Sense strand starting at position 718 of SEQ ID NO: 1881111
uguacuaguuuguguugau

SEQ ID NO: 2018971 - RNA, 19 nt, Artificial Sequence
  Description of Artificial Sequence: Synthetic oligonucleotide
  Antisense strand to SEQ ID NO: 2018970
aucaacacaaacuaguaca

SEQ ID NO: 2018972 - RNA, 19 nt, Artificial Sequence
  Description of Artificial Sequence: Synthetic oligonucleotide
  Sense strand starting at position 719 of SEQ ID NO: 1881111
guacuaguuuguguugaua

SEQ ID NO: 2018973 - RNA, 19 nt, Artificial Sequence
  Description of Artificial Sequence: Synthetic oligonucleotide
  Antisense strand to SEQ ID NO: 2018972
uaucaacacaaacuaguac

SEQ ID NO: 2018974 - RNA, 19 nt, Artificial Sequence
  Description of Artificial Sequence: Synthetic oligonucleotide
  Sense strand starting at position 721 of SEQ ID NO: 1881111
acuaguuuguguugauaaa

SEQ ID NO: 2018975 - RNA, 19 nt, Artificial Sequence
  Description of Artificial Sequence: Synthetic oligonucleotide
  Antisense strand to SEQ ID NO: 2018974
uuuaucaacacaaacuagu

SEQ ID NO: 2018976 - RNA, 19 nt, Artificial Sequence
  Description of Artificial Sequence: Synthetic oligonucleotide
  Sense strand starting at position 722 of SEQ ID NO: 1881111
cuaguuuguguugauaaau

SEQ ID NO: 2018977 - RNA, 19 nt, Artificial Sequence
  Description of Artificial Sequence: Synthetic oligonucleotide
  Antisense strand to SEQ ID NO: 2018976
auuuaucaacacaaacuag

SEQ ID NO: 2018978 - RNA, 19 nt, Artificial Sequence
  Description of Artificial Sequence: Synthetic oligonucleotide
  Sense strand starting at position 967 of SEQ ID NO: 1881111
gcucuugauuuagcucuca

SEQ ID NO: 2018979 - RNA, 19 nt, Artificial Sequence
  Description of Artificial Sequence: Synthetic oligonucleotide
  Antisense strand to SEQ ID NO: 2018978
ugagagcuaaaucaagagc

SEQ ID NO: 2018980 - RNA, 19 nt, Artificial Sequence
  Description of Artificial Sequence: Synthetic oligonucleotide
  Sense strand starting at position 972 of SEQ ID NO: 1881111
ugauuuagcucucaaggug

SEQ ID NO: 2018981 - RNA, 19 nt, Artificial Sequence
  Description of Artificial Sequence: Synthetic oligonucleotide
  Antisense strand to SEQ ID NO: 2018980
caccuugagagcuaaauca

SEQ ID NO: 2018982 - RNA, 19 nt, Artificial Sequence
  Description of Artificial Sequence: Synthetic oligonucleotide
  Sense strand starting at position 1095 of SEQ ID NO: 1881111
ucuagaucuuuguuccugu

SEQ ID NO: 2018983 - RNA, 19 nt, Artificial Sequence
  Description of Artificial Sequence: Synthetic oligonucleotide
  Antisense strand to SEQ ID NO: 2018982
acaggaacaaagaucuaga

SEQ ID NO: 2018984 - RNA, 19 nt, Artificial Sequence
  Description of Artificial Sequence: Synthetic oligonucleotide
  Sense strand starting at position 24 of SEQ ID NO: 1881112
gucaaauacugaguaagau

SEQ ID NO: 2018985 - RNA, 19 nt, Artificial Sequence
  Description of Artificial Sequence: Synthetic oligonucleotide
  Antisense strand to SEQ ID NO: 2018984
aucuuacucaguauuugac

SEQ ID NO: 2018986 - RNA, 19 nt, Artificial Sequence
  Description of Artificial Sequence: Synthetic oligonucleotide
  Sense strand starting at position 73 of SEQ ID NO: 1881112
aaauaauuguuacuggaug

SEQ ID NO: 2018987 - RNA, 19 nt, Artificial Sequence
  Description of Artificial Sequence: Synthetic oligonucleotide
  Antisense strand to SEQ ID NO: 2018986
cauccaguaacaauuauuu

SEQ ID NO: 2018988 - RNA, 19 nt, Artificial Sequence
  Description of Artificial Sequence: Synthetic oligonucleotide
  Sense strand starting at position 159 of SEQ ID NO: 1881112
agcucugcugaugaagaaa

SEQ ID NO: 2018989 - RNA, 19 nt, Artificial Sequence
  Description of Artificial Sequence: Synthetic oligonucleotide
  Antisense strand to SEQ ID NO: 2018988
uuucuucaucagcagagcu

SEQ ID NO: 2018990 - RNA, 19 nt, Artificial Sequence
  Description of Artificial Sequence: Synthetic oligonucleotide
  Sense strand starting at position 189 of SEQ ID NO: 1881112
guaacuugaggaugaguca

SEQ ID NO: 2018991 - RNA, 19 nt, Artificial Sequence
  Description of Artificial Sequence: Synthetic oligonucleotide
  Antisense strand to SEQ ID NO: 2018990
ugacucauccucaaguuac

SEQ ID NO: 2018992 - RNA, 19 nt, Artificial Sequence
  Description of Artificial Sequence: Synthetic oligonucleotide
  Sense strand starting at position 196 of SEQ ID NO: 1881112
gaggaugagucauugucua

SEQ ID NO: 2018993 - RNA, 19 nt, Artificial Sequence
  Description of Artificial Sequence: Synthetic oligonucleotide
  Antisense strand to SEQ ID NO: 2018992
uagacaaugacucauccuc

SEQ ID NO: 2018994 - RNA, 19 nt, Artificial Sequence
  Description of Artificial Sequence: Synthetic oligonucleotide
  Sense strand starting at position 200 of SEQ ID NO: 1881112
augagucauugucuauaaa

SEQ ID NO: 2018995 - RNA, 19 nt, Artificial Sequence
  Description of Artificial Sequence: Synthetic oligonucleotide
  Antisense strand to SEQ ID NO: 2018994
uuuauagacaaugacucau

SEQ ID NO: 2018996 - RNA, 19 nt, Artificial Sequence
  Description of Artificial Sequence: Synthetic oligonucleotide
  Sense strand starting at position 201 of SEQ ID NO: 1881112
ugagucauugucuauaaag

SEQ ID NO: 2018997 - RNA, 19 nt, Artificial Sequence
  Description of Artificial Sequence: Synthetic oligonucleotide
  Antisense strand to SEQ ID NO: 2018996
cuuuauagacaaugacuca

SEQ ID NO: 2018998 - RNA, 19 nt, Artificial Sequence
  Description of Artificial Sequence: Synthetic oligonucleotide
  Sense strand starting at position 339 of SEQ ID NO: 1881112
aguguuuauguccacauaa

SEQ ID NO: 2018999 - RNA, 19 nt, Artificial Sequence
  Description of Artificial Sequence: Synthetic oligonucleotide
  Antisense strand to SEQ ID NO: 2018998
uuauguggacauaaacacu

SEQ ID NO: 2019000 - RNA, 19 nt, Artificial Sequence
  Description of Artificial Sequence: Synthetic oligonucleotide
  Sense strand starting at position 439 of SEQ ID NO: 1881112
uuggguuaauuggcaagaa

SEQ ID NO: 2019001 - RNA, 19 nt, Artificial Sequence
  Description of Artificial Sequence: Synthetic oligonucleotide
  Antisense strand to SEQ ID NO: 2019000
uucuugccaauuaacccaa

SEQ ID NO: 2019002 - RNA, 19 nt, Artificial Sequence
  Description of Artificial Sequence: Synthetic oligonucleotide
  Sense strand starting at position 648 of SEQ ID NO: 1881112
uugcucuuagguuagauau

SEQ ID NO: 2019003 - RNA, 19 nt, Artificial Sequence
  Description of Artificial Sequence: Synthetic oligonucleotide
  Antisense strand to SEQ ID NO: 2019002
auaucuaaccuaagagcaa

SEQ ID NO: 2019004 - RNA, 19 nt, Artificial Sequence
  Description of Artificial Sequence: Synthetic oligonucleotide
  Sense strand starting at position 1118 of SEQ ID NO: 1881112
agcgaaacucagcaucaaa

SEQ ID NO: 2019005 - RNA, 19 nt, Artificial Sequence
  Description of Artificial Sequence: Synthetic oligonucleotide
  Antisense strand to SEQ ID NO: 2019004
uuugaugcugaguuucgcu

SEQ ID NO: 2019006 - RNA, 19 nt, Artificial Sequence
  Description of Artificial Sequence: Synthetic oligonucleotide
  Sense strand starting at position 1208 of SEQ ID NO: 1881112
aaagucagucaagggaauu

SEQ ID NO: 2019007 - RNA, 19 nt, Artificial Sequence
  Description of Artificial Sequence: Synthetic oligonucleotide
  Antisense strand to SEQ ID NO: 2019006
aauucccuugacugacuuu

SEQ ID NO: 2019008 - RNA, 19 nt, Artificial Sequence
  Description of Artificial Sequence: Synthetic oligonucleotide
  Sense strand starting at position 1297 of SEQ ID NO: 1881112
aggcuacagugauugaaau

SEQ ID NO: 2019009 - RNA, 19 nt, Artificial Sequence
  Description of Artificial Sequence: Synthetic oligonucleotide
  Antisense strand to SEQ ID NO: 2019008
auuucaaucacuguagccu

SEQ ID NO: 2019010 - RNA, 19 nt, Artificial Sequence
  Description of Artificial Sequence: Synthetic oligonucleotide
  Sense strand starting at position 1298 of SEQ ID NO: 1881112
ggcuacagugauugaaauu

SEQ ID NO: 2019011 - RNA, 19 nt, Artificial Sequence
  Description of Artificial Sequence: Synthetic oligonucleotide
  Antisense strand to SEQ ID NO: 2019010
aauuucaaucacuguagcc

SEQ ID NO: 2019012 - RNA, 19 nt, Artificial Sequence
  Description of Artificial Sequence: Synthetic oligonucleotide
  Sense strand starting at position 1416 of SEQ ID NO: 1881112
ggauucuaacagugaguug

SEQ ID NO: 2019013 - RNA, 19 nt, Artificial Sequence
  Description of Artificial Sequence: Synthetic oligonucleotide
  Antisense strand to SEQ ID NO: 2019012
caacucacuguuagaaucc

SEQ ID NO: 2019014 - RNA, 19 nt, Artificial Sequence
  Description of Artificial Sequence: Synthetic oligonucleotide
  Sense strand starting at position 1515 of SEQ ID NO: 1881112
agauaauuggcucaggucu

SEQ ID NO: 2019015 - RNA, 19 nt, Artificial Sequence
  Description of Artificial Sequence: Synthetic oligonucleotide
  Antisense strand to SEQ ID NO: 2019014
agaccugagccaauuaucu

SEQ ID NO: 2019016 - RNA, 19 nt, Artificial Sequence
  Description of Artificial Sequence: Synthetic oligonucleotide
  Sense strand starting at position 1556 of SEQ ID NO: 1881112
uggagccuuagauaaguca

SEQ ID NO: 2019017 - RNA, 19 nt, Artificial Sequence
  Description of Artificial Sequence: Synthetic oligonucleotide
  Antisense strand to SEQ ID NO: 2019016
ugacuuaucuaaggcucca

SEQ ID NO: 2019018 - RNA, 19 nt, Artificial Sequence
  Description of Artificial Sequence: Synthetic oligonucleotide
  Sense strand starting at position 1695 of SEQ ID NO: 1881112
agucgaucccucugagaaa

SEQ ID NO: 2019019 - RNA, 19 nt, Artificial Sequence
  Description of Artificial Sequence: Synthetic oligonucleotide
  Antisense strand to SEQ ID NO: 2019018
uuucucagagggaucgacu

SEQ ID NO: 2019020 - RNA, 19 nt, Artificial Sequence
  Description of Artificial Sequence: Synthetic oligonucleotide
  Sense strand starting at position 2519 of SEQ ID NO: 1881112
cuuagcuggccugaaauua

SEQ ID NO: 2019021 - RNA, 19 nt, Artificial Sequence
  Description of Artificial Sequence: Synthetic oligonucleotide
  Antisense strand to SEQ ID NO: 2019020
uaauuucaggccagcuaag

SEQ ID NO: 2019022 - RNA, 19 nt, Artificial Sequence
  Description of Artificial Sequence: Synthetic oligonucleotide
  Sense strand starting at position 2658 of SEQ ID NO: 1881112
gggaucugcucauccagau

SEQ ID NO: 2019023 - RNA, 19 nt, Artificial Sequence
  Description of Artificial Sequence: Synthetic oligonucleotide
  Antisense strand to SEQ ID NO: 2019022
aucuggaugagcagauccc

SEQ ID NO: 2019024 - RNA, 19 nt, Artificial Sequence
  Description of Artificial Sequence: Synthetic oligonucleotide
  Sense strand starting at position 2671 of SEQ ID NO: 1881112
ccagauguucaguugcguu

SEQ ID NO: 2019025 - RNA, 19 nt, Artificial Sequence
  Description of Artificial Sequence: Synthetic oligonucleotide
  Antisense strand to SEQ ID NO: 2019024
aacgcaacugaacaucugg

SEQ ID NO: 2019026 - RNA, 19 nt, Artificial Sequence
  Description of Artificial Sequence: Synthetic oligonucleotide
  Sense strand starting at position 2926 of SEQ ID NO: 1881112
guucuuugccaagaggauu

SEQ ID NO: 2019027 - RNA, 19 nt, Artificial Sequence
  Description of Artificial Sequence: Synthetic oligonucleotide
  Antisense strand to SEQ ID NO: 2019026
aauccucuuggcaaagaac

SEQ ID NO: 2019028 - RNA, 19 nt, Artificial Sequence
  Description of Artificial Sequence: Synthetic oligonucleotide
  Sense strand starting at position 2970 of SEQ ID NO: 1881112
ggauauuuauuagucgucu

SEQ ID NO: 2019029 - RNA, 19 nt, Artificial Sequence
  Description of Artificial Sequence: Synthetic oligonucleotide
  Antisense strand to SEQ ID NO: 2019028
agacgacuaauaaauaucc

SEQ ID NO: 2019030 - RNA, 19 nt, Artificial Sequence
  Description of Artificial Sequence: Synthetic oligonucleotide
  Sense strand starting at position 2974 of SEQ ID NO: 1881112
auuuauuagucgucucauc

SEQ ID NO: 2019031 - RNA, 19 nt, Artificial Sequence
  Description of Artificial Sequence: Synthetic oligonucleotide
  Antisense strand to SEQ ID NO: 2019030
gaugagacgacuaauaaau

SEQ ID NO: 2019032 - RNA, 19 nt, Artificial Sequence
  Description of Artificial Sequence: Synthetic oligonucleotide
  Sense strand starting at position 2993 of SEQ ID NO: 1881112
agcugaugugcugagaaac

SEQ ID NO: 2019033 - RNA, 19 nt, Artificial Sequence
  Description of Artificial Sequence: Synthetic oligonucleotide
  Antisense strand to SEQ ID NO: 2019032
guuucucagcacaucagcu

SEQ ID NO: 2019034 - RNA, 19 nt, Artificial Sequence
  Description of Artificial Sequence: Synthetic oligonucleotide
  Sense strand starting at position 3165 of SEQ ID NO: 1881112
aucgauuuauuggcguaca

SEQ ID NO: 2019035 - RNA, 19 nt, Artificial Sequence
  Description of Artificial Sequence: Synthetic oligonucleotide
  Antisense strand to SEQ ID NO: 2019034
uguacgccaauaaaucgau

SEQ ID NO: 2019036 - RNA, 19 nt, Artificial Sequence
  Description of Artificial Sequence: Synthetic oligonucleotide
  Sense strand starting at position 3275 of SEQ ID NO: 1881112
uuuggaauuuggcagaaau

SEQ ID NO: 2019037 - RNA, 19 nt, Artificial Sequence
  Description of Artificial Sequence: Synthetic oligonucleotide
  Antisense strand to SEQ ID NO: 2019036
auuucugccaaauuccaaa

SEQ ID NO: 2019038 - RNA, 19 nt, Artificial Sequence
  Description of Artificial Sequence: Synthetic oligonucleotide
  Sense strand starting at position 3289 of SEQ ID NO: 1881112
gaaauaaaguaguuccgaa

SEQ ID NO: 2019039 - RNA, 19 nt, Artificial Sequence
  Description of Artificial Sequence: Synthetic oligonucleotide
  Antisense strand to SEQ ID NO: 2019038
uucggaacuacuuuauuuc

SEQ ID NO: 2019040 - RNA, 19 nt, Artificial Sequence
  Description of Artificial Sequence: Synthetic oligonucleotide
  Sense strand starting at position 3353 of SEQ ID NO: 1881112
cagauaagacuaggucuua

SEQ ID NO: 2019041 - RNA, 19 nt, Artificial Sequence
  Description of Artificial Sequence: Synthetic oligonucleotide
  Antisense strand to SEQ ID NO: 2019040
uaagaccuagucuuaucug

SEQ ID NO: 2019042 - RNA, 19 nt, Artificial Sequence
  Description of Artificial Sequence: Synthetic oligonucleotide
  Sense strand starting at position 3366 of SEQ ID NO: 1881112
gucuuaagaucaguagaag

SEQ ID NO: 2019043 - RNA, 19 nt, Artificial Sequence
  Description of Artificial Sequence: Synthetic oligonucleotide
  Antisense strand to SEQ ID NO: 2019042
cuucuacugaucuuaagac

SEQ ID NO: 2019044 - RNA, 19 nt, Artificial Sequence
  Description of Artificial Sequence: Synthetic oligonucleotide
  Sense strand starting at position 3467 of SEQ ID NO: 1881112
auugaaauugucugucaga

SEQ ID NO: 2019045 - RNA, 19 nt, Artificial Sequence
  Description of Artificial Sequence: Synthetic oligonucleotide
  Antisense strand to SEQ ID NO: 2019044
ucugacagacaauuucaau

SEQ ID NO: 2019046 - RNA, 19 nt, Artificial Sequence
  Description of Artificial Sequence: Synthetic oligonucleotide
  Sense strand starting at position 3476 of SEQ ID NO: 1881112
gucugucagauuuguacuu

SEQ ID NO: 2019047 - RNA, 19 nt, Artificial Sequence
  Description of Artificial Sequence: Synthetic oligonucleotide
  Antisense strand to SEQ ID NO: 2019046
aaguacaaaucugacagac

SEQ ID NO: 2019048 - RNA, 19 nt, Artificial Sequence
  Description of Artificial Sequence: Synthetic oligonucleotide
  Sense strand starting at position 3581 of SEQ ID NO: 1881112
uguuguaagggcuauauaa

SEQ ID NO: 2019049 - RNA, 19 nt, Artificial Sequence
  Description of Artificial Sequence: Synthetic oligonucleotide
  Antisense strand to SEQ ID NO: 2019048
uuauauagcccuuacaaca

SEQ ID NO: 2019050 - RNA, 19 nt, Artificial Sequence
  Description of Artificial Sequence: Synthetic oligonucleotide
  Sense strand starting at position 3583 of SEQ ID NO: 1881112
uuguaagggcuauauaauu

SEQ ID NO: 2019051 - RNA, 19 nt, Artificial Sequence
  Description of Artificial Sequence: Synthetic oligonucleotide
  Antisense strand to SEQ ID NO: 2019050
aauuauauagcccuuacaa

SEQ ID NO: 2019052 - RNA, 19 nt, Artificial Sequence
  Description of Artificial Sequence: Synthetic oligonucleotide
  Sense strand starting at position 3617 of SEQ ID NO: 1881112
ugcucuuauuuaguuguga

SEQ ID NO: 2019053 - RNA, 19 nt, Artificial Sequence
  Description of Artificial Sequence: Synthetic oligonucleotide
  Antisense strand to SEQ ID NO: 2019052
ucacaacuaaauaagagca

SEQ ID NO: 2019054 - RNA, 19 nt, Artificial Sequence
  Description of Artificial Sequence: Synthetic oligonucleotide
  Sense strand starting at position 3618 of SEQ ID NO: 1881112
gcucuuauuuaguugugau

SEQ ID NO: 2019055 - RNA, 19 nt, Artificial Sequence
  Description of Artificial Sequence: Synthetic oligonucleotide
  Antisense strand to SEQ ID NO: 2019054
aucacaacuaaauaagagc

SEQ ID NO: 2019056 - RNA, 19 nt, Artificial Sequence
  Description of Artificial Sequence: Synthetic oligonucleotide
  Sense strand starting at position 3725 of SEQ ID NO: 1881112
caauuauuggcugaguaac

SEQ ID NO: 2019057 - RNA, 19 nt, Artificial Sequence
  Description of Artificial Sequence: Synthetic oligonucleotide
  Antisense strand to SEQ ID NO: 2019056
guuacucagccaauaauug

SEQ ID NO: 2019058 - RNA, 19 nt, Artificial Sequence
  Description of Artificial Sequence: Synthetic oligonucleotide
  Sense strand starting at position 3738 of SEQ ID NO: 1881112
aguaacuuugagcaaguua

SEQ ID NO: 2019059 - RNA, 19 nt, Artificial Sequence
  Description of Artificial Sequence: Synthetic oligonucleotide
  Antisense strand to SEQ ID NO: 2019058
uaacuugcucaaaguuacu

SEQ ID NO: 2019060 - RNA, 19 nt, Artificial Sequence
  Description of Artificial Sequence: Synthetic oligonucleotide
  Sense strand starting at position 3850 of SEQ ID NO: 1881112
aauaauaggugagucaacu

SEQ ID NO: 2019061 - RNA, 19 nt, Artificial Sequence
  Description of Artificial Sequence: Synthetic oligonucleotide
  Antisense strand to SEQ ID NO: 2019060
aguugacucaccuauuauu

SEQ ID NO: 2019062 - RNA, 19 nt, Artificial Sequence
  Description of Artificial Sequence: Synthetic oligonucleotide
  Sense strand starting at position 3923 of SEQ ID NO: 1881112
acuccuuacccaggaugaa

SEQ ID NO: 2019063 - RNA, 19 nt, Artificial Sequence
  Description of Artificial Sequence: Synthetic oligonucleotide
  Antisense strand to SEQ ID NO: 2019062
uucauccuggguaaggagu

SEQ ID NO: 2019064 - RNA, 19 nt, Artificial Sequence
  Description of Artificial Sequence: Synthetic oligonucleotide
  Sense strand starting at position 2002 of SEQ ID NO: 1881113
acucguaucucguuugauc

SEQ ID NO: 2019065 - RNA, 19 nt, Artificial Sequence
  Description of Artificial Sequence: Synthetic oligonucleotide
  Antisense strand to SEQ ID NO: 2019064
gaucaaacgagauacgagu

SEQ ID NO: 2019066 - RNA, 19 nt, Artificial Sequence
  Description of Artificial Sequence: Synthetic oligonucleotide
  Sense strand starting at position 2003 of SEQ ID NO: 1881113
cucguaucucguuugaucu

SEQ ID NO: 2019067 - RNA, 19 nt, Artificial Sequence
  Description of Artificial Sequence: Synthetic oligonucleotide
  Antisense strand to SEQ ID NO: 2019066
agaucaaacgagauacgag

SEQ ID NO: 2019068 - RNA, 19 nt, Artificial Sequence
  Description of Artificial Sequence: Synthetic oligonucleotide
  Sense strand starting at position 2007 of SEQ ID NO: 1881113
uaucucguuugaucugauu

SEQ ID NO: 2019069 - RNA, 19 nt, Artificial Sequence
  Description of Artificial Sequence: Synthetic oligonucleotide
  Antisense strand to SEQ ID NO: 2019068
aaucagaucaaacgagaua

SEQ ID NO: 2019070 - RNA, 19 nt, Artificial Sequence
  Description of Artificial Sequence: Synthetic oligonucleotide
  Sense strand starting at position 2019 of SEQ ID NO: 1881113
ucugauucuggugagcaaa

SEQ ID NO: 2019071 - RNA, 19 nt, Artificial Sequence
  Description of Artificial Sequence: Synthetic oligonucleotide
  Antisense strand to SEQ ID NO: 2019070
uuugcucaccagaaucaga

SEQ ID NO: 2019072 - RNA, 19 nt, Artificial Sequence
  Description of Artificial Sequence: Synthetic oligonucleotide
  Sense strand starting at position 2115 of SEQ ID NO: 1881113
uuuaauaaacccuguguuu

SEQ ID NO: 2019073 - RNA, 19 nt, Artificial Sequence
  Description of Artificial Sequence: Synthetic oligonucleotide
  Antisense strand to SEQ ID NO: 2019072
aaacacaggguuuauuaaa

SEQ ID NO: 2019074 - RNA, 19 nt, Artificial Sequence
  Description of Artificial Sequence: Synthetic oligonucleotide
  Sense strand starting at position 2136 of SEQ ID NO: 1881113
uauauaaaguccuuuggga

SEQ ID NO: 2019075 - RNA, 19 nt, Artificial Sequence
  Description of Artificial Sequence: Synthetic oligonucleotide
  Antisense strand to SEQ ID NO: 2019074
ucccaaaggacuuuauaua

SEQ ID NO: 2019076 - RNA, 19 nt, Artificial Sequence
  Description of Artificial Sequence: Synthetic oligonucleotide
  Sense strand starting at position 2138 of SEQ ID NO: 1881113
uauaaaguccuuugggaaa

SEQ ID NO: 2019077 - RNA, 19 nt, Artificial Sequence
  Description of Artificial Sequence: Synthetic oligonucleotide
  Antisense strand to SEQ ID NO: 2019076
uuucccaaaggacuuuaua

SEQ ID NO: 2019078 - RNA, 19 nt, Artificial Sequence
  Description of Artificial Sequence: Synthetic oligonucleotide
  Sense strand starting at position 2222 of SEQ ID NO: 1881113
guggaugcagcauaagauu

SEQ ID NO: 2019079 - RNA, 19 nt, Artificial Sequence
  Description of Artificial Sequence: Synthetic oligonucleotide
  Antisense strand to SEQ ID NO: 2019078
aaucuuaugcugcauccac

SEQ ID NO: 2019080 - RNA, 19 nt, Artificial Sequence
  Description of Artificial Sequence: Synthetic oligonucleotide
  Sense strand starting at position 2363 of SEQ ID NO: 1881113
agaaucaacugguauuucu

SEQ ID NO: 2019081 - RNA, 19 nt, Artificial Sequence
  Description of Artificial Sequence: Synthetic oligonucleotide
  Antisense strand to SEQ ID NO: 2019080
agaaauaccaguugauucu

SEQ ID NO: 2019082 - RNA, 19 nt, Artificial Sequence
  Description of Artificial Sequence: Synthetic oligonucleotide
  Sense strand starting at position 2370 of SEQ ID NO: 1881113
acugguauuucugaauuag

SEQ ID NO: 2019083 - RNA, 19 nt, Artificial Sequence
  Description of Artificial Sequence: Synthetic oligonucleotide
  Antisense strand to SEQ ID NO: 2019082
cuaauucagaaauaccagu

SEQ ID NO: 2019084 - RNA, 19 nt, Artificial Sequence
  Description of Artificial Sequence: Synthetic oligonucleotide
  Sense strand starting at position 2388 of SEQ ID NO: 1881113
gaagaaaucuaagggaaca

SEQ ID NO: 2019085 - RNA, 19 nt, Artificial Sequence
  Description of Artificial Sequence: Synthetic oligonucleotide
  Antisense strand to SEQ ID NO: 2019084
uguucccuuagauuucuuc

SEQ ID NO: 2019086 - RNA, 19 nt, Artificial Sequence
  Description of Artificial Sequence: Synthetic oligonucleotide
  Sense strand starting at position 2428 of SEQ ID NO: 1881113
uagagauguugcuaaagga

SEQ ID NO: 2019087 - RNA, 19 nt, Artificial Sequence
  Description of Artificial Sequence: Synthetic oligonucleotide
  Antisense strand to SEQ ID NO: 2019086
uccuuuagcaacaucucua

SEQ ID NO: 2019088 - RNA, 19 nt, Artificial Sequence
  Description of Artificial Sequence: Synthetic oligonucleotide
  Sense strand starting at position 2468 of SEQ ID NO: 1881113
ggucaaauagcugaaguca

SEQ ID NO: 2019089 - RNA, 19 nt, Artificial Sequence
  Description of Artificial Sequence: Synthetic oligonucleotide
  Antisense strand to SEQ ID NO: 2019088
ugacuucagcuauuugacc

SEQ ID NO: 2019090 - RNA, 19 nt, Artificial Sequence
  Description of Artificial Sequence: Synthetic oligonucleotide
  Sense strand starting at position 2636 of SEQ ID NO: 1881113
gcucccaagcauugucaga

SEQ ID NO: 2019091 - RNA, 19 nt, Artificial Sequence
  Description of Artificial Sequence: Synthetic oligonucleotide
  Antisense strand to SEQ ID NO: 2019090
ucugacaaugcuugggagc

SEQ ID NO: 2019092 - RNA, 19 nt, Artificial Sequence
  Description of Artificial Sequence: Synthetic oligonucleotide
  Sense strand starting at position 2638 of SEQ ID NO: 1881113
ucccaagcauugucagaaa

SEQ ID NO: 2019093 - RNA, 19 nt, Artificial Sequence
  Description of Artificial Sequence: Synthetic oligonucleotide
  Antisense strand to SEQ ID NO: 2019092
uuucugacaaugcuuggga

SEQ ID NO: 2019094 - RNA, 19 nt, Artificial Sequence
  Description of Artificial Sequence: Synthetic oligonucleotide
  Sense strand starting at position 2732 of SEQ ID NO: 1881113
gagcuucuggccugcuaca

SEQ ID NO: 2019095 - RNA, 19 nt, Artificial Sequence
  Description of Artificial Sequence: Synthetic oligonucleotide
  Antisense strand to SEQ ID NO: 2019094
uguagcaggccagaagcuc

SEQ ID NO: 2019096 - RNA, 19 nt, Artificial Sequence
  Description of Artificial Sequence: Synthetic oligonucleotide
  Sense strand starting at position 2978 of SEQ ID NO: 1881113
cuugcuugagccuggaaga

SEQ ID NO: 2019097 - RNA, 19 nt, Artificial Sequence
  Description of Artificial Sequence: Synthetic oligonucleotide
  Antisense strand to SEQ ID NO: 2019096
ucuuccaggcucaagcaag

SEQ ID NO: 2019098 - RNA, 19 nt, Artificial Sequence
  Description of Artificial Sequence: Synthetic oligonucleotide
  Sense strand starting at position 3028 of SEQ ID NO: 1881113
ggcacucaagccugaauga

SEQ ID NO: 2019099 - RNA, 19 nt, Artificial Sequence
  Description of Artificial Sequence: Synthetic oligonucleotide
  Antisense strand to SEQ ID NO: 2019098
ucauucaggcuugagugcc

SEQ ID NO: 2019100 - RNA, 19 nt, Artificial Sequence
  Description of Artificial Sequence: Synthetic oligonucleotide
  Sense strand starting at position 3122 of SEQ ID NO: 1881113
uugugugccucugcagaga

SEQ ID NO: 2019101 - RNA, 19 nt, Artificial Sequence
  Description of Artificial Sequence: Synthetic oligonucleotide
  Antisense strand to SEQ ID NO: 2019100
ucucugcagaggcacacaa

SEQ ID NO: 2019102 - RNA, 19 nt, Artificial Sequence
  Description of Artificial Sequence: Synthetic oligonucleotide
  Sense strand starting at position 3151 of SEQ ID NO: 1881113
aagaaaguccuguggagga

SEQ ID NO: 2019103 - RNA, 19 nt, Artificial Sequence
  Description of Artificial Sequence: Synthetic oligonucleotide
  Antisense strand to SEQ ID NO: 2019102
uccuccacaggacuuucuu

SEQ ID NO: 2019104 - RNA, 19 nt, Artificial Sequence
  Description of Artificial Sequence: Synthetic oligonucleotide
  Sense strand starting at position 3225 of SEQ ID NO: 1881113
agcuuaguugaugguguua

SEQ ID NO: 2019105 - RNA, 19 nt, Artificial Sequence
  Description of Artificial Sequence: Synthetic oligonucleotide
  Antisense strand to SEQ ID NO: 2019104
uaacaccaucaacuaagcu

SEQ ID NO: 2019106 - RNA, 19 nt, Artificial Sequence
  Description of Artificial Sequence: Synthetic oligonucleotide
  Sense strand starting at position 3345 of SEQ ID NO: 1881113
aaagcuugaugguacauaa

SEQ ID NO: 2019107 - RNA, 19 nt, Artificial Sequence
  Description of Artificial Sequence: Synthetic oligonucleotide
  Antisense strand to SEQ ID NO: 2019106
uuauguaccaucaagcuuu

SEQ ID NO: 2019108 - RNA, 19 nt, Artificial Sequence
  Description of Artificial Sequence: Synthetic oligonucleotide
  Sense strand starting at position 3361 of SEQ ID NO: 1881113
uaagcaggucugugaaaca

SEQ ID NO: 2019109 - RNA, 19 nt, Artificial Sequence
  Description of Artificial Sequence: Synthetic oligonucleotide
  Antisense strand to SEQ ID NO: 2019108
uguuucacagaccugcuua

SEQ ID NO: 2019110 - RNA, 19 nt, Artificial Sequence
  Description of Artificial Sequence: Synthetic oligonucleotide
  Sense strand starting at position 3450 of SEQ ID NO: 1881113
ugcuucugcccauaaaguu

SEQ ID NO: 2019111 - RNA, 19 nt, Artificial Sequence
  Description of Artificial Sequence: Synthetic oligonucleotide
  Antisense strand to SEQ ID NO: 2019110
aacuuuaugggcagaagca

SEQ ID NO: 2019112 - RNA, 19 nt, Artificial Sequence
  Description of Artificial Sequence: Synthetic oligonucleotide
  Sense strand starting at position 3489 of SEQ ID NO: 1881113
aagagaucccuaggugacu

SEQ ID NO: 2019113 - RNA, 19 nt, Artificial Sequence
  Description of Artificial Sequence: Synthetic oligonucleotide
  Antisense strand to SEQ ID NO: 2019112
agucaccuagggaucucuu

SEQ ID NO: 2019114 - RNA, 19 nt, Artificial Sequence
  Description of Artificial Sequence: Synthetic oligonucleotide
  Sense strand starting at position 3558 of SEQ ID NO: 1881113
acaaguuucuucugaaaga

SEQ ID NO: 2019115 - RNA, 19 nt, Artificial Sequence
  Description of Artificial Sequence: Synthetic oligonucleotide
  Antisense strand to SEQ ID NO: 2019114
ucuuucagaagaaacuugu

SEQ ID NO: 2019116 - RNA, 19 nt, Artificial Sequence
  Description of Artificial Sequence: Synthetic oligonucleotide
  Sense strand starting at position 3584 of SEQ ID NO: 1881113
augauacccucuggagaga

SEQ ID NO: 2019117 - RNA, 19 nt, Artificial Sequence
  Description of Artificial Sequence: Synthetic oligonucleotide
  Antisense strand to SEQ ID NO: 2019116
ucucuccagaggguaucau

SEQ ID NO: 2019118 - RNA, 19 nt, Artificial Sequence
  Description of Artificial Sequence: Synthetic oligonucleotide
  Sense strand starting at position 3604 of SEQ ID NO: 1881113
uggauuaaacagcauguuu

SEQ ID NO: 2019119 - RNA, 19 nt, Artificial Sequence
  Description of Artificial Sequence: Synthetic oligonucleotide
  Antisense strand to SEQ ID NO: 2019118
aaacaugcuguuuaaucca

SEQ ID NO: 2019120 - RNA, 19 nt, Artificial Sequence
  Description of Artificial Sequence: Synthetic oligonucleotide
  Sense strand starting at position 3606 of SEQ ID NO: 1881113
gauuaaacagcauguuugu

SEQ ID NO: 2019121 - RNA, 19 nt, Artificial Sequence
  Description of Artificial Sequence: Synthetic oligonucleotide
  Antisense strand to SEQ ID NO: 2019120
acaaacaugcuguuuaauc

SEQ ID NO: 2019122 - RNA, 19 nt, Artificial Sequence
  Description of Artificial Sequence: Synthetic oligonucleotide
  Sense strand starting at position 3620 of SEQ ID NO: 1881113
uuuguauggagguagacuu

SEQ ID NO: 2019123 - RNA, 19 nt, Artificial Sequence
  Description of Artificial Sequence: Synthetic oligonucleotide
  Antisense strand to SEQ ID NO: 2019122
aagucuaccuccauacaaa

SEQ ID NO: 2019124 - RNA, 19 nt, Artificial Sequence
  Description of Artificial Sequence: Synthetic oligonucleotide
  Sense strand starting at position 3630 of SEQ ID NO: 1881113
gguagacuuuacuuucuau

SEQ ID NO: 2019125 - RNA, 19 nt, Artificial Sequence
  Description of Artificial Sequence: Synthetic oligonucleotide
  Antisense strand to SEQ ID NO: 2019124
auagaaaguaaagucuacc

SEQ ID NO: 2019126 - RNA, 19 nt, Artificial Sequence
  Description of Artificial Sequence: Synthetic oligonucleotide
  Sense strand starting at position 3669 of SEQ ID NO: 1881113
guuauacacucauguauuu

SEQ ID NO: 2019127 - RNA, 19 nt, Artificial Sequence
  Description of Artificial Sequence: Synthetic oligonucleotide
  Antisense strand to SEQ ID NO: 2019126
aaauacaugaguguauaac

SEQ ID NO: 2019128 - RNA, 19 nt, Artificial Sequence
  Description of Artificial Sequence: Synthetic oligonucleotide
  Sense strand starting at position 3678 of SEQ ID NO: 1881113
ucauguauuucucauguaa

SEQ ID NO: 2019129 - RNA, 19 nt, Artificial Sequence
  Description of Artificial Sequence: Synthetic oligonucleotide
  Antisense strand to SEQ ID NO: 2019128
uuacaugagaaauacauga

SEQ ID NO: 2019130 - RNA, 19 nt, Artificial Sequence
  Description of Artificial Sequence: Synthetic oligonucleotide
  Sense strand starting at position 3747 of SEQ ID NO: 1881113
uggcuaacacauugaucau

SEQ ID NO: 2019131 - RNA, 19 nt, Artificial Sequence
  Description of Artificial Sequence: Synthetic oligonucleotide
  Antisense strand to SEQ ID NO: 2019130
augaucaauguguuagcca

SEQ ID NO: 2019132 - RNA, 19 nt, Artificial Sequence
  Description of Artificial Sequence: Synthetic oligonucleotide
  Sense strand starting at position 3758 of SEQ ID NO: 1881113
uugaucauuuagggauuga

SEQ ID NO: 2019133 - RNA, 19 nt, Artificial Sequence
  Description of Artificial Sequence: Synthetic oligonucleotide
  Antisense strand to SEQ ID NO: 2019132
ucaaucccuaaaugaucaa

SEQ ID NO: 2019134 - RNA, 19 nt, Artificial Sequence
  Description of Artificial Sequence: Synthetic oligonucleotide
  Sense strand starting at position 3772 of SEQ ID NO: 1881113
auugaaugcuggucuagga

SEQ ID NO: 2019135 - RNA, 19 nt, Artificial Sequence
  Description of Artificial Sequence: Synthetic oligonucleotide
  Antisense strand to SEQ ID NO: 2019134
uccuagaccagcauucaau

SEQ ID NO: 2019136 - RNA, 19 nt, Artificial Sequence
  Description of Artificial Sequence: Synthetic oligonucleotide
  Sense strand starting at position 3788 of SEQ ID NO: 1881113
ggagccaagugaucugcua

SEQ ID NO: 2019137 - RNA, 19 nt, Artificial Sequence
  Description of Artificial Sequence: Synthetic oligonucleotide
  Antisense strand to SEQ ID NO: 2019136
uagcagaucacuuggcucc

SEQ ID NO: 2019138 - RNA, 19 nt, Artificial Sequence
  Description of Artificial Sequence: Synthetic oligonucleotide
  Sense strand starting at position 3833 of SEQ ID NO: 1881113
aagguucucuacugauuug

SEQ ID NO: 2019139 - RNA, 19 nt, Artificial Sequence
  Description of Artificial Sequence: Synthetic oligonucleotide
  Antisense strand to SEQ ID NO: 2019138
caaaucaguagagaaccuu

SEQ ID NO: 2019140 - RNA, 19 nt, Artificial Sequence
  Description of Artificial Sequence: Synthetic oligonucleotide
  Sense strand starting at position 3891 of SEQ ID NO: 1881113
augauccuucuggguaaau

SEQ ID NO: 2019141 - RNA, 19 nt, Artificial Sequence
  Description of Artificial Sequence: Synthetic oligonucleotide
  Antisense strand to SEQ ID NO: 2019140
auuuacccagaaggaucau

SEQ ID NO: 2019142 - RNA, 19 nt, Artificial Sequence
  Description of Artificial Sequence: Synthetic oligonucleotide
  Sense strand starting at position 3892 of SEQ ID NO: 1881113
ugauccuucuggguaaaug

SEQ ID NO: 2019143 - RNA, 19 nt, Artificial Sequence
  Description of Artificial Sequence: Synthetic oligonucleotide
  Antisense strand to SEQ ID NO: 2019142
cauuuacccagaaggauca

SEQ ID NO: 2019144 - RNA, 19 nt, Artificial Sequence
  Description of Artificial Sequence: Synthetic oligonucleotide
  Sense strand starting at position 160 of SEQ ID NO: 1881114
ugcugauuuguuugcagaa

SEQ ID NO: 2019145 - RNA, 19 nt, Artificial Sequence
  Description of Artificial Sequence: Synthetic oligonucleotide
  Antisense strand to SEQ ID NO: 2019144
uucugcaaacaaaucagca

SEQ ID NO: 2019146 - RNA, 19 nt, Artificial Sequence
  Description of Artificial Sequence: Synthetic oligonucleotide
  Sense strand starting at position 161 of SEQ ID NO: 1881114
gcugauuuguuugcagaau

SEQ ID NO: 2019147 - RNA, 19 nt, Artificial Sequence
  Description of Artificial Sequence: Synthetic oligonucleotide
  Antisense strand to SEQ ID NO: 2019146
auucugcaaacaaaucagc

SEQ ID NO: 2019148 - RNA, 19 nt, Artificial Sequence
  Description of Artificial Sequence: Synthetic oligonucleotide
  Sense strand starting at position 177 of SEQ ID NO: 1881114
aauacaggugcucaguauu

SEQ ID NO: 2019149 - RNA, 19 nt, Artificial Sequence
  Description of Artificial Sequence: Synthetic oligonucleotide
  Antisense strand to SEQ ID NO: 2019148
aauacugagcaccuguauu

SEQ ID NO: 2019150 - RNA, 19 nt, Artificial Sequence
  Description of Artificial Sequence: Synthetic oligonucleotide
  Sense strand starting at position 406 of SEQ ID NO: 1881114
agugcuguuacacagaaag

SEQ ID NO: 2019151 - RNA, 19 nt, Artificial Sequence
  Description of Artificial Sequence: Synthetic oligonucleotide
  Antisense strand to SEQ ID NO: 2019150
cuuucuguguaacagcacu

SEQ ID NO: 2019152 - RNA, 19 nt, Artificial Sequence
  Description of Artificial Sequence: Synthetic oligonucleotide
  Sense strand starting at position 492 of SEQ ID NO: 1881114
auugcauuauuugaggaaa

SEQ ID NO: 2019153 - RNA, 19 nt, Artificial Sequence
  Description of Artificial Sequence: Synthetic oligonucleotide
  Antisense strand to SEQ ID NO: 2019152
uuuccucaaauaaugcaau

SEQ ID NO: 2019154 - RNA, 19 nt, Artificial Sequence
  Description of Artificial Sequence: Synthetic oligonucleotide
  Sense strand starting at position 1109 of SEQ ID NO: 1881114
uccagacuuccggguuaaa

SEQ ID NO: 2019155 - RNA, 19 nt, Artificial Sequence
  Description of Artificial Sequence: Synthetic oligonucleotide
  Antisense strand to SEQ ID NO: 2019154
uuuaacccggaagucugga

SEQ ID NO: 2019156 - RNA, 19 nt, Artificial Sequence
  Description of Artificial Sequence: Synthetic oligonucleotide
  Sense strand starting at position 1120 of SEQ ID NO: 1881114
ggguuaaagaaucguaaga

SEQ ID NO: 2019157 - RNA, 19 nt, Artificial Sequence
  Description of Artificial Sequence: Synthetic oligonucleotide
  Antisense strand to SEQ ID NO: 2019156
ucuuacgauucuuuaaccc

SEQ ID NO: 2019158 - RNA, 19 nt, Artificial Sequence
  Description of Artificial Sequence: Synthetic oligonucleotide
  Sense strand starting at position 1130 of SEQ ID NO: 1881114
aucguaagaugauuacagu

SEQ ID NO: 2019159 - RNA, 19 nt, Artificial Sequence
  Description of Artificial Sequence: Synthetic oligonucleotide
  Antisense strand to SEQ ID NO: 2019158
acuguaaucaucuuacgau

SEQ ID NO: 2019160 - RNA, 19 nt, Artificial Sequence
  Description of Artificial Sequence: Synthetic oligonucleotide
  Sense strand starting at position 1131 of SEQ ID NO: 1881114
ucguaagaugauuacaguu

SEQ ID NO: 2019161 - RNA, 19 nt, Artificial Sequence
  Description of Artificial Sequence: Synthetic oligonucleotide
  Antisense strand to SEQ ID NO: 2019160
aacuguaaucaucuuacga

SEQ ID NO: 2019162 - RNA, 19 nt, Artificial Sequence
  Description of Artificial Sequence: Synthetic oligonucleotide
  Sense strand starting at position 1137 of SEQ ID NO: 1881114
gaugauuacaguuggaagu

SEQ ID NO: 2019163 - RNA, 19 nt, Artificial Sequence
  Description of Artificial Sequence: Synthetic oligonucleotide
  Antisense strand to SEQ ID NO: 2019162
acuuccaacuguaaucauc

SEQ ID NO: 2019164 - RNA, 19 nt, Artificial Sequence
  Description of Artificial Sequence: Synthetic oligonucleotide
  Sense strand starting at position 1138 of SEQ ID NO: 1881114
augauuacaguuggaaguu

SEQ ID NO: 2019165 - RNA, 19 nt, Artificial Sequence
  Description of Artificial Sequence: Synthetic oligonucleotide
  Antisense strand to SEQ ID NO: 2019164
aacuuccaacuguaaucau

SEQ ID NO: 2019166 - RNA, 19 nt, Artificial Sequence
  Description of Artificial Sequence: Synthetic oligonucleotide
  Sense strand starting at position 1420 of SEQ ID NO: 1881114
gaauaugggcucuaacagu

SEQ ID NO: 2019167 - RNA, 19 nt, Artificial Sequence
  Description of Artificial Sequence: Synthetic oligonucleotide
  Antisense strand to SEQ ID NO: 2019166
acuguuagagcccauauuc

SEQ ID NO: 2019168 - RNA, 19 nt, Artificial Sequence
  Description of Artificial Sequence: Synthetic oligonucleotide
  Sense strand starting at position 1463 of SEQ ID NO: 1881114
guuauuacugugcuuugca

SEQ ID NO: 2019169 - RNA, 19 nt, Artificial Sequence
  Description of Artificial Sequence: Synthetic oligonucleotide
  Antisense strand to SEQ ID NO: 2019168
ugcaaagcacaguaauaac

SEQ ID NO: 2019170 - RNA, 19 nt, Artificial Sequence
  Description of Artificial Sequence: Synthetic oligonucleotide
  Sense strand starting at position 1475 of SEQ ID NO: 1881114
cuuugcauggcauaugaaa

SEQ ID NO: 2019171 - RNA, 19 nt, Artificial Sequence
  Description of Artificial Sequence: Synthetic oligonucleotide
  Antisense strand to SEQ ID NO: 2019170
uuucauaugccaugcaaag

SEQ ID NO: 2019172 - RNA, 19 nt, Artificial Sequence
  Description of Artificial Sequence: Synthetic oligonucleotide
  Sense strand starting at position 1505 of SEQ ID NO: 1881114
cucaccaacuggucuaaga

SEQ ID NO: 2019173 - RNA, 19 nt, Artificial Sequence
  Description of Artificial Sequence: Synthetic oligonucleotide
  Antisense strand to SEQ ID NO: 2019172
ucuuagaccaguuggugag

SEQ ID NO: 2019174 - RNA, 19 nt, Artificial Sequence
  Description of Artificial Sequence: Synthetic oligonucleotide
  Sense strand starting at position 1519 of SEQ ID NO: 1881114
uaagauugcccugggcaaa

SEQ ID NO: 2019175 - RNA, 19 nt, Artificial Sequence
  Description of Artificial Sequence: Synthetic oligonucleotide
  Antisense strand to SEQ ID NO: 2019174
uuugcccagggcaaucuua

SEQ ID NO: 2019176 - RNA, 19 nt, Artificial Sequence
  Description of Artificial Sequence: Synthetic oligonucleotide
  Sense strand starting at position 1530 of SEQ ID NO: 1881114
ugggcaaagagauguuacu

SEQ ID NO: 2019177 - RNA, 19 nt, Artificial Sequence
  Description of Artificial Sequence: Synthetic oligonucleotide
  Antisense strand to SEQ ID NO: 2019176
aguaacaucucuuugccca

SEQ ID NO: 2019178 - RNA, 19 nt, Artificial Sequence
  Description of Artificial Sequence: Synthetic oligonucleotide
  Sense strand starting at position 1539 of SEQ ID NO: 1881114
agauguuacuucucacuca

SEQ ID NO: 2019179 - RNA, 19 nt, Artificial Sequence
  Description of Artificial Sequence: Synthetic oligonucleotide
  Antisense strand to SEQ ID NO: 2019178
ugagugagaaguaacaucu

SEQ ID NO: 2019180 - RNA, 19 nt, Artificial Sequence
  Description of Artificial Sequence: Synthetic oligonucleotide
  Sense strand starting at position 1561 of SEQ ID NO: 1881114
cccuguuaggagcacaaua

SEQ ID NO: 2019181 - RNA, 19 nt, Artificial Sequence
  Description of Artificial Sequence: Synthetic oligonucleotide
  Antisense strand to SEQ ID NO: 2019180
uauugugcuccuaacaggg

SEQ ID NO: 2019182 - RNA, 19 nt, Artificial Sequence
  Description of Artificial Sequence: Synthetic oligonucleotide
  Sense strand starting at position 1563 of SEQ ID NO: 1881114
cuguuaggagcacaauagu

SEQ ID NO: 2019183 - RNA, 19 nt, Artificial Sequence
  Description of Artificial Sequence: Synthetic oligonucleotide
  Antisense strand to SEQ ID NO: 2019182
acuauugugcuccuaacag

SEQ ID NO: 2019184 - RNA, 19 nt, Artificial Sequence
  Description of Artificial Sequence: Synthetic oligonucleotide
  Sense strand starting at position 1627 of SEQ ID NO: 1881114
cugaaucuuggaugagcca

SEQ ID NO: 2019185 - RNA, 19 nt, Artificial Sequence
  Description of Artificial Sequence: Synthetic oligonucleotide
  Antisense strand to SEQ ID NO: 2019184
uggcucauccaagauucag

SEQ ID NO: 2019186 - RNA, 19 nt, Artificial Sequence
  Description of Artificial Sequence: Synthetic oligonucleotide
  Sense strand starting at position 1726 of SEQ ID NO: 1881114
augguaagugauggucaca

SEQ ID NO: 2019187 - RNA, 19 nt, Artificial Sequence
  Description of Artificial Sequence: Synthetic oligonucleotide
  Antisense strand to SEQ ID NO: 2019186
ugugaccaucacuuaccau

SEQ ID NO: 2019188 - RNA, 19 nt, Artificial Sequence
  Description of Artificial Sequence: Synthetic oligonucleotide
  Sense strand starting at position 1729 of SEQ ID NO: 1881114
guaagugauggucacagca

SEQ ID NO: 2019189 - RNA, 19 nt, Artificial Sequence
  Description of Artificial Sequence: Synthetic oligonucleotide
  Antisense strand to SEQ ID NO: 2019188
ugcugugaccaucacuuac

SEQ ID NO: 2019190 - RNA, 19 nt, Artificial Sequence
  Description of Artificial Sequence: Synthetic oligonucleotide
  Sense strand starting at position 2125 of SEQ ID NO: 1881114
aguccugccgaugaggauu

SEQ ID NO: 2019191 - RNA, 19 nt, Artificial Sequence
  Description of Artificial Sequence: Synthetic oligonucleotide
  Antisense strand to SEQ ID NO: 2019190
aauccucaucggcaggacu

SEQ ID NO: 2019192 - RNA, 19 nt, Artificial Sequence
  Description of Artificial Sequence: Synthetic oligonucleotide
  Sense strand starting at position 2136 of SEQ ID NO: 1881114
ugaggauucugaccguaga

SEQ ID NO: 2019193 - RNA, 19 nt, Artificial Sequence
  Description of Artificial Sequence: Synthetic oligonucleotide
  Antisense strand to SEQ ID NO: 2019192
ucuacggucagaauccuca

SEQ ID NO: 2019194 - RNA, 19 nt, Artificial Sequence
  Description of Artificial Sequence: Synthetic oligonucleotide
  Sense strand starting at position 2137 of SEQ ID NO: 1881114
gaggauucugaccguagac

SEQ ID NO: 2019195 - RNA, 19 nt, Artificial Sequence
  Description of Artificial Sequence: Synthetic oligonucleotide
  Antisense strand to SEQ ID NO: 2019194
gucuacggucagaauccuc

SEQ ID NO: 2019196 - RNA, 19 nt, Artificial Sequence
  Description of Artificial Sequence: Synthetic oligonucleotide
  Sense strand starting at position 2169 of SEQ ID NO: 1881114
guaccuauccgugcucuuu

SEQ ID NO: 2019197 - RNA, 19 nt, Artificial Sequence
  Description of Artificial Sequence: Synthetic oligonucleotide
  Antisense strand to SEQ ID NO: 2019196
aaagagcacggauagguac

SEQ ID NO: 2019198 - RNA, 19 nt, Artificial Sequence
  Description of Artificial Sequence: Synthetic oligonucleotide
  Sense strand starting at position 2254 of SEQ ID NO: 1881114
accacuugugaguggaaga

SEQ ID NO: 2019199 - RNA, 19 nt, Artificial Sequence
  Description of Artificial Sequence: Synthetic oligonucleotide
  Antisense strand to SEQ ID NO: 2019198
ucuuccacucacaaguggu

SEQ ID NO: 2019200 - RNA, 19 nt, Artificial Sequence
  Description of Artificial Sequence: Synthetic oligonucleotide
  Sense strand starting at position 2255 of SEQ ID NO: 1881114
ccacuugugaguggaagaa

SEQ ID NO: 2019201 - RNA, 19 nt, Artificial Sequence
  Description of Artificial Sequence: Synthetic oligonucleotide
  Antisense strand to SEQ ID NO: 2019200
uucuuccacucacaagugg

SEQ ID NO: 2019202 - RNA, 19 nt, Artificial Sequence
  Description of Artificial Sequence: Synthetic oligonucleotide
  Sense strand starting at position 2627 of SEQ ID NO: 1881114
cuuaguuguccacauuaaa

SEQ ID NO: 2019203 - RNA, 19 nt, Artificial Sequence
  Description of Artificial Sequence: Synthetic oligonucleotide
  Antisense strand to SEQ ID NO: 2019202
uuuaauguggacaacuaag

SEQ ID NO: 2019204 - RNA, 19 nt, Artificial Sequence
  Description of Artificial Sequence: Synthetic oligonucleotide
  Sense strand starting at position 2630 of SEQ ID NO: 1881114
aguuguccacauuaaauga

SEQ ID NO: 2019205 - RNA, 19 nt, Artificial Sequence
  Description of Artificial Sequence: Synthetic oligonucleotide
  Antisense strand to SEQ ID NO: 2019204
ucauuuaauguggacaacu

SEQ ID NO: 2019206 - RNA, 19 nt, Artificial Sequence
  Description of Artificial Sequence: Synthetic oligonucleotide
  Sense strand starting at position 2688 of SEQ ID NO: 1881114
uuuagagugaguuggaacu

SEQ ID NO: 2019207 - RNA, 19 nt, Artificial Sequence
  Description of Artificial Sequence: Synthetic oligonucleotide
  Antisense strand to SEQ ID NO: 2019206
aguuccaacucacucuaaa

SEQ ID NO: 2019208 - RNA, 19 nt, Artificial Sequence
  Description of Artificial Sequence: Synthetic oligonucleotide
  Sense strand starting at position 2790 of SEQ ID NO: 1881114
ccuagauauguuuagugaa

SEQ ID NO: 2019209 - RNA, 19 nt, Artificial Sequence
  Description of Artificial Sequence: Synthetic oligonucleotide
  Antisense strand to SEQ ID NO: 2019208
uucacuaaacauaucuagg

SEQ ID NO: 2019210 - RNA, 19 nt, Artificial Sequence
  Description of Artificial Sequence: Synthetic oligonucleotide
  Sense strand starting at position 3063 of SEQ ID NO: 1881114
ggucccacucuuuauagga

SEQ ID NO: 2019211 - RNA, 19 nt, Artificial Sequence
  Description of Artificial Sequence: Synthetic oligonucleotide
  Antisense strand to SEQ ID NO: 2019210
uccuauaaagagugggacc

SEQ ID NO: 2019212 - RNA, 19 nt, Artificial Sequence
  Description of Artificial Sequence: Synthetic oligonucleotide
  Sense strand starting at position 3102 of SEQ ID NO: 1881114
caaagaguccuugaggcca

SEQ ID NO: 2019213 - RNA, 19 nt, Artificial Sequence
  Description of Artificial Sequence: Synthetic oligonucleotide
  Antisense strand to SEQ ID NO: 2019212
uggccucaaggacucuuug

SEQ ID NO: 2019214 - RNA, 19 nt, Artificial Sequence
  Description of Artificial Sequence: Synthetic oligonucleotide
  Sense strand starting at position 3430 of SEQ ID NO: 1881114
gucccaagaccuggaauua

SEQ ID NO: 2019215 - RNA, 19 nt, Artificial Sequence
  Description of Artificial Sequence: Synthetic oligonucleotide
  Antisense strand to SEQ ID NO: 2019214
uaauuccaggucuugggac

SEQ ID NO: 2019216 - RNA, 19 nt, Artificial Sequence
  Description of Artificial Sequence: Synthetic oligonucleotide
  Sense strand starting at position 3439 of SEQ ID NO: 1881114
ccuggaauuauuggaguaa

SEQ ID NO: 2019217 - RNA, 19 nt, Artificial Sequence
  Description of Artificial Sequence: Synthetic oligonucleotide
  Antisense strand to SEQ ID NO: 2019216
uuacuccaauaauuccagg

SEQ ID NO: 2019218 - RNA, 19 nt, Artificial Sequence
  Description of Artificial Sequence: Synthetic oligonucleotide
  Sense strand starting at position 3644 of SEQ ID NO: 1881114
cugacuagaugcuucuuaa

SEQ ID NO: 2019219 - RNA, 19 nt, Artificial Sequence
  Description of Artificial Sequence: Synthetic oligonucleotide
  Antisense strand to SEQ ID NO: 2019218
uuaagaagcaucuagucag

SEQ ID NO: 2019220 - RNA, 19 nt, Artificial Sequence
  Description of Artificial Sequence: Synthetic oligonucleotide
  Sense strand starting at position 3810 of SEQ ID NO: 1881114
ugcagaugccuggaaacuu

SEQ ID NO: 2019221 - RNA, 19 nt, Artificial Sequence
  Description of Artificial Sequence: Synthetic oligonucleotide
  Antisense strand to SEQ ID NO: 2019220
aaguuuccaggcaucugca

SEQ ID NO: 2019222 - RNA, 19 nt, Artificial Sequence
  Description of Artificial Sequence: Synthetic oligonucleotide
  Sense strand starting at position 3967 of SEQ ID NO: 1881114
ccaugagcuuauuugugca

SEQ ID NO: 2019223 - RNA, 19 nt, Artificial Sequence
  Description of Artificial Sequence: Synthetic oligonucleotide
  Antisense strand to SEQ ID NO: 2019222
ugcacaaauaagcucaugg

SEQ ID NO: 2019224 - RNA, 19 nt, Artificial Sequence
  Description of Artificial Sequence: Synthetic oligonucleotide
  Sense strand starting at position 223 of SEQ ID NO: 1881115
aaguauagguuccuuggaa

SEQ ID NO: 2019225 - RNA, 19 nt, Artificial Sequence
  Description of Artificial Sequence: Synthetic oligonucleotide
  Antisense strand to SEQ ID NO: 2019224
uuccaaggaaccuauacuu

SEQ ID NO: 2019226 - RNA, 19 nt, Artificial Sequence
  Description of Artificial Sequence: Synthetic oligonucleotide
  Sense strand starting at position 224 of SEQ ID NO: 1881115
aguauagguuccuuggaaa

SEQ ID NO: 2019227 - RNA, 19 nt, Artificial Sequence
  Description of Artificial Sequence: Synthetic oligonucleotide
  Antisense strand to SEQ ID NO: 2019226
uuuccaaggaaccuauacu

SEQ ID NO: 2019228 - RNA, 19 nt, Artificial Sequence
  Description of Artificial Sequence: Synthetic oligonucleotide
  Sense strand starting at position 284 of SEQ ID NO: 1881115
guaagccuuccuggaggaa

SEQ ID NO: 2019229 - RNA, 19 nt, Artificial Sequence
  Description of Artificial Sequence: Synthetic oligonucleotide
  Antisense strand to SEQ ID NO: 2019228
uuccuccaggaaggcuuac

SEQ ID NO: 2019230 - RNA, 19 nt, Artificial Sequence
  Description of Artificial Sequence: Synthetic oligonucleotide
  Sense strand starting at position 407 of SEQ ID NO: 1881115
guagaaguaaauugaauug

SEQ ID NO: 2019231 - RNA, 19 nt, Artificial Sequence
  Description of Artificial Sequence: Synthetic oligonucleotide
  Antisense strand to SEQ ID NO: 2019230
caauucaauuuacuucuac

SEQ ID NO: 2019232 - RNA, 19 nt, Artificial Sequence
  Description of Artificial Sequence: Synthetic oligonucleotide
  Sense strand starting at position 431 of SEQ ID NO: 1881115
gagggugcaagucauucua

SEQ ID NO: 2019233 - RNA, 19 nt, Artificial Sequence
  Description of Artificial Sequence: Synthetic oligonucleotide
  Antisense strand to SEQ ID NO: 2019232
uagaaugacuugcacccuc

SEQ ID NO: 2019234 - RNA, 19 nt, Artificial Sequence
  Description of Artificial Sequence: Synthetic oligonucleotide
  Sense strand starting at position 574 of SEQ ID NO: 1881115
cuguuaaucuuucuugaga

SEQ ID NO: 2019235 - RNA, 19 nt, Artificial Sequence
  Description of Artificial Sequence: Synthetic oligonucleotide
  Antisense strand to SEQ ID NO: 2019234
ucucaagaaagauuaacag

SEQ ID NO: 2019236 - RNA, 19 nt, Artificial Sequence
  Description of Artificial Sequence: Synthetic oligonucleotide
  Sense strand starting at position 575 of SEQ ID NO: 1881115
uguuaaucuuucuugagag

SEQ ID NO: 2019237 - RNA, 19 nt, Artificial Sequence
  Description of Artificial Sequence: Synthetic oligonucleotide
  Antisense strand to SEQ ID NO: 2019236
cucucaagaaagauuaaca

SEQ ID NO: 2019238 - RNA, 19 nt, Artificial Sequence
  Description of Artificial Sequence: Synthetic oligonucleotide
  Sense strand starting at position 1323 of SEQ ID NO: 1881115
gcaagcuuuccgucuuuga

SEQ ID NO: 2019239 - RNA, 19 nt, Artificial Sequence
  Description of Artificial Sequence: Synthetic oligonucleotide
  Antisense strand to SEQ ID NO: 2019238
ucaaagacggaaagcuugc

SEQ ID NO: 2019240 - RNA, 19 nt, Artificial Sequence
  Description of Artificial Sequence: Synthetic oligonucleotide
  Sense strand starting at position 1721 of SEQ ID NO: 1881115
cagcguuuccguccaucga

SEQ ID NO: 2019241 - RNA, 19 nt, Artificial Sequence
  Description of Artificial Sequence: Synthetic oligonucleotide
  Antisense strand to SEQ ID NO: 2019240
ucgauggacggaaacgcug

SEQ ID NO: 2019242 - RNA, 19 nt, Artificial Sequence
  Description of Artificial Sequence: Synthetic oligonucleotide
  Sense strand starting at position 1803 of SEQ ID NO: 1881115
gccagugcacgucuuuaaa

SEQ ID NO: 2019243 - RNA, 19 nt, Artificial Sequence
  Description of Artificial Sequence: Synthetic oligonucleotide
  Antisense strand to SEQ ID NO: 2019242
uuuaaagacgugcacuggc

SEQ ID NO: 2019244 - RNA, 19 nt, Artificial Sequence
  Description of Artificial Sequence: Synthetic oligonucleotide
  Sense strand starting at position 1917 of SEQ ID NO: 1881115
cucugaauucccggaccca

SEQ ID NO: 2019245 - RNA, 19 nt, Artificial Sequence
  Description of Artificial Sequence: Synthetic oligonucleotide
  Antisense strand to SEQ ID NO: 2019244
uggguccgggaauucagag

SEQ ID NO: 2019246 - RNA, 19 nt, Artificial Sequence
  Description of Artificial Sequence: Synthetic oligonucleotide
  Sense strand starting at position 1918 of SEQ ID NO: 1881115
ucugaauucccggacccaa

SEQ ID NO: 2019247 - RNA, 19 nt, Artificial Sequence
  Description of Artificial Sequence: Synthetic oligonucleotide
  Antisense strand to SEQ ID NO: 2019246
uuggguccgggaauucaga

SEQ ID NO: 2019248 - RNA, 19 nt, Artificial Sequence
  Description of Artificial Sequence: Synthetic oligonucleotide
  Sense strand starting at position 2452 of SEQ ID NO: 1881115
uuggcauuggagugaaauc

SEQ ID NO: 2019249 - RNA, 19 nt, Artificial Sequence
  Description of Artificial Sequence: Synthetic oligonucleotide
  Antisense strand to SEQ ID NO: 2019248
gauuucacuccaaugccaa

SEQ ID NO: 2019250 - RNA, 19 nt, Artificial Sequence
  Description of Artificial Sequence: Synthetic oligonucleotide
  Sense strand starting at position 2478 of SEQ ID NO: 1881115
cagauugaggucugaagca

SEQ ID NO: 2019251 - RNA, 19 nt, Artificial Sequence
  Description of Artificial Sequence: Synthetic oligonucleotide
  Antisense strand to SEQ ID NO: 2019250
ugcuucagaccucaaucug

SEQ ID NO: 2019252 - RNA, 19 nt, Artificial Sequence
  Description of Artificial Sequence: Synthetic oligonucleotide
  Sense strand starting at position 2571 of SEQ ID NO: 1881115
ucgcuucccggugcuuaaa

SEQ ID NO: 2019253 - RNA, 19 nt, Artificial Sequence
  Description of Artificial Sequence: Synthetic oligonucleotide
  Antisense strand to SEQ ID NO: 2019252
uuuaagcaccgggaagcga

SEQ ID NO: 2019254 - RNA, 19 nt, Artificial Sequence
  Description of Artificial Sequence: Synthetic oligonucleotide
  Sense strand starting at position 2640 of SEQ ID NO: 1881115
ucaguuucccuccaaggaa

SEQ ID NO: 2019255 - RNA, 19 nt, Artificial Sequence
  Description of Artificial Sequence: Synthetic oligonucleotide
  Antisense strand to SEQ ID NO: 2019254
uuccuuggagggaaacuga

SEQ ID NO: 2019256 - RNA, 19 nt, Artificial Sequence
  Description of Artificial Sequence: Synthetic oligonucleotide
  Sense strand starting at position 2795 of SEQ ID NO: 1881115
uuuaccuuaacgggaagua

SEQ ID NO: 2019257 - RNA, 19 nt, Artificial Sequence
  Description of Artificial Sequence: Synthetic oligonucleotide
  Antisense strand to SEQ ID NO: 2019256
uacuucccguuaagguaaa

SEQ ID NO: 2019258 - RNA, 19 nt, Artificial Sequence
  Description of Artificial Sequence: Synthetic oligonucleotide
  Sense strand starting at position 2875 of SEQ ID NO: 1881115
aagagaagcuccguagacu

SEQ ID NO: 2019259 - RNA, 19 nt, Artificial Sequence
  Description of Artificial Sequence: Synthetic oligonucleotide
  Antisense strand to SEQ ID NO: 2019258
agucuacggagcuucucuu

SEQ ID NO: 2019260 - RNA, 19 nt, Artificial Sequence
  Description of Artificial Sequence: Synthetic oligonucleotide
  Sense strand starting at position 2876 of SEQ ID NO: 1881115
agagaagcuccguagacuu

SEQ ID NO: 2019261 - RNA, 19 nt, Artificial Sequence
  Description of Artificial Sequence: Synthetic oligonucleotide
  Antisense strand to SEQ ID NO: 2019260
aagucuacggagcuucucu

SEQ ID NO: 2019262 - RNA, 19 nt, Artificial Sequence
  Description of Artificial Sequence: Synthetic oligonucleotide
  Sense strand starting at position 2891 of SEQ ID NO: 1881115
acuuguaagcuacauacga

SEQ ID NO: 2019263 - RNA, 19 nt, Artificial Sequence
  Description of Artificial Sequence: Synthetic oligonucleotide
  Antisense strand to SEQ ID NO: 2019262
ucguauguagcuuacaagu

SEQ ID NO: 2019264 - RNA, 19 nt, Artificial Sequence
  Description of Artificial Sequence: Synthetic oligonucleotide
  Sense strand starting at position 2899 of SEQ ID NO: 1881115
gcuacauacgauuaguaaa

SEQ ID NO: 2019265 - RNA, 19 nt, Artificial Sequence
  Description of Artificial Sequence: Synthetic oligonucleotide
  Antisense strand to SEQ ID NO: 2019264
uuuacuaaucguauguagc

SEQ ID NO: 2019266 - RNA, 19 nt, Artificial Sequence
  Description of Artificial Sequence: Synthetic oligonucleotide
  Sense strand starting at position 2913 of SEQ ID NO: 1881115
guaaauugcauuuguguuu

SEQ ID NO: 2019267 - RNA, 19 nt, Artificial Sequence
  Description of Artificial Sequence: Synthetic oligonucleotide
  Antisense strand to SEQ ID NO: 2019266
aaacacaaaugcaauuuac

SEQ ID NO: 2019268 - RNA, 19 nt, Artificial Sequence
  Description of Artificial Sequence: Synthetic oligonucleotide
  Sense strand starting at position 2964 of SEQ ID NO: 1881115
gugagcugugguaguaguu

SEQ ID NO: 2019269 - RNA, 19 nt, Artificial Sequence
  Description of Artificial Sequence: Synthetic oligonucleotide
  Antisense strand to SEQ ID NO: 2019268
aacuacuaccacagcucac

SEQ ID NO: 2019270 - RNA, 19 nt, Artificial Sequence
  Description of Artificial Sequence: Synthetic oligonucleotide
  Sense strand starting at position 3053 of SEQ ID NO: 1881115
ucuggucucgaauauauua

SEQ ID NO: 2019271 - RNA, 19 nt, Artificial Sequence
  Description of Artificial Sequence: Synthetic oligonucleotide
  Antisense strand to SEQ ID NO: 2019270
uaauauauucgagaccaga

SEQ ID NO: 2019272 - RNA, 19 nt, Artificial Sequence
  Description of Artificial Sequence: Synthetic oligonucleotide
  Sense strand starting at position 3088 of SEQ ID NO: 1881115
ccacgagguaguuaaacuu

SEQ ID NO: 2019273 - RNA, 19 nt, Artificial Sequence
  Description of Artificial Sequence: Synthetic oligonucleotide
  Antisense strand to SEQ ID NO: 2019272
aaguuuaacuaccucgugg

SEQ ID NO: 2019274 - RNA, 19 nt, Artificial Sequence
  Description of Artificial Sequence: Synthetic oligonucleotide
  Sense strand starting at position 3120 of SEQ ID NO: 1881115
caagaagcuguguaacacu

SEQ ID NO: 2019275 - RNA, 19 nt, Artificial Sequence
  Description of Artificial Sequence: Synthetic oligonucleotide
  Antisense strand to SEQ ID NO: 2019274
aguguuacacagcuucuug

SEQ ID NO: 2019276 - RNA, 19 nt, Artificial Sequence
  Description of Artificial Sequence: Synthetic oligonucleotide
  Sense strand starting at position 3160 of SEQ ID NO: 1881115
aaucuuaaagaguguguga

SEQ ID NO: 2019277 - RNA, 19 nt, Artificial Sequence
  Description of Artificial Sequence: Synthetic oligonucleotide
  Antisense strand to SEQ ID NO: 2019276
ucacacacucuuuaagauu

SEQ ID NO: 2019278 - RNA, 19 nt, Artificial Sequence
  Description of Artificial Sequence: Synthetic oligonucleotide
  Sense strand starting at position 3179 of SEQ ID NO: 1881115
cuguaaaucggcuauuaga

SEQ ID NO: 2019279 - RNA, 19 nt, Artificial Sequence
  Description of Artificial Sequence: Synthetic oligonucleotide
  Antisense strand to SEQ ID NO: 2019278
ucuaauagccgauuuacag

SEQ ID NO: 2019280 - RNA, 19 nt, Artificial Sequence
  Description of Artificial Sequence: Synthetic oligonucleotide
  Sense strand starting at position 3287 of SEQ ID NO: 1881115
guuuaugccauuuggugaa

SEQ ID NO: 2019281 - RNA, 19 nt, Artificial Sequence
  Description of Artificial Sequence: Synthetic oligonucleotide
  Antisense strand to SEQ ID NO: 2019280
uucaccaaauggcauaaac

SEQ ID NO: 2019282 - RNA, 19 nt, Artificial Sequence
  Description of Artificial Sequence: Synthetic oligonucleotide
  Sense strand starting at position 3343 of SEQ ID NO: 1881115
ggucuuaacagacaucguu

SEQ ID NO: 2019283 - RNA, 19 nt, Artificial Sequence
  Description of Artificial Sequence: Synthetic oligonucleotide
  Antisense strand to SEQ ID NO: 2019282
aacgaugucuguuaagacc

SEQ ID NO: 2019284 - RNA, 19 nt, Artificial Sequence
  Description of Artificial Sequence: Synthetic oligonucleotide
  Sense strand starting at position 3388 of SEQ ID NO: 1881115
gccaguuucggcuucuuua

SEQ ID NO: 2019285 - RNA, 19 nt, Artificial Sequence
  Description of Artificial Sequence: Synthetic oligonucleotide
  Antisense strand to SEQ ID NO: 2019284
uaaagaagccgaaacuggc

SEQ ID NO: 2019286 - RNA, 19 nt, Artificial Sequence
  Description of Artificial Sequence: Synthetic oligonucleotide
  Sense strand starting at position 3618 of SEQ ID NO: 1881115
acuugaggucuuggauaca

SEQ ID NO: 2019287 - RNA, 19 nt, Artificial Sequence
  Description of Artificial Sequence: Synthetic oligonucleotide
  Antisense strand to SEQ ID NO: 2019286
uguauccaagaccucaagu

SEQ ID NO: 2019288 - RNA, 19 nt, Artificial Sequence
  Description of Artificial Sequence: Synthetic oligonucleotide
  Sense strand starting at position 3680 of SEQ ID NO: 1881115
agugcuucucaugacugaa

SEQ ID NO: 2019289 - RNA, 19 nt, Artificial Sequence
  Description of Artificial Sequence: Synthetic oligonucleotide
  Antisense strand to SEQ ID NO: 2019288
uucagucaugagaagcacu

SEQ ID NO: 2019290 - RNA, 19 nt, Artificial Sequence
  Description of Artificial Sequence: Synthetic oligonucleotide
  Sense strand starting at position 3704 of SEQ ID NO: 1881115
ggcuguucucaauaaauaa

SEQ ID NO: 2019291 - RNA, 19 nt, Artificial Sequence
  Description of Artificial Sequence: Synthetic oligonucleotide
  Antisense strand to SEQ ID NO: 2019290
uuauuuauugagaacagcc

SEQ ID NO: 2019292 - RNA, 19 nt, Artificial Sequence
  Description of Artificial Sequence: Synthetic oligonucleotide
  Sense strand starting at position 3723 of SEQ ID NO: 1881115
auuauuggauuauccagua

SEQ ID NO: 2019293 - RNA, 19 nt, Artificial Sequence
  Description of Artificial Sequence: Synthetic oligonucleotide
  Antisense strand to SEQ ID NO: 2019292
uacuggauaauccaauaau

SEQ ID NO: 2019294 - RNA, 19 nt, Artificial Sequence
  Description of Artificial Sequence: Synthetic oligonucleotide
  Sense strand starting at position 3728 of SEQ ID NO: 1881115
uggauuauccaguaaucuu

SEQ ID NO: 2019295 - RNA, 19 nt, Artificial Sequence
  Description of Artificial Sequence: Synthetic oligonucleotide
  Antisense strand to SEQ ID NO: 2019294
aagauuacuggauaaucca

SEQ ID NO: 2019296 - RNA, 19 nt, Artificial Sequence
  Description of Artificial Sequence: Synthetic oligonucleotide
  Sense strand starting at position 3800 of SEQ ID NO: 1881115
uacugaugucugugaaagg

SEQ ID NO: 2019297 - RNA, 19 nt, Artificial Sequence
  Description of Artificial Sequence: Synthetic oligonucleotide
  Antisense strand to SEQ ID NO: 2019296
ccuuucacagacaucagua

SEQ ID NO: 2019298 - RNA, 19 nt, Artificial Sequence
  Description of Artificial Sequence: Synthetic oligonucleotide
  Sense strand starting at position 3849 of SEQ ID NO: 1881115
gcauaauguagugggaaga

SEQ ID NO: 2019299 - RNA, 19 nt, Artificial Sequence
  Description of Artificial Sequence: Synthetic oligonucleotide
  Antisense strand to SEQ ID NO: 2019298
ucuucccacuacauuaugc

SEQ ID NO: 2019300 - RNA, 19 nt, Artificial Sequence
  Description of Artificial Sequence: Synthetic oligonucleotide
  Sense strand starting at position 3850 of SEQ ID NO: 1881115
cauaauguagugggaagau

SEQ ID NO: 2019301 - RNA, 19 nt, Artificial Sequence
  Description of Artificial Sequence: Synthetic oligonucleotide
  Antisense strand to SEQ ID NO: 2019300
aucuucccacuacauuaug

SEQ ID NO: 2019302 - RNA, 19 nt, Artificial Sequence
  Description of Artificial Sequence: Synthetic oligonucleotide
  Sense strand starting at position 3905 of SEQ ID NO: 1881115
cugacuugguaauuaauua

SEQ ID NO: 2019303 - RNA, 19 nt, Artificial Sequence
  Description of Artificial Sequence: Synthetic oligonucleotide
  Antisense strand to SEQ ID NO: 2019302
uaauuaauuaccaagucag

SEQ ID NO: 2019304 - RNA, 19 nt, Artificial Sequence
  Description of Artificial Sequence: Synthetic oligonucleotide
  Sense strand starting at position 214 of SEQ ID NO: 1881117
acccguaucaggcagcaua

SEQ ID NO: 2019305 - RNA, 19 nt, Artificial Sequence
  Description of Artificial Sequence: Synthetic oligonucleotide
  Antisense strand to SEQ ID NO: 2019304
uaugcugccugauacgggu

SEQ ID NO: 2019306 - RNA, 19 nt, Artificial Sequence
  Description of Artificial Sequence: Synthetic oligonucleotide
  Sense strand starting at position 338 of SEQ ID NO: 1881117
guuagaugcccugguggua

SEQ ID NO: 2019307 - RNA, 19 nt, Artificial Sequence
  Description of Artificial Sequence: Synthetic oligonucleotide
  Antisense strand to SEQ ID NO: 2019306
uaccaccagggcaucuaac

SEQ ID NO: 2019308 - RNA, 19 nt, Artificial Sequence
  Description of Artificial Sequence: Synthetic oligonucleotide
  Sense strand starting at position 492 of SEQ ID NO: 1881117
aacaguguucuguggaaca

SEQ ID NO: 2019309 - RNA, 19 nt, Artificial Sequence
  Description of Artificial Sequence: Synthetic oligonucleotide
  Antisense strand to SEQ ID NO: 2019308
uguuccacagaacacuguu

SEQ ID NO: 2019310 - RNA, 19 nt, Artificial Sequence
  Description of Artificial Sequence: Synthetic oligonucleotide
  Sense strand starting at position 494 of SEQ ID NO: 1881117
caguguucuguggaacaca

SEQ ID NO: 2019311 - RNA, 19 nt, Artificial Sequence
  Description of Artificial Sequence: Synthetic oligonucleotide
  Antisense strand to SEQ ID NO: 2019310
uguguuccacagaacacug

SEQ ID NO: 2019312 - RNA, 19 nt, Artificial Sequence
  Description of Artificial Sequence: Synthetic oligonucleotide
  Sense strand starting at position 570 of SEQ ID NO: 1881117
caucgugacucugcuauua

SEQ ID NO: 2019313 - RNA, 19 nt, Artificial Sequence
  Description of Artificial Sequence: Synthetic oligonucleotide
  Antisense strand to SEQ ID NO: 2019312
uaauagcagagucacgaug

SEQ ID NO: 2019314 - RNA, 19 nt, Artificial Sequence
  Description of Artificial Sequence: Synthetic oligonucleotide
  Sense strand starting at position 578 of SEQ ID NO: 1881117
cucugcuauuaaccgaaua

SEQ ID NO: 2019315 - RNA, 19 nt, Artificial Sequence
  Description of Artificial Sequence: Synthetic oligonucleotide
  Antisense strand to SEQ ID NO: 2019314
uauucgguuaauagcagag

SEQ ID NO: 2019316 - RNA, 19 nt, Artificial Sequence
  Description of Artificial Sequence: Synthetic oligonucleotide
  Sense strand starting at position 583 of SEQ ID NO: 1881117
cuauuaaccgaauauguga

SEQ ID NO: 2019317 - RNA, 19 nt, Artificial Sequence
  Description of Artificial Sequence: Synthetic oligonucleotide
  Antisense strand to SEQ ID NO: 2019316
ucacauauucgguuaauag

SEQ ID NO: 2019318 - RNA, 19 nt, Artificial Sequence
  Description of Artificial Sequence: Synthetic oligonucleotide
  Sense strand starting at position 598 of SEQ ID NO: 1881117
gugaccuugggccaugaau

SEQ ID NO: 2019319 - RNA, 19 nt, Artificial Sequence
  Description of Artificial Sequence: Synthetic oligonucleotide
  Antisense strand to SEQ ID NO: 2019318
auucauggcccaaggucac

SEQ ID NO: 2019320 - RNA, 19 nt, Artificial Sequence
  Description of Artificial Sequence: Synthetic oligonucleotide
  Sense strand starting at position 671 of SEQ ID NO: 1881117
aucaauuacugagggauaa

SEQ ID NO: 2019321 - RNA, 19 nt, Artificial Sequence
  Description of Artificial Sequence: Synthetic oligonucleotide
  Antisense strand to SEQ ID NO: 2019320
uuaucccucaguaauugau

SEQ ID NO: 2019322 - RNA, 19 nt, Artificial Sequence
  Description of Artificial Sequence: Synthetic oligonucleotide
  Sense strand starting at position 719 of SEQ ID NO: 1881117
aagcauaauggcugggaaa

SEQ ID NO: 2019323 - RNA, 19 nt, Artificial Sequence
  Description of Artificial Sequence: Synthetic oligonucleotide
  Antisense strand to SEQ ID NO: 2019322
uuucccagccauuaugcuu

SEQ ID NO: 2019324 - RNA, 19 nt, Artificial Sequence
  Description of Artificial Sequence: Synthetic oligonucleotide
  Sense strand starting at position 720 of SEQ ID NO: 1881117
agcauaauggcugggaaac

SEQ ID NO: 2019325 - RNA, 19 nt, Artificial Sequence
  Description of Artificial Sequence: Synthetic oligonucleotide
  Antisense strand to SEQ ID NO: 2019324
guuucccagccauuaugcu

SEQ ID NO: 2019326 - RNA, 19 nt, Artificial Sequence
  Description of Artificial Sequence: Synthetic oligonucleotide
  Sense strand starting at position 721 of SEQ ID NO: 1881117
gcauaauggcugggaaaca

SEQ ID NO: 2019327 - RNA, 19 nt, Artificial Sequence
  Description of Artificial Sequence: Synthetic oligonucleotide
  Antisense strand to SEQ ID NO: 2019326
uguuucccagccauuaugc

SEQ ID NO: 2019328 - RNA, 19 nt, Artificial Sequence
  Description of Artificial Sequence: Synthetic oligonucleotide
  Sense strand starting at position 722 of SEQ ID NO: 1881117
cauaauggcugggaaacaa

SEQ ID NO: 2019329 - RNA, 19 nt, Artificial Sequence
  Description of Artificial Sequence: Synthetic oligonucleotide
  Antisense strand to SEQ ID NO: 2019328
uuguuucccagccauuaug

SEQ ID NO: 2019330 - RNA, 19 nt, Artificial Sequence
  Description of Artificial Sequence: Synthetic oligonucleotide
  Sense strand starting at position 794 of SEQ ID NO: 1881117
ggcagucuuucuccacaca

SEQ ID NO: 2019331 - RNA, 19 nt, Artificial Sequence
  Description of Artificial Sequence: Synthetic oligonucleotide
  Antisense strand to SEQ ID NO: 2019330
uguguggagaaagacugcc

SEQ ID NO: 2019332 - RNA, 19 nt, Artificial Sequence
  Description of Artificial Sequence: Synthetic oligonucleotide
  Sense strand starting at position 851 of SEQ ID NO: 1881117
uuaaguuuguagcuuccaa

SEQ ID NO: 2019333 - RNA, 19 nt, Artificial Sequence
  Description of Artificial Sequence: Synthetic oligonucleotide
  Antisense strand to SEQ ID NO: 2019332
uuggaagcuacaaacuuaa

SEQ ID NO: 2019334 - RNA, 19 nt, Artificial Sequence
  Description of Artificial Sequence: Synthetic oligonucleotide
  Sense strand starting at position 920 of SEQ ID NO: 1881117
ggagacugcuuccugggaa

SEQ ID NO: 2019335 - RNA, 19 nt, Artificial Sequence
  Description of Artificial Sequence: Synthetic oligonucleotide
  Antisense strand to SEQ ID NO: 2019334
uucccaggaagcagucucc

SEQ ID NO: 2019336 - RNA, 19 nt, Artificial Sequence
  Description of Artificial Sequence: Synthetic oligonucleotide
  Sense strand starting at position 923 of SEQ ID NO: 1881117
gacugcuuccugggaaguu

SEQ ID NO: 2019337 - RNA, 19 nt, Artificial Sequence
  Description of Artificial Sequence: Synthetic oligonucleotide
  Antisense strand to SEQ ID NO: 2019336
aacuucccaggaagcaguc

SEQ ID NO: 2019338 - RNA, 19 nt, Artificial Sequence
  Description of Artificial Sequence: Synthetic oligonucleotide
  Sense strand starting at position 933 of SEQ ID NO: 1881117
ugggaaguuucuaguggga

SEQ ID NO: 2019339 - RNA, 19 nt, Artificial Sequence
  Description of Artificial Sequence: Synthetic oligonucleotide
  Antisense strand to SEQ ID NO: 2019338
ucccacuagaaacuuccca

SEQ ID NO: 2019340 - RNA, 19 nt, Artificial Sequence
  Description of Artificial Sequence: Synthetic oligonucleotide
  Sense strand starting at position 1049 of SEQ ID NO: 1881117
cagcuauuuccuugcagga

SEQ ID NO: 2019341 - RNA, 19 nt, Artificial Sequence
  Description of Artificial Sequence: Synthetic oligonucleotide
  Antisense strand to SEQ ID NO: 2019340
uccugcaaggaaauagcug

SEQ ID NO: 2019342 - RNA, 19 nt, Artificial Sequence
  Description of Artificial Sequence: Synthetic oligonucleotide
  Sense strand starting at position 1119 of SEQ ID NO: 1881117
ucuucuaguuucuuauagu

SEQ ID NO: 2019343 - RNA, 19 nt, Artificial Sequence
  Description of Artificial Sequence: Synthetic oligonucleotide
  Antisense strand to SEQ ID NO: 2019342
acuauaagaaacuagaaga

SEQ ID NO: 2019344 - RNA, 19 nt, Artificial Sequence
  Description of Artificial Sequence: Synthetic oligonucleotide
  Sense strand starting at position 1154 of SEQ ID NO: 1881117
guguguucugaggguuaaa

SEQ ID NO: 2019345 - RNA, 19 nt, Artificial Sequence
  Description of Artificial Sequence: Synthetic oligonucleotide
  Antisense strand to SEQ ID NO: 2019344
uuuaacccucagaacacac

SEQ ID NO: 2019346 - RNA, 19 nt, Artificial Sequence
  Description of Artificial Sequence: Synthetic oligonucleotide
  Sense strand starting at position 1263 of SEQ ID NO: 1881117
agcgccuugaaggaugaaa

SEQ ID NO: 2019347 - RNA, 19 nt, Artificial Sequence
  Description of Artificial Sequence: Synthetic oligonucleotide
  Antisense strand to SEQ ID NO: 2019346
uuucauccuucaaggcgcu

SEQ ID NO: 2019348 - RNA, 19 nt, Artificial Sequence
  Description of Artificial Sequence: Synthetic oligonucleotide
  Sense strand starting at position 1265 of SEQ ID NO: 1881117
cgccuugaaggaugaaaua

SEQ ID NO: 2019349 - RNA, 19 nt, Artificial Sequence
  Description of Artificial Sequence: Synthetic oligonucleotide
  Antisense strand to SEQ ID NO: 2019348
uauuucauccuucaaggcg

SEQ ID NO: 2019350 - RNA, 19 nt, Artificial Sequence
  Description of Artificial Sequence: Synthetic oligonucleotide
  Sense strand starting at position 2005 of SEQ ID NO: 1881117
gccaucaauguggacauaa

SEQ ID NO: 2019351 - RNA, 19 nt, Artificial Sequence
  Description of Artificial Sequence: Synthetic oligonucleotide
  Antisense strand to SEQ ID NO: 2019350
uuauguccacauugauggc

SEQ ID NO: 2019352 - RNA, 19 nt, Artificial Sequence
  Description of Artificial Sequence: Synthetic oligonucleotide
  Sense strand starting at position 2153 of SEQ ID NO: 1881117
ccagaacaucuggguaaua

SEQ ID NO: 2019353 - RNA, 19 nt, Artificial Sequence
  Description of Artificial Sequence: Synthetic oligonucleotide
  Antisense strand to SEQ ID NO: 2019352
uauuacccagauguucugg

SEQ ID NO: 2019354 - RNA, 19 nt, Artificial Sequence
  Description of Artificial Sequence: Synthetic oligonucleotide
  Sense strand starting at position 2200 of SEQ ID NO: 1881117
ugcugcaagucuccaaaua

SEQ ID NO: 2019355 - RNA, 19 nt, Artificial Sequence
  Description of Artificial Sequence: Synthetic oligonucleotide
  Antisense strand to SEQ ID NO: 2019354
uauuuggagacuugcagca

SEQ ID NO: 2019356 - RNA, 19 nt, Artificial Sequence
  Description of Artificial Sequence: Synthetic oligonucleotide
  Sense strand starting at position 2289 of SEQ ID NO: 1881117
uggacuuuggagugugaca

SEQ ID NO: 2019357 - RNA, 19 nt, Artificial Sequence
  Description of Artificial Sequence: Synthetic oligonucleotide
  Antisense strand to SEQ ID NO: 2019356
ugucacacuccaaagucca

SEQ ID NO: 2019358 - RNA, 19 nt, Artificial Sequence
  Description of Artificial Sequence: Synthetic oligonucleotide
  Sense strand starting at position 2298 of SEQ ID NO: 1881117
gagugugacaguuagugau

SEQ ID NO: 2019359 - RNA, 19 nt, Artificial Sequence
  Description of Artificial Sequence: Synthetic oligonucleotide
  Antisense strand to SEQ ID NO: 2019358
aucacuaacugucacacuc

SEQ ID NO: 2019360 - RNA, 19 nt, Artificial Sequence
  Description of Artificial Sequence: Synthetic oligonucleotide
  Sense strand starting at position 2300 of SEQ ID NO: 1881117
gugugacaguuagugauuu

SEQ ID NO: 2019361 - RNA, 19 nt, Artificial Sequence
  Description of Artificial Sequence: Synthetic oligonucleotide
  Antisense strand to SEQ ID NO: 2019360
aaaucacuaacugucacac

SEQ ID NO: 2019362 - RNA, 19 nt, Artificial Sequence
  Description of Artificial Sequence: Synthetic oligonucleotide
  Sense strand starting at position 2331 of SEQ ID NO: 1881117
uggcaugaccuguaggagu

SEQ ID NO: 2019363 - RNA, 19 nt, Artificial Sequence
  Description of Artificial Sequence: Synthetic oligonucleotide
  Antisense strand to SEQ ID NO: 2019362
acuccuacaggucaugcca

SEQ ID NO: 2019364 - RNA, 19 nt, Artificial Sequence
  Description of Artificial Sequence: Synthetic oligonucleotide
  Sense strand starting at position 2333 of SEQ ID NO: 1881117
gcaugaccuguaggaguua

SEQ ID NO: 2019365 - RNA, 19 nt, Artificial Sequence
  Description of Artificial Sequence: Synthetic oligonucleotide
  Antisense strand to SEQ ID NO: 2019364
uaacuccuacaggucaugc

SEQ ID NO: 2019366 - RNA, 19 nt, Artificial Sequence
  Description of Artificial Sequence: Synthetic oligonucleotide
  Sense strand starting at position 2968 of SEQ ID NO: 1881117
gacacuuucuaagagggau

SEQ ID NO: 2019367 - RNA, 19 nt, Artificial Sequence
  Description of Artificial Sequence: Synthetic oligonucleotide
  Antisense strand to SEQ ID NO: 2019366
aucccucuuagaaaguguc

SEQ ID NO: 2019368 - RNA, 19 nt, Artificial Sequence
  Description of Artificial Sequence: Synthetic oligonucleotide
  Sense strand starting at position 3035 of SEQ ID NO: 1881117
ggcugugugacaugaguua

SEQ ID NO: 2019369 - RNA, 19 nt, Artificial Sequence
  Description of Artificial Sequence: Synthetic oligonucleotide
  Antisense strand to SEQ ID NO: 2019368
uaacucaugucacacagcc

SEQ ID NO: 2019370 - RNA, 19 nt, Artificial Sequence
  Description of Artificial Sequence: Synthetic oligonucleotide
  Sense strand starting at position 3076 of SEQ ID NO: 1881117
cuguguccuuaacuguuaa

SEQ ID NO: 2019371 - RNA, 19 nt, Artificial Sequence
  Description of Artificial Sequence: Synthetic oligonucleotide
  Antisense strand to SEQ ID NO: 2019370
uuaacaguuaaggacacag

SEQ ID NO: 2019372 - RNA, 19 nt, Artificial Sequence
  Description of Artificial Sequence: Synthetic oligonucleotide
  Sense strand starting at position 3086 of SEQ ID NO: 1881117
aacuguuaagagugaauaa

SEQ ID NO: 2019373 - RNA, 19 nt, Artificial Sequence
  Description of Artificial Sequence: Synthetic oligonucleotide
  Antisense strand to SEQ ID NO: 2019372
uuauucacucuuaacaguu

SEQ ID NO: 2019374 - RNA, 19 nt, Artificial Sequence
  Description of Artificial Sequence: Synthetic oligonucleotide
  Sense strand starting at position 3290 of SEQ ID NO: 1881117
gcagucgugcugcuuacua

SEQ ID NO: 2019375 - RNA, 19 nt, Artificial Sequence
  Description of Artificial Sequence: Synthetic oligonucleotide
  Antisense strand to SEQ ID NO: 2019374
uaguaagcagcacgacugc

SEQ ID NO: 2019376 - RNA, 19 nt, Artificial Sequence
  Description of Artificial Sequence: Synthetic oligonucleotide
  Sense strand starting at position 3297 of SEQ ID NO: 1881117
ugcugcuuacuaugaugaa

SEQ ID NO: 2019377 - RNA, 19 nt, Artificial Sequence
  Description of Artificial Sequence: Synthetic oligonucleotide
  Antisense strand to SEQ ID NO: 2019376
uucaucauaguaagcagca

SEQ ID NO: 2019378 - RNA, 19 nt, Artificial Sequence
  Description of Artificial Sequence: Synthetic oligonucleotide
  Sense strand starting at position 3739 of SEQ ID NO: 1881117
gggaaucuaccgugcacaa

SEQ ID NO: 2019379 - RNA, 19 nt, Artificial Sequence
  Description of Artificial Sequence: Synthetic oligonucleotide
  Antisense strand to SEQ ID NO: 2019378
uugugcacgguagauuccc

SEQ ID NO: 2019380 - RNA, 19 nt, Artificial Sequence
  Description of Artificial Sequence: Synthetic oligonucleotide
  Sense strand starting at position 3741 of SEQ ID NO: 1881117
gaaucuaccgugcacaaau

SEQ ID NO: 2019381 - RNA, 19 nt, Artificial Sequence
  Description of Artificial Sequence: Synthetic oligonucleotide
  Antisense strand to SEQ ID NO: 2019380
auuugugcacgguagauuc

SEQ ID NO: 2019382 - RNA, 19 nt, Artificial Sequence
  Description of Artificial Sequence: Synthetic oligonucleotide
  Sense strand starting at position 3926 of SEQ ID NO: 1881117
uagacuuugggagguccaa

SEQ ID NO: 2019383 - RNA, 19 nt, Artificial Sequence
  Description of Artificial Sequence: Synthetic oligonucleotide
  Antisense strand to SEQ ID NO: 2019382
uuggaccucccaaagucua

SEQ ID NO: 2019384 - RNA, 19 nt, Artificial Sequence
  Description of Artificial Sequence: Synthetic oligonucleotide
  Sense strand starting at position 214 of SEQ ID NO: 1881116
ucuuuaacugcugagauuc

SEQ ID NO: 2019385 - RNA, 19 nt, Artificial Sequence
  Description of Artificial Sequence: Synthetic oligonucleotide
  Antisense strand to SEQ ID NO: 2019384
gaaucucagcaguuaaaga

SEQ ID NO: 2019386 - RNA, 19 nt, Artificial Sequence
  Description of Artificial Sequence: Synthetic oligonucleotide
  Sense strand starting at position 374 of SEQ ID NO: 1881116
gcuuaugagcccgaagaca

SEQ ID NO: 2019387 - RNA, 19 nt, Artificial Sequence
  Description of Artificial Sequence: Synthetic oligonucleotide
  Antisense strand to SEQ ID NO: 2019386
ugucuucgggcucauaagc

SEQ ID NO: 2019388 - RNA, 19 nt, Artificial Sequence
  Description of Artificial Sequence: Synthetic oligonucleotide
  Sense strand starting at position 612 of SEQ ID NO: 1881116
gcgccucuccuauucgaga

SEQ ID NO: 2019389 - RNA, 19 nt, Artificial Sequence
  Description of Artificial Sequence: Synthetic oligonucleotide
  Antisense strand to SEQ ID NO: 2019388
ucucgaauaggagaggcgc

SEQ ID NO: 2019390 - RNA, 19 nt, Artificial Sequence
  Description of Artificial Sequence: Synthetic oligonucleotide
  Sense strand starting at position 784 of SEQ ID NO: 1881116
ugugauugugcagggaaau

SEQ ID NO: 2019391 - RNA, 19 nt, Artificial Sequence
  Description of Artificial Sequence: Synthetic oligonucleotide
  Antisense strand to SEQ ID NO: 2019390
auuucccugcacaaucaca

SEQ ID NO: 2019392 - RNA, 19 nt, Artificial Sequence
  Description of Artificial Sequence: Synthetic oligonucleotide
  Sense strand starting at position 785 of SEQ ID NO: 1881116
gugauugugcagggaaaua

SEQ ID NO: 2019393 - RNA, 19 nt, Artificial Sequence
  Description of Artificial Sequence: Synthetic oligonucleotide
  Antisense strand to SEQ ID NO: 2019392
uauuucccugcacaaucac

SEQ ID NO: 2019394 - RNA, 19 nt, Artificial Sequence
  Description of Artificial Sequence: Synthetic oligonucleotide
  Sense strand starting at position 906 of SEQ ID NO: 1881116
gacggauaugcacaaaucu

SEQ ID NO: 2019395 - RNA, 19 nt, Artificial Sequence
  Description of Artificial Sequence: Synthetic oligonucleotide
  Antisense strand to SEQ ID NO: 2019394
agauuugugcauauccguc

SEQ ID NO: 2019396 - RNA, 19 nt, Artificial Sequence
  Description of Artificial Sequence: Synthetic oligonucleotide
  Sense strand starting at position 1014 of SEQ ID NO: 1881116
uuagcaguauaacuugaau

SEQ ID NO: 2019397 - RNA, 19 nt, Artificial Sequence
  Description of Artificial Sequence: Synthetic oligonucleotide
  Antisense strand to SEQ ID NO: 2019396
auucaaguuauacugcuaa

SEQ ID NO: 2019398 - RNA, 19 nt, Artificial Sequence
  Description of Artificial Sequence: Synthetic oligonucleotide
  Sense strand starting at position 1017 of SEQ ID NO: 1881116
gcaguauaacuugaauuau

SEQ ID NO: 2019399 - RNA, 19 nt, Artificial Sequence
  Description of Artificial Sequence: Synthetic oligonucleotide
  Antisense strand to SEQ ID NO: 2019398
auaauucaaguuauacugc

SEQ ID NO: 2019400 - RNA, 19 nt, Artificial Sequence
  Description of Artificial Sequence: Synthetic oligonucleotide
  Sense strand starting at position 1028 of SEQ ID NO: 1881116
ugaauuauauagucaugga

SEQ ID NO: 2019401 - RNA, 19 nt, Artificial Sequence
  Description of Artificial Sequence: Synthetic oligonucleotide
  Antisense strand to SEQ ID NO: 2019400
uccaugacuauauaauuca

SEQ ID NO: 2019402 - RNA, 19 nt, Artificial Sequence
  Description of Artificial Sequence: Synthetic oligonucleotide
  Sense strand starting at position 1471 of SEQ ID NO: 1881116
gccugagaggcguaaucaa

SEQ ID NO: 2019403 - RNA, 19 nt, Artificial Sequence
  Description of Artificial Sequence: Synthetic oligonucleotide
  Antisense strand to SEQ ID NO: 2019402
uugauuacgccucucaggc

SEQ ID NO: 2019404 - RNA, 19 nt, Artificial Sequence
  Description of Artificial Sequence: Synthetic oligonucleotide
  Sense strand starting at position 1533 of SEQ ID NO: 1881116
gaggccuugagagguuaca

SEQ ID NO: 2019405 - RNA, 19 nt, Artificial Sequence
  Description of Artificial Sequence: Synthetic oligonucleotide
  Antisense strand to SEQ ID NO: 2019404
uguaaccucucaaggccuc

SEQ ID NO: 2019406 - RNA, 19 nt, Artificial Sequence
  Description of Artificial Sequence: Synthetic oligonucleotide
  Sense strand starting at position 1667 of SEQ ID NO: 1881116
augauaacuugauuaaguc

SEQ ID NO: 2019407 - RNA, 19 nt, Artificial Sequence
  Description of Artificial Sequence: Synthetic oligonucleotide
  Antisense strand to SEQ ID NO: 2019406
gacuuaaucaaguuaucau

SEQ ID NO: 2019408 - RNA, 19 nt, Artificial Sequence
  Description of Artificial Sequence: Synthetic oligonucleotide
  Sense strand starting at position 1808 of SEQ ID NO: 1881116
gacauugucugccuaaaug

SEQ ID NO: 2019409 - RNA, 19 nt, Artificial Sequence
  Description of Artificial Sequence: Synthetic oligonucleotide
  Antisense strand to SEQ ID NO: 2019408
cauuuaggcagacaauguc

SEQ ID NO: 2019410 - RNA, 19 nt, Artificial Sequence
  Description of Artificial Sequence: Synthetic oligonucleotide
  Sense strand starting at position 1826 of SEQ ID NO: 1881116
guaugucagucauuugcag

SEQ ID NO: 2019411 - RNA, 19 nt, Artificial Sequence
  Description of Artificial Sequence: Synthetic oligonucleotide
  Antisense strand to SEQ ID NO: 2019410
cugcaaaugacugacauac

SEQ ID NO: 2019412 - RNA, 19 nt, Artificial Sequence
  Description of Artificial Sequence: Synthetic oligonucleotide
  Sense strand starting at position 1873 of SEQ ID NO: 1881116
ucaugucucuucgcuauuu

SEQ ID NO: 2019413 - RNA, 19 nt, Artificial Sequence
  Description of Artificial Sequence: Synthetic oligonucleotide
  Antisense strand to SEQ ID NO: 2019412
aaauagcgaagagacauga

SEQ ID NO: 2019414 - RNA, 19 nt, Artificial Sequence
  Description of Artificial Sequence: Synthetic oligonucleotide
  Sense strand starting at position 1875 of SEQ ID NO: 1881116
augucucuucgcuauuuga

SEQ ID NO: 2019415 - RNA, 19 nt, Artificial Sequence
  Description of Artificial Sequence: Synthetic oligonucleotide
  Antisense strand to SEQ ID NO: 2019414
ucaaauagcgaagagacau

SEQ ID NO: 2019416 - RNA, 19 nt, Artificial Sequence
  Description of Artificial Sequence: Synthetic oligonucleotide
  Sense strand starting at position 2239 of SEQ ID NO: 1881116
agcaaagugacuggaugaa

SEQ ID NO: 2019417 - RNA, 19 nt, Artificial Sequence
  Description of Artificial Sequence: Synthetic oligonucleotide
  Antisense strand to SEQ ID NO: 2019416
uucauccagucacuuugcu

SEQ ID NO: 2019418 - RNA, 19 nt, Artificial Sequence
  Description of Artificial Sequence: Synthetic oligonucleotide
  Sense strand starting at position 2285 of SEQ ID NO: 1881116
ugcggaugugaggaaauca

SEQ ID NO: 2019419 - RNA, 19 nt, Artificial Sequence
  Description of Artificial Sequence: Synthetic oligonucleotide
  Antisense strand to SEQ ID NO: 2019418
ugauuuccucacauccgca

SEQ ID NO: 2019420 - RNA, 19 nt, Artificial Sequence
  Description of Artificial Sequence: Synthetic oligonucleotide
  Sense strand starting at position 2344 of SEQ ID NO: 1881116
uggugucugauccaggaga

SEQ ID NO: 2019421 - RNA, 19 nt, Artificial Sequence
  Description of Artificial Sequence: Synthetic oligonucleotide
  Antisense strand to SEQ ID NO: 2019420
ucuccuggaucagacacca

SEQ ID NO: 2019422 - RNA, 19 nt, Artificial Sequence
  Description of Artificial Sequence: Synthetic oligonucleotide
  Sense strand starting at position 2346 of SEQ ID NO: 1881116
gugucugauccaggagaca

SEQ ID NO: 2019423 - RNA, 19 nt, Artificial Sequence
  Description of Artificial Sequence: Synthetic oligonucleotide
  Antisense strand to SEQ ID NO: 2019422
ugucuccuggaucagacac

SEQ ID NO: 2019424 - RNA, 19 nt, Artificial Sequence
  Description of Artificial Sequence: Synthetic oligonucleotide
  Sense strand starting at position 2382 of SEQ ID NO: 1881116
ugguaaaccucagcuccaa

SEQ ID NO: 2019425 - RNA, 19 nt, Artificial Sequence
  Description of Artificial Sequence: Synthetic oligonucleotide
  Antisense strand to SEQ ID NO: 2019424
uuggagcugagguuuacca

SEQ ID NO: 2019426 - RNA, 19 nt, Artificial Sequence
  Description of Artificial Sequence: Synthetic oligonucleotide
  Sense strand starting at position 2425 of SEQ ID NO: 1881116
ggguuaauuuaacauacag

SEQ ID NO: 2019427 - RNA, 19 nt, Artificial Sequence
  Description of Artificial Sequence: Synthetic oligonucleotide
  Antisense strand to SEQ ID NO: 2019426
cuguauguuaaauuaaccc

SEQ ID NO: 2019428 - RNA, 19 nt, Artificial Sequence
  Description of Artificial Sequence: Synthetic oligonucleotide
  Sense strand starting at position 2619 of SEQ ID NO: 1881116
gugcaauaucaggaucaua

SEQ ID NO: 2019429 - RNA, 19 nt, Artificial Sequence
  Description of Artificial Sequence: Synthetic oligonucleotide
  Antisense strand to SEQ ID NO: 2019428
uaugauccugauauugcac

SEQ ID NO: 2019430 - RNA, 19 nt, Artificial Sequence
  Description of Artificial Sequence: Synthetic oligonucleotide
  Sense strand starting at position 2980 of SEQ ID NO: 1881116
ccauguuguuugcucauuu

SEQ ID NO: 2019431 - RNA, 19 nt, Artificial Sequence
  Description of Artificial Sequence: Synthetic oligonucleotide
  Antisense strand to SEQ ID NO: 2019430
aaaugagcaaacaacaugg

SEQ ID NO: 2019432 - RNA, 19 nt, Artificial Sequence
  Description of Artificial Sequence: Synthetic oligonucleotide
  Sense strand starting at position 3006 of SEQ ID NO: 1881116
ugaguaguauucccuagga

SEQ ID NO: 2019433 - RNA, 19 nt, Artificial Sequence
  Description of Artificial Sequence: Synthetic oligonucleotide
  Antisense strand to SEQ ID NO: 2019432
uccuagggaauacuacuca

SEQ ID NO: 2019434 - RNA, 19 nt, Artificial Sequence
  Description of Artificial Sequence: Synthetic oligonucleotide
  Sense strand starting at position 3008 of SEQ ID NO: 1881116
aguaguauucccuaggagg

SEQ ID NO: 2019435 - RNA, 19 nt, Artificial Sequence
  Description of Artificial Sequence: Synthetic oligonucleotide
  Antisense strand to SEQ ID NO: 2019434
ccuccuagggaauacuacu

SEQ ID NO: 2019436 - RNA, 19 nt, Artificial Sequence
  Description of Artificial Sequence: Synthetic oligonucleotide
  Sense strand starting at position 3054 of SEQ ID NO: 1881116
uccugcugauguguauuua

SEQ ID NO: 2019437 - RNA, 19 nt, Artificial Sequence
  Description of Artificial Sequence: Synthetic oligonucleotide
  Antisense strand to SEQ ID NO: 2019436
uaaauacacaucagcagga

SEQ ID NO: 2019438 - RNA, 19 nt, Artificial Sequence
  Description of Artificial Sequence: Synthetic oligonucleotide
  Sense strand starting at position 3058 of SEQ ID NO: 1881116
gcugauguguauuuaaguu

SEQ ID NO: 2019439 - RNA, 19 nt, Artificial Sequence
  Description of Artificial Sequence: Synthetic oligonucleotide
  Antisense strand to SEQ ID NO: 2019438
aacuuaaauacacaucagc

SEQ ID NO: 2019440 - RNA, 19 nt, Artificial Sequence
  Description of Artificial Sequence: Synthetic oligonucleotide
  Sense strand starting at position 3066 of SEQ ID NO: 1881116
guauuuaaguuguuuccag

SEQ ID NO: 2019441 - RNA, 19 nt, Artificial Sequence
  Description of Artificial Sequence: Synthetic oligonucleotide
  Antisense strand to SEQ ID NO: 2019440
cuggaaacaacuuaaauac

SEQ ID NO: 2019442 - RNA, 19 nt, Artificial Sequence
  Description of Artificial Sequence: Synthetic oligonucleotide
  Sense strand starting at position 3136 of SEQ ID NO: 1881116
auuucuaagucauaggauu

SEQ ID NO: 2019443 - RNA, 19 nt, Artificial Sequence
  Description of Artificial Sequence: Synthetic oligonucleotide
  Antisense strand to SEQ ID NO: 2019442
aauccuaugacuuagaaau

SEQ ID NO: 2019444 - RNA, 19 nt, Artificial Sequence
  Description of Artificial Sequence: Synthetic oligonucleotide
  Sense strand starting at position 3507 of SEQ ID NO: 1881116
gccugaggucaugaaaggu

SEQ ID NO: 2019445 - RNA, 19 nt, Artificial Sequence
  Description of Artificial Sequence: Synthetic oligonucleotide
  Antisense strand to SEQ ID NO: 2019444
accuuucaugaccucaggc

SEQ ID NO: 2019446 - RNA, 19 nt, Artificial Sequence
  Description of Artificial Sequence: Synthetic oligonucleotide
  Sense strand starting at position 3552 of SEQ ID NO: 1881116
guuucugggacuugacagu

SEQ ID NO: 2019447 - RNA, 19 nt, Artificial Sequence
  Description of Artificial Sequence: Synthetic oligonucleotide
  Antisense strand to SEQ ID NO: 2019446
acugucaagucccagaaac

SEQ ID NO: 2019448 - RNA, 19 nt, Artificial Sequence
  Description of Artificial Sequence: Synthetic oligonucleotide
  Sense strand starting at position 3561 of SEQ ID NO: 1881116
acuugacaguuucuagcua

SEQ ID NO: 2019449 - RNA, 19 nt, Artificial Sequence
  Description of Artificial Sequence: Synthetic oligonucleotide
  Antisense strand to SEQ ID NO: 2019448
uagcuagaaacugucaagu

SEQ ID NO: 2019450 - RNA, 19 nt, Artificial Sequence
  Description of Artificial Sequence: Synthetic oligonucleotide
  Sense strand starting at position 3712 of SEQ ID NO: 1881116
ggguauuggcaucauucca

SEQ ID NO: 2019451 - RNA, 19 nt, Artificial Sequence
  Description of Artificial Sequence: Synthetic oligonucleotide
  Antisense strand to SEQ ID NO: 2019450
uggaaugaugccaauaccc

SEQ ID NO: 2019452 - RNA, 19 nt, Artificial Sequence
  Description of Artificial Sequence: Synthetic oligonucleotide
  Sense strand starting at position 3742 of SEQ ID NO: 1881116
auauguguauucccaucua

SEQ ID NO: 2019453 - RNA, 19 nt, Artificial Sequence
  Description of Artificial Sequence: Synthetic oligonucleotide
  Antisense strand to SEQ ID NO: 2019452
uagaugggaauacacauau

SEQ ID NO: 2019454 - RNA, 19 nt, Artificial Sequence
  Description of Artificial Sequence: Synthetic oligonucleotide
  Sense strand starting at position 3781 of SEQ ID NO: 1881116
gggccuuguggguagacaa

SEQ ID NO: 2019455 - RNA, 19 nt, Artificial Sequence
  Description of Artificial Sequence: Synthetic oligonucleotide
  Antisense strand to SEQ ID NO: 2019454
uugucuacccacaaggccc

SEQ ID NO: 2019456 - RNA, 19 nt, Artificial Sequence
  Description of Artificial Sequence: Synthetic oligonucleotide
  Sense strand starting at position 3818 of SEQ ID NO: 1881116
agaugaauuugaugaggga

SEQ ID NO: 2019457 - RNA, 19 nt, Artificial Sequence
  Description of Artificial Sequence: Synthetic oligonucleotide
  Antisense strand to SEQ ID NO: 2019456
ucccucaucaaauucaucu

SEQ ID NO: 2019458 - RNA, 19 nt, Artificial Sequence
  Description of Artificial Sequence: Synthetic oligonucleotide
  Sense strand starting at position 3827 of SEQ ID NO: 1881116
ugaugagggaccugucuuu

SEQ ID NO: 2019459 - RNA, 19 nt, Artificial Sequence
  Description of Artificial Sequence: Synthetic oligonucleotide
  Antisense strand to SEQ ID NO: 2019458
aaagacaggucccucauca

SEQ ID NO: 2019460 - RNA, 19 nt, Artificial Sequence
  Description of Artificial Sequence: Synthetic oligonucleotide
  Sense strand starting at position 3832 of SEQ ID NO: 1881116
agggaccugucuuuaaagu

SEQ ID NO: 2019461 - RNA, 19 nt, Artificial Sequence
  Description of Artificial Sequence: Synthetic oligonucleotide
  Antisense strand to SEQ ID NO: 2019460
acuuuaaagacaggucccu

SEQ ID NO: 2019462 - RNA, 19 nt, Artificial Sequence
  Description of Artificial Sequence: Synthetic oligonucleotide
  Sense strand starting at position 3833 of SEQ ID NO: 1881116
gggaccugucuuuaaagug

SEQ ID NO: 2019463 - RNA, 19 nt, Artificial Sequence
  Description of Artificial Sequence: Synthetic oligonucleotide
  Antisense strand to SEQ ID NO: 2019462
cacuuuaaagacagguccc

SEQ ID NO: 2019464 - RNA, 19 nt, Artificial Sequence
  Description of Artificial Sequence: Synthetic oligonucleotide
  Sense strand starting at position 130 of SEQ ID NO: 1881118
ucuacaauugcaggacuua

SEQ ID NO: 2019465 - RNA, 19 nt, Artificial Sequence
  Description of Artificial Sequence: Synthetic oligonucleotide
  Antisense strand to SEQ ID NO: 2019464
uaaguccugcaauuguaga

SEQ ID NO: 2019466 - RNA, 19 nt, Artificial Sequence
  Description of Artificial Sequence: Synthetic oligonucleotide
  Sense strand starting at position 361 of SEQ ID NO: 1881118
ucucaagugcaagaguauu

SEQ ID NO: 2019467 - RNA, 19 nt, Artificial Sequence
  Description of Artificial Sequence: Synthetic oligonucleotide
  Antisense strand to SEQ ID NO: 2019466
aauacucuugcacuugaga

SEQ ID NO: 2019468 - RNA, 19 nt, Artificial Sequence
  Description of Artificial Sequence: Synthetic oligonucleotide
  Sense strand starting at position 367 of SEQ ID NO: 1881118
gugcaagaguauucaggag

SEQ ID NO: 2019469 - RNA, 19 nt, Artificial Sequence
  Description of Artificial Sequence: Synthetic oligonucleotide
  Antisense strand to SEQ ID NO: 2019468
cuccugaauacucuugcac

SEQ ID NO: 2019470 - RNA, 19 nt, Artificial Sequence
  Description of Artificial Sequence: Synthetic oligonucleotide
  Sense strand starting at position 412 of SEQ ID NO: 1881118
caagcaaauuagguauagu

SEQ ID NO: 2019471 - RNA, 19 nt, Artificial Sequence
  Description of Artificial Sequence: Synthetic oligonucleotide
  Antisense strand to SEQ ID NO: 2019470
acuauaccuaauuugcuug

SEQ ID NO: 2019472 - RNA, 19 nt, Artificial Sequence
  Description of Artificial Sequence: Synthetic oligonucleotide
  Sense strand starting at position 458 of SEQ ID NO: 1881118
ucagucacuccauagagua

SEQ ID NO: 2019473 - RNA, 19 nt, Artificial Sequence
  Description of Artificial Sequence: Synthetic oligonucleotide
  Antisense strand to SEQ ID NO: 2019472
uacucuauggagugacuga

SEQ ID NO: 2019474 - RNA, 19 nt, Artificial Sequence
  Description of Artificial Sequence: Synthetic oligonucleotide
  Sense strand starting at position 838 of SEQ ID NO: 1881118
acguuuguacguguaacca

SEQ ID NO: 2019475 - RNA, 19 nt, Artificial Sequence
  Description of Artificial Sequence: Synthetic oligonucleotide
  Antisense strand to SEQ ID NO: 2019474
ugguuacacguacaaacgu

SEQ ID NO: 2019476 - RNA, 19 nt, Artificial Sequence
  Description of Artificial Sequence: Synthetic oligonucleotide
  Sense strand starting at position 868 of SEQ ID NO: 1881118
uucuaugguccacauguuu

SEQ ID NO: 2019477 - RNA, 19 nt, Artificial Sequence
  Description of Artificial Sequence: Synthetic oligonucleotide
  Antisense strand to SEQ ID NO: 2019476
aaacauguggaccauagaa

SEQ ID NO: 2019478 - RNA, 19 nt, Artificial Sequence
  Description of Artificial Sequence: Synthetic oligonucleotide
  Sense strand starting at position 937 of SEQ ID NO: 1881118
acaggcaaauguucucgaa

SEQ ID NO: 2019479 - RNA, 19 nt, Artificial Sequence
  Description of Artificial Sequence: Synthetic oligonucleotide
  Antisense strand to SEQ ID NO: 2019478
uucgagaacauuugccugu

SEQ ID NO: 2019480 - RNA, 19 nt, Artificial Sequence
  Description of Artificial Sequence: Synthetic oligonucleotide
  Sense strand starting at position 941 of SEQ ID NO: 1881118
gcaaauguucucgaacuuu

SEQ ID NO: 2019481 - RNA, 19 nt, Artificial Sequence
  Description of Artificial Sequence: Synthetic oligonucleotide
  Antisense strand to SEQ ID NO: 2019480
aaaguucgagaacauuugc

SEQ ID NO: 2019482 - RNA, 19 nt, Artificial Sequence
  Description of Artificial Sequence: Synthetic oligonucleotide
  Sense strand starting at position 954 of SEQ ID NO: 1881118
aacuuuauuguguagugua

SEQ ID NO: 2019483 - RNA, 19 nt, Artificial Sequence
  Description of Artificial Sequence: Synthetic oligonucleotide
  Antisense strand to SEQ ID NO: 2019482
uacacuacacaauaaaguu

SEQ ID NO: 2019484 - RNA, 19 nt, Artificial Sequence
  Description of Artificial Sequence: Synthetic oligonucleotide
  Sense strand starting at position 981 of SEQ ID NO: 1881118
ggcacaggcccuuagaauu

SEQ ID NO: 2019485 - RNA, 19 nt, Artificial Sequence
  Description of Artificial Sequence: Synthetic oligonucleotide
  Antisense strand to SEQ ID NO: 2019484
aauucuaagggccugugcc

SEQ ID NO: 2019486 - RNA, 19 nt, Artificial Sequence
  Description of Artificial Sequence: Synthetic oligonucleotide
  Sense strand starting at position 1169 of SEQ ID NO: 1881118
ucuggaacagcuuggauua

SEQ ID NO: 2019487 - RNA, 19 nt, Artificial Sequence
  Description of Artificial Sequence: Synthetic oligonucleotide
  Antisense strand to SEQ ID NO: 2019486
uaauccaagcuguuccaga

SEQ ID NO: 2019488 - RNA, 19 nt, Artificial Sequence
  Description of Artificial Sequence: Synthetic oligonucleotide
  Sense strand starting at position 1377 of SEQ ID NO: 1881118
ugcagucuuggcuagaaca

SEQ ID NO: 2019489 - RNA, 19 nt, Artificial Sequence
  Description of Artificial Sequence: Synthetic oligonucleotide
  Antisense strand to SEQ ID NO: 2019488
uguucuagccaagacugca

SEQ ID NO: 2019490 - RNA, 19 nt, Artificial Sequence
  Description of Artificial Sequence: Synthetic oligonucleotide
  Sense strand starting at position 1379 of SEQ ID NO: 1881118
cagucuuggcuagaacacu

SEQ ID NO: 2019491 - RNA, 19 nt, Artificial Sequence
  Description of Artificial Sequence: Synthetic oligonucleotide
  Antisense strand to SEQ ID NO: 2019490
aguguucuagccaagacug

SEQ ID NO: 2019492 - RNA, 19 nt, Artificial Sequence
  Description of Artificial Sequence: Synthetic oligonucleotide
  Sense strand starting at position 1413 of SEQ ID NO: 1881118
cgaguuuccucaucauuaa

SEQ ID NO: 2019493 - RNA, 19 nt, Artificial Sequence
  Description of Artificial Sequence: Synthetic oligonucleotide
  Antisense strand to SEQ ID NO: 2019492
uuaaugaugaggaaacucg

SEQ ID NO: 2019494 - RNA, 19 nt, Artificial Sequence
  Description of Artificial Sequence: Synthetic oligonucleotide
  Sense strand starting at position 1443 of SEQ ID NO: 1881118
ucagguuugaugugaagau

SEQ ID NO: 2019495 - RNA, 19 nt, Artificial Sequence
  Description of Artificial Sequence: Synthetic oligonucleotide
  Antisense strand to SEQ ID NO: 2019494
aucuucacaucaaaccuga

SEQ ID NO: 2019496 - RNA, 19 nt, Artificial Sequence
  Description of Artificial Sequence: Synthetic oligonucleotide
  Sense strand starting at position 1452 of SEQ ID NO: 1881118
augugaagauuugagaaga

SEQ ID NO: 2019497 - RNA, 19 nt, Artificial Sequence
  Description of Artificial Sequence: Synthetic oligonucleotide
  Antisense strand to SEQ ID NO: 2019496
ucuucucaaaucuucacau

SEQ ID NO: 2019498 - RNA, 19 nt, Artificial Sequence
  Description of Artificial Sequence: Synthetic oligonucleotide
  Sense strand starting at position 1489 of SEQ ID NO: 1881118
gccgaagaucgauaaauau

SEQ ID NO: 2019499 - RNA, 19 nt, Artificial Sequence
  Description of Artificial Sequence: Synthetic oligonucleotide
  Antisense strand to SEQ ID NO: 2019498
auauuuaucgaucuucggc

SEQ ID NO: 2019500 - RNA, 19 nt, Artificial Sequence
  Description of Artificial Sequence: Synthetic oligonucleotide
  Sense strand starting at position 1673 of SEQ ID NO: 1881118
cgucucuucgcagccuuaa

SEQ ID NO: 2019501 - RNA, 19 nt, Artificial Sequence
  Description of Artificial Sequence: Synthetic oligonucleotide
  Antisense strand to SEQ ID NO: 2019500
uuaaggcugcgaagagacg

SEQ ID NO: 2019502 - RNA, 19 nt, Artificial Sequence
  Description of Artificial Sequence: Synthetic oligonucleotide
  Sense strand starting at position 1674 of SEQ ID NO: 1881118
gucucuucgcagccuuaau

SEQ ID NO: 2019503 - RNA, 19 nt, Artificial Sequence
  Description of Artificial Sequence: Synthetic oligonucleotide
  Antisense strand to SEQ ID NO: 2019502
auuaaggcugcgaagagac

SEQ ID NO: 2019504 - RNA, 19 nt, Artificial Sequence
  Description of Artificial Sequence: Synthetic oligonucleotide
  Sense strand starting at position 1714 of SEQ ID NO: 1881118
cagagaauucucugggccu

SEQ ID NO: 2019505 - RNA, 19 nt, Artificial Sequence
  Description of Artificial Sequence: Synthetic oligonucleotide
  Antisense strand to SEQ ID NO: 2019504
aggcccagagaauucucug

SEQ ID NO: 2019506 - RNA, 19 nt, Artificial Sequence
  Description of Artificial Sequence: Synthetic oligonucleotide
  Sense strand starting at position 1826 of SEQ ID NO: 1881118
cgguucucggccuccgaaa

SEQ ID NO: 2019507 - RNA, 19 nt, Artificial Sequence
  Description of Artificial Sequence: Synthetic oligonucleotide
  Antisense strand to SEQ ID NO: 2019506
uuucggaggccgagaaccg

SEQ ID NO: 2019508 - RNA, 19 nt, Artificial Sequence
  Description of Artificial Sequence: Synthetic oligonucleotide
  Sense strand starting at position 2038 of SEQ ID NO: 1881118
ggccacguugccuaggaaa

SEQ ID NO: 2019509 - RNA, 19 nt, Artificial Sequence
  Description of Artificial Sequence: Synthetic oligonucleotide
  Antisense strand to SEQ ID NO: 2019508
uuuccuaggcaacguggcc

SEQ ID NO: 2019510 - RNA, 19 nt, Artificial Sequence
  Description of Artificial Sequence: Synthetic oligonucleotide
  Sense strand starting at position 2121 of SEQ ID NO: 1881118
ucugacuaucgcgagaauc

SEQ ID NO: 2019511 - RNA, 19 nt, Artificial Sequence
  Description of Artificial Sequence: Synthetic oligonucleotide
  Antisense strand to SEQ ID NO: 2019510
gauucucgcgauagucaga

SEQ ID NO: 2019512 - RNA, 19 nt, Artificial Sequence
  Description of Artificial Sequence: Synthetic oligonucleotide
  Sense strand starting at position 2189 of SEQ ID NO: 1881118
gguuuaucucaaggccuga

SEQ ID NO: 2019513 - RNA, 19 nt, Artificial Sequence
  Description of Artificial Sequence: Synthetic oligonucleotide
  Antisense strand to SEQ ID NO: 2019512
ucaggccuugagauaaacc

SEQ ID NO: 2019514 - RNA, 19 nt, Artificial Sequence
  Description of Artificial Sequence: Synthetic oligonucleotide
  Sense strand starting at position 2204 of SEQ ID NO: 1881118
cugaguagccgguaacaaa

SEQ ID NO: 2019515 - RNA, 19 nt, Artificial Sequence
  Description of Artificial Sequence: Synthetic oligonucleotide
  Antisense strand to SEQ ID NO: 2019514
uuuguuaccggcuacucag

SEQ ID NO: 2019516 - RNA, 19 nt, Artificial Sequence
  Description of Artificial Sequence: Synthetic oligonucleotide
  Sense strand starting at position 2224 of SEQ ID NO: 1881118
gaggguucccgggauugga

SEQ ID NO: 2019517 - RNA, 19 nt, Artificial Sequence
  Description of Artificial Sequence: Synthetic oligonucleotide
  Antisense strand to SEQ ID NO: 2019516
uccaaucccgggaacccuc

SEQ ID NO: 2019518 - RNA, 19 nt, Artificial Sequence
  Description of Artificial Sequence: Synthetic oligonucleotide
  Sense strand starting at position 2612 of SEQ ID NO: 1881118
aacggugguaguuaaucua

SEQ ID NO: 2019519 - RNA, 19 nt, Artificial Sequence
  Description of Artificial Sequence: Synthetic oligonucleotide
  Antisense strand to SEQ ID NO: 2019518
uagauuaacuaccaccguu

SEQ ID NO: 2019520 - RNA, 19 nt, Artificial Sequence
  Description of Artificial Sequence: Synthetic oligonucleotide
  Sense strand starting at position 2909 of SEQ ID NO: 1881118
ccuagacuaguuugcacaa

SEQ ID NO: 2019521 - RNA, 19 nt, Artificial Sequence
  Description of Artificial Sequence: Synthetic oligonucleotide
  Antisense strand to SEQ ID NO: 2019520
uugugcaaacuagucuagg

SEQ ID NO: 2019522 - RNA, 19 nt, Artificial Sequence
  Description of Artificial Sequence: Synthetic oligonucleotide
  Sense strand starting at position 2962 of SEQ ID NO: 1881118
auaagaauaucuuccgucu

SEQ ID NO: 2019523 - RNA, 19 nt, Artificial Sequence
  Description of Artificial Sequence: Synthetic oligonucleotide
  Antisense strand to SEQ ID NO: 2019522
agacggaagauauucuuau

SEQ ID NO: 2019524 - RNA, 19 nt, Artificial Sequence
  Description of Artificial Sequence: Synthetic oligonucleotide
  Sense strand starting at position 2965 of SEQ ID NO: 1881118
agaauaucuuccgucucua

SEQ ID NO: 2019525 - RNA, 19 nt, Artificial Sequence
  Description of Artificial Sequence: Synthetic oligonucleotide
  Antisense strand to SEQ ID NO: 2019524
uagagacggaagauauucu

SEQ ID NO: 2019526 - RNA, 19 nt, Artificial Sequence
  Description of Artificial Sequence: Synthetic oligonucleotide
  Sense strand starting at position 2970 of SEQ ID NO: 1881118
aucuuccgucucuauugaa

SEQ ID NO: 2019527 - RNA, 19 nt, Artificial Sequence
  Description of Artificial Sequence: Synthetic oligonucleotide
  Antisense strand to SEQ ID NO: 2019526
uucaauagagacggaagau

SEQ ID NO: 2019528 - RNA, 19 nt, Artificial Sequence
  Description of Artificial Sequence: Synthetic oligonucleotide
  Sense strand starting at position 3211 of SEQ ID NO: 1881118
gcuugaagacgcuagggau

SEQ ID NO: 2019529 - RNA, 19 nt, Artificial Sequence
  Description of Artificial Sequence: Synthetic oligonucleotide
  Antisense strand to SEQ ID NO: 2019528
aucccuagcgucuucaagc

SEQ ID NO: 2019530 - RNA, 19 nt, Artificial Sequence
  Description of Artificial Sequence: Synthetic oligonucleotide
  Sense strand starting at position 3225 of SEQ ID NO: 1881118
gggauuaagucccucaucu

SEQ ID NO: 2019531 - RNA, 19 nt, Artificial Sequence
  Description of Artificial Sequence: Synthetic oligonucleotide
  Antisense strand to SEQ ID NO: 2019530
agaugagggacuuaauccc

SEQ ID NO: 2019532 - RNA, 19 nt, Artificial Sequence
  Description of Artificial Sequence: Synthetic oligonucleotide
  Sense strand starting at position 3268 of SEQ ID NO: 1881118
auguuucuacaagguuaau

SEQ ID NO: 2019533 - RNA, 19 nt, Artificial Sequence
  Description of Artificial Sequence: Synthetic oligonucleotide
  Antisense strand to SEQ ID NO: 2019532
auuaaccuuguagaaacau

SEQ ID NO: 2019534 - RNA, 19 nt, Artificial Sequence
  Description of Artificial Sequence: Synthetic oligonucleotide
  Sense strand starting at position 3457 of SEQ ID NO: 1881118
cacggauuugcgugucaua

SEQ ID NO: 2019535 - RNA, 19 nt, Artificial Sequence
  Description of Artificial Sequence: Synthetic oligonucleotide
  Antisense strand to SEQ ID NO: 2019534
uaugacacgcaaauccgug

SEQ ID NO: 2019536 - RNA, 19 nt, Artificial Sequence
  Description of Artificial Sequence: Synthetic oligonucleotide
  Sense strand starting at position 3553 of SEQ ID NO: 1881118
agguuacagucccugaaca

SEQ ID NO: 2019537 - RNA, 19 nt, Artificial Sequence
  Description of Artificial Sequence: Synthetic oligonucleotide
  Antisense strand to SEQ ID NO: 2019536
uguucagggacuguaaccu

SEQ ID NO: 2019538 - RNA, 19 nt, Artificial Sequence
  Description of Artificial Sequence: Synthetic oligonucleotide
  Sense strand starting at position 3886 of SEQ ID NO: 1881118
agaguuauauguuugugaa

SEQ ID NO: 2019539 - RNA, 19 nt, Artificial Sequence
  Description of Artificial Sequence: Synthetic oligonucleotide
  Antisense strand to SEQ ID NO: 2019538
uucacaaacauauaacucu

SEQ ID NO: 2019540 - RNA, 19 nt, Artificial Sequence
  Description of Artificial Sequence: Synthetic oligonucleotide
  Sense strand starting at position 3887 of SEQ ID NO: 1881118
gaguuauauguuugugaag

SEQ ID NO: 2019541 - RNA, 19 nt, Artificial Sequence
  Description of Artificial Sequence: Synthetic oligonucleotide
  Antisense strand to SEQ ID NO: 2019540
cuucacaaacauauaacuc

SEQ ID NO: 2019542 - RNA, 19 nt, Artificial Sequence
  Description of Artificial Sequence: Synthetic oligonucleotide
  Sense strand starting at position 3898 of SEQ ID NO: 1881118
uugugaagugguuacugua

SEQ ID NO: 2019543 - RNA, 19 nt, Artificial Sequence
  Description of Artificial Sequence: Synthetic oligonucleotide
  Antisense strand to SEQ ID NO: 2019542
uacaguaaccacuucacaa

SEQ ID NO: 2019544 - RNA, 19 nt, Artificial Sequence
  Description of Artificial Sequence: Synthetic oligonucleotide
  Sense strand starting at position 188 of SEQ ID NO: 1881119
agaguauaggcuuguucag

SEQ ID NO: 2019545 - RNA, 19 nt, Artificial Sequence
  Description of Artificial Sequence: Synthetic oligonucleotide
  Antisense strand to SEQ ID NO: 2019544
cugaacaagccuauacucu

SEQ ID NO: 2019546 - RNA, 19 nt, Artificial Sequence
  Description of Artificial Sequence: Synthetic oligonucleotide
  Sense strand starting at position 190 of SEQ ID NO: 1881119
aguauaggcuuguucagag

SEQ ID NO: 2019547 - RNA, 19 nt, Artificial Sequence
  Description of Artificial Sequence: Synthetic oligonucleotide
  Antisense strand to SEQ ID NO: 2019546
cucugaacaagccuauacu

SEQ ID NO: 2019548 - RNA, 19 nt, Artificial Sequence
  Description of Artificial Sequence: Synthetic oligonucleotide
  Sense strand starting at position 351 of SEQ ID NO: 1881119
uaagauaugugcuuuagau

SEQ ID NO: 2019549 - RNA, 19 nt, Artificial Sequence
  Description of Artificial Sequence: Synthetic oligonucleotide
  Antisense strand to SEQ ID NO: 2019548
aucuaaagcacauaucuua

SEQ ID NO: 2019550 - RNA, 19 nt, Artificial Sequence
  Description of Artificial Sequence: Synthetic oligonucleotide
  Sense strand starting at position 353 of SEQ ID NO: 1881119
agauaugugcuuuagauau

SEQ ID NO: 2019551 - RNA, 19 nt, Artificial Sequence
  Description of Artificial Sequence: Synthetic oligonucleotide
  Antisense strand to SEQ ID NO: 2019550
auaucuaaagcacauaucu

SEQ ID NO: 2019552 - RNA, 19 nt, Artificial Sequence
  Description of Artificial Sequence: Synthetic oligonucleotide
  Sense strand starting at position 368 of SEQ ID NO: 1881119
auaucauuacacuggcaga

SEQ ID NO: 2019553 - RNA, 19 nt, Artificial Sequence
  Description of Artificial Sequence: Synthetic oligonucleotide
  Antisense strand to SEQ ID NO: 2019552
ucugccaguguaaugauau

SEQ ID NO: 2019554 - RNA, 19 nt, Artificial Sequence
  Description of Artificial Sequence: Synthetic oligonucleotide
  Sense strand starting at position 502 of SEQ ID NO: 1881119
auggcuauucccuauagag

SEQ ID NO: 2019555 - RNA, 19 nt, Artificial Sequence
  Description of Artificial Sequence: Synthetic oligonucleotide
  Antisense strand to SEQ ID NO: 2019554
cucuauagggaauagccau

SEQ ID NO: 2019556 - RNA, 19 nt, Artificial Sequence
  Description of Artificial Sequence: Synthetic oligonucleotide
  Sense strand starting at position 504 of SEQ ID NO: 1881119
ggcuauucccuauagagac

SEQ ID NO: 2019557 - RNA, 19 nt, Artificial Sequence
  Description of Artificial Sequence: Synthetic oligonucleotide
  Antisense strand to SEQ ID NO: 2019556
gucucuauagggaauagcc

SEQ ID NO: 2019558 - RNA, 19 nt, Artificial Sequence
  Description of Artificial Sequence: Synthetic oligonucleotide
  Sense strand starting at position 627 of SEQ ID NO: 1881119
cugugaauaucuguuauua

SEQ ID NO: 2019559 - RNA, 19 nt, Artificial Sequence
  Description of Artificial Sequence: Synthetic oligonucleotide
  Antisense strand to SEQ ID NO: 2019558
uaauaacagauauucacag

SEQ ID NO: 2019560 - RNA, 19 nt, Artificial Sequence
  Description of Artificial Sequence: Synthetic oligonucleotide
  Sense strand starting at position 897 of SEQ ID NO: 1881119
aacucuuugcgugcaagca

SEQ ID NO: 2019561 - RNA, 19 nt, Artificial Sequence
  Description of Artificial Sequence: Synthetic oligonucleotide
  Antisense strand to SEQ ID NO: 2019560
ugcuugcacgcaaagaguu

SEQ ID NO: 2019562 - RNA, 19 nt, Artificial Sequence
  Description of Artificial Sequence: Synthetic oligonucleotide
  Sense strand starting at position 980 of SEQ ID NO: 1881119
aaggcauugugggcugaau

SEQ ID NO: 2019563 - RNA, 19 nt, Artificial Sequence
  Description of Artificial Sequence: Synthetic oligonucleotide
  Antisense strand to SEQ ID NO: 2019562
auucagcccacaaugccuu

SEQ ID NO: 2019564 - RNA, 19 nt, Artificial Sequence
  Description of Artificial Sequence: Synthetic oligonucleotide
  Sense strand starting at position 982 of SEQ ID NO: 1881119
ggcauugugggcugaauuu

SEQ ID NO: 2019565 - RNA, 19 nt, Artificial Sequence
  Description of Artificial Sequence: Synthetic oligonucleotide
  Antisense strand to SEQ ID NO: 2019564
aaauucagcccacaaugcc

SEQ ID NO: 2019566 - RNA, 19 nt, Artificial Sequence
  Description of Artificial Sequence: Synthetic oligonucleotide
  Sense strand starting at position 1141 of SEQ ID NO: 1881119
ccuguaagaaagugagauu

SEQ ID NO: 2019567 - RNA, 19 nt, Artificial Sequence
  Description of Artificial Sequence: Synthetic oligonucleotide
  Antisense strand to SEQ ID NO: 2019566
aaucucacuuucuuacagg

SEQ ID NO: 2019568 - RNA, 19 nt, Artificial Sequence
  Description of Artificial Sequence: Synthetic oligonucleotide
  Sense strand starting at position 1225 of SEQ ID NO: 1881119
agaagagaguuuccagagu

SEQ ID NO: 2019569 - RNA, 19 nt, Artificial Sequence
  Description of Artificial Sequence: Synthetic oligonucleotide
  Antisense strand to SEQ ID NO: 2019568
acucuggaaacucucuucu

SEQ ID NO: 2019570 - RNA, 19 nt, Artificial Sequence
  Description of Artificial Sequence: Synthetic oligonucleotide
  Sense strand starting at position 1320 of SEQ ID NO: 1881119
ccacccagucuguaauacu

SEQ ID NO: 2019571 - RNA, 19 nt, Artificial Sequence
  Description of Artificial Sequence: Synthetic oligonucleotide
  Antisense strand to SEQ ID NO: 2019570
aguauuacagacugggugg

SEQ ID NO: 2019572 - RNA, 19 nt, Artificial Sequence
  Description of Artificial Sequence: Synthetic oligonucleotide
  Sense strand starting at position 1329 of SEQ ID NO: 1881119
cuguaauacuuuguuaaug

SEQ ID NO: 2019573 - RNA, 19 nt, Artificial Sequence
  Description of Artificial Sequence: Synthetic oligonucleotide
  Antisense strand to SEQ ID NO: 2019572
cauuaacaaaguauuacag

SEQ ID NO: 2019574 - RNA, 19 nt, Artificial Sequence
  Description of Artificial Sequence: Synthetic oligonucleotide
  Sense strand starting at position 1368 of SEQ ID NO: 1881119
agaagaauacuggguguuu

SEQ ID NO: 2019575 - RNA, 19 nt, Artificial Sequence
  Description of Artificial Sequence: Synthetic oligonucleotide
  Antisense strand to SEQ ID NO: 2019574
aaacacccaguauucuucu

SEQ ID NO: 2019576 - RNA, 19 nt, Artificial Sequence
  Description of Artificial Sequence: Synthetic oligonucleotide
  Sense strand starting at position 1369 of SEQ ID NO: 1881119
gaagaauacuggguguuuc

SEQ ID NO: 2019577 - RNA, 19 nt, Artificial Sequence
  Description of Artificial Sequence: Synthetic oligonucleotide
  Antisense strand to SEQ ID NO: 2019576
gaaacacccaguauucuuc

SEQ ID NO: 2019578 - RNA, 19 nt, Artificial Sequence
  Description of Artificial Sequence: Synthetic oligonucleotide
  Sense strand starting at position 1587 of SEQ ID NO: 1881119
agugaugcaucucuaccau

SEQ ID NO: 2019579 - RNA, 19 nt, Artificial Sequence
  Description of Artificial Sequence: Synthetic oligonucleotide
  Antisense strand to SEQ ID NO: 2019578
augguagagaugcaucacu

SEQ ID NO: 2019580 - RNA, 19 nt, Artificial Sequence
  Description of Artificial Sequence: Synthetic oligonucleotide
  Sense strand starting at position 1637 of SEQ ID NO: 1881119
gugguugaguuucccaaga

SEQ ID NO: 2019581 - RNA, 19 nt, Artificial Sequence
  Description of Artificial Sequence: Synthetic oligonucleotide
  Antisense strand to SEQ ID NO: 2019580
ucuugggaaacucaaccac

SEQ ID NO: 2019582 - RNA, 19 nt, Artificial Sequence
  Description of Artificial Sequence: Synthetic oligonucleotide
  Sense strand starting at position 1654 of SEQ ID NO: 1881119
gagaguaaaccugguuucu

SEQ ID NO: 2019583 - RNA, 19 nt, Artificial Sequence
  Description of Artificial Sequence: Synthetic oligonucleotide
  Antisense strand to SEQ ID NO: 2019582
agaaaccagguuuacucuc

SEQ ID NO: 2019584 - RNA, 19 nt, Artificial Sequence
  Description of Artificial Sequence: Synthetic oligonucleotide
  Sense strand starting at position 1665 of SEQ ID NO: 1881119
ugguuucugccaggacaag

SEQ ID NO: 2019585 - RNA, 19 nt, Artificial Sequence
  Description of Artificial Sequence: Synthetic oligonucleotide
  Antisense strand to SEQ ID NO: 2019584
cuuguccuggcagaaacca

SEQ ID NO: 2019586 - RNA, 19 nt, Artificial Sequence
  Description of Artificial Sequence: Synthetic oligonucleotide
  Sense strand starting at position 1666 of SEQ ID NO: 1881119
gguuucugccaggacaaga

SEQ ID NO: 2019587 - RNA, 19 nt, Artificial Sequence
  Description of Artificial Sequence: Synthetic oligonucleotide
  Antisense strand to SEQ ID NO: 2019586
ucuuguccuggcagaaacc

SEQ ID NO: 2019588 - RNA, 19 nt, Artificial Sequence
  Description of Artificial Sequence: Synthetic oligonucleotide
  Sense strand starting at position 2036 of SEQ ID NO: 1881119
ugcaauguuuaaccagaag

SEQ ID NO: 2019589 - RNA, 19 nt, Artificial Sequence
  Description of Artificial Sequence: Synthetic oligonucleotide
  Antisense strand to SEQ ID NO: 2019588
cuucugguuaaacauugca

SEQ ID NO: 2019590 - RNA, 19 nt, Artificial Sequence
  Description of Artificial Sequence: Synthetic oligonucleotide
  Sense strand starting at position 2074 of SEQ ID NO: 1881119
aauaauccucugugaaggu

SEQ ID NO: 2019591 - RNA, 19 nt, Artificial Sequence
  Description of Artificial Sequence: Synthetic oligonucleotide
  Antisense strand to SEQ ID NO: 2019590
accuucacagaggauuauu

SEQ ID NO: 2019592 - RNA, 19 nt, Artificial Sequence
  Description of Artificial Sequence: Synthetic oligonucleotide
  Sense strand starting at position 2104 of SEQ ID NO: 1881119
uuacuucuggcuugggaag

SEQ ID NO: 2019593 - RNA, 19 nt, Artificial Sequence
  Description of Artificial Sequence: Synthetic oligonucleotide
  Antisense strand to SEQ ID NO: 2019592
cuucccaagccagaaguaa

SEQ ID NO: 2019594 - RNA, 19 nt, Artificial Sequence
  Description of Artificial Sequence: Synthetic oligonucleotide
  Sense strand starting at position 2375 of SEQ ID NO: 1881119
ucauuagauuguguuacaa

SEQ ID NO: 2019595 - RNA, 19 nt, Artificial Sequence
  Description of Artificial Sequence: Synthetic oligonucleotide
  Antisense strand to SEQ ID NO: 2019594
uuguaacacaaucuaauga

SEQ ID NO: 2019596 - RNA, 19 nt, Artificial Sequence
  Description of Artificial Sequence: Synthetic oligonucleotide
  Sense strand starting at position 2598 of SEQ ID NO: 1881119
augucaggcauugauggau

SEQ ID NO: 2019597 - RNA, 19 nt, Artificial Sequence
  Description of Artificial Sequence: Synthetic oligonucleotide
  Antisense strand to SEQ ID NO: 2019596
auccaucaaugccugacau

SEQ ID NO: 2019598 - RNA, 19 nt, Artificial Sequence
  Description of Artificial Sequence: Synthetic oligonucleotide
  Sense strand starting at position 2772 of SEQ ID NO: 1881119
uaaugcagaccugaaaguu

SEQ ID NO: 2019599 - RNA, 19 nt, Artificial Sequence
  Description of Artificial Sequence: Synthetic oligonucleotide
  Antisense strand to SEQ ID NO: 2019598
aacuuucaggucugcauua

SEQ ID NO: 2019600 - RNA, 19 nt, Artificial Sequence
  Description of Artificial Sequence: Synthetic oligonucleotide
  Sense strand starting at position 2793 of SEQ ID NO: 1881119
ggaagucucccuggaggaa

SEQ ID NO: 2019601 - RNA, 19 nt, Artificial Sequence
  Description of Artificial Sequence: Synthetic oligonucleotide
  Antisense strand to SEQ ID NO: 2019600
uuccuccagggagacuucc

SEQ ID NO: 2019602 - RNA, 19 nt, Artificial Sequence
  Description of Artificial Sequence: Synthetic oligonucleotide
  Sense strand starting at position 2864 of SEQ ID NO: 1881119
guaagaaauuuggaaguug

SEQ ID NO: 2019603 - RNA, 19 nt, Artificial Sequence
  Description of Artificial Sequence: Synthetic oligonucleotide
  Antisense strand to SEQ ID NO: 2019602
caacuuccaaauuucuuac

SEQ ID NO: 2019604 - RNA, 19 nt, Artificial Sequence
  Description of Artificial Sequence: Synthetic oligonucleotide
  Sense strand starting at position 3056 of SEQ ID NO: 1881119
gugacagagcgauauucuu

SEQ ID NO: 2019605 - RNA, 19 nt, Artificial Sequence
  Description of Artificial Sequence: Synthetic oligonucleotide
  Antisense strand to SEQ ID NO: 2019604
aagaauaucgcucugucac

SEQ ID NO: 2019606 - RNA, 19 nt, Artificial Sequence
  Description of Artificial Sequence: Synthetic oligonucleotide
  Sense strand starting at position 3256 of SEQ ID NO: 1881119
cugaacuuguaacugugaa

SEQ ID NO: 2019607 - RNA, 19 nt, Artificial Sequence
  Description of Artificial Sequence: Synthetic oligonucleotide
  Antisense strand to SEQ ID NO: 2019606
uucacaguuacaaguucag

SEQ ID NO: 2019608 - RNA, 19 nt, Artificial Sequence
  Description of Artificial Sequence: Synthetic oligonucleotide
  Sense strand starting at position 3284 of SEQ ID NO: 1881119
ccaguucucagacaagugu

SEQ ID NO: 2019609 - RNA, 19 nt, Artificial Sequence
  Description of Artificial Sequence: Synthetic oligonucleotide
  Antisense strand to SEQ ID NO: 2019608
acacuugucugagaacugg

SEQ ID NO: 2019610 - RNA, 19 nt, Artificial Sequence
  Description of Artificial Sequence: Synthetic oligonucleotide
  Sense strand starting at position 3290 of SEQ ID NO: 1881119
cucagacaagugugaacaa

SEQ ID NO: 2019611 - RNA, 19 nt, Artificial Sequence
  Description of Artificial Sequence: Synthetic oligonucleotide
  Antisense strand to SEQ ID NO: 2019610
uuguucacacuugucugag

SEQ ID NO: 2019612 - RNA, 19 nt, Artificial Sequence
  Description of Artificial Sequence: Synthetic oligonucleotide
  Sense strand starting at position 3331 of SEQ ID NO: 1881119
ggaacugaaucauagagag

SEQ ID NO: 2019613 - RNA, 19 nt, Artificial Sequence
  Description of Artificial Sequence: Synthetic oligonucleotide
  Antisense strand to SEQ ID NO: 2019612
cucucuaugauucaguucc

SEQ ID NO: 2019614 - RNA, 19 nt, Artificial Sequence
  Description of Artificial Sequence: Synthetic oligonucleotide
  Sense strand starting at position 3390 of SEQ ID NO: 1881119
caggucucacagugaauau

SEQ ID NO: 2019615 - RNA, 19 nt, Artificial Sequence
  Description of Artificial Sequence: Synthetic oligonucleotide
  Antisense strand to SEQ ID NO: 2019614
auauucacugugagaccug

SEQ ID NO: 2019616 - RNA, 19 nt, Artificial Sequence
  Description of Artificial Sequence: Synthetic oligonucleotide
  Sense strand starting at position 3464 of SEQ ID NO: 1881119
ugaaauaugcuagagcauu

SEQ ID NO: 2019617 - RNA, 19 nt, Artificial Sequence
  Description of Artificial Sequence: Synthetic oligonucleotide
  Antisense strand to SEQ ID NO: 2019616
aaugcucuagcauauuuca

SEQ ID NO: 2019618 - RNA, 19 nt, Artificial Sequence
  Description of Artificial Sequence: Synthetic oligonucleotide
  Sense strand starting at position 3475 of SEQ ID NO: 1881119
agagcauuauguucuuaac

SEQ ID NO: 2019619 - RNA, 19 nt, Artificial Sequence
  Description of Artificial Sequence: Synthetic oligonucleotide
  Antisense strand to SEQ ID NO: 2019618
guuaagaacauaaugcucu

SEQ ID NO: 2019620 - RNA, 19 nt, Artificial Sequence
  Description of Artificial Sequence: Synthetic oligonucleotide
  Sense strand starting at position 3497 of SEQ ID NO: 1881119
gucuguccucaggagaaac

SEQ ID NO: 2019621 - RNA, 19 nt, Artificial Sequence
  Description of Artificial Sequence: Synthetic oligonucleotide
  Antisense strand to SEQ ID NO: 2019620
guuucuccugaggacagac

SEQ ID NO: 2019622 - RNA, 19 nt, Artificial Sequence
  Description of Artificial Sequence: Synthetic oligonucleotide
  Sense strand starting at position 3911 of SEQ ID NO: 1881119
ugugcucagcuuuaaugga

SEQ ID NO: 2019623 - RNA, 19 nt, Artificial Sequence
  Description of Artificial Sequence: Synthetic oligonucleotide
  Antisense strand to SEQ ID NO: 2019622
uccauuaaagcugagcaca

SEQ ID NO: 2019624 - RNA, 19 nt, Artificial Sequence
  Description of Artificial Sequence: Synthetic oligonucleotide
  Sense strand starting at position 49 of SEQ ID NO: 1881120
agagaaucaugagacauau

SEQ ID NO: 2019625 - RNA, 19 nt, Artificial Sequence
  Description of Artificial Sequence: Synthetic oligonucleotide
  Antisense strand to SEQ ID NO: 2019624
auaugucucaugauucucu

SEQ ID NO: 2019626 - RNA, 19 nt, Artificial Sequence
  Description of Artificial Sequence: Synthetic oligonucleotide
  Sense strand starting at position 180 of SEQ ID NO: 1881120
cguaacauuccaugggauu

SEQ ID NO: 2019627 - RNA, 19 nt, Artificial Sequence
  Description of Artificial Sequence: Synthetic oligonucleotide
  Antisense strand to SEQ ID NO: 2019626
aaucccauggaauguuacg

SEQ ID NO: 2019628 - RNA, 19 nt, Artificial Sequence
  Description of Artificial Sequence: Synthetic oligonucleotide
  Sense strand starting at position 181 of SEQ ID NO: 1881120
guaacauuccaugggauua

SEQ ID NO: 2019629 - RNA, 19 nt, Artificial Sequence
  Description of Artificial Sequence: Synthetic oligonucleotide
  Antisense strand to SEQ ID NO: 2019628
uaaucccauggaauguuac

SEQ ID NO: 2019630 - RNA, 19 nt, Artificial Sequence
  Description of Artificial Sequence: Synthetic oligonucleotide
  Sense strand starting at position 763 of SEQ ID NO: 1881120
uuacgugucuuauuaacau

SEQ ID NO: 2019631 - RNA, 19 nt, Artificial Sequence
  Description of Artificial Sequence: Synthetic oligonucleotide
  Antisense strand to SEQ ID NO: 2019630
auguuaauaagacacguaa

SEQ ID NO: 2019632 - RNA, 19 nt, Artificial Sequence
  Description of Artificial Sequence: Synthetic oligonucleotide
  Sense strand starting at position 1023 of SEQ ID NO: 1881120
accugagagcaguguuaac

SEQ ID NO: 2019633 - RNA, 19 nt, Artificial Sequence
  Description of Artificial Sequence: Synthetic oligonucleotide
  Antisense strand to SEQ ID NO: 2019632
guuaacacugcucucaggu

SEQ ID NO: 2019634 - RNA, 19 nt, Artificial Sequence
  Description of Artificial Sequence: Synthetic oligonucleotide
  Sense strand starting at position 1075 of SEQ ID NO: 1881120
gccagcaugaauuagugua

SEQ ID NO: 2019635 - RNA, 19 nt, Artificial Sequence
  Description of Artificial Sequence: Synthetic oligonucleotide
  Antisense strand to SEQ ID NO: 2019634
uacacuaauucaugcuggc

SEQ ID NO: 2019636 - RNA, 19 nt, Artificial Sequence
  Description of Artificial Sequence: Synthetic oligonucleotide
  Sense strand starting at position 1077 of SEQ ID NO: 1881120
cagcaugaauuaguguaau

SEQ ID NO: 2019637 - RNA, 19 nt, Artificial Sequence
  Description of Artificial Sequence: Synthetic oligonucleotide
  Antisense strand to SEQ ID NO: 2019636
auuacacuaauucaugcug

SEQ ID NO: 2019638 - RNA, 19 nt, Artificial Sequence
  Description of Artificial Sequence: Synthetic oligonucleotide
  Sense strand starting at position 1176 of SEQ ID NO: 1881120
caguaaacugcauggacau

SEQ ID NO: 2019639 - RNA, 19 nt, Artificial Sequence
  Description of Artificial Sequence: Synthetic oligonucleotide
  Antisense strand to SEQ ID NO: 2019638
auguccaugcaguuuacug

SEQ ID NO: 2019640 - RNA, 19 nt, Artificial Sequence
  Description of Artificial Sequence: Synthetic oligonucleotide
  Sense strand starting at position 1177 of SEQ ID NO: 1881120
aguaaacugcauggacauu

SEQ ID NO: 2019641 - RNA, 19 nt, Artificial Sequence
  Description of Artificial Sequence: Synthetic oligonucleotide
  Antisense strand to SEQ ID NO: 2019640
aauguccaugcaguuuacu

SEQ ID NO: 2019642 - RNA, 19 nt, Artificial Sequence
  Description of Artificial Sequence: Synthetic oligonucleotide
  Sense strand starting at position 1208 of SEQ ID NO: 1881120
acuaauauagguuggcuau

SEQ ID NO: 2019643 - RNA, 19 nt, Artificial Sequence
  Description of Artificial Sequence: Synthetic oligonucleotide
  Antisense strand to SEQ ID NO: 2019642
auagccaaccuauauuagu

SEQ ID NO: 2019644 - RNA, 19 nt, Artificial Sequence
  Description of Artificial Sequence: Synthetic oligonucleotide
  Sense strand starting at position 1209 of SEQ ID NO: 1881120
cuaauauagguuggcuauu

SEQ ID NO: 2019645 - RNA, 19 nt, Artificial Sequence
  Description of Artificial Sequence: Synthetic oligonucleotide
  Antisense strand to SEQ ID NO: 2019644
aauagccaaccuauauuag

SEQ ID NO: 2019646 - RNA, 19 nt, Artificial Sequence
  Description of Artificial Sequence: Synthetic oligonucleotide
  Sense strand starting at position 1210 of SEQ ID NO: 1881120
uaauauagguuggcuauua

SEQ ID NO: 2019647 - RNA, 19 nt, Artificial Sequence
  Description of Artificial Sequence: Synthetic oligonucleotide
  Antisense strand to SEQ ID NO: 2019646
uaauagccaaccuauauua

SEQ ID NO: 2019648 - RNA, 19 nt, Artificial Sequence
  Description of Artificial Sequence: Synthetic oligonucleotide
  Sense strand starting at position 1211 of SEQ ID NO: 1881120
aauauagguuggcuauuaa

SEQ ID NO: 2019649 - RNA, 19 nt, Artificial Sequence
  Description of Artificial Sequence: Synthetic oligonucleotide
  Antisense strand to SEQ ID NO: 2019648
uuaauagccaaccuauauu

SEQ ID NO: 2019650 - RNA, 19 nt, Artificial Sequence
  Description of Artificial Sequence: Synthetic oligonucleotide
  Sense strand starting at position 1252 of SEQ ID NO: 1881120
aauaaaugguuuguuggua

SEQ ID NO: 2019651 - RNA, 19 nt, Artificial Sequence
  Description of Artificial Sequence: Synthetic oligonucleotide
  Antisense strand to SEQ ID NO: 2019650
uaccaacaaaccauuuauu

SEQ ID NO: 2019652 - RNA, 19 nt, Artificial Sequence
  Description of Artificial Sequence: Synthetic oligonucleotide
  Sense strand starting at position 1253 of SEQ ID NO: 1881120
auaaaugguuuguugguau

SEQ ID NO: 2019653 - RNA, 19 nt, Artificial Sequence
  Description of Artificial Sequence: Synthetic oligonucleotide
  Antisense strand to SEQ ID NO: 2019652
auaccaacaaaccauuuau

SEQ ID NO: 2019654 - RNA, 19 nt, Artificial Sequence
  Description of Artificial Sequence: Synthetic oligonucleotide
  Sense strand starting at position 1265 of SEQ ID NO: 1881120
uugguauuaccuuaugaug

SEQ ID NO: 2019655 - RNA, 19 nt, Artificial Sequence
  Description of Artificial Sequence: Synthetic oligonucleotide
  Antisense strand to SEQ ID NO: 2019654
caucauaagguaauaccaa

SEQ ID NO: 2019656 - RNA, 19 nt, Artificial Sequence
  Description of Artificial Sequence: Synthetic oligonucleotide
  Sense strand starting at position 2060 of SEQ ID NO: 1881120
uugaucucuccuggaucau

SEQ ID NO: 2019657 - RNA, 19 nt, Artificial Sequence
  Description of Artificial Sequence: Synthetic oligonucleotide
  Antisense strand to SEQ ID NO: 2019656
augauccaggagagaucaa

SEQ ID NO: 2019658 - RNA, 19 nt, Artificial Sequence
  Description of Artificial Sequence: Synthetic oligonucleotide
  Sense strand starting at position 2061 of SEQ ID NO: 1881120
ugaucucuccuggaucauu

SEQ ID NO: 2019659 - RNA, 19 nt, Artificial Sequence
  Description of Artificial Sequence: Synthetic oligonucleotide
  Antisense strand to SEQ ID NO: 2019658
aaugauccaggagagauca

SEQ ID NO: 2019660 - RNA, 19 nt, Artificial Sequence
  Description of Artificial Sequence: Synthetic oligonucleotide
  Sense strand starting at position 2220 of SEQ ID NO: 1881120
gcuaauuugucagccuugu

SEQ ID NO: 2019661 - RNA, 19 nt, Artificial Sequence
  Description of Artificial Sequence: Synthetic oligonucleotide
  Antisense strand to SEQ ID NO: 2019660
acaaggcugacaaauuagc

SEQ ID NO: 2019662 - RNA, 19 nt, Artificial Sequence
  Description of Artificial Sequence: Synthetic oligonucleotide
  Sense strand starting at position 2224 of SEQ ID NO: 1881120
auuugucagccuugugagu

SEQ ID NO: 2019663 - RNA, 19 nt, Artificial Sequence
  Description of Artificial Sequence: Synthetic oligonucleotide
  Antisense strand to SEQ ID NO: 2019662
acucacaaggcugacaaau

SEQ ID NO: 2019664 - RNA, 19 nt, Artificial Sequence
  Description of Artificial Sequence: Synthetic oligonucleotide
  Sense strand starting at position 2297 of SEQ ID NO: 1881120
ugacaucuugacugcaaau

SEQ ID NO: 2019665 - RNA, 19 nt, Artificial Sequence
  Description of Artificial Sequence: Synthetic oligonucleotide
  Antisense strand to SEQ ID NO: 2019664
auuugcagucaagauguca

SEQ ID NO: 2019666 - RNA, 19 nt, Artificial Sequence
  Description of Artificial Sequence: Synthetic oligonucleotide
  Sense strand starting at position 2374 of SEQ ID NO: 1881120
caggaauugugagauaaua

SEQ ID NO: 2019667 - RNA, 19 nt, Artificial Sequence
  Description of Artificial Sequence: Synthetic oligonucleotide
  Antisense strand to SEQ ID NO: 2019666
uauuaucucacaauuccug

SEQ ID NO: 2019668 - RNA, 19 nt, Artificial Sequence
  Description of Artificial Sequence: Synthetic oligonucleotide
  Sense strand starting at position 2893 of SEQ ID NO: 1881120
uguagcuguggauaacuaa

SEQ ID NO: 2019669 - RNA, 19 nt, Artificial Sequence
  Description of Artificial Sequence: Synthetic oligonucleotide
  Antisense strand to SEQ ID NO: 2019668
uuaguuauccacagcuaca

SEQ ID NO: 2019670 - RNA, 19 nt, Artificial Sequence
  Description of Artificial Sequence: Synthetic oligonucleotide
  Sense strand starting at position 2968 of SEQ ID NO: 1881120
uaagaaagucucggaagca

SEQ ID NO: 2019671 - RNA, 19 nt, Artificial Sequence
  Description of Artificial Sequence: Synthetic oligonucleotide
  Antisense strand to SEQ ID NO: 2019670
ugcuuccgagacuuucuua

SEQ ID NO: 2019672 - RNA, 19 nt, Artificial Sequence
  Description of Artificial Sequence: Synthetic oligonucleotide
  Sense strand starting at position 3038 of SEQ ID NO: 1881120
cugagucacccuuaaagug

SEQ ID NO: 2019673 - RNA, 19 nt, Artificial Sequence
  Description of Artificial Sequence: Synthetic oligonucleotide
  Antisense strand to SEQ ID NO: 2019672
cacuuuaagggugacucag

SEQ ID NO: 2019674 - RNA, 19 nt, Artificial Sequence
  Description of Artificial Sequence: Synthetic oligonucleotide
  Sense strand starting at position 3083 of SEQ ID NO: 1881120
agggaacacucucuguaaa

SEQ ID NO: 2019675 - RNA, 19 nt, Artificial Sequence
  Description of Artificial Sequence: Synthetic oligonucleotide
  Antisense strand to SEQ ID NO: 2019674
uuuacagagaguguucccu

SEQ ID NO: 2019676 - RNA, 19 nt, Artificial Sequence
  Description of Artificial Sequence: Synthetic oligonucleotide
  Sense strand starting at position 3084 of SEQ ID NO: 1881120
gggaacacucucuguaaag

SEQ ID NO: 2019677 - RNA, 19 nt, Artificial Sequence
  Description of Artificial Sequence: Synthetic oligonucleotide
  Antisense strand to SEQ ID NO: 2019676
cuuuacagagaguguuccc

SEQ ID NO: 2019678 - RNA, 19 nt, Artificial Sequence
  Description of Artificial Sequence: Synthetic oligonucleotide
  Sense strand starting at position 3207 of SEQ ID NO: 1881120
agaccuaauuuagguaaca

SEQ ID NO: 2019679 - RNA, 19 nt, Artificial Sequence
  Description of Artificial Sequence: Synthetic oligonucleotide
  Antisense strand to SEQ ID NO: 2019678
uguuaccuaaauuaggucu

SEQ ID NO: 2019680 - RNA, 19 nt, Artificial Sequence
  Description of Artificial Sequence: Synthetic oligonucleotide
  Sense strand starting at position 3478 of SEQ ID NO: 1881120
cuggucaauguuuaacaau

SEQ ID NO: 2019681 - RNA, 19 nt, Artificial Sequence
  Description of Artificial Sequence: Synthetic oligonucleotide
  Antisense strand to SEQ ID NO: 2019680
auuguuaaacauugaccag

SEQ ID NO: 2019682 - RNA, 19 nt, Artificial Sequence
  Description of Artificial Sequence: Synthetic oligonucleotide
  Sense strand starting at position 3492 of SEQ ID NO: 1881120
acaaucagcucucugcaga

SEQ ID NO: 2019683 - RNA, 19 nt, Artificial Sequence
  Description of Artificial Sequence: Synthetic oligonucleotide
  Antisense strand to SEQ ID NO: 2019682
ucugcagagagcugauugu

SEQ ID NO: 2019684 - RNA, 19 nt, Artificial Sequence
  Description of Artificial Sequence: Synthetic oligonucleotide
  Sense strand starting at position 3495 of SEQ ID NO: 1881120
aucagcucucugcagagaa

SEQ ID NO: 2019685 - RNA, 19 nt, Artificial Sequence
  Description of Artificial Sequence: Synthetic oligonucleotide
  Antisense strand to SEQ ID NO: 2019684
uucucugcagagagcugau

SEQ ID NO: 2019686 - RNA, 19 nt, Artificial Sequence
  Description of Artificial Sequence: Synthetic oligonucleotide
  Sense strand starting at position 3573 of SEQ ID NO: 1881120
agcauugcaucccugaaag

SEQ ID NO: 2019687 - RNA, 19 nt, Artificial Sequence
  Description of Artificial Sequence: Synthetic oligonucleotide
  Antisense strand to SEQ ID NO: 2019686
cuuucagggaugcaaugcu

SEQ ID NO: 2019688 - RNA, 19 nt, Artificial Sequence
  Description of Artificial Sequence: Synthetic oligonucleotide
  Sense strand starting at position 3603 of SEQ ID NO: 1881120
aaagauaugcacgaucagu

SEQ ID NO: 2019689 - RNA, 19 nt, Artificial Sequence
  Description of Artificial Sequence: Synthetic oligonucleotide
  Antisense strand to SEQ ID NO: 2019688
acugaucgugcauaucuuu

SEQ ID NO: 2019690 - RNA, 19 nt, Artificial Sequence
  Description of Artificial Sequence: Synthetic oligonucleotide
  Sense strand starting at position 3680 of SEQ ID NO: 1881120
cacuguccucgugauuacu

SEQ ID NO: 2019691 - RNA, 19 nt, Artificial Sequence
  Description of Artificial Sequence: Synthetic oligonucleotide
  Antisense strand to SEQ ID NO: 2019690
aguaaucacgaggacagug

SEQ ID NO: 2019692 - RNA, 19 nt, Artificial Sequence
  Description of Artificial Sequence: Synthetic oligonucleotide
  Sense strand starting at position 3688 of SEQ ID NO: 1881120
ucgugauuacuuugaaaua

SEQ ID NO: 2019693 - RNA, 19 nt, Artificial Sequence
  Description of Artificial Sequence: Synthetic oligonucleotide
  Antisense strand to SEQ ID NO: 2019692
uauuucaaaguaaucacga

SEQ ID NO: 2019694 - RNA, 19 nt, Artificial Sequence
  Description of Artificial Sequence: Synthetic oligonucleotide
  Sense strand starting at position 3699 of SEQ ID NO: 1881120
uugaaauaucccuggaacc

SEQ ID NO: 2019695 - RNA, 19 nt, Artificial Sequence
  Description of Artificial Sequence: Synthetic oligonucleotide
  Antisense strand to SEQ ID NO: 2019694
gguuccagggauauuucaa

SEQ ID NO: 2019696 - RNA, 19 nt, Artificial Sequence
  Description of Artificial Sequence: Synthetic oligonucleotide
  Sense strand starting at position 3700 of SEQ ID NO: 1881120
ugaaauaucccuggaaccu

SEQ ID NO: 2019697 - RNA, 19 nt, Artificial Sequence
  Description of Artificial Sequence: Synthetic oligonucleotide
  Antisense strand to SEQ ID NO: 2019696
agguuccagggauauuuca

SEQ ID NO: 2019698 - RNA, 19 nt, Artificial Sequence
  Description of Artificial Sequence: Synthetic oligonucleotide
  Sense strand starting at position 3925 of SEQ ID NO: 1881120
acgggaaggucaaaguugu

SEQ ID NO: 2019699 - RNA, 19 nt, Artificial Sequence
  Description of Artificial Sequence: Synthetic oligonucleotide
  Antisense strand to SEQ ID NO: 2019698
acaacuuugaccuucccgu

SEQ ID NO: 2019700 - RNA, 19 nt, Artificial Sequence
  Description of Artificial Sequence: Synthetic oligonucleotide
  Sense strand starting at position 3931 of SEQ ID NO: 1881120
aggucaaaguuguuggaua

SEQ ID NO: 2019701 - RNA, 19 nt, Artificial Sequence
  Description of Artificial Sequence: Synthetic oligonucleotide
  Antisense strand to SEQ ID NO: 2019700
uauccaacaacuuugaccu

SEQ ID NO: 2019702 - RNA, 19 nt, Artificial Sequence
  Description of Artificial Sequence: Synthetic oligonucleotide
  Sense strand starting at position 3933 of SEQ ID NO: 1881120
gucaaaguuguuggauaua

SEQ ID NO: 2019703 - RNA, 19 nt, Artificial Sequence
  Description of Artificial Sequence: Synthetic oligonucleotide
  Antisense strand to SEQ ID NO: 2019702
uauauccaacaacuuugac

SEQ ID NO: 2019704 - RNA, 19 nt, Artificial Sequence
  Description of Artificial Sequence: Synthetic oligonucleotide
  Sense strand starting at position 56 of SEQ ID NO: 1881121
uuguacucuuaccuguaaa

SEQ ID NO: 2019705 - RNA, 19 nt, Artificial Sequence
  Description of Artificial Sequence: Synthetic oligonucleotide
  Antisense strand to SEQ ID NO: 2019704
uuuacagguaagaguacaa

SEQ ID NO: 2019706 - RNA, 19 nt, Artificial Sequence
  Description of Artificial Sequence: Synthetic oligonucleotide
  Sense strand starting at position 609 of SEQ ID NO: 1881121
ugugguauugcuuaaggau

SEQ ID NO: 2019707 - RNA, 19 nt, Artificial Sequence
  Description of Artificial Sequence: Synthetic oligonucleotide
  Antisense strand to SEQ ID NO: 2019706
auccuuaagcaauaccaca

SEQ ID NO: 2019708 - RNA, 19 nt, Artificial Sequence
  Description of Artificial Sequence: Synthetic oligonucleotide
  Sense strand starting at position 615 of SEQ ID NO: 1881121
auugcuuaaggauaaagca

SEQ ID NO: 2019709 - RNA, 19 nt, Artificial Sequence
  Description of Artificial Sequence: Synthetic oligonucleotide
  Antisense strand to SEQ ID NO: 2019708
ugcuuuauccuuaagcaau

SEQ ID NO: 2019710 - RNA, 19 nt, Artificial Sequence
  Description of Artificial Sequence: Synthetic oligonucleotide
  Sense strand starting at position 690 of SEQ ID NO: 1881121
guaccauuacaauggaagu

SEQ ID NO: 2019711 - RNA, 19 nt, Artificial Sequence
  Description of Artificial Sequence: Synthetic oligonucleotide
  Antisense strand to SEQ ID NO: 2019710
acuuccauuguaaugguac

SEQ ID NO: 2019712 - RNA, 19 nt, Artificial Sequence
  Description of Artificial Sequence: Synthetic oligonucleotide
  Sense strand starting at position 975 of SEQ ID NO: 1881121
cuaauaccuguggaauugu

SEQ ID NO: 2019713 - RNA, 19 nt, Artificial Sequence
  Description of Artificial Sequence: Synthetic oligonucleotide
  Antisense strand to SEQ ID NO: 2019712
acaauuccacagguauuag

SEQ ID NO: 2019714 - RNA, 19 nt, Artificial Sequence
  Description of Artificial Sequence: Synthetic oligonucleotide
  Sense strand starting at position 983 of SEQ ID NO: 1881121
uguggaauuguuuggaagu

SEQ ID NO: 2019715 - RNA, 19 nt, Artificial Sequence
  Description of Artificial Sequence: Synthetic oligonucleotide
  Antisense strand to SEQ ID NO: 2019714
acuuccaaacaauuccaca

SEQ ID NO: 2019716 - RNA, 19 nt, Artificial Sequence
  Description of Artificial Sequence: Synthetic oligonucleotide
  Sense strand starting at position 1021 of SEQ ID NO: 1881121
acauacuuugcauauguca

SEQ ID NO: 2019717 - RNA, 19 nt, Artificial Sequence
  Description of Artificial Sequence: Synthetic oligonucleotide
  Antisense strand to SEQ ID NO: 2019716
ugacauaugcaaaguaugu

SEQ ID NO: 2019718 - RNA, 19 nt, Artificial Sequence
  Description of Artificial Sequence: Synthetic oligonucleotide
  Sense strand starting at position 1114 of SEQ ID NO: 1881121
uccaguucugagcauauca

SEQ ID NO: 2019719 - RNA, 19 nt, Artificial Sequence
  Description of Artificial Sequence: Synthetic oligonucleotide
  Antisense strand to SEQ ID NO: 2019718
ugauaugcucagaacugga

SEQ ID NO: 2019720 - RNA, 19 nt, Artificial Sequence
  Description of Artificial Sequence: Synthetic oligonucleotide
  Sense strand starting at position 1145 of SEQ ID NO: 1881121
cuggaaguguucuugagga

SEQ ID NO: 2019721 - RNA, 19 nt, Artificial Sequence
  Description of Artificial Sequence: Synthetic oligonucleotide
  Antisense strand to SEQ ID NO: 2019720
uccucaagaacacuuccag

SEQ ID NO: 2019722 - RNA, 19 nt, Artificial Sequence
  Description of Artificial Sequence: Synthetic oligonucleotide
  Sense strand starting at position 1160 of SEQ ID NO: 1881121
aggacacugugcucuggaa

SEQ ID NO: 2019723 - RNA, 19 nt, Artificial Sequence
  Description of Artificial Sequence: Synthetic oligonucleotide
  Antisense strand to SEQ ID NO: 2019722
uuccagagcacaguguccu

SEQ ID NO: 2019724 - RNA, 19 nt, Artificial Sequence
  Description of Artificial Sequence: Synthetic oligonucleotide
  Sense strand starting at position 1178 of SEQ ID NO: 1881121
aaagacuguccagguuaaa

SEQ ID NO: 2019725 - RNA, 19 nt, Artificial Sequence
  Description of Artificial Sequence: Synthetic oligonucleotide
  Antisense strand to SEQ ID NO: 2019724
uuuaaccuggacagucuuu

SEQ ID NO: 2019726 - RNA, 19 nt, Artificial Sequence
  Description of Artificial Sequence: Synthetic oligonucleotide
  Sense strand starting at position 1212 of SEQ ID NO: 1881121
cucuuuagcgaucaugaac

SEQ ID NO: 2019727 - RNA, 19 nt, Artificial Sequence
  Description of Artificial Sequence: Synthetic oligonucleotide
  Antisense strand to SEQ ID NO: 2019726
guucaugaucgcuaaagag

SEQ ID NO: 2019728 - RNA, 19 nt, Artificial Sequence
  Description of Artificial Sequence: Synthetic oligonucleotide
  Sense strand starting at position 1218 of SEQ ID NO: 1881121
agcgaucaugaacaaguua

SEQ ID NO: 2019729 - RNA, 19 nt, Artificial Sequence
  Description of Artificial Sequence: Synthetic oligonucleotide
  Antisense strand to SEQ ID NO: 2019728
uaacuuguucaugaucgcu

SEQ ID NO: 2019730 - RNA, 19 nt, Artificial Sequence
  Description of Artificial Sequence: Synthetic oligonucleotide
  Sense strand starting at position 1279 of SEQ ID NO: 1881121
ugaugaugauaugcauauu

SEQ ID NO: 2019731 - RNA, 19 nt, Artificial Sequence
  Description of Artificial Sequence: Synthetic oligonucleotide
  Antisense strand to SEQ ID NO: 2019730
aauaugcauaucaucauca

SEQ ID NO: 2019732 - RNA, 19 nt, Artificial Sequence
  Description of Artificial Sequence: Synthetic oligonucleotide
  Sense strand starting at position 1612 of SEQ ID NO: 1881121
ucaauucuggcucagaauu

SEQ ID NO: 2019733 - RNA, 19 nt, Artificial Sequence
  Description of Artificial Sequence: Synthetic oligonucleotide
  Antisense strand to SEQ ID NO: 2019732
aauucugagccagaauuga

SEQ ID NO: 2019734 - RNA, 19 nt, Artificial Sequence
  Description of Artificial Sequence: Synthetic oligonucleotide
  Sense strand starting at position 1894 of SEQ ID NO: 1881121
agagaauccuaugccuuaa

SEQ ID NO: 2019735 - RNA, 19 nt, Artificial Sequence
  Description of Artificial Sequence: Synthetic oligonucleotide
  Antisense strand to SEQ ID NO: 2019734
uuaaggcauaggauucucu

SEQ ID NO: 2019736 - RNA, 19 nt, Artificial Sequence
  Description of Artificial Sequence: Synthetic oligonucleotide
  Sense strand starting at position 2065 of SEQ ID NO: 1881121
ugcagagugauguaaguca

SEQ ID NO: 2019737 - RNA, 19 nt, Artificial Sequence
  Description of Artificial Sequence: Synthetic oligonucleotide
  Antisense strand to SEQ ID NO: 2019736
ugacuuacaucacucugca

SEQ ID NO: 2019738 - RNA, 19 nt, Artificial Sequence
  Description of Artificial Sequence: Synthetic oligonucleotide
  Sense strand starting at position 2070 of SEQ ID NO: 1881121
agugauguaagucauggga

SEQ ID NO: 2019739 - RNA, 19 nt, Artificial Sequence
  Description of Artificial Sequence: Synthetic oligonucleotide
  Antisense strand to SEQ ID NO: 2019738
ucccaugacuuacaucacu

SEQ ID NO: 2019740 - RNA, 19 nt, Artificial Sequence
  Description of Artificial Sequence: Synthetic oligonucleotide
  Sense strand starting at position 2073 of SEQ ID NO: 1881121
gauguaagucaugggaaag

SEQ ID NO: 2019741 - RNA, 19 nt, Artificial Sequence
  Description of Artificial Sequence: Synthetic oligonucleotide
  Antisense strand to SEQ ID NO: 2019740
cuuucccaugacuuacauc

SEQ ID NO: 2019742 - RNA, 19 nt, Artificial Sequence
  Description of Artificial Sequence: Synthetic oligonucleotide
  Sense strand starting at position 2153 of SEQ ID NO: 1881121
acaauuagguaagcugaau

SEQ ID NO: 2019743 - RNA, 19 nt, Artificial Sequence
  Description of Artificial Sequence: Synthetic oligonucleotide
  Antisense strand to SEQ ID NO: 2019742
auucagcuuaccuaauugu

SEQ ID NO: 2019744 - RNA, 19 nt, Artificial Sequence
  Description of Artificial Sequence: Synthetic oligonucleotide
  Sense strand starting at position 2206 of SEQ ID NO: 1881121
gcaccaugccuuuagguaa

SEQ ID NO: 2019745 - RNA, 19 nt, Artificial Sequence
  Description of Artificial Sequence: Synthetic oligonucleotide
  Antisense strand to SEQ ID NO: 2019744
uuaccuaaaggcauggugc

SEQ ID NO: 2019746 - RNA, 19 nt, Artificial Sequence
  Description of Artificial Sequence: Synthetic oligonucleotide
  Sense strand starting at position 2284 of SEQ ID NO: 1881121
aagugcuaucaaggagaag

SEQ ID NO: 2019747 - RNA, 19 nt, Artificial Sequence
  Description of Artificial Sequence: Synthetic oligonucleotide
  Antisense strand to SEQ ID NO: 2019746
cuucuccuugauagcacuu

SEQ ID NO: 2019748 - RNA, 19 nt, Artificial Sequence
  Description of Artificial Sequence: Synthetic oligonucleotide
  Sense strand starting at position 2382 of SEQ ID NO: 1881121
aguugcuuaaccugggaau

SEQ ID NO: 2019749 - RNA, 19 nt, Artificial Sequence
  Description of Artificial Sequence: Synthetic oligonucleotide
  Antisense strand to SEQ ID NO: 2019748
auucccagguuaagcaacu

SEQ ID NO: 2019750 - RNA, 19 nt, Artificial Sequence
  Description of Artificial Sequence: Synthetic oligonucleotide
  Sense strand starting at position 2383 of SEQ ID NO: 1881121
guugcuuaaccugggaauc

SEQ ID NO: 2019751 - RNA, 19 nt, Artificial Sequence
  Description of Artificial Sequence: Synthetic oligonucleotide
  Antisense strand to SEQ ID NO: 2019750
gauucccagguuaagcaac

SEQ ID NO: 2019752 - RNA, 19 nt, Artificial Sequence
  Description of Artificial Sequence: Synthetic oligonucleotide
  Sense strand starting at position 2384 of SEQ ID NO: 1881121
uugcuuaaccugggaauca

SEQ ID NO: 2019753 - RNA, 19 nt, Artificial Sequence
  Description of Artificial Sequence: Synthetic oligonucleotide
  Antisense strand to SEQ ID NO: 2019752
ugauucccagguuaagcaa

SEQ ID NO: 2019754 - RNA, 19 nt, Artificial Sequence
  Description of Artificial Sequence: Synthetic oligonucleotide
  Sense strand starting at position 2438 of SEQ ID NO: 1881121
acucaugggagucgcauaa

SEQ ID NO: 2019755 - RNA, 19 nt, Artificial Sequence
  Description of Artificial Sequence: Synthetic oligonucleotide
  Antisense strand to SEQ ID NO: 2019754
uuaugcgacucccaugagu

SEQ ID NO: 2019756 - RNA, 19 nt, Artificial Sequence
  Description of Artificial Sequence: Synthetic oligonucleotide
  Sense strand starting at position 2442 of SEQ ID NO: 1881121
augggagucgcauaaagau

SEQ ID NO: 2019757 - RNA, 19 nt, Artificial Sequence
  Description of Artificial Sequence: Synthetic oligonucleotide
  Antisense strand to SEQ ID NO: 2019756
aucuuuaugcgacucccau

SEQ ID NO: 2019758 - RNA, 19 nt, Artificial Sequence
  Description of Artificial Sequence: Synthetic oligonucleotide
  Sense strand starting at position 2448 of SEQ ID NO: 1881121
gucgcauaaagaugaaaug

SEQ ID NO: 2019759 - RNA, 19 nt, Artificial Sequence
  Description of Artificial Sequence: Synthetic oligonucleotide
  Antisense strand to SEQ ID NO: 2019758
cauuucaucuuuaugcgac

SEQ ID NO: 2019760 - RNA, 19 nt, Artificial Sequence
  Description of Artificial Sequence: Synthetic oligonucleotide
  Sense strand starting at position 2470 of SEQ ID NO: 1881121
gucuguaugaaauguagac

SEQ ID NO: 2019761 - RNA, 19 nt, Artificial Sequence
  Description of Artificial Sequence: Synthetic oligonucleotide
  Antisense strand to SEQ ID NO: 2019760
gucuacauuucauacagac

SEQ ID NO: 2019762 - RNA, 19 nt, Artificial Sequence
  Description of Artificial Sequence: Synthetic oligonucleotide
  Sense strand starting at position 2474 of SEQ ID NO: 1881121
guaugaaauguagacaguu

SEQ ID NO: 2019763 - RNA, 19 nt, Artificial Sequence
  Description of Artificial Sequence: Synthetic oligonucleotide
  Antisense strand to SEQ ID NO: 2019762
aacugucuacauuucauac

SEQ ID NO: 2019764 - RNA, 19 nt, Artificial Sequence
  Description of Artificial Sequence: Synthetic oligonucleotide
  Sense strand starting at position 2482 of SEQ ID NO: 1881121
uguagacaguucuuuauua

SEQ ID NO: 2019765 - RNA, 19 nt, Artificial Sequence
  Description of Artificial Sequence: Synthetic oligonucleotide
  Antisense strand to SEQ ID NO: 2019764
uaauaaagaacugucuaca

SEQ ID NO: 2019766 - RNA, 19 nt, Artificial Sequence
  Description of Artificial Sequence: Synthetic oligonucleotide
  Sense strand starting at position 2483 of SEQ ID NO: 1881121
guagacaguucuuuauuac

SEQ ID NO: 2019767 - RNA, 19 nt, Artificial Sequence
  Description of Artificial Sequence: Synthetic oligonucleotide
  Antisense strand to SEQ ID NO: 2019766
guaauaaagaacugucuac

SEQ ID NO: 2019768 - RNA, 19 nt, Artificial Sequence
  Description of Artificial Sequence: Synthetic oligonucleotide
  Sense strand starting at position 2599 of SEQ ID NO: 1881121
acagacgucgccuagaauu

SEQ ID NO: 2019769 - RNA, 19 nt, Artificial Sequence
  Description of Artificial Sequence: Synthetic oligonucleotide
  Antisense strand to SEQ ID NO: 2019768
aauucuaggcgacgucugu

SEQ ID NO: 2019770 - RNA, 19 nt, Artificial Sequence
  Description of Artificial Sequence: Synthetic oligonucleotide
  Sense strand starting at position 2689 of SEQ ID NO: 1881121
uccaaacugguuuauguaa

SEQ ID NO: 2019771 - RNA, 19 nt, Artificial Sequence
  Description of Artificial Sequence: Synthetic oligonucleotide
  Antisense strand to SEQ ID NO: 2019770
uuacauaaaccaguuugga

SEQ ID NO: 2019772 - RNA, 19 nt, Artificial Sequence
  Description of Artificial Sequence: Synthetic oligonucleotide
  Sense strand starting at position 2840 of SEQ ID NO: 1881121
caggucuggccugaucaaa

SEQ ID NO: 2019773 - RNA, 19 nt, Artificial Sequence
  Description of Artificial Sequence: Synthetic oligonucleotide
  Antisense strand to SEQ ID NO: 2019772
uuugaucaggccagaccug

SEQ ID NO: 2019774 - RNA, 19 nt, Artificial Sequence
  Description of Artificial Sequence: Synthetic oligonucleotide
  Sense strand starting at position 2871 of SEQ ID NO: 1881121
gaguuccaagagugauauu

SEQ ID NO: 2019775 - RNA, 19 nt, Artificial Sequence
  Description of Artificial Sequence: Synthetic oligonucleotide
  Antisense strand to SEQ ID NO: 2019774
aauaucacucuuggaacuc

SEQ ID NO: 2019776 - RNA, 19 nt, Artificial Sequence
  Description of Artificial Sequence: Synthetic oligonucleotide
  Sense strand starting at position 3145 of SEQ ID NO: 1881121
ccaagaaucuggcacauuu

SEQ ID NO: 2019777 - RNA, 19 nt, Artificial Sequence
  Description of Artificial Sequence: Synthetic oligonucleotide
  Antisense strand to SEQ ID NO: 2019776
aaaugugccagauucuugg

SEQ ID NO: 2019778 - RNA, 19 nt, Artificial Sequence
  Description of Artificial Sequence: Synthetic oligonucleotide
  Sense strand starting at position 3596 of SEQ ID NO: 1881121
agcuuucuucuugacauga

SEQ ID NO: 2019779 - RNA, 19 nt, Artificial Sequence
  Description of Artificial Sequence: Synthetic oligonucleotide
  Antisense strand to SEQ ID NO: 2019778
ucaugucaagaagaaagcu

SEQ ID NO: 2019780 - RNA, 19 nt, Artificial Sequence
  Description of Artificial Sequence: Synthetic oligonucleotide
  Sense strand starting at position 3788 of SEQ ID NO: 1881121
uugguuauaucaucaguaa

SEQ ID NO: 2019781 - RNA, 19 nt, Artificial Sequence
  Description of Artificial Sequence: Synthetic oligonucleotide
  Antisense strand to SEQ ID NO: 2019780
uuacugaugauauaaccaa

SEQ ID NO: 2019782 - RNA, 19 nt, Artificial Sequence
  Description of Artificial Sequence: Synthetic oligonucleotide
  Sense strand starting at position 3789 of SEQ ID NO: 1881121
ugguuauaucaucaguaaa

SEQ ID NO: 2019783 - RNA, 19 nt, Artificial Sequence
  Description of Artificial Sequence: Synthetic oligonucleotide
  Antisense strand to SEQ ID NO: 2019782
uuuacugaugauauaacca

SEQ ID NO: 2019784 - RNA, 19 nt, Artificial Sequence
  Description of Artificial Sequence: Synthetic oligonucleotide
  Sense strand starting at position 114 of SEQ ID NO: 1881122
ccgccuugccugccugaaa

SEQ ID NO: 2019785 - RNA, 19 nt, Artificial Sequence
  Description of Artificial Sequence: Synthetic oligonucleotide
  Antisense strand to SEQ ID NO: 2019784
uuucaggcaggcaaggcgg

SEQ ID NO: 2019786 - RNA, 19 nt, Artificial Sequence
  Description of Artificial Sequence: Synthetic oligonucleotide
  Sense strand starting at position 125 of SEQ ID NO: 1881122
gccugaaagccucagaggu

SEQ ID NO: 2019787 - RNA, 19 nt, Artificial Sequence
  Description of Artificial Sequence: Synthetic oligonucleotide
  Antisense strand to SEQ ID NO: 2019786
accucugaggcuuucaggc

SEQ ID NO: 2019788 - RNA, 19 nt, Artificial Sequence
  Description of Artificial Sequence: Synthetic oligonucleotide
  Sense strand starting at position 135 of SEQ ID NO: 1881122
cucagaggugguggagauu

SEQ ID NO: 2019789 - RNA, 19 nt, Artificial Sequence
  Description of Artificial Sequence: Synthetic oligonucleotide
  Antisense strand to SEQ ID NO: 2019788
aaucuccaccaccucugag

SEQ ID NO: 2019790 - RNA, 19 nt, Artificial Sequence
  Description of Artificial Sequence: Synthetic oligonucleotide
  Sense strand starting at position 144 of SEQ ID NO: 1881122
gguggagauucuucagcuu

SEQ ID NO: 2019791 - RNA, 19 nt, Artificial Sequence
  Description of Artificial Sequence: Synthetic oligonucleotide
  Antisense strand to SEQ ID NO: 2019790
aagcugaagaaucuccacc

SEQ ID NO: 2019792 - RNA, 19 nt, Artificial Sequence
  Description of Artificial Sequence: Synthetic oligonucleotide
  Sense strand starting at position 174 of SEQ ID NO: 1881122
acucaagacuuaguagauu

SEQ ID NO: 2019793 - RNA, 19 nt, Artificial Sequence
  Description of Artificial Sequence: Synthetic oligonucleotide
  Antisense strand to SEQ ID NO: 2019792
aaucuacuaagucuugagu

SEQ ID NO: 2019794 - RNA, 19 nt, Artificial Sequence
  Description of Artificial Sequence: Synthetic oligonucleotide
  Sense strand starting at position 238 of SEQ ID NO: 1881122
gggaguuaaguuuaggucu

SEQ ID NO: 2019795 - RNA, 19 nt, Artificial Sequence
  Description of Artificial Sequence: Synthetic oligonucleotide
  Antisense strand to SEQ ID NO: 2019794
agaccuaaacuuaacuccc

SEQ ID NO: 2019796 - RNA, 19 nt, Artificial Sequence
  Description of Artificial Sequence: Synthetic oligonucleotide
  Sense strand starting at position 391 of SEQ ID NO: 1881122
cuugaauuagcuuacugga

SEQ ID NO: 2019797 - RNA, 19 nt, Artificial Sequence
  Description of Artificial Sequence: Synthetic oligonucleotide
  Antisense strand to SEQ ID NO: 2019796
uccaguaagcuaauucaag

SEQ ID NO: 2019798 - RNA, 19 nt, Artificial Sequence
  Description of Artificial Sequence: Synthetic oligonucleotide
  Sense strand starting at position 393 of SEQ ID NO: 1881122
ugaauuagcuuacuggaaa

SEQ ID NO: 2019799 - RNA, 19 nt, Artificial Sequence
  Description of Artificial Sequence: Synthetic oligonucleotide
  Antisense strand to SEQ ID NO: 2019798
uuuccaguaagcuaauuca

SEQ ID NO: 2019800 - RNA, 19 nt, Artificial Sequence
  Description of Artificial Sequence: Synthetic oligonucleotide
  Sense strand starting at position 1415 of SEQ ID NO: 1881122
acucacauguuaucuguaa

SEQ ID NO: 2019801 - RNA, 19 nt, Artificial Sequence
  Description of Artificial Sequence: Synthetic oligonucleotide
  Antisense strand to SEQ ID NO: 2019800
uuacagauaacaugugagu

SEQ ID NO: 2019802 - RNA, 19 nt, Artificial Sequence
  Description of Artificial Sequence: Synthetic oligonucleotide
  Sense strand starting at position 1419 of SEQ ID NO: 1881122
acauguuaucuguaaggua

SEQ ID NO: 2019803 - RNA, 19 nt, Artificial Sequence
  Description of Artificial Sequence: Synthetic oligonucleotide
  Antisense strand to SEQ ID NO: 2019802
uaccuuacagauaacaugu

SEQ ID NO: 2019804 - RNA, 19 nt, Artificial Sequence
  Description of Artificial Sequence: Synthetic oligonucleotide
  Sense strand starting at position 1490 of SEQ ID NO: 1881122
gauuaauacuguguguuug

SEQ ID NO: 2019805 - RNA, 19 nt, Artificial Sequence
  Description of Artificial Sequence: Synthetic oligonucleotide
  Antisense strand to SEQ ID NO: 2019804
caaacacacaguauuaauc

SEQ ID NO: 2019806 - RNA, 19 nt, Artificial Sequence
  Description of Artificial Sequence: Synthetic oligonucleotide
  Sense strand starting at position 1522 of SEQ ID NO: 1881122
ugcagagacccuugugaag

SEQ ID NO: 2019807 - RNA, 19 nt, Artificial Sequence
  Description of Artificial Sequence: Synthetic oligonucleotide
  Antisense strand to SEQ ID NO: 2019806
cuucacaagggucucugca

SEQ ID NO: 2019808 - RNA, 19 nt, Artificial Sequence
  Description of Artificial Sequence: Synthetic oligonucleotide
  Sense strand starting at position 2138 of SEQ ID NO: 1881122
auaauugaaugaugagaag

SEQ ID NO: 2019809 - RNA, 19 nt, Artificial Sequence
  Description of Artificial Sequence: Synthetic oligonucleotide
  Antisense strand to SEQ ID NO: 2019808
cuucucaucauucaauuau

SEQ ID NO: 2019810 - RNA, 19 nt, Artificial Sequence
  Description of Artificial Sequence: Synthetic oligonucleotide
  Sense strand starting at position 2310 of SEQ ID NO: 1881122
uuugaaaguugaccacuaa

SEQ ID NO: 2019811 - RNA, 19 nt, Artificial Sequence
  Description of Artificial Sequence: Synthetic oligonucleotide
  Antisense strand to SEQ ID NO: 2019810
uuaguggucaacuuucaaa

SEQ ID NO: 2019812 - RNA, 19 nt, Artificial Sequence
  Description of Artificial Sequence: Synthetic oligonucleotide
  Sense strand starting at position 2422 of SEQ ID NO: 1881122
ugaccugaaguuuauagua

SEQ ID NO: 2019813 - RNA, 19 nt, Artificial Sequence
  Description of Artificial Sequence: Synthetic oligonucleotide
  Antisense strand to SEQ ID NO: 2019812
uacuauaaacuucagguca

SEQ ID NO: 2019814 - RNA, 19 nt, Artificial Sequence
  Description of Artificial Sequence: Synthetic oligonucleotide
  Sense strand starting at position 2499 of SEQ ID NO: 1881122
ugugauguggguagcagua

SEQ ID NO: 2019815 - RNA, 19 nt, Artificial Sequence
  Description of Artificial Sequence: Synthetic oligonucleotide
  Antisense strand to SEQ ID NO: 2019814
uacugcuacccacaucaca

SEQ ID NO: 2019816 - RNA, 19 nt, Artificial Sequence
  Description of Artificial Sequence: Synthetic oligonucleotide
  Sense strand starting at position 2714 of SEQ ID NO: 1881122
uuuauauuccagcaaguag

SEQ ID NO: 2019817 - RNA, 19 nt, Artificial Sequence
  Description of Artificial Sequence: Synthetic oligonucleotide
  Antisense strand to SEQ ID NO: 2019816
cuacuugcuggaauauaaa

SEQ ID NO: 2019818 - RNA, 19 nt, Artificial Sequence
  Description of Artificial Sequence: Synthetic oligonucleotide
  Sense strand starting at position 2770 of SEQ ID NO: 1881122
gcccaaaggcauugguuaa

SEQ ID NO: 2019819 - RNA, 19 nt, Artificial Sequence
  Description of Artificial Sequence: Synthetic oligonucleotide
  Antisense strand to SEQ ID NO: 2019818
uuaaccaaugccuuugggc

SEQ ID NO: 2019820 - RNA, 19 nt, Artificial Sequence
  Description of Artificial Sequence: Synthetic oligonucleotide
  Sense strand starting at position 2937 of SEQ ID NO: 1881122
augguugaaucaucauuau

SEQ ID NO: 2019821 - RNA, 19 nt, Artificial Sequence
  Description of Artificial Sequence: Synthetic oligonucleotide
  Antisense strand to SEQ ID NO: 2019820
auaaugaugauucaaccau

SEQ ID NO: 2019822 - RNA, 19 nt, Artificial Sequence
  Description of Artificial Sequence: Synthetic oligonucleotide
  Sense strand starting at position 2940 of SEQ ID NO: 1881122
guugaaucaucauuauacg

SEQ ID NO: 2019823 - RNA, 19 nt, Artificial Sequence
  Description of Artificial Sequence: Synthetic oligonucleotide
  Antisense strand to SEQ ID NO: 2019822
cguauaaugaugauucaac

SEQ ID NO: 2019824 - RNA, 19 nt, Artificial Sequence
  Description of Artificial Sequence: Synthetic oligonucleotide
  Sense strand starting at position 2941 of SEQ ID NO: 1881122
uugaaucaucauuauacgu

SEQ ID NO: 2019825 - RNA, 19 nt, Artificial Sequence
  Description of Artificial Sequence: Synthetic oligonucleotide
  Antisense strand to SEQ ID NO: 2019824
acguauaaugaugauucaa

SEQ ID NO: 2019826 - RNA, 19 nt, Artificial Sequence
  Description of Artificial Sequence: Synthetic oligonucleotide
  Sense strand starting at position 2946 of SEQ ID NO: 1881122
ucaucauuauacgugcaau

SEQ ID NO: 2019827 - RNA, 19 nt, Artificial Sequence
  Description of Artificial Sequence: Synthetic oligonucleotide
  Antisense strand to SEQ ID NO: 2019826
auugcacguauaaugauga

SEQ ID NO: 2019828 - RNA, 19 nt, Artificial Sequence
  Description of Artificial Sequence: Synthetic oligonucleotide
  Sense strand starting at position 2949 of SEQ ID NO: 1881122
ucauuauacgugcaauaga

SEQ ID NO: 2019829 - RNA, 19 nt, Artificial Sequence
  Description of Artificial Sequence: Synthetic oligonucleotide
  Antisense strand to SEQ ID NO: 2019828
ucuauugcacguauaauga

SEQ ID NO: 2019830 - RNA, 19 nt, Artificial Sequence
  Description of Artificial Sequence: Synthetic oligonucleotide
  Sense strand starting at position 2952 of SEQ ID NO: 1881122
uuauacgugcaauagacua

SEQ ID NO: 2019831 - RNA, 19 nt, Artificial Sequence
  Description of Artificial Sequence: Synthetic oligonucleotide
  Antisense strand to SEQ ID NO: 2019830
uagucuauugcacguauaa

SEQ ID NO: 2019832 - RNA, 19 nt, Artificial Sequence
  Description of Artificial Sequence: Synthetic oligonucleotide
  Sense strand starting at position 2996 of SEQ ID NO: 1881122
uugcauauagggcaaauua

SEQ ID NO: 2019833 - RNA, 19 nt, Artificial Sequence
  Description of Artificial Sequence: Synthetic oligonucleotide
  Antisense strand to SEQ ID NO: 2019832
uaauuugcccuauaugcaa

SEQ ID NO: 2019834 - RNA, 19 nt, Artificial Sequence
  Description of Artificial Sequence: Synthetic oligonucleotide
  Sense strand starting at position 3280 of SEQ ID NO: 1881122
ugacaauauugacacagaa

SEQ ID NO: 2019835 - RNA, 19 nt, Artificial Sequence
  Description of Artificial Sequence: Synthetic oligonucleotide
  Antisense strand to SEQ ID NO: 2019834
uucugugucaauauuguca

SEQ ID NO: 2019836 - RNA, 19 nt, Artificial Sequence
  Description of Artificial Sequence: Synthetic oligonucleotide
  Sense strand starting at position 3442 of SEQ ID NO: 1881122
acgucauaauuaccagcua

SEQ ID NO: 2019837 - RNA, 19 nt, Artificial Sequence
  Description of Artificial Sequence: Synthetic oligonucleotide
  Antisense strand to SEQ ID NO: 2019836
uagcugguaauuaugacgu

SEQ ID NO: 2019838 - RNA, 19 nt, Artificial Sequence
  Description of Artificial Sequence: Synthetic oligonucleotide
  Sense strand starting at position 3531 of SEQ ID NO: 1881122
ugcgcucuccagccuuauu

SEQ ID NO: 2019839 - RNA, 19 nt, Artificial Sequence
  Description of Artificial Sequence: Synthetic oligonucleotide
  Antisense strand to SEQ ID NO: 2019838
aauaaggcuggagagcgca

SEQ ID NO: 2019840 - RNA, 19 nt, Artificial Sequence
  Description of Artificial Sequence: Synthetic oligonucleotide
  Sense strand starting at position 3662 of SEQ ID NO: 1881122
ucaagucucgcucagacuu

SEQ ID NO: 2019841 - RNA, 19 nt, Artificial Sequence
  Description of Artificial Sequence: Synthetic oligonucleotide
  Antisense strand to SEQ ID NO: 2019840
aagucugagcgagacuuga

SEQ ID NO: 2019842 - RNA, 19 nt, Artificial Sequence
  Description of Artificial Sequence: Synthetic oligonucleotide
  Sense strand starting at position 3683 of SEQ ID NO: 1881122
gcagccuguaaggauaaga

SEQ ID NO: 2019843 - RNA, 19 nt, Artificial Sequence
  Description of Artificial Sequence: Synthetic oligonucleotide
  Antisense strand to SEQ ID NO: 2019842
ucuuauccuuacaggcugc

SEQ ID NO: 2019844 - RNA, 19 nt, Artificial Sequence
  Description of Artificial Sequence: Synthetic oligonucleotide
  Sense strand starting at position 3688 of SEQ ID NO: 1881122
cuguaaggauaagaauaua

SEQ ID NO: 2019845 - RNA, 19 nt, Artificial Sequence
  Description of Artificial Sequence: Synthetic oligonucleotide
  Antisense strand to SEQ ID NO: 2019844
uauauucuuauccuuacag

SEQ ID NO: 2019846 - RNA, 19 nt, Artificial Sequence
  Description of Artificial Sequence: Synthetic oligonucleotide
  Sense strand starting at position 3807 of SEQ ID NO: 1881122
acuuguauagucuguauuu

SEQ ID NO: 2019847 - RNA, 19 nt, Artificial Sequence
  Description of Artificial Sequence: Synthetic oligonucleotide
  Antisense strand to SEQ ID NO: 2019846
aaauacagacuauacaagu

SEQ ID NO: 2019848 - RNA, 19 nt, Artificial Sequence
  Description of Artificial Sequence: Synthetic oligonucleotide
  Sense strand starting at position 3888 of SEQ ID NO: 1881122
guggauaaauggcuggaua

SEQ ID NO: 2019849 - RNA, 19 nt, Artificial Sequence
  Description of Artificial Sequence: Synthetic oligonucleotide
  Antisense strand to SEQ ID NO: 2019848
uauccagccauuuauccac

SEQ ID NO: 2019850 - RNA, 19 nt, Artificial Sequence
  Description of Artificial Sequence: Synthetic oligonucleotide
  Sense strand starting at position 3889 of SEQ ID NO: 1881122
uggauaaauggcuggauau

SEQ ID NO: 2019851 - RNA, 19 nt, Artificial Sequence
  Description of Artificial Sequence: Synthetic oligonucleotide
  Antisense strand to SEQ ID NO: 2019850
auauccagccauuuaucca

SEQ ID NO: 2019852 - RNA, 19 nt, Artificial Sequence
  Description of Artificial Sequence: Synthetic oligonucleotide
  Sense strand starting at position 3910 of SEQ ID NO: 1881122
ccagaaauagccuauggcu

SEQ ID NO: 2019853 - RNA, 19 nt, Artificial Sequence
  Description of Artificial Sequence: Synthetic oligonucleotide
  Antisense strand to SEQ ID NO: 2019852
agccauaggcuauuucugg

SEQ ID NO: 2019854 - RNA, 19 nt, Artificial Sequence
  Description of Artificial Sequence: Synthetic oligonucleotide
  Sense strand starting at position 3916 of SEQ ID NO: 1881122
auagccuauggcuaguaaa

SEQ ID NO: 2019855 - RNA, 19 nt, Artificial Sequence
  Description of Artificial Sequence: Synthetic oligonucleotide
  Antisense strand to SEQ ID NO: 2019854
uuuacuagccauaggcuau

SEQ ID NO: 2019856 - RNA, 19 nt, Artificial Sequence
  Description of Artificial Sequence: Synthetic oligonucleotide
  Sense strand starting at position 3926 of SEQ ID NO: 1881122
gcuaguaaagcauaauaug

SEQ ID NO: 2019857 - RNA, 19 nt, Artificial Sequence
  Description of Artificial Sequence: Synthetic oligonucleotide
  Antisense strand to SEQ ID NO: 2019856
cauauuaugcuuuacuagc

SEQ ID NO: 2019858 - RNA, 19 nt, Artificial Sequence
  Description of Artificial Sequence: Synthetic oligonucleotide
  Sense strand starting at position 3940 of SEQ ID NO: 1881122
auaugucuaucuccuguau

SEQ ID NO: 2019859 - RNA, 19 nt, Artificial Sequence
  Description of Artificial Sequence: Synthetic oligonucleotide
  Antisense strand to SEQ ID NO: 2019858
auacaggagauagacauau

SEQ ID NO: 2019860 - RNA, 19 nt, Artificial Sequence
  Description of Artificial Sequence: Synthetic oligonucleotide
  Sense strand starting at position 3979 of SEQ ID NO: 1881122
aaagguuaauaugugugua

SEQ ID NO: 2019861 - RNA, 19 nt, Artificial Sequence
  Description of Artificial Sequence: Synthetic oligonucleotide
  Antisense strand to SEQ ID NO: 2019860
uacacacauauuaaccuuu

SEQ ID NO: 2019862 - RNA, 19 nt, Artificial Sequence
  Description of Artificial Sequence: Synthetic oligonucleotide
  Sense strand starting at position 3981 of SEQ ID NO: 1881122
agguuaauauguguguaug

SEQ ID NO: 2019863 - RNA, 19 nt, Artificial Sequence
  Description of Artificial Sequence: Synthetic oligonucleotide
  Antisense strand to SEQ ID NO: 2019862
cauacacacauauuaaccu

SEQ ID NO: 2019864 - RNA, 19 nt, Artificial Sequence
  Description of Artificial Sequence: Synthetic oligonucleotide
  Sense strand starting at position 301 of SEQ ID NO: 1881123
aaaugaugucaaggucucu

SEQ ID NO: 2019865 - RNA, 19 nt, Artificial Sequence
  Description of Artificial Sequence: Synthetic oligonucleotide
  Antisense strand to SEQ ID NO: 2019864
agagaccuugacaucauuu

SEQ ID NO: 2019866 - RNA, 19 nt, Artificial Sequence
  Description of Artificial Sequence: Synthetic oligonucleotide
  Sense strand starting at position 359 of SEQ ID NO: 1881123
uugcauuugucauuagauc

SEQ ID NO: 2019867 - RNA, 19 nt, Artificial Sequence
  Description of Artificial Sequence: Synthetic oligonucleotide
  Antisense strand to SEQ ID NO: 2019866
gaucuaaugacaaaugcaa

SEQ ID NO: 2019868 - RNA, 19 nt, Artificial Sequence
  Description of Artificial Sequence: Synthetic oligonucleotide
  Sense strand starting at position 414 of SEQ ID NO: 1881123
uaaccugugccuggacuaa

SEQ ID NO: 2019869 - RNA, 19 nt, Artificial Sequence
  Description of Artificial Sequence: Synthetic oligonucleotide
  Antisense strand to SEQ ID NO: 2019868
uuaguccaggcacagguua

SEQ ID NO: 2019870 - RNA, 19 nt, Artificial Sequence
  Description of Artificial Sequence: Synthetic oligonucleotide
  Sense strand starting at position 479 of SEQ ID NO: 1881123
aggguaacauuacaaauuu

SEQ ID NO: 2019871 - RNA, 19 nt, Artificial Sequence
  Description of Artificial Sequence: Synthetic oligonucleotide
  Antisense strand to SEQ ID NO: 2019870
aaauuuguaauguuacccu

SEQ ID NO: 2019872 - RNA, 19 nt, Artificial Sequence
  Description of Artificial Sequence: Synthetic oligonucleotide
  Sense strand starting at position 502 of SEQ ID NO: 1881123
ggccuuaauccagaacuau

SEQ ID NO: 2019873 - RNA, 19 nt, Artificial Sequence
  Description of Artificial Sequence: Synthetic oligonucleotide
  Antisense strand to SEQ ID NO: 2019872
auaguucuggauuaaggcc

SEQ ID NO: 2019874 - RNA, 19 nt, Artificial Sequence
  Description of Artificial Sequence: Synthetic oligonucleotide
  Sense strand starting at position 587 of SEQ ID NO: 1881123
acaucuugugcuuauacua

SEQ ID NO: 2019875 - RNA, 19 nt, Artificial Sequence
  Description of Artificial Sequence: Synthetic oligonucleotide
  Antisense strand to SEQ ID NO: 2019874
uaguauaagcacaagaugu

SEQ ID NO: 2019876 - RNA, 19 nt, Artificial Sequence
  Description of Artificial Sequence: Synthetic oligonucleotide
  Sense strand starting at position 703 of SEQ ID NO: 1881123
gcuuuauucugaguccaga

SEQ ID NO: 2019877 - RNA, 19 nt, Artificial Sequence
  Description of Artificial Sequence: Synthetic oligonucleotide
  Antisense strand to SEQ ID NO: 2019876
ucuggacucagaauaaagc

SEQ ID NO: 2019878 - RNA, 19 nt, Artificial Sequence
  Description of Artificial Sequence: Synthetic oligonucleotide
  Sense strand starting at position 822 of SEQ ID NO: 1881123
gccagagaacuuggcuaaa

SEQ ID NO: 2019879 - RNA, 19 nt, Artificial Sequence
  Description of Artificial Sequence: Synthetic oligonucleotide
  Antisense strand to SEQ ID NO: 2019878
uuuagccaaguucucuggc

SEQ ID NO: 2019880 - RNA, 19 nt, Artificial Sequence
  Description of Artificial Sequence: Synthetic oligonucleotide
  Sense strand starting at position 1063 of SEQ ID NO: 1881123
guggacaugcaagauguau

SEQ ID NO: 2019881 - RNA, 19 nt, Artificial Sequence
  Description of Artificial Sequence: Synthetic oligonucleotide
  Antisense strand to SEQ ID NO: 2019880
auacaucuugcauguccac

SEQ ID NO: 2019882 - RNA, 19 nt, Artificial Sequence
  Description of Artificial Sequence: Synthetic oligonucleotide
  Sense strand starting at position 1318 of SEQ ID NO: 1881123
gcucuugauguauaucacu

SEQ ID NO: 2019883 - RNA, 19 nt, Artificial Sequence
  Description of Artificial Sequence: Synthetic oligonucleotide
  Antisense strand to SEQ ID NO: 2019882
agugauauacaucaagagc

SEQ ID NO: 2019884 - RNA, 19 nt, Artificial Sequence
  Description of Artificial Sequence: Synthetic oligonucleotide
  Sense strand starting at position 1355 of SEQ ID NO: 1881123
guuuccuugccauaaauag

SEQ ID NO: 2019885 - RNA, 19 nt, Artificial Sequence
  Description of Artificial Sequence: Synthetic oligonucleotide
  Antisense strand to SEQ ID NO: 2019884
cuauuuauggcaaggaaac

SEQ ID NO: 2019886 - RNA, 19 nt, Artificial Sequence
  Description of Artificial Sequence: Synthetic oligonucleotide
  Sense strand starting at position 1370 of SEQ ID NO: 1881123
auagaaagcucccugauaa

SEQ ID NO: 2019887 - RNA, 19 nt, Artificial Sequence
  Description of Artificial Sequence: Synthetic oligonucleotide
  Antisense strand to SEQ ID NO: 2019886
uuaucagggagcuuucuau

SEQ ID NO: 2019888 - RNA, 19 nt, Artificial Sequence
  Description of Artificial Sequence: Synthetic oligonucleotide
  Sense strand starting at position 1464 of SEQ ID NO: 1881123
accugcuguuagguuaaga

SEQ ID NO: 2019889 - RNA, 19 nt, Artificial Sequence
  Description of Artificial Sequence: Synthetic oligonucleotide
  Antisense strand to SEQ ID NO: 2019888
ucuuaaccuaacagcaggu

SEQ ID NO: 2019890 - RNA, 19 nt, Artificial Sequence
  Description of Artificial Sequence: Synthetic oligonucleotide
  Sense strand starting at position 1566 of SEQ ID NO: 1881123
gagagcagcuuucucaaga

SEQ ID NO: 2019891 - RNA, 19 nt, Artificial Sequence
  Description of Artificial Sequence: Synthetic oligonucleotide
  Antisense strand to SEQ ID NO: 2019890
ucuugagaaagcugcucuc

SEQ ID NO: 2019892 - RNA, 19 nt, Artificial Sequence
  Description of Artificial Sequence: Synthetic oligonucleotide
  Sense strand starting at position 1571 of SEQ ID NO: 1881123
cagcuuucucaagagguaa

SEQ ID NO: 2019893 - RNA, 19 nt, Artificial Sequence
  Description of Artificial Sequence: Synthetic oligonucleotide
  Antisense strand to SEQ ID NO: 2019892
uuaccucuugagaaagcug

SEQ ID NO: 2019894 - RNA, 19 nt, Artificial Sequence
  Description of Artificial Sequence: Synthetic oligonucleotide
  Sense strand starting at position 1585 of SEQ ID NO: 1881123
gguaaauaaguuuguugaa

SEQ ID NO: 2019895 - RNA, 19 nt, Artificial Sequence
  Description of Artificial Sequence: Synthetic oligonucleotide
  Antisense strand to SEQ ID NO: 2019894
uucaacaaacuuauuuacc

SEQ ID NO: 2019896 - RNA, 19 nt, Artificial Sequence
  Description of Artificial Sequence: Synthetic oligonucleotide
  Sense strand starting at position 1714 of SEQ ID NO: 1881123
accagagaauguuucggau

SEQ ID NO: 2019897 - RNA, 19 nt, Artificial Sequence
  Description of Artificial Sequence: Synthetic oligonucleotide
  Antisense strand to SEQ ID NO: 2019896
auccgaaacauucucuggu

SEQ ID NO: 2019898 - RNA, 19 nt, Artificial Sequence
  Description of Artificial Sequence: Synthetic oligonucleotide
  Sense strand starting at position 1737 of SEQ ID NO: 1881123
gacuaauuccuguggauga

SEQ ID NO: 2019899 - RNA, 19 nt, Artificial Sequence
  Description of Artificial Sequence: Synthetic oligonucleotide
  Antisense strand to SEQ ID NO: 2019898
ucauccacaggaauuaguc

SEQ ID NO: 2019900 - RNA, 19 nt, Artificial Sequence
  Description of Artificial Sequence: Synthetic oligonucleotide
  Sense strand starting at position 1741 of SEQ ID NO: 1881123
aauuccuguggaugacaga

SEQ ID NO: 2019901 - RNA, 19 nt, Artificial Sequence
  Description of Artificial Sequence: Synthetic oligonucleotide
  Antisense strand to SEQ ID NO: 2019900
ucugucauccacaggaauu

SEQ ID NO: 2019902 - RNA, 19 nt, Artificial Sequence
  Description of Artificial Sequence: Synthetic oligonucleotide
  Sense strand starting at position 1755 of SEQ ID NO: 1881123
acagaaugcgaccguugaa

SEQ ID NO: 2019903 - RNA, 19 nt, Artificial Sequence
  Description of Artificial Sequence: Synthetic oligonucleotide
  Antisense strand to SEQ ID NO: 2019902
uucaacggucgcauucugu

SEQ ID NO: 2019904 - RNA, 19 nt, Artificial Sequence
  Description of Artificial Sequence: Synthetic oligonucleotide
  Sense strand starting at position 1764 of SEQ ID NO: 1881123
gaccguugaaugggacauu

SEQ ID NO: 2019905 - RNA, 19 nt, Artificial Sequence
  Description of Artificial Sequence: Synthetic oligonucleotide
  Antisense strand to SEQ ID NO: 2019904
aaugucccauucaacgguc

SEQ ID NO: 2019906 - RNA, 19 nt, Artificial Sequence
  Description of Artificial Sequence: Synthetic oligonucleotide
  Sense strand starting at position 1784 of SEQ ID NO: 1881123
ggugucaucugguccaaau

SEQ ID NO: 2019907 - RNA, 19 nt, Artificial Sequence
  Description of Artificial Sequence: Synthetic oligonucleotide
  Antisense strand to SEQ ID NO: 2019906
auuuggaccagaugacacc

SEQ ID NO: 2019908 - RNA, 19 nt, Artificial Sequence
  Description of Artificial Sequence: Synthetic oligonucleotide
  Sense strand starting at position 1786 of SEQ ID NO: 1881123
ugucaucugguccaaaucu

SEQ ID NO: 2019909 - RNA, 19 nt, Artificial Sequence
  Description of Artificial Sequence: Synthetic oligonucleotide
  Antisense strand to SEQ ID NO: 2019908
agauuuggaccagaugaca

SEQ ID NO: 2019910 - RNA, 19 nt, Artificial Sequence
  Description of Artificial Sequence: Synthetic oligonucleotide
  Sense strand starting at position 1872 of SEQ ID NO: 1881123
cacagaaaggguggucuaa

SEQ ID NO: 2019911 - RNA, 19 nt, Artificial Sequence
  Description of Artificial Sequence: Synthetic oligonucleotide
  Antisense strand to SEQ ID NO: 2019910
uuagaccacccuuucugug

SEQ ID NO: 2019912 - RNA, 19 nt, Artificial Sequence
  Description of Artificial Sequence: Synthetic oligonucleotide
  Sense strand starting at position 1874 of SEQ ID NO: 1881123
cagaaaggguggucuaaug

SEQ ID NO: 2019913 - RNA, 19 nt, Artificial Sequence
  Description of Artificial Sequence: Synthetic oligonucleotide
  Antisense strand to SEQ ID NO: 2019912
cauuagaccacccuuucug

SEQ ID NO: 2019914 - RNA, 19 nt, Artificial Sequence
  Description of Artificial Sequence: Synthetic oligonucleotide
  Sense strand starting at position 2043 of SEQ ID NO: 1881123
ggugacgucacagagcaau

SEQ ID NO: 2019915 - RNA, 19 nt, Artificial Sequence
  Description of Artificial Sequence: Synthetic oligonucleotide
  Antisense strand to SEQ ID NO: 2019914
auugcucugugacgucacc

SEQ ID NO: 2019916 - RNA, 19 nt, Artificial Sequence
  Description of Artificial Sequence: Synthetic oligonucleotide
  Sense strand starting at position 2049 of SEQ ID NO: 1881123
gucacagagcaauguccaa

SEQ ID NO: 2019917 - RNA, 19 nt, Artificial Sequence
  Description of Artificial Sequence: Synthetic oligonucleotide
  Antisense strand to SEQ ID NO: 2019916
uuggacauugcucugugac

SEQ ID NO: 2019918 - RNA, 19 nt, Artificial Sequence
  Description of Artificial Sequence: Synthetic oligonucleotide
  Sense strand starting at position 2056 of SEQ ID NO: 1881123
agcaauguccaaugggaaa

SEQ ID NO: 2019919 - RNA, 19 nt, Artificial Sequence
  Description of Artificial Sequence: Synthetic oligonucleotide
  Antisense strand to SEQ ID NO: 2019918
uuucccauuggacauugcu

SEQ ID NO: 2019920 - RNA, 19 nt, Artificial Sequence
  Description of Artificial Sequence: Synthetic oligonucleotide
  Sense strand starting at position 2315 of SEQ ID NO: 1881123
cgggaauuaagguaucgag

SEQ ID NO: 2019921 - RNA, 19 nt, Artificial Sequence
  Description of Artificial Sequence: Synthetic oligonucleotide
  Antisense strand to SEQ ID NO: 2019920
cucgauaccuuaauucccg

SEQ ID NO: 2019922 - RNA, 19 nt, Artificial Sequence
  Description of Artificial Sequence: Synthetic oligonucleotide
  Sense strand starting at position 2479 of SEQ ID NO: 1881123
gacggauuugggcgcauga

SEQ ID NO: 2019923 - RNA, 19 nt, Artificial Sequence
  Description of Artificial Sequence: Synthetic oligonucleotide
  Antisense strand to SEQ ID NO: 2019922
ucaugcgcccaaauccguc

SEQ ID NO: 2019924 - RNA, 19 nt, Artificial Sequence
  Description of Artificial Sequence: Synthetic oligonucleotide
  Sense strand starting at position 2567 of SEQ ID NO: 1881123
gagaguuaaggcugggagu

SEQ ID NO: 2019925 - RNA, 19 nt, Artificial Sequence
  Description of Artificial Sequence: Synthetic oligonucleotide
  Antisense strand to SEQ ID NO: 2019924
acucccagccuuaacucuc

SEQ ID NO: 2019926 - RNA, 19 nt, Artificial Sequence
  Description of Artificial Sequence: Synthetic oligonucleotide
  Sense strand starting at position 2945 of SEQ ID NO: 1881123
gaggguugagggugugaga

SEQ ID NO: 2019927 - RNA, 19 nt, Artificial Sequence
  Description of Artificial Sequence: Synthetic oligonucleotide
  Antisense strand to SEQ ID NO: 2019926
ucucacacccucaacccuc

SEQ ID NO: 2019928 - RNA, 19 nt, Artificial Sequence
  Description of Artificial Sequence: Synthetic oligonucleotide
  Sense strand starting at position 3052 of SEQ ID NO: 1881123
gggagaguugaagguguga

SEQ ID NO: 2019929 - RNA, 19 nt, Artificial Sequence
  Description of Artificial Sequence: Synthetic oligonucleotide
  Antisense strand to SEQ ID NO: 2019928
ucacaccuucaacucuccc

SEQ ID NO: 2019930 - RNA, 19 nt, Artificial Sequence
  Description of Artificial Sequence: Synthetic oligonucleotide
  Sense strand starting at position 3245 of SEQ ID NO: 1881123
gaguuaagagcuugaagug

SEQ ID NO: 2019931 - RNA, 19 nt, Artificial Sequence
  Description of Artificial Sequence: Synthetic oligonucleotide
  Antisense strand to SEQ ID NO: 2019930
cacuucaagcucuuaacuc

SEQ ID NO: 2019932 - RNA, 19 nt, Artificial Sequence
  Description of Artificial Sequence: Synthetic oligonucleotide
  Sense strand starting at position 3808 of SEQ ID NO: 1881123
gcugcaugagauggaaaga

SEQ ID NO: 2019933 - RNA, 19 nt, Artificial Sequence
  Description of Artificial Sequence: Synthetic oligonucleotide
  Antisense strand to SEQ ID NO: 2019932
ucuuuccaucucaugcagc

SEQ ID NO: 2019934 - RNA, 19 nt, Artificial Sequence
  Description of Artificial Sequence: Synthetic oligonucleotide
  Sense strand starting at position 3931 of SEQ ID NO: 1881123
gggcuuugcaggugacaua

SEQ ID NO: 2019935 - RNA, 19 nt, Artificial Sequence
  Description of Artificial Sequence: Synthetic oligonucleotide
  Antisense strand to SEQ ID NO: 2019934
uaugucaccugcaaagccc

SEQ ID NO: 2019936 - RNA, 19 nt, Artificial Sequence
  Description of Artificial Sequence: Synthetic oligonucleotide
  Sense strand starting at position 3932 of SEQ ID NO: 1881123
ggcuuugcaggugacauaa

SEQ ID NO: 2019937 - RNA, 19 nt, Artificial Sequence
  Description of Artificial Sequence: Synthetic oligonucleotide
  Antisense strand to SEQ ID NO: 2019936
uuaugucaccugcaaagcc

SEQ ID NO: 2019938 - RNA, 19 nt, Artificial Sequence
  Description of Artificial Sequence: Synthetic oligonucleotide
  Sense strand starting at position 3949 of SEQ ID NO: 1881123
aacuaccaucucggugaaa

SEQ ID NO: 2019939 - RNA, 19 nt, Artificial Sequence
  Description of Artificial Sequence: Synthetic oligonucleotide
  Antisense strand to SEQ ID NO: 2019938
uuucaccgagaugguaguu

SEQ ID NO: 2019940 - RNA, 19 nt, Artificial Sequence
  Description of Artificial Sequence: Synthetic oligonucleotide
  Sense strand starting at position 3951 of SEQ ID NO: 1881123
cuaccaucucggugaaacu

SEQ ID NO: 2019941 - RNA, 19 nt, Artificial Sequence
  Description of Artificial Sequence: Synthetic oligonucleotide
  Antisense strand to SEQ ID NO: 2019940
aguuucaccgagaugguag

SEQ ID NO: 2019942 - RNA, 19 nt, Artificial Sequence
  Description of Artificial Sequence: Synthetic oligonucleotide
  Sense strand starting at position 3952 of SEQ ID NO: 1881123
uaccaucucggugaaacuu

SEQ ID NO: 2019943 - RNA, 19 nt, Artificial Sequence
  Description of Artificial Sequence: Synthetic oligonucleotide
  Antisense strand to SEQ ID NO: 2019942
aaguuucaccgagauggua

SEQ ID NO: 2019944 - RNA, 19 nt, Artificial Sequence
  Description of Artificial Sequence: Synthetic oligonucleotide
  Sense strand starting at position 212 of SEQ ID NO: 1881124
cgaaauuacaguugaugaa

SEQ ID NO: 2019945 - RNA, 19 nt, Artificial Sequence
  Description of Artificial Sequence: Synthetic oligonucleotide
  Antisense strand to SEQ ID NO: 2019944
uucaucaacuguaauuucg

SEQ ID NO: 2019946 - RNA, 19 nt, Artificial Sequence
  Description of Artificial Sequence: Synthetic oligonucleotide
  Sense strand starting at position 249 of SEQ ID NO: 1881124
uuaauuugacagugccgau

SEQ ID NO: 2019947 - RNA, 19 nt, Artificial Sequence
  Description of Artificial Sequence: Synthetic oligonucleotide
  Antisense strand to SEQ ID NO: 2019946
aucggcacugucaaauuaa

SEQ ID NO: 2019948 - RNA, 19 nt, Artificial Sequence
  Description of Artificial Sequence: Synthetic oligonucleotide
  Sense strand starting at position 253 of SEQ ID NO: 1881124
uuugacagugccgaucaaa

SEQ ID NO: 2019949 - RNA, 19 nt, Artificial Sequence
  Description of Artificial Sequence: Synthetic oligonucleotide
  Antisense strand to SEQ ID NO: 2019948
uuugaucggcacugucaaa

SEQ ID NO: 2019950 - RNA, 19 nt, Artificial Sequence
  Description of Artificial Sequence: Synthetic oligonucleotide
  Sense strand starting at position 256 of SEQ ID NO: 1881124
gacagugccgaucaaacuu

SEQ ID NO: 2019951 - RNA, 19 nt, Artificial Sequence
  Description of Artificial Sequence: Synthetic oligonucleotide
  Antisense strand to SEQ ID NO: 2019950
aaguuugaucggcacuguc

SEQ ID NO: 2019952 - RNA, 19 nt, Artificial Sequence
  Description of Artificial Sequence: Synthetic oligonucleotide
  Sense strand starting at position 276 of SEQ ID NO: 1881124
ggcccaaaucuugagcuca

SEQ ID NO: 2019953 - RNA, 19 nt, Artificial Sequence
  Description of Artificial Sequence: Synthetic oligonucleotide
  Antisense strand to SEQ ID NO: 2019952
ugagcucaagauuugggcc

SEQ ID NO: 2019954 - RNA, 19 nt, Artificial Sequence
  Description of Artificial Sequence: Synthetic oligonucleotide
  Sense strand starting at position 358 of SEQ ID NO: 1881124
cccuuauuucucugagucu

SEQ ID NO: 2019955 - RNA, 19 nt, Artificial Sequence
  Description of Artificial Sequence: Synthetic oligonucleotide
  Antisense strand to SEQ ID NO: 2019954
agacucagagaaauaaggg

SEQ ID NO: 2019956 - RNA, 19 nt, Artificial Sequence
  Description of Artificial Sequence: Synthetic oligonucleotide
  Sense strand starting at position 418 of SEQ ID NO: 1881124
ugugcauuaucuguaagaa

SEQ ID NO: 2019957 - RNA, 19 nt, Artificial Sequence
  Description of Artificial Sequence: Synthetic oligonucleotide
  Antisense strand to SEQ ID NO: 2019956
uucuuacagauaaugcaca

SEQ ID NO: 2019958 - RNA, 19 nt, Artificial Sequence
  Description of Artificial Sequence: Synthetic oligonucleotide
  Sense strand starting at position 419 of SEQ ID NO: 1881124
gugcauuaucuguaagaaa

SEQ ID NO: 2019959 - RNA, 19 nt, Artificial Sequence
  Description of Artificial Sequence: Synthetic oligonucleotide
  Antisense strand to SEQ ID NO: 2019958
uuucuuacagauaaugcac

SEQ ID NO: 2019960 - RNA, 19 nt, Artificial Sequence
  Description of Artificial Sequence: Synthetic oligonucleotide
  Sense strand starting at position 482 of SEQ ID NO: 1881124
guagucagugcucaaucaa

SEQ ID NO: 2019961 - RNA, 19 nt, Artificial Sequence
  Description of Artificial Sequence: Synthetic oligonucleotide
  Antisense strand to SEQ ID NO: 2019960
uugauugagcacugacuac

SEQ ID NO: 2019962 - RNA, 19 nt, Artificial Sequence
  Description of Artificial Sequence: Synthetic oligonucleotide
  Sense strand starting at position 507 of SEQ ID NO: 1881124
cuguuaggguucuugacga

SEQ ID NO: 2019963 - RNA, 19 nt, Artificial Sequence
  Description of Artificial Sequence: Synthetic oligonucleotide
  Antisense strand to SEQ ID NO: 2019962
ucgucaagaacccuaacag

SEQ ID NO: 2019964 - RNA, 19 nt, Artificial Sequence
  Description of Artificial Sequence: Synthetic oligonucleotide
  Sense strand starting at position 669 of SEQ ID NO: 1881124
ucuugauucuaauuggacu

SEQ ID NO: 2019965 - RNA, 19 nt, Artificial Sequence
  Description of Artificial Sequence: Synthetic oligonucleotide
  Antisense strand to SEQ ID NO: 2019964
aguccaauuagaaucaaga

SEQ ID NO: 2019966 - RNA, 19 nt, Artificial Sequence
  Description of Artificial Sequence: Synthetic oligonucleotide
  Sense strand starting at position 682 of SEQ ID NO: 1881124
uggacuagaauauguaguu

SEQ ID NO: 2019967 - RNA, 19 nt, Artificial Sequence
  Description of Artificial Sequence: Synthetic oligonucleotide
  Antisense strand to SEQ ID NO: 2019966
aacuacauauucuagucca

SEQ ID NO: 2019968 - RNA, 19 nt, Artificial Sequence
  Description of Artificial Sequence: Synthetic oligonucleotide
  Sense strand starting at position 2257 of SEQ ID NO: 1881124
gugauccauuguguaggaa

SEQ ID NO: 2019969 - RNA, 19 nt, Artificial Sequence
  Description of Artificial Sequence: Synthetic oligonucleotide
  Antisense strand to SEQ ID NO: 2019968
uuccuacacaauggaucac

SEQ ID NO: 2019970 - RNA, 19 nt, Artificial Sequence
  Description of Artificial Sequence: Synthetic oligonucleotide
  Sense strand starting at position 2258 of SEQ ID NO: 1881124
ugauccauuguguaggaau

SEQ ID NO: 2019971 - RNA, 19 nt, Artificial Sequence
  Description of Artificial Sequence: Synthetic oligonucleotide
  Antisense strand to SEQ ID NO: 2019970
auuccuacacaauggauca

SEQ ID NO: 2019972 - RNA, 19 nt, Artificial Sequence
  Description of Artificial Sequence: Synthetic oligonucleotide
  Sense strand starting at position 2374 of SEQ ID NO: 1881124
agggcuuaugccuacaaua

SEQ ID NO: 2019973 - RNA, 19 nt, Artificial Sequence
  Description of Artificial Sequence: Synthetic oligonucleotide
  Antisense strand to SEQ ID NO: 2019972
uauuguaggcauaagcccu

SEQ ID NO: 2019974 - RNA, 19 nt, Artificial Sequence
  Description of Artificial Sequence: Synthetic oligonucleotide
  Sense strand starting at position 2376 of SEQ ID NO: 1881124
ggcuuaugccuacaauaca

SEQ ID NO: 2019975 - RNA, 19 nt, Artificial Sequence
  Description of Artificial Sequence: Synthetic oligonucleotide
  Antisense strand to SEQ ID NO: 2019974
uguauuguaggcauaagcc

SEQ ID NO: 2019976 - RNA, 19 nt, Artificial Sequence
  Description of Artificial Sequence: Synthetic oligonucleotide
  Sense strand starting at position 2426 of SEQ ID NO: 1881124
uggagaaguucuguuuggu

SEQ ID NO: 2019977 - RNA, 19 nt, Artificial Sequence
  Description of Artificial Sequence: Synthetic oligonucleotide
  Antisense strand to SEQ ID NO: 2019976
accaaacagaacuucucca

SEQ ID NO: 2019978 - RNA, 19 nt, Artificial Sequence
  Description of Artificial Sequence: Synthetic oligonucleotide
  Sense strand starting at position 2484 of SEQ ID NO: 1881124
aggaaucauugcuccucua

SEQ ID NO: 2019979 - RNA, 19 nt, Artificial Sequence
  Description of Artificial Sequence: Synthetic oligonucleotide
  Antisense strand to SEQ ID NO: 2019978
uagaggagcaaugauuccu

SEQ ID NO: 2019980 - RNA, 19 nt, Artificial Sequence
  Description of Artificial Sequence: Synthetic oligonucleotide
  Sense strand starting at position 3001 of SEQ ID NO: 1881124
uauuuaaaguggccuaguu

SEQ ID NO: 2019981 - RNA, 19 nt, Artificial Sequence
  Description of Artificial Sequence: Synthetic oligonucleotide
  Antisense strand to SEQ ID NO: 2019980
aacuaggccacuuuaaaua

SEQ ID NO: 2019982 - RNA, 19 nt, Artificial Sequence
  Description of Artificial Sequence: Synthetic oligonucleotide
  Sense strand starting at position 3014 of SEQ ID NO: 1881124
cuaguuaccuuugcuaaug

SEQ ID NO: 2019983 - RNA, 19 nt, Artificial Sequence
  Description of Artificial Sequence: Synthetic oligonucleotide
  Antisense strand to SEQ ID NO: 2019982
cauuagcaaagguaacuag

SEQ ID NO: 2019984 - RNA, 19 nt, Artificial Sequence
  Description of Artificial Sequence: Synthetic oligonucleotide
  Sense strand starting at position 3152 of SEQ ID NO: 1881124
ucuauuugcuuggaaauuu

SEQ ID NO: 2019985 - RNA, 19 nt, Artificial Sequence
  Description of Artificial Sequence: Synthetic oligonucleotide
  Antisense strand to SEQ ID NO: 2019984
aaauuuccaagcaaauaga

SEQ ID NO: 2019986 - RNA, 19 nt, Artificial Sequence
  Description of Artificial Sequence: Synthetic oligonucleotide
  Sense strand starting at position 3198 of SEQ ID NO: 1881124
uuaagaaggucuuucugca

SEQ ID NO: 2019987 - RNA, 19 nt, Artificial Sequence
  Description of Artificial Sequence: Synthetic oligonucleotide
  Antisense strand to SEQ ID NO: 2019986
ugcagaaagaccuucuuaa

SEQ ID NO: 2019988 - RNA, 19 nt, Artificial Sequence
  Description of Artificial Sequence: Synthetic oligonucleotide
  Sense strand starting at position 3202 of SEQ ID NO: 1881124
gaaggucuuucugcagaga

SEQ ID NO: 2019989 - RNA, 19 nt, Artificial Sequence
  Description of Artificial Sequence: Synthetic oligonucleotide
  Antisense strand to SEQ ID NO: 2019988
ucucugcagaaagaccuuc

SEQ ID NO: 2019990 - RNA, 19 nt, Artificial Sequence
  Description of Artificial Sequence: Synthetic oligonucleotide
  Sense strand starting at position 3205 of SEQ ID NO: 1881124
ggucuuucugcagagagua

SEQ ID NO: 2019991 - RNA, 19 nt, Artificial Sequence
  Description of Artificial Sequence: Synthetic oligonucleotide
  Antisense strand to SEQ ID NO: 2019990
uacucucugcagaaagacc

SEQ ID NO: 2019992 - RNA, 19 nt, Artificial Sequence
  Description of Artificial Sequence: Synthetic oligonucleotide
  Sense strand starting at position 3218 of SEQ ID NO: 1881124
agaguaacaauguggagua

SEQ ID NO: 2019993 - RNA, 19 nt, Artificial Sequence
  Description of Artificial Sequence: Synthetic oligonucleotide
  Antisense strand to SEQ ID NO: 2019992
uacuccacauuguuacucu

SEQ ID NO: 2019994 - RNA, 19 nt, Artificial Sequence
  Description of Artificial Sequence: Synthetic oligonucleotide
  Sense strand starting at position 3220 of SEQ ID NO: 1881124
aguaacaauguggaguauu

SEQ ID NO: 2019995 - RNA, 19 nt, Artificial Sequence
  Description of Artificial Sequence: Synthetic oligonucleotide
  Antisense strand to SEQ ID NO: 2019994
aauacuccacauuguuacu

SEQ ID NO: 2019996 - RNA, 19 nt, Artificial Sequence
  Description of Artificial Sequence: Synthetic oligonucleotide
  Sense strand starting at position 3230 of SEQ ID NO: 1881124
uggaguauuacguaauuau

SEQ ID NO: 2019997 - RNA, 19 nt, Artificial Sequence
  Description of Artificial Sequence: Synthetic oligonucleotide
  Antisense strand to SEQ ID NO: 2019996
auaauuacguaauacucca

SEQ ID NO: 2019998 - RNA, 19 nt, Artificial Sequence
  Description of Artificial Sequence: Synthetic oligonucleotide
  Sense strand starting at position 3316 of SEQ ID NO: 1881124
acaaucuccugugucaaau

SEQ ID NO: 2019999 - RNA, 19 nt, Artificial Sequence
  Description of Artificial Sequence: Synthetic oligonucleotide
  Antisense strand to SEQ ID NO: 2019998
auuugacacaggagauugu

SEQ ID NO: 2020000 - RNA, 19 nt, Artificial Sequence
  Description of Artificial Sequence: Synthetic oligonucleotide
  Sense strand starting at position 3325 of SEQ ID NO: 1881124
ugugucaaaucuucuaaua

SEQ ID NO: 2020001 - RNA, 19 nt, Artificial Sequence
  Description of Artificial Sequence: Synthetic oligonucleotide
  Antisense strand to SEQ ID NO: 2020000
uauuagaagauuugacaca

SEQ ID NO: 2020002 - RNA, 19 nt, Artificial Sequence
  Description of Artificial Sequence: Synthetic oligonucleotide
  Sense strand starting at position 3509 of SEQ ID NO: 1881124
gcacgucauauguuuaugu

SEQ ID NO: 2020003 - RNA, 19 nt, Artificial Sequence
  Description of Artificial Sequence: Synthetic oligonucleotide
  Antisense strand to SEQ ID NO: 2020002
acauaaacauaugacgugc

SEQ ID NO: 2020004 - RNA, 19 nt, Artificial Sequence
  Description of Artificial Sequence: Synthetic oligonucleotide
  Sense strand starting at position 3606 of SEQ ID NO: 1881124
cggcaucauuaauucuaca

SEQ ID NO: 2020005 - RNA, 19 nt, Artificial Sequence
  Description of Artificial Sequence: Synthetic oligonucleotide
  Antisense strand to SEQ ID NO: 2020004
uguagaauuaaugaugccg

SEQ ID NO: 2020006 - RNA, 19 nt, Artificial Sequence
  Description of Artificial Sequence: Synthetic oligonucleotide
  Sense strand starting at position 3614 of SEQ ID NO: 1881124
uuaauucuacagcacgauu

SEQ ID NO: 2020007 - RNA, 19 nt, Artificial Sequence
  Description of Artificial Sequence: Synthetic oligonucleotide
  Antisense strand to SEQ ID NO: 2020006
aaucgugcuguagaauuaa

SEQ ID NO: 2020008 - RNA, 19 nt, Artificial Sequence
  Description of Artificial Sequence: Synthetic oligonucleotide
  Sense strand starting at position 3622 of SEQ ID NO: 1881124
acagcacgauuguuaauaa

SEQ ID NO: 2020009 - RNA, 19 nt, Artificial Sequence
  Description of Artificial Sequence: Synthetic oligonucleotide
  Antisense strand to SEQ ID NO: 2020008
uuauuaacaaucgugcugu

SEQ ID NO: 2020010 - RNA, 19 nt, Artificial Sequence
  Description of Artificial Sequence: Synthetic oligonucleotide
  Sense strand starting at position 3657 of SEQ ID NO: 1881124
auagaacuggagugugauu

SEQ ID NO: 2020011 - RNA, 19 nt, Artificial Sequence
  Description of Artificial Sequence: Synthetic oligonucleotide
  Antisense strand to SEQ ID NO: 2020010
aaucacacuccaguucuau

SEQ ID NO: 2020012 - RNA, 19 nt, Artificial Sequence
  Description of Artificial Sequence: Synthetic oligonucleotide
  Sense strand starting at position 3707 of SEQ ID NO: 1881124
gugguuuauagugauuaag

SEQ ID NO: 2020013 - RNA, 19 nt, Artificial Sequence
  Description of Artificial Sequence: Synthetic oligonucleotide
  Antisense strand to SEQ ID NO: 2020012
cuuaaucacuauaaaccac

SEQ ID NO: 2020014 - RNA, 19 nt, Artificial Sequence
  Description of Artificial Sequence: Synthetic oligonucleotide
  Sense strand starting at position 3709 of SEQ ID NO: 1881124
gguuuauagugauuaagca

SEQ ID NO: 2020015 - RNA, 19 nt, Artificial Sequence
  Description of Artificial Sequence: Synthetic oligonucleotide
  Antisense strand to SEQ ID NO: 2020014
ugcuuaaucacuauaaacc

SEQ ID NO: 2020016 - RNA, 19 nt, Artificial Sequence
  Description of Artificial Sequence: Synthetic oligonucleotide
  Sense strand starting at position 3710 of SEQ ID NO: 1881124
guuuauagugauuaagcau

SEQ ID NO: 2020017 - RNA, 19 nt, Artificial Sequence
  Description of Artificial Sequence: Synthetic oligonucleotide
  Antisense strand to SEQ ID NO: 2020016
augcuuaaucacuauaaac

SEQ ID NO: 2020018 - RNA, 19 nt, Artificial Sequence
  Description of Artificial Sequence: Synthetic oligonucleotide
  Sense strand starting at position 3811 of SEQ ID NO: 1881124
uucuuaacauuugagagaa

SEQ ID NO: 2020019 - RNA, 19 nt, Artificial Sequence
  Description of Artificial Sequence: Synthetic oligonucleotide
  Antisense strand to SEQ ID NO: 2020018
uucucucaaauguuaagaa

SEQ ID NO: 2020020 - RNA, 19 nt, Artificial Sequence
  Description of Artificial Sequence: Synthetic oligonucleotide
  Sense strand starting at position 3813 of SEQ ID NO: 1881124
cuuaacauuugagagaaug

SEQ ID NO: 2020021 - RNA, 19 nt, Artificial Sequence
  Description of Artificial Sequence: Synthetic oligonucleotide
  Antisense strand to SEQ ID NO: 2020020
cauucucucaaauguuaag

SEQ ID NO: 2020022 - RNA, 19 nt, Artificial Sequence
  Description of Artificial Sequence: Synthetic oligonucleotide
  Sense strand starting at position 3937 of SEQ ID NO: 1881124
uugagaacgcaguagcauu

SEQ ID NO: 2020023 - RNA, 19 nt, Artificial Sequence
  Description of Artificial Sequence: Synthetic oligonucleotide
  Antisense strand to SEQ ID NO: 2020022
aaugcuacugcguucucaa

SEQ ID NO: 2020024 - RNA, 19 nt, Artificial Sequence
  Description of Artificial Sequence: Synthetic oligonucleotide
  Sense strand starting at position 281 of SEQ ID NO: 1881125
ucagcucuucuuuggauga

SEQ ID NO: 2020025 - RNA, 19 nt, Artificial Sequence
  Description of Artificial Sequence: Synthetic oligonucleotide
  Antisense strand to SEQ ID NO: 2020024
ucauccaaagaagagcuga

SEQ ID NO: 2020026 - RNA, 19 nt, Artificial Sequence
  Description of Artificial Sequence: Synthetic oligonucleotide
  Sense strand starting at position 282 of SEQ ID NO: 1881125
cagcucuucuuuggaugau

SEQ ID NO: 2020027 - RNA, 19 nt, Artificial Sequence
  Description of Artificial Sequence: Synthetic oligonucleotide
  Antisense strand to SEQ ID NO: 2020026
aucauccaaagaagagcug

SEQ ID NO: 2020028 - RNA, 19 nt, Artificial Sequence
  Description of Artificial Sequence: Synthetic oligonucleotide
  Sense strand starting at position 286 of SEQ ID NO: 1881125
ucuucuuuggaugaucagu

SEQ ID NO: 2020029 - RNA, 19 nt, Artificial Sequence
  Description of Artificial Sequence: Synthetic oligonucleotide
  Antisense strand to SEQ ID NO: 2020028
acugaucauccaaagaaga

SEQ ID NO: 2020030 - RNA, 19 nt, Artificial Sequence
  Description of Artificial Sequence: Synthetic oligonucleotide
  Sense strand starting at position 288 of SEQ ID NO: 1881125
uucuuuggaugaucaguau

SEQ ID NO: 2020031 - RNA, 19 nt, Artificial Sequence
  Description of Artificial Sequence: Synthetic oligonucleotide
  Antisense strand to SEQ ID NO: 2020030
auacugaucauccaaagaa

SEQ ID NO: 2020032 - RNA, 19 nt, Artificial Sequence
  Description of Artificial Sequence: Synthetic oligonucleotide
  Sense strand starting at position 294 of SEQ ID NO: 1881125
ggaugaucaguaugcucca

SEQ ID NO: 2020033 - RNA, 19 nt, Artificial Sequence
  Description of Artificial Sequence: Synthetic oligonucleotide
  Antisense strand to SEQ ID NO: 2020032
uggagcauacugaucaucc

SEQ ID NO: 2020034 - RNA, 19 nt, Artificial Sequence
  Description of Artificial Sequence: Synthetic oligonucleotide
  Sense strand starting at position 295 of SEQ ID NO: 1881125
gaugaucaguaugcuccaa

SEQ ID NO: 2020035 - RNA, 19 nt, Artificial Sequence
  Description of Artificial Sequence: Synthetic oligonucleotide
  Antisense strand to SEQ ID NO: 2020034
uuggagcauacugaucauc

SEQ ID NO: 2020036 - RNA, 19 nt, Artificial Sequence
  Description of Artificial Sequence: Synthetic oligonucleotide
  Sense strand starting at position 307 of SEQ ID NO: 1881125
gcuccaagccaguguuauc

SEQ ID NO: 2020037 - RNA, 19 nt, Artificial Sequence
  Description of Artificial Sequence: Synthetic oligonucleotide
  Antisense strand to SEQ ID NO: 2020036
gauaacacuggcuuggagc

SEQ ID NO: 2020038 - RNA, 19 nt, Artificial Sequence
  Description of Artificial Sequence: Synthetic oligonucleotide
  Sense strand starting at position 418 of SEQ ID NO: 1881125
gggcuagugagugaagcuu

SEQ ID NO: 2020039 - RNA, 19 nt, Artificial Sequence
  Description of Artificial Sequence: Synthetic oligonucleotide
  Antisense strand to SEQ ID NO: 2020038
aagcuucacucacuagccc

SEQ ID NO: 2020040 - RNA, 19 nt, Artificial Sequence
  Description of Artificial Sequence: Synthetic oligonucleotide
  Sense strand starting at position 466 of SEQ ID NO: 1881125
ugaucucugucuccuauca

SEQ ID NO: 2020041 - RNA, 19 nt, Artificial Sequence
  Description of Artificial Sequence: Synthetic oligonucleotide
  Antisense strand to SEQ ID NO: 2020040
ugauaggagacagagauca

SEQ ID NO: 2020042 - RNA, 19 nt, Artificial Sequence
  Description of Artificial Sequence: Synthetic oligonucleotide
  Sense strand starting at position 468 of SEQ ID NO: 1881125
aucucugucuccuaucaga

SEQ ID NO: 2020043 - RNA, 19 nt, Artificial Sequence
  Description of Artificial Sequence: Synthetic oligonucleotide
  Antisense strand to SEQ ID NO: 2020042
ucugauaggagacagagau

SEQ ID NO: 2020044 - RNA, 19 nt, Artificial Sequence
  Description of Artificial Sequence: Synthetic oligonucleotide
  Sense strand starting at position 527 of SEQ ID NO: 1881125
gugugaacugcauguggaa

SEQ ID NO: 2020045 - RNA, 19 nt, Artificial Sequence
  Description of Artificial Sequence: Synthetic oligonucleotide
  Antisense strand to SEQ ID NO: 2020044
uuccacaugcaguucacac

SEQ ID NO: 2020046 - RNA, 19 nt, Artificial Sequence
  Description of Artificial Sequence: Synthetic oligonucleotide
  Sense strand starting at position 620 of SEQ ID NO: 1881125
ggaauuaucuaguugcagg

SEQ ID NO: 2020047 - RNA, 19 nt, Artificial Sequence
  Description of Artificial Sequence: Synthetic oligonucleotide
  Antisense strand to SEQ ID NO: 2020046
ccugcaacuagauaauucc

SEQ ID NO: 2020048 - RNA, 19 nt, Artificial Sequence
  Description of Artificial Sequence: Synthetic oligonucleotide
  Sense strand starting at position 830 of SEQ ID NO: 1881125
gcaauagacuauucgguca

SEQ ID NO: 2020049 - RNA, 19 nt, Artificial Sequence
  Description of Artificial Sequence: Synthetic oligonucleotide
  Antisense strand to SEQ ID NO: 2020048
ugaccgaauagucuauugc

SEQ ID NO: 2020050 - RNA, 19 nt, Artificial Sequence
  Description of Artificial Sequence: Synthetic oligonucleotide
  Sense strand starting at position 832 of SEQ ID NO: 1881125
aauagacuauucggucacu

SEQ ID NO: 2020051 - RNA, 19 nt, Artificial Sequence
  Description of Artificial Sequence: Synthetic oligonucleotide
  Antisense strand to SEQ ID NO: 2020050
agugaccgaauagucuauu

SEQ ID NO: 2020052 - RNA, 19 nt, Artificial Sequence
  Description of Artificial Sequence: Synthetic oligonucleotide
  Sense strand starting at position 1430 of SEQ ID NO: 1881125
ggugacacucuagauucuu

SEQ ID NO: 2020053 - RNA, 19 nt, Artificial Sequence
  Description of Artificial Sequence: Synthetic oligonucleotide
  Antisense strand to SEQ ID NO: 2020052
aagaaucuagagugucacc

SEQ ID NO: 2020054 - RNA, 19 nt, Artificial Sequence
  Description of Artificial Sequence: Synthetic oligonucleotide
  Sense strand starting at position 1502 of SEQ ID NO: 1881125
cuguccuuccaagaaagua

SEQ ID NO: 2020055 - RNA, 19 nt, Artificial Sequence
  Description of Artificial Sequence: Synthetic oligonucleotide
  Antisense strand to SEQ ID NO: 2020054
uacuuucuuggaaggacag

SEQ ID NO: 2020056 - RNA, 19 nt, Artificial Sequence
  Description of Artificial Sequence: Synthetic oligonucleotide
  Sense strand starting at position 1784 of SEQ ID NO: 1881125
acaggaaucuugugcuuac

SEQ ID NO: 2020057 - RNA, 19 nt, Artificial Sequence
  Description of Artificial Sequence: Synthetic oligonucleotide
  Antisense strand to SEQ ID NO: 2020056
guaagcacaagauuccugu

SEQ ID NO: 2020058 - RNA, 19 nt, Artificial Sequence
  Description of Artificial Sequence: Synthetic oligonucleotide
  Sense strand starting at position 2027 of SEQ ID NO: 1881125
auccauaaguguuuaugca

SEQ ID NO: 2020059 - RNA, 19 nt, Artificial Sequence
  Description of Artificial Sequence: Synthetic oligonucleotide
  Antisense strand to SEQ ID NO: 2020058
ugcauaaacacuuauggau

SEQ ID NO: 2020060 - RNA, 19 nt, Artificial Sequence
  Description of Artificial Sequence: Synthetic oligonucleotide
  Sense strand starting at position 2028 of SEQ ID NO: 1881125
uccauaaguguuuaugcaa

SEQ ID NO: 2020061 - RNA, 19 nt, Artificial Sequence
  Description of Artificial Sequence: Synthetic oligonucleotide
  Antisense strand to SEQ ID NO: 2020060
uugcauaaacacuuaugga

SEQ ID NO: 2020062 - RNA, 19 nt, Artificial Sequence
  Description of Artificial Sequence: Synthetic oligonucleotide
  Sense strand starting at position 2108 of SEQ ID NO: 1881125
caaauuguugugucucguu

SEQ ID NO: 2020063 - RNA, 19 nt, Artificial Sequence
  Description of Artificial Sequence: Synthetic oligonucleotide
  Antisense strand to SEQ ID NO: 2020062
aacgagacacaacaauuug

SEQ ID NO: 2020064 - RNA, 19 nt, Artificial Sequence
  Description of Artificial Sequence: Synthetic oligonucleotide
  Sense strand starting at position 2375 of SEQ ID NO: 1881125
uguggagauugcugcauua

SEQ ID NO: 2020065 - RNA, 19 nt, Artificial Sequence
  Description of Artificial Sequence: Synthetic oligonucleotide
  Antisense strand to SEQ ID NO: 2020064
uaaugcagcaaucuccaca

SEQ ID NO: 2020066 - RNA, 19 nt, Artificial Sequence
  Description of Artificial Sequence: Synthetic oligonucleotide
  Sense strand starting at position 2377 of SEQ ID NO: 1881125
uggagauugcugcauuaac

SEQ ID NO: 2020067 - RNA, 19 nt, Artificial Sequence
  Description of Artificial Sequence: Synthetic oligonucleotide
  Antisense strand to SEQ ID NO: 2020066
guuaaugcagcaaucucca

SEQ ID NO: 2020068 - RNA, 19 nt, Artificial Sequence
  Description of Artificial Sequence: Synthetic oligonucleotide
  Sense strand starting at position 2462 of SEQ ID NO: 1881125
gaacuaaugugccuuggca

SEQ ID NO: 2020069 - RNA, 19 nt, Artificial Sequence
  Description of Artificial Sequence: Synthetic oligonucleotide
  Antisense strand to SEQ ID NO: 2020068
ugccaaggcacauuaguuc

SEQ ID NO: 2020070 - RNA, 19 nt, Artificial Sequence
  Description of Artificial Sequence: Synthetic oligonucleotide
  Sense strand starting at position 2464 of SEQ ID NO: 1881125
acuaaugugccuuggcaga

SEQ ID NO: 2020071 - RNA, 19 nt, Artificial Sequence
  Description of Artificial Sequence: Synthetic oligonucleotide
  Antisense strand to SEQ ID NO: 2020070
ucugccaaggcacauuagu

SEQ ID NO: 2020072 - RNA, 19 nt, Artificial Sequence
  Description of Artificial Sequence: Synthetic oligonucleotide
  Sense strand starting at position 2642 of SEQ ID NO: 1881125
caacaugaucgauggcuga

SEQ ID NO: 2020073 - RNA, 19 nt, Artificial Sequence
  Description of Artificial Sequence: Synthetic oligonucleotide
  Antisense strand to SEQ ID NO: 2020072
ucagccaucgaucauguug

SEQ ID NO: 2020074 - RNA, 19 nt, Artificial Sequence
  Description of Artificial Sequence: Synthetic oligonucleotide
  Sense strand starting at position 2680 of SEQ ID NO: 1881125
gaguucuaguucucagaga

SEQ ID NO: 2020075 - RNA, 19 nt, Artificial Sequence
  Description of Artificial Sequence: Synthetic oligonucleotide
  Antisense strand to SEQ ID NO: 2020074
ucucugagaacuagaacuc

SEQ ID NO: 2020076 - RNA, 19 nt, Artificial Sequence
  Description of Artificial Sequence: Synthetic oligonucleotide
  Sense strand starting at position 2681 of SEQ ID NO: 1881125
aguucuaguucucagagag

SEQ ID NO: 2020077 - RNA, 19 nt, Artificial Sequence
  Description of Artificial Sequence: Synthetic oligonucleotide
  Antisense strand to SEQ ID NO: 2020076
cucucugagaacuagaacu

SEQ ID NO: 2020078 - RNA, 19 nt, Artificial Sequence
  Description of Artificial Sequence: Synthetic oligonucleotide
  Sense strand starting at position 2822 of SEQ ID NO: 1881125
gggucaucguggccgacaa

SEQ ID NO: 2020079 - RNA, 19 nt, Artificial Sequence
  Description of Artificial Sequence: Synthetic oligonucleotide
  Antisense strand to SEQ ID NO: 2020078
uugucggccacgaugaccc

SEQ ID NO: 2020080 - RNA, 19 nt, Artificial Sequence
  Description of Artificial Sequence: Synthetic oligonucleotide
  Sense strand starting at position 2834 of SEQ ID NO: 1881125
ccgacaagggucugugaca

SEQ ID NO: 2020081 - RNA, 19 nt, Artificial Sequence
  Description of Artificial Sequence: Synthetic oligonucleotide
  Antisense strand to SEQ ID NO: 2020080
ugucacagacccuugucgg

SEQ ID NO: 2020082 - RNA, 19 nt, Artificial Sequence
  Description of Artificial Sequence: Synthetic oligonucleotide
  Sense strand starting at position 3021 of SEQ ID NO: 1881125
cuaauauugguccaagcua

SEQ ID NO: 2020083 - RNA, 19 nt, Artificial Sequence
  Description of Artificial Sequence: Synthetic oligonucleotide
  Antisense strand to SEQ ID NO: 2020082
uagcuuggaccaauauuag

SEQ ID NO: 2020084 - RNA, 19 nt, Artificial Sequence
  Description of Artificial Sequence: Synthetic oligonucleotide
  Sense strand starting at position 3104 of SEQ ID NO: 1881125
uuugaagaaucucaggcaa

SEQ ID NO: 2020085 - RNA, 19 nt, Artificial Sequence
  Description of Artificial Sequence: Synthetic oligonucleotide
  Antisense strand to SEQ ID NO: 2020084
uugccugagauucuucaaa

SEQ ID NO: 2020086 - RNA, 19 nt, Artificial Sequence
  Description of Artificial Sequence: Synthetic oligonucleotide
  Sense strand starting at position 3106 of SEQ ID NO: 1881125
ugaagaaucucaggcaacu

SEQ ID NO: 2020087 - RNA, 19 nt, Artificial Sequence
  Description of Artificial Sequence: Synthetic oligonucleotide
  Antisense strand to SEQ ID NO: 2020086
aguugccugagauucuuca

SEQ ID NO: 2020088 - RNA, 19 nt, Artificial Sequence
  Description of Artificial Sequence: Synthetic oligonucleotide
  Sense strand starting at position 3126 of SEQ ID NO: 1881125
gcuuccuucugcucaagga

SEQ ID NO: 2020089 - RNA, 19 nt, Artificial Sequence
  Description of Artificial Sequence: Synthetic oligonucleotide
  Antisense strand to SEQ ID NO: 2020088
uccuugagcagaaggaagc

SEQ ID NO: 2020090 - RNA, 19 nt, Artificial Sequence
  Description of Artificial Sequence: Synthetic oligonucleotide
  Sense strand starting at position 3457 of SEQ ID NO: 1881125
uuaggaauggccuguaaga

SEQ ID NO: 2020091 - RNA, 19 nt, Artificial Sequence
  Description of Artificial Sequence: Synthetic oligonucleotide
  Antisense strand to SEQ ID NO: 2020090
ucuuacaggccauuccuaa

SEQ ID NO: 2020092 - RNA, 19 nt, Artificial Sequence
  Description of Artificial Sequence: Synthetic oligonucleotide
  Sense strand starting at position 3668 of SEQ ID NO: 1881125
gauuauuucucagaagugu

SEQ ID NO: 2020093 - RNA, 19 nt, Artificial Sequence
  Description of Artificial Sequence: Synthetic oligonucleotide
  Antisense strand to SEQ ID NO: 2020092
acacuucugagaaauaauc

SEQ ID NO: 2020094 - RNA, 19 nt, Artificial Sequence
  Description of Artificial Sequence: Synthetic oligonucleotide
  Sense strand starting at position 3677 of SEQ ID NO: 1881125
ucagaaguguuuguugaaa

SEQ ID NO: 2020095 - RNA, 19 nt, Artificial Sequence
  Description of Artificial Sequence: Synthetic oligonucleotide
  Antisense strand to SEQ ID NO: 2020094
uuucaacaaacacuucuga

SEQ ID NO: 2020096 - RNA, 19 nt, Artificial Sequence
  Description of Artificial Sequence: Synthetic oligonucleotide
  Sense strand starting at position 3721 of SEQ ID NO: 1881125
auucaauuguggugcggua

SEQ ID NO: 2020097 - RNA, 19 nt, Artificial Sequence
  Description of Artificial Sequence: Synthetic oligonucleotide
  Antisense strand to SEQ ID NO: 2020096
uaccgcaccacaauugaau

SEQ ID NO: 2020098 - RNA, 19 nt, Artificial Sequence
  Description of Artificial Sequence: Synthetic oligonucleotide
  Sense strand starting at position 3781 of SEQ ID NO: 1881125
acacaugugucuuucugga

SEQ ID NO: 2020099 - RNA, 19 nt, Artificial Sequence
  Description of Artificial Sequence: Synthetic oligonucleotide
  Antisense strand to SEQ ID NO: 2020098
uccagaaagacacaugugu

SEQ ID NO: 2020100 - RNA, 19 nt, Artificial Sequence
  Description of Artificial Sequence: Synthetic oligonucleotide
  Sense strand starting at position 107 of SEQ ID NO: 1881126
uugcuaugccaugaaagcu

SEQ ID NO: 2020101 - RNA, 19 nt, Artificial Sequence
  Description of Artificial Sequence: Synthetic oligonucleotide
  Antisense strand to SEQ ID NO: 2020100
agcuuucauggcauagcaa

SEQ ID NO: 2020102 - RNA, 19 nt, Artificial Sequence
  Description of Artificial Sequence: Synthetic oligonucleotide
  Sense strand starting at position 117 of SEQ ID NO: 1881126
augaaagcuaacugacgua

SEQ ID NO: 2020103 - RNA, 19 nt, Artificial Sequence
  Description of Artificial Sequence: Synthetic oligonucleotide
  Antisense strand to SEQ ID NO: 2020102
uacgucaguuagcuuucau

SEQ ID NO: 2020104 - RNA, 19 nt, Artificial Sequence
  Description of Artificial Sequence: Synthetic oligonucleotide
  Sense strand starting at position 165 of SEQ ID NO: 1881126
ucuguuuccuccugagagg

SEQ ID NO: 2020105 - RNA, 19 nt, Artificial Sequence
  Description of Artificial Sequence: Synthetic oligonucleotide
  Antisense strand to SEQ ID NO: 2020104
ccucucaggaggaaacaga

SEQ ID NO: 2020106 - RNA, 19 nt, Artificial Sequence
  Description of Artificial Sequence: Synthetic oligonucleotide
  Sense strand starting at position 286 of SEQ ID NO: 1881126
agcauugacuccugaaaug

SEQ ID NO: 2020107 - RNA, 19 nt, Artificial Sequence
  Description of Artificial Sequence: Synthetic oligonucleotide
  Antisense strand to SEQ ID NO: 2020106
cauuucaggagucaaugcu

SEQ ID NO: 2020108 - RNA, 19 nt, Artificial Sequence
  Description of Artificial Sequence: Synthetic oligonucleotide
  Sense strand starting at position 339 of SEQ ID NO: 1881126
guaacuuuccuccauaagg

SEQ ID NO: 2020109 - RNA, 19 nt, Artificial Sequence
  Description of Artificial Sequence: Synthetic oligonucleotide
  Antisense strand to SEQ ID NO: 2020108
ccuuauggaggaaaguuac

SEQ ID NO: 2020110 - RNA, 19 nt, Artificial Sequence
  Description of Artificial Sequence: Synthetic oligonucleotide
  Sense strand starting at position 364 of SEQ ID NO: 1881126
gaugucucauggucaaguu

SEQ ID NO: 2020111 - RNA, 19 nt, Artificial Sequence
  Description of Artificial Sequence: Synthetic oligonucleotide
  Antisense strand to SEQ ID NO: 2020110
aacuugaccaugagacauc

SEQ ID NO: 2020112 - RNA, 19 nt, Artificial Sequence
  Description of Artificial Sequence: Synthetic oligonucleotide
  Sense strand starting at position 365 of SEQ ID NO: 1881126
augucucauggucaaguuu

SEQ ID NO: 2020113 - RNA, 19 nt, Artificial Sequence
  Description of Artificial Sequence: Synthetic oligonucleotide
  Antisense strand to SEQ ID NO: 2020112
aaacuugaccaugagacau

SEQ ID NO: 2020114 - RNA, 19 nt, Artificial Sequence
  Description of Artificial Sequence: Synthetic oligonucleotide
  Sense strand starting at position 701 of SEQ ID NO: 1881126
gggaauaacuacuagucaa

SEQ ID NO: 2020115 - RNA, 19 nt, Artificial Sequence
  Description of Artificial Sequence: Synthetic oligonucleotide
  Antisense strand to SEQ ID NO: 2020114
uugacuaguaguuauuccc

SEQ ID NO: 2020116 - RNA, 19 nt, Artificial Sequence
  Description of Artificial Sequence: Synthetic oligonucleotide
  Sense strand starting at position 908 of SEQ ID NO: 1881126
ccacaagaauggugacuca

SEQ ID NO: 2020117 - RNA, 19 nt, Artificial Sequence
  Description of Artificial Sequence: Synthetic oligonucleotide
  Antisense strand to SEQ ID NO: 2020116
ugagucaccauucuugugg

SEQ ID NO: 2020118 - RNA, 19 nt, Artificial Sequence
  Description of Artificial Sequence: Synthetic oligonucleotide
  Sense strand starting at position 953 of SEQ ID NO: 1881126
uggcaaguauuuccugagu

SEQ ID NO: 2020119 - RNA, 19 nt, Artificial Sequence
  Description of Artificial Sequence: Synthetic oligonucleotide
  Antisense strand to SEQ ID NO: 2020118
acucaggaaauacuugcca

SEQ ID NO: 2020120 - RNA, 19 nt, Artificial Sequence
  Description of Artificial Sequence: Synthetic oligonucleotide
  Sense strand starting at position 955 of SEQ ID NO: 1881126
gcaaguauuuccugagucc

SEQ ID NO: 2020121 - RNA, 19 nt, Artificial Sequence
  Description of Artificial Sequence: Synthetic oligonucleotide
  Antisense strand to SEQ ID NO: 2020120
ggacucaggaaauacuugc

SEQ ID NO: 2020122 - RNA, 19 nt, Artificial Sequence
  Description of Artificial Sequence: Synthetic oligonucleotide
  Sense strand starting at position 993 of SEQ ID NO: 1881126
cuaagagucacagggcaua

SEQ ID NO: 2020123 - RNA, 19 nt, Artificial Sequence
  Description of Artificial Sequence: Synthetic oligonucleotide
  Antisense strand to SEQ ID NO: 2020122
uaugcccugugacucuuag

SEQ ID NO: 2020124 - RNA, 19 nt, Artificial Sequence
  Description of Artificial Sequence: Synthetic oligonucleotide
  Sense strand starting at position 1124 of SEQ ID NO: 1881126
caaagaaugugaugcaguu

SEQ ID NO: 2020125 - RNA, 19 nt, Artificial Sequence
  Description of Artificial Sequence: Synthetic oligonucleotide
  Antisense strand to SEQ ID NO: 2020124
aacugcaucacauucuuug

SEQ ID NO: 2020126 - RNA, 19 nt, Artificial Sequence
  Description of Artificial Sequence: Synthetic oligonucleotide
  Sense strand starting at position 1146 of SEQ ID NO: 1881126
uggacaaagacuugguagu

SEQ ID NO: 2020127 - RNA, 19 nt, Artificial Sequence
  Description of Artificial Sequence: Synthetic oligonucleotide
  Antisense strand to SEQ ID NO: 2020126
acuaccaagucuuugucca

SEQ ID NO: 2020128 - RNA, 19 nt, Artificial Sequence
  Description of Artificial Sequence: Synthetic oligonucleotide
  Sense strand starting at position 1182 of SEQ ID NO: 1881126
aggagaacguucuagaagu

SEQ ID NO: 2020129 - RNA, 19 nt, Artificial Sequence
  Description of Artificial Sequence: Synthetic oligonucleotide
  Antisense strand to SEQ ID NO: 2020128
acuucuagaacguucuccu

SEQ ID NO: 2020130 - RNA, 19 nt, Artificial Sequence
  Description of Artificial Sequence: Synthetic oligonucleotide
  Sense strand starting at position 1183 of SEQ ID NO: 1881126
ggagaacguucuagaagug

SEQ ID NO: 2020131 - RNA, 19 nt, Artificial Sequence
  Description of Artificial Sequence: Synthetic oligonucleotide
  Antisense strand to SEQ ID NO: 2020130
cacuucuagaacguucucc

SEQ ID NO: 2020132 - RNA, 19 nt, Artificial Sequence
  Description of Artificial Sequence: Synthetic oligonucleotide
  Sense strand starting at position 1503 of SEQ ID NO: 1881126
aagcccagguguucugaaa

SEQ ID NO: 2020133 - RNA, 19 nt, Artificial Sequence
  Description of Artificial Sequence: Synthetic oligonucleotide
  Antisense strand to SEQ ID NO: 2020132
uuucagaacaccugggcuu

SEQ ID NO: 2020134 - RNA, 19 nt, Artificial Sequence
  Description of Artificial Sequence: Synthetic oligonucleotide
  Sense strand starting at position 1690 of SEQ ID NO: 1881126
cccuaugucccuugauucu

SEQ ID NO: 2020135 - RNA, 19 nt, Artificial Sequence
  Description of Artificial Sequence: Synthetic oligonucleotide
  Antisense strand to SEQ ID NO: 2020134
agaaucaagggacauaggg

SEQ ID NO: 2020136 - RNA, 19 nt, Artificial Sequence
  Description of Artificial Sequence: Synthetic oligonucleotide
  Sense strand starting at position 1699 of SEQ ID NO: 1881126
ccuugauucuauuccugua

SEQ ID NO: 2020137 - RNA, 19 nt, Artificial Sequence
  Description of Artificial Sequence: Synthetic oligonucleotide
  Antisense strand to SEQ ID NO: 2020136
uacaggaauagaaucaagg

SEQ ID NO: 2020138 - RNA, 19 nt, Artificial Sequence
  Description of Artificial Sequence: Synthetic oligonucleotide
  Sense strand starting at position 1709 of SEQ ID NO: 1881126
auuccuguaucacuauuga

SEQ ID NO: 2020139 - RNA, 19 nt, Artificial Sequence
  Description of Artificial Sequence: Synthetic oligonucleotide
  Antisense strand to SEQ ID NO: 2020138
ucaauagugauacaggaau

SEQ ID NO: 2020140 - RNA, 19 nt, Artificial Sequence
  Description of Artificial Sequence: Synthetic oligonucleotide
  Sense strand starting at position 1885 of SEQ ID NO: 1881126
cuguguucuccuuacacag

SEQ ID NO: 2020141 - RNA, 19 nt, Artificial Sequence
  Description of Artificial Sequence: Synthetic oligonucleotide
  Antisense strand to SEQ ID NO: 2020140
cuguguaaggagaacacag

SEQ ID NO: 2020142 - RNA, 19 nt, Artificial Sequence
  Description of Artificial Sequence: Synthetic oligonucleotide
  Sense strand starting at position 2026 of SEQ ID NO: 1881126
cugaauuuggcccagcgua

SEQ ID NO: 2020143 - RNA, 19 nt, Artificial Sequence
  Description of Artificial Sequence: Synthetic oligonucleotide
  Antisense strand to SEQ ID NO: 2020142
uacgcugggccaaauucag

SEQ ID NO: 2020144 - RNA, 19 nt, Artificial Sequence
  Description of Artificial Sequence: Synthetic oligonucleotide
  Sense strand starting at position 2038 of SEQ ID NO: 1881126
cagcguaagcguucuggga

SEQ ID NO: 2020145 - RNA, 19 nt, Artificial Sequence
  Description of Artificial Sequence: Synthetic oligonucleotide
  Antisense strand to SEQ ID NO: 2020144
ucccagaacgcuuacgcug

SEQ ID NO: 2020146 - RNA, 19 nt, Artificial Sequence
  Description of Artificial Sequence: Synthetic oligonucleotide
  Sense strand starting at position 2042 of SEQ ID NO: 1881126
guaagcguucugggaaugu

SEQ ID NO: 2020147 - RNA, 19 nt, Artificial Sequence
  Description of Artificial Sequence: Synthetic oligonucleotide
  Antisense strand to SEQ ID NO: 2020146
acauucccagaacgcuuac

SEQ ID NO: 2020148 - RNA, 19 nt, Artificial Sequence
  Description of Artificial Sequence: Synthetic oligonucleotide
  Sense strand starting at position 2259 of SEQ ID NO: 1881126
ggugcucgugcuggguaaa

SEQ ID NO: 2020149 - RNA, 19 nt, Artificial Sequence
  Description of Artificial Sequence: Synthetic oligonucleotide
  Antisense strand to SEQ ID NO: 2020148
uuuacccagcacgagcacc

SEQ ID NO: 2020150 - RNA, 19 nt, Artificial Sequence
  Description of Artificial Sequence: Synthetic oligonucleotide
  Sense strand starting at position 2308 of SEQ ID NO: 1881126
aggguucguccaugccaca

SEQ ID NO: 2020151 - RNA, 19 nt, Artificial Sequence
  Description of Artificial Sequence: Synthetic oligonucleotide
  Antisense strand to SEQ ID NO: 2020150
uguggcauggacgaacccu

SEQ ID NO: 2020152 - RNA, 19 nt, Artificial Sequence
  Description of Artificial Sequence: Synthetic oligonucleotide
  Sense strand starting at position 2522 of SEQ ID NO: 1881126
ugccguuuccugcagaaca

SEQ ID NO: 2020153 - RNA, 19 nt, Artificial Sequence
  Description of Artificial Sequence: Synthetic oligonucleotide
  Antisense strand to SEQ ID NO: 2020152
uguucugcaggaaacggca

SEQ ID NO: 2020154 - RNA, 19 nt, Artificial Sequence
  Description of Artificial Sequence: Synthetic oligonucleotide
  Sense strand starting at position 2581 of SEQ ID NO: 1881126
gugcuuaguagggacuaga

SEQ ID NO: 2020155 - RNA, 19 nt, Artificial Sequence
  Description of Artificial Sequence: Synthetic oligonucleotide
  Antisense strand to SEQ ID NO: 2020154
ucuagucccuacuaagcac

SEQ ID NO: 2020156 - RNA, 19 nt, Artificial Sequence
  Description of Artificial Sequence: Synthetic oligonucleotide
  Sense strand starting at position 2591 of SEQ ID NO: 1881126
gggacuagauccuguacag

SEQ ID NO: 2020157 - RNA, 19 nt, Artificial Sequence
  Description of Artificial Sequence: Synthetic oligonucleotide
  Antisense strand to SEQ ID NO: 2020156
cuguacaggaucuaguccc

SEQ ID NO: 2020158 - RNA, 19 nt, Artificial Sequence
  Description of Artificial Sequence: Synthetic oligonucleotide
  Sense strand starting at position 2641 of SEQ ID NO: 1881126
uuacaagugcuuugucuac

SEQ ID NO: 2020159 - RNA, 19 nt, Artificial Sequence
  Description of Artificial Sequence: Synthetic oligonucleotide
  Antisense strand to SEQ ID NO: 2020158
guagacaaagcacuuguaa

SEQ ID NO: 2020160 - RNA, 19 nt, Artificial Sequence
  Description of Artificial Sequence: Synthetic oligonucleotide
  Sense strand starting at position 2643 of SEQ ID NO: 1881126
acaagugcuuugucuacuu

SEQ ID NO: 2020161 - RNA, 19 nt, Artificial Sequence
  Description of Artificial Sequence: Synthetic oligonucleotide
  Antisense strand to SEQ ID NO: 2020160
aaguagacaaagcacuugu

SEQ ID NO: 2020162 - RNA, 19 nt, Artificial Sequence
  Description of Artificial Sequence: Synthetic oligonucleotide
  Sense strand starting at position 2653 of SEQ ID NO: 1881126
ugucuacuuagaggugaag

SEQ ID NO: 2020163 - RNA, 19 nt, Artificial Sequence
  Description of Artificial Sequence: Synthetic oligonucleotide
  Antisense strand to SEQ ID NO: 2020162
cuucaccucuaaguagaca

SEQ ID NO: 2020164 - RNA, 19 nt, Artificial Sequence
  Description of Artificial Sequence: Synthetic oligonucleotide
  Sense strand starting at position 3220 of SEQ ID NO: 1881126
ugcugugacagccaggaaa

SEQ ID NO: 2020165 - RNA, 19 nt, Artificial Sequence
  Description of Artificial Sequence: Synthetic oligonucleotide
  Antisense strand to SEQ ID NO: 2020164
uuuccuggcugucacagca

SEQ ID NO: 2020166 - RNA, 19 nt, Artificial Sequence
  Description of Artificial Sequence: Synthetic oligonucleotide
  Sense strand starting at position 3365 of SEQ ID NO: 1881126
gaugguuaccucuagguca

SEQ ID NO: 2020167 - RNA, 19 nt, Artificial Sequence
  Description of Artificial Sequence: Synthetic oligonucleotide
  Antisense strand to SEQ ID NO: 2020166
ugaccuagagguaaccauc

SEQ ID NO: 2020168 - RNA, 19 nt, Artificial Sequence
  Description of Artificial Sequence: Synthetic oligonucleotide
  Sense strand starting at position 3373 of SEQ ID NO: 1881126
ccucuaggucacuguggaa

SEQ ID NO: 2020169 - RNA, 19 nt, Artificial Sequence
  Description of Artificial Sequence: Synthetic oligonucleotide
  Antisense strand to SEQ ID NO: 2020168
uuccacagugaccuagagg

SEQ ID NO: 2020170 - RNA, 19 nt, Artificial Sequence
  Description of Artificial Sequence: Synthetic oligonucleotide
  Sense strand starting at position 3693 of SEQ ID NO: 1881126
caccguggcuggguuuaau

SEQ ID NO: 2020171 - RNA, 19 nt, Artificial Sequence
  Description of Artificial Sequence: Synthetic oligonucleotide
  Antisense strand to SEQ ID NO: 2020170
auuaaacccagccacggug

SEQ ID NO: 2020172 - RNA, 19 nt, Artificial Sequence
  Description of Artificial Sequence: Synthetic oligonucleotide
  Sense strand starting at position 3702 of SEQ ID NO: 1881126
uggguuuaaucugcuagca

SEQ ID NO: 2020173 - RNA, 19 nt, Artificial Sequence
  Description of Artificial Sequence: Synthetic oligonucleotide
  Antisense strand to SEQ ID NO: 2020172
ugcuagcagauuaaaccca

SEQ ID NO: 2020174 - RNA, 19 nt, Artificial Sequence
  Description of Artificial Sequence: Synthetic oligonucleotide
  Sense strand starting at position 3935 of SEQ ID NO: 1881126
aauggagacucggguuaag

SEQ ID NO: 2020175 - RNA, 19 nt, Artificial Sequence
  Description of Artificial Sequence: Synthetic oligonucleotide
  Antisense strand to SEQ ID NO: 2020174
cuuaacccgagucuccauu

SEQ ID NO: 2020176 - RNA, 19 nt, Artificial Sequence
  Description of Artificial Sequence: Synthetic oligonucleotide
  Sense strand starting at position 3946 of SEQ ID NO: 1881126
ggguuaaguuguguguuag

SEQ ID NO: 2020177 - RNA, 19 nt, Artificial Sequence
  Description of Artificial Sequence: Synthetic oligonucleotide
  Antisense strand to SEQ ID NO: 2020176
cuaacacacaacuuaaccc

SEQ ID NO: 2020178 - RNA, 19 nt, Artificial Sequence
  Description of Artificial Sequence: Synthetic oligonucleotide
  Sense strand starting at position 3947 of SEQ ID NO: 1881126
gguuaaguuguguguuaga

SEQ ID NO: 2020179 - RNA, 19 nt, Artificial Sequence
  Description of Artificial Sequence: Synthetic oligonucleotide
  Antisense strand to SEQ ID NO: 2020178
ucuaacacacaacuuaacc

SEQ ID NO: 2020180 - RNA, 19 nt, Artificial Sequence
  Description of Artificial Sequence: Synthetic oligonucleotide
  Sense strand starting at position 360 of SEQ ID NO: 1881127
agaacauccugugcuauca

SEQ ID NO: 2020181 - RNA, 19 nt, Artificial Sequence
  Description of Artificial Sequence: Synthetic oligonucleotide
  Antisense strand to SEQ ID NO: 2020180
ugauagcacaggauguucu

SEQ ID NO: 2020182 - RNA, 19 nt, Artificial Sequence
  Description of Artificial Sequence: Synthetic oligonucleotide
  Sense strand starting at position 393 of SEQ ID NO: 1881127
gacacacaucauugagguu

SEQ ID NO: 2020183 - RNA, 19 nt, Artificial Sequence
  Description of Artificial Sequence: Synthetic oligonucleotide
  Antisense strand to SEQ ID NO: 2020182
aaccucaaugauguguguc

SEQ ID NO: 2020184 - RNA, 19 nt, Artificial Sequence
  Description of Artificial Sequence: Synthetic oligonucleotide
  Sense strand starting at position 400 of SEQ ID NO: 1881127
aucauugagguuugaguga

SEQ ID NO: 2020185 - RNA, 19 nt, Artificial Sequence
  Description of Artificial Sequence: Synthetic oligonucleotide
  Antisense strand to SEQ ID NO: 2020184
ucacucaaaccucaaugau

SEQ ID NO: 2020186 - RNA, 19 nt, Artificial Sequence
  Description of Artificial Sequence: Synthetic oligonucleotide
  Sense strand starting at position 428 of SEQ ID NO: 1881127
uagcaauuauguccuagag

SEQ ID NO: 2020187 - RNA, 19 nt, Artificial Sequence
  Description of Artificial Sequence: Synthetic oligonucleotide
  Antisense strand to SEQ ID NO: 2020186
cucuaggacauaauugcua

SEQ ID NO: 2020188 - RNA, 19 nt, Artificial Sequence
  Description of Artificial Sequence: Synthetic oligonucleotide
  Sense strand starting at position 432 of SEQ ID NO: 1881127
aauuauguccuagaguagu

SEQ ID NO: 2020189 - RNA, 19 nt, Artificial Sequence
  Description of Artificial Sequence: Synthetic oligonucleotide
  Antisense strand to SEQ ID NO: 2020188
acuacucuaggacauaauu

SEQ ID NO: 2020190 - RNA, 19 nt, Artificial Sequence
  Description of Artificial Sequence: Synthetic oligonucleotide
  Sense strand starting at position 435 of SEQ ID NO: 1881127
uauguccuagaguaguaau

SEQ ID NO: 2020191 - RNA, 19 nt, Artificial Sequence
  Description of Artificial Sequence: Synthetic oligonucleotide
  Antisense strand to SEQ ID NO: 2020190
auuacuacucuaggacaua

SEQ ID NO: 2020192 - RNA, 19 nt, Artificial Sequence
  Description of Artificial Sequence: Synthetic oligonucleotide
  Sense strand starting at position 550 of SEQ ID NO: 1881127
ugagaauuguuucucucuu

SEQ ID NO: 2020193 - RNA, 19 nt, Artificial Sequence
  Description of Artificial Sequence: Synthetic oligonucleotide
  Antisense strand to SEQ ID NO: 2020192
aagagagaaacaauucuca

SEQ ID NO: 2020194 - RNA, 19 nt, Artificial Sequence
  Description of Artificial Sequence: Synthetic oligonucleotide
  Sense strand starting at position 640 of SEQ ID NO: 1881127
gcaaaucuucuguaaagug

SEQ ID NO: 2020195 - RNA, 19 nt, Artificial Sequence
  Description of Artificial Sequence: Synthetic oligonucleotide
  Antisense strand to SEQ ID NO: 2020194
cacuuuacagaagauuugc

SEQ ID NO: 2020196 - RNA, 19 nt, Artificial Sequence
  Description of Artificial Sequence: Synthetic oligonucleotide
  Sense strand starting at position 708 of SEQ ID NO: 1881127
aggugcuuccaagagguca

SEQ ID NO: 2020197 - RNA, 19 nt, Artificial Sequence
  Description of Artificial Sequence: Synthetic oligonucleotide
  Antisense strand to SEQ ID NO: 2020196
ugaccucuuggaagcaccu

SEQ ID NO: 2020198 - RNA, 19 nt, Artificial Sequence
  Description of Artificial Sequence: Synthetic oligonucleotide
  Sense strand starting at position 823 of SEQ ID NO: 1881127
aggccuagaauguaaguaa

SEQ ID NO: 2020199 - RNA, 19 nt, Artificial Sequence
  Description of Artificial Sequence: Synthetic oligonucleotide
  Antisense strand to SEQ ID NO: 2020198
uuacuuacauucuaggccu

SEQ ID NO: 2020200 - RNA, 19 nt, Artificial Sequence
  Description of Artificial Sequence: Synthetic oligonucleotide
  Sense strand starting at position 826 of SEQ ID NO: 1881127
ccuagaauguaaguaacuu

SEQ ID NO: 2020201 - RNA, 19 nt, Artificial Sequence
  Description of Artificial Sequence: Synthetic oligonucleotide
  Antisense strand to SEQ ID NO: 2020200
aaguuacuuacauucuagg

SEQ ID NO: 2020202 - RNA, 19 nt, Artificial Sequence
  Description of Artificial Sequence: Synthetic oligonucleotide
  Sense strand starting at position 830 of SEQ ID NO: 1881127
gaauguaaguaacuuguua

SEQ ID NO: 2020203 - RNA, 19 nt, Artificial Sequence
  Description of Artificial Sequence: Synthetic oligonucleotide
  Antisense strand to SEQ ID NO: 2020202
uaacaaguuacuuacauuc

SEQ ID NO: 2020204 - RNA, 19 nt, Artificial Sequence
  Description of Artificial Sequence: Synthetic oligonucleotide
  Sense strand starting at position 834 of SEQ ID NO: 1881127
guaaguaacuuguuagaca

SEQ ID NO: 2020205 - RNA, 19 nt, Artificial Sequence
  Description of Artificial Sequence: Synthetic oligonucleotide
  Antisense strand to SEQ ID NO: 2020204
ugucuaacaaguuacuuac

SEQ ID NO: 2020206 - RNA, 19 nt, Artificial Sequence
  Description of Artificial Sequence: Synthetic oligonucleotide
  Sense strand starting at position 842 of SEQ ID NO: 1881127
cuuguuagacauugucaua

SEQ ID NO: 2020207 - RNA, 19 nt, Artificial Sequence
  Description of Artificial Sequence: Synthetic oligonucleotide
  Antisense strand to SEQ ID NO: 2020206
uaugacaaugucuaacaag

SEQ ID NO: 2020208 - RNA, 19 nt, Artificial Sequence
  Description of Artificial Sequence: Synthetic oligonucleotide
  Sense strand starting at position 866 of SEQ ID NO: 1881127
gcgauaaaugcagacccuu

SEQ ID NO: 2020209 - RNA, 19 nt, Artificial Sequence
  Description of Artificial Sequence: Synthetic oligonucleotide
  Antisense strand to SEQ ID NO: 2020208
aagggucugcauuuaucgc

SEQ ID NO: 2020210 - RNA, 19 nt, Artificial Sequence
  Description of Artificial Sequence: Synthetic oligonucleotide
  Sense strand starting at position 971 of SEQ ID NO: 1881127
uuaugucaguaacuggaaa

SEQ ID NO: 2020211 - RNA, 19 nt, Artificial Sequence
  Description of Artificial Sequence: Synthetic oligonucleotide
  Antisense strand to SEQ ID NO: 2020210
uuuccaguuacugacauaa

SEQ ID NO: 2020212 - RNA, 19 nt, Artificial Sequence
  Description of Artificial Sequence: Synthetic oligonucleotide
  Sense strand starting at position 973 of SEQ ID NO: 1881127
augucaguaacuggaaagu

SEQ ID NO: 2020213 - RNA, 19 nt, Artificial Sequence
  Description of Artificial Sequence: Synthetic oligonucleotide
  Antisense strand to SEQ ID NO: 2020212
acuuuccaguuacugacau

SEQ ID NO: 2020214 - RNA, 19 nt, Artificial Sequence
  Description of Artificial Sequence: Synthetic oligonucleotide
  Sense strand starting at position 1031 of SEQ ID NO: 1881127
aucauaucuggaugucuau

SEQ ID NO: 2020215 - RNA, 19 nt, Artificial Sequence
  Description of Artificial Sequence: Synthetic oligonucleotide
  Antisense strand to SEQ ID NO: 2020214
auagacauccagauaugau

SEQ ID NO: 2020216 - RNA, 19 nt, Artificial Sequence
  Description of Artificial Sequence: Synthetic oligonucleotide
  Sense strand starting at position 1066 of SEQ ID NO: 1881127
cauuuaguguuacugucga

SEQ ID NO: 2020217 - RNA, 19 nt, Artificial Sequence
  Description of Artificial Sequence: Synthetic oligonucleotide
  Antisense strand to SEQ ID NO: 2020216
ucgacaguaacacuaaaug

SEQ ID NO: 2020218 - RNA, 19 nt, Artificial Sequence
  Description of Artificial Sequence: Synthetic oligonucleotide
  Sense strand starting at position 1194 of SEQ ID NO: 1881127
ggccgucgacaagaugaaa

SEQ ID NO: 2020219 - RNA, 19 nt, Artificial Sequence
  Description of Artificial Sequence: Synthetic oligonucleotide
  Antisense strand to SEQ ID NO: 2020218
uuucaucuugucgacggcc

SEQ ID NO: 2020220 - RNA, 19 nt, Artificial Sequence
  Description of Artificial Sequence: Synthetic oligonucleotide
  Sense strand starting at position 1322 of SEQ ID NO: 1881127
gcuuauaagccuuacagaa

SEQ ID NO: 2020221 - RNA, 19 nt, Artificial Sequence
  Description of Artificial Sequence: Synthetic oligonucleotide
  Antisense strand to SEQ ID NO: 2020220
uucuguaaggcuuauaagc

SEQ ID NO: 2020222 - RNA, 19 nt, Artificial Sequence
  Description of Artificial Sequence: Synthetic oligonucleotide
  Sense strand starting at position 1404 of SEQ ID NO: 1881127
gucuuagaacuuugacaaa

SEQ ID NO: 2020223 - RNA, 19 nt, Artificial Sequence
  Description of Artificial Sequence: Synthetic oligonucleotide
  Antisense strand to SEQ ID NO: 2020222
uuugucaaaguucuaagac

SEQ ID NO: 2020224 - RNA, 19 nt, Artificial Sequence
  Description of Artificial Sequence: Synthetic oligonucleotide
  Sense strand starting at position 1580 of SEQ ID NO: 1881127
uuuguagucuacuuggaga

SEQ ID NO: 2020225 - RNA, 19 nt, Artificial Sequence
  Description of Artificial Sequence: Synthetic oligonucleotide
  Antisense strand to SEQ ID NO: 2020224
ucuccaaguagacuacaaa

SEQ ID NO: 2020226 - RNA, 19 nt, Artificial Sequence
  Description of Artificial Sequence: Synthetic oligonucleotide
  Sense strand starting at position 2001 of SEQ ID NO: 1881127
gcuccucagaaugagaguu

SEQ ID NO: 2020227 - RNA, 19 nt, Artificial Sequence
  Description of Artificial Sequence: Synthetic oligonucleotide
  Antisense strand to SEQ ID NO: 2020226
aacucucauucugaggagc

SEQ ID NO: 2020228 - RNA, 19 nt, Artificial Sequence
  Description of Artificial Sequence: Synthetic oligonucleotide
  Sense strand starting at position 2068 of SEQ ID NO: 1881127
gcgugaagucuuucugcag

SEQ ID NO: 2020229 - RNA, 19 nt, Artificial Sequence
  Description of Artificial Sequence: Synthetic oligonucleotide
  Antisense strand to SEQ ID NO: 2020228
cugcagaaagacuucacgc

SEQ ID NO: 2020230 - RNA, 19 nt, Artificial Sequence
  Description of Artificial Sequence: Synthetic oligonucleotide
  Sense strand starting at position 2154 of SEQ ID NO: 1881127
cccagugcuccugagggaa

SEQ ID NO: 2020231 - RNA, 19 nt, Artificial Sequence
  Description of Artificial Sequence: Synthetic oligonucleotide
  Antisense strand to SEQ ID NO: 2020230
uucccucaggagcacuggg

SEQ ID NO: 2020232 - RNA, 19 nt, Artificial Sequence
  Description of Artificial Sequence: Synthetic oligonucleotide
  Sense strand starting at position 2224 of SEQ ID NO: 1881127
ugacacgucucacuugaau

SEQ ID NO: 2020233 - RNA, 19 nt, Artificial Sequence
  Description of Artificial Sequence: Synthetic oligonucleotide
  Antisense strand to SEQ ID NO: 2020232
auucaagugagacguguca

SEQ ID NO: 2020234 - RNA, 19 nt, Artificial Sequence
  Description of Artificial Sequence: Synthetic oligonucleotide
  Sense strand starting at position 2476 of SEQ ID NO: 1881127
gaaucaguauugccaguga

SEQ ID NO: 2020235 - RNA, 19 nt, Artificial Sequence
  Description of Artificial Sequence: Synthetic oligonucleotide
  Antisense strand to SEQ ID NO: 2020234
ucacuggcaauacugauuc

SEQ ID NO: 2020236 - RNA, 19 nt, Artificial Sequence
  Description of Artificial Sequence: Synthetic oligonucleotide
  Sense strand starting at position 3150 of SEQ ID NO: 1881127
gacaaagcaguuugauaua

SEQ ID NO: 2020237 - RNA, 19 nt, Artificial Sequence
  Description of Artificial Sequence: Synthetic oligonucleotide
  Antisense strand to SEQ ID NO: 2020236
uauaucaaacugcuuuguc

SEQ ID NO: 2020238 - RNA, 19 nt, Artificial Sequence
  Description of Artificial Sequence: Synthetic oligonucleotide
  Sense strand starting at position 3209 of SEQ ID NO: 1881127
ggugucuuuccauaugcaa

SEQ ID NO: 2020239 - RNA, 19 nt, Artificial Sequence
  Description of Artificial Sequence: Synthetic oligonucleotide
  Antisense strand to SEQ ID NO: 2020238
uugcauauggaaagacacc

SEQ ID NO: 2020240 - RNA, 19 nt, Artificial Sequence
  Description of Artificial Sequence: Synthetic oligonucleotide
  Sense strand starting at position 3344 of SEQ ID NO: 1881127
cucaucauagucuauguga

SEQ ID NO: 2020241 - RNA, 19 nt, Artificial Sequence
  Description of Artificial Sequence: Synthetic oligonucleotide
  Antisense strand to SEQ ID NO: 2020240
ucacauagacuaugaugag

SEQ ID NO: 2020242 - RNA, 19 nt, Artificial Sequence
  Description of Artificial Sequence: Synthetic oligonucleotide
  Sense strand starting at position 3347 of SEQ ID NO: 1881127
aucauagucuaugugaaua

SEQ ID NO: 2020243 - RNA, 19 nt, Artificial Sequence
  Description of Artificial Sequence: Synthetic oligonucleotide
  Antisense strand to SEQ ID NO: 2020242
uauucacauagacuaugau

SEQ ID NO: 2020244 - RNA, 19 nt, Artificial Sequence
  Description of Artificial Sequence: Synthetic oligonucleotide
  Sense strand starting at position 3481 of SEQ ID NO: 1881127
gacccucucccugguagau

SEQ ID NO: 2020245 - RNA, 19 nt, Artificial Sequence
  Description of Artificial Sequence: Synthetic oligonucleotide
  Antisense strand to SEQ ID NO: 2020244
aucuaccagggagaggguc

SEQ ID NO: 2020246 - RNA, 19 nt, Artificial Sequence
  Description of Artificial Sequence: Synthetic oligonucleotide
  Sense strand starting at position 3496 of SEQ ID NO: 1881127
agauaaucccaagguuucu

SEQ ID NO: 2020247 - RNA, 19 nt, Artificial Sequence
  Description of Artificial Sequence: Synthetic oligonucleotide
  Antisense strand to SEQ ID NO: 2020246
agaaaccuugggauuaucu

SEQ ID NO: 2020248 - RNA, 19 nt, Artificial Sequence
  Description of Artificial Sequence: Synthetic oligonucleotide
  Sense strand starting at position 3505 of SEQ ID NO: 1881127
caagguuucugagucagua

SEQ ID NO: 2020249 - RNA, 19 nt, Artificial Sequence
  Description of Artificial Sequence: Synthetic oligonucleotide
  Antisense strand to SEQ ID NO: 2020248
uacugacucagaaaccuug

SEQ ID NO: 2020250 - RNA, 19 nt, Artificial Sequence
  Description of Artificial Sequence: Synthetic oligonucleotide
  Sense strand starting at position 3507 of SEQ ID NO: 1881127
agguuucugagucaguagu

SEQ ID NO: 2020251 - RNA, 19 nt, Artificial Sequence
  Description of Artificial Sequence: Synthetic oligonucleotide
  Antisense strand to SEQ ID NO: 2020250
acuacugacucagaaaccu

SEQ ID NO: 2020252 - RNA, 19 nt, Artificial Sequence
  Description of Artificial Sequence: Synthetic oligonucleotide
  Sense strand starting at position 3556 of SEQ ID NO: 1881127
uaucacauucccgggugau

SEQ ID NO: 2020253 - RNA, 19 nt, Artificial Sequence
  Description of Artificial Sequence: Synthetic oligonucleotide
  Antisense strand to SEQ ID NO: 2020252
aucacccgggaaugugaua

SEQ ID NO: 2020254 - RNA, 19 nt, Artificial Sequence
  Description of Artificial Sequence: Synthetic oligonucleotide
  Sense strand starting at position 3557 of SEQ ID NO: 1881127
aucacauucccgggugaug

SEQ ID NO: 2020255 - RNA, 19 nt, Artificial Sequence
  Description of Artificial Sequence: Synthetic oligonucleotide
  Antisense strand to SEQ ID NO: 2020254
caucacccgggaaugugau

SEQ ID NO: 2020256 - RNA, 19 nt, Artificial Sequence
  Description of Artificial Sequence: Synthetic oligonucleotide
  Sense strand starting at position 3841 of SEQ ID NO: 1881127
aguacagauuagucuaaag

SEQ ID NO: 2020257 - RNA, 19 nt, Artificial Sequence
  Description of Artificial Sequence: Synthetic oligonucleotide
  Antisense strand to SEQ ID NO: 2020256
cuuuagacuaaucuguacu

SEQ ID NO: 2020258 - RNA, 19 nt, Artificial Sequence
  Description of Artificial Sequence: Synthetic oligonucleotide
  Sense strand starting at position 3923 of SEQ ID NO: 1881127
uuuagacucuauucugagu

SEQ ID NO: 2020259 - RNA, 19 nt, Artificial Sequence
  Description of Artificial Sequence: Synthetic oligonucleotide
  Antisense strand to SEQ ID NO: 2020258
acucagaauagagucuaaa

SEQ ID NO: 2020260 - RNA, 19 nt, Artificial Sequence
  Description of Artificial Sequence: Synthetic oligonucleotide
  Sense strand starting at position 114 of SEQ ID NO: 1881128
ggagauuucucauaauaau

SEQ ID NO: 2020261 - RNA, 19 nt, Artificial Sequence
  Description of Artificial Sequence: Synthetic oligonucleotide
  Antisense strand to SEQ ID NO: 2020260
auuauuaugagaaaucucc

SEQ ID NO: 2020262 - RNA, 19 nt, Artificial Sequence
  Description of Artificial Sequence: Synthetic oligonucleotide
  Sense strand starting at position 180 of SEQ ID NO: 1881128
aucuguaacccauauggua

SEQ ID NO: 2020263 - RNA, 19 nt, Artificial Sequence
  Description of Artificial Sequence: Synthetic oligonucleotide
  Antisense strand to SEQ ID NO: 2020262
uaccauauggguuacagau

SEQ ID NO: 2020264 - RNA, 19 nt, Artificial Sequence
  Description of Artificial Sequence: Synthetic oligonucleotide
  Sense strand starting at position 305 of SEQ ID NO: 1881128
ucauuuauguuaccuguuu

SEQ ID NO: 2020265 - RNA, 19 nt, Artificial Sequence
  Description of Artificial Sequence: Synthetic oligonucleotide
  Antisense strand to SEQ ID NO: 2020264
aaacagguaacauaaauga

SEQ ID NO: 2020266 - RNA, 19 nt, Artificial Sequence
  Description of Artificial Sequence: Synthetic oligonucleotide
  Sense strand starting at position 435 of SEQ ID NO: 1881128
gguucuugaccuuacuuua

SEQ ID NO: 2020267 - RNA, 19 nt, Artificial Sequence
  Description of Artificial Sequence: Synthetic oligonucleotide
  Antisense strand to SEQ ID NO: 2020266
uaaaguaaggucaagaacc

SEQ ID NO: 2020268 - RNA, 19 nt, Artificial Sequence
  Description of Artificial Sequence: Synthetic oligonucleotide
  Sense strand starting at position 542 of SEQ ID NO: 1881128
gcucuuuaaguguagaaau

SEQ ID NO: 2020269 - RNA, 19 nt, Artificial Sequence
  Description of Artificial Sequence: Synthetic oligonucleotide
  Antisense strand to SEQ ID NO: 2020268
auuucuacacuuaaagagc

SEQ ID NO: 2020270 - RNA, 19 nt, Artificial Sequence
  Description of Artificial Sequence: Synthetic oligonucleotide
  Sense strand starting at position 647 of SEQ ID NO: 1881128
ucuauaauguucuuggaag

SEQ ID NO: 2020271 - RNA, 19 nt, Artificial Sequence
  Description of Artificial Sequence: Synthetic oligonucleotide
  Antisense strand to SEQ ID NO: 2020270
cuuccaagaacauuauaga

SEQ ID NO: 2020272 - RNA, 19 nt, Artificial Sequence
  Description of Artificial Sequence: Synthetic oligonucleotide
  Sense strand starting at position 927 of SEQ ID NO: 1881128
caaaucaguguuuaugaug

SEQ ID NO: 2020273 - RNA, 19 nt, Artificial Sequence
  Description of Artificial Sequence: Synthetic oligonucleotide
  Antisense strand to SEQ ID NO: 2020272
caucauaaacacugauuug

SEQ ID NO: 2020274 - RNA, 19 nt, Artificial Sequence
  Description of Artificial Sequence: Synthetic oligonucleotide
  Sense strand starting at position 949 of SEQ ID NO: 1881128
ugcagaugauccuugaaug

SEQ ID NO: 2020275 - RNA, 19 nt, Artificial Sequence
  Description of Artificial Sequence: Synthetic oligonucleotide
  Antisense strand to SEQ ID NO: 2020274
cauucaaggaucaucugca

SEQ ID NO: 2020276 - RNA, 19 nt, Artificial Sequence
  Description of Artificial Sequence: Synthetic oligonucleotide
  Sense strand starting at position 1077 of SEQ ID NO: 1881128
gaaagaugauuguuuacca

SEQ ID NO: 2020277 - RNA, 19 nt, Artificial Sequence
  Description of Artificial Sequence: Synthetic oligonucleotide
  Antisense strand to SEQ ID NO: 2020276
ugguaaacaaucaucuuuc

SEQ ID NO: 2020278 - RNA, 19 nt, Artificial Sequence
  Description of Artificial Sequence: Synthetic oligonucleotide
  Sense strand starting at position 1348 of SEQ ID NO: 1881128
uguuaugagaaauguugac

SEQ ID NO: 2020279 - RNA, 19 nt, Artificial Sequence
  Description of Artificial Sequence: Synthetic oligonucleotide
  Antisense strand to SEQ ID NO: 2020278
gucaacauuucucauaaca

SEQ ID NO: 2020280 - RNA, 19 nt, Artificial Sequence
  Description of Artificial Sequence: Synthetic oligonucleotide
  Sense strand starting at position 1457 of SEQ ID NO: 1881128
ggcauuugugcuuauguac

SEQ ID NO: 2020281 - RNA, 19 nt, Artificial Sequence
  Description of Artificial Sequence: Synthetic oligonucleotide
  Antisense strand to SEQ ID NO: 2020280
guacauaagcacaaaugcc

SEQ ID NO: 2020282 - RNA, 19 nt, Artificial Sequence
  Description of Artificial Sequence: Synthetic oligonucleotide
  Sense strand starting at position 1529 of SEQ ID NO: 1881128
auagaagccuuguugagaa

SEQ ID NO: 2020283 - RNA, 19 nt, Artificial Sequence
  Description of Artificial Sequence: Synthetic oligonucleotide
  Antisense strand to SEQ ID NO: 2020282
uucucaacaaggcuucuau

SEQ ID NO: 2020284 - RNA, 19 nt, Artificial Sequence
  Description of Artificial Sequence: Synthetic oligonucleotide
  Sense strand starting at position 1586 of SEQ ID NO: 1881128
cuuugcauuucugcugaau

SEQ ID NO: 2020285 - RNA, 19 nt, Artificial Sequence
  Description of Artificial Sequence: Synthetic oligonucleotide
  Antisense strand to SEQ ID NO: 2020284
auucagcagaaaugcaaag

SEQ ID NO: 2020286 - RNA, 19 nt, Artificial Sequence
  Description of Artificial Sequence: Synthetic oligonucleotide
  Sense strand starting at position 1612 of SEQ ID NO: 1881128
caggauuggcuccagguuu

SEQ ID NO: 2020287 - RNA, 19 nt, Artificial Sequence
  Description of Artificial Sequence: Synthetic oligonucleotide
  Antisense strand to SEQ ID NO: 2020286
aaaccuggagccaauccug

SEQ ID NO: 2020288 - RNA, 19 nt, Artificial Sequence
  Description of Artificial Sequence: Synthetic oligonucleotide
  Sense strand starting at position 2058 of SEQ ID NO: 1881128
cuuagaauuccugggacuu

SEQ ID NO: 2020289 - RNA, 19 nt, Artificial Sequence
  Description of Artificial Sequence: Synthetic oligonucleotide
  Antisense strand to SEQ ID NO: 2020288
aagucccaggaauucuaag

SEQ ID NO: 2020290 - RNA, 19 nt, Artificial Sequence
  Description of Artificial Sequence: Synthetic oligonucleotide
  Sense strand starting at position 2059 of SEQ ID NO: 1881128
uuagaauuccugggacuug

SEQ ID NO: 2020291 - RNA, 19 nt, Artificial Sequence
  Description of Artificial Sequence: Synthetic oligonucleotide
  Antisense strand to SEQ ID NO: 2020290
caagucccaggaauucuaa

SEQ ID NO: 2020292 - RNA, 19 nt, Artificial Sequence
  Description of Artificial Sequence: Synthetic oligonucleotide
  Sense strand starting at position 2103 of SEQ ID NO: 1881128
aaggccauguguguaauuu

SEQ ID NO: 2020293 - RNA, 19 nt, Artificial Sequence
  Description of Artificial Sequence: Synthetic oligonucleotide
  Antisense strand to SEQ ID NO: 2020292
aaauuacacacauggccuu

SEQ ID NO: 2020294 - RNA, 19 nt, Artificial Sequence
  Description of Artificial Sequence: Synthetic oligonucleotide
  Sense strand starting at position 2289 of SEQ ID NO: 1881128
uacaauuggugguugauaa

SEQ ID NO: 2020295 - RNA, 19 nt, Artificial Sequence
  Description of Artificial Sequence: Synthetic oligonucleotide
  Antisense strand to SEQ ID NO: 2020294
uuaucaaccaccaauugua

SEQ ID NO: 2020296 - RNA, 19 nt, Artificial Sequence
  Description of Artificial Sequence: Synthetic oligonucleotide
  Sense strand starting at position 2290 of SEQ ID NO: 1881128
acaauuggugguugauaaa

SEQ ID NO: 2020297 - RNA, 19 nt, Artificial Sequence
  Description of Artificial Sequence: Synthetic oligonucleotide
  Antisense strand to SEQ ID NO: 2020296
uuuaucaaccaccaauugu

SEQ ID NO: 2020298 - RNA, 19 nt, Artificial Sequence
  Description of Artificial Sequence: Synthetic oligonucleotide
  Sense strand starting at position 2427 of SEQ ID NO: 1881128
agucuuuaggacugaauau

SEQ ID NO: 2020299 - RNA, 19 nt, Artificial Sequence
  Description of Artificial Sequence: Synthetic oligonucleotide
  Antisense strand to SEQ ID NO: 2020298
auauucaguccuaaagacu

SEQ ID NO: 2020300 - RNA, 19 nt, Artificial Sequence
  Description of Artificial Sequence: Synthetic oligonucleotide
  Sense strand starting at position 2460 of SEQ ID NO: 1881128
aggacaggauuaugaauuu

SEQ ID NO: 2020301 - RNA, 19 nt, Artificial Sequence
  Description of Artificial Sequence: Synthetic oligonucleotide
  Antisense strand to SEQ ID NO: 2020300
aaauucauaauccuguccu

SEQ ID NO: 2020302 - RNA, 19 nt, Artificial Sequence
  Description of Artificial Sequence: Synthetic oligonucleotide
  Sense strand starting at position 2532 of SEQ ID NO: 1881128
aguuuaucacccuauaggu

SEQ ID NO: 2020303 - RNA, 19 nt, Artificial Sequence
  Description of Artificial Sequence: Synthetic oligonucleotide
  Antisense strand to SEQ ID NO: 2020302
accuauagggugauaaacu

SEQ ID NO: 2020304 - RNA, 19 nt, Artificial Sequence
  Description of Artificial Sequence: Synthetic oligonucleotide
  Sense strand starting at position 2546 of SEQ ID NO: 1881128
uaggucaucacagguggaa

SEQ ID NO: 2020305 - RNA, 19 nt, Artificial Sequence
  Description of Artificial Sequence: Synthetic oligonucleotide
  Antisense strand to SEQ ID NO: 2020304
uuccaccugugaugaccua

SEQ ID NO: 2020306 - RNA, 19 nt, Artificial Sequence
  Description of Artificial Sequence: Synthetic oligonucleotide
  Sense strand starting at position 2548 of SEQ ID NO: 1881128
ggucaucacagguggaaau

SEQ ID NO: 2020307 - RNA, 19 nt, Artificial Sequence
  Description of Artificial Sequence: Synthetic oligonucleotide
  Antisense strand to SEQ ID NO: 2020306
auuuccaccugugaugacc

SEQ ID NO: 2020308 - RNA, 19 nt, Artificial Sequence
  Description of Artificial Sequence: Synthetic oligonucleotide
  Sense strand starting at position 2746 of SEQ ID NO: 1881128
acuggaaauuccuccagua

SEQ ID NO: 2020309 - RNA, 19 nt, Artificial Sequence
  Description of Artificial Sequence: Synthetic oligonucleotide
  Antisense strand to SEQ ID NO: 2020308
uacuggaggaauuuccagu

SEQ ID NO: 2020310 - RNA, 19 nt, Artificial Sequence
  Description of Artificial Sequence: Synthetic oligonucleotide
  Sense strand starting at position 2778 of SEQ ID NO: 1881128
caaaguaggcuugaagcua

SEQ ID NO: 2020311 - RNA, 19 nt, Artificial Sequence
  Description of Artificial Sequence: Synthetic oligonucleotide
  Antisense strand to SEQ ID NO: 2020310
uagcuucaagccuacuuug

SEQ ID NO: 2020312 - RNA, 19 nt, Artificial Sequence
  Description of Artificial Sequence: Synthetic oligonucleotide
  Sense strand starting at position 2876 of SEQ ID NO: 1881128
gaaagcugugguggagaga

SEQ ID NO: 2020313 - RNA, 19 nt, Artificial Sequence
  Description of Artificial Sequence: Synthetic oligonucleotide
  Antisense strand to SEQ ID NO: 2020312
ucucuccaccacagcuuuc

SEQ ID NO: 2020314 - RNA, 19 nt, Artificial Sequence
  Description of Artificial Sequence: Synthetic oligonucleotide
  Sense strand starting at position 2877 of SEQ ID NO: 1881128
aaagcugugguggagagau

SEQ ID NO: 2020315 - RNA, 19 nt, Artificial Sequence
  Description of Artificial Sequence: Synthetic oligonucleotide
  Antisense strand to SEQ ID NO: 2020314
aucucuccaccacagcuuu

SEQ ID NO: 2020316 - RNA, 19 nt, Artificial Sequence
  Description of Artificial Sequence: Synthetic oligonucleotide
  Sense strand starting at position 2921 of SEQ ID NO: 1881128
cuggaacaaucagagauuu

SEQ ID NO: 2020317 - RNA, 19 nt, Artificial Sequence
  Description of Artificial Sequence: Synthetic oligonucleotide
  Antisense strand to SEQ ID NO: 2020316
aaaucucugauuguuccag

SEQ ID NO: 2020318 - RNA, 19 nt, Artificial Sequence
  Description of Artificial Sequence: Synthetic oligonucleotide
  Sense strand starting at position 3217 of SEQ ID NO: 1881128
auaaaugauuggucuuacu

SEQ ID NO: 2020319 - RNA, 19 nt, Artificial Sequence
  Description of Artificial Sequence: Synthetic oligonucleotide
  Antisense strand to SEQ ID NO: 2020318
aguaagaccaaucauuuau

SEQ ID NO: 2020320 - RNA, 19 nt, Artificial Sequence
  Description of Artificial Sequence: Synthetic oligonucleotide
  Sense strand starting at position 3227 of SEQ ID NO: 1881128
ggucuuacugaccguauuu

SEQ ID NO: 2020321 - RNA, 19 nt, Artificial Sequence
  Description of Artificial Sequence: Synthetic oligonucleotide
  Antisense strand to SEQ ID NO: 2020320
aaauacggucaguaagacc

SEQ ID NO: 2020322 - RNA, 19 nt, Artificial Sequence
  Description of Artificial Sequence: Synthetic oligonucleotide
  Sense strand starting at position 3378 of SEQ ID NO: 1881128
guccaauauugauuagauu

SEQ ID NO: 2020323 - RNA, 19 nt, Artificial Sequence
  Description of Artificial Sequence: Synthetic oligonucleotide
  Antisense strand to SEQ ID NO: 2020322
aaucuaaucaauauuggac

SEQ ID NO: 2020324 - RNA, 19 nt, Artificial Sequence
  Description of Artificial Sequence: Synthetic oligonucleotide
  Sense strand starting at position 3510 of SEQ ID NO: 1881128
ccauuauugcaaggaugga

SEQ ID NO: 2020325 - RNA, 19 nt, Artificial Sequence
  Description of Artificial Sequence: Synthetic oligonucleotide
  Antisense strand to SEQ ID NO: 2020324
uccauccuugcaauaaugg

SEQ ID NO: 2020326 - RNA, 19 nt, Artificial Sequence
  Description of Artificial Sequence: Synthetic oligonucleotide
  Sense strand starting at position 3574 of SEQ ID NO: 1881128
guuaaaugacuuugucaga

SEQ ID NO: 2020327 - RNA, 19 nt, Artificial Sequence
  Description of Artificial Sequence: Synthetic oligonucleotide
  Antisense strand to SEQ ID NO: 2020326
ucugacaaagucauuuaac

SEQ ID NO: 2020328 - RNA, 19 nt, Artificial Sequence
  Description of Artificial Sequence: Synthetic oligonucleotide
  Sense strand starting at position 3575 of SEQ ID NO: 1881128
uuaaaugacuuugucagaa

SEQ ID NO: 2020329 - RNA, 19 nt, Artificial Sequence
  Description of Artificial Sequence: Synthetic oligonucleotide
  Antisense strand to SEQ ID NO: 2020328
uucugacaaagucauuuaa

SEQ ID NO: 2020330 - RNA, 19 nt, Artificial Sequence
  Description of Artificial Sequence: Synthetic oligonucleotide
  Sense strand starting at position 3622 of SEQ ID NO: 1881128
acaguucuauaaucaaagu

SEQ ID NO: 2020331 - RNA, 19 nt, Artificial Sequence
  Description of Artificial Sequence: Synthetic oligonucleotide
  Antisense strand to SEQ ID NO: 2020330
acuuugauuauagaacugu

SEQ ID NO: 2020332 - RNA, 19 nt, Artificial Sequence
  Description of Artificial Sequence: Synthetic oligonucleotide
  Sense strand starting at position 3796 of SEQ ID NO: 1881128
ugcaaauaaugcuuggaaa

SEQ ID NO: 2020333 - RNA, 19 nt, Artificial Sequence
  Description of Artificial Sequence: Synthetic oligonucleotide
  Antisense strand to SEQ ID NO: 2020332
uuuccaagcauuauuugca

SEQ ID NO: 2020334 - RNA, 19 nt, Artificial Sequence
  Description of Artificial Sequence: Synthetic oligonucleotide
  Sense strand starting at position 3837 of SEQ ID NO: 1881128
augguaagaaugcagcaau

SEQ ID NO: 2020335 - RNA, 19 nt, Artificial Sequence
  Description of Artificial Sequence: Synthetic oligonucleotide
  Antisense strand to SEQ ID NO: 2020334
auugcugcauucuuaccau

SEQ ID NO: 2020336 - RNA, 19 nt, Artificial Sequence
  Description of Artificial Sequence: Synthetic oligonucleotide
  Sense strand starting at position 3919 of SEQ ID NO: 1881128
cuaagaggugacugagcua

SEQ ID NO: 2020337 - RNA, 19 nt, Artificial Sequence
  Description of Artificial Sequence: Synthetic oligonucleotide
  Antisense strand to SEQ ID NO: 2020336
uagcucagucaccucuuag

SEQ ID NO: 2020338 - RNA, 19 nt, Artificial Sequence
  Description of Artificial Sequence: Synthetic oligonucleotide
  Sense strand starting at position 3922 of SEQ ID NO: 1881128
agaggugacugagcuauaa

SEQ ID NO: 2020339 - RNA, 19 nt, Artificial Sequence
  Description of Artificial Sequence: Synthetic oligonucleotide
  Antisense strand to SEQ ID NO: 2020338
uuauagcucagucaccucu

SEQ ID NO: 2020340 - RNA, 19 nt, Artificial Sequence
  Description of Artificial Sequence: Synthetic oligonucleotide
  Sense strand starting at position 65 of SEQ ID NO: 1881129
ugcuaaaggucacuuagca

SEQ ID NO: 2020341 - RNA, 19 nt, Artificial Sequence
  Description of Artificial Sequence: Synthetic oligonucleotide
  Antisense strand to SEQ ID NO: 2020340
ugcuaagugaccuuuagca

SEQ ID NO: 2020342 - RNA, 19 nt, Artificial Sequence
  Description of Artificial Sequence: Synthetic oligonucleotide
  Sense strand starting at position 73 of SEQ ID NO: 1881129
gucacuuagcacuagauuc

SEQ ID NO: 2020343 - RNA, 19 nt, Artificial Sequence
  Description of Artificial Sequence: Synthetic oligonucleotide
  Antisense strand to SEQ ID NO: 2020342
gaaucuagugcuaagugac

SEQ ID NO: 2020344 - RNA, 19 nt, Artificial Sequence
  Description of Artificial Sequence: Synthetic oligonucleotide
  Sense strand starting at position 107 of SEQ ID NO: 1881129
gcaucauuccuacagauag

SEQ ID NO: 2020345 - RNA, 19 nt, Artificial Sequence
  Description of Artificial Sequence: Synthetic oligonucleotide
  Antisense strand to SEQ ID NO: 2020344
cuaucuguaggaaugaugc

SEQ ID NO: 2020346 - RNA, 19 nt, Artificial Sequence
  Description of Artificial Sequence: Synthetic oligonucleotide
  Sense strand starting at position 218 of SEQ ID NO: 1881129
gcuuaaggaucccuuaaga

SEQ ID NO: 2020347 - RNA, 19 nt, Artificial Sequence
  Description of Artificial Sequence: Synthetic oligonucleotide
  Antisense strand to SEQ ID NO: 2020346
ucuuaagggauccuuaagc

SEQ ID NO: 2020348 - RNA, 19 nt, Artificial Sequence
  Description of Artificial Sequence: Synthetic oligonucleotide
  Sense strand starting at position 355 of SEQ ID NO: 1881129
aucaauaauguccauguuu

SEQ ID NO: 2020349 - RNA, 19 nt, Artificial Sequence
  Description of Artificial Sequence: Synthetic oligonucleotide
  Antisense strand to SEQ ID NO: 2020348
aaacauggacauuauugau

SEQ ID NO: 2020350 - RNA, 19 nt, Artificial Sequence
  Description of Artificial Sequence: Synthetic oligonucleotide
  Sense strand starting at position 402 of SEQ ID NO: 1881129
aguccaaauuccuuagaga

SEQ ID NO: 2020351 - RNA, 19 nt, Artificial Sequence
  Description of Artificial Sequence: Synthetic oligonucleotide
  Antisense strand to SEQ ID NO: 2020350
ucucuaaggaauuuggacu

SEQ ID NO: 2020352 - RNA, 19 nt, Artificial Sequence
  Description of Artificial Sequence: Synthetic oligonucleotide
  Sense strand starting at position 427 of SEQ ID NO: 1881129
uuuaaaguuuguucucauc

SEQ ID NO: 2020353 - RNA, 19 nt, Artificial Sequence
  Description of Artificial Sequence: Synthetic oligonucleotide
  Antisense strand to SEQ ID NO: 2020352
gaugagaacaaacuuuaaa

SEQ ID NO: 2020354 - RNA, 19 nt, Artificial Sequence
  Description of Artificial Sequence: Synthetic oligonucleotide
  Sense strand starting at position 492 of SEQ ID NO: 1881129
ggugucuuggcauauugaa

SEQ ID NO: 2020355 - RNA, 19 nt, Artificial Sequence
  Description of Artificial Sequence: Synthetic oligonucleotide
  Antisense strand to SEQ ID NO: 2020354
uucaauaugccaagacacc

SEQ ID NO: 2020356 - RNA, 19 nt, Artificial Sequence
  Description of Artificial Sequence: Synthetic oligonucleotide
  Sense strand starting at position 579 of SEQ ID NO: 1881129
cguugucuagucuaugaca

SEQ ID NO: 2020357 - RNA, 19 nt, Artificial Sequence
  Description of Artificial Sequence: Synthetic oligonucleotide
  Antisense strand to SEQ ID NO: 2020356
ugucauagacuagacaacg

SEQ ID NO: 2020358 - RNA, 19 nt, Artificial Sequence
  Description of Artificial Sequence: Synthetic oligonucleotide
  Sense strand starting at position 581 of SEQ ID NO: 1881129
uugucuagucuaugacaga

SEQ ID NO: 2020359 - RNA, 19 nt, Artificial Sequence
  Description of Artificial Sequence: Synthetic oligonucleotide
  Antisense strand to SEQ ID NO: 2020358
ucugucauagacuagacaa

SEQ ID NO: 2020360 - RNA, 19 nt, Artificial Sequence
  Description of Artificial Sequence: Synthetic oligonucleotide
  Sense strand starting at position 657 of SEQ ID NO: 1881129
ccaaccuagugguugcaaa

SEQ ID NO: 2020361 - RNA, 19 nt, Artificial Sequence
  Description of Artificial Sequence: Synthetic oligonucleotide
  Antisense strand to SEQ ID NO: 2020360
uuugcaaccacuagguugg

SEQ ID NO: 2020362 - RNA, 19 nt, Artificial Sequence
  Description of Artificial Sequence: Synthetic oligonucleotide
  Sense strand starting at position 658 of SEQ ID NO: 1881129
caaccuagugguugcaaau

SEQ ID NO: 2020363 - RNA, 19 nt, Artificial Sequence
  Description of Artificial Sequence: Synthetic oligonucleotide
  Antisense strand to SEQ ID NO: 2020362
auuugcaaccacuagguug

SEQ ID NO: 2020364 - RNA, 19 nt, Artificial Sequence
  Description of Artificial Sequence: Synthetic oligonucleotide
  Sense strand starting at position 664 of SEQ ID NO: 1881129
agugguugcaaauggaaca

SEQ ID NO: 2020365 - RNA, 19 nt, Artificial Sequence
  Description of Artificial Sequence: Synthetic oligonucleotide
  Antisense strand to SEQ ID NO: 2020364
uguuccauuugcaaccacu

SEQ ID NO: 2020366 - RNA, 19 nt, Artificial Sequence
  Description of Artificial Sequence: Synthetic oligonucleotide
  Sense strand starting at position 742 of SEQ ID NO: 1881129
gugguuucagggcaugcaa

SEQ ID NO: 2020367 - RNA, 19 nt, Artificial Sequence
  Description of Artificial Sequence: Synthetic oligonucleotide
  Antisense strand to SEQ ID NO: 2020366
uugcaugcccugaaaccac

SEQ ID NO: 2020368 - RNA, 19 nt, Artificial Sequence
  Description of Artificial Sequence: Synthetic oligonucleotide
  Sense strand starting at position 1105 of SEQ ID NO: 1881129
augcaucuacaguguacaa

SEQ ID NO: 2020369 - RNA, 19 nt, Artificial Sequence
  Description of Artificial Sequence: Synthetic oligonucleotide
  Antisense strand to SEQ ID NO: 2020368
uuguacacuguagaugcau

SEQ ID NO: 2020370 - RNA, 19 nt, Artificial Sequence
  Description of Artificial Sequence: Synthetic oligonucleotide
  Sense strand starting at position 1107 of SEQ ID NO: 1881129
gcaucuacaguguacaauu

SEQ ID NO: 2020371 - RNA, 19 nt, Artificial Sequence
  Description of Artificial Sequence: Synthetic oligonucleotide
  Antisense strand to SEQ ID NO: 2020370
aauuguacacuguagaugc

SEQ ID NO: 2020372 - RNA, 19 nt, Artificial Sequence
  Description of Artificial Sequence: Synthetic oligonucleotide
  Sense strand starting at position 1148 of SEQ ID NO: 1881129
ucaauuguuguaggacuuu

SEQ ID NO: 2020373 - RNA, 19 nt, Artificial Sequence
  Description of Artificial Sequence: Synthetic oligonucleotide
  Antisense strand to SEQ ID NO: 2020372
aaaguccuacaacaauuga

SEQ ID NO: 2020374 - RNA, 19 nt, Artificial Sequence
  Description of Artificial Sequence: Synthetic oligonucleotide
  Sense strand starting at position 1211 of SEQ ID NO: 1881129
aaauauuaggcucgcagau

SEQ ID NO: 2020375 - RNA, 19 nt, Artificial Sequence
  Description of Artificial Sequence: Synthetic oligonucleotide
  Antisense strand to SEQ ID NO: 2020374
aucugcgagccuaauauuu

SEQ ID NO: 2020376 - RNA, 19 nt, Artificial Sequence
  Description of Artificial Sequence: Synthetic oligonucleotide
  Sense strand starting at position 1324 of SEQ ID NO: 1881129
ggcuuccugcuuuacagau

SEQ ID NO: 2020377 - RNA, 19 nt, Artificial Sequence
  Description of Artificial Sequence: Synthetic oligonucleotide
  Antisense strand to SEQ ID NO: 2020376
aucuguaaagcaggaagcc

SEQ ID NO: 2020378 - RNA, 19 nt, Artificial Sequence
  Description of Artificial Sequence: Synthetic oligonucleotide
  Sense strand starting at position 1522 of SEQ ID NO: 1881129
cugccauuagaauaaguau

SEQ ID NO: 2020379 - RNA, 19 nt, Artificial Sequence
  Description of Artificial Sequence: Synthetic oligonucleotide
  Antisense strand to SEQ ID NO: 2020378
auacuuauucuaauggcag

SEQ ID NO: 2020380 - RNA, 19 nt, Artificial Sequence
  Description of Artificial Sequence: Synthetic oligonucleotide
  Sense strand starting at position 1694 of SEQ ID NO: 1881129
guuugauggcuugaaggca

SEQ ID NO: 2020381 - RNA, 19 nt, Artificial Sequence
  Description of Artificial Sequence: Synthetic oligonucleotide
  Antisense strand to SEQ ID NO: 2020380
ugccuucaagccaucaaac

SEQ ID NO: 2020382 - RNA, 19 nt, Artificial Sequence
  Description of Artificial Sequence: Synthetic oligonucleotide
  Sense strand starting at position 1717 of SEQ ID NO: 1881129
aagacacacuggguuauua

SEQ ID NO: 2020383 - RNA, 19 nt, Artificial Sequence
  Description of Artificial Sequence: Synthetic oligonucleotide
  Antisense strand to SEQ ID NO: 2020382
uaauaacccagugugucuu

SEQ ID NO: 2020384 - RNA, 19 nt, Artificial Sequence
  Description of Artificial Sequence: Synthetic oligonucleotide
  Sense strand starting at position 1721 of SEQ ID NO: 1881129
cacacuggguuauuagaaa

SEQ ID NO: 2020385 - RNA, 19 nt, Artificial Sequence
  Description of Artificial Sequence: Synthetic oligonucleotide
  Antisense strand to SEQ ID NO: 2020384
uuucuaauaacccagugug

SEQ ID NO: 2020386 - RNA, 19 nt, Artificial Sequence
  Description of Artificial Sequence: Synthetic oligonucleotide
  Sense strand starting at position 1941 of SEQ ID NO: 1881129
uccaguuuagaggaugcau

SEQ ID NO: 2020387 - RNA, 19 nt, Artificial Sequence
  Description of Artificial Sequence: Synthetic oligonucleotide
  Antisense strand to SEQ ID NO: 2020386
augcauccucuaaacugga

SEQ ID NO: 2020388 - RNA, 19 nt, Artificial Sequence
  Description of Artificial Sequence: Synthetic oligonucleotide
  Sense strand starting at position 1965 of SEQ ID NO: 1881129
ggaagugucccauaguaug

SEQ ID NO: 2020389 - RNA, 19 nt, Artificial Sequence
  Description of Artificial Sequence: Synthetic oligonucleotide
  Antisense strand to SEQ ID NO: 2020388
cauacuaugggacacuucc

SEQ ID NO: 2020390 - RNA, 19 nt, Artificial Sequence
  Description of Artificial Sequence: Synthetic oligonucleotide
  Sense strand starting at position 2408 of SEQ ID NO: 1881129
gccuuuauccgugaaaugg

SEQ ID NO: 2020391 - RNA, 19 nt, Artificial Sequence
  Description of Artificial Sequence: Synthetic oligonucleotide
  Antisense strand to SEQ ID NO: 2020390
ccauuucacggauaaaggc

SEQ ID NO: 2020392 - RNA, 19 nt, Artificial Sequence
  Description of Artificial Sequence: Synthetic oligonucleotide
  Sense strand starting at position 2435 of SEQ ID NO: 1881129
gcuuaauuggcaggaauag

SEQ ID NO: 2020393 - RNA, 19 nt, Artificial Sequence
  Description of Artificial Sequence: Synthetic oligonucleotide
  Antisense strand to SEQ ID NO: 2020392
cuauuccugccaauuaagc

SEQ ID NO: 2020394 - RNA, 19 nt, Artificial Sequence
  Description of Artificial Sequence: Synthetic oligonucleotide
  Sense strand starting at position 2532 of SEQ ID NO: 1881129
gggcuuugacuggaagcuu

SEQ ID NO: 2020395 - RNA, 19 nt, Artificial Sequence
  Description of Artificial Sequence: Synthetic oligonucleotide
  Antisense strand to SEQ ID NO: 2020394
aagcuuccagucaaagccc

SEQ ID NO: 2020396 - RNA, 19 nt, Artificial Sequence
  Description of Artificial Sequence: Synthetic oligonucleotide
  Sense strand starting at position 2787 of SEQ ID NO: 1881129
ccaagugaugggcaucuua

SEQ ID NO: 2020397 - RNA, 19 nt, Artificial Sequence
  Description of Artificial Sequence: Synthetic oligonucleotide
  Antisense strand to SEQ ID NO: 2020396
uaagaugcccaucacuugg

SEQ ID NO: 2020398 - RNA, 19 nt, Artificial Sequence
  Description of Artificial Sequence: Synthetic oligonucleotide
  Sense strand starting at position 2899 of SEQ ID NO: 1881129
cugagcuguagugagagau

SEQ ID NO: 2020399 - RNA, 19 nt, Artificial Sequence
  Description of Artificial Sequence: Synthetic oligonucleotide
  Antisense strand to SEQ ID NO: 2020398
aucucucacuacagcucag

SEQ ID NO: 2020400 - RNA, 19 nt, Artificial Sequence
  Description of Artificial Sequence: Synthetic oligonucleotide
  Sense strand starting at position 3000 of SEQ ID NO: 1881129
ugacaaacuuauguugaga

SEQ ID NO: 2020401 - RNA, 19 nt, Artificial Sequence
  Description of Artificial Sequence: Synthetic oligonucleotide
  Antisense strand to SEQ ID NO: 2020400
ucucaacauaaguuuguca

SEQ ID NO: 2020402 - RNA, 19 nt, Artificial Sequence
  Description of Artificial Sequence: Synthetic oligonucleotide
  Sense strand starting at position 3075 of SEQ ID NO: 1881129
auaagacugaguuguuuga

SEQ ID NO: 2020403 - RNA, 19 nt, Artificial Sequence
  Description of Artificial Sequence: Synthetic oligonucleotide
  Antisense strand to SEQ ID NO: 2020402
ucaaacaacucagucuuau

SEQ ID NO: 2020404 - RNA, 19 nt, Artificial Sequence
  Description of Artificial Sequence: Synthetic oligonucleotide
  Sense strand starting at position 3077 of SEQ ID NO: 1881129
aagacugaguuguuugaaa

SEQ ID NO: 2020405 - RNA, 19 nt, Artificial Sequence
  Description of Artificial Sequence: Synthetic oligonucleotide
  Antisense strand to SEQ ID NO: 2020404
uuucaaacaacucagucuu

SEQ ID NO: 2020406 - RNA, 19 nt, Artificial Sequence
  Description of Artificial Sequence: Synthetic oligonucleotide
  Sense strand starting at position 3119 of SEQ ID NO: 1881129
gccugauuauuugcggaaa

SEQ ID NO: 2020407 - RNA, 19 nt, Artificial Sequence
  Description of Artificial Sequence: Synthetic oligonucleotide
  Antisense strand to SEQ ID NO: 2020406
uuuccgcaaauaaucaggc

SEQ ID NO: 2020408 - RNA, 19 nt, Artificial Sequence
  Description of Artificial Sequence: Synthetic oligonucleotide
  Sense strand starting at position 3186 of SEQ ID NO: 1881129
auggaacuuugugcuguaa

SEQ ID NO: 2020409 - RNA, 19 nt, Artificial Sequence
  Description of Artificial Sequence: Synthetic oligonucleotide
  Antisense strand to SEQ ID NO: 2020408
uuacagcacaaaguuccau

SEQ ID NO: 2020410 - RNA, 19 nt, Artificial Sequence
  Description of Artificial Sequence: Synthetic oligonucleotide
  Sense strand starting at position 3190 of SEQ ID NO: 1881129
aacuuugugcuguaaggaa

SEQ ID NO: 2020411 - RNA, 19 nt, Artificial Sequence
  Description of Artificial Sequence: Synthetic oligonucleotide
  Antisense strand to SEQ ID NO: 2020410
uuccuuacagcacaaaguu

SEQ ID NO: 2020412 - RNA, 19 nt, Artificial Sequence
  Description of Artificial Sequence: Synthetic oligonucleotide
  Sense strand starting at position 3626 of SEQ ID NO: 1881129
agcaccuaggucuguuaga

SEQ ID NO: 2020413 - RNA, 19 nt, Artificial Sequence
  Description of Artificial Sequence: Synthetic oligonucleotide
  Antisense strand to SEQ ID NO: 2020412
ucuaacagaccuaggugcu

SEQ ID NO: 2020414 - RNA, 19 nt, Artificial Sequence
  Description of Artificial Sequence: Synthetic oligonucleotide
  Sense strand starting at position 3627 of SEQ ID NO: 1881129
gcaccuaggucuguuagaa

SEQ ID NO: 2020415 - RNA, 19 nt, Artificial Sequence
  Description of Artificial Sequence: Synthetic oligonucleotide
  Antisense strand to SEQ ID NO: 2020414
uucuaacagaccuaggugc

SEQ ID NO: 2020416 - RNA, 19 nt, Artificial Sequence
  Description of Artificial Sequence: Synthetic oligonucleotide
  Sense strand starting at position 3738 of SEQ ID NO: 1881129
uuuauuggcucugcaauuu

SEQ ID NO: 2020417 - RNA, 19 nt, Artificial Sequence
  Description of Artificial Sequence: Synthetic oligonucleotide
  Antisense strand to SEQ ID NO: 2020416
aaauugcagagccaauaaa

SEQ ID NO: 2020418 - RNA, 19 nt, Artificial Sequence
  Description of Artificial Sequence: Synthetic oligonucleotide
  Sense strand starting at position 3970 of SEQ ID NO: 1881129
auaggaguauaacuuacuu

SEQ ID NO: 2020419 - RNA, 19 nt, Artificial Sequence
  Description of Artificial Sequence: Synthetic oligonucleotide
  Antisense strand to SEQ ID NO: 2020418
aaguaaguuauacuccuau

SEQ ID NO: 2020420 - RNA, 19 nt, Artificial Sequence
  Description of Artificial Sequence: Synthetic oligonucleotide
  Sense strand starting at position 943 of SEQ ID NO: 1881130
agcacuugguguuugaaac

SEQ ID NO: 2020421 - RNA, 19 nt, Artificial Sequence
  Description of Artificial Sequence: Synthetic oligonucleotide
  Antisense strand to SEQ ID NO: 2020420
guuucaaacaccaagugcu

SEQ ID NO: 2020422 - RNA, 19 nt, Artificial Sequence
  Description of Artificial Sequence: Synthetic oligonucleotide
  Sense strand starting at position 954 of SEQ ID NO: 1881130
uuugaaaccuccucgcaua

SEQ ID NO: 2020423 - RNA, 19 nt, Artificial Sequence
  Description of Artificial Sequence: Synthetic oligonucleotide
  Antisense strand to SEQ ID NO: 2020422
uaugcgaggagguuucaaa

SEQ ID NO: 2020424 - RNA, 19 nt, Artificial Sequence
  Description of Artificial Sequence: Synthetic oligonucleotide
  Sense strand starting at position 967 of SEQ ID NO: 1881130
cgcauagcugugguuuauu

SEQ ID NO: 2020425 - RNA, 19 nt, Artificial Sequence
  Description of Artificial Sequence: Synthetic oligonucleotide
  Antisense strand to SEQ ID NO: 2020424
aauaaaccacagcuaugcg

SEQ ID NO: 2020426 - RNA, 19 nt, Artificial Sequence
  Description of Artificial Sequence: Synthetic oligonucleotide
  Sense strand starting at position 1061 of SEQ ID NO: 1881130
ugauucugccagcagagaa

SEQ ID NO: 2020427 - RNA, 19 nt, Artificial Sequence
  Description of Artificial Sequence: Synthetic oligonucleotide
  Antisense strand to SEQ ID NO: 2020426
uucucugcuggcagaauca

SEQ ID NO: 2020428 - RNA, 19 nt, Artificial Sequence
  Description of Artificial Sequence: Synthetic oligonucleotide
  Sense strand starting at position 1132 of SEQ ID NO: 1881130
agcaaucaguuagugauca

SEQ ID NO: 2020429 - RNA, 19 nt, Artificial Sequence
  Description of Artificial Sequence: Synthetic oligonucleotide
  Antisense strand to SEQ ID NO: 2020428
ugaucacuaacugauugcu

SEQ ID NO: 2020430 - RNA, 19 nt, Artificial Sequence
  Description of Artificial Sequence: Synthetic oligonucleotide
  Sense strand starting at position 1136 of SEQ ID NO: 1881130
aucaguuagugaucacugu

SEQ ID NO: 2020431 - RNA, 19 nt, Artificial Sequence
  Description of Artificial Sequence: Synthetic oligonucleotide
  Antisense strand to SEQ ID NO: 2020430
acagugaucacuaacugau

SEQ ID NO: 2020432 - RNA, 19 nt, Artificial Sequence
  Description of Artificial Sequence: Synthetic oligonucleotide
  Sense strand starting at position 1200 of SEQ ID NO: 1881130
aucggaugguuccugaauu

SEQ ID NO: 2020433 - RNA, 19 nt, Artificial Sequence
  Description of Artificial Sequence: Synthetic oligonucleotide
  Antisense strand to SEQ ID NO: 2020432
aauucaggaaccauccgau

SEQ ID NO: 2020434 - RNA, 19 nt, Artificial Sequence
  Description of Artificial Sequence: Synthetic oligonucleotide
  Sense strand starting at position 1206 of SEQ ID NO: 1881130
ugguuccugaauuguagaa

SEQ ID NO: 2020435 - RNA, 19 nt, Artificial Sequence
  Description of Artificial Sequence: Synthetic oligonucleotide
  Antisense strand to SEQ ID NO: 2020434
uucuacaauucaggaacca

SEQ ID NO: 2020436 - RNA, 19 nt, Artificial Sequence
  Description of Artificial Sequence: Synthetic oligonucleotide
  Sense strand starting at position 1443 of SEQ ID NO: 1881130
gaguuuaguccuuugccgu

SEQ ID NO: 2020437 - RNA, 19 nt, Artificial Sequence
  Description of Artificial Sequence: Synthetic oligonucleotide
  Antisense strand to SEQ ID NO: 2020436
acggcaaaggacuaaacuc

SEQ ID NO: 2020438 - RNA, 19 nt, Artificial Sequence
  Description of Artificial Sequence: Synthetic oligonucleotide
  Sense strand starting at position 2040 of SEQ ID NO: 1881130
ggagucagucacggaggua

SEQ ID NO: 2020439 - RNA, 19 nt, Artificial Sequence
  Description of Artificial Sequence: Synthetic oligonucleotide
  Antisense strand to SEQ ID NO: 2020438
uaccuccgugacugacucc

SEQ ID NO: 2020440 - RNA, 19 nt, Artificial Sequence
  Description of Artificial Sequence: Synthetic oligonucleotide
  Sense strand starting at position 2041 of SEQ ID NO: 1881130
gagucagucacggagguau

SEQ ID NO: 2020441 - RNA, 19 nt, Artificial Sequence
  Description of Artificial Sequence: Synthetic oligonucleotide
  Antisense strand to SEQ ID NO: 2020440
auaccuccgugacugacuc

SEQ ID NO: 2020442 - RNA, 19 nt, Artificial Sequence
  Description of Artificial Sequence: Synthetic oligonucleotide
  Sense strand starting at position 2043 of SEQ ID NO: 1881130
gucagucacggagguauga

SEQ ID NO: 2020443 - RNA, 19 nt, Artificial Sequence
  Description of Artificial Sequence: Synthetic oligonucleotide
  Antisense strand to SEQ ID NO: 2020442
ucauaccuccgugacugac

SEQ ID NO: 2020444 - RNA, 19 nt, Artificial Sequence
  Description of Artificial Sequence: Synthetic oligonucleotide
  Sense strand starting at position 2056 of SEQ ID NO: 1881130
guaugagucacccacguga

SEQ ID NO: 2020445 - RNA, 19 nt, Artificial Sequence
  Description of Artificial Sequence: Synthetic oligonucleotide
  Antisense strand to SEQ ID NO: 2020444
ucacgugggugacucauac

SEQ ID NO: 2020446 - RNA, 19 nt, Artificial Sequence
  Description of Artificial Sequence: Synthetic oligonucleotide
  Sense strand starting at position 2106 of SEQ ID NO: 1881130
ccugcaugccuggaaucaa

SEQ ID NO: 2020447 - RNA, 19 nt, Artificial Sequence
  Description of Artificial Sequence: Synthetic oligonucleotide
  Antisense strand to SEQ ID NO: 2020446
uugauuccaggcaugcagg

SEQ ID NO: 2020448 - RNA, 19 nt, Artificial Sequence
  Description of Artificial Sequence: Synthetic oligonucleotide
  Sense strand starting at position 2166 of SEQ ID NO: 1881130
ggccuuuaucaugaauuac

SEQ ID NO: 2020449 - RNA, 19 nt, Artificial Sequence
  Description of Artificial Sequence: Synthetic oligonucleotide
  Antisense strand to SEQ ID NO: 2020448
guaauucaugauaaaggcc

SEQ ID NO: 2020450 - RNA, 19 nt, Artificial Sequence
  Description of Artificial Sequence: Synthetic oligonucleotide
  Sense strand starting at position 2243 of SEQ ID NO: 1881130
uuccaucaggcacgauauu

SEQ ID NO: 2020451 - RNA, 19 nt, Artificial Sequence
  Description of Artificial Sequence: Synthetic oligonucleotide
  Antisense strand to SEQ ID NO: 2020450
aauaucgugccugauggaa

SEQ ID NO: 2020452 - RNA, 19 nt, Artificial Sequence
  Description of Artificial Sequence: Synthetic oligonucleotide
  Sense strand starting at position 2254 of SEQ ID NO: 1881130
acgauauuccaagggcuca

SEQ ID NO: 2020453 - RNA, 19 nt, Artificial Sequence
  Description of Artificial Sequence: Synthetic oligonucleotide
  Antisense strand to SEQ ID NO: 2020452
ugagcccuuggaauaucgu

SEQ ID NO: 2020454 - RNA, 19 nt, Artificial Sequence
  Description of Artificial Sequence: Synthetic oligonucleotide
  Sense strand starting at position 2302 of SEQ ID NO: 1881130
ccaguucuuucuuuggaag

SEQ ID NO: 2020455 - RNA, 19 nt, Artificial Sequence
  Description of Artificial Sequence: Synthetic oligonucleotide
  Antisense strand to SEQ ID NO: 2020454
cuuccaaagaaagaacugg

SEQ ID NO: 2020456 - RNA, 19 nt, Artificial Sequence
  Description of Artificial Sequence: Synthetic oligonucleotide
  Sense strand starting at position 2379 of SEQ ID NO: 1881130
ccacgauucucuccaguau

SEQ ID NO: 2020457 - RNA, 19 nt, Artificial Sequence
  Description of Artificial Sequence: Synthetic oligonucleotide
  Antisense strand to SEQ ID NO: 2020456
auacuggagagaaucgugg

SEQ ID NO: 2020458 - RNA, 19 nt, Artificial Sequence
  Description of Artificial Sequence: Synthetic oligonucleotide
  Sense strand starting at position 2391 of SEQ ID NO: 1881130
ccaguauuaggccauucuu

SEQ ID NO: 2020459 - RNA, 19 nt, Artificial Sequence
  Description of Artificial Sequence: Synthetic oligonucleotide
  Antisense strand to SEQ ID NO: 2020458
aagaauggccuaauacugg

SEQ ID NO: 2020460 - RNA, 19 nt, Artificial Sequence
  Description of Artificial Sequence: Synthetic oligonucleotide
  Sense strand starting at position 2481 of SEQ ID NO: 1881130
gcaggcuuuacaggaaaug

SEQ ID NO: 2020461 - RNA, 19 nt, Artificial Sequence
  Description of Artificial Sequence: Synthetic oligonucleotide
  Antisense strand to SEQ ID NO: 2020460
cauuuccuguaaagccugc

SEQ ID NO: 2020462 - RNA, 19 nt, Artificial Sequence
  Description of Artificial Sequence: Synthetic oligonucleotide
  Sense strand starting at position 2646 of SEQ ID NO: 1881130
aagaacucacuguggugaa

SEQ ID NO: 2020463 - RNA, 19 nt, Artificial Sequence
  Description of Artificial Sequence: Synthetic oligonucleotide
  Antisense strand to SEQ ID NO: 2020462
uucaccacagugaguucuu

SEQ ID NO: 2020464 - RNA, 19 nt, Artificial Sequence
  Description of Artificial Sequence: Synthetic oligonucleotide
  Sense strand starting at position 2753 of SEQ ID NO: 1881130
uguggauuaucguucaaug

SEQ ID NO: 2020465 - RNA, 19 nt, Artificial Sequence
  Description of Artificial Sequence: Synthetic oligonucleotide
  Antisense strand to SEQ ID NO: 2020464
cauugaacgauaauccaca

SEQ ID NO: 2020466 - RNA, 19 nt, Artificial Sequence
  Description of Artificial Sequence: Synthetic oligonucleotide
  Sense strand starting at position 2755 of SEQ ID NO: 1881130
uggauuaucguucaaugug

SEQ ID NO: 2020467 - RNA, 19 nt, Artificial Sequence
  Description of Artificial Sequence: Synthetic oligonucleotide
  Antisense strand to SEQ ID NO: 2020466
cacauugaacgauaaucca

SEQ ID NO: 2020468 - RNA, 19 nt, Artificial Sequence
  Description of Artificial Sequence: Synthetic oligonucleotide
  Sense strand starting at position 3005 of SEQ ID NO: 1881130
guacauaggcacugucaau

SEQ ID NO: 2020469 - RNA, 19 nt, Artificial Sequence
  Description of Artificial Sequence: Synthetic oligonucleotide
  Antisense strand to SEQ ID NO: 2020468
auugacagugccuauguac

SEQ ID NO: 2020470 - RNA, 19 nt, Artificial Sequence
  Description of Artificial Sequence: Synthetic oligonucleotide
  Sense strand starting at position 3016 of SEQ ID NO: 1881130
cugucaaugcgugccguaa

SEQ ID NO: 2020471 - RNA, 19 nt, Artificial Sequence
  Description of Artificial Sequence: Synthetic oligonucleotide
  Antisense strand to SEQ ID NO: 2020470
uuacggcacgcauugacag

SEQ ID NO: 2020472 - RNA, 19 nt, Artificial Sequence
  Description of Artificial Sequence: Synthetic oligonucleotide
  Sense strand starting at position 3017 of SEQ ID NO: 1881130
ugucaaugcgugccguaau

SEQ ID NO: 2020473 - RNA, 19 nt, Artificial Sequence
  Description of Artificial Sequence: Synthetic oligonucleotide
  Antisense strand to SEQ ID NO: 2020472
auuacggcacgcauugaca

SEQ ID NO: 2020474 - RNA, 19 nt, Artificial Sequence
  Description of Artificial Sequence: Synthetic oligonucleotide
  Sense strand starting at position 3104 of SEQ ID NO: 1881130
cuccuuuagcgugagaaau

SEQ ID NO: 2020475 - RNA, 19 nt, Artificial Sequence
  Description of Artificial Sequence: Synthetic oligonucleotide
  Antisense strand to SEQ ID NO: 2020474
auuucucacgcuaaaggag

SEQ ID NO: 2020476 - RNA, 19 nt, Artificial Sequence
  Description of Artificial Sequence: Synthetic oligonucleotide
  Sense strand starting at position 3114 of SEQ ID NO: 1881130
gugagaaaugugcagucca

SEQ ID NO: 2020477 - RNA, 19 nt, Artificial Sequence
  Description of Artificial Sequence: Synthetic oligonucleotide
  Antisense strand to SEQ ID NO: 2020476
uggacugcacauuucucac

SEQ ID NO: 2020478 - RNA, 19 nt, Artificial Sequence
  Description of Artificial Sequence: Synthetic oligonucleotide
  Sense strand starting at position 3169 of SEQ ID NO: 1881130
gcaauacuugcucauggua

SEQ ID NO: 2020479 - RNA, 19 nt, Artificial Sequence
  Description of Artificial Sequence: Synthetic oligonucleotide
  Antisense strand to SEQ ID NO: 2020478
uaccaugagcaaguauugc

SEQ ID NO: 2020480 - RNA, 19 nt, Artificial Sequence
  Description of Artificial Sequence: Synthetic oligonucleotide
  Sense strand starting at position 3238 of SEQ ID NO: 1881130
ccgugugugaaucauuaua

SEQ ID NO: 2020481 - RNA, 19 nt, Artificial Sequence
  Description of Artificial Sequence: Synthetic oligonucleotide
  Antisense strand to SEQ ID NO: 2020480
uauaaugauucacacacgg

SEQ ID NO: 2020482 - RNA, 19 nt, Artificial Sequence
  Description of Artificial Sequence: Synthetic oligonucleotide
  Sense strand starting at position 3240 of SEQ ID NO: 1881130
gugugugaaucauuauaau

SEQ ID NO: 2020483 - RNA, 19 nt, Artificial Sequence
  Description of Artificial Sequence: Synthetic oligonucleotide
  Antisense strand to SEQ ID NO: 2020482
auuauaaugauucacacac

SEQ ID NO: 2020484 - RNA, 19 nt, Artificial Sequence
  Description of Artificial Sequence: Synthetic oligonucleotide
  Sense strand starting at position 3246 of SEQ ID NO: 1881130
gaaucauuauaauccggga

SEQ ID NO: 2020485 - RNA, 19 nt, Artificial Sequence
  Description of Artificial Sequence: Synthetic oligonucleotide
  Antisense strand to SEQ ID NO: 2020484
ucccggauuauaaugauuc

SEQ ID NO: 2020486 - RNA, 19 nt, Artificial Sequence
  Description of Artificial Sequence: Synthetic oligonucleotide
  Sense strand starting at position 3248 of SEQ ID NO: 1881130
aucauuauaauccgggaga

SEQ ID NO: 2020487 - RNA, 19 nt, Artificial Sequence
  Description of Artificial Sequence: Synthetic oligonucleotide
  Antisense strand to SEQ ID NO: 2020486
ucucccggauuauaaugau

SEQ ID NO: 2020488 - RNA, 19 nt, Artificial Sequence
  Description of Artificial Sequence: Synthetic oligonucleotide
  Sense strand starting at position 3311 of SEQ ID NO: 1881130
uuguuccagucucucuaaa

SEQ ID NO: 2020489 - RNA, 19 nt, Artificial Sequence
  Description of Artificial Sequence: Synthetic oligonucleotide
  Antisense strand to SEQ ID NO: 2020488
uuuagagagacuggaacaa

SEQ ID NO: 2020490 - RNA, 19 nt, Artificial Sequence
  Description of Artificial Sequence: Synthetic oligonucleotide
  Sense strand starting at position 3319 of SEQ ID NO: 1881130
gucucucuaaaguggugaa

SEQ ID NO: 2020491 - RNA, 19 nt, Artificial Sequence
  Description of Artificial Sequence: Synthetic oligonucleotide
  Antisense strand to SEQ ID NO: 2020490
uucaccacuuuagagagac

SEQ ID NO: 2020492 - RNA, 19 nt, Artificial Sequence
  Description of Artificial Sequence: Synthetic oligonucleotide
  Sense strand starting at position 3643 of SEQ ID NO: 1881130
agcccugggaugugacaua

SEQ ID NO: 2020493 - RNA, 19 nt, Artificial Sequence
  Description of Artificial Sequence: Synthetic oligonucleotide
  Antisense strand to SEQ ID NO: 2020492
uaugucacaucccagggcu

SEQ ID NO: 2020494 - RNA, 19 nt, Artificial Sequence
  Description of Artificial Sequence: Synthetic oligonucleotide
  Sense strand starting at position 3772 of SEQ ID NO: 1881130
gucauuuggcucuggaugu

SEQ ID NO: 2020495 - RNA, 19 nt, Artificial Sequence
  Description of Artificial Sequence: Synthetic oligonucleotide
  Antisense strand to SEQ ID NO: 2020494
acauccagagccaaaugac

SEQ ID NO: 2020496 - RNA, 19 nt, Artificial Sequence
  Description of Artificial Sequence: Synthetic oligonucleotide
  Sense strand starting at position 3813 of SEQ ID NO: 1881130
ccagauagcugaccgacua

SEQ ID NO: 2020497 - RNA, 19 nt, Artificial Sequence
  Description of Artificial Sequence: Synthetic oligonucleotide
  Antisense strand to SEQ ID NO: 2020496
uagucggucagcuaucugg

SEQ ID NO: 2020498 - RNA, 19 nt, Artificial Sequence
  Description of Artificial Sequence: Synthetic oligonucleotide
  Sense strand starting at position 3814 of SEQ ID NO: 1881130
cagauagcugaccgacuaa

SEQ ID NO: 2020499 - RNA, 19 nt, Artificial Sequence
  Description of Artificial Sequence: Synthetic oligonucleotide
  Antisense strand to SEQ ID NO: 2020498
uuagucggucagcuaucug

SEQ ID NO: 2020500 - RNA, 19 nt, Artificial Sequence
  Description of Artificial Sequence: Synthetic oligonucleotide
  Sense strand starting at position 76 of SEQ ID NO: 1881131
cuugaaugcccauguaaga

SEQ ID NO: 2020501 - RNA, 19 nt, Artificial Sequence
  Description of Artificial Sequence: Synthetic oligonucleotide
  Antisense strand to SEQ ID NO: 2020500
ucuuacaugggcauucaag

SEQ ID NO: 2020502 - RNA, 19 nt, Artificial Sequence
  Description of Artificial Sequence: Synthetic oligonucleotide
  Sense strand starting at position 145 of SEQ ID NO: 1881131
cagaauuacucaguuggcu

SEQ ID NO: 2020503 - RNA, 19 nt, Artificial Sequence
  Description of Artificial Sequence: Synthetic oligonucleotide
  Antisense strand to SEQ ID NO: 2020502
agccaacugaguaauucug

SEQ ID NO: 2020504 - RNA, 19 nt, Artificial Sequence
  Description of Artificial Sequence: Synthetic oligonucleotide
  Sense strand starting at position 300 of SEQ ID NO: 1881131
gcauuacagguuuaauuaa

SEQ ID NO: 2020505 - RNA, 19 nt, Artificial Sequence
  Description of Artificial Sequence: Synthetic oligonucleotide
  Antisense strand to SEQ ID NO: 2020504
uuaauuaaaccuguaaugc

SEQ ID NO: 2020506 - RNA, 19 nt, Artificial Sequence
  Description of Artificial Sequence: Synthetic oligonucleotide
  Sense strand starting at position 322 of SEQ ID NO: 1881131
aguguuuauugaccaccaa

SEQ ID NO: 2020507 - RNA, 19 nt, Artificial Sequence
  Description of Artificial Sequence: Synthetic oligonucleotide
  Antisense strand to SEQ ID NO: 2020506
uugguggucaauaaacacu

SEQ ID NO: 2020508 - RNA, 19 nt, Artificial Sequence
  Description of Artificial Sequence: Synthetic oligonucleotide
  Sense strand starting at position 368 of SEQ ID NO: 1881131
uagaguccauucuuugaga

SEQ ID NO: 2020509 - RNA, 19 nt, Artificial Sequence
  Description of Artificial Sequence: Synthetic oligonucleotide
  Antisense strand to SEQ ID NO: 2020508
ucucaaagaauggacucua

SEQ ID NO: 2020510 - RNA, 19 nt, Artificial Sequence
  Description of Artificial Sequence: Synthetic oligonucleotide
  Sense strand starting at position 370 of SEQ ID NO: 1881131
gaguccauucuuugagaga

SEQ ID NO: 2020511 - RNA, 19 nt, Artificial Sequence
  Description of Artificial Sequence: Synthetic oligonucleotide
  Antisense strand to SEQ ID NO: 2020510
ucucucaaagaauggacuc

SEQ ID NO: 2020512 - RNA, 19 nt, Artificial Sequence
  Description of Artificial Sequence: Synthetic oligonucleotide
  Sense strand starting at position 1985 of SEQ ID NO: 1881131
gugauacaaaguugaauga

SEQ ID NO: 2020513 - RNA, 19 nt, Artificial Sequence
  Description of Artificial Sequence: Synthetic oligonucleotide
  Antisense strand to SEQ ID NO: 2020512
ucauucaacuuuguaucac

SEQ ID NO: 2020514 - RNA, 19 nt, Artificial Sequence
  Description of Artificial Sequence: Synthetic oligonucleotide
  Sense strand starting at position 2046 of SEQ ID NO: 1881131
acauaaucagguggucaca

SEQ ID NO: 2020515 - RNA, 19 nt, Artificial Sequence
  Description of Artificial Sequence: Synthetic oligonucleotide
  Antisense strand to SEQ ID NO: 2020514
ugugaccaccugauuaugu

SEQ ID NO: 2020516 - RNA, 19 nt, Artificial Sequence
  Description of Artificial Sequence: Synthetic oligonucleotide
  Sense strand starting at position 2048 of SEQ ID NO: 1881131
auaaucagguggucacaau

SEQ ID NO: 2020517 - RNA, 19 nt, Artificial Sequence
  Description of Artificial Sequence: Synthetic oligonucleotide
  Antisense strand to SEQ ID NO: 2020516
auugugaccaccugauuau

SEQ ID NO: 2020518 - RNA, 19 nt, Artificial Sequence
  Description of Artificial Sequence: Synthetic oligonucleotide
  Sense strand starting at position 2059 of SEQ ID NO: 1881131
gucacaauacaguguaaua

SEQ ID NO: 2020519 - RNA, 19 nt, Artificial Sequence
  Description of Artificial Sequence: Synthetic oligonucleotide
  Antisense strand to SEQ ID NO: 2020518
uauuacacuguauugugac

SEQ ID NO: 2020520 - RNA, 19 nt, Artificial Sequence
  Description of Artificial Sequence: Synthetic oligonucleotide
  Sense strand starting at position 2074 of SEQ ID NO: 1881131
aauacagugcugugacaga

SEQ ID NO: 2020521 - RNA, 19 nt, Artificial Sequence
  Description of Artificial Sequence: Synthetic oligonucleotide
  Antisense strand to SEQ ID NO: 2020520
ucugucacagcacuguauu

SEQ ID NO: 2020522 - RNA, 19 nt, Artificial Sequence
  Description of Artificial Sequence: Synthetic oligonucleotide
  Sense strand starting at position 2309 of SEQ ID NO: 1881131
gcccuuuaaccagauguac

SEQ ID NO: 2020523 - RNA, 19 nt, Artificial Sequence
  Description of Artificial Sequence: Synthetic oligonucleotide
  Antisense strand to SEQ ID NO: 2020522
guacaucugguuaaagggc

SEQ ID NO: 2020524 - RNA, 19 nt, Artificial Sequence
  Description of Artificial Sequence: Synthetic oligonucleotide
  Sense strand starting at position 2492 of SEQ ID NO: 1881131
ugaaguccugacuaggagu

SEQ ID NO: 2020525 - RNA, 19 nt, Artificial Sequence
  Description of Artificial Sequence: Synthetic oligonucleotide
  Antisense strand to SEQ ID NO: 2020524
acuccuagucaggacuuca

SEQ ID NO: 2020526 - RNA, 19 nt, Artificial Sequence
  Description of Artificial Sequence: Synthetic oligonucleotide
  Sense strand starting at position 2518 of SEQ ID NO: 1881131
agccuagucaaauggugaa

SEQ ID NO: 2020527 - RNA, 19 nt, Artificial Sequence
  Description of Artificial Sequence: Synthetic oligonucleotide
  Antisense strand to SEQ ID NO: 2020526
uucaccauuugacuaggcu

SEQ ID NO: 2020528 - RNA, 19 nt, Artificial Sequence
  Description of Artificial Sequence: Synthetic oligonucleotide
  Sense strand starting at position 2812 of SEQ ID NO: 1881131
aggacauucucuucuguag

SEQ ID NO: 2020529 - RNA, 19 nt, Artificial Sequence
  Description of Artificial Sequence: Synthetic oligonucleotide
  Antisense strand to SEQ ID NO: 2020528
cuacagaagagaauguccu

SEQ ID NO: 2020530 - RNA, 19 nt, Artificial Sequence
  Description of Artificial Sequence: Synthetic oligonucleotide
  Sense strand starting at position 2823 of SEQ ID NO: 1881131
uucuguagccuacaaguaa

SEQ ID NO: 2020531 - RNA, 19 nt, Artificial Sequence
  Description of Artificial Sequence: Synthetic oligonucleotide
  Antisense strand to SEQ ID NO: 2020530
uuacuuguaggcuacagaa

SEQ ID NO: 2020532 - RNA, 19 nt, Artificial Sequence
  Description of Artificial Sequence: Synthetic oligonucleotide
  Sense strand starting at position 2872 of SEQ ID NO: 1881131
cuacgaucuuaucuacaga

SEQ ID NO: 2020533 - RNA, 19 nt, Artificial Sequence
  Description of Artificial Sequence: Synthetic oligonucleotide
  Antisense strand to SEQ ID NO: 2020532
ucuguagauaagaucguag

SEQ ID NO: 2020534 - RNA, 19 nt, Artificial Sequence
  Description of Artificial Sequence: Synthetic oligonucleotide
  Sense strand starting at position 2875 of SEQ ID NO: 1881131
cgaucuuaucuacagaccu

SEQ ID NO: 2020535 - RNA, 19 nt, Artificial Sequence
  Description of Artificial Sequence: Synthetic oligonucleotide
  Antisense strand to SEQ ID NO: 2020534
aggucuguagauaagaucg

SEQ ID NO: 2020536 - RNA, 19 nt, Artificial Sequence
  Description of Artificial Sequence: Synthetic oligonucleotide
  Sense strand starting at position 2919 of SEQ ID NO: 1881131
auguguacucuacagcaga

SEQ ID NO: 2020537 - RNA, 19 nt, Artificial Sequence
  Description of Artificial Sequence: Synthetic oligonucleotide
  Antisense strand to SEQ ID NO: 2020536
ucugcuguagaguacacau

SEQ ID NO: 2020538 - RNA, 19 nt, Artificial Sequence
  Description of Artificial Sequence: Synthetic oligonucleotide
  Sense strand starting at position 2922 of SEQ ID NO: 1881131
uguacucuacagcagaaga

SEQ ID NO: 2020539 - RNA, 19 nt, Artificial Sequence
  Description of Artificial Sequence: Synthetic oligonucleotide
  Antisense strand to SEQ ID NO: 2020538
ucuucugcuguagaguaca

SEQ ID NO: 2020540 - RNA, 19 nt, Artificial Sequence
  Description of Artificial Sequence: Synthetic oligonucleotide
  Sense strand starting at position 2976 of SEQ ID NO: 1881131
ugucuuuaguauccuacaa

SEQ ID NO: 2020541 - RNA, 19 nt, Artificial Sequence
  Description of Artificial Sequence: Synthetic oligonucleotide
  Antisense strand to SEQ ID NO: 2020540
uuguaggauacuaaagaca

SEQ ID NO: 2020542 - RNA, 19 nt, Artificial Sequence
  Description of Artificial Sequence: Synthetic oligonucleotide
  Sense strand starting at position 3047 of SEQ ID NO: 1881131
aagugcagagucuaguuau

SEQ ID NO: 2020543 - RNA, 19 nt, Artificial Sequence
  Description of Artificial Sequence: Synthetic oligonucleotide
  Antisense strand to SEQ ID NO: 2020542
auaacuagacucugcacuu

SEQ ID NO: 2020544 - RNA, 19 nt, Artificial Sequence
  Description of Artificial Sequence: Synthetic oligonucleotide
  Sense strand starting at position 3050 of SEQ ID NO: 1881131
ugcagagucuaguuauuua

SEQ ID NO: 2020545 - RNA, 19 nt, Artificial Sequence
  Description of Artificial Sequence: Synthetic oligonucleotide
  Antisense strand to SEQ ID NO: 2020544
uaaauaacuagacucugca

SEQ ID NO: 2020546 - RNA, 19 nt, Artificial Sequence
  Description of Artificial Sequence: Synthetic oligonucleotide
  Sense strand starting at position 3058 of SEQ ID NO: 1881131
cuaguuauuuaguagaaug

SEQ ID NO: 2020547 - RNA, 19 nt, Artificial Sequence
  Description of Artificial Sequence: Synthetic oligonucleotide
  Antisense strand to SEQ ID NO: 2020546
cauucuacuaaauaacuag

SEQ ID NO: 2020548 - RNA, 19 nt, Artificial Sequence
  Description of Artificial Sequence: Synthetic oligonucleotide
  Sense strand starting at position 3066 of SEQ ID NO: 1881131
uuaguagaaugucccugaa

SEQ ID NO: 2020549 - RNA, 19 nt, Artificial Sequence
  Description of Artificial Sequence: Synthetic oligonucleotide
  Antisense strand to SEQ ID NO: 2020548
uucagggacauucuacuaa

SEQ ID NO: 2020550 - RNA, 19 nt, Artificial Sequence
  Description of Artificial Sequence: Synthetic oligonucleotide
  Sense strand starting at position 3068 of SEQ ID NO: 1881131
aguagaaugucccugaauu

SEQ ID NO: 2020551 - RNA, 19 nt, Artificial Sequence
  Description of Artificial Sequence: Synthetic oligonucleotide
  Antisense strand to SEQ ID NO: 2020550
aauucagggacauucuacu

SEQ ID NO: 2020552 - RNA, 19 nt, Artificial Sequence
  Description of Artificial Sequence: Synthetic oligonucleotide
  Sense strand starting at position 3081 of SEQ ID NO: 1881131
ugaauuuacgcugggcaca

SEQ ID NO: 2020553 - RNA, 19 nt, Artificial Sequence
  Description of Artificial Sequence: Synthetic oligonucleotide
  Antisense strand to SEQ ID NO: 2020552
ugugcccagcguaaauuca

SEQ ID NO: 2020554 - RNA, 19 nt, Artificial Sequence
  Description of Artificial Sequence: Synthetic oligonucleotide
  Sense strand starting at position 3398 of SEQ ID NO: 1881131
cccugaauuuaguagaaug

SEQ ID NO: 2020555 - RNA, 19 nt, Artificial Sequence
  Description of Artificial Sequence: Synthetic oligonucleotide
  Antisense strand to SEQ ID NO: 2020554
cauucuacuaaauucaggg

SEQ ID NO: 2020556 - RNA, 19 nt, Artificial Sequence
  Description of Artificial Sequence: Synthetic oligonucleotide
  Sense strand starting at position 3408 of SEQ ID NO: 1881131
aguagaaugucucugguuu

SEQ ID NO: 2020557 - RNA, 19 nt, Artificial Sequence
  Description of Artificial Sequence: Synthetic oligonucleotide
  Antisense strand to SEQ ID NO: 2020556
aaaccagagacauucuacu

SEQ ID NO: 2020558 - RNA, 19 nt, Artificial Sequence
  Description of Artificial Sequence: Synthetic oligonucleotide
  Sense strand starting at position 3412 of SEQ ID NO: 1881131
gaaugucucugguuuggaa

SEQ ID NO: 2020559 - RNA, 19 nt, Artificial Sequence
  Description of Artificial Sequence: Synthetic oligonucleotide
  Antisense strand to SEQ ID NO: 2020558
uuccaaaccagagacauuc

SEQ ID NO: 2020560 - RNA, 19 nt, Artificial Sequence
  Description of Artificial Sequence: Synthetic oligonucleotide
  Sense strand starting at position 3441 of SEQ ID NO: 1881131
cuguuucucgcgguuagau

SEQ ID NO: 2020561 - RNA, 19 nt, Artificial Sequence
  Description of Artificial Sequence: Synthetic oligonucleotide
  Antisense strand to SEQ ID NO: 2020560
aucuaaccgcgagaaacag

SEQ ID NO: 2020562 - RNA, 19 nt, Artificial Sequence
  Description of Artificial Sequence: Synthetic oligonucleotide
  Sense strand starting at position 3442 of SEQ ID NO: 1881131
uguuucucgcgguuagauu

SEQ ID NO: 2020563 - RNA, 19 nt, Artificial Sequence
  Description of Artificial Sequence: Synthetic oligonucleotide
  Antisense strand to SEQ ID NO: 2020562
aaucuaaccgcgagaaaca

SEQ ID NO: 2020564 - RNA, 19 nt, Artificial Sequence
  Description of Artificial Sequence: Synthetic oligonucleotide
  Sense strand starting at position 3443 of SEQ ID NO: 1881131
guuucucgcgguuagauuu

SEQ ID NO: 2020565 - RNA, 19 nt, Artificial Sequence
  Description of Artificial Sequence: Synthetic oligonucleotide
  Antisense strand to SEQ ID NO: 2020564
aaaucuaaccgcgagaaac

SEQ ID NO: 2020566 - RNA, 19 nt, Artificial Sequence
  Description of Artificial Sequence: Synthetic oligonucleotide
  Sense strand starting at position 3449 of SEQ ID NO: 1881131
cgcgguuagauuuggcaua

SEQ ID NO: 2020567 - RNA, 19 nt, Artificial Sequence
  Description of Artificial Sequence: Synthetic oligonucleotide
  Antisense strand to SEQ ID NO: 2020566
uaugccaaaucuaaccgcg

SEQ ID NO: 2020568 - RNA, 19 nt, Artificial Sequence
  Description of Artificial Sequence: Synthetic oligonucleotide
  Sense strand starting at position 3643 of SEQ ID NO: 1881131
uuuaucaaguaguuaccaa

SEQ ID NO: 2020569 - RNA, 19 nt, Artificial Sequence
  Description of Artificial Sequence: Synthetic oligonucleotide
  Antisense strand to SEQ ID NO: 2020568
uugguaacuacuugauaaa

SEQ ID NO: 2020570 - RNA, 19 nt, Artificial Sequence
  Description of Artificial Sequence: Synthetic oligonucleotide
  Sense strand starting at position 3663 of SEQ ID NO: 1881131
cacuguuuggaauguguua

SEQ ID NO: 2020571 - RNA, 19 nt, Artificial Sequence
  Description of Artificial Sequence: Synthetic oligonucleotide
  Antisense strand to SEQ ID NO: 2020570
uaacacauuccaaacagug

SEQ ID NO: 2020572 - RNA, 19 nt, Artificial Sequence
  Description of Artificial Sequence: Synthetic oligonucleotide
  Sense strand starting at position 3675 of SEQ ID NO: 1881131
uguguuacauaaguuaacu

SEQ ID NO: 2020573 - RNA, 19 nt, Artificial Sequence
  Description of Artificial Sequence: Synthetic oligonucleotide
  Antisense strand to SEQ ID NO: 2020572
aguuaacuuauguaacaca

SEQ ID NO: 2020574 - RNA, 19 nt, Artificial Sequence
  Description of Artificial Sequence: Synthetic oligonucleotide
  Sense strand starting at position 3703 of SEQ ID NO: 1881131
ucgcaacacccuuaugaca

SEQ ID NO: 2020575 - RNA, 19 nt, Artificial Sequence
  Description of Artificial Sequence: Synthetic oligonucleotide
  Antisense strand to SEQ ID NO: 2020574
ugucauaaggguguugcga

SEQ ID NO: 2020576 - RNA, 19 nt, Artificial Sequence
  Description of Artificial Sequence: Synthetic oligonucleotide
  Sense strand starting at position 3923 of SEQ ID NO: 1881131
guguaacugguccaagcaa

SEQ ID NO: 2020577 - RNA, 19 nt, Artificial Sequence
  Description of Artificial Sequence: Synthetic oligonucleotide
  Antisense strand to SEQ ID NO: 2020576
uugcuuggaccaguuacac

SEQ ID NO: 2020578 - RNA, 19 nt, Artificial Sequence
  Description of Artificial Sequence: Synthetic oligonucleotide
  Sense strand starting at position 3969 of SEQ ID NO: 1881131
ggcugaaucccuuauugca

SEQ ID NO: 2020579 - RNA, 19 nt, Artificial Sequence
  Description of Artificial Sequence: Synthetic oligonucleotide
  Antisense strand to SEQ ID NO: 2020578
ugcaauaagggauucagcc

SEQ ID NO: 2020580 - RNA, 19 nt, Artificial Sequence
  Description of Artificial Sequence: Synthetic oligonucleotide
  Sense strand starting at position 141 of SEQ ID NO: 1881132
augguacugugauuccaaa

SEQ ID NO: 2020581 - RNA, 19 nt, Artificial Sequence
  Description of Artificial Sequence: Synthetic oligonucleotide
  Antisense strand to SEQ ID NO: 2020580
uuuggaaucacaguaccau

SEQ ID NO: 2020582 - RNA, 19 nt, Artificial Sequence
  Description of Artificial Sequence: Synthetic oligonucleotide
  Sense strand starting at position 149 of SEQ ID NO: 1881132
gugauuccaaaguggauca

SEQ ID NO: 2020583 - RNA, 19 nt, Artificial Sequence
  Description of Artificial Sequence: Synthetic oligonucleotide
  Antisense strand to SEQ ID NO: 2020582
ugauccacuuuggaaucac

SEQ ID NO: 2020584 - RNA, 19 nt, Artificial Sequence
  Description of Artificial Sequence: Synthetic oligonucleotide
  Sense strand starting at position 188 of SEQ ID NO: 1881132
ugaaauaagccuuguuaaa

SEQ ID NO: 2020585 - RNA, 19 nt, Artificial Sequence
  Description of Artificial Sequence: Synthetic oligonucleotide
  Antisense strand to SEQ ID NO: 2020584
uuuaacaaggcuuauuuca

SEQ ID NO: 2020586 - RNA, 19 nt, Artificial Sequence
  Description of Artificial Sequence: Synthetic oligonucleotide
  Sense strand starting at position 207 of SEQ ID NO: 1881132
uagauuguguuaucuagaa

SEQ ID NO: 2020587 - RNA, 19 nt, Artificial Sequence
  Description of Artificial Sequence: Synthetic oligonucleotide
  Antisense strand to SEQ ID NO: 2020586
uucuagauaacacaaucua

SEQ ID NO: 2020588 - RNA, 19 nt, Artificial Sequence
  Description of Artificial Sequence: Synthetic oligonucleotide
  Sense strand starting at position 211 of SEQ ID NO: 1881132
uuguguuaucuagaacuca

SEQ ID NO: 2020589 - RNA, 19 nt, Artificial Sequence
  Description of Artificial Sequence: Synthetic oligonucleotide
  Antisense strand to SEQ ID NO: 2020588
ugaguucuagauaacacaa

SEQ ID NO: 2020590 - RNA, 19 nt, Artificial Sequence
  Description of Artificial Sequence: Synthetic oligonucleotide
  Sense strand starting at position 648 of SEQ ID NO: 1881132
cugaaauccugggccuaug

SEQ ID NO: 2020591 - RNA, 19 nt, Artificial Sequence
  Description of Artificial Sequence: Synthetic oligonucleotide
  Antisense strand to SEQ ID NO: 2020590
cauaggcccaggauuucag

SEQ ID NO: 2020592 - RNA, 19 nt, Artificial Sequence
  Description of Artificial Sequence: Synthetic oligonucleotide
  Sense strand starting at position 651 of SEQ ID NO: 1881132
aaauccugggccuauguua

SEQ ID NO: 2020593 - RNA, 19 nt, Artificial Sequence
  Description of Artificial Sequence: Synthetic oligonucleotide
  Antisense strand to SEQ ID NO: 2020592
uaacauaggcccaggauuu

SEQ ID NO: 2020594 - RNA, 19 nt, Artificial Sequence
  Description of Artificial Sequence: Synthetic oligonucleotide
  Sense strand starting at position 662 of SEQ ID NO: 1881132
cuauguuaacucuaugagu

SEQ ID NO: 2020595 - RNA, 19 nt, Artificial Sequence
  Description of Artificial Sequence: Synthetic oligonucleotide
  Antisense strand to SEQ ID NO: 2020594
acucauagaguuaacauag

SEQ ID NO: 2020596 - RNA, 19 nt, Artificial Sequence
  Description of Artificial Sequence: Synthetic oligonucleotide
  Sense strand starting at position 779 of SEQ ID NO: 1881132
ucucuuugacguuaacaua

SEQ ID NO: 2020597 - RNA, 19 nt, Artificial Sequence
  Description of Artificial Sequence: Synthetic oligonucleotide
  Antisense strand to SEQ ID NO: 2020596
uauguuaacgucaaagaga

SEQ ID NO: 2020598 - RNA, 19 nt, Artificial Sequence
  Description of Artificial Sequence: Synthetic oligonucleotide
  Sense strand starting at position 990 of SEQ ID NO: 1881132
aguccucuuccagaaugca

SEQ ID NO: 2020599 - RNA, 19 nt, Artificial Sequence
  Description of Artificial Sequence: Synthetic oligonucleotide
  Antisense strand to SEQ ID NO: 2020598
ugcauucuggaagaggacu

SEQ ID NO: 2020600 - RNA, 19 nt, Artificial Sequence
  Description of Artificial Sequence: Synthetic oligonucleotide
  Sense strand starting at position 998 of SEQ ID NO: 1881132
uccagaaugcaauguuaag

SEQ ID NO: 2020601 - RNA, 19 nt, Artificial Sequence
  Description of Artificial Sequence: Synthetic oligonucleotide
  Antisense strand to SEQ ID NO: 2020600
cuuaacauugcauucugga

SEQ ID NO: 2020602 - RNA, 19 nt, Artificial Sequence
  Description of Artificial Sequence: Synthetic oligonucleotide
  Sense strand starting at position 1134 of SEQ ID NO: 1881132
uaacuaaaugaguguaaug

SEQ ID NO: 2020603 - RNA, 19 nt, Artificial Sequence
  Description of Artificial Sequence: Synthetic oligonucleotide
  Antisense strand to SEQ ID NO: 2020602
cauuacacucauuuaguua

SEQ ID NO: 2020604 - RNA, 19 nt, Artificial Sequence
  Description of Artificial Sequence: Synthetic oligonucleotide
  Sense strand starting at position 1226 of SEQ ID NO: 1881132
cucuuacuuuggguuuaaa

SEQ ID NO: 2020605 - RNA, 19 nt, Artificial Sequence
  Description of Artificial Sequence: Synthetic oligonucleotide
  Antisense strand to SEQ ID NO: 2020604
uuuaaacccaaaguaagag

SEQ ID NO: 2020606 - RNA, 19 nt, Artificial Sequence
  Description of Artificial Sequence: Synthetic oligonucleotide
  Sense strand starting at position 1266 of SEQ ID NO: 1881132
uguugucaucccgagaaau

SEQ ID NO: 2020607 - RNA, 19 nt, Artificial Sequence
  Description of Artificial Sequence: Synthetic oligonucleotide
  Antisense strand to SEQ ID NO: 2020606
auuucucgggaugacaaca

SEQ ID NO: 2020608 - RNA, 19 nt, Artificial Sequence
  Description of Artificial Sequence: Synthetic oligonucleotide
  Sense strand starting at position 1268 of SEQ ID NO: 1881132
uugucaucccgagaaauga

SEQ ID NO: 2020609 - RNA, 19 nt, Artificial Sequence
  Description of Artificial Sequence: Synthetic oligonucleotide
  Antisense strand to SEQ ID NO: 2020608
ucauuucucgggaugacaa

SEQ ID NO: 2020610 - RNA, 19 nt, Artificial Sequence
  Description of Artificial Sequence: Synthetic oligonucleotide
  Sense strand starting at position 1279 of SEQ ID NO: 1881132
agaaaugacuguuucucuu

SEQ ID NO: 2020611 - RNA, 19 nt, Artificial Sequence
  Description of Artificial Sequence: Synthetic oligonucleotide
  Antisense strand to SEQ ID NO: 2020610
aagagaaacagucauuucu

SEQ ID NO: 2020612 - RNA, 19 nt, Artificial Sequence
  Description of Artificial Sequence: Synthetic oligonucleotide
  Sense strand starting at position 1309 of SEQ ID NO: 1881132
uacaguguuggaggagaca

SEQ ID NO: 2020613 - RNA, 19 nt, Artificial Sequence
  Description of Artificial Sequence: Synthetic oligonucleotide
  Antisense strand to SEQ ID NO: 2020612
ugucuccuccaacacugua

SEQ ID NO: 2020614 - RNA, 19 nt, Artificial Sequence
  Description of Artificial Sequence: Synthetic oligonucleotide
  Sense strand starting at position 1359 of SEQ ID NO: 1881132
guuagucugagugaauaug

SEQ ID NO: 2020615 - RNA, 19 nt, Artificial Sequence
  Description of Artificial Sequence: Synthetic oligonucleotide
  Antisense strand to SEQ ID NO: 2020614
cauauucacucagacuaac

SEQ ID NO: 2020616 - RNA, 19 nt, Artificial Sequence
  Description of Artificial Sequence: Synthetic oligonucleotide
  Sense strand starting at position 1399 of SEQ ID NO: 1881132
agggaauaucuuugaggcu

SEQ ID NO: 2020617 - RNA, 19 nt, Artificial Sequence
  Description of Artificial Sequence: Synthetic oligonucleotide
  Antisense strand to SEQ ID NO: 2020616
agccucaaagauauucccu

SEQ ID NO: 2020618 - RNA, 19 nt, Artificial Sequence
  Description of Artificial Sequence: Synthetic oligonucleotide
  Sense strand starting at position 1482 of SEQ ID NO: 1881132
guagauucuggucauccau

SEQ ID NO: 2020619 - RNA, 19 nt, Artificial Sequence
  Description of Artificial Sequence: Synthetic oligonucleotide
  Antisense strand to SEQ ID NO: 2020618
auggaugaccagaaucuac

SEQ ID NO: 2020620 - RNA, 19 nt, Artificial Sequence
  Description of Artificial Sequence: Synthetic oligonucleotide
  Sense strand starting at position 1520 of SEQ ID NO: 1881132
caguccuaucugcaggaaa

SEQ ID NO: 2020621 - RNA, 19 nt, Artificial Sequence
  Description of Artificial Sequence: Synthetic oligonucleotide
  Antisense strand to SEQ ID NO: 2020620
uuuccugcagauaggacug

SEQ ID NO: 2020622 - RNA, 19 nt, Artificial Sequence
  Description of Artificial Sequence: Synthetic oligonucleotide
  Sense strand starting at position 1726 of SEQ ID NO: 1881132
gugucuguucagcuaaugu

SEQ ID NO: 2020623 - RNA, 19 nt, Artificial Sequence
  Description of Artificial Sequence: Synthetic oligonucleotide
  Antisense strand to SEQ ID NO: 2020622
acauuagcugaacagacac

SEQ ID NO: 2020624 - RNA, 19 nt, Artificial Sequence
  Description of Artificial Sequence: Synthetic oligonucleotide
  Sense strand starting at position 2349 of SEQ ID NO: 1881132
ugcagacagucucuugaaa

SEQ ID NO: 2020625 - RNA, 19 nt, Artificial Sequence
  Description of Artificial Sequence: Synthetic oligonucleotide
  Antisense strand to SEQ ID NO: 2020624
uuucaagagacugucugca

SEQ ID NO: 2020626 - RNA, 19 nt, Artificial Sequence
  Description of Artificial Sequence: Synthetic oligonucleotide
  Sense strand starting at position 2537 of SEQ ID NO: 1881132
augggaaauuucgaauucu

SEQ ID NO: 2020627 - RNA, 19 nt, Artificial Sequence
  Description of Artificial Sequence: Synthetic oligonucleotide
  Antisense strand to SEQ ID NO: 2020626
agaauucgaaauuucccau

SEQ ID NO: 2020628 - RNA, 19 nt, Artificial Sequence
  Description of Artificial Sequence: Synthetic oligonucleotide
  Sense strand starting at position 2545 of SEQ ID NO: 1881132
uuucgaauucugggagaga

SEQ ID NO: 2020629 - RNA, 19 nt, Artificial Sequence
  Description of Artificial Sequence: Synthetic oligonucleotide
  Antisense strand to SEQ ID NO: 2020628
ucucucccagaauucgaaa

SEQ ID NO: 2020630 - RNA, 19 nt, Artificial Sequence
  Description of Artificial Sequence: Synthetic oligonucleotide
  Sense strand starting at position 2560 of SEQ ID NO: 1881132
gagagauccugauuccauu

SEQ ID NO: 2020631 - RNA, 19 nt, Artificial Sequence
  Description of Artificial Sequence: Synthetic oligonucleotide
  Antisense strand to SEQ ID NO: 2020630
aauggaaucaggaucucuc

SEQ ID NO: 2020632 - RNA, 19 nt, Artificial Sequence
  Description of Artificial Sequence: Synthetic oligonucleotide
  Sense strand starting at position 2617 of SEQ ID NO: 1881132
gacucuaaagagugaaugu

SEQ ID NO: 2020633 - RNA, 19 nt, Artificial Sequence
  Description of Artificial Sequence: Synthetic oligonucleotide
  Antisense strand to SEQ ID NO: 2020632
acauucacucuuuagaguc

SEQ ID NO: 2020634 - RNA, 19 nt, Artificial Sequence
  Description of Artificial Sequence: Synthetic oligonucleotide
  Sense strand starting at position 2628 of SEQ ID NO: 1881132
gugaaugugccuuacagag

SEQ ID NO: 2020635 - RNA, 19 nt, Artificial Sequence
  Description of Artificial Sequence: Synthetic oligonucleotide
  Antisense strand to SEQ ID NO: 2020634
cucuguaaggcacauucac

SEQ ID NO: 2020636 - RNA, 19 nt, Artificial Sequence
  Description of Artificial Sequence: Synthetic oligonucleotide
  Sense strand starting at position 2634 of SEQ ID NO: 1881132
gugccuuacagaggacaau

SEQ ID NO: 2020637 - RNA, 19 nt, Artificial Sequence
  Description of Artificial Sequence: Synthetic oligonucleotide
  Antisense strand to SEQ ID NO: 2020636
auuguccucuguaaggcac

SEQ ID NO: 2020638 - RNA, 19 nt, Artificial Sequence
  Description of Artificial Sequence: Synthetic oligonucleotide
  Sense strand starting at position 2643 of SEQ ID NO: 1881132
agaggacaauacguuauua

SEQ ID NO: 2020639 - RNA, 19 nt, Artificial Sequence
  Description of Artificial Sequence: Synthetic oligonucleotide
  Antisense strand to SEQ ID NO: 2020638
uaauaacguauuguccucu

SEQ ID NO: 2020640 - RNA, 19 nt, Artificial Sequence
  Description of Artificial Sequence: Synthetic oligonucleotide
  Sense strand starting at position 2645 of SEQ ID NO: 1881132
aggacaauacguuauuagu

SEQ ID NO: 2020641 - RNA, 19 nt, Artificial Sequence
  Description of Artificial Sequence: Synthetic oligonucleotide
  Antisense strand to SEQ ID NO: 2020640
acuaauaacguauuguccu

SEQ ID NO: 2020642 - RNA, 19 nt, Artificial Sequence
  Description of Artificial Sequence: Synthetic oligonucleotide
  Sense strand starting at position 2658 of SEQ ID NO: 1881132
auuagugacugacuuaaac

SEQ ID NO: 2020643 - RNA, 19 nt, Artificial Sequence
  Description of Artificial Sequence: Synthetic oligonucleotide
  Antisense strand to SEQ ID NO: 2020642
guuuaagucagucacuaau

SEQ ID NO: 2020644 - RNA, 19 nt, Artificial Sequence
  Description of Artificial Sequence: Synthetic oligonucleotide
  Sense strand starting at position 2810 of SEQ ID NO: 1881132
gaagaaaucguguagcaaa

SEQ ID NO: 2020645 - RNA, 19 nt, Artificial Sequence
  Description of Artificial Sequence: Synthetic oligonucleotide
  Antisense strand to SEQ ID NO: 2020644
uuugcuacacgauuucuuc

SEQ ID NO: 2020646 - RNA, 19 nt, Artificial Sequence
  Description of Artificial Sequence: Synthetic oligonucleotide
  Sense strand starting at position 3283 of SEQ ID NO: 1881132
cuagaagagugaguuaucu

SEQ ID NO: 2020647 - RNA, 19 nt, Artificial Sequence
  Description of Artificial Sequence: Synthetic oligonucleotide
  Antisense strand to SEQ ID NO: 2020646
agauaacucacucuucuag

SEQ ID NO: 2020648 - RNA, 19 nt, Artificial Sequence
  Description of Artificial Sequence: Synthetic oligonucleotide
  Sense strand starting at position 3307 of SEQ ID NO: 1881132
ucacauugaucagugaauc

SEQ ID NO: 2020649 - RNA, 19 nt, Artificial Sequence
  Description of Artificial Sequence: Synthetic oligonucleotide
  Antisense strand to SEQ ID NO: 2020648
gauucacugaucaauguga

SEQ ID NO: 2020650 - RNA, 19 nt, Artificial Sequence
  Description of Artificial Sequence: Synthetic oligonucleotide
  Sense strand starting at position 3346 of SEQ ID NO: 1881132
ggauacaguucuucucaga

SEQ ID NO: 2020651 - RNA, 19 nt, Artificial Sequence
  Description of Artificial Sequence: Synthetic oligonucleotide
  Antisense strand to SEQ ID NO: 2020650
ucugagaagaacuguaucc

SEQ ID NO: 2020652 - RNA, 19 nt, Artificial Sequence
  Description of Artificial Sequence: Synthetic oligonucleotide
  Sense strand starting at position 3531 of SEQ ID NO: 1881132
guccacuuccaagaguuaa

SEQ ID NO: 2020653 - RNA, 19 nt, Artificial Sequence
  Description of Artificial Sequence: Synthetic oligonucleotide
  Antisense strand to SEQ ID NO: 2020652
uuaacucuuggaaguggac

SEQ ID NO: 2020654 - RNA, 19 nt, Artificial Sequence
  Description of Artificial Sequence: Synthetic oligonucleotide
  Sense strand starting at position 3694 of SEQ ID NO: 1881132
ccaugaagugcccaagaca

SEQ ID NO: 2020655 - RNA, 19 nt, Artificial Sequence
  Description of Artificial Sequence: Synthetic oligonucleotide
  Antisense strand to SEQ ID NO: 2020654
ugucuugggcacuucaugg

SEQ ID NO: 2020656 - RNA, 19 nt, Artificial Sequence
  Description of Artificial Sequence: Synthetic oligonucleotide
  Sense strand starting at position 3825 of SEQ ID NO: 1881132
aagugaacagagugacuuu

SEQ ID NO: 2020657 - RNA, 19 nt, Artificial Sequence
  Description of Artificial Sequence: Synthetic oligonucleotide
  Antisense strand to SEQ ID NO: 2020656
aaagucacucuguucacuu

SEQ ID NO: 2020658 - RNA, 19 nt, Artificial Sequence
  Description of Artificial Sequence: Synthetic oligonucleotide
  Sense strand starting at position 3932 of SEQ ID NO: 1881132
augagucagcaucagagua

SEQ ID NO: 2020659 - RNA, 19 nt, Artificial Sequence
  Description of Artificial Sequence: Synthetic oligonucleotide
  Antisense strand to SEQ ID NO: 2020658
uacucugaugcugacucau

SEQ ID NO: 2020660 - RNA, 19 nt, Artificial Sequence
  Description of Artificial Sequence: Synthetic oligonucleotide
  Sense strand starting at position 105 of SEQ ID NO: 1881133
gaucacgugauauggugaa

SEQ ID NO: 2020661 - RNA, 19 nt, Artificial Sequence
  Description of Artificial Sequence: Synthetic oligonucleotide
  Antisense strand to SEQ ID NO: 2020660
uucaccauaucacgugauc

SEQ ID NO: 2020662 - RNA, 19 nt, Artificial Sequence
  Description of Artificial Sequence: Synthetic oligonucleotide
  Sense strand starting at position 401 of SEQ ID NO: 1881133
ugaucugugcuugcugcaa

SEQ ID NO: 2020663 - RNA, 19 nt, Artificial Sequence
  Description of Artificial Sequence: Synthetic oligonucleotide
  Antisense strand to SEQ ID NO: 2020662
uugcagcaagcacagauca

SEQ ID NO: 2020664 - RNA, 19 nt, Artificial Sequence
  Description of Artificial Sequence: Synthetic oligonucleotide
  Sense strand starting at position 412 of SEQ ID NO: 1881133
ugcugcaaggaucaucaaa

SEQ ID NO: 2020665 - RNA, 19 nt, Artificial Sequence
  Description of Artificial Sequence: Synthetic oligonucleotide
  Antisense strand to SEQ ID NO: 2020664
uuugaugauccuugcagca

SEQ ID NO: 2020666 - RNA, 19 nt, Artificial Sequence
  Description of Artificial Sequence: Synthetic oligonucleotide
  Sense strand starting at position 414 of SEQ ID NO: 1881133
cugcaaggaucaucaaaca

SEQ ID NO: 2020667 - RNA, 19 nt, Artificial Sequence
  Description of Artificial Sequence: Synthetic oligonucleotide
  Antisense strand to SEQ ID NO: 2020666
uguuugaugauccuugcag

SEQ ID NO: 2020668 - RNA, 19 nt, Artificial Sequence
  Description of Artificial Sequence: Synthetic oligonucleotide
  Sense strand starting at position 547 of SEQ ID NO: 1881133
agagaaacccuuuguuucu

SEQ ID NO: 2020669 - RNA, 19 nt, Artificial Sequence
  Description of Artificial Sequence: Synthetic oligonucleotide
  Antisense strand to SEQ ID NO: 2020668
agaaacaaaggguuucucu

SEQ ID NO: 2020670 - RNA, 19 nt, Artificial Sequence
  Description of Artificial Sequence: Synthetic oligonucleotide
  Sense strand starting at position 568 of SEQ ID NO: 1881133
ccuucucuggauuguuaga

SEQ ID NO: 2020671 - RNA, 19 nt, Artificial Sequence
  Description of Artificial Sequence: Synthetic oligonucleotide
  Antisense strand to SEQ ID NO: 2020670
ucuaacaauccagagaagg

SEQ ID NO: 2020672 - RNA, 19 nt, Artificial Sequence
  Description of Artificial Sequence: Synthetic oligonucleotide
  Sense strand starting at position 570 of SEQ ID NO: 1881133
uucucuggauuguuagauu

SEQ ID NO: 2020673 - RNA, 19 nt, Artificial Sequence
  Description of Artificial Sequence: Synthetic oligonucleotide
  Antisense strand to SEQ ID NO: 2020672
aaucuaacaauccagagaa

SEQ ID NO: 2020674 - RNA, 19 nt, Artificial Sequence
  Description of Artificial Sequence: Synthetic oligonucleotide
  Sense strand starting at position 609 of SEQ ID NO: 1881133
ugccuacuugcguaauuuc

SEQ ID NO: 2020675 - RNA, 19 nt, Artificial Sequence
  Description of Artificial Sequence: Synthetic oligonucleotide
  Antisense strand to SEQ ID NO: 2020674
gaaauuacgcaaguaggca

SEQ ID NO: 2020676 - RNA, 19 nt, Artificial Sequence
  Description of Artificial Sequence: Synthetic oligonucleotide
  Sense strand starting at position 701 of SEQ ID NO: 1881133
gccuguuaguaguuauuua

SEQ ID NO: 2020677 - RNA, 19 nt, Artificial Sequence
  Description of Artificial Sequence: Synthetic oligonucleotide
  Antisense strand to SEQ ID NO: 2020676
uaaauaacuacuaacaggc

SEQ ID NO: 2020678 - RNA, 19 nt, Artificial Sequence
  Description of Artificial Sequence: Synthetic oligonucleotide
  Sense strand starting at position 728 of SEQ ID NO: 1881133
gauauuaauugggugccua

SEQ ID NO: 2020679 - RNA, 19 nt, Artificial Sequence
  Description of Artificial Sequence: Synthetic oligonucleotide
  Antisense strand to SEQ ID NO: 2020678
uaggcacccaauuaauauc

SEQ ID NO: 2020680 - RNA, 19 nt, Artificial Sequence
  Description of Artificial Sequence: Synthetic oligonucleotide
  Sense strand starting at position 924 of SEQ ID NO: 1881133
ucugccuauguguagaaua

SEQ ID NO: 2020681 - RNA, 19 nt, Artificial Sequence
  Description of Artificial Sequence: Synthetic oligonucleotide
  Antisense strand to SEQ ID NO: 2020680
uauucuacacauaggcaga

SEQ ID NO: 2020682 - RNA, 19 nt, Artificial Sequence
  Description of Artificial Sequence: Synthetic oligonucleotide
  Sense strand starting at position 926 of SEQ ID NO: 1881133
ugccuauguguagaauaca

SEQ ID NO: 2020683 - RNA, 19 nt, Artificial Sequence
  Description of Artificial Sequence: Synthetic oligonucleotide
  Antisense strand to SEQ ID NO: 2020682
uguauucuacacauaggca

SEQ ID NO: 2020684 - RNA, 19 nt, Artificial Sequence
  Description of Artificial Sequence: Synthetic oligonucleotide
  Sense strand starting at position 934 of SEQ ID NO: 1881133
uguagaauacauuggagca

SEQ ID NO: 2020685 - RNA, 19 nt, Artificial Sequence
  Description of Artificial Sequence: Synthetic oligonucleotide
  Antisense strand to SEQ ID NO: 2020684
ugcuccaauguauucuaca

SEQ ID NO: 2020686 - RNA, 19 nt, Artificial Sequence
  Description of Artificial Sequence: Synthetic oligonucleotide
  Sense strand starting at position 1041 of SEQ ID NO: 1881133
agccacuucccuuagucau

SEQ ID NO: 2020687 - RNA, 19 nt, Artificial Sequence
  Description of Artificial Sequence: Synthetic oligonucleotide
  Antisense strand to SEQ ID NO: 2020686
augacuaagggaaguggcu

SEQ ID NO: 2020688 - RNA, 19 nt, Artificial Sequence
  Description of Artificial Sequence: Synthetic oligonucleotide
  Sense strand starting at position 1240 of SEQ ID NO: 1881133
ugucaaugggaucaagguu

SEQ ID NO: 2020689 - RNA, 19 nt, Artificial Sequence
  Description of Artificial Sequence: Synthetic oligonucleotide
  Antisense strand to SEQ ID NO: 2020688
aaccuugaucccauugaca

SEQ ID NO: 2020690 - RNA, 19 nt, Artificial Sequence
  Description of Artificial Sequence: Synthetic oligonucleotide
  Sense strand starting at position 1261 of SEQ ID NO: 1881133
uucugcuugucauuugaag

SEQ ID NO: 2020691 - RNA, 19 nt, Artificial Sequence
  Description of Artificial Sequence: Synthetic oligonucleotide
  Antisense strand to SEQ ID NO: 2020690
cuucaaaugacaagcagaa

SEQ ID NO: 2020692 - RNA, 19 nt, Artificial Sequence
  Description of Artificial Sequence: Synthetic oligonucleotide
  Sense strand starting at position 1523 of SEQ ID NO: 1881133
agcucuaaaccaugggaau

SEQ ID NO: 2020693 - RNA, 19 nt, Artificial Sequence
  Description of Artificial Sequence: Synthetic oligonucleotide
  Antisense strand to SEQ ID NO: 2020692
auucccaugguuuagagcu

SEQ ID NO: 2020694 - RNA, 19 nt, Artificial Sequence
  Description of Artificial Sequence: Synthetic oligonucleotide
  Sense strand starting at position 1524 of SEQ ID NO: 1881133
gcucuaaaccaugggaauc

SEQ ID NO: 2020695 - RNA, 19 nt, Artificial Sequence
  Description of Artificial Sequence: Synthetic oligonucleotide
  Antisense strand to SEQ ID NO: 2020694
gauucccaugguuuagagc

SEQ ID NO: 2020696 - RNA, 19 nt, Artificial Sequence
  Description of Artificial Sequence: Synthetic oligonucleotide
  Sense strand starting at position 2020 of SEQ ID NO: 1881133
ccuggacaguucccucuaa

SEQ ID NO: 2020697 - RNA, 19 nt, Artificial Sequence
  Description of Artificial Sequence: Synthetic oligonucleotide
  Antisense strand to SEQ ID NO: 2020696
uuagagggaacuguccagg

SEQ ID NO: 2020698 - RNA, 19 nt, Artificial Sequence
  Description of Artificial Sequence: Synthetic oligonucleotide
  Sense strand starting at position 2049 of SEQ ID NO: 1881133
gucucaauccuuuaagucu

SEQ ID NO: 2020699 - RNA, 19 nt, Artificial Sequence
  Description of Artificial Sequence: Synthetic oligonucleotide
  Antisense strand to SEQ ID NO: 2020698
agacuuaaaggauugagac

SEQ ID NO: 2020700 - RNA, 19 nt, Artificial Sequence
  Description of Artificial Sequence: Synthetic oligonucleotide
  Sense strand starting at position 2056 of SEQ ID NO: 1881133
uccuuuaagucuucuggau

SEQ ID NO: 2020701 - RNA, 19 nt, Artificial Sequence
  Description of Artificial Sequence: Synthetic oligonucleotide
  Antisense strand to SEQ ID NO: 2020700
auccagaagacuuaaagga

SEQ ID NO: 2020702 - RNA, 19 nt, Artificial Sequence
  Description of Artificial Sequence: Synthetic oligonucleotide
  Sense strand starting at position 2188 of SEQ ID NO: 1881133
accauauacccagguucua

SEQ ID NO: 2020703 - RNA, 19 nt, Artificial Sequence
  Description of Artificial Sequence: Synthetic oligonucleotide
  Antisense strand to SEQ ID NO: 2020702
uagaaccuggguauauggu

SEQ ID NO: 2020704 - RNA, 19 nt, Artificial Sequence
  Description of Artificial Sequence: Synthetic oligonucleotide
  Sense strand starting at position 2268 of SEQ ID NO: 1881133
uuuagaaugacucaugcgu

SEQ ID NO: 2020705 - RNA, 19 nt, Artificial Sequence
  Description of Artificial Sequence: Synthetic oligonucleotide
  Antisense strand to SEQ ID NO: 2020704
acgcaugagucauucuaaa

SEQ ID NO: 2020706 - RNA, 19 nt, Artificial Sequence
  Description of Artificial Sequence: Synthetic oligonucleotide
  Sense strand starting at position 2275 of SEQ ID NO: 1881133
ugacucaugcgucauaaga

SEQ ID NO: 2020707 - RNA, 19 nt, Artificial Sequence
  Description of Artificial Sequence: Synthetic oligonucleotide
  Antisense strand to SEQ ID NO: 2020706
ucuuaugacgcaugaguca

SEQ ID NO: 2020708 - RNA, 19 nt, Artificial Sequence
  Description of Artificial Sequence: Synthetic oligonucleotide
  Sense strand starting at position 2474 of SEQ ID NO: 1881133
gcaacaagucaaggaauau

SEQ ID NO: 2020709 - RNA, 19 nt, Artificial Sequence
  Description of Artificial Sequence: Synthetic oligonucleotide
  Antisense strand to SEQ ID NO: 2020708
auauuccuugacuuguugc

SEQ ID NO: 2020710 - RNA, 19 nt, Artificial Sequence
  Description of Artificial Sequence: Synthetic oligonucleotide
  Sense strand starting at position 2486 of SEQ ID NO: 1881133
ggaauauacucaucauguu

SEQ ID NO: 2020711 - RNA, 19 nt, Artificial Sequence
  Description of Artificial Sequence: Synthetic oligonucleotide
  Antisense strand to SEQ ID NO: 2020710
aacaugaugaguauauucc

SEQ ID NO: 2020712 - RNA, 19 nt, Artificial Sequence
  Description of Artificial Sequence: Synthetic oligonucleotide
  Sense strand starting at position 2721 of SEQ ID NO: 1881133
uucagaguugcguugcuua

SEQ ID NO: 2020713 - RNA, 19 nt, Artificial Sequence
  Description of Artificial Sequence: Synthetic oligonucleotide
  Antisense strand to SEQ ID NO: 2020712
uaagcaacgcaacucugaa

SEQ ID NO: 2020714 - RNA, 19 nt, Artificial Sequence
  Description of Artificial Sequence: Synthetic oligonucleotide
  Sense strand starting at position 2723 of SEQ ID NO: 1881133
cagaguugcguugcuuaca

SEQ ID NO: 2020715 - RNA, 19 nt, Artificial Sequence
  Description of Artificial Sequence: Synthetic oligonucleotide
  Antisense strand to SEQ ID NO: 2020714
uguaagcaacgcaacucug

SEQ ID NO: 2020716 - RNA, 19 nt, Artificial Sequence
  Description of Artificial Sequence: Synthetic oligonucleotide
  Sense strand starting at position 2887 of SEQ ID NO: 1881133
ggaauaacuuguguccacu

SEQ ID NO: 2020717 - RNA, 19 nt, Artificial Sequence
  Description of Artificial Sequence: Synthetic oligonucleotide
  Antisense strand to SEQ ID NO: 2020716
aguggacacaaguuauucc

SEQ ID NO: 2020718 - RNA, 19 nt, Artificial Sequence
  Description of Artificial Sequence: Synthetic oligonucleotide
  Sense strand starting at position 2964 of SEQ ID NO: 1881133
aguccugauuccucuacca

SEQ ID NO: 2020719 - RNA, 19 nt, Artificial Sequence
  Description of Artificial Sequence: Synthetic oligonucleotide
  Antisense strand to SEQ ID NO: 2020718
ugguagaggaaucaggacu

SEQ ID NO: 2020720 - RNA, 19 nt, Artificial Sequence
  Description of Artificial Sequence: Synthetic oligonucleotide
  Sense strand starting at position 3103 of SEQ ID NO: 1881133
gguccugagggucagaguu

SEQ ID NO: 2020721 - RNA, 19 nt, Artificial Sequence
  Description of Artificial Sequence: Synthetic oligonucleotide
  Antisense strand to SEQ ID NO: 2020720
aacucugacccucaggacc

SEQ ID NO: 2020722 - RNA, 19 nt, Artificial Sequence
  Description of Artificial Sequence: Synthetic oligonucleotide
  Sense strand starting at position 3163 of SEQ ID NO: 1881133
uguauauggacuugaaaug

SEQ ID NO: 2020723 - RNA, 19 nt, Artificial Sequence
  Description of Artificial Sequence: Synthetic oligonucleotide
  Antisense strand to SEQ ID NO: 2020722
cauuucaaguccauauaca

SEQ ID NO: 2020724 - RNA, 19 nt, Artificial Sequence
  Description of Artificial Sequence: Synthetic oligonucleotide
  Sense strand starting at position 3168 of SEQ ID NO: 1881133
auggacuugaaaugugacu

SEQ ID NO: 2020725 - RNA, 19 nt, Artificial Sequence
  Description of Artificial Sequence: Synthetic oligonucleotide
  Antisense strand to SEQ ID NO: 2020724
agucacauuucaaguccau

SEQ ID NO: 2020726 - RNA, 19 nt, Artificial Sequence
  Description of Artificial Sequence: Synthetic oligonucleotide
  Sense strand starting at position 3170 of SEQ ID NO: 1881133
ggacuugaaaugugacuuu

SEQ ID NO: 2020727 - RNA, 19 nt, Artificial Sequence
  Description of Artificial Sequence: Synthetic oligonucleotide
  Antisense strand to SEQ ID NO: 2020726
aaagucacauuucaagucc

SEQ ID NO: 2020728 - RNA, 19 nt, Artificial Sequence
  Description of Artificial Sequence: Synthetic oligonucleotide
  Sense strand starting at position 3173 of SEQ ID NO: 1881133
cuugaaaugugacuuucuu

SEQ ID NO: 2020729 - RNA, 19 nt, Artificial Sequence
  Description of Artificial Sequence: Synthetic oligonucleotide
  Antisense strand to SEQ ID NO: 2020728
aagaaagucacauuucaag

SEQ ID NO: 2020730 - RNA, 19 nt, Artificial Sequence
  Description of Artificial Sequence: Synthetic oligonucleotide
  Sense strand starting at position 3177 of SEQ ID NO: 1881133
aaaugugacuuucuuagug

SEQ ID NO: 2020731 - RNA, 19 nt, Artificial Sequence
  Description of Artificial Sequence: Synthetic oligonucleotide
  Antisense strand to SEQ ID NO: 2020730
cacuaagaaagucacauuu

SEQ ID NO: 2020732 - RNA, 19 nt, Artificial Sequence
  Description of Artificial Sequence: Synthetic oligonucleotide
  Sense strand starting at position 3181 of SEQ ID NO: 1881133
gugacuuucuuagugauaa

SEQ ID NO: 2020733 - RNA, 19 nt, Artificial Sequence
  Description of Artificial Sequence: Synthetic oligonucleotide
  Antisense strand to SEQ ID NO: 2020732
uuaucacuaagaaagucac

SEQ ID NO: 2020734 - RNA, 19 nt, Artificial Sequence
  Description of Artificial Sequence: Synthetic oligonucleotide
  Sense strand starting at position 3277 of SEQ ID NO: 1881133
agaagagguuacuuuagca

SEQ ID NO: 2020735 - RNA, 19 nt, Artificial Sequence
  Description of Artificial Sequence: Synthetic oligonucleotide
  Antisense strand to SEQ ID NO: 2020734
ugcuaaaguaaccucuucu

SEQ ID NO: 2020736 - RNA, 19 nt, Artificial Sequence
  Description of Artificial Sequence: Synthetic oligonucleotide
  Sense strand starting at position 3723 of SEQ ID NO: 1881133
cugagcauuuggcccuaau

SEQ ID NO: 2020737 - RNA, 19 nt, Artificial Sequence
  Description of Artificial Sequence: Synthetic oligonucleotide
  Antisense strand to SEQ ID NO: 2020736
auuagggccaaaugcucag

SEQ ID NO: 2020738 - RNA, 19 nt, Artificial Sequence
  Description of Artificial Sequence: Synthetic oligonucleotide
  Sense strand starting at position 3849 of SEQ ID NO: 1881133
ucuguaaagcuggagcaau

SEQ ID NO: 2020739 - RNA, 19 nt, Artificial Sequence
  Description of Artificial Sequence: Synthetic oligonucleotide
  Antisense strand to SEQ ID NO: 2020738
auugcuccagcuuuacaga

SEQ ID NO: 2020740 - RNA, 19 nt, Artificial Sequence
  Description of Artificial Sequence: Synthetic oligonucleotide
  Sense strand starting at position 298 of SEQ ID NO: 1881134
uggaguugcuaagcacaaa

SEQ ID NO: 2020741 - RNA, 19 nt, Artificial Sequence
  Description of Artificial Sequence: Synthetic oligonucleotide
  Antisense strand to SEQ ID NO: 2020740
uuugugcuuagcaacucca

SEQ ID NO: 2020742 - RNA, 19 nt, Artificial Sequence
  Description of Artificial Sequence: Synthetic oligonucleotide
  Sense strand starting at position 429 of SEQ ID NO: 1881134
cugagauguccuggagaua

SEQ ID NO: 2020743 - RNA, 19 nt, Artificial Sequence
  Description of Artificial Sequence: Synthetic oligonucleotide
  Antisense strand to SEQ ID NO: 2020742
uaucuccaggacaucucag

SEQ ID NO: 2020744 - RNA, 19 nt, Artificial Sequence
  Description of Artificial Sequence: Synthetic oligonucleotide
  Sense strand starting at position 588 of SEQ ID NO: 1881134
cugugucacuucuuaaaug

SEQ ID NO: 2020745 - RNA, 19 nt, Artificial Sequence
  Description of Artificial Sequence: Synthetic oligonucleotide
  Antisense strand to SEQ ID NO: 2020744
cauuuaagaagugacacag

SEQ ID NO: 2020746 - RNA, 19 nt, Artificial Sequence
  Description of Artificial Sequence: Synthetic oligonucleotide
  Sense strand starting at position 736 of SEQ ID NO: 1881134
auuaguucccaaugaguuc

SEQ ID NO: 2020747 - RNA, 19 nt, Artificial Sequence
  Description of Artificial Sequence: Synthetic oligonucleotide
  Antisense strand to SEQ ID NO: 2020746
gaacucauugggaacuaau

SEQ ID NO: 2020748 - RNA, 19 nt, Artificial Sequence
  Description of Artificial Sequence: Synthetic oligonucleotide
  Sense strand starting at position 911 of SEQ ID NO: 1881134
guguuuauaccagaugauu

SEQ ID NO: 2020749 - RNA, 19 nt, Artificial Sequence
  Description of Artificial Sequence: Synthetic oligonucleotide
  Antisense strand to SEQ ID NO: 2020748
aaucaucugguauaaacac

SEQ ID NO: 2020750 - RNA, 19 nt, Artificial Sequence
  Description of Artificial Sequence: Synthetic oligonucleotide
  Sense strand starting at position 1034 of SEQ ID NO: 1881134
augucuuaugcaggagaag

SEQ ID NO: 2020751 - RNA, 19 nt, Artificial Sequence
  Description of Artificial Sequence: Synthetic oligonucleotide
  Antisense strand to SEQ ID NO: 2020750
cuucuccugcauaagacau

SEQ ID NO: 2020752 - RNA, 19 nt, Artificial Sequence
  Description of Artificial Sequence: Synthetic oligonucleotide
  Sense strand starting at position 1151 of SEQ ID NO: 1881134
ggaacccucucuuugcuaa

SEQ ID NO: 2020753 - RNA, 19 nt, Artificial Sequence
  Description of Artificial Sequence: Synthetic oligonucleotide
  Antisense strand to SEQ ID NO: 2020752
uuagcaaagagaggguucc

SEQ ID NO: 2020754 - RNA, 19 nt, Artificial Sequence
  Description of Artificial Sequence: Synthetic oligonucleotide
  Sense strand starting at position 1813 of SEQ ID NO: 1881134
ucaguuuaaguauaaggua

SEQ ID NO: 2020755 - RNA, 19 nt, Artificial Sequence
  Description of Artificial Sequence: Synthetic oligonucleotide
  Antisense strand to SEQ ID NO: 2020754
uaccuuauacuuaaacuga

SEQ ID NO: 2020756 - RNA, 19 nt, Artificial Sequence
  Description of Artificial Sequence: Synthetic oligonucleotide
  Sense strand starting at position 1829 of SEQ ID NO: 1881134
guauuugacuaggaccaua

SEQ ID NO: 2020757 - RNA, 19 nt, Artificial Sequence
  Description of Artificial Sequence: Synthetic oligonucleotide
  Antisense strand to SEQ ID NO: 2020756
uaugguccuagucaaauac

SEQ ID NO: 2020758 - RNA, 19 nt, Artificial Sequence
  Description of Artificial Sequence: Synthetic oligonucleotide
  Sense strand starting at position 1840 of SEQ ID NO: 1881134
ggaccauaccuuugugaug

SEQ ID NO: 2020759 - RNA, 19 nt, Artificial Sequence
  Description of Artificial Sequence: Synthetic oligonucleotide
  Antisense strand to SEQ ID NO: 2020758
caucacaaagguauggucc

SEQ ID NO: 2020760 - RNA, 19 nt, Artificial Sequence
  Description of Artificial Sequence: Synthetic oligonucleotide
  Sense strand starting at position 1864 of SEQ ID NO: 1881134
ugacuucuugguugcauuu

SEQ ID NO: 2020761 - RNA, 19 nt, Artificial Sequence
  Description of Artificial Sequence: Synthetic oligonucleotide
  Antisense strand to SEQ ID NO: 2020760
aaaugcaaccaagaaguca

SEQ ID NO: 2020762 - RNA, 19 nt, Artificial Sequence
  Description of Artificial Sequence: Synthetic oligonucleotide
  Sense strand starting at position 2012 of SEQ ID NO: 1881134
ccucauugugaguguggaa

SEQ ID NO: 2020763 - RNA, 19 nt, Artificial Sequence
  Description of Artificial Sequence: Synthetic oligonucleotide
  Antisense strand to SEQ ID NO: 2020762
uuccacacucacaaugagg

SEQ ID NO: 2020764 - RNA, 19 nt, Artificial Sequence
  Description of Artificial Sequence: Synthetic oligonucleotide
  Sense strand starting at position 2301 of SEQ ID NO: 1881134
gcagaugugccuuguauuu

SEQ ID NO: 2020765 - RNA, 19 nt, Artificial Sequence
  Description of Artificial Sequence: Synthetic oligonucleotide
  Antisense strand to SEQ ID NO: 2020764
aaauacaaggcacaucugc

SEQ ID NO: 2020766 - RNA, 19 nt, Artificial Sequence
  Description of Artificial Sequence: Synthetic oligonucleotide
  Sense strand starting at position 2313 of SEQ ID NO: 1881134
uguauuuaccagcgugcaa

SEQ ID NO: 2020767 - RNA, 19 nt, Artificial Sequence
  Description of Artificial Sequence: Synthetic oligonucleotide
  Antisense strand to SEQ ID NO: 2020766
uugcacgcugguaaauaca

SEQ ID NO: 2020768 - RNA, 19 nt, Artificial Sequence
  Description of Artificial Sequence: Synthetic oligonucleotide
  Sense strand starting at position 2371 of SEQ ID NO: 1881134
ggcagauggguauggauau

SEQ ID NO: 2020769 - RNA, 19 nt, Artificial Sequence
  Description of Artificial Sequence: Synthetic oligonucleotide
  Antisense strand to SEQ ID NO: 2020768
auauccauacccaucugcc

SEQ ID NO: 2020770 - RNA, 19 nt, Artificial Sequence
  Description of Artificial Sequence: Synthetic oligonucleotide
  Sense strand starting at position 2378 of SEQ ID NO: 1881134
ggguauggauaugugcaua

SEQ ID NO: 2020771 - RNA, 19 nt, Artificial Sequence
  Description of Artificial Sequence: Synthetic oligonucleotide
  Antisense strand to SEQ ID NO: 2020770
uaugcacauauccauaccc

SEQ ID NO: 2020772 - RNA, 19 nt, Artificial Sequence
  Description of Artificial Sequence: Synthetic oligonucleotide
  Sense strand starting at position 2383 of SEQ ID NO: 1881134
uggauaugugcauaugcca

SEQ ID NO: 2020773 - RNA, 19 nt, Artificial Sequence
  Description of Artificial Sequence: Synthetic oligonucleotide
  Antisense strand to SEQ ID NO: 2020772
uggcauaugcacauaucca

SEQ ID NO: 2020774 - RNA, 19 nt, Artificial Sequence
  Description of Artificial Sequence: Synthetic oligonucleotide
  Sense strand starting at position 2445 of SEQ ID NO: 1881134
ggugaaauuugacaugaca

SEQ ID NO: 2020775 - RNA, 19 nt, Artificial Sequence
  Description of Artificial Sequence: Synthetic oligonucleotide
  Antisense strand to SEQ ID NO: 2020774
ugucaugucaaauuucacc

SEQ ID NO: 2020776 - RNA, 19 nt, Artificial Sequence
  Description of Artificial Sequence: Synthetic oligonucleotide
  Sense strand starting at position 2497 of SEQ ID NO: 1881134
ugcaaauacucauugucag

SEQ ID NO: 2020777 - RNA, 19 nt, Artificial Sequence
  Description of Artificial Sequence: Synthetic oligonucleotide
  Antisense strand to SEQ ID NO: 2020776
cugacaaugaguauuugca

SEQ ID NO: 2020778 - RNA, 19 nt, Artificial Sequence
  Description of Artificial Sequence: Synthetic oligonucleotide
  Sense strand starting at position 2633 of SEQ ID NO: 1881134
uugucagaucucuggugau

SEQ ID NO: 2020779 - RNA, 19 nt, Artificial Sequence
  Description of Artificial Sequence: Synthetic oligonucleotide
  Antisense strand to SEQ ID NO: 2020778
aucaccagagaucugacaa

SEQ ID NO: 2020780 - RNA, 19 nt, Artificial Sequence
  Description of Artificial Sequence: Synthetic oligonucleotide
  Sense strand starting at position 2670 of SEQ ID NO: 1881134
gcauuuaugugacaaggac

SEQ ID NO: 2020781 - RNA, 19 nt, Artificial Sequence
  Description of Artificial Sequence: Synthetic oligonucleotide
  Antisense strand to SEQ ID NO: 2020780
guccuugucacauaaaugc

SEQ ID NO: 2020782 - RNA, 19 nt, Artificial Sequence
  Description of Artificial Sequence: Synthetic oligonucleotide
  Sense strand starting at position 2827 of SEQ ID NO: 1881134
cuguuuggucaauggacaa

SEQ ID NO: 2020783 - RNA, 19 nt, Artificial Sequence
  Description of Artificial Sequence: Synthetic oligonucleotide
  Antisense strand to SEQ ID NO: 2020782
uuguccauugaccaaacag

SEQ ID NO: 2020784 - RNA, 19 nt, Artificial Sequence
  Description of Artificial Sequence: Synthetic oligonucleotide
  Sense strand starting at position 2842 of SEQ ID NO: 1881134
acaaauagugcugaaugua

SEQ ID NO: 2020785 - RNA, 19 nt, Artificial Sequence
  Description of Artificial Sequence: Synthetic oligonucleotide
  Antisense strand to SEQ ID NO: 2020784
uacauucagcacuauuugu

SEQ ID NO: 2020786 - RNA, 19 nt, Artificial Sequence
  Description of Artificial Sequence: Synthetic oligonucleotide
  Sense strand starting at position 2880 of SEQ ID NO: 1881134
ugcccagaguacuugaauu

SEQ ID NO: 2020787 - RNA, 19 nt, Artificial Sequence
  Description of Artificial Sequence: Synthetic oligonucleotide
  Antisense strand to SEQ ID NO: 2020786
aauucaaguacucugggca

SEQ ID NO: 2020788 - RNA, 19 nt, Artificial Sequence
  Description of Artificial Sequence: Synthetic oligonucleotide
  Sense strand starting at position 2882 of SEQ ID NO: 1881134
cccagaguacuugaauugu

SEQ ID NO: 2020789 - RNA, 19 nt, Artificial Sequence
  Description of Artificial Sequence: Synthetic oligonucleotide
  Antisense strand to SEQ ID NO: 2020788
acaauucaaguacucuggg

SEQ ID NO: 2020790 - RNA, 19 nt, Artificial Sequence
  Description of Artificial Sequence: Synthetic oligonucleotide
  Sense strand starting at position 2951 of SEQ ID NO: 1881134
gcucaccuauguccaagaa

SEQ ID NO: 2020791 - RNA, 19 nt, Artificial Sequence
  Description of Artificial Sequence: Synthetic oligonucleotide
  Antisense strand to SEQ ID NO: 2020790
uucuuggacauaggugagc

SEQ ID NO: 2020792 - RNA, 19 nt, Artificial Sequence
  Description of Artificial Sequence: Synthetic oligonucleotide
  Sense strand starting at position 2970 of SEQ ID NO: 1881134
uagguuauuuaagacugau

SEQ ID NO: 2020793 - RNA, 19 nt, Artificial Sequence
  Description of Artificial Sequence: Synthetic oligonucleotide
  Antisense strand to SEQ ID NO: 2020792
aucagucuuaaauaaccua

SEQ ID NO: 2020794 - RNA, 19 nt, Artificial Sequence
  Description of Artificial Sequence: Synthetic oligonucleotide
  Sense strand starting at position 3055 of SEQ ID NO: 1881134
augucuguccuggguaaga

SEQ ID NO: 2020795 - RNA, 19 nt, Artificial Sequence
  Description of Artificial Sequence: Synthetic oligonucleotide
  Antisense strand to SEQ ID NO: 2020794
ucuuacccaggacagacau

SEQ ID NO: 2020796 - RNA, 19 nt, Artificial Sequence
  Description of Artificial Sequence: Synthetic oligonucleotide
  Sense strand starting at position 3064 of SEQ ID NO: 1881134
cuggguaagagcugguaga

SEQ ID NO: 2020797 - RNA, 19 nt, Artificial Sequence
  Description of Artificial Sequence: Synthetic oligonucleotide
  Antisense strand to SEQ ID NO: 2020796
ucuaccagcucuuacccag

SEQ ID NO: 2020798 - RNA, 19 nt, Artificial Sequence
  Description of Artificial Sequence: Synthetic oligonucleotide
  Sense strand starting at position 3065 of SEQ ID NO: 1881134
uggguaagagcugguagaa

SEQ ID NO: 2020799 - RNA, 19 nt, Artificial Sequence
  Description of Artificial Sequence: Synthetic oligonucleotide
  Antisense strand to SEQ ID NO: 2020798
uucuaccagcucuuaccca

SEQ ID NO: 2020800 - RNA, 19 nt, Artificial Sequence
  Description of Artificial Sequence: Synthetic oligonucleotide
  Sense strand starting at position 3159 of SEQ ID NO: 1881134
aggaaauauaucuggcuga

SEQ ID NO: 2020801 - RNA, 19 nt, Artificial Sequence
  Description of Artificial Sequence: Synthetic oligonucleotide
  Antisense strand to SEQ ID NO: 2020800
ucagccagauauauuuccu

SEQ ID NO: 2020802 - RNA, 19 nt, Artificial Sequence
  Description of Artificial Sequence: Synthetic oligonucleotide
  Sense strand starting at position 3220 of SEQ ID NO: 1881134
cccgguacccagggauaau

SEQ ID NO: 2020803 - RNA, 19 nt, Artificial Sequence
  Description of Artificial Sequence: Synthetic oligonucleotide
  Antisense strand to SEQ ID NO: 2020802
auuaucccuggguaccggg

SEQ ID NO: 2020804 - RNA, 19 nt, Artificial Sequence
  Description of Artificial Sequence: Synthetic oligonucleotide
  Sense strand starting at position 3267 of SEQ ID NO: 1881134
guagaacaacugugauauc

SEQ ID NO: 2020805 - RNA, 19 nt, Artificial Sequence
  Description of Artificial Sequence: Synthetic oligonucleotide
  Antisense strand to SEQ ID NO: 2020804
gauaucacaguuguucuac

SEQ ID NO: 2020806 - RNA, 19 nt, Artificial Sequence
  Description of Artificial Sequence: Synthetic oligonucleotide
  Sense strand starting at position 3276 of SEQ ID NO: 1881134
cugugauaucuagacacuu

SEQ ID NO: 2020807 - RNA, 19 nt, Artificial Sequence
  Description of Artificial Sequence: Synthetic oligonucleotide
  Antisense strand to SEQ ID NO: 2020806
aagugucuagauaucacag

SEQ ID NO: 2020808 - RNA, 19 nt, Artificial Sequence
  Description of Artificial Sequence: Synthetic oligonucleotide
  Sense strand starting at position 3286 of SEQ ID NO: 1881134
uagacacuuuggucaggaa

SEQ ID NO: 2020809 - RNA, 19 nt, Artificial Sequence
  Description of Artificial Sequence: Synthetic oligonucleotide
  Antisense strand to SEQ ID NO: 2020808
uuccugaccaaagugucua

SEQ ID NO: 2020810 - RNA, 19 nt, Artificial Sequence
  Description of Artificial Sequence: Synthetic oligonucleotide
  Sense strand starting at position 3300 of SEQ ID NO: 1881134
aggaauugauaacaaggaa

SEQ ID NO: 2020811 - RNA, 19 nt, Artificial Sequence
  Description of Artificial Sequence: Synthetic oligonucleotide
  Antisense strand to SEQ ID NO: 2020810
uuccuuguuaucaauuccu

SEQ ID NO: 2020812 - RNA, 19 nt, Artificial Sequence
  Description of Artificial Sequence: Synthetic oligonucleotide
  Sense strand starting at position 3355 of SEQ ID NO: 1881134
ccaucauggugaccaauau

SEQ ID NO: 2020813 - RNA, 19 nt, Artificial Sequence
  Description of Artificial Sequence: Synthetic oligonucleotide
  Antisense strand to SEQ ID NO: 2020812
auauuggucaccaugaugg

SEQ ID NO: 2020814 - RNA, 19 nt, Artificial Sequence
  Description of Artificial Sequence: Synthetic oligonucleotide
  Sense strand starting at position 3696 of SEQ ID NO: 1881134
agaaucagaugucucucau

SEQ ID NO: 2020815 - RNA, 19 nt, Artificial Sequence
  Description of Artificial Sequence: Synthetic oligonucleotide
  Antisense strand to SEQ ID NO: 2020814
augagagacaucugauucu

SEQ ID NO: 2020816 - RNA, 19 nt, Artificial Sequence
  Description of Artificial Sequence: Synthetic oligonucleotide
  Sense strand starting at position 3813 of SEQ ID NO: 1881134
cugcaugaccuugagcuaa

SEQ ID NO: 2020817 - RNA, 19 nt, Artificial Sequence
  Description of Artificial Sequence: Synthetic oligonucleotide
  Antisense strand to SEQ ID NO: 2020816
uuagcucaaggucaugcag

SEQ ID NO: 2020818 - RNA, 19 nt, Artificial Sequence
  Description of Artificial Sequence: Synthetic oligonucleotide
  Sense strand starting at position 3815 of SEQ ID NO: 1881134
gcaugaccuugagcuaacu

SEQ ID NO: 2020819 - RNA, 19 nt, Artificial Sequence
  Description of Artificial Sequence: Synthetic oligonucleotide
  Antisense strand to SEQ ID NO: 2020818
aguuagcucaaggucaugc

SEQ ID NO: 2020820 - RNA, 19 nt, Artificial Sequence
  Description of Artificial Sequence: Synthetic oligonucleotide
  Sense strand starting at position 201 of SEQ ID NO: 1881135
gcuugacugcuggagcuaa

SEQ ID NO: 2020821 - RNA, 19 nt, Artificial Sequence
  Description of Artificial Sequence: Synthetic oligonucleotide
  Antisense strand to SEQ ID NO: 2020820
uuagcuccagcagucaagc

SEQ ID NO: 2020822 - RNA, 19 nt, Artificial Sequence
  Description of Artificial Sequence: Synthetic oligonucleotide
  Sense strand starting at position 395 of SEQ ID NO: 1881135
gaugcugaugccuaaguga

SEQ ID NO: 2020823 - RNA, 19 nt, Artificial Sequence
  Description of Artificial Sequence: Synthetic oligonucleotide
  Antisense strand to SEQ ID NO: 2020822
ucacuuaggcaucagcauc

SEQ ID NO: 2020824 - RNA, 19 nt, Artificial Sequence
  Description of Artificial Sequence: Synthetic oligonucleotide
  Sense strand starting at position 398 of SEQ ID NO: 1881135
gcugaugccuaagugauuu

SEQ ID NO: 2020825 - RNA, 19 nt, Artificial Sequence
  Description of Artificial Sequence: Synthetic oligonucleotide
  Antisense strand to SEQ ID NO: 2020824
aaaucacuuaggcaucagc

SEQ ID NO: 2020826 - RNA, 19 nt, Artificial Sequence
  Description of Artificial Sequence: Synthetic oligonucleotide
  Sense strand starting at position 429 of SEQ ID NO: 1881135
gccucagaguccuuaucca

SEQ ID NO: 2020827 - RNA, 19 nt, Artificial Sequence
  Description of Artificial Sequence: Synthetic oligonucleotide
  Antisense strand to SEQ ID NO: 2020826
uggauaaggacucugaggc

SEQ ID NO: 2020828 - RNA, 19 nt, Artificial Sequence
  Description of Artificial Sequence: Synthetic oligonucleotide
  Sense strand starting at position 497 of SEQ ID NO: 1881135
gauccacugugagucagau

SEQ ID NO: 2020829 - RNA, 19 nt, Artificial Sequence
  Description of Artificial Sequence: Synthetic oligonucleotide
  Antisense strand to SEQ ID NO: 2020828
aucugacucacaguggauc

SEQ ID NO: 2020830 - RNA, 19 nt, Artificial Sequence
  Description of Artificial Sequence: Synthetic oligonucleotide
  Sense strand starting at position 499 of SEQ ID NO: 1881135
uccacugugagucagauga

SEQ ID NO: 2020831 - RNA, 19 nt, Artificial Sequence
  Description of Artificial Sequence: Synthetic oligonucleotide
  Antisense strand to SEQ ID NO: 2020830
ucaucugacucacagugga

SEQ ID NO: 2020832 - RNA, 19 nt, Artificial Sequence
  Description of Artificial Sequence: Synthetic oligonucleotide
  Sense strand starting at position 503 of SEQ ID NO: 1881135
cugugagucagaugaggaa

SEQ ID NO: 2020833 - RNA, 19 nt, Artificial Sequence
  Description of Artificial Sequence: Synthetic oligonucleotide
  Antisense strand to SEQ ID NO: 2020832
uuccucaucugacucacag

SEQ ID NO: 2020834 - RNA, 19 nt, Artificial Sequence
  Description of Artificial Sequence: Synthetic oligonucleotide
  Sense strand starting at position 562 of SEQ ID NO: 1881135
gcuagcuggucagaagcau

SEQ ID NO: 2020835 - RNA, 19 nt, Artificial Sequence
  Description of Artificial Sequence: Synthetic oligonucleotide
  Antisense strand to SEQ ID NO: 2020834
augcuucugaccagcuagc

SEQ ID NO: 2020836 - RNA, 19 nt, Artificial Sequence
  Description of Artificial Sequence: Synthetic oligonucleotide
  Sense strand starting at position 566 of SEQ ID NO: 1881135
gcuggucagaagcauguaa

SEQ ID NO: 2020837 - RNA, 19 nt, Artificial Sequence
  Description of Artificial Sequence: Synthetic oligonucleotide
  Antisense strand to SEQ ID NO: 2020836
uuacaugcuucugaccagc

SEQ ID NO: 2020838 - RNA, 19 nt, Artificial Sequence
  Description of Artificial Sequence: Synthetic oligonucleotide
  Sense strand starting at position 718 of SEQ ID NO: 1881135
ucucccuagcucugggaua

SEQ ID NO: 2020839 - RNA, 19 nt, Artificial Sequence
  Description of Artificial Sequence: Synthetic oligonucleotide
  Antisense strand to SEQ ID NO: 2020838
uaucccagagcuagggaga

SEQ ID NO: 2020840 - RNA, 19 nt, Artificial Sequence
  Description of Artificial Sequence: Synthetic oligonucleotide
  Sense strand starting at position 729 of SEQ ID NO: 1881135
cugggauagccuuauccug

SEQ ID NO: 2020841 - RNA, 19 nt, Artificial Sequence
  Description of Artificial Sequence: Synthetic oligonucleotide
  Antisense strand to SEQ ID NO: 2020840
caggauaaggcuaucccag

SEQ ID NO: 2020842 - RNA, 19 nt, Artificial Sequence
  Description of Artificial Sequence: Synthetic oligonucleotide
  Sense strand starting at position 731 of SEQ ID NO: 1881135
gggauagccuuauccugag

SEQ ID NO: 2020843 - RNA, 19 nt, Artificial Sequence
  Description of Artificial Sequence: Synthetic oligonucleotide
  Antisense strand to SEQ ID NO: 2020842
cucaggauaaggcuauccc

SEQ ID NO: 2020844 - RNA, 19 nt, Artificial Sequence
  Description of Artificial Sequence: Synthetic oligonucleotide
  Sense strand starting at position 754 of SEQ ID NO: 1881135
uacguauucuggcagagag

SEQ ID NO: 2020845 - RNA, 19 nt, Artificial Sequence
  Description of Artificial Sequence: Synthetic oligonucleotide
  Antisense strand to SEQ ID NO: 2020844
cucucugccagaauacgua

SEQ ID NO: 2020846 - RNA, 19 nt, Artificial Sequence
  Description of Artificial Sequence: Synthetic oligonucleotide
  Sense strand starting at position 756 of SEQ ID NO: 1881135
cguauucuggcagagagug

SEQ ID NO: 2020847 - RNA, 19 nt, Artificial Sequence
  Description of Artificial Sequence: Synthetic oligonucleotide
  Antisense strand to SEQ ID NO: 2020846
cacucucugccagaauacg

SEQ ID NO: 2020848 - RNA, 19 nt, Artificial Sequence
  Description of Artificial Sequence: Synthetic oligonucleotide
  Sense strand starting at position 793 of SEQ ID NO: 1881135
cuugcaaucuuacaggaca

SEQ ID NO: 2020849 - RNA, 19 nt, Artificial Sequence
  Description of Artificial Sequence: Synthetic oligonucleotide
  Antisense strand to SEQ ID NO: 2020848
uguccuguaagauugcaag

SEQ ID NO: 2020850 - RNA, 19 nt, Artificial Sequence
  Description of Artificial Sequence: Synthetic oligonucleotide
  Sense strand starting at position 922 of SEQ ID NO: 1881135
ucgugaguaggacaacaua

SEQ ID NO: 2020851 - RNA, 19 nt, Artificial Sequence
  Description of Artificial Sequence: Synthetic oligonucleotide
  Antisense strand to SEQ ID NO: 2020850
uauguuguccuacucacga

SEQ ID NO: 2020852 - RNA, 19 nt, Artificial Sequence
  Description of Artificial Sequence: Synthetic oligonucleotide
  Sense strand starting at position 962 of SEQ ID NO: 1881135
uggacauggacuuguaugu

SEQ ID NO: 2020853 - RNA, 19 nt, Artificial Sequence
  Description of Artificial Sequence: Synthetic oligonucleotide
  Antisense strand to SEQ ID NO: 2020852
acauacaaguccaugucca

SEQ ID NO: 2020854 - RNA, 19 nt, Artificial Sequence
  Description of Artificial Sequence: Synthetic oligonucleotide
  Sense strand starting at position 966 of SEQ ID NO: 1881135
cauggacuuguauguaaac

SEQ ID NO: 2020855 - RNA, 19 nt, Artificial Sequence
  Description of Artificial Sequence: Synthetic oligonucleotide
  Antisense strand to SEQ ID NO: 2020854
guuuacauacaaguccaug

SEQ ID NO: 2020856 - RNA, 19 nt, Artificial Sequence
  Description of Artificial Sequence: Synthetic oligonucleotide
  Sense strand starting at position 967 of SEQ ID NO: 1881135
auggacuuguauguaaaca

SEQ ID NO: 2020857 - RNA, 19 nt, Artificial Sequence
  Description of Artificial Sequence: Synthetic oligonucleotide
  Antisense strand to SEQ ID NO: 2020856
uguuuacauacaaguccau

SEQ ID NO: 2020858 - RNA, 19 nt, Artificial Sequence
  Description of Artificial Sequence: Synthetic oligonucleotide
  Sense strand starting at position 1093 of SEQ ID NO: 1881135
agaggccucuccucuacaa

SEQ ID NO: 2020859 - RNA, 19 nt, Artificial Sequence
  Description of Artificial Sequence: Synthetic oligonucleotide
  Antisense strand to SEQ ID NO: 2020858
uuguagaggagaggccucu

SEQ ID NO: 2020860 - RNA, 19 nt, Artificial Sequence
  Description of Artificial Sequence: Synthetic oligonucleotide
  Sense strand starting at position 1738 of SEQ ID NO: 1881135
gcgcucagcuuccugauuu

SEQ ID NO: 2020861 - RNA, 19 nt, Artificial Sequence
  Description of Artificial Sequence: Synthetic oligonucleotide
  Antisense strand to SEQ ID NO: 2020860
aaaucaggaagcugagcgc

SEQ ID NO: 2020862 - RNA, 19 nt, Artificial Sequence
  Description of Artificial Sequence: Synthetic oligonucleotide
  Sense strand starting at position 1810 of SEQ ID NO: 1881135
auguuugacucccggacga

SEQ ID NO: 2020863 - RNA, 19 nt, Artificial Sequence
  Description of Artificial Sequence: Synthetic oligonucleotide
  Antisense strand to SEQ ID NO: 2020862
ucguccgggagucaaacau

SEQ ID NO: 2020864 - RNA, 19 nt, Artificial Sequence
  Description of Artificial Sequence: Synthetic oligonucleotide
  Sense strand starting at position 1872 of SEQ ID NO: 1881135
gggucuaucugcucggaua

SEQ ID NO: 2020865 - RNA, 19 nt, Artificial Sequence
  Description of Artificial Sequence: Synthetic oligonucleotide
  Antisense strand to SEQ ID NO: 2020864
uauccgagcagauagaccc

SEQ ID NO: 2020866 - RNA, 19 nt, Artificial Sequence
  Description of Artificial Sequence: Synthetic oligonucleotide
  Sense strand starting at position 1873 of SEQ ID NO: 1881135
ggucuaucugcucggauau

SEQ ID NO: 2020867 - RNA, 19 nt, Artificial Sequence
  Description of Artificial Sequence: Synthetic oligonucleotide
  Antisense strand to SEQ ID NO: 2020866
auauccgagcagauagacc

SEQ ID NO: 2020868 - RNA, 19 nt, Artificial Sequence
  Description of Artificial Sequence: Synthetic oligonucleotide
  Sense strand starting at position 1874 of SEQ ID NO: 1881135
gucuaucugcucggauaug

SEQ ID NO: 2020869 - RNA, 19 nt, Artificial Sequence
  Description of Artificial Sequence: Synthetic oligonucleotide
  Antisense strand to SEQ ID NO: 2020868
cauauccgagcagauagac

SEQ ID NO: 2020870 - RNA, 19 nt, Artificial Sequence
  Description of Artificial Sequence: Synthetic oligonucleotide
  Sense strand starting at position 1875 of SEQ ID NO: 1881135
ucuaucugcucggauauga

SEQ ID NO: 2020871 - RNA, 19 nt, Artificial Sequence
  Description of Artificial Sequence: Synthetic oligonucleotide
  Antisense strand to SEQ ID NO: 2020870
ucauauccgagcagauaga

SEQ ID NO: 2020872 - RNA, 19 nt, Artificial Sequence
  Description of Artificial Sequence: Synthetic oligonucleotide
  Sense strand starting at position 2497 of SEQ ID NO: 1881135
ggguuaaauuccuguggug

SEQ ID NO: 2020873 - RNA, 19 nt, Artificial Sequence
  Description of Artificial Sequence: Synthetic oligonucleotide
  Antisense strand to SEQ ID NO: 2020872
caccacaggaauuuaaccc

SEQ ID NO: 2020874 - RNA, 19 nt, Artificial Sequence
  Description of Artificial Sequence: Synthetic oligonucleotide
  Sense strand starting at position 2774 of SEQ ID NO: 1881135
ugggucuauuuccaaggga

SEQ ID NO: 2020875 - RNA, 19 nt, Artificial Sequence
  Description of Artificial Sequence: Synthetic oligonucleotide
  Antisense strand to SEQ ID NO: 2020874
ucccuuggaaauagaccca

SEQ ID NO: 2020876 - RNA, 19 nt, Artificial Sequence
  Description of Artificial Sequence: Synthetic oligonucleotide
  Sense strand starting at position 2847 of SEQ ID NO: 1881135
ggaggagccuagaggucau

SEQ ID NO: 2020877 - RNA, 19 nt, Artificial Sequence
  Description of Artificial Sequence: Synthetic oligonucleotide
  Antisense strand to SEQ ID NO: 2020876
augaccucuaggcuccucc

SEQ ID NO: 2020878 - RNA, 19 nt, Artificial Sequence
  Description of Artificial Sequence: Synthetic oligonucleotide
  Sense strand starting at position 3004 of SEQ ID NO: 1881135
agaugaggcuucucaucag

SEQ ID NO: 2020879 - RNA, 19 nt, Artificial Sequence
  Description of Artificial Sequence: Synthetic oligonucleotide
  Antisense strand to SEQ ID NO: 2020878
cugaugagaagccucaucu

SEQ ID NO: 2020880 - RNA, 19 nt, Artificial Sequence
  Description of Artificial Sequence: Synthetic oligonucleotide
  Sense strand starting at position 3007 of SEQ ID NO: 1881135
ugaggcuucucaucaguga

SEQ ID NO: 2020881 - RNA, 19 nt, Artificial Sequence
  Description of Artificial Sequence: Synthetic oligonucleotide
  Antisense strand to SEQ ID NO: 2020880
ucacugaugagaagccuca

SEQ ID NO: 2020882 - RNA, 19 nt, Artificial Sequence
  Description of Artificial Sequence: Synthetic oligonucleotide
  Sense strand starting at position 3016 of SEQ ID NO: 1881135
ucaucagugaggcaaggua

SEQ ID NO: 2020883 - RNA, 19 nt, Artificial Sequence
  Description of Artificial Sequence: Synthetic oligonucleotide
  Antisense strand to SEQ ID NO: 2020882
uaccuugccucacugauga

SEQ ID NO: 2020884 - RNA, 19 nt, Artificial Sequence
  Description of Artificial Sequence: Synthetic oligonucleotide
  Sense strand starting at position 3044 of SEQ ID NO: 1881135
uguagaaggcucugacuug

SEQ ID NO: 2020885 - RNA, 19 nt, Artificial Sequence
  Description of Artificial Sequence: Synthetic oligonucleotide
  Antisense strand to SEQ ID NO: 2020884
caagucagagccuucuaca

SEQ ID NO: 2020886 - RNA, 19 nt, Artificial Sequence
  Description of Artificial Sequence: Synthetic oligonucleotide
  Sense strand starting at position 3395 of SEQ ID NO: 1881135
ccaaucaggucaugagguu

SEQ ID NO: 2020887 - RNA, 19 nt, Artificial Sequence
  Description of Artificial Sequence: Synthetic oligonucleotide
  Antisense strand to SEQ ID NO: 2020886
aaccucaugaccugauugg

SEQ ID NO: 2020888 - RNA, 19 nt, Artificial Sequence
  Description of Artificial Sequence: Synthetic oligonucleotide
  Sense strand starting at position 3396 of SEQ ID NO: 1881135
caaucaggucaugagguuu

SEQ ID NO: 2020889 - RNA, 19 nt, Artificial Sequence
  Description of Artificial Sequence: Synthetic oligonucleotide
  Antisense strand to SEQ ID NO: 2020888
aaaccucaugaccugauug

SEQ ID NO: 2020890 - RNA, 19 nt, Artificial Sequence
  Description of Artificial Sequence: Synthetic oligonucleotide
  Sense strand starting at position 3441 of SEQ ID NO: 1881135
gcugccuuggcugagagua

SEQ ID NO: 2020891 - RNA, 19 nt, Artificial Sequence
  Description of Artificial Sequence: Synthetic oligonucleotide
  Antisense strand to SEQ ID NO: 2020890
uacucucagccaaggcagc

SEQ ID NO: 2020892 - RNA, 19 nt, Artificial Sequence
  Description of Artificial Sequence: Synthetic oligonucleotide
  Sense strand starting at position 3449 of SEQ ID NO: 1881135
ggcugagaguacuaccuua

SEQ ID NO: 2020893 - RNA, 19 nt, Artificial Sequence
  Description of Artificial Sequence: Synthetic oligonucleotide
  Antisense strand to SEQ ID NO: 2020892
uaagguaguacucucagcc

SEQ ID NO: 2020894 - RNA, 19 nt, Artificial Sequence
  Description of Artificial Sequence: Synthetic oligonucleotide
  Sense strand starting at position 3454 of SEQ ID NO: 1881135
agaguacuaccuuagcaau

SEQ ID NO: 2020895 - RNA, 19 nt, Artificial Sequence
  Description of Artificial Sequence: Synthetic oligonucleotide
  Antisense strand to SEQ ID NO: 2020894
auugcuaagguaguacucu

SEQ ID NO: 2020896 - RNA, 19 nt, Artificial Sequence
  Description of Artificial Sequence: Synthetic oligonucleotide
  Sense strand starting at position 3465 of SEQ ID NO: 1881135
uuagcaauggaguguuuga

SEQ ID NO: 2020897 - RNA, 19 nt, Artificial Sequence
  Description of Artificial Sequence: Synthetic oligonucleotide
  Antisense strand to SEQ ID NO: 2020896
ucaaacacuccauugcuaa

SEQ ID NO: 2020898 - RNA, 19 nt, Artificial Sequence
  Description of Artificial Sequence: Synthetic oligonucleotide
  Sense strand starting at position 3470 of SEQ ID NO: 1881135
aauggaguguuugagaaag

SEQ ID NO: 2020899 - RNA, 19 nt, Artificial Sequence
  Description of Artificial Sequence: Synthetic oligonucleotide
  Antisense strand to SEQ ID NO: 2020898
cuuucucaaacacuccauu

SEQ ID NO: 2020900 - RNA, 19 nt, Artificial Sequence
  Description of Artificial Sequence: Synthetic oligonucleotide
  Sense strand starting at position 4 of SEQ ID NO: 1881136
ugaugaguuuggucauaua

SEQ ID NO: 2020901 - RNA, 19 nt, Artificial Sequence
  Description of Artificial Sequence: Synthetic oligonucleotide
  Antisense strand to SEQ ID NO: 2020900
uauaugaccaaacucauca

SEQ ID NO: 2020902 - RNA, 19 nt, Artificial Sequence
  Description of Artificial Sequence: Synthetic oligonucleotide
  Sense strand starting at position 110 of SEQ ID NO: 1881136
accuaagaccaauggcuua

SEQ ID NO: 2020903 - RNA, 19 nt, Artificial Sequence
  Description of Artificial Sequence: Synthetic oligonucleotide
  Antisense strand to SEQ ID NO: 2020902
uaagccauuggucuuaggu

SEQ ID NO: 2020904 - RNA, 19 nt, Artificial Sequence
  Description of Artificial Sequence: Synthetic oligonucleotide
  Sense strand starting at position 142 of SEQ ID NO: 1881136
cauuaucaaccgugaauug

SEQ ID NO: 2020905 - RNA, 19 nt, Artificial Sequence
  Description of Artificial Sequence: Synthetic oligonucleotide
  Antisense strand to SEQ ID NO: 2020904
caauucacgguugauaaug

SEQ ID NO: 2020906 - RNA, 19 nt, Artificial Sequence
  Description of Artificial Sequence: Synthetic oligonucleotide
  Sense strand starting at position 143 of SEQ ID NO: 1881136
auuaucaaccgugaauuga

SEQ ID NO: 2020907 - RNA, 19 nt, Artificial Sequence
  Description of Artificial Sequence: Synthetic oligonucleotide
  Antisense strand to SEQ ID NO: 2020906
ucaauucacgguugauaau

SEQ ID NO: 2020908 - RNA, 19 nt, Artificial Sequence
  Description of Artificial Sequence: Synthetic oligonucleotide
  Sense strand starting at position 151 of SEQ ID NO: 1881136
ccgugaauugaauaguaaa

SEQ ID NO: 2020909 - RNA, 19 nt, Artificial Sequence
  Description of Artificial Sequence: Synthetic oligonucleotide
  Antisense strand to SEQ ID NO: 2020908
uuuacuauucaauucacgg

SEQ ID NO: 2020910 - RNA, 19 nt, Artificial Sequence
  Description of Artificial Sequence: Synthetic oligonucleotide
  Sense strand starting at position 872 of SEQ ID NO: 1881136
ugggauauauugccuuaaa

SEQ ID NO: 2020911 - RNA, 19 nt, Artificial Sequence
  Description of Artificial Sequence: Synthetic oligonucleotide
  Antisense strand to SEQ ID NO: 2020910
uuuaaggcaauauauccca

SEQ ID NO: 2020912 - RNA, 19 nt, Artificial Sequence
  Description of Artificial Sequence: Synthetic oligonucleotide
  Sense strand starting at position 930 of SEQ ID NO: 1881136
aaaucuguacucuggagua

SEQ ID NO: 2020913 - RNA, 19 nt, Artificial Sequence
  Description of Artificial Sequence: Synthetic oligonucleotide
  Antisense strand to SEQ ID NO: 2020912
uacuccagaguacagauuu

SEQ ID NO: 2020914 - RNA, 19 nt, Artificial Sequence
  Description of Artificial Sequence: Synthetic oligonucleotide
  Sense strand starting at position 932 of SEQ ID NO: 1881136
aucuguacucuggaguaac

SEQ ID NO: 2020915 - RNA, 19 nt, Artificial Sequence
  Description of Artificial Sequence: Synthetic oligonucleotide
  Antisense strand to SEQ ID NO: 2020914
guuacuccagaguacagau

SEQ ID NO: 2020916 - RNA, 19 nt, Artificial Sequence
  Description of Artificial Sequence: Synthetic oligonucleotide
  Sense strand starting at position 935 of SEQ ID NO: 1881136
uguacucuggaguaacagu

SEQ ID NO: 2020917 - RNA, 19 nt, Artificial Sequence
  Description of Artificial Sequence: Synthetic oligonucleotide
  Antisense strand to SEQ ID NO: 2020916
acuguuacuccagaguaca

SEQ ID NO: 2020918 - RNA, 19 nt, Artificial Sequence
  Description of Artificial Sequence: Synthetic oligonucleotide
  Sense strand starting at position 968 of SEQ ID NO: 1881136
gaagaacauugguucgaga

SEQ ID NO: 2020919 - RNA, 19 nt, Artificial Sequence
  Description of Artificial Sequence: Synthetic oligonucleotide
  Antisense strand to SEQ ID NO: 2020918
ucucgaaccaauguucuuc

SEQ ID NO: 2020920 - RNA, 19 nt, Artificial Sequence
  Description of Artificial Sequence: Synthetic oligonucleotide
  Sense strand starting at position 970 of SEQ ID NO: 1881136
agaacauugguucgagaaa

SEQ ID NO: 2020921 - RNA, 19 nt, Artificial Sequence
  Description of Artificial Sequence: Synthetic oligonucleotide
  Antisense strand to SEQ ID NO: 2020920
uuucucgaaccaauguucu

SEQ ID NO: 2020922 - RNA, 19 nt, Artificial Sequence
  Description of Artificial Sequence: Synthetic oligonucleotide
  Sense strand starting at position 1167 of SEQ ID NO: 1881136
agaagacuguuauugguca

SEQ ID NO: 2020923 - RNA, 19 nt, Artificial Sequence
  Description of Artificial Sequence: Synthetic oligonucleotide
  Antisense strand to SEQ ID NO: 2020922
ugaccaauaacagucuucu

SEQ ID NO: 2020924 - RNA, 19 nt, Artificial Sequence
  Description of Artificial Sequence: Synthetic oligonucleotide
  Sense strand starting at position 1172 of SEQ ID NO: 1881136
acuguuauuggucagaguu

SEQ ID NO: 2020925 - RNA, 19 nt, Artificial Sequence
  Description of Artificial Sequence: Synthetic oligonucleotide
  Antisense strand to SEQ ID NO: 2020924
aacucugaccaauaacagu

SEQ ID NO: 2020926 - RNA, 19 nt, Artificial Sequence
  Description of Artificial Sequence: Synthetic oligonucleotide
  Sense strand starting at position 1212 of SEQ ID NO: 1881136
acuguaacaucucuaggau

SEQ ID NO: 2020927 - RNA, 19 nt, Artificial Sequence
  Description of Artificial Sequence: Synthetic oligonucleotide
  Antisense strand to SEQ ID NO: 2020926
auccuagagauguuacagu

SEQ ID NO: 2020928 - RNA, 19 nt, Artificial Sequence
  Description of Artificial Sequence: Synthetic oligonucleotide
  Sense strand starting at position 1535 of SEQ ID NO: 1881136
acgucuucugaauaguuag

SEQ ID NO: 2020929 - RNA, 19 nt, Artificial Sequence
  Description of Artificial Sequence: Synthetic oligonucleotide
  Antisense strand to SEQ ID NO: 2020928
cuaacuauucagaagacgu

SEQ ID NO: 2020930 - RNA, 19 nt, Artificial Sequence
  Description of Artificial Sequence: Synthetic oligonucleotide
  Sense strand starting at position 1538 of SEQ ID NO: 1881136
ucuucugaauaguuagaau

SEQ ID NO: 2020931 - RNA, 19 nt, Artificial Sequence
  Description of Artificial Sequence: Synthetic oligonucleotide
  Antisense strand to SEQ ID NO: 2020930
auucuaacuauucagaaga

SEQ ID NO: 2020932 - RNA, 19 nt, Artificial Sequence
  Description of Artificial Sequence: Synthetic oligonucleotide
  Sense strand starting at position 1618 of SEQ ID NO: 1881136
aaaggucuccacgaaguga

SEQ ID NO: 2020933 - RNA, 19 nt, Artificial Sequence
  Description of Artificial Sequence: Synthetic oligonucleotide
  Antisense strand to SEQ ID NO: 2020932
ucacuucguggagaccuuu

SEQ ID NO: 2020934 - RNA, 19 nt, Artificial Sequence
  Description of Artificial Sequence: Synthetic oligonucleotide
  Sense strand starting at position 1696 of SEQ ID NO: 1881136
aaaccaugucggcagaaga

SEQ ID NO: 2020935 - RNA, 19 nt, Artificial Sequence
  Description of Artificial Sequence: Synthetic oligonucleotide
  Antisense strand to SEQ ID NO: 2020934
ucuucugccgacaugguuu

SEQ ID NO: 2020936 - RNA, 19 nt, Artificial Sequence
  Description of Artificial Sequence: Synthetic oligonucleotide
  Sense strand starting at position 3235 of SEQ ID NO: 1881136
gagacaaacgcuuagaucu

SEQ ID NO: 2020937 - RNA, 19 nt, Artificial Sequence
  Description of Artificial Sequence: Synthetic oligonucleotide
  Antisense strand to SEQ ID NO: 2020936
agaucuaagcguuugucuc

SEQ ID NO: 2020938 - RNA, 19 nt, Artificial Sequence
  Description of Artificial Sequence: Synthetic oligonucleotide
  Sense strand starting at position 3363 of SEQ ID NO: 1881136
ccgggauugggcuauguaa

SEQ ID NO: 2020939 - RNA, 19 nt, Artificial Sequence
  Description of Artificial Sequence: Synthetic oligonucleotide
  Antisense strand to SEQ ID NO: 2020938
uuacauagcccaaucccgg

SEQ ID NO: 2020940 - RNA, 19 nt, Artificial Sequence
  Description of Artificial Sequence: Synthetic oligonucleotide
  Sense strand starting at position 3365 of SEQ ID NO: 1881136
gggauugggcuauguaaac

SEQ ID NO: 2020941 - RNA, 19 nt, Artificial Sequence
  Description of Artificial Sequence: Synthetic oligonucleotide
  Antisense strand to SEQ ID NO: 2020940
guuuacauagcccaauccc

SEQ ID NO: 2020942 - RNA, 19 nt, Artificial Sequence
  Description of Artificial Sequence: Synthetic oligonucleotide
  Sense strand starting at position 3469 of SEQ ID NO: 1881136
uguuaccagacuugggaau

SEQ ID NO: 2020943 - RNA, 19 nt, Artificial Sequence
  Description of Artificial Sequence: Synthetic oligonucleotide
  Antisense strand to SEQ ID NO: 2020942
auucccaagucugguaaca

SEQ ID NO: 2020944 - RNA, 19 nt, Artificial Sequence
  Description of Artificial Sequence: Synthetic oligonucleotide
  Sense strand starting at position 3512 of SEQ ID NO: 1881136
aauugagacuguuuacaug

SEQ ID NO: 2020945 - RNA, 19 nt, Artificial Sequence
  Description of Artificial Sequence: Synthetic oligonucleotide
  Antisense strand to SEQ ID NO: 2020944
cauguaaacagucucaauu

SEQ ID NO: 2020946 - RNA, 19 nt, Artificial Sequence
  Description of Artificial Sequence: Synthetic oligonucleotide
  Sense strand starting at position 3518 of SEQ ID NO: 1881136
gacuguuuacaugguuaaa

SEQ ID NO: 2020947 - RNA, 19 nt, Artificial Sequence
  Description of Artificial Sequence: Synthetic oligonucleotide
  Antisense strand to SEQ ID NO: 2020946
uuuaaccauguaaacaguc

SEQ ID NO: 2020948 - RNA, 19 nt, Artificial Sequence
  Description of Artificial Sequence: Synthetic oligonucleotide
  Sense strand starting at position 3520 of SEQ ID NO: 1881136
cuguuuacaugguuaaaua

SEQ ID NO: 2020949 - RNA, 19 nt, Artificial Sequence
  Description of Artificial Sequence: Synthetic oligonucleotide
  Antisense strand to SEQ ID NO: 2020948
uauuuaaccauguaaacag

SEQ ID NO: 2020950 - RNA, 19 nt, Artificial Sequence
  Description of Artificial Sequence: Synthetic oligonucleotide
  Sense strand starting at position 3562 of SEQ ID NO: 1881136
acaagagggucuuucuaga

SEQ ID NO: 2020951 - RNA, 19 nt, Artificial Sequence
  Description of Artificial Sequence: Synthetic oligonucleotide
  Antisense strand to SEQ ID NO: 2020950
ucuagaaagacccucuugu

SEQ ID NO: 2020952 - RNA, 19 nt, Artificial Sequence
  Description of Artificial Sequence: Synthetic oligonucleotide
  Sense strand starting at position 3602 of SEQ ID NO: 1881136
augaauuagaguugugauu

SEQ ID NO: 2020953 - RNA, 19 nt, Artificial Sequence
  Description of Artificial Sequence: Synthetic oligonucleotide
  Antisense strand to SEQ ID NO: 2020952
aaucacaacucuaauucau

SEQ ID NO: 2020954 - RNA, 19 nt, Artificial Sequence
  Description of Artificial Sequence: Synthetic oligonucleotide
  Sense strand starting at position 3728 of SEQ ID NO: 1881136
cccuuagaauacuugggua

SEQ ID NO: 2020955 - RNA, 19 nt, Artificial Sequence
  Description of Artificial Sequence: Synthetic oligonucleotide
  Antisense strand to SEQ ID NO: 2020954
uacccaaguauucuaaggg

SEQ ID NO: 2020956 - RNA, 19 nt, Artificial Sequence
  Description of Artificial Sequence: Synthetic oligonucleotide
  Sense strand starting at position 3732 of SEQ ID NO: 1881136
uagaauacuuggguaggua

SEQ ID NO: 2020957 - RNA, 19 nt, Artificial Sequence
  Description of Artificial Sequence: Synthetic oligonucleotide
  Antisense strand to SEQ ID NO: 2020956
uaccuacccaaguauucua

SEQ ID NO: 2020958 - RNA, 19 nt, Artificial Sequence
  Description of Artificial Sequence: Synthetic oligonucleotide
  Sense strand starting at position 3735 of SEQ ID NO: 1881136
aauacuuggguagguaaau

SEQ ID NO: 2020959 - RNA, 19 nt, Artificial Sequence
  Description of Artificial Sequence: Synthetic oligonucleotide
  Antisense strand to SEQ ID NO: 2020958
auuuaccuacccaaguauu

SEQ ID NO: 2020960 - RNA, 19 nt, Artificial Sequence
  Description of Artificial Sequence: Synthetic oligonucleotide
  Sense strand starting at position 3736 of SEQ ID NO: 1881136
auacuuggguagguaaauu

SEQ ID NO: 2020961 - RNA, 19 nt, Artificial Sequence
  Description of Artificial Sequence: Synthetic oligonucleotide
  Antisense strand to SEQ ID NO: 2020960
aauuuaccuacccaaguau

SEQ ID NO: 2020962 - RNA, 19 nt, Artificial Sequence
  Description of Artificial Sequence: Synthetic oligonucleotide
  Sense strand starting at position 3746 of SEQ ID NO: 1881136
agguaaauuccagguuauc

SEQ ID NO: 2020963 - RNA, 19 nt, Artificial Sequence
  Description of Artificial Sequence: Synthetic oligonucleotide
  Antisense strand to SEQ ID NO: 2020962
gauaaccuggaauuuaccu

SEQ ID NO: 2020964 - RNA, 19 nt, Artificial Sequence
  Description of Artificial Sequence: Synthetic oligonucleotide
  Sense strand starting at position 3773 of SEQ ID NO: 1881136
uuauuucuacugcgacuuu

SEQ ID NO: 2020965 - RNA, 19 nt, Artificial Sequence
  Description of Artificial Sequence: Synthetic oligonucleotide
  Antisense strand to SEQ ID NO: 2020964
aaagucgcaguagaaauaa

SEQ ID NO: 2020966 - RNA, 19 nt, Artificial Sequence
  Description of Artificial Sequence: Synthetic oligonucleotide
  Sense strand starting at position 3802 of SEQ ID NO: 1881136
agggcaauauuggucauau

SEQ ID NO: 2020967 - RNA, 19 nt, Artificial Sequence
  Description of Artificial Sequence: Synthetic oligonucleotide
  Antisense strand to SEQ ID NO: 2020966
auaugaccaauauugcccu

SEQ ID NO: 2020968 - RNA, 19 nt, Artificial Sequence
  Description of Artificial Sequence: Synthetic oligonucleotide
  Sense strand starting at position 3803 of SEQ ID NO: 1881136
gggcaauauuggucauaug

SEQ ID NO: 2020969 - RNA, 19 nt, Artificial Sequence
  Description of Artificial Sequence: Synthetic oligonucleotide
  Antisense strand to SEQ ID NO: 2020968
cauaugaccaauauugccc

SEQ ID NO: 2020970 - RNA, 19 nt, Artificial Sequence
  Description of Artificial Sequence: Synthetic oligonucleotide
  Sense strand starting at position 3804 of SEQ ID NO: 1881136
ggcaauauuggucauaugu

SEQ ID NO: 2020971 - RNA, 19 nt, Artificial Sequence
  Description of Artificial Sequence: Synthetic oligonucleotide
  Antisense strand to SEQ ID NO: 2020970
acauaugaccaauauugcc

SEQ ID NO: 2020972 - RNA, 19 nt, Artificial Sequence
  Description of Artificial Sequence: Synthetic oligonucleotide
  Sense strand starting at position 3846 of SEQ ID NO: 1881136
uucugaguauuugcuuaca

SEQ ID NO: 2020973 - RNA, 19 nt, Artificial Sequence
  Description of Artificial Sequence: Synthetic oligonucleotide
  Antisense strand to SEQ ID NO: 2020972
uguaagcaaauacucagaa

SEQ ID NO: 2020974 - RNA, 19 nt, Artificial Sequence
  Description of Artificial Sequence: Synthetic oligonucleotide
  Sense strand starting at position 3848 of SEQ ID NO: 1881136
cugaguauuugcuuacauu

SEQ ID NO: 2020975 - RNA, 19 nt, Artificial Sequence
  Description of Artificial Sequence: Synthetic oligonucleotide
  Antisense strand to SEQ ID NO: 2020974
aauguaagcaaauacucag

SEQ ID NO: 2020976 - RNA, 19 nt, Artificial Sequence
  Description of Artificial Sequence: Synthetic oligonucleotide
  Sense strand starting at position 3879 of SEQ ID NO: 1881136
auuuguuuaugugcuggau

SEQ ID NO: 2020977 - RNA, 19 nt, Artificial Sequence
  Description of Artificial Sequence: Synthetic oligonucleotide
  Antisense strand to SEQ ID NO: 2020976
auccagcacauaaacaaau

SEQ ID NO: 2020978 - RNA, 19 nt, Artificial Sequence
  Description of Artificial Sequence: Synthetic oligonucleotide
  Sense strand starting at position 3938 of SEQ ID NO: 1881136
cguguugcuaaguuaguuu

SEQ ID NO: 2020979 - RNA, 19 nt, Artificial Sequence
  Description of Artificial Sequence: Synthetic oligonucleotide
  Antisense strand to SEQ ID NO: 2020978
aaacuaacuuagcaacacg

SEQ ID NO: 2020980 - RNA, 19 nt, Artificial Sequence
  Description of Artificial Sequence: Synthetic oligonucleotide
  Sense strand starting at position 44 of SEQ ID NO: 1881137
augaguguagcuuauaaag

SEQ ID NO: 2020981 - RNA, 19 nt, Artificial Sequence
  Description of Artificial Sequence: Synthetic oligonucleotide
  Antisense strand to SEQ ID NO: 2020980
cuuuauaagcuacacucau

SEQ ID NO: 2020982 - RNA, 19 nt, Artificial Sequence
  Description of Artificial Sequence: Synthetic oligonucleotide
  Sense strand starting at position 71 of SEQ ID NO: 1881137
aguuuauagcgugugaugu

SEQ ID NO: 2020983 - RNA, 19 nt, Artificial Sequence
  Description of Artificial Sequence: Synthetic oligonucleotide
  Antisense strand to SEQ ID NO: 2020982
acaucacacgcuauaaacu

SEQ ID NO: 2020984 - RNA, 19 nt, Artificial Sequence
  Description of Artificial Sequence: Synthetic oligonucleotide
  Sense strand starting at position 79 of SEQ ID NO: 1881137
gcgugugauguuucaucca

SEQ ID NO: 2020985 - RNA, 19 nt, Artificial Sequence
  Description of Artificial Sequence: Synthetic oligonucleotide
  Antisense strand to SEQ ID NO: 2020984
uggaugaaacaucacacgc

SEQ ID NO: 2020986 - RNA, 19 nt, Artificial Sequence
  Description of Artificial Sequence: Synthetic oligonucleotide
  Sense strand starting at position 131 of SEQ ID NO: 1881137
guuauagugccauaauaaa

SEQ ID NO: 2020987 - RNA, 19 nt, Artificial Sequence
  Description of Artificial Sequence: Synthetic oligonucleotide
  Antisense strand to SEQ ID NO: 2020986
uuuauuauggcacuauaac

SEQ ID NO: 2020988 - RNA, 19 nt, Artificial Sequence
  Description of Artificial Sequence: Synthetic oligonucleotide
  Sense strand starting at position 224 of SEQ ID NO: 1881137
ggaaucauugugcaccuca

SEQ ID NO: 2020989 - RNA, 19 nt, Artificial Sequence
  Description of Artificial Sequence: Synthetic oligonucleotide
  Antisense strand to SEQ ID NO: 2020988
ugaggugcacaaugauucc

SEQ ID NO: 2020990 - RNA, 19 nt, Artificial Sequence
  Description of Artificial Sequence: Synthetic oligonucleotide
  Sense strand starting at position 282 of SEQ ID NO: 1881137
agaagucaguuauucuaug

SEQ ID NO: 2020991 - RNA, 19 nt, Artificial Sequence
  Description of Artificial Sequence: Synthetic oligonucleotide
  Antisense strand to SEQ ID NO: 2020990
cauagaauaacugacuucu

SEQ ID NO: 2020992 - RNA, 19 nt, Artificial Sequence
  Description of Artificial Sequence: Synthetic oligonucleotide
  Sense strand starting at position 283 of SEQ ID NO: 1881137
gaagucaguuauucuauga

SEQ ID NO: 2020993 - RNA, 19 nt, Artificial Sequence
  Description of Artificial Sequence: Synthetic oligonucleotide
  Antisense strand to SEQ ID NO: 2020992
ucauagaauaacugacuuc

SEQ ID NO: 2020994 - RNA, 19 nt, Artificial Sequence
  Description of Artificial Sequence: Synthetic oligonucleotide
  Sense strand starting at position 287 of SEQ ID NO: 1881137
ucaguuauucuaugaauug

SEQ ID NO: 2020995 - RNA, 19 nt, Artificial Sequence
  Description of Artificial Sequence: Synthetic oligonucleotide
  Antisense strand to SEQ ID NO: 2020994
caauucauagaauaacuga

SEQ ID NO: 2020996 - RNA, 19 nt, Artificial Sequence
  Description of Artificial Sequence: Synthetic oligonucleotide
  Sense strand starting at position 298 of SEQ ID NO: 1881137
augaauuguggccauauaa

SEQ ID NO: 2020997 - RNA, 19 nt, Artificial Sequence
  Description of Artificial Sequence: Synthetic oligonucleotide
  Antisense strand to SEQ ID NO: 2020996
uuauauggccacaauucau

SEQ ID NO: 2020998 - RNA, 19 nt, Artificial Sequence
  Description of Artificial Sequence: Synthetic oligonucleotide
  Sense strand starting at position 351 of SEQ ID NO: 1881137
acugacauaucugcugaau

SEQ ID NO: 2020999 - RNA, 19 nt, Artificial Sequence
  Description of Artificial Sequence: Synthetic oligonucleotide
  Antisense strand to SEQ ID NO: 2020998
auucagcagauaugucagu

SEQ ID NO: 2021000 - RNA, 19 nt, Artificial Sequence
  Description of Artificial Sequence: Synthetic oligonucleotide
  Sense strand starting at position 681 of SEQ ID NO: 1881137
cauggaaacgaucaagcuu

SEQ ID NO: 2021001 - RNA, 19 nt, Artificial Sequence
  Description of Artificial Sequence: Synthetic oligonucleotide
  Antisense strand to SEQ ID NO: 2021000
aagcuugaucguuuccaug

SEQ ID NO: 2021002 - RNA, 19 nt, Artificial Sequence
  Description of Artificial Sequence: Synthetic oligonucleotide
  Sense strand starting at position 688 of SEQ ID NO: 1881137
acgaucaagcuuuauuaag

SEQ ID NO: 2021003 - RNA, 19 nt, Artificial Sequence
  Description of Artificial Sequence: Synthetic oligonucleotide
  Antisense strand to SEQ ID NO: 2021002
cuuaauaaagcuugaucgu

SEQ ID NO: 2021004 - RNA, 19 nt, Artificial Sequence
  Description of Artificial Sequence: Synthetic oligonucleotide
  Sense strand starting at position 880 of SEQ ID NO: 1881137
aggcuuuacccagagaccu

SEQ ID NO: 2021005 - RNA, 19 nt, Artificial Sequence
  Description of Artificial Sequence: Synthetic oligonucleotide
  Antisense strand to SEQ ID NO: 2021004
aggucucuggguaaagccu

SEQ ID NO: 2021006 - RNA, 19 nt, Artificial Sequence
  Description of Artificial Sequence: Synthetic oligonucleotide
  Sense strand starting at position 998 of SEQ ID NO: 1881137
gggcuuucccauuauacca

SEQ ID NO: 2021007 - RNA, 19 nt, Artificial Sequence
  Description of Artificial Sequence: Synthetic oligonucleotide
  Antisense strand to SEQ ID NO: 2021006
ugguauaaugggaaagccc

SEQ ID NO: 2021008 - RNA, 19 nt, Artificial Sequence
  Description of Artificial Sequence: Synthetic oligonucleotide
  Sense strand starting at position 1198 of SEQ ID NO: 1881137
agauuagugccacaauauu

SEQ ID NO: 2021009 - RNA, 19 nt, Artificial Sequence
  Description of Artificial Sequence: Synthetic oligonucleotide
  Antisense strand to SEQ ID NO: 2021008
aauauuguggcacuaaucu

SEQ ID NO: 2021010 - RNA, 19 nt, Artificial Sequence
  Description of Artificial Sequence: Synthetic oligonucleotide
  Sense strand starting at position 1228 of SEQ ID NO: 1881137
acgucaguuauggauuauc

SEQ ID NO: 2021011 - RNA, 19 nt, Artificial Sequence
  Description of Artificial Sequence: Synthetic oligonucleotide
  Antisense strand to SEQ ID NO: 2021010
gauaauccauaacugacgu

SEQ ID NO: 2021012 - RNA, 19 nt, Artificial Sequence
  Description of Artificial Sequence: Synthetic oligonucleotide
  Sense strand starting at position 1231 of SEQ ID NO: 1881137
ucaguuauggauuauccuu

SEQ ID NO: 2021013 - RNA, 19 nt, Artificial Sequence
  Description of Artificial Sequence: Synthetic oligonucleotide
  Antisense strand to SEQ ID NO: 2021012
aaggauaauccauaacuga

SEQ ID NO: 2021014 - RNA, 19 nt, Artificial Sequence
  Description of Artificial Sequence: Synthetic oligonucleotide
  Sense strand starting at position 1233 of SEQ ID NO: 1881137
aguuauggauuauccuuua

SEQ ID NO: 2021015 - RNA, 19 nt, Artificial Sequence
  Description of Artificial Sequence: Synthetic oligonucleotide
  Antisense strand to SEQ ID NO: 2021014
uaaaggauaauccauaacu

SEQ ID NO: 2021016 - RNA, 19 nt, Artificial Sequence
  Description of Artificial Sequence: Synthetic oligonucleotide
  Sense strand starting at position 1238 of SEQ ID NO: 1881137
uggauuauccuuuacguau

SEQ ID NO: 2021017 - RNA, 19 nt, Artificial Sequence
  Description of Artificial Sequence: Synthetic oligonucleotide
  Antisense strand to SEQ ID NO: 2021016
auacguaaaggauaaucca

SEQ ID NO: 2021018 - RNA, 19 nt, Artificial Sequence
  Description of Artificial Sequence: Synthetic oligonucleotide
  Sense strand starting at position 1262 of SEQ ID NO: 1881137
auccuuuaugucuguauuu

SEQ ID NO: 2021019 - RNA, 19 nt, Artificial Sequence
  Description of Artificial Sequence: Synthetic oligonucleotide
  Antisense strand to SEQ ID NO: 2021018
aaauacagacauaaaggau

SEQ ID NO: 2021020 - RNA, 19 nt, Artificial Sequence
  Description of Artificial Sequence: Synthetic oligonucleotide
  Sense strand starting at position 1263 of SEQ ID NO: 1881137
uccuuuaugucuguauuua

SEQ ID NO: 2021021 - RNA, 19 nt, Artificial Sequence
  Description of Artificial Sequence: Synthetic oligonucleotide
  Antisense strand to SEQ ID NO: 2021020
uaaauacagacauaaagga

SEQ ID NO: 2021022 - RNA, 19 nt, Artificial Sequence
  Description of Artificial Sequence: Synthetic oligonucleotide
  Sense strand starting at position 2005 of SEQ ID NO: 1881137
gagggaggagucugcugaa

SEQ ID NO: 2021023 - RNA, 19 nt, Artificial Sequence
  Description of Artificial Sequence: Synthetic oligonucleotide
  Antisense strand to SEQ ID NO: 2021022
uucagcagacuccucccuc

SEQ ID NO: 2021024 - RNA, 19 nt, Artificial Sequence
  Description of Artificial Sequence: Synthetic oligonucleotide
  Sense strand starting at position 2074 of SEQ ID NO: 1881137
ucuguaggaagcugacaua

SEQ ID NO: 2021025 - RNA, 19 nt, Artificial Sequence
  Description of Artificial Sequence: Synthetic oligonucleotide
  Antisense strand to SEQ ID NO: 2021024
uaugucagcuuccuacaga

SEQ ID NO: 2021026 - RNA, 19 nt, Artificial Sequence
  Description of Artificial Sequence: Synthetic oligonucleotide
  Sense strand starting at position 2297 of SEQ ID NO: 1881137
agagaauauaugugcaagu

SEQ ID NO: 2021027 - RNA, 19 nt, Artificial Sequence
  Description of Artificial Sequence: Synthetic oligonucleotide
  Antisense strand to SEQ ID NO: 2021026
acuugcacauauauucucu

SEQ ID NO: 2021028 - RNA, 19 nt, Artificial Sequence
  Description of Artificial Sequence: Synthetic oligonucleotide
  Sense strand starting at position 2298 of SEQ ID NO: 1881137
gagaauauaugugcaagua

SEQ ID NO: 2021029 - RNA, 19 nt, Artificial Sequence
  Description of Artificial Sequence: Synthetic oligonucleotide
  Antisense strand to SEQ ID NO: 2021028
uacuugcacauauauucuc

SEQ ID NO: 2021030 - RNA, 19 nt, Artificial Sequence
  Description of Artificial Sequence: Synthetic oligonucleotide
  Sense strand starting at position 2299 of SEQ ID NO: 1881137
agaauauaugugcaaguaa

SEQ ID NO: 2021031 - RNA, 19 nt, Artificial Sequence
  Description of Artificial Sequence: Synthetic oligonucleotide
  Antisense strand to SEQ ID NO: 2021030
uuacuugcacauauauucu

SEQ ID NO: 2021032 - RNA, 19 nt, Artificial Sequence
  Description of Artificial Sequence: Synthetic oligonucleotide
  Sense strand starting at position 2450 of SEQ ID NO: 1881137
ucaguuuaccaguagaaua

SEQ ID NO: 2021033 - RNA, 19 nt, Artificial Sequence
  Description of Artificial Sequence: Synthetic oligonucleotide
  Antisense strand to SEQ ID NO: 2021032
uauucuacugguaaacuga

SEQ ID NO: 2021034 - RNA, 19 nt, Artificial Sequence
  Description of Artificial Sequence: Synthetic oligonucleotide
  Sense strand starting at position 2452 of SEQ ID NO: 1881137
aguuuaccaguagaauauc

SEQ ID NO: 2021035 - RNA, 19 nt, Artificial Sequence
  Description of Artificial Sequence: Synthetic oligonucleotide
  Antisense strand to SEQ ID NO: 2021034
gauauucuacugguaaacu

SEQ ID NO: 2021036 - RNA, 19 nt, Artificial Sequence
  Description of Artificial Sequence: Synthetic oligonucleotide
  Sense strand starting at position 2503 of SEQ ID NO: 1881137
ugugacuaugcauacuaca

SEQ ID NO: 2021037 - RNA, 19 nt, Artificial Sequence
  Description of Artificial Sequence: Synthetic oligonucleotide
  Antisense strand to SEQ ID NO: 2021036
uguaguaugcauagucaca

SEQ ID NO: 2021038 - RNA, 19 nt, Artificial Sequence
  Description of Artificial Sequence: Synthetic oligonucleotide
  Sense strand starting at position 2730 of SEQ ID NO: 1881137
acauguggagacugugaau

SEQ ID NO: 2021039 - RNA, 19 nt, Artificial Sequence
  Description of Artificial Sequence: Synthetic oligonucleotide
  Antisense strand to SEQ ID NO: 2021038
auucacagucuccacaugu

SEQ ID NO: 2021040 - RNA, 19 nt, Artificial Sequence
  Description of Artificial Sequence: Synthetic oligonucleotide
  Sense strand starting at position 2955 of SEQ ID NO: 1881137
auaugaacaugccuagaau

SEQ ID NO: 2021041 - RNA, 19 nt, Artificial Sequence
  Description of Artificial Sequence: Synthetic oligonucleotide
  Antisense strand to SEQ ID NO: 2021040
auucuaggcauguucauau

SEQ ID NO: 2021042 - RNA, 19 nt, Artificial Sequence
  Description of Artificial Sequence: Synthetic oligonucleotide
  Sense strand starting at position 3046 of SEQ ID NO: 1881137
agaauaucagcggaucuca

SEQ ID NO: 2021043 - RNA, 19 nt, Artificial Sequence
  Description of Artificial Sequence: Synthetic oligonucleotide
  Antisense strand to SEQ ID NO: 2021042
ugagauccgcugauauucu

SEQ ID NO: 2021044 - RNA, 19 nt, Artificial Sequence
  Description of Artificial Sequence: Synthetic oligonucleotide
  Sense strand starting at position 3179 of SEQ ID NO: 1881137
uucccaagacuuugggaua

SEQ ID NO: 2021045 - RNA, 19 nt, Artificial Sequence
  Description of Artificial Sequence: Synthetic oligonucleotide
  Antisense strand to SEQ ID NO: 2021044
uaucccaaagucuugggaa

SEQ ID NO: 2021046 - RNA, 19 nt, Artificial Sequence
  Description of Artificial Sequence: Synthetic oligonucleotide
  Sense strand starting at position 3426 of SEQ ID NO: 1881137
gugagaacuacuugaaguu

SEQ ID NO: 2021047 - RNA, 19 nt, Artificial Sequence
  Description of Artificial Sequence: Synthetic oligonucleotide
  Antisense strand to SEQ ID NO: 2021046
aacuucaaguaguucucac

SEQ ID NO: 2021048 - RNA, 19 nt, Artificial Sequence
  Description of Artificial Sequence: Synthetic oligonucleotide
  Sense strand starting at position 3461 of SEQ ID NO: 1881137
gccauacaacgguagauaa

SEQ ID NO: 2021049 - RNA, 19 nt, Artificial Sequence
  Description of Artificial Sequence: Synthetic oligonucleotide
  Antisense strand to SEQ ID NO: 2021048
uuaucuaccguuguauggc

SEQ ID NO: 2021050 - RNA, 19 nt, Artificial Sequence
  Description of Artificial Sequence: Synthetic oligonucleotide
  Sense strand starting at position 3504 of SEQ ID NO: 1881137
acaguuguacuguaacaua

SEQ ID NO: 2021051 - RNA, 19 nt, Artificial Sequence
  Description of Artificial Sequence: Synthetic oligonucleotide
  Antisense strand to SEQ ID NO: 2021050
uauguuacaguacaacugu

SEQ ID NO: 2021052 - RNA, 19 nt, Artificial Sequence
  Description of Artificial Sequence: Synthetic oligonucleotide
  Sense strand starting at position 3811 of SEQ ID NO: 1881137
acuuuacugcaugaagauu

SEQ ID NO: 2021053 - RNA, 19 nt, Artificial Sequence
  Description of Artificial Sequence: Synthetic oligonucleotide
  Antisense strand to SEQ ID NO: 2021052
aaucuucaugcaguaaagu

SEQ ID NO: 2021054 - RNA, 19 nt, Artificial Sequence
  Description of Artificial Sequence: Synthetic oligonucleotide
  Sense strand starting at position 3875 of SEQ ID NO: 1881137
cgguuuaugaaucagcaaa

SEQ ID NO: 2021055 - RNA, 19 nt, Artificial Sequence
  Description of Artificial Sequence: Synthetic oligonucleotide
  Antisense strand to SEQ ID NO: 2021054
uuugcugauucauaaaccg

SEQ ID NO: 2021056 - RNA, 19 nt, Artificial Sequence
  Description of Artificial Sequence: Synthetic oligonucleotide
  Sense strand starting at position 3877 of SEQ ID NO: 1881137
guuuaugaaucagcaaaca

SEQ ID NO: 2021057 - RNA, 19 nt, Artificial Sequence
  Description of Artificial Sequence: Synthetic oligonucleotide
  Antisense strand to SEQ ID NO: 2021056
uguuugcugauucauaaac

SEQ ID NO: 2021058 - RNA, 19 nt, Artificial Sequence
  Description of Artificial Sequence: Synthetic oligonucleotide
  Sense strand starting at position 3955 of SEQ ID NO: 1881137
uagugacagcuguaauaca

SEQ ID NO: 2021059 - RNA, 19 nt, Artificial Sequence
  Description of Artificial Sequence: Synthetic oligonucleotide
  Antisense strand to SEQ ID NO: 2021058
uguauuacagcugucacua

SEQ ID NO: 2021060 - RNA, 19 nt, Artificial Sequence
  Description of Artificial Sequence: Synthetic oligonucleotide
  Sense strand starting at position 203 of SEQ ID NO: 1881138
gaguuugaagucugaacaa

SEQ ID NO: 2021061 - RNA, 19 nt, Artificial Sequence
  Description of Artificial Sequence: Synthetic oligonucleotide
  Antisense strand to SEQ ID NO: 2021060
uuguucagacuucaaacuc

SEQ ID NO: 2021062 - RNA, 19 nt, Artificial Sequence
  Description of Artificial Sequence: Synthetic oligonucleotide
  Sense strand starting at position 307 of SEQ ID NO: 1881138
gagucugaagucugaacaa

SEQ ID NO: 2021063 - RNA, 19 nt, Artificial Sequence
  Description of Artificial Sequence: Synthetic oligonucleotide
  Antisense strand to SEQ ID NO: 2021062
uuguucagacuucagacuc

SEQ ID NO: 2021064 - RNA, 19 nt, Artificial Sequence
  Description of Artificial Sequence: Synthetic oligonucleotide
  Sense strand starting at position 384 of SEQ ID NO: 1881138
acaguuauauugucaucag

SEQ ID NO: 2021065 - RNA, 19 nt, Artificial Sequence
  Description of Artificial Sequence: Synthetic oligonucleotide
  Antisense strand to SEQ ID NO: 2021064
cugaugacaauauaacugu

SEQ ID NO: 2021066 - RNA, 19 nt, Artificial Sequence
  Description of Artificial Sequence: Synthetic oligonucleotide
  Sense strand starting at position 430 of SEQ ID NO: 1881138
uguaaaguuccaugaauug

SEQ ID NO: 2021067 - RNA, 19 nt, Artificial Sequence
  Description of Artificial Sequence: Synthetic oligonucleotide
  Antisense strand to SEQ ID NO: 2021066
caauucauggaacuuuaca

SEQ ID NO: 2021068 - RNA, 19 nt, Artificial Sequence
  Description of Artificial Sequence: Synthetic oligonucleotide
  Sense strand starting at position 485 of SEQ ID NO: 1881138
gcauuaucccacgagauaa

SEQ ID NO: 2021069 - RNA, 19 nt, Artificial Sequence
  Description of Artificial Sequence: Synthetic oligonucleotide
  Antisense strand to SEQ ID NO: 2021068
uuaucucgugggauaaugc

SEQ ID NO: 2021070 - RNA, 19 nt, Artificial Sequence
  Description of Artificial Sequence: Synthetic oligonucleotide
  Sense strand starting at position 582 of SEQ ID NO: 1881138
auugauacaugaguguauu

SEQ ID NO: 2021071 - RNA, 19 nt, Artificial Sequence
  Description of Artificial Sequence: Synthetic oligonucleotide
  Antisense strand to SEQ ID NO: 2021070
aauacacucauguaucaau

SEQ ID NO: 2021072 - RNA, 19 nt, Artificial Sequence
  Description of Artificial Sequence: Synthetic oligonucleotide
  Sense strand starting at position 637 of SEQ ID NO: 1881138
guaccauggagaugucauu

SEQ ID NO: 2021073 - RNA, 19 nt, Artificial Sequence
  Description of Artificial Sequence: Synthetic oligonucleotide
  Antisense strand to SEQ ID NO: 2021072
aaugacaucuccaugguac

SEQ ID NO: 2021074 - RNA, 19 nt, Artificial Sequence
  Description of Artificial Sequence: Synthetic oligonucleotide
  Sense strand starting at position 1031 of SEQ ID NO: 1881138
auuauaguugcacauguaa

SEQ ID NO: 2021075 - RNA, 19 nt, Artificial Sequence
  Description of Artificial Sequence: Synthetic oligonucleotide
  Antisense strand to SEQ ID NO: 2021074
uuacaugugcaacuauaau

SEQ ID NO: 2021076 - RNA, 19 nt, Artificial Sequence
  Description of Artificial Sequence: Synthetic oligonucleotide
  Sense strand starting at position 1058 of SEQ ID NO: 1881138
cucuauguaguuuauggau

SEQ ID NO: 2021077 - RNA, 19 nt, Artificial Sequence
  Description of Artificial Sequence: Synthetic oligonucleotide
  Antisense strand to SEQ ID NO: 2021076
auccauaaacuacauagag

SEQ ID NO: 2021078 - RNA, 19 nt, Artificial Sequence
  Description of Artificial Sequence: Synthetic oligonucleotide
  Sense strand starting at position 1126 of SEQ ID NO: 1881138
uugagaugcuuaucaauug

SEQ ID NO: 2021079 - RNA, 19 nt, Artificial Sequence
  Description of Artificial Sequence: Synthetic oligonucleotide
  Antisense strand to SEQ ID NO: 2021078
caauugauaagcaucucaa

SEQ ID NO: 2021080 - RNA, 19 nt, Artificial Sequence
  Description of Artificial Sequence: Synthetic oligonucleotide
  Sense strand starting at position 1385 of SEQ ID NO: 1881138
aaaugaguguagcuuauaa

SEQ ID NO: 2021081 - RNA, 19 nt, Artificial Sequence
  Description of Artificial Sequence: Synthetic oligonucleotide
  Antisense strand to SEQ ID NO: 2021080
uuauaagcuacacucauuu

SEQ ID NO: 2021082 - RNA, 19 nt, Artificial Sequence
  Description of Artificial Sequence: Synthetic oligonucleotide
  Sense strand starting at position 1387 of SEQ ID NO: 1881138
augaguguagcuuauaaag

SEQ ID NO: 2021083 - RNA, 19 nt, Artificial Sequence
  Description of Artificial Sequence: Synthetic oligonucleotide
  Antisense strand to SEQ ID NO: 2021082
cuuuauaagcuacacucau

SEQ ID NO: 2021084 - RNA, 19 nt, Artificial Sequence
  Description of Artificial Sequence: Synthetic oligonucleotide
  Sense strand starting at position 1414 of SEQ ID NO: 1881138
aguuuauagcgugugaugu

SEQ ID NO: 2021085 - RNA, 19 nt, Artificial Sequence
  Description of Artificial Sequence: Synthetic oligonucleotide
  Antisense strand to SEQ ID NO: 2021084
acaucacacgcuauaaacu

SEQ ID NO: 2021086 - RNA, 19 nt, Artificial Sequence
  Description of Artificial Sequence: Synthetic oligonucleotide
  Sense strand starting at position 1422 of SEQ ID NO: 1881138
gcgugugauguuucaucca

SEQ ID NO: 2021087 - RNA, 19 nt, Artificial Sequence
  Description of Artificial Sequence: Synthetic oligonucleotide
  Antisense strand to SEQ ID NO: 2021086
uggaugaaacaucacacgc

SEQ ID NO: 2021088 - RNA, 19 nt, Artificial Sequence
  Description of Artificial Sequence: Synthetic oligonucleotide
  Sense strand starting at position 1474 of SEQ ID NO: 1881138
guuauagugccauaauaaa

SEQ ID NO: 2021089 - RNA, 19 nt, Artificial Sequence
  Description of Artificial Sequence: Synthetic oligonucleotide
  Antisense strand to SEQ ID NO: 2021088
uuuauuauggcacuauaac

SEQ ID NO: 2021090 - RNA, 19 nt, Artificial Sequence
  Description of Artificial Sequence: Synthetic oligonucleotide
  Sense strand starting at position 1567 of SEQ ID NO: 1881138
ggaaucauugugcaccuca

SEQ ID NO: 2021091 - RNA, 19 nt, Artificial Sequence
  Description of Artificial Sequence: Synthetic oligonucleotide
  Antisense strand to SEQ ID NO: 2021090
ugaggugcacaaugauucc

SEQ ID NO: 2021092 - RNA, 19 nt, Artificial Sequence
  Description of Artificial Sequence: Synthetic oligonucleotide
  Sense strand starting at position 1625 of SEQ ID NO: 1881138
agaagucaguuauucuaug

SEQ ID NO: 2021093 - RNA, 19 nt, Artificial Sequence
  Description of Artificial Sequence: Synthetic oligonucleotide
  Antisense strand to SEQ ID NO: 2021092
cauagaauaacugacuucu

SEQ ID NO: 2021094 - RNA, 19 nt, Artificial Sequence
  Description of Artificial Sequence: Synthetic oligonucleotide
  Sense strand starting at position 1626 of SEQ ID NO: 1881138
gaagucaguuauucuauga

SEQ ID NO: 2021095 - RNA, 19 nt, Artificial Sequence
  Description of Artificial Sequence: Synthetic oligonucleotide
  Antisense strand to SEQ ID NO: 2021094
ucauagaauaacugacuuc

SEQ ID NO: 2021096 - RNA, 19 nt, Artificial Sequence
  Description of Artificial Sequence: Synthetic oligonucleotide
  Sense strand starting at position 1630 of SEQ ID NO: 1881138
ucaguuauucuaugaauug

SEQ ID NO: 2021097 - RNA, 19 nt, Artificial Sequence
  Description of Artificial Sequence: Synthetic oligonucleotide
  Antisense strand to SEQ ID NO: 2021096
caauucauagaauaacuga

SEQ ID NO: 2021098 - RNA, 19 nt, Artificial Sequence
  Description of Artificial Sequence: Synthetic oligonucleotide
  Sense strand starting at position 1641 of SEQ ID NO: 1881138
augaauuguggccauauaa

SEQ ID NO: 2021099 - RNA, 19 nt, Artificial Sequence
  Description of Artificial Sequence: Synthetic oligonucleotide
  Antisense strand to SEQ ID NO: 2021098
uuauauggccacaauucau

SEQ ID NO: 2021100 - RNA, 19 nt, Artificial Sequence
  Description of Artificial Sequence: Synthetic oligonucleotide
  Sense strand starting at position 1694 of SEQ ID NO: 1881138
acugacauaucugcugaau

SEQ ID NO: 2021101 - RNA, 19 nt, Artificial Sequence
  Description of Artificial Sequence: Synthetic oligonucleotide
  Antisense strand to SEQ ID NO: 2021100
auucagcagauaugucagu

SEQ ID NO: 2021102 - RNA, 19 nt, Artificial Sequence
  Description of Artificial Sequence: Synthetic oligonucleotide
  Sense strand starting at position 2024 of SEQ ID NO: 1881138
cauggaaacgaucaagcuu

SEQ ID NO: 2021103 - RNA, 19 nt, Artificial Sequence
  Description of Artificial Sequence: Synthetic oligonucleotide
  Antisense strand to SEQ ID NO: 2021102
aagcuugaucguuuccaug

SEQ ID NO: 2021104 - RNA, 19 nt, Artificial Sequence
  Description of Artificial Sequence: Synthetic oligonucleotide
  Sense strand starting at position 2031 of SEQ ID NO: 1881138
acgaucaagcuuuauuaag

SEQ ID NO: 2021105 - RNA, 19 nt, Artificial Sequence
  Description of Artificial Sequence: Synthetic oligonucleotide
  Antisense strand to SEQ ID NO: 2021104
cuuaauaaagcuugaucgu

SEQ ID NO: 2021106 - RNA, 19 nt, Artificial Sequence
  Description of Artificial Sequence: Synthetic oligonucleotide
  Sense strand starting at position 2223 of SEQ ID NO: 1881138
aggcuuuacccagagaccu

SEQ ID NO: 2021107 - RNA, 19 nt, Artificial Sequence
  Description of Artificial Sequence: Synthetic oligonucleotide
  Antisense strand to SEQ ID NO: 2021106
aggucucuggguaaagccu

SEQ ID NO: 2021108 - RNA, 19 nt, Artificial Sequence
  Description of Artificial Sequence: Synthetic oligonucleotide
  Sense strand starting at position 2341 of SEQ ID NO: 1881138
gggcuuucccauuauacca

SEQ ID NO: 2021109 - RNA, 19 nt, Artificial Sequence
  Description of Artificial Sequence: Synthetic oligonucleotide
  Antisense strand to SEQ ID NO: 2021108
ugguauaaugggaaagccc

SEQ ID NO: 2021110 - RNA, 19 nt, Artificial Sequence
  Description of Artificial Sequence: Synthetic oligonucleotide
  Sense strand starting at position 2541 of SEQ ID NO: 1881138
agauuagugccacaauauu

SEQ ID NO: 2021111 - RNA, 19 nt, Artificial Sequence
  Description of Artificial Sequence: Synthetic oligonucleotide
  Antisense strand to SEQ ID NO: 2021110
aauauuguggcacuaaucu

SEQ ID NO: 2021112 - RNA, 19 nt, Artificial Sequence
  Description of Artificial Sequence: Synthetic oligonucleotide
  Sense strand starting at position 2571 of SEQ ID NO: 1881138
acgucaguuauggauuauc

SEQ ID NO: 2021113 - RNA, 19 nt, Artificial Sequence
  Description of Artificial Sequence: Synthetic oligonucleotide
  Antisense strand to SEQ ID NO: 2021112
gauaauccauaacugacgu

SEQ ID NO: 2021114 - RNA, 19 nt, Artificial Sequence
  Description of Artificial Sequence: Synthetic oligonucleotide
  Sense strand starting at position 2574 of SEQ ID NO: 1881138
ucaguuauggauuauccuu

SEQ ID NO: 2021115 - RNA, 19 nt, Artificial Sequence
  Description of Artificial Sequence: Synthetic oligonucleotide
  Antisense strand to SEQ ID NO: 2021114
aaggauaauccauaacuga

SEQ ID NO: 2021116 - RNA, 19 nt, Artificial Sequence
  Description of Artificial Sequence: Synthetic oligonucleotide
  Sense strand starting at position 2576 of SEQ ID NO: 1881138
aguuauggauuauccuuua

SEQ ID NO: 2021117 - RNA, 19 nt, Artificial Sequence
  Description of Artificial Sequence: Synthetic oligonucleotide
  Antisense strand to SEQ ID NO: 2021116
uaaaggauaauccauaacu

SEQ ID NO: 2021118 - RNA, 19 nt, Artificial Sequence
  Description of Artificial Sequence: Synthetic oligonucleotide
  Sense strand starting at position 2581 of SEQ ID NO: 1881138
uggauuauccuuuacguau

SEQ ID NO: 2021119 - RNA, 19 nt, Artificial Sequence
  Description of Artificial Sequence: Synthetic oligonucleotide
  Antisense strand to SEQ ID NO: 2021118
auacguaaaggauaaucca

SEQ ID NO: 2021120 - RNA, 19 nt, Artificial Sequence
  Description of Artificial Sequence: Synthetic oligonucleotide
  Sense strand starting at position 2605 of SEQ ID NO: 1881138
auccuuuaugucuguauuu

SEQ ID NO: 2021121 - RNA, 19 nt, Artificial Sequence
  Description of Artificial Sequence: Synthetic oligonucleotide
  Antisense strand to SEQ ID NO: 2021120
aaauacagacauaaaggau

SEQ ID NO: 2021122 - RNA, 19 nt, Artificial Sequence
  Description of Artificial Sequence: Synthetic oligonucleotide
  Sense strand starting at position 2606 of SEQ ID NO: 1881138
uccuuuaugucuguauuua

SEQ ID NO: 2021123 - RNA, 19 nt, Artificial Sequence
  Description of Artificial Sequence: Synthetic oligonucleotide
  Antisense strand to SEQ ID NO: 2021122
uaaauacagacauaaagga

SEQ ID NO: 2021124 - RNA, 19 nt, Artificial Sequence
  Description of Artificial Sequence: Synthetic oligonucleotide
  Sense strand starting at position 3348 of SEQ ID NO: 1881138
gagggaggagucugcugaa

SEQ ID NO: 2021125 - RNA, 19 nt, Artificial Sequence
  Description of Artificial Sequence: Synthetic oligonucleotide
  Antisense strand to SEQ ID NO: 2021124
uucagcagacuccucccuc

SEQ ID NO: 2021126 - RNA, 19 nt, Artificial Sequence
  Description of Artificial Sequence: Synthetic oligonucleotide
  Sense strand starting at position 3417 of SEQ ID NO: 1881138
ucuguaggaagcugacaua

SEQ ID NO: 2021127 - RNA, 19 nt, Artificial Sequence
  Description of Artificial Sequence: Synthetic oligonucleotide
  Antisense strand to SEQ ID NO: 2021126
uaugucagcuuccuacaga

SEQ ID NO: 2021128 - RNA, 19 nt, Artificial Sequence
  Description of Artificial Sequence: Synthetic oligonucleotide
  Sense strand starting at position 3640 of SEQ ID NO: 1881138
agagaauauaugugcaagu

SEQ ID NO: 2021129 - RNA, 19 nt, Artificial Sequence
  Description of Artificial Sequence: Synthetic oligonucleotide
  Antisense strand to SEQ ID NO: 2021128
acuugcacauauauucucu

SEQ ID NO: 2021130 - RNA, 19 nt, Artificial Sequence
  Description of Artificial Sequence: Synthetic oligonucleotide
  Sense strand starting at position 3641 of SEQ ID NO: 1881138
gagaauauaugugcaagua

SEQ ID NO: 2021131 - RNA, 19 nt, Artificial Sequence
  Description of Artificial Sequence: Synthetic oligonucleotide
  Antisense strand to SEQ ID NO: 2021130
uacuugcacauauauucuc

SEQ ID NO: 2021132 - RNA, 19 nt, Artificial Sequence
  Description of Artificial Sequence: Synthetic oligonucleotide
  Sense strand starting at position 3642 of SEQ ID NO: 1881138
agaauauaugugcaaguaa

SEQ ID NO: 2021133 - RNA, 19 nt, Artificial Sequence
  Description of Artificial Sequence: Synthetic oligonucleotide
  Antisense strand to SEQ ID NO: 2021132
uuacuugcacauauauucu

SEQ ID NO: 2021134 - RNA, 19 nt, Artificial Sequence
  Description of Artificial Sequence: Synthetic oligonucleotide
  Sense strand starting at position 3793 of SEQ ID NO: 1881138
ucaguuuaccaguagaaua

SEQ ID NO: 2021135 - RNA, 19 nt, Artificial Sequence
  Description of Artificial Sequence: Synthetic oligonucleotide
  Antisense strand to SEQ ID NO: 2021134
uauucuacugguaaacuga

SEQ ID NO: 2021136 - RNA, 19 nt, Artificial Sequence
  Description of Artificial Sequence: Synthetic oligonucleotide
  Sense strand starting at position 3795 of SEQ ID NO: 1881138
aguuuaccaguagaauauc

SEQ ID NO: 2021137 - RNA, 19 nt, Artificial Sequence
  Description of Artificial Sequence: Synthetic oligonucleotide
  Antisense strand to SEQ ID NO: 2021136
gauauucuacugguaaacu

SEQ ID NO: 2021138 - RNA, 19 nt, Artificial Sequence
  Description of Artificial Sequence: Synthetic oligonucleotide
  Sense strand starting at position 3846 of SEQ ID NO: 1881138
ugugacuaugcauacuaca

SEQ ID NO: 2021139 - RNA, 19 nt, Artificial Sequence
  Description of Artificial Sequence: Synthetic oligonucleotide
  Antisense strand to SEQ ID NO: 2021138
uguaguaugcauagucaca

SEQ ID NO: 2021140 - RNA, 19 nt, Artificial Sequence
  Description of Artificial Sequence: Synthetic oligonucleotide
  Sense strand starting at position 107 of SEQ ID NO: 1881139
cggauugaaagguagugua

SEQ ID NO: 2021141 - RNA, 19 nt, Artificial Sequence
  Description of Artificial Sequence: Synthetic oligonucleotide
  Antisense strand to SEQ ID NO: 2021140
uacacuaccuuucaauccg

SEQ ID NO: 2021142 - RNA, 19 nt, Artificial Sequence
  Description of Artificial Sequence: Synthetic oligonucleotide
  Sense strand starting at position 454 of SEQ ID NO: 1881139
gagccaagccguucuguau

SEQ ID NO: 2021143 - RNA, 19 nt, Artificial Sequence
  Description of Artificial Sequence: Synthetic oligonucleotide
  Antisense strand to SEQ ID NO: 2021142
auacagaacggcuuggcuc

SEQ ID NO: 2021144 - RNA, 19 nt, Artificial Sequence
  Description of Artificial Sequence: Synthetic oligonucleotide
  Sense strand starting at position 505 of SEQ ID NO: 1881139
gccauuaggauauggacaa

SEQ ID NO: 2021145 - RNA, 19 nt, Artificial Sequence
  Description of Artificial Sequence: Synthetic oligonucleotide
  Antisense strand to SEQ ID NO: 2021144
uuguccauauccuaauggc

SEQ ID NO: 2021146 - RNA, 19 nt, Artificial Sequence
  Description of Artificial Sequence: Synthetic oligonucleotide
  Sense strand starting at position 527 of SEQ ID NO: 1881139
ccagucuuuccguuguuua

SEQ ID NO: 2021147 - RNA, 19 nt, Artificial Sequence
  Description of Artificial Sequence: Synthetic oligonucleotide
  Antisense strand to SEQ ID NO: 2021146
uaaacaacggaaagacugg

SEQ ID NO: 2021148 - RNA, 19 nt, Artificial Sequence
  Description of Artificial Sequence: Synthetic oligonucleotide
  Sense strand starting at position 561 of SEQ ID NO: 1881139
ggauuccucccagaagucu

SEQ ID NO: 2021149 - RNA, 19 nt, Artificial Sequence
  Description of Artificial Sequence: Synthetic oligonucleotide
  Antisense strand to SEQ ID NO: 2021148
agacuucugggaggaaucc

SEQ ID NO: 2021150 - RNA, 19 nt, Artificial Sequence
  Description of Artificial Sequence: Synthetic oligonucleotide
  Sense strand starting at position 570 of SEQ ID NO: 1881139
ccagaagucuacccaagga

SEQ ID NO: 2021151 - RNA, 19 nt, Artificial Sequence
  Description of Artificial Sequence: Synthetic oligonucleotide
  Antisense strand to SEQ ID NO: 2021150
uccuuggguagacuucugg

SEQ ID NO: 2021152 - RNA, 19 nt, Artificial Sequence
  Description of Artificial Sequence: Synthetic oligonucleotide
  Sense strand starting at position 675 of SEQ ID NO: 1881139
gcuuuacauggccaaauau

SEQ ID NO: 2021153 - RNA, 19 nt, Artificial Sequence
  Description of Artificial Sequence: Synthetic oligonucleotide
  Antisense strand to SEQ ID NO: 2021152
auauuuggccauguaaagc

SEQ ID NO: 2021154 - RNA, 19 nt, Artificial Sequence
  Description of Artificial Sequence: Synthetic oligonucleotide
  Sense strand starting at position 683 of SEQ ID NO: 1881139
uggccaaauaugcauggau

SEQ ID NO: 2021155 - RNA, 19 nt, Artificial Sequence
  Description of Artificial Sequence: Synthetic oligonucleotide
  Antisense strand to SEQ ID NO: 2021154
auccaugcauauuuggcca

SEQ ID NO: 2021156 - RNA, 19 nt, Artificial Sequence
  Description of Artificial Sequence: Synthetic oligonucleotide
  Sense strand starting at position 686 of SEQ ID NO: 1881139
ccaaauaugcauggaucaa

SEQ ID NO: 2021157 - RNA, 19 nt, Artificial Sequence
  Description of Artificial Sequence: Synthetic oligonucleotide
  Antisense strand to SEQ ID NO: 2021156
uugauccaugcauauuugg

SEQ ID NO: 2021158 - RNA, 19 nt, Artificial Sequence
  Description of Artificial Sequence: Synthetic oligonucleotide
  Sense strand starting at position 723 of SEQ ID NO: 1881139
aagaaucuagugugaaaua

SEQ ID NO: 2021159 - RNA, 19 nt, Artificial Sequence
  Description of Artificial Sequence: Synthetic oligonucleotide
  Antisense strand to SEQ ID NO: 2021158
uauuucacacuagauucuu

SEQ ID NO: 2021160 - RNA, 19 nt, Artificial Sequence
  Description of Artificial Sequence: Synthetic oligonucleotide
  Sense strand starting at position 816 of SEQ ID NO: 1881139
ccuuguaugggagaaguua

SEQ ID NO: 2021161 - RNA, 19 nt, Artificial Sequence
  Description of Artificial Sequence: Synthetic oligonucleotide
  Antisense strand to SEQ ID NO: 2021160
uaacuucucccauacaagg

SEQ ID NO: 2021162 - RNA, 19 nt, Artificial Sequence
  Description of Artificial Sequence: Synthetic oligonucleotide
  Sense strand starting at position 916 of SEQ ID NO: 1881139
uugcaugguggucauuaaa

SEQ ID NO: 2021163 - RNA, 19 nt, Artificial Sequence
  Description of Artificial Sequence: Synthetic oligonucleotide
  Antisense strand to SEQ ID NO: 2021162
uuuaaugaccaccaugcaa

SEQ ID NO: 2021164 - RNA, 19 nt, Artificial Sequence
  Description of Artificial Sequence: Synthetic oligonucleotide
  Sense strand starting at position 919 of SEQ ID NO: 1881139
caugguggucauuaaagcu

SEQ ID NO: 2021165 - RNA, 19 nt, Artificial Sequence
  Description of Artificial Sequence: Synthetic oligonucleotide
  Antisense strand to SEQ ID NO: 2021164
agcuuuaaugaccaccaug

SEQ ID NO: 2021166 - RNA, 19 nt, Artificial Sequence
  Description of Artificial Sequence: Synthetic oligonucleotide
  Sense strand starting at position 1110 of SEQ ID NO: 1881139
agugaaauuucgaggugug

SEQ ID NO: 2021167 - RNA, 19 nt, Artificial Sequence
  Description of Artificial Sequence: Synthetic oligonucleotide
  Antisense strand to SEQ ID NO: 2021166
cacaccucgaaauuucacu

SEQ ID NO: 2021168 - RNA, 19 nt, Artificial Sequence
  Description of Artificial Sequence: Synthetic oligonucleotide
  Sense strand starting at position 1119 of SEQ ID NO: 1881139
ucgaggugugagggagaaa

SEQ ID NO: 2021169 - RNA, 19 nt, Artificial Sequence
  Description of Artificial Sequence: Synthetic oligonucleotide
  Antisense strand to SEQ ID NO: 2021168
uuucucccucacaccucga

SEQ ID NO: 2021170 - RNA, 19 nt, Artificial Sequence
  Description of Artificial Sequence: Synthetic oligonucleotide
  Sense strand starting at position 1254 of SEQ ID NO: 1881139
aggaauuacgcacacucau

SEQ ID NO: 2021171 - RNA, 19 nt, Artificial Sequence
  Description of Artificial Sequence: Synthetic oligonucleotide
  Antisense strand to SEQ ID NO: 2021170
augagugugcguaauuccu

SEQ ID NO: 2021172 - RNA, 19 nt, Artificial Sequence
  Description of Artificial Sequence: Synthetic oligonucleotide
  Sense strand starting at position 1449 of SEQ ID NO: 1881139
gggccucaaccugaaguuu

SEQ ID NO: 2021173 - RNA, 19 nt, Artificial Sequence
  Description of Artificial Sequence: Synthetic oligonucleotide
  Antisense strand to SEQ ID NO: 2021172
aaacuucagguugaggccc

SEQ ID NO: 2021174 - RNA, 19 nt, Artificial Sequence
  Description of Artificial Sequence: Synthetic oligonucleotide
  Sense strand starting at position 1709 of SEQ ID NO: 1881139
ugaaauggguuucuuuaau

SEQ ID NO: 2021175 - RNA, 19 nt, Artificial Sequence
  Description of Artificial Sequence: Synthetic oligonucleotide
  Antisense strand to SEQ ID NO: 2021174
auuaaagaaacccauuuca

SEQ ID NO: 2021176 - RNA, 19 nt, Artificial Sequence
  Description of Artificial Sequence: Synthetic oligonucleotide
  Sense strand starting at position 2147 of SEQ ID NO: 1881139
ggucauaugaacggauuga

SEQ ID NO: 2021177 - RNA, 19 nt, Artificial Sequence
  Description of Artificial Sequence: Synthetic oligonucleotide
  Antisense strand to SEQ ID NO: 2021176
ucaauccguucauaugacc

SEQ ID NO: 2021178 - RNA, 19 nt, Artificial Sequence
  Description of Artificial Sequence: Synthetic oligonucleotide
  Sense strand starting at position 2158 of SEQ ID NO: 1881139
cggauugaagaguagugua

SEQ ID NO: 2021179 - RNA, 19 nt, Artificial Sequence
  Description of Artificial Sequence: Synthetic oligonucleotide
  Antisense strand to SEQ ID NO: 2021178
uacacuacucuucaauccg

SEQ ID NO: 2021180 - RNA, 19 nt, Artificial Sequence
  Description of Artificial Sequence: Synthetic oligonucleotide
  Sense strand starting at position 2234 of SEQ ID NO: 1881139
gugaaagagggucaucuuu

SEQ ID NO: 2021181 - RNA, 19 nt, Artificial Sequence
  Description of Artificial Sequence: Synthetic oligonucleotide
  Antisense strand to SEQ ID NO: 2021180
aaagaugacccucuuucac

SEQ ID NO: 2021182 - RNA, 19 nt, Artificial Sequence
  Description of Artificial Sequence: Synthetic oligonucleotide
  Sense strand starting at position 2241 of SEQ ID NO: 1881139
agggucaucuuucccugaa

SEQ ID NO: 2021183 - RNA, 19 nt, Artificial Sequence
  Description of Artificial Sequence: Synthetic oligonucleotide
  Antisense strand to SEQ ID NO: 2021182
uucagggaaagaugacccu

SEQ ID NO: 2021184 - RNA, 19 nt, Artificial Sequence
  Description of Artificial Sequence: Synthetic oligonucleotide
  Sense strand starting at position 2242 of SEQ ID NO: 1881139
gggucaucuuucccugaag

SEQ ID NO: 2021185 - RNA, 19 nt, Artificial Sequence
  Description of Artificial Sequence: Synthetic oligonucleotide
  Antisense strand to SEQ ID NO: 2021184
cuucagggaaagaugaccc

SEQ ID NO: 2021186 - RNA, 19 nt, Artificial Sequence
  Description of Artificial Sequence: Synthetic oligonucleotide
  Sense strand starting at position 2544 of SEQ ID NO: 1881139
guguacuuuaaguagauua

SEQ ID NO: 2021187 - RNA, 19 nt, Artificial Sequence
  Description of Artificial Sequence: Synthetic oligonucleotide
  Antisense strand to SEQ ID NO: 2021186
uaaucuacuuaaaguacac

SEQ ID NO: 2021188 - RNA, 19 nt, Artificial Sequence
  Description of Artificial Sequence: Synthetic oligonucleotide
  Sense strand starting at position 2546 of SEQ ID NO: 1881139
guacuuuaaguagauuaac

SEQ ID NO: 2021189 - RNA, 19 nt, Artificial Sequence
  Description of Artificial Sequence: Synthetic oligonucleotide
  Antisense strand to SEQ ID NO: 2021188
guuaaucuacuuaaaguac

SEQ ID NO: 2021190 - RNA, 19 nt, Artificial Sequence
  Description of Artificial Sequence: Synthetic oligonucleotide
  Sense strand starting at position 2555 of SEQ ID NO: 1881139
guagauuaaccguaugaua

SEQ ID NO: 2021191 - RNA, 19 nt, Artificial Sequence
  Description of Artificial Sequence: Synthetic oligonucleotide
  Antisense strand to SEQ ID NO: 2021190
uaucauacgguuaaucuac

SEQ ID NO: 2021192 - RNA, 19 nt, Artificial Sequence
  Description of Artificial Sequence: Synthetic oligonucleotide
  Sense strand starting at position 2557 of SEQ ID NO: 1881139
agauuaaccguaugauaua

SEQ ID NO: 2021193 - RNA, 19 nt, Artificial Sequence
  Description of Artificial Sequence: Synthetic oligonucleotide
  Antisense strand to SEQ ID NO: 2021192
uauaucauacgguuaaucu

SEQ ID NO: 2021194 - RNA, 19 nt, Artificial Sequence
  Description of Artificial Sequence: Synthetic oligonucleotide
  Sense strand starting at position 2612 of SEQ ID NO: 1881139
augcauauaccuuagucua

SEQ ID NO: 2021195 - RNA, 19 nt, Artificial Sequence
  Description of Artificial Sequence: Synthetic oligonucleotide
  Antisense strand to SEQ ID NO: 2021194
uagacuaagguauaugcau

SEQ ID NO: 2021196 - RNA, 19 nt, Artificial Sequence
  Description of Artificial Sequence: Synthetic oligonucleotide
  Sense strand starting at position 2640 of SEQ ID NO: 1881139
ggucauauacuacagcgau

SEQ ID NO: 2021197 - RNA, 19 nt, Artificial Sequence
  Description of Artificial Sequence: Synthetic oligonucleotide
  Antisense strand to SEQ ID NO: 2021196
aucgcuguaguauaugacc

SEQ ID NO: 2021198 - RNA, 19 nt, Artificial Sequence
  Description of Artificial Sequence: Synthetic oligonucleotide
  Sense strand starting at position 2646 of SEQ ID NO: 1881139
auacuacagcgauaguaac

SEQ ID NO: 2021199 - RNA, 19 nt, Artificial Sequence
  Description of Artificial Sequence: Synthetic oligonucleotide
  Antisense strand to SEQ ID NO: 2021198
guuacuaucgcuguaguau

SEQ ID NO: 2021200 - RNA, 19 nt, Artificial Sequence
  Description of Artificial Sequence: Synthetic oligonucleotide
  Sense strand starting at position 2700 of SEQ ID NO: 1881139
ggaaauacuuaaucuugca

SEQ ID NO: 2021201 - RNA, 19 nt, Artificial Sequence
  Description of Artificial Sequence: Synthetic oligonucleotide
  Antisense strand to SEQ ID NO: 2021200
ugcaagauuaaguauuucc

SEQ ID NO: 2021202 - RNA, 19 nt, Artificial Sequence
  Description of Artificial Sequence: Synthetic oligonucleotide
  Sense strand starting at position 2720 of SEQ ID NO: 1881139
augcaugaucaguaaggua

SEQ ID NO: 2021203 - RNA, 19 nt, Artificial Sequence
  Description of Artificial Sequence: Synthetic oligonucleotide
  Antisense strand to SEQ ID NO: 2021202
uaccuuacugaucaugcau

SEQ ID NO: 2021204 - RNA, 19 nt, Artificial Sequence
  Description of Artificial Sequence: Synthetic oligonucleotide
  Sense strand starting at position 2791 of SEQ ID NO: 1881139
uaguaaucucaaggaagua

SEQ ID NO: 2021205 - RNA, 19 nt, Artificial Sequence
  Description of Artificial Sequence: Synthetic oligonucleotide
  Antisense strand to SEQ ID NO: 2021204
uacuuccuugagauuacua

SEQ ID NO: 2021206 - RNA, 19 nt, Artificial Sequence
  Description of Artificial Sequence: Synthetic oligonucleotide
  Sense strand starting at position 2819 of SEQ ID NO: 1881139
acugaaacuguuuauguca

SEQ ID NO: 2021207 - RNA, 19 nt, Artificial Sequence
  Description of Artificial Sequence: Synthetic oligonucleotide
  Antisense strand to SEQ ID NO: 2021206
ugacauaaacaguuucagu

SEQ ID NO: 2021208 - RNA, 19 nt, Artificial Sequence
  Description of Artificial Sequence: Synthetic oligonucleotide
  Sense strand starting at position 2872 of SEQ ID NO: 1881139
agagauagcucauuaugau

SEQ ID NO: 2021209 - RNA, 19 nt, Artificial Sequence
  Description of Artificial Sequence: Synthetic oligonucleotide
  Antisense strand to SEQ ID NO: 2021208
aucauaaugagcuaucucu

SEQ ID NO: 2021210 - RNA, 19 nt, Artificial Sequence
  Description of Artificial Sequence: Synthetic oligonucleotide
  Sense strand starting at position 2977 of SEQ ID NO: 1881139
cuggaaguuugacuuuaaa

SEQ ID NO: 2021211 - RNA, 19 nt, Artificial Sequence
  Description of Artificial Sequence: Synthetic oligonucleotide
  Antisense strand to SEQ ID NO: 2021210
uuuaaagucaaacuuccag

SEQ ID NO: 2021212 - RNA, 19 nt, Artificial Sequence
  Description of Artificial Sequence: Synthetic oligonucleotide
  Sense strand starting at position 3008 of SEQ ID NO: 1881139
gcaagagaucaauauagcu

SEQ ID NO: 2021213 - RNA, 19 nt, Artificial Sequence
  Description of Artificial Sequence: Synthetic oligonucleotide
  Antisense strand to SEQ ID NO: 2021212
agcuauauugaucucuugc

SEQ ID NO: 2021214 - RNA, 19 nt, Artificial Sequence
  Description of Artificial Sequence: Synthetic oligonucleotide
  Sense strand starting at position 3013 of SEQ ID NO: 1881139
agaucaauauagcuagagu

SEQ ID NO: 2021215 - RNA, 19 nt, Artificial Sequence
  Description of Artificial Sequence: Synthetic oligonucleotide
  Antisense strand to SEQ ID NO: 2021214
acucuagcuauauugaucu

SEQ ID NO: 2021216 - RNA, 19 nt, Artificial Sequence
  Description of Artificial Sequence: Synthetic oligonucleotide
  Sense strand starting at position 3221 of SEQ ID NO: 1881139
uggcuccuuggaggauuaa

SEQ ID NO: 2021217 - RNA, 19 nt, Artificial Sequence
  Description of Artificial Sequence: Synthetic oligonucleotide
  Antisense strand to SEQ ID NO: 2021216
uuaauccuccaaggagcca

SEQ ID NO: 2021218 - RNA, 19 nt, Artificial Sequence
  Description of Artificial Sequence: Synthetic oligonucleotide
  Sense strand starting at position 3744 of SEQ ID NO: 1881139
ggaacaugguaaucuuugu

SEQ ID NO: 2021219 - RNA, 19 nt, Artificial Sequence
  Description of Artificial Sequence: Synthetic oligonucleotide
  Antisense strand to SEQ ID NO: 2021218
acaaagauuaccauguucc

SEQ ID NO: 2021220 - RNA, 19 nt, Artificial Sequence
  Description of Artificial Sequence: Synthetic oligonucleotide
  Sense strand starting at position 8 of SEQ ID NO: 1881140
uggaguauuugcuuuacuu

SEQ ID NO: 2021221 - RNA, 19 nt, Artificial Sequence
  Description of Artificial Sequence: Synthetic oligonucleotide
  Antisense strand to SEQ ID NO: 2021220
aaguaaagcaaauacucca

SEQ ID NO: 2021222 - RNA, 19 nt, Artificial Sequence
  Description of Artificial Sequence: Synthetic oligonucleotide
  Sense strand starting at position 114 of SEQ ID NO: 1881140
uguuccuugcauggacaau

SEQ ID NO: 2021223 - RNA, 19 nt, Artificial Sequence
  Description of Artificial Sequence: Synthetic oligonucleotide
  Antisense strand to SEQ ID NO: 2021222
auuguccaugcaaggaaca

SEQ ID NO: 2021224 - RNA, 19 nt, Artificial Sequence
  Description of Artificial Sequence: Synthetic oligonucleotide
  Sense strand starting at position 120 of SEQ ID NO: 1881140
uugcauggacaauaucauu

SEQ ID NO: 2021225 - RNA, 19 nt, Artificial Sequence
  Description of Artificial Sequence: Synthetic oligonucleotide
  Antisense strand to SEQ ID NO: 2021224
aaugauauuguccaugcaa

SEQ ID NO: 2021226 - RNA, 19 nt, Artificial Sequence
  Description of Artificial Sequence: Synthetic oligonucleotide
  Sense strand starting at position 244 of SEQ ID NO: 1881140
gguuuauacuguguugaua

SEQ ID NO: 2021227 - RNA, 19 nt, Artificial Sequence
  Description of Artificial Sequence: Synthetic oligonucleotide
  Antisense strand to SEQ ID NO: 2021226
uaucaacacaguauaaacc

SEQ ID NO: 2021228 - RNA, 19 nt, Artificial Sequence
  Description of Artificial Sequence: Synthetic oligonucleotide
  Sense strand starting at position 247 of SEQ ID NO: 1881140
uuauacuguguugauaacu

SEQ ID NO: 2021229 - RNA, 19 nt, Artificial Sequence
  Description of Artificial Sequence: Synthetic oligonucleotide
  Antisense strand to SEQ ID NO: 2021228
aguuaucaacacaguauaa

SEQ ID NO: 2021230 - RNA, 19 nt, Artificial Sequence
  Description of Artificial Sequence: Synthetic oligonucleotide
  Sense strand starting at position 329 of SEQ ID NO: 1881140
cugcaaacuugucuuggga

SEQ ID NO: 2021231 - RNA, 19 nt, Artificial Sequence
  Description of Artificial Sequence: Synthetic oligonucleotide
  Antisense strand to SEQ ID NO: 2021230
ucccaagacaaguuugcag

SEQ ID NO: 2021232 - RNA, 19 nt, Artificial Sequence
  Description of Artificial Sequence: Synthetic oligonucleotide
  Sense strand starting at position 356 of SEQ ID NO: 1881140
cacugauuugcacggaggu

SEQ ID NO: 2021233 - RNA, 19 nt, Artificial Sequence
  Description of Artificial Sequence: Synthetic oligonucleotide
  Antisense strand to SEQ ID NO: 2021232
accuccgugcaaaucagug

SEQ ID NO: 2021234 - RNA, 19 nt, Artificial Sequence
  Description of Artificial Sequence: Synthetic oligonucleotide
  Sense strand starting at position 531 of SEQ ID NO: 1881140
ugagaacguuucuuucuau

SEQ ID NO: 2021235 - RNA, 19 nt, Artificial Sequence
  Description of Artificial Sequence: Synthetic oligonucleotide
  Antisense strand to SEQ ID NO: 2021234
auagaaagaaacguucuca

SEQ ID NO: 2021236 - RNA, 19 nt, Artificial Sequence
  Description of Artificial Sequence: Synthetic oligonucleotide
  Sense strand starting at position 532 of SEQ ID NO: 1881140
gagaacguuucuuucuauc

SEQ ID NO: 2021237 - RNA, 19 nt, Artificial Sequence
  Description of Artificial Sequence: Synthetic oligonucleotide
  Antisense strand to SEQ ID NO: 2021236
gauagaaagaaacguucuc

SEQ ID NO: 2021238 - RNA, 19 nt, Artificial Sequence
  Description of Artificial Sequence: Synthetic oligonucleotide
  Sense strand starting at position 553 of SEQ ID NO: 1881140
gcugaaaugugagucuaau

SEQ ID NO: 2021239 - RNA, 19 nt, Artificial Sequence
  Description of Artificial Sequence: Synthetic oligonucleotide
  Antisense strand to SEQ ID NO: 2021238
auuagacucacauuucagc

SEQ ID NO: 2021240 - RNA, 19 nt, Artificial Sequence
  Description of Artificial Sequence: Synthetic oligonucleotide
  Sense strand starting at position 717 of SEQ ID NO: 1881140
agaggugagggauguacau

SEQ ID NO: 2021241 - RNA, 19 nt, Artificial Sequence
  Description of Artificial Sequence: Synthetic oligonucleotide
  Antisense strand to SEQ ID NO: 2021240
auguacaucccucaccucu

SEQ ID NO: 2021242 - RNA, 19 nt, Artificial Sequence
  Description of Artificial Sequence: Synthetic oligonucleotide
  Sense strand starting at position 831 of SEQ ID NO: 1881140
ggaucugucauccgcagaa

SEQ ID NO: 2021243 - RNA, 19 nt, Artificial Sequence
  Description of Artificial Sequence: Synthetic oligonucleotide
  Antisense strand to SEQ ID NO: 2021242
uucugcggaugacagaucc

SEQ ID NO: 2021244 - RNA, 19 nt, Artificial Sequence
  Description of Artificial Sequence: Synthetic oligonucleotide
  Sense strand starting at position 833 of SEQ ID NO: 1881140
aucugucauccgcagaaua

SEQ ID NO: 2021245 - RNA, 19 nt, Artificial Sequence
  Description of Artificial Sequence: Synthetic oligonucleotide
  Antisense strand to SEQ ID NO: 2021244
uauucugcggaugacagau

SEQ ID NO: 2021246 - RNA, 19 nt, Artificial Sequence
  Description of Artificial Sequence: Synthetic oligonucleotide
  Sense strand starting at position 835 of SEQ ID NO: 1881140
cugucauccgcagaauaag

SEQ ID NO: 2021247 - RNA, 19 nt, Artificial Sequence
  Description of Artificial Sequence: Synthetic oligonucleotide
  Antisense strand to SEQ ID NO: 2021246
cuuauucugcggaugacag

SEQ ID NO: 2021248 - RNA, 19 nt, Artificial Sequence
  Description of Artificial Sequence: Synthetic oligonucleotide
  Sense strand starting at position 843 of SEQ ID NO: 1881140
cgcagaauaagucaugaag

SEQ ID NO: 2021249 - RNA, 19 nt, Artificial Sequence
  Description of Artificial Sequence: Synthetic oligonucleotide
  Antisense strand to SEQ ID NO: 2021248
cuucaugacuuauucugcg

SEQ ID NO: 2021250 - RNA, 19 nt, Artificial Sequence
  Description of Artificial Sequence: Synthetic oligonucleotide
  Sense strand starting at position 893 of SEQ ID NO: 1881140
gggauucucccucauguuu

SEQ ID NO: 2021251 - RNA, 19 nt, Artificial Sequence
  Description of Artificial Sequence: Synthetic oligonucleotide
  Antisense strand to SEQ ID NO: 2021250
aaacaugagggagaauccc

SEQ ID NO: 2021252 - RNA, 19 nt, Artificial Sequence
  Description of Artificial Sequence: Synthetic oligonucleotide
  Sense strand starting at position 918 of SEQ ID NO: 1881140
ggagguucucuauguuuaa

SEQ ID NO: 2021253 - RNA, 19 nt, Artificial Sequence
  Description of Artificial Sequence: Synthetic oligonucleotide
  Antisense strand to SEQ ID NO: 2021252
uuaaacauagagaaccucc

SEQ ID NO: 2021254 - RNA, 19 nt, Artificial Sequence
  Description of Artificial Sequence: Synthetic oligonucleotide
  Sense strand starting at position 921 of SEQ ID NO: 1881140
gguucucuauguuuaaucu

SEQ ID NO: 2021255 - RNA, 19 nt, Artificial Sequence
  Description of Artificial Sequence: Synthetic oligonucleotide
  Antisense strand to SEQ ID NO: 2021254
agauuaaacauagagaacc

SEQ ID NO: 2021256 - RNA, 19 nt, Artificial Sequence
  Description of Artificial Sequence: Synthetic oligonucleotide
  Sense strand starting at position 922 of SEQ ID NO: 1881140
guucucuauguuuaaucuu

SEQ ID NO: 2021257 - RNA, 19 nt, Artificial Sequence
  Description of Artificial Sequence: Synthetic oligonucleotide
  Antisense strand to SEQ ID NO: 2021256
aagauuaaacauagagaac

SEQ ID NO: 2021258 - RNA, 19 nt, Artificial Sequence
  Description of Artificial Sequence: Synthetic oligonucleotide
  Sense strand starting at position 929 of SEQ ID NO: 1881140
auguuuaaucuuggcucua

SEQ ID NO: 2021259 - RNA, 19 nt, Artificial Sequence
  Description of Artificial Sequence: Synthetic oligonucleotide
  Antisense strand to SEQ ID NO: 2021258
uagagccaagauuaaacau

SEQ ID NO: 2021260 - RNA, 19 nt, Artificial Sequence
  Description of Artificial Sequence: Synthetic oligonucleotide
  Sense strand starting at position 1065 of SEQ ID NO: 1881140
gacaauguggccugaacuu

SEQ ID NO: 2021261 - RNA, 19 nt, Artificial Sequence
  Description of Artificial Sequence: Synthetic oligonucleotide
  Antisense strand to SEQ ID NO: 2021260
aaguucaggccacauuguc

SEQ ID NO: 2021262 - RNA, 19 nt, Artificial Sequence
  Description of Artificial Sequence: Synthetic oligonucleotide
  Sense strand starting at position 1098 of SEQ ID NO: 1881140
cacuucuguguggaaacaa

SEQ ID NO: 2021263 - RNA, 19 nt, Artificial Sequence
  Description of Artificial Sequence: Synthetic oligonucleotide
  Antisense strand to SEQ ID NO: 2021262
uuguuuccacacagaagug

SEQ ID NO: 2021264 - RNA, 19 nt, Artificial Sequence
  Description of Artificial Sequence: Synthetic oligonucleotide
  Sense strand starting at position 1122 of SEQ ID NO: 1881140
ggacuuucccucugauauu

SEQ ID NO: 2021265 - RNA, 19 nt, Artificial Sequence
  Description of Artificial Sequence: Synthetic oligonucleotide
  Antisense strand to SEQ ID NO: 2021264
aauaucagagggaaagucc

SEQ ID NO: 2021266 - RNA, 19 nt, Artificial Sequence
  Description of Artificial Sequence: Synthetic oligonucleotide
  Sense strand starting at position 1210 of SEQ ID NO: 1881140
ugagauagguuagcaucuu

SEQ ID NO: 2021267 - RNA, 19 nt, Artificial Sequence
  Description of Artificial Sequence: Synthetic oligonucleotide
  Antisense strand to SEQ ID NO: 2021266
aagaugcuaaccuaucuca

SEQ ID NO: 2021268 - RNA, 19 nt, Artificial Sequence
  Description of Artificial Sequence: Synthetic oligonucleotide
  Sense strand starting at position 1577 of SEQ ID NO: 1881140
ggcaguuaagucuauacac

SEQ ID NO: 2021269 - RNA, 19 nt, Artificial Sequence
  Description of Artificial Sequence: Synthetic oligonucleotide
  Antisense strand to SEQ ID NO: 2021268
guguauagacuuaacugcc

SEQ ID NO: 2021270 - RNA, 19 nt, Artificial Sequence
  Description of Artificial Sequence: Synthetic oligonucleotide
  Sense strand starting at position 1800 of SEQ ID NO: 1881140
aggguagggccuugcuuaa

SEQ ID NO: 2021271 - RNA, 19 nt, Artificial Sequence
  Description of Artificial Sequence: Synthetic oligonucleotide
  Antisense strand to SEQ ID NO: 2021270
uuaagcaaggcccuacccu

SEQ ID NO: 2021272 - RNA, 19 nt, Artificial Sequence
  Description of Artificial Sequence: Synthetic oligonucleotide
  Sense strand starting at position 1812 of SEQ ID NO: 1881140
ugcuuaaggucaccugauu

SEQ ID NO: 2021273 - RNA, 19 nt, Artificial Sequence
  Description of Artificial Sequence: Synthetic oligonucleotide
  Antisense strand to SEQ ID NO: 2021272
aaucaggugaccuuaagca

SEQ ID NO: 2021274 - RNA, 19 nt, Artificial Sequence
  Description of Artificial Sequence: Synthetic oligonucleotide
  Sense strand starting at position 2033 of SEQ ID NO: 1881140
guuugaaagaucuggccua

SEQ ID NO: 2021275 - RNA, 19 nt, Artificial Sequence
  Description of Artificial Sequence: Synthetic oligonucleotide
  Antisense strand to SEQ ID NO: 2021274
uaggccagaucuuucaaac

SEQ ID NO: 2021276 - RNA, 19 nt, Artificial Sequence
  Description of Artificial Sequence: Synthetic oligonucleotide
  Sense strand starting at position 2443 of SEQ ID NO: 1881140
gauggauuccaagagcugu

SEQ ID NO: 2021277 - RNA, 19 nt, Artificial Sequence
  Description of Artificial Sequence: Synthetic oligonucleotide
  Antisense strand to SEQ ID NO: 2021276
acagcucuuggaauccauc

SEQ ID NO: 2021278 - RNA, 19 nt, Artificial Sequence
  Description of Artificial Sequence: Synthetic oligonucleotide
  Sense strand starting at position 2472 of SEQ ID NO: 1881140
gguuuacggucaguuagga

SEQ ID NO: 2021279 - RNA, 19 nt, Artificial Sequence
  Description of Artificial Sequence: Synthetic oligonucleotide
  Antisense strand to SEQ ID NO: 2021278
uccuaacugaccguaaacc

SEQ ID NO: 2021280 - RNA, 19 nt, Artificial Sequence
  Description of Artificial Sequence: Synthetic oligonucleotide
  Sense strand starting at position 2510 of SEQ ID NO: 1881140
ggaacugccgcuggaauuu

SEQ ID NO: 2021281 - RNA, 19 nt, Artificial Sequence
  Description of Artificial Sequence: Synthetic oligonucleotide
  Antisense strand to SEQ ID NO: 2021280
aaauuccagcggcaguucc

SEQ ID NO: 2021282 - RNA, 19 nt, Artificial Sequence
  Description of Artificial Sequence: Synthetic oligonucleotide
  Sense strand starting at position 3397 of SEQ ID NO: 1881140
cugaaugauuugggagcca

SEQ ID NO: 2021283 - RNA, 19 nt, Artificial Sequence
  Description of Artificial Sequence: Synthetic oligonucleotide
  Antisense strand to SEQ ID NO: 2021282
uggcucccaaaucauucag

SEQ ID NO: 2021284 - RNA, 19 nt, Artificial Sequence
  Description of Artificial Sequence: Synthetic oligonucleotide
  Sense strand starting at position 3779 of SEQ ID NO: 1881140
gcugucauuccagagccau

SEQ ID NO: 2021285 - RNA, 19 nt, Artificial Sequence
  Description of Artificial Sequence: Synthetic oligonucleotide
  Antisense strand to SEQ ID NO: 2021284
auggcucuggaaugacagc

SEQ ID NO: 2021286 - RNA, 19 nt, Artificial Sequence
  Description of Artificial Sequence: Synthetic oligonucleotide
  Sense strand starting at position 3803 of SEQ ID NO: 1881140
caggaaagcuuucuguucu

SEQ ID NO: 2021287 - RNA, 19 nt, Artificial Sequence
  Description of Artificial Sequence: Synthetic oligonucleotide
  Antisense strand to SEQ ID NO: 2021286
agaacagaaagcuuuccug

SEQ ID NO: 2021288 - RNA, 19 nt, Artificial Sequence
  Description of Artificial Sequence: Synthetic oligonucleotide
  Sense strand starting at position 3809 of SEQ ID NO: 1881140
agcuuucuguucuuuaaga

SEQ ID NO: 2021289 - RNA, 19 nt, Artificial Sequence
  Description of Artificial Sequence: Synthetic oligonucleotide
  Antisense strand to SEQ ID NO: 2021288
ucuuaaagaacagaaagcu

SEQ ID NO: 2021290 - RNA, 19 nt, Artificial Sequence
  Description of Artificial Sequence: Synthetic oligonucleotide
  Sense strand starting at position 3810 of SEQ ID NO: 1881140
gcuuucuguucuuuaagag

SEQ ID NO: 2021291 - RNA, 19 nt, Artificial Sequence
  Description of Artificial Sequence: Synthetic oligonucleotide
  Antisense strand to SEQ ID NO: 2021290
cucuuaaagaacagaaagc

SEQ ID NO: 2021292 - RNA, 19 nt, Artificial Sequence
  Description of Artificial Sequence: Synthetic oligonucleotide
  Sense strand starting at position 3811 of SEQ ID NO: 1881140
cuuucuguucuuuaagagu

SEQ ID NO: 2021293 - RNA, 19 nt, Artificial Sequence
  Description of Artificial Sequence: Synthetic oligonucleotide
  Antisense strand to SEQ ID NO: 2021292
acucuuaaagaacagaaag

SEQ ID NO: 2021294 - RNA, 19 nt, Artificial Sequence
  Description of Artificial Sequence: Synthetic oligonucleotide
  Sense strand starting at position 3820 of SEQ ID NO: 1881140
cuuuaagaguugccucuga

SEQ ID NO: 2021295 - RNA, 19 nt, Artificial Sequence
  Description of Artificial Sequence: Synthetic oligonucleotide
  Antisense strand to SEQ ID NO: 2021294
ucagaggcaacucuuaaag

SEQ ID NO: 2021296 - RNA, 19 nt, Artificial Sequence
  Description of Artificial Sequence: Synthetic oligonucleotide
  Sense strand starting at position 3868 of SEQ ID NO: 1881140
agggcugcugcuuaaauua

SEQ ID NO: 2021297 - RNA, 19 nt, Artificial Sequence
  Description of Artificial Sequence: Synthetic oligonucleotide
  Antisense strand to SEQ ID NO: 2021296
uaauuuaagcagcagcccu

SEQ ID NO: 2021298 - RNA, 19 nt, Artificial Sequence
  Description of Artificial Sequence: Synthetic oligonucleotide
  Sense strand starting at position 3892 of SEQ ID NO: 1881140
ccuaaauccuuaguaggaa

SEQ ID NO: 2021299 - RNA, 19 nt, Artificial Sequence
  Description of Artificial Sequence: Synthetic oligonucleotide
  Antisense strand to SEQ ID NO: 2021298
uuccuacuaaggauuuagg

SEQ ID NO: 2021300 - RNA, 19 nt, Artificial Sequence
  Description of Artificial Sequence: Synthetic oligonucleotide
  Sense strand starting at position 13 of SEQ ID NO: 1881141
ccuugacaucucuguuuga

SEQ ID NO: 2021301 - RNA, 19 nt, Artificial Sequence
  Description of Artificial Sequence: Synthetic oligonucleotide
  Antisense strand to SEQ ID NO: 2021300
ucaaacagagaugucaagg

SEQ ID NO: 2021302 - RNA, 19 nt, Artificial Sequence
  Description of Artificial Sequence: Synthetic oligonucleotide
  Sense strand starting at position 16 of SEQ ID NO: 1881141
ugacaucucuguuugacug

SEQ ID NO: 2021303 - RNA, 19 nt, Artificial Sequence
  Description of Artificial Sequence: Synthetic oligonucleotide
  Antisense strand to SEQ ID NO: 2021302
cagucaaacagagauguca

SEQ ID NO: 2021304 - RNA, 19 nt, Artificial Sequence
  Description of Artificial Sequence: Synthetic oligonucleotide
  Sense strand starting at position 91 of SEQ ID NO: 1881141
ucugguguuccauaagauu

SEQ ID NO: 2021305 - RNA, 19 nt, Artificial Sequence
  Description of Artificial Sequence: Synthetic oligonucleotide
  Antisense strand to SEQ ID NO: 2021304
aaucuuauggaacaccaga

SEQ ID NO: 2021306 - RNA, 19 nt, Artificial Sequence
  Description of Artificial Sequence: Synthetic oligonucleotide
  Sense strand starting at position 261 of SEQ ID NO: 1881141
ucaaguuucugucuaugag

SEQ ID NO: 2021307 - RNA, 19 nt, Artificial Sequence
  Description of Artificial Sequence: Synthetic oligonucleotide
  Antisense strand to SEQ ID NO: 2021306
cucauagacagaaacuuga

SEQ ID NO: 2021308 - RNA, 19 nt, Artificial Sequence
  Description of Artificial Sequence: Synthetic oligonucleotide
  Sense strand starting at position 262 of SEQ ID NO: 1881141
caaguuucugucuaugagu

SEQ ID NO: 2021309 - RNA, 19 nt, Artificial Sequence
  Description of Artificial Sequence: Synthetic oligonucleotide
  Antisense strand to SEQ ID NO: 2021308
acucauagacagaaacuug

SEQ ID NO: 2021310 - RNA, 19 nt, Artificial Sequence
  Description of Artificial Sequence: Synthetic oligonucleotide
  Sense strand starting at position 623 of SEQ ID NO: 1881141
ggcucaggagucuaaggau

SEQ ID NO: 2021311 - RNA, 19 nt, Artificial Sequence
  Description of Artificial Sequence: Synthetic oligonucleotide
  Antisense strand to SEQ ID NO: 2021310
auccuuagacuccugagcc

SEQ ID NO: 2021312 - RNA, 19 nt, Artificial Sequence
  Description of Artificial Sequence: Synthetic oligonucleotide
  Sense strand starting at position 1079 of SEQ ID NO: 1881141
uauauaugagccugugaaa

SEQ ID NO: 2021313 - RNA, 19 nt, Artificial Sequence
  Description of Artificial Sequence: Synthetic oligonucleotide
  Antisense strand to SEQ ID NO: 2021312
uuucacaggcucauauaua

SEQ ID NO: 2021314 - RNA, 19 nt, Artificial Sequence
  Description of Artificial Sequence: Synthetic oligonucleotide
  Sense strand starting at position 1131 of SEQ ID NO: 1881141
gugggacaagcauaucgua

SEQ ID NO: 2021315 - RNA, 19 nt, Artificial Sequence
  Description of Artificial Sequence: Synthetic oligonucleotide
  Antisense strand to SEQ ID NO: 2021314
uacgauaugcuugucccac

SEQ ID NO: 2021316 - RNA, 19 nt, Artificial Sequence
  Description of Artificial Sequence: Synthetic oligonucleotide
  Sense strand starting at position 1192 of SEQ ID NO: 1881141
gguaacaggcuuuaagcaa

SEQ ID NO: 2021317 - RNA, 19 nt, Artificial Sequence
  Description of Artificial Sequence: Synthetic oligonucleotide
  Antisense strand to SEQ ID NO: 2021316
uugcuuaaagccuguuacc

SEQ ID NO: 2021318 - RNA, 19 nt, Artificial Sequence
  Description of Artificial Sequence: Synthetic oligonucleotide
  Sense strand starting at position 1227 of SEQ ID NO: 1881141
aguagacauugggucuuaa

SEQ ID NO: 2021319 - RNA, 19 nt, Artificial Sequence
  Description of Artificial Sequence: Synthetic oligonucleotide
  Antisense strand to SEQ ID NO: 2021318
uuaagacccaaugucuacu

SEQ ID NO: 2021320 - RNA, 19 nt, Artificial Sequence
  Description of Artificial Sequence: Synthetic oligonucleotide
  Sense strand starting at position 1415 of SEQ ID NO: 1881141
gaggcauugcccuacugaa

SEQ ID NO: 2021321 - RNA, 19 nt, Artificial Sequence
  Description of Artificial Sequence: Synthetic oligonucleotide
  Antisense strand to SEQ ID NO: 2021320
uucaguagggcaaugccuc

SEQ ID NO: 2021322 - RNA, 19 nt, Artificial Sequence
  Description of Artificial Sequence: Synthetic oligonucleotide
  Sense strand starting at position 1457 of SEQ ID NO: 1881141
cuacauuucugcuuggcau

SEQ ID NO: 2021323 - RNA, 19 nt, Artificial Sequence
  Description of Artificial Sequence: Synthetic oligonucleotide
  Antisense strand to SEQ ID NO: 2021322
augccaagcagaaauguag

SEQ ID NO: 2021324 - RNA, 19 nt, Artificial Sequence
  Description of Artificial Sequence: Synthetic oligonucleotide
  Sense strand starting at position 1503 of SEQ ID NO: 1881141
cucuacugucaugacaagu

SEQ ID NO: 2021325 - RNA, 19 nt, Artificial Sequence
  Description of Artificial Sequence: Synthetic oligonucleotide
  Antisense strand to SEQ ID NO: 2021324
acuugucaugacaguagag

SEQ ID NO: 2021326 - RNA, 19 nt, Artificial Sequence
  Description of Artificial Sequence: Synthetic oligonucleotide
  Sense strand starting at position 1528 of SEQ ID NO: 1881141
cugugcugucacguuauca

SEQ ID NO: 2021327 - RNA, 19 nt, Artificial Sequence
  Description of Artificial Sequence: Synthetic oligonucleotide
  Antisense strand to SEQ ID NO: 2021326
ugauaacgugacagcacag

SEQ ID NO: 2021328 - RNA, 19 nt, Artificial Sequence
  Description of Artificial Sequence: Synthetic oligonucleotide
  Sense strand starting at position 1529 of SEQ ID NO: 1881141
ugugcugucacguuaucaa

SEQ ID NO: 2021329 - RNA, 19 nt, Artificial Sequence
  Description of Artificial Sequence: Synthetic oligonucleotide
  Antisense strand to SEQ ID NO: 2021328
uugauaacgugacagcaca

SEQ ID NO: 2021330 - RNA, 19 nt, Artificial Sequence
  Description of Artificial Sequence: Synthetic oligonucleotide
  Sense strand starting at position 1536 of SEQ ID NO: 1881141
ucacguuaucaaugacauu

SEQ ID NO: 2021331 - RNA, 19 nt, Artificial Sequence
  Description of Artificial Sequence: Synthetic oligonucleotide
  Antisense strand to SEQ ID NO: 2021330
aaugucauugauaacguga

SEQ ID NO: 2021332 - RNA, 19 nt, Artificial Sequence
  Description of Artificial Sequence: Synthetic oligonucleotide
  Sense strand starting at position 1602 of SEQ ID NO: 1881141
cuugcaagucagcagaauu

SEQ ID NO: 2021333 - RNA, 19 nt, Artificial Sequence
  Description of Artificial Sequence: Synthetic oligonucleotide
  Antisense strand to SEQ ID NO: 2021332
aauucugcugacuugcaag

SEQ ID NO: 2021334 - RNA, 19 nt, Artificial Sequence
  Description of Artificial Sequence: Synthetic oligonucleotide
  Sense strand starting at position 1978 of SEQ ID NO: 1881141
cauggccaggcugauaaau

SEQ ID NO: 2021335 - RNA, 19 nt, Artificial Sequence
  Description of Artificial Sequence: Synthetic oligonucleotide
  Antisense strand to SEQ ID NO: 2021334
auuuaucagccuggccaug

SEQ ID NO: 2021336 - RNA, 19 nt, Artificial Sequence
  Description of Artificial Sequence: Synthetic oligonucleotide
  Sense strand starting at position 2165 of SEQ ID NO: 1881141
cacagaguucuugagugug

SEQ ID NO: 2021337 - RNA, 19 nt, Artificial Sequence
  Description of Artificial Sequence: Synthetic oligonucleotide
  Antisense strand to SEQ ID NO: 2021336
cacacucaagaacucugug

SEQ ID NO: 2021338 - RNA, 19 nt, Artificial Sequence
  Description of Artificial Sequence: Synthetic oligonucleotide
  Sense strand starting at position 2167 of SEQ ID NO: 1881141
cagaguucuugagugugga

SEQ ID NO: 2021339 - RNA, 19 nt, Artificial Sequence
  Description of Artificial Sequence: Synthetic oligonucleotide
  Antisense strand to SEQ ID NO: 2021338
uccacacucaagaacucug

SEQ ID NO: 2021340 - RNA, 19 nt, Artificial Sequence
  Description of Artificial Sequence: Synthetic oligonucleotide
  Sense strand starting at position 2168 of SEQ ID NO: 1881141
agaguucuugaguguggac

SEQ ID NO: 2021341 - RNA, 19 nt, Artificial Sequence
  Description of Artificial Sequence: Synthetic oligonucleotide
  Antisense strand to SEQ ID NO: 2021340
guccacacucaagaacucu

SEQ ID NO: 2021342 - RNA, 19 nt, Artificial Sequence
  Description of Artificial Sequence: Synthetic oligonucleotide
  Sense strand starting at position 2615 of SEQ ID NO: 1881141
ugugaauaaugcuuccaca

SEQ ID NO: 2021343 - RNA, 19 nt, Artificial Sequence
  Description of Artificial Sequence: Synthetic oligonucleotide
  Antisense strand to SEQ ID NO: 2021342
uguggaagcauuauucaca

SEQ ID NO: 2021344 - RNA, 19 nt, Artificial Sequence
  Description of Artificial Sequence: Synthetic oligonucleotide
  Sense strand starting at position 2633 of SEQ ID NO: 1881141
aaacauuagugggcaauga

SEQ ID NO: 2021345 - RNA, 19 nt, Artificial Sequence
  Description of Artificial Sequence: Synthetic oligonucleotide
  Antisense strand to SEQ ID NO: 2021344
ucauugcccacuaauguuu

SEQ ID NO: 2021346 - RNA, 19 nt, Artificial Sequence
  Description of Artificial Sequence: Synthetic oligonucleotide
  Sense strand starting at position 2807 of SEQ ID NO: 1881141
ggaucagccagaggugaaa

SEQ ID NO: 2021347 - RNA, 19 nt, Artificial Sequence
  Description of Artificial Sequence: Synthetic oligonucleotide
  Antisense strand to SEQ ID NO: 2021346
uuucaccucuggcugaucc

SEQ ID NO: 2021348 - RNA, 19 nt, Artificial Sequence
  Description of Artificial Sequence: Synthetic oligonucleotide
  Sense strand starting at position 2953 of SEQ ID NO: 1881141
cugggucuuagaugaucua

SEQ ID NO: 2021349 - RNA, 19 nt, Artificial Sequence
  Description of Artificial Sequence: Synthetic oligonucleotide
  Antisense strand to SEQ ID NO: 2021348
uagaucaucuaagacccag

SEQ ID NO: 2021350 - RNA, 19 nt, Artificial Sequence
  Description of Artificial Sequence: Synthetic oligonucleotide
  Sense strand starting at position 2956 of SEQ ID NO: 1881141
ggucuuagaugaucuauug

SEQ ID NO: 2021351 - RNA, 19 nt, Artificial Sequence
  Description of Artificial Sequence: Synthetic oligonucleotide
  Antisense strand to SEQ ID NO: 2021350
caauagaucaucuaagacc

SEQ ID NO: 2021352 - RNA, 19 nt, Artificial Sequence
  Description of Artificial Sequence: Synthetic oligonucleotide
  Sense strand starting at position 3105 of SEQ ID NO: 1881141
gcaaauaaggucugaucug

SEQ ID NO: 2021353 - RNA, 19 nt, Artificial Sequence
  Description of Artificial Sequence: Synthetic oligonucleotide
  Antisense strand to SEQ ID NO: 2021352
cagaucagaccuuauuugc

SEQ ID NO: 2021354 - RNA, 19 nt, Artificial Sequence
  Description of Artificial Sequence: Synthetic oligonucleotide
  Sense strand starting at position 3128 of SEQ ID NO: 1881141
uucuguucuaaaggaggau

SEQ ID NO: 2021355 - RNA, 19 nt, Artificial Sequence
  Description of Artificial Sequence: Synthetic oligonucleotide
  Antisense strand to SEQ ID NO: 2021354
auccuccuuuagaacagaa

SEQ ID NO: 2021356 - RNA, 19 nt, Artificial Sequence
  Description of Artificial Sequence: Synthetic oligonucleotide
  Sense strand starting at position 3131 of SEQ ID NO: 1881141
uguucuaaaggaggauauu

SEQ ID NO: 2021357 - RNA, 19 nt, Artificial Sequence
  Description of Artificial Sequence: Synthetic oligonucleotide
  Antisense strand to SEQ ID NO: 2021356
aauauccuccuuuagaaca

SEQ ID NO: 2021358 - RNA, 19 nt, Artificial Sequence
  Description of Artificial Sequence: Synthetic oligonucleotide
  Sense strand starting at position 3193 of SEQ ID NO: 1881141
gugggucaagggugaguaa

SEQ ID NO: 2021359 - RNA, 19 nt, Artificial Sequence
  Description of Artificial Sequence: Synthetic oligonucleotide
  Antisense strand to SEQ ID NO: 2021358
uuacucacccuugacccac

SEQ ID NO: 2021360 - RNA, 19 nt, Artificial Sequence
  Description of Artificial Sequence: Synthetic oligonucleotide
  Sense strand starting at position 3447 of SEQ ID NO: 1881141
cacgcagggccauaaugau

SEQ ID NO: 2021361 - RNA, 19 nt, Artificial Sequence
  Description of Artificial Sequence: Synthetic oligonucleotide
  Antisense strand to SEQ ID NO: 2021360
aucauuauggcccugcgug

SEQ ID NO: 2021362 - RNA, 19 nt, Artificial Sequence
  Description of Artificial Sequence: Synthetic oligonucleotide
  Sense strand starting at position 3644 of SEQ ID NO: 1881141
acugcaagacuuuaugauu

SEQ ID NO: 2021363 - RNA, 19 nt, Artificial Sequence
  Description of Artificial Sequence: Synthetic oligonucleotide
  Antisense strand to SEQ ID NO: 2021362
aaucauaaagucuugcagu

SEQ ID NO: 2021364 - RNA, 19 nt, Artificial Sequence
  Description of Artificial Sequence: Synthetic oligonucleotide
  Sense strand starting at position 3663 of SEQ ID NO: 1881141
cucaaagucuacuuaggga

SEQ ID NO: 2021365 - RNA, 19 nt, Artificial Sequence
  Description of Artificial Sequence: Synthetic oligonucleotide
  Antisense strand to SEQ ID NO: 2021364
ucccuaaguagacuuugag

SEQ ID NO: 2021366 - RNA, 19 nt, Artificial Sequence
  Description of Artificial Sequence: Synthetic oligonucleotide
  Sense strand starting at position 3692 of SEQ ID NO: 1881141
uacagagucaugggauguu

SEQ ID NO: 2021367 - RNA, 19 nt, Artificial Sequence
  Description of Artificial Sequence: Synthetic oligonucleotide
  Antisense strand to SEQ ID NO: 2021366
aacaucccaugacucugua

SEQ ID NO: 2021368 - RNA, 19 nt, Artificial Sequence
  Description of Artificial Sequence: Synthetic oligonucleotide
  Sense strand starting at position 3695 of SEQ ID NO: 1881141
agagucaugggauguuaga

SEQ ID NO: 2021369 - RNA, 19 nt, Artificial Sequence
  Description of Artificial Sequence: Synthetic oligonucleotide
  Antisense strand to SEQ ID NO: 2021368
ucuaacaucccaugacucu

SEQ ID NO: 2021370 - RNA, 19 nt, Artificial Sequence
  Description of Artificial Sequence: Synthetic oligonucleotide
  Sense strand starting at position 3701 of SEQ ID NO: 1881141
augggauguuagaguugga

SEQ ID NO: 2021371 - RNA, 19 nt, Artificial Sequence
  Description of Artificial Sequence: Synthetic oligonucleotide
  Antisense strand to SEQ ID NO: 2021370
uccaacucuaacaucccau

SEQ ID NO: 2021372 - RNA, 19 nt, Artificial Sequence
  Description of Artificial Sequence: Synthetic oligonucleotide
  Sense strand starting at position 3704 of SEQ ID NO: 1881141
ggauguuagaguuggaaga

SEQ ID NO: 2021373 - RNA, 19 nt, Artificial Sequence
  Description of Artificial Sequence: Synthetic oligonucleotide
  Antisense strand to SEQ ID NO: 2021372
ucuuccaacucuaacaucc

SEQ ID NO: 2021374 - RNA, 19 nt, Artificial Sequence
  Description of Artificial Sequence: Synthetic oligonucleotide
  Sense strand starting at position 3705 of SEQ ID NO: 1881141
gauguuagaguuggaagaa

SEQ ID NO: 2021375 - RNA, 19 nt, Artificial Sequence
  Description of Artificial Sequence: Synthetic oligonucleotide
  Antisense strand to SEQ ID NO: 2021374
uucuuccaacucuaacauc

SEQ ID NO: 2021376 - RNA, 19 nt, Artificial Sequence
  Description of Artificial Sequence: Synthetic oligonucleotide
  Sense strand starting at position 3851 of SEQ ID NO: 1881141
ccagaacuguuucccaaga

SEQ ID NO: 2021377 - RNA, 19 nt, Artificial Sequence
  Description of Artificial Sequence: Synthetic oligonucleotide
  Antisense strand to SEQ ID NO: 2021376
ucuugggaaacaguucugg

SEQ ID NO: 2021378 - RNA, 19 nt, Artificial Sequence
  Description of Artificial Sequence: Synthetic oligonucleotide
  Sense strand starting at position 3875 of SEQ ID NO: 1881141
ccugaucugcuaggaagau

SEQ ID NO: 2021379 - RNA, 19 nt, Artificial Sequence
  Description of Artificial Sequence: Synthetic oligonucleotide
  Antisense strand to SEQ ID NO: 2021378
aucuuccuagcagaucagg

SEQ ID NO: 2021380 - RNA, 19 nt, Artificial Sequence
  Description of Artificial Sequence: Synthetic oligonucleotide
  Sense strand starting at position 261 of SEQ ID NO: 1881142
aacuguuggcccuguauuu

SEQ ID NO: 2021381 - RNA, 19 nt, Artificial Sequence
  Description of Artificial Sequence: Synthetic oligonucleotide
  Antisense strand to SEQ ID NO: 2021380
aaauacagggccaacaguu

SEQ ID NO: 2021382 - RNA, 19 nt, Artificial Sequence
  Description of Artificial Sequence: Synthetic oligonucleotide
  Sense strand starting at position 425 of SEQ ID NO: 1881142
gaguuccugcaaggaaaua

SEQ ID NO: 2021383 - RNA, 19 nt, Artificial Sequence
  Description of Artificial Sequence: Synthetic oligonucleotide
  Antisense strand to SEQ ID NO: 2021382
uauuuccuugcaggaacuc

SEQ ID NO: 2021384 - RNA, 19 nt, Artificial Sequence
  Description of Artificial Sequence: Synthetic oligonucleotide
  Sense strand starting at position 490 of SEQ ID NO: 1881142
cggguucugcccaguggaa

SEQ ID NO: 2021385 - RNA, 19 nt, Artificial Sequence
  Description of Artificial Sequence: Synthetic oligonucleotide
  Antisense strand to SEQ ID NO: 2021384
uuccacugggcagaacccg

SEQ ID NO: 2021386 - RNA, 19 nt, Artificial Sequence
  Description of Artificial Sequence: Synthetic oligonucleotide
  Sense strand starting at position 552 of SEQ ID NO: 1881142
agaaacuucccaggaagca

SEQ ID NO: 2021387 - RNA, 19 nt, Artificial Sequence
  Description of Artificial Sequence: Synthetic oligonucleotide
  Antisense strand to SEQ ID NO: 2021386
ugcuuccugggaaguuucu

SEQ ID NO: 2021388 - RNA, 19 nt, Artificial Sequence
  Description of Artificial Sequence: Synthetic oligonucleotide
  Sense strand starting at position 675 of SEQ ID NO: 1881142
uugaaugacuguguggaga

SEQ ID NO: 2021389 - RNA, 19 nt, Artificial Sequence
  Description of Artificial Sequence: Synthetic oligonucleotide
  Antisense strand to SEQ ID NO: 2021388
ucuccacacagucauucaa

SEQ ID NO: 2021390 - RNA, 19 nt, Artificial Sequence
  Description of Artificial Sequence: Synthetic oligonucleotide
  Sense strand starting at position 721 of SEQ ID NO: 1881142
cccuguccugagcaagaaa

SEQ ID NO: 2021391 - RNA, 19 nt, Artificial Sequence
  Description of Artificial Sequence: Synthetic oligonucleotide
  Antisense strand to SEQ ID NO: 2021390
uuucuugcucaggacaggg

SEQ ID NO: 2021392 - RNA, 19 nt, Artificial Sequence
  Description of Artificial Sequence: Synthetic oligonucleotide
  Sense strand starting at position 896 of SEQ ID NO: 1881142
cacauauucgguuaauagc

SEQ ID NO: 2021393 - RNA, 19 nt, Artificial Sequence
  Description of Artificial Sequence: Synthetic oligonucleotide
  Antisense strand to SEQ ID NO: 2021392
gcuauuaaccgaauaugug

SEQ ID NO: 2021394 - RNA, 19 nt, Artificial Sequence
  Description of Artificial Sequence: Synthetic oligonucleotide
  Sense strand starting at position 983 of SEQ ID NO: 1881142
guguguuccacagaacacu

SEQ ID NO: 2021395 - RNA, 19 nt, Artificial Sequence
  Description of Artificial Sequence: Synthetic oligonucleotide
  Antisense strand to SEQ ID NO: 2021394
aguguucuguggaacacac

SEQ ID NO: 2021396 - RNA, 19 nt, Artificial Sequence
  Description of Artificial Sequence: Synthetic oligonucleotide
  Sense strand starting at position 1112 of SEQ ID NO: 1881142
ugucaccaugcucaugaua

SEQ ID NO: 2021397 - RNA, 19 nt, Artificial Sequence
  Description of Artificial Sequence: Synthetic oligonucleotide
  Antisense strand to SEQ ID NO: 2021396
uaucaugagcauggugaca

SEQ ID NO: 2021398 - RNA, 19 nt, Artificial Sequence
  Description of Artificial Sequence: Synthetic oligonucleotide
  Sense strand starting at position 1123 of SEQ ID NO: 1881142
ucaugauaccugugaauua

SEQ ID NO: 2021399 - RNA, 19 nt, Artificial Sequence
  Description of Artificial Sequence: Synthetic oligonucleotide
  Antisense strand to SEQ ID NO: 2021398
uaauucacagguaucauga

SEQ ID NO: 2021400 - RNA, 19 nt, Artificial Sequence
  Description of Artificial Sequence: Synthetic oligonucleotide
  Sense strand starting at position 1203 of SEQ ID NO: 1881142
cacagagcugauugugaga

SEQ ID NO: 2021401 - RNA, 19 nt, Artificial Sequence
  Description of Artificial Sequence: Synthetic oligonucleotide
  Antisense strand to SEQ ID NO: 2021400
ucucacaaucagcucugug

SEQ ID NO: 2021402 - RNA, 19 nt, Artificial Sequence
  Description of Artificial Sequence: Synthetic oligonucleotide
  Sense strand starting at position 1518 of SEQ ID NO: 1881142
cagauaugccacgggaaga

SEQ ID NO: 2021403 - RNA, 19 nt, Artificial Sequence
  Description of Artificial Sequence: Synthetic oligonucleotide
  Antisense strand to SEQ ID NO: 2021402
ucuucccguggcauaucug

SEQ ID NO: 2021404 - RNA, 19 nt, Artificial Sequence
  Description of Artificial Sequence: Synthetic oligonucleotide
  Sense strand starting at position 1557 of SEQ ID NO: 1881142
ucuguaaaccaaggaaugu

SEQ ID NO: 2021405 - RNA, 19 nt, Artificial Sequence
  Description of Artificial Sequence: Synthetic oligonucleotide
  Antisense strand to SEQ ID NO: 2021404
acauuccuugguuuacaga

SEQ ID NO: 2021406 - RNA, 19 nt, Artificial Sequence
  Description of Artificial Sequence: Synthetic oligonucleotide
  Sense strand starting at position 1616 of SEQ ID NO: 1881142
gaaggauucucucccggag

SEQ ID NO: 2021407 - RNA, 19 nt, Artificial Sequence
  Description of Artificial Sequence: Synthetic oligonucleotide
  Antisense strand to SEQ ID NO: 2021406
cuccgggagagaauccuuc

SEQ ID NO: 2021408 - RNA, 19 nt, Artificial Sequence
  Description of Artificial Sequence: Synthetic oligonucleotide
  Sense strand starting at position 1802 of SEQ ID NO: 1881142
aaaguuucugggcaauguu

SEQ ID NO: 2021409 - RNA, 19 nt, Artificial Sequence
  Description of Artificial Sequence: Synthetic oligonucleotide
  Antisense strand to SEQ ID NO: 2021408
aacauugcccagaaacuuu

SEQ ID NO: 2021410 - RNA, 19 nt, Artificial Sequence
  Description of Artificial Sequence: Synthetic oligonucleotide
  Sense strand starting at position 2090 of SEQ ID NO: 1881142
acacuaaauguuuggucua

SEQ ID NO: 2021411 - RNA, 19 nt, Artificial Sequence
  Description of Artificial Sequence: Synthetic oligonucleotide
  Antisense strand to SEQ ID NO: 2021410
uagaccaaacauuuagugu

SEQ ID NO: 2021412 - RNA, 19 nt, Artificial Sequence
  Description of Artificial Sequence: Synthetic oligonucleotide
  Sense strand starting at position 2102 of SEQ ID NO: 1881142
uggucuaguaccuggaaga

SEQ ID NO: 2021413 - RNA, 19 nt, Artificial Sequence
  Description of Artificial Sequence: Synthetic oligonucleotide
  Antisense strand to SEQ ID NO: 2021412
ucuuccagguacuagacca

SEQ ID NO: 2021414 - RNA, 19 nt, Artificial Sequence
  Description of Artificial Sequence: Synthetic oligonucleotide
  Sense strand starting at position 2103 of SEQ ID NO: 1881142
ggucuaguaccuggaagau

SEQ ID NO: 2021415 - RNA, 19 nt, Artificial Sequence
  Description of Artificial Sequence: Synthetic oligonucleotide
  Antisense strand to SEQ ID NO: 2021414
aucuuccagguacuagacc

SEQ ID NO: 2021416 - RNA, 19 nt, Artificial Sequence
  Description of Artificial Sequence: Synthetic oligonucleotide
  Sense strand starting at position 2116 of SEQ ID NO: 1881142
gaagauacccaguauccgu

SEQ ID NO: 2021417 - RNA, 19 nt, Artificial Sequence
  Description of Artificial Sequence: Synthetic oligonucleotide
  Antisense strand to SEQ ID NO: 2021416
acggauacuggguaucuuc

SEQ ID NO: 2021418 - RNA, 19 nt, Artificial Sequence
  Description of Artificial Sequence: Synthetic oligonucleotide
  Sense strand starting at position 2138 of SEQ ID NO: 1881142
uuugaaauuugcgcaagca

SEQ ID NO: 2021419 - RNA, 19 nt, Artificial Sequence
  Description of Artificial Sequence: Synthetic oligonucleotide
  Antisense strand to SEQ ID NO: 2021418
ugcuugcgcaaauuucaaa

SEQ ID NO: 2021420 - RNA, 19 nt, Artificial Sequence
  Description of Artificial Sequence: Synthetic oligonucleotide
  Sense strand starting at position 2212 of SEQ ID NO: 1881142
ugggcaauuugcucagucu

SEQ ID NO: 2021421 - RNA, 19 nt, Artificial Sequence
  Description of Artificial Sequence: Synthetic oligonucleotide
  Antisense strand to SEQ ID NO: 2021420
agacugagcaaauugccca

SEQ ID NO: 2021422 - RNA, 19 nt, Artificial Sequence
  Description of Artificial Sequence: Synthetic oligonucleotide
  Sense strand starting at position 2303 of SEQ ID NO: 1881142
guuagaaaucgugauucua

SEQ ID NO: 2021423 - RNA, 19 nt, Artificial Sequence
  Description of Artificial Sequence: Synthetic oligonucleotide
  Antisense strand to SEQ ID NO: 2021422
uagaaucacgauuucuaac

SEQ ID NO: 2021424 - RNA, 19 nt, Artificial Sequence
  Description of Artificial Sequence: Synthetic oligonucleotide
  Sense strand starting at position 2305 of SEQ ID NO: 1881142
uagaaaucgugauucuaaa

SEQ ID NO: 2021425 - RNA, 19 nt, Artificial Sequence
  Description of Artificial Sequence: Synthetic oligonucleotide
  Antisense strand to SEQ ID NO: 2021424
uuuagaaucacgauuucua

SEQ ID NO: 2021426 - RNA, 19 nt, Artificial Sequence
  Description of Artificial Sequence: Synthetic oligonucleotide
  Sense strand starting at position 2332 of SEQ ID NO: 1881142
aaaugagcacguuaucauu

SEQ ID NO: 2021427 - RNA, 19 nt, Artificial Sequence
  Description of Artificial Sequence: Synthetic oligonucleotide
  Antisense strand to SEQ ID NO: 2021426
aaugauaacgugcucauuu

SEQ ID NO: 2021428 - RNA, 19 nt, Artificial Sequence
  Description of Artificial Sequence: Synthetic oligonucleotide
  Sense strand starting at position 2344 of SEQ ID NO: 1881142
uaucauugugaaugaguga

SEQ ID NO: 2021429 - RNA, 19 nt, Artificial Sequence
  Description of Artificial Sequence: Synthetic oligonucleotide
  Antisense strand to SEQ ID NO: 2021428
ucacucauucacaaugaua

SEQ ID NO: 2021430 - RNA, 19 nt, Artificial Sequence
  Description of Artificial Sequence: Synthetic oligonucleotide
  Sense strand starting at position 2353 of SEQ ID NO: 1881142
gaaugagugaaccagcgau

SEQ ID NO: 2021431 - RNA, 19 nt, Artificial Sequence
  Description of Artificial Sequence: Synthetic oligonucleotide
  Antisense strand to SEQ ID NO: 2021430
aucgcugguucacucauuc

SEQ ID NO: 2021432 - RNA, 19 nt, Artificial Sequence
  Description of Artificial Sequence: Synthetic oligonucleotide
  Sense strand starting at position 2357 of SEQ ID NO: 1881142
gagugaaccagcgauguua

SEQ ID NO: 2021433 - RNA, 19 nt, Artificial Sequence
  Description of Artificial Sequence: Synthetic oligonucleotide
  Antisense strand to SEQ ID NO: 2021432
uaacaucgcugguucacuc

SEQ ID NO: 2021434 - RNA, 19 nt, Artificial Sequence
  Description of Artificial Sequence: Synthetic oligonucleotide
  Sense strand starting at position 2402 of SEQ ID NO: 1881142
aacagauguguuuaugguu

SEQ ID NO: 2021435 - RNA, 19 nt, Artificial Sequence
  Description of Artificial Sequence: Synthetic oligonucleotide
  Antisense strand to SEQ ID NO: 2021434
aaccauaaacacaucuguu

SEQ ID NO: 2021436 - RNA, 19 nt, Artificial Sequence
  Description of Artificial Sequence: Synthetic oligonucleotide
  Sense strand starting at position 2408 of SEQ ID NO: 1881142
uguguuuaugguuauggaa

SEQ ID NO: 2021437 - RNA, 19 nt, Artificial Sequence
  Description of Artificial Sequence: Synthetic oligonucleotide
  Antisense strand to SEQ ID NO: 2021436
uuccauaaccauaaacaca

SEQ ID NO: 2021438 - RNA, 19 nt, Artificial Sequence
  Description of Artificial Sequence: Synthetic oligonucleotide
  Sense strand starting at position 2415 of SEQ ID NO: 1881142
augguuauggaauguugau

SEQ ID NO: 2021439 - RNA, 19 nt, Artificial Sequence
  Description of Artificial Sequence: Synthetic oligonucleotide
  Antisense strand to SEQ ID NO: 2021438
aucaacauuccauaaccau

SEQ ID NO: 2021440 - RNA, 19 nt, Artificial Sequence
  Description of Artificial Sequence: Synthetic oligonucleotide
  Sense strand starting at position 2541 of SEQ ID NO: 1881142
cuuacagagcaguaaacua

SEQ ID NO: 2021441 - RNA, 19 nt, Artificial Sequence
  Description of Artificial Sequence: Synthetic oligonucleotide
  Antisense strand to SEQ ID NO: 2021440
uaguuuacugcucuguaag

SEQ ID NO: 2021442 - RNA, 19 nt, Artificial Sequence
  Description of Artificial Sequence: Synthetic oligonucleotide
  Sense strand starting at position 2988 of SEQ ID NO: 1881142
gugaauaaggaaugucuga

SEQ ID NO: 2021443 - RNA, 19 nt, Artificial Sequence
  Description of Artificial Sequence: Synthetic oligonucleotide
  Antisense strand to SEQ ID NO: 2021442
ucagacauuccuuauucac

SEQ ID NO: 2021444 - RNA, 19 nt, Artificial Sequence
  Description of Artificial Sequence: Synthetic oligonucleotide
  Sense strand starting at position 3107 of SEQ ID NO: 1881142
cuaagccuauuccuggaaa

SEQ ID NO: 2021445 - RNA, 19 nt, Artificial Sequence
  Description of Artificial Sequence: Synthetic oligonucleotide
  Antisense strand to SEQ ID NO: 2021444
uuuccaggaauaggcuuag

SEQ ID NO: 2021446 - RNA, 19 nt, Artificial Sequence
  Description of Artificial Sequence: Synthetic oligonucleotide
  Sense strand starting at position 3625 of SEQ ID NO: 1881142
gagaucuaacccuggugca

SEQ ID NO: 2021447 - RNA, 19 nt, Artificial Sequence
  Description of Artificial Sequence: Synthetic oligonucleotide
  Antisense strand to SEQ ID NO: 2021446
ugcaccaggguuagaucuc

SEQ ID NO: 2021448 - RNA, 19 nt, Artificial Sequence
  Description of Artificial Sequence: Synthetic oligonucleotide
  Sense strand starting at position 3733 of SEQ ID NO: 1881142
gggcuaucaggaggcuuaa

SEQ ID NO: 2021449 - RNA, 19 nt, Artificial Sequence
  Description of Artificial Sequence: Synthetic oligonucleotide
  Antisense strand to SEQ ID NO: 2021448
uuaagccuccugauagccc

SEQ ID NO: 2021450 - RNA, 19 nt, Artificial Sequence
  Description of Artificial Sequence: Synthetic oligonucleotide
  Sense strand starting at position 3755 of SEQ ID NO: 1881142
aggugaugucugagcugug

SEQ ID NO: 2021451 - RNA, 19 nt, Artificial Sequence
  Description of Artificial Sequence: Synthetic oligonucleotide
  Antisense strand to SEQ ID NO: 2021450
cacagcucagacaucaccu

SEQ ID NO: 2021452 - RNA, 19 nt, Artificial Sequence
  Description of Artificial Sequence: Synthetic oligonucleotide
  Sense strand starting at position 3789 of SEQ ID NO: 1881142
uuaguuuggguugaugcaa

SEQ ID NO: 2021453 - RNA, 19 nt, Artificial Sequence
  Description of Artificial Sequence: Synthetic oligonucleotide
  Antisense strand to SEQ ID NO: 2021452
uugcaucaacccaaacuaa

SEQ ID NO: 2021454 - RNA, 19 nt, Artificial Sequence
  Description of Artificial Sequence: Synthetic oligonucleotide
  Sense strand starting at position 3825 of SEQ ID NO: 1881142
cuugauaugcuuuaauagc

SEQ ID NO: 2021455 - RNA, 19 nt, Artificial Sequence
  Description of Artificial Sequence: Synthetic oligonucleotide
  Antisense strand to SEQ ID NO: 2021454
gcuauuaaagcauaucaag

SEQ ID NO: 2021456 - RNA, 19 nt, Artificial Sequence
  Description of Artificial Sequence: Synthetic oligonucleotide
  Sense strand starting at position 3870 of SEQ ID NO: 1881142
gcgcaaggcccuguuauau

SEQ ID NO: 2021457 - RNA, 19 nt, Artificial Sequence
  Description of Artificial Sequence: Synthetic oligonucleotide
  Antisense strand to SEQ ID NO: 2021456
auauaacagggccuugcgc

SEQ ID NO: 2021458 - RNA, 19 nt, Artificial Sequence
  Description of Artificial Sequence: Synthetic oligonucleotide
  Sense strand starting at position 3933 of SEQ ID NO: 1881142
ugaggaaugcacuguuauc

SEQ ID NO: 2021459 - RNA, 19 nt, Artificial Sequence
  Description of Artificial Sequence: Synthetic oligonucleotide
  Antisense strand to SEQ ID NO: 2021458
gauaacagugcauuccuca

SEQ ID NO: 2021460 - RNA, 19 nt, Artificial Sequence
  Description of Artificial Sequence: Synthetic oligonucleotide
  Sense strand starting at position 219 of SEQ ID NO: 1881143
uacuaacgacuugaguuua

SEQ ID NO: 2021461 - RNA, 19 nt, Artificial Sequence
  Description of Artificial Sequence: Synthetic oligonucleotide
  Antisense strand to SEQ ID NO: 2021460
uaaacucaagucguuagua

SEQ ID NO: 2021462 - RNA, 19 nt, Artificial Sequence
  Description of Artificial Sequence: Synthetic oligonucleotide
  Sense strand starting at position 224 of SEQ ID NO: 1881143
acgacuugaguuuaccuau

SEQ ID NO: 2021463 - RNA, 19 nt, Artificial Sequence
  Description of Artificial Sequence: Synthetic oligonucleotide
  Antisense strand to SEQ ID NO: 2021462
auagguaaacucaagucgu

SEQ ID NO: 2021464 - RNA, 19 nt, Artificial Sequence
  Description of Artificial Sequence: Synthetic oligonucleotide
  Sense strand starting at position 362 of SEQ ID NO: 1881143
gauaacugugcuuacaaug

SEQ ID NO: 2021465 - RNA, 19 nt, Artificial Sequence
  Description of Artificial Sequence: Synthetic oligonucleotide
  Antisense strand to SEQ ID NO: 2021464
cauuguaagcacaguuauc

SEQ ID NO: 2021466 - RNA, 19 nt, Artificial Sequence
  Description of Artificial Sequence: Synthetic oligonucleotide
  Sense strand starting at position 389 of SEQ ID NO: 1881143
uguuaaaggcacuagcaau

SEQ ID NO: 2021467 - RNA, 19 nt, Artificial Sequence
  Description of Artificial Sequence: Synthetic oligonucleotide
  Antisense strand to SEQ ID NO: 2021466
auugcuagugccuuuaaca

SEQ ID NO: 2021468 - RNA, 19 nt, Artificial Sequence
  Description of Artificial Sequence: Synthetic oligonucleotide
  Sense strand starting at position 429 of SEQ ID NO: 1881143
cagagauguccguaaggaa

SEQ ID NO: 2021469 - RNA, 19 nt, Artificial Sequence
  Description of Artificial Sequence: Synthetic oligonucleotide
  Antisense strand to SEQ ID NO: 2021468
uuccuuacggacaucucug

SEQ ID NO: 2021470 - RNA, 19 nt, Artificial Sequence
  Description of Artificial Sequence: Synthetic oligonucleotide
  Sense strand starting at position 654 of SEQ ID NO: 1881143
cccuuaauguuucuagaga

SEQ ID NO: 2021471 - RNA, 19 nt, Artificial Sequence
  Description of Artificial Sequence: Synthetic oligonucleotide
  Antisense strand to SEQ ID NO: 2021470
ucucuagaaacauuaaggg

SEQ ID NO: 2021472 - RNA, 19 nt, Artificial Sequence
  Description of Artificial Sequence: Synthetic oligonucleotide
  Sense strand starting at position 975 of SEQ ID NO: 1881143
auagcaauacugcaaguau

SEQ ID NO: 2021473 - RNA, 19 nt, Artificial Sequence
  Description of Artificial Sequence: Synthetic oligonucleotide
  Antisense strand to SEQ ID NO: 2021472
auacuugcaguauugcuau

SEQ ID NO: 2021474 - RNA, 19 nt, Artificial Sequence
  Description of Artificial Sequence: Synthetic oligonucleotide
  Sense strand starting at position 995 of SEQ ID NO: 1881143
gcuggugucagagaagaaa

SEQ ID NO: 2021475 - RNA, 19 nt, Artificial Sequence
  Description of Artificial Sequence: Synthetic oligonucleotide
  Antisense strand to SEQ ID NO: 2021474
uuucuucucugacaccagc

SEQ ID NO: 2021476 - RNA, 19 nt, Artificial Sequence
  Description of Artificial Sequence: Synthetic oligonucleotide
  Sense strand starting at position 1017 of SEQ ID NO: 1881143
gcuugaugagccuugugcu

SEQ ID NO: 2021477 - RNA, 19 nt, Artificial Sequence
  Description of Artificial Sequence: Synthetic oligonucleotide
  Antisense strand to SEQ ID NO: 2021476
agcacaaggcucaucaagc

SEQ ID NO: 2021478 - RNA, 19 nt, Artificial Sequence
  Description of Artificial Sequence: Synthetic oligonucleotide
  Sense strand starting at position 1065 of SEQ ID NO: 1881143
ggacaaugcagcugacaga

SEQ ID NO: 2021479 - RNA, 19 nt, Artificial Sequence
  Description of Artificial Sequence: Synthetic oligonucleotide
  Antisense strand to SEQ ID NO: 2021478
ucugucagcugcauugucc

SEQ ID NO: 2021480 - RNA, 19 nt, Artificial Sequence
  Description of Artificial Sequence: Synthetic oligonucleotide
  Sense strand starting at position 1118 of SEQ ID NO: 1881143
aggaacgugggaugugaaa

SEQ ID NO: 2021481 - RNA, 19 nt, Artificial Sequence
  Description of Artificial Sequence: Synthetic oligonucleotide
  Antisense strand to SEQ ID NO: 2021480
uuucacaucccacguuccu

SEQ ID NO: 2021482 - RNA, 19 nt, Artificial Sequence
  Description of Artificial Sequence: Synthetic oligonucleotide
  Sense strand starting at position 1450 of SEQ ID NO: 1881143
cuuauaacucagcauguga

SEQ ID NO: 2021483 - RNA, 19 nt, Artificial Sequence
  Description of Artificial Sequence: Synthetic oligonucleotide
  Antisense strand to SEQ ID NO: 2021482
ucacaugcugaguuauaag

SEQ ID NO: 2021484 - RNA, 19 nt, Artificial Sequence
  Description of Artificial Sequence: Synthetic oligonucleotide
  Sense strand starting at position 1458 of SEQ ID NO: 1881143
ucagcaugugagcaaauaa

SEQ ID NO: 2021485 - RNA, 19 nt, Artificial Sequence
  Description of Artificial Sequence: Synthetic oligonucleotide
  Antisense strand to SEQ ID NO: 2021484
uuauuugcucacaugcuga

SEQ ID NO: 2021486 - RNA, 19 nt, Artificial Sequence
  Description of Artificial Sequence: Synthetic oligonucleotide
  Sense strand starting at position 2041 of SEQ ID NO: 1881143
uaauuagacgaaugucuau

SEQ ID NO: 2021487 - RNA, 19 nt, Artificial Sequence
  Description of Artificial Sequence: Synthetic oligonucleotide
  Antisense strand to SEQ ID NO: 2021486
auagacauucgucuaauua

SEQ ID NO: 2021488 - RNA, 19 nt, Artificial Sequence
  Description of Artificial Sequence: Synthetic oligonucleotide
  Sense strand starting at position 2044 of SEQ ID NO: 1881143
uuagacgaaugucuauaau

SEQ ID NO: 2021489 - RNA, 19 nt, Artificial Sequence
  Description of Artificial Sequence: Synthetic oligonucleotide
  Antisense strand to SEQ ID NO: 2021488
auuauagacauucgucuaa

SEQ ID NO: 2021490 - RNA, 19 nt, Artificial Sequence
  Description of Artificial Sequence: Synthetic oligonucleotide
  Sense strand starting at position 2047 of SEQ ID NO: 1881143
gacgaaugucuauaaugua

SEQ ID NO: 2021491 - RNA, 19 nt, Artificial Sequence
  Description of Artificial Sequence: Synthetic oligonucleotide
  Antisense strand to SEQ ID NO: 2021490
uacauuauagacauucguc

SEQ ID NO: 2021492 - RNA, 19 nt, Artificial Sequence
  Description of Artificial Sequence: Synthetic oligonucleotide
  Sense strand starting at position 2054 of SEQ ID NO: 1881143
gucuauaauguauaucagu

SEQ ID NO: 2021493 - RNA, 19 nt, Artificial Sequence
  Description of Artificial Sequence: Synthetic oligonucleotide
  Antisense strand to SEQ ID NO: 2021492
acugauauacauuauagac

SEQ ID NO: 2021494 - RNA, 19 nt, Artificial Sequence
  Description of Artificial Sequence: Synthetic oligonucleotide
  Sense strand starting at position 2147 of SEQ ID NO: 1881143
gaggaaacacucgguggua

SEQ ID NO: 2021495 - RNA, 19 nt, Artificial Sequence
  Description of Artificial Sequence: Synthetic oligonucleotide
  Antisense strand to SEQ ID NO: 2021494
uaccaccgaguguuuccuc

SEQ ID NO: 2021496 - RNA, 19 nt, Artificial Sequence
  Description of Artificial Sequence: Synthetic oligonucleotide
  Sense strand starting at position 2148 of SEQ ID NO: 1881143
aggaaacacucggugguaa

SEQ ID NO: 2021497 - RNA, 19 nt, Artificial Sequence
  Description of Artificial Sequence: Synthetic oligonucleotide
  Antisense strand to SEQ ID NO: 2021496
uuaccaccgaguguuuccu

SEQ ID NO: 2021498 - RNA, 19 nt, Artificial Sequence
  Description of Artificial Sequence: Synthetic oligonucleotide
  Sense strand starting at position 2149 of SEQ ID NO: 1881143
ggaaacacucggugguaaa

SEQ ID NO: 2021499 - RNA, 19 nt, Artificial Sequence
  Description of Artificial Sequence: Synthetic oligonucleotide
  Antisense strand to SEQ ID NO: 2021498
uuuaccaccgaguguuucc

SEQ ID NO: 2021500 - RNA, 19 nt, Artificial Sequence
  Description of Artificial Sequence: Synthetic oligonucleotide
  Sense strand starting at position 2372 of SEQ ID NO: 1881143
ugaaaucauguguauaauc

SEQ ID NO: 2021501 - RNA, 19 nt, Artificial Sequence
  Description of Artificial Sequence: Synthetic oligonucleotide
  Antisense strand to SEQ ID NO: 2021500
gauuauacacaugauuuca

SEQ ID NO: 2021502 - RNA, 19 nt, Artificial Sequence
  Description of Artificial Sequence: Synthetic oligonucleotide
  Sense strand starting at position 2456 of SEQ ID NO: 1881143
gcuaaaugucaauggaagg

SEQ ID NO: 2021503 - RNA, 19 nt, Artificial Sequence
  Description of Artificial Sequence: Synthetic oligonucleotide
  Antisense strand to SEQ ID NO: 2021502
ccuuccauugacauuuagc

SEQ ID NO: 2021504 - RNA, 19 nt, Artificial Sequence
  Description of Artificial Sequence: Synthetic oligonucleotide
  Sense strand starting at position 2623 of SEQ ID NO: 1881143
auccaaagacagugugaua

SEQ ID NO: 2021505 - RNA, 19 nt, Artificial Sequence
  Description of Artificial Sequence: Synthetic oligonucleotide
  Antisense strand to SEQ ID NO: 2021504
uaucacacugucuuuggau

SEQ ID NO: 2021506 - RNA, 19 nt, Artificial Sequence
  Description of Artificial Sequence: Synthetic oligonucleotide
  Sense strand starting at position 2952 of SEQ ID NO: 1881143
caguccuguccugaaagaa

SEQ ID NO: 2021507 - RNA, 19 nt, Artificial Sequence
  Description of Artificial Sequence: Synthetic oligonucleotide
  Antisense strand to SEQ ID NO: 2021506
uucuuucaggacaggacug

SEQ ID NO: 2021508 - RNA, 19 nt, Artificial Sequence
  Description of Artificial Sequence: Synthetic oligonucleotide
  Sense strand starting at position 3201 of SEQ ID NO: 1881143
guagacugucacuaacaua

SEQ ID NO: 2021509 - RNA, 19 nt, Artificial Sequence
  Description of Artificial Sequence: Synthetic oligonucleotide
  Antisense strand to SEQ ID NO: 2021508
uauguuagugacagucuac

SEQ ID NO: 2021510 - RNA, 19 nt, Artificial Sequence
  Description of Artificial Sequence: Synthetic oligonucleotide
  Sense strand starting at position 3211 of SEQ ID NO: 1881143
acuaacauaucaguggauu

SEQ ID NO: 2021511 - RNA, 19 nt, Artificial Sequence
  Description of Artificial Sequence: Synthetic oligonucleotide
  Antisense strand to SEQ ID NO: 2021510
aauccacugauauguuagu

SEQ ID NO: 2021512 - RNA, 19 nt, Artificial Sequence
  Description of Artificial Sequence: Synthetic oligonucleotide
  Sense strand starting at position 3212 of SEQ ID NO: 1881143
cuaacauaucaguggauua

SEQ ID NO: 2021513 - RNA, 19 nt, Artificial Sequence
  Description of Artificial Sequence: Synthetic oligonucleotide
  Antisense strand to SEQ ID NO: 2021512
uaauccacugauauguuag

SEQ ID NO: 2021514 - RNA, 19 nt, Artificial Sequence
  Description of Artificial Sequence: Synthetic oligonucleotide
  Sense strand starting at position 3222 of SEQ ID NO: 1881143
aguggauuaugcucugaaa

SEQ ID NO: 2021515 - RNA, 19 nt, Artificial Sequence
  Description of Artificial Sequence: Synthetic oligonucleotide
  Antisense strand to SEQ ID NO: 2021514
uuucagagcauaauccacu

SEQ ID NO: 2021516 - RNA, 19 nt, Artificial Sequence
  Description of Artificial Sequence: Synthetic oligonucleotide
  Sense strand starting at position 3224 of SEQ ID NO: 1881143
uggauuaugcucugaaacu

SEQ ID NO: 2021517 - RNA, 19 nt, Artificial Sequence
  Description of Artificial Sequence: Synthetic oligonucleotide
  Antisense strand to SEQ ID NO: 2021516
aguuucagagcauaaucca

SEQ ID NO: 2021518 - RNA, 19 nt, Artificial Sequence
  Description of Artificial Sequence: Synthetic oligonucleotide
  Sense strand starting at position 3268 of SEQ ID NO: 1881143
gaaugcguacuacaaagaa

SEQ ID NO: 2021519 - RNA, 19 nt, Artificial Sequence
  Description of Artificial Sequence: Synthetic oligonucleotide
  Antisense strand to SEQ ID NO: 2021518
uucuuuguaguacgcauuc

SEQ ID NO: 2021520 - RNA, 19 nt, Artificial Sequence
  Description of Artificial Sequence: Synthetic oligonucleotide
  Sense strand starting at position 3333 of SEQ ID NO: 1881143
acuacaauguagcugagau

SEQ ID NO: 2021521 - RNA, 19 nt, Artificial Sequence
  Description of Artificial Sequence: Synthetic oligonucleotide
  Antisense strand to SEQ ID NO: 2021520
aucucagcuacauuguagu

SEQ ID NO: 2021522 - RNA, 19 nt, Artificial Sequence
  Description of Artificial Sequence: Synthetic oligonucleotide
  Sense strand starting at position 3343 of SEQ ID NO: 1881143
agcugagauaauggcauua

SEQ ID NO: 2021523 - RNA, 19 nt, Artificial Sequence
  Description of Artificial Sequence: Synthetic oligonucleotide
  Antisense strand to SEQ ID NO: 2021522
uaaugccauuaucucagcu

SEQ ID NO: 2021524 - RNA, 19 nt, Artificial Sequence
  Description of Artificial Sequence: Synthetic oligonucleotide
  Sense strand starting at position 3481 of SEQ ID NO: 1881143
cuaucugauaguggaguga

SEQ ID NO: 2021525 - RNA, 19 nt, Artificial Sequence
  Description of Artificial Sequence: Synthetic oligonucleotide
  Antisense strand to SEQ ID NO: 2021524
ucacuccacuaucagauag

SEQ ID NO: 2021526 - RNA, 19 nt, Artificial Sequence
  Description of Artificial Sequence: Synthetic oligonucleotide
  Sense strand starting at position 3608 of SEQ ID NO: 1881143
guggaaauucuugggugag

SEQ ID NO: 2021527 - RNA, 19 nt, Artificial Sequence
  Description of Artificial Sequence: Synthetic oligonucleotide
  Antisense strand to SEQ ID NO: 2021526
cucacccaagaauuuccac

SEQ ID NO: 2021528 - RNA, 19 nt, Artificial Sequence
  Description of Artificial Sequence: Synthetic oligonucleotide
  Sense strand starting at position 3719 of SEQ ID NO: 1881143
gacugaaggcugcauacaa

SEQ ID NO: 2021529 - RNA, 19 nt, Artificial Sequence
  Description of Artificial Sequence: Synthetic oligonucleotide
  Antisense strand to SEQ ID NO: 2021528
uuguaugcagccuucaguc

SEQ ID NO: 2021530 - RNA, 19 nt, Artificial Sequence
  Description of Artificial Sequence: Synthetic oligonucleotide
  Sense strand starting at position 3727 of SEQ ID NO: 1881143
gcugcauacaagggagaua

SEQ ID NO: 2021531 - RNA, 19 nt, Artificial Sequence
  Description of Artificial Sequence: Synthetic oligonucleotide
  Antisense strand to SEQ ID NO: 2021530
uaucucccuuguaugcagc

SEQ ID NO: 2021532 - RNA, 19 nt, Artificial Sequence
  Description of Artificial Sequence: Synthetic oligonucleotide
  Sense strand starting at position 3743 of SEQ ID NO: 1881143
auaauugaagcauguaaag

SEQ ID NO: 2021533 - RNA, 19 nt, Artificial Sequence
  Description of Artificial Sequence: Synthetic oligonucleotide
  Antisense strand to SEQ ID NO: 2021532
cuuuacaugcuucaauuau

SEQ ID NO: 2021534 - RNA, 19 nt, Artificial Sequence
  Description of Artificial Sequence: Synthetic oligonucleotide
  Sense strand starting at position 3784 of SEQ ID NO: 1881143
ggcucaauaaauggugaua

SEQ ID NO: 2021535 - RNA, 19 nt, Artificial Sequence
  Description of Artificial Sequence: Synthetic oligonucleotide
  Antisense strand to SEQ ID NO: 2021534
uaucaccauuuauugagcc

SEQ ID NO: 2021536 - RNA, 19 nt, Artificial Sequence
  Description of Artificial Sequence: Synthetic oligonucleotide
  Sense strand starting at position 3908 of SEQ ID NO: 1881143
augaaacuccaaugucagu

SEQ ID NO: 2021537 - RNA, 19 nt, Artificial Sequence
  Description of Artificial Sequence: Synthetic oligonucleotide
  Antisense strand to SEQ ID NO: 2021536
acugacauuggaguuucau

SEQ ID NO: 2021538 - RNA, 19 nt, Artificial Sequence
  Description of Artificial Sequence: Synthetic oligonucleotide
  Sense strand starting at position 3953 of SEQ ID NO: 1881143
gaugguugugcagauggga

SEQ ID NO: 2021539 - RNA, 19 nt, Artificial Sequence
  Description of Artificial Sequence: Synthetic oligonucleotide
  Antisense strand to SEQ ID NO: 2021538
ucccaucugcacaaccauc

SEQ ID NO: 2021540 - RNA, 19 nt, Artificial Sequence
  Description of Artificial Sequence: Synthetic oligonucleotide
  Sense strand starting at position 60 of SEQ ID NO: 1881144
ggugaccuagaguaaguua

SEQ ID NO: 2021541 - RNA, 19 nt, Artificial Sequence
  Description of Artificial Sequence: Synthetic oligonucleotide
  Antisense strand to SEQ ID NO: 2021540
uaacuuacucuaggucacc

SEQ ID NO: 2021542 - RNA, 19 nt, Artificial Sequence
  Description of Artificial Sequence: Synthetic oligonucleotide
  Sense strand starting at position 230 of SEQ ID NO: 1881144
uuguauagcccacaguauu

SEQ ID NO: 2021543 - RNA, 19 nt, Artificial Sequence
  Description of Artificial Sequence: Synthetic oligonucleotide
  Antisense strand to SEQ ID NO: 2021542
aauacugugggcuauacaa

SEQ ID NO: 2021544 - RNA, 19 nt, Artificial Sequence
  Description of Artificial Sequence: Synthetic oligonucleotide
  Sense strand starting at position 281 of SEQ ID NO: 1881144
gcguuuggugcaagguaga

SEQ ID NO: 2021545 - RNA, 19 nt, Artificial Sequence
  Description of Artificial Sequence: Synthetic oligonucleotide
  Antisense strand to SEQ ID NO: 2021544
ucuaccuugcaccaaacgc

SEQ ID NO: 2021546 - RNA, 19 nt, Artificial Sequence
  Description of Artificial Sequence: Synthetic oligonucleotide
  Sense strand starting at position 295 of SEQ ID NO: 1881144
guagacgauccauaaguau

SEQ ID NO: 2021547 - RNA, 19 nt, Artificial Sequence
  Description of Artificial Sequence: Synthetic oligonucleotide
  Antisense strand to SEQ ID NO: 2021546
auacuuauggaucgucuac

SEQ ID NO: 2021548 - RNA, 19 nt, Artificial Sequence
  Description of Artificial Sequence: Synthetic oligonucleotide
  Sense strand starting at position 372 of SEQ ID NO: 1881144
ugaaaugauuagcccagga

SEQ ID NO: 2021549 - RNA, 19 nt, Artificial Sequence
  Description of Artificial Sequence: Synthetic oligonucleotide
  Antisense strand to SEQ ID NO: 2021548
uccugggcuaaucauuuca

SEQ ID NO: 2021550 - RNA, 19 nt, Artificial Sequence
  Description of Artificial Sequence: Synthetic oligonucleotide
  Sense strand starting at position 376 of SEQ ID NO: 1881144
augauuagcccaggaauua

SEQ ID NO: 2021551 - RNA, 19 nt, Artificial Sequence
  Description of Artificial Sequence: Synthetic oligonucleotide
  Antisense strand to SEQ ID NO: 2021550
uaauuccugggcuaaucau

SEQ ID NO: 2021552 - RNA, 19 nt, Artificial Sequence
  Description of Artificial Sequence: Synthetic oligonucleotide
  Sense strand starting at position 406 of SEQ ID NO: 1881144
agguaaagcuaguuugaga

SEQ ID NO: 2021553 - RNA, 19 nt, Artificial Sequence
  Description of Artificial Sequence: Synthetic oligonucleotide
  Antisense strand to SEQ ID NO: 2021552
ucucaaacuagcuuuaccu

SEQ ID NO: 2021554 - RNA, 19 nt, Artificial Sequence
  Description of Artificial Sequence: Synthetic oligonucleotide
  Sense strand starting at position 417 of SEQ ID NO: 1881144
guuugagagaacugcuuaa

SEQ ID NO: 2021555 - RNA, 19 nt, Artificial Sequence
  Description of Artificial Sequence: Synthetic oligonucleotide
  Antisense strand to SEQ ID NO: 2021554
uuaagcaguucucucaaac

SEQ ID NO: 2021556 - RNA, 19 nt, Artificial Sequence
  Description of Artificial Sequence: Synthetic oligonucleotide
  Sense strand starting at position 520 of SEQ ID NO: 1881144
gggcgagcugauuacgaaa

SEQ ID NO: 2021557 - RNA, 19 nt, Artificial Sequence
  Description of Artificial Sequence: Synthetic oligonucleotide
  Antisense strand to SEQ ID NO: 2021556
uuucguaaucagcucgccc

SEQ ID NO: 2021558 - RNA, 19 nt, Artificial Sequence
  Description of Artificial Sequence: Synthetic oligonucleotide
  Sense strand starting at position 635 of SEQ ID NO: 1881144
acaagaugccgugaaauuc

SEQ ID NO: 2021559 - RNA, 19 nt, Artificial Sequence
  Description of Artificial Sequence: Synthetic oligonucleotide
  Antisense strand to SEQ ID NO: 2021558
gaauuucacggcaucuugu

SEQ ID NO: 2021560 - RNA, 19 nt, Artificial Sequence
  Description of Artificial Sequence: Synthetic oligonucleotide
  Sense strand starting at position 651 of SEQ ID NO: 1881144
uucucaaagucauuguaac

SEQ ID NO: 2021561 - RNA, 19 nt, Artificial Sequence
  Description of Artificial Sequence: Synthetic oligonucleotide
  Antisense strand to SEQ ID NO: 2021560
guuacaaugacuuugagaa

SEQ ID NO: 2021562 - RNA, 19 nt, Artificial Sequence
  Description of Artificial Sequence: Synthetic oligonucleotide
  Sense strand starting at position 652 of SEQ ID NO: 1881144
ucucaaagucauuguaacu

SEQ ID NO: 2021563 - RNA, 19 nt, Artificial Sequence
  Description of Artificial Sequence: Synthetic oligonucleotide
  Antisense strand to SEQ ID NO: 2021562
aguuacaaugacuuugaga

SEQ ID NO: 2021564 - RNA, 19 nt, Artificial Sequence
  Description of Artificial Sequence: Synthetic oligonucleotide
  Sense strand starting at position 787 of SEQ ID NO: 1881144
acuucuauucgccaugaac

SEQ ID NO: 2021565 - RNA, 19 nt, Artificial Sequence
  Description of Artificial Sequence: Synthetic oligonucleotide
  Antisense strand to SEQ ID NO: 2021564
guucauggcgaauagaagu

SEQ ID NO: 2021566 - RNA, 19 nt, Artificial Sequence
  Description of Artificial Sequence: Synthetic oligonucleotide
  Sense strand starting at position 799 of SEQ ID NO: 1881144
caugaacucgcugaugcaa

SEQ ID NO: 2021567 - RNA, 19 nt, Artificial Sequence
  Description of Artificial Sequence: Synthetic oligonucleotide
  Antisense strand to SEQ ID NO: 2021566
uugcaucagcgaguucaug

SEQ ID NO: 2021568 - RNA, 19 nt, Artificial Sequence
  Description of Artificial Sequence: Synthetic oligonucleotide
  Sense strand starting at position 897 of SEQ ID NO: 1881144
gucuguagcgagaggaguu

SEQ ID NO: 2021569 - RNA, 19 nt, Artificial Sequence
  Description of Artificial Sequence: Synthetic oligonucleotide
  Antisense strand to SEQ ID NO: 2021568
aacuccucucgcuacagac

SEQ ID NO: 2021570 - RNA, 19 nt, Artificial Sequence
  Description of Artificial Sequence: Synthetic oligonucleotide
  Sense strand starting at position 961 of SEQ ID NO: 1881144
gguggccuccuagaaagau

SEQ ID NO: 2021571 - RNA, 19 nt, Artificial Sequence
  Description of Artificial Sequence: Synthetic oligonucleotide
  Antisense strand to SEQ ID NO: 2021570
aucuuucuaggaggccacc

SEQ ID NO: 2021572 - RNA, 19 nt, Artificial Sequence
  Description of Artificial Sequence: Synthetic oligonucleotide
  Sense strand starting at position 998 of SEQ ID NO: 1881144
cccgauuguccuggaagaa

SEQ ID NO: 2021573 - RNA, 19 nt, Artificial Sequence
  Description of Artificial Sequence: Synthetic oligonucleotide
  Antisense strand to SEQ ID NO: 2021572
uucuuccaggacaaucggg

SEQ ID NO: 2021574 - RNA, 19 nt, Artificial Sequence
  Description of Artificial Sequence: Synthetic oligonucleotide
  Sense strand starting at position 1836 of SEQ ID NO: 1881144
gggcauuuccguuauccuc

SEQ ID NO: 2021575 - RNA, 19 nt, Artificial Sequence
  Description of Artificial Sequence: Synthetic oligonucleotide
  Antisense strand to SEQ ID NO: 2021574
gaggauaacggaaaugccc

SEQ ID NO: 2021576 - RNA, 19 nt, Artificial Sequence
  Description of Artificial Sequence: Synthetic oligonucleotide
  Sense strand starting at position 1845 of SEQ ID NO: 1881144
cguuauccucucgaagaca

SEQ ID NO: 2021577 - RNA, 19 nt, Artificial Sequence
  Description of Artificial Sequence: Synthetic oligonucleotide
  Antisense strand to SEQ ID NO: 2021576
ugucuucgagaggauaacg

SEQ ID NO: 2021578 - RNA, 19 nt, Artificial Sequence
  Description of Artificial Sequence: Synthetic oligonucleotide
  Sense strand starting at position 2311 of SEQ ID NO: 1881144
guccuauguuuauuaaagg

SEQ ID NO: 2021579 - RNA, 19 nt, Artificial Sequence
  Description of Artificial Sequence: Synthetic oligonucleotide
  Antisense strand to SEQ ID NO: 2021578
ccuuuaauaaacauaggac

SEQ ID NO: 2021580 - RNA, 19 nt, Artificial Sequence
  Description of Artificial Sequence: Synthetic oligonucleotide
  Sense strand starting at position 2426 of SEQ ID NO: 1881144
gacucuccucaagguguaa

SEQ ID NO: 2021581 - RNA, 19 nt, Artificial Sequence
  Description of Artificial Sequence: Synthetic oligonucleotide
  Antisense strand to SEQ ID NO: 2021580
uuacaccuugaggagaguc

SEQ ID NO: 2021582 - RNA, 19 nt, Artificial Sequence
  Description of Artificial Sequence: Synthetic oligonucleotide
  Sense strand starting at position 2542 of SEQ ID NO: 1881144
ccagauggguugcugaaua

SEQ ID NO: 2021583 - RNA, 19 nt, Artificial Sequence
  Description of Artificial Sequence: Synthetic oligonucleotide
  Antisense strand to SEQ ID NO: 2021582
uauucagcaacccaucugg

SEQ ID NO: 2021584 - RNA, 19 nt, Artificial Sequence
  Description of Artificial Sequence: Synthetic oligonucleotide
  Sense strand starting at position 2651 of SEQ ID NO: 1881144
cagaguccucuucgaucca

SEQ ID NO: 2021585 - RNA, 19 nt, Artificial Sequence
  Description of Artificial Sequence: Synthetic oligonucleotide
  Antisense strand to SEQ ID NO: 2021584
uggaucgaagaggacucug

SEQ ID NO: 2021586 - RNA, 19 nt, Artificial Sequence
  Description of Artificial Sequence: Synthetic oligonucleotide
  Sense strand starting at position 2729 of SEQ ID NO: 1881144
ggaaacccauguucuuaga

SEQ ID NO: 2021587 - RNA, 19 nt, Artificial Sequence
  Description of Artificial Sequence: Synthetic oligonucleotide
  Antisense strand to SEQ ID NO: 2021586
ucuaagaacauggguuucc

SEQ ID NO: 2021588 - RNA, 19 nt, Artificial Sequence
  Description of Artificial Sequence: Synthetic oligonucleotide
  Sense strand starting at position 3077 of SEQ ID NO: 1881144
uagcguacagcauagauaa

SEQ ID NO: 2021589 - RNA, 19 nt, Artificial Sequence
  Description of Artificial Sequence: Synthetic oligonucleotide
  Antisense strand to SEQ ID NO: 2021588
uuaucuaugcuguacgcua

SEQ ID NO: 2021590 - RNA, 19 nt, Artificial Sequence
  Description of Artificial Sequence: Synthetic oligonucleotide
  Sense strand starting at position 3079 of SEQ ID NO: 1881144
gcguacagcauagauaaau

SEQ ID NO: 2021591 - RNA, 19 nt, Artificial Sequence
  Description of Artificial Sequence: Synthetic oligonucleotide
  Antisense strand to SEQ ID NO: 2021590
auuuaucuaugcuguacgc

SEQ ID NO: 2021592 - RNA, 19 nt, Artificial Sequence
  Description of Artificial Sequence: Synthetic oligonucleotide
  Sense strand starting at position 3144 of SEQ ID NO: 1881144
gaaaguacuguaggcucua

SEQ ID NO: 2021593 - RNA, 19 nt, Artificial Sequence
  Description of Artificial Sequence: Synthetic oligonucleotide
  Antisense strand to SEQ ID NO: 2021592
uagagccuacaguacuuuc

SEQ ID NO: 2021594 - RNA, 19 nt, Artificial Sequence
  Description of Artificial Sequence: Synthetic oligonucleotide
  Sense strand starting at position 3149 of SEQ ID NO: 1881144
uacuguaggcucuauugga

SEQ ID NO: 2021595 - RNA, 19 nt, Artificial Sequence
  Description of Artificial Sequence: Synthetic oligonucleotide
  Antisense strand to SEQ ID NO: 2021594
uccaauagagccuacagua

SEQ ID NO: 2021596 - RNA, 19 nt, Artificial Sequence
  Description of Artificial Sequence: Synthetic oligonucleotide
  Sense strand starting at position 3240 of SEQ ID NO: 1881144
ggugguggucuguuacguu

SEQ ID NO: 2021597 - RNA, 19 nt, Artificial Sequence
  Description of Artificial Sequence: Synthetic oligonucleotide
  Antisense strand to SEQ ID NO: 2021596
aacguaacagaccaccacc

SEQ ID NO: 2021598 - RNA, 19 nt, Artificial Sequence
  Description of Artificial Sequence: Synthetic oligonucleotide
  Sense strand starting at position 3303 of SEQ ID NO: 1881144
uccacagaaucguuugaua

SEQ ID NO: 2021599 - RNA, 19 nt, Artificial Sequence
  Description of Artificial Sequence: Synthetic oligonucleotide
  Antisense strand to SEQ ID NO: 2021598
uaucaaacgauucugugga

SEQ ID NO: 2021600 - RNA, 19 nt, Artificial Sequence
  Description of Artificial Sequence: Synthetic oligonucleotide
  Sense strand starting at position 3315 of SEQ ID NO: 1881144
uuugauaaccgugguaaag

SEQ ID NO: 2021601 - RNA, 19 nt, Artificial Sequence
  Description of Artificial Sequence: Synthetic oligonucleotide
  Antisense strand to SEQ ID NO: 2021600
cuuuaccacgguuaucaaa

SEQ ID NO: 2021602 - RNA, 19 nt, Artificial Sequence
  Description of Artificial Sequence: Synthetic oligonucleotide
  Sense strand starting at position 3329 of SEQ ID NO: 1881144
uaaagauuccgaggcaucu

SEQ ID NO: 2021603 - RNA, 19 nt, Artificial Sequence
  Description of Artificial Sequence: Synthetic oligonucleotide
  Antisense strand to SEQ ID NO: 2021602
agaugccucggaaucuuua

SEQ ID NO: 2021604 - RNA, 19 nt, Artificial Sequence
  Description of Artificial Sequence: Synthetic oligonucleotide
  Sense strand starting at position 3461 of SEQ ID NO: 1881144
auugguucagaucgagagu

SEQ ID NO: 2021605 - RNA, 19 nt, Artificial Sequence
  Description of Artificial Sequence: Synthetic oligonucleotide
  Antisense strand to SEQ ID NO: 2021604
acucucgaucugaaccaau

SEQ ID NO: 2021606 - RNA, 19 nt, Artificial Sequence
  Description of Artificial Sequence: Synthetic oligonucleotide
  Sense strand starting at position 3631 of SEQ ID NO: 1881144
ggguuuguggagcaguaau

SEQ ID NO: 2021607 - RNA, 19 nt, Artificial Sequence
  Description of Artificial Sequence: Synthetic oligonucleotide
  Antisense strand to SEQ ID NO: 2021606
auuacugcuccacaaaccc

SEQ ID NO: 2021608 - RNA, 19 nt, Artificial Sequence
  Description of Artificial Sequence: Synthetic oligonucleotide
  Sense strand starting at position 3683 of SEQ ID NO: 1881144
uguagagacuagcuauuau

SEQ ID NO: 2021609 - RNA, 19 nt, Artificial Sequence
  Description of Artificial Sequence: Synthetic oligonucleotide
  Antisense strand to SEQ ID NO: 2021608
auaauagcuagucucuaca

SEQ ID NO: 2021610 - RNA, 19 nt, Artificial Sequence
  Description of Artificial Sequence: Synthetic oligonucleotide
  Sense strand starting at position 3723 of SEQ ID NO: 1881144
ugaagugauaacggcuaaa

SEQ ID NO: 2021611 - RNA, 19 nt, Artificial Sequence
  Description of Artificial Sequence: Synthetic oligonucleotide
  Antisense strand to SEQ ID NO: 2021610
uuuagccguuaucacuuca

SEQ ID NO: 2021612 - RNA, 19 nt, Artificial Sequence
  Description of Artificial Sequence: Synthetic oligonucleotide
  Sense strand starting at position 3726 of SEQ ID NO: 1881144
agugauaacggcuaaauua

SEQ ID NO: 2021613 - RNA, 19 nt, Artificial Sequence
  Description of Artificial Sequence: Synthetic oligonucleotide
  Antisense strand to SEQ ID NO: 2021612
uaauuuagccguuaucacu

SEQ ID NO: 2021614 - RNA, 19 nt, Artificial Sequence
  Description of Artificial Sequence: Synthetic oligonucleotide
  Sense strand starting at position 3733 of SEQ ID NO: 1881144
acggcuaaauuauccaaau

SEQ ID NO: 2021615 - RNA, 19 nt, Artificial Sequence
  Description of Artificial Sequence: Synthetic oligonucleotide
  Antisense strand to SEQ ID NO: 2021614
auuuggauaauuuagccgu

SEQ ID NO: 2021616 - RNA, 19 nt, Artificial Sequence
  Description of Artificial Sequence: Synthetic oligonucleotide
  Sense strand starting at position 3734 of SEQ ID NO: 1881144
cggcuaaauuauccaaaug

SEQ ID NO: 2021617 - RNA, 19 nt, Artificial Sequence
  Description of Artificial Sequence: Synthetic oligonucleotide
  Antisense strand to SEQ ID NO: 2021616
cauuuggauaauuuagccg

SEQ ID NO: 2021618 - RNA, 19 nt, Artificial Sequence
  Description of Artificial Sequence: Synthetic oligonucleotide
  Sense strand starting at position 3832 of SEQ ID NO: 1881144
gaaauaccuuuggaaggga

SEQ ID NO: 2021619 - RNA, 19 nt, Artificial Sequence
  Description of Artificial Sequence: Synthetic oligonucleotide
  Antisense strand to SEQ ID NO: 2021618
ucccuuccaaagguauuuc

SEQ ID NO: 2021620 - RNA, 19 nt, Artificial Sequence
  Description of Artificial Sequence: Synthetic oligonucleotide
  Sense strand starting at position 93 of SEQ ID NO: 1881145
acagcacagcucuauaaug

SEQ ID NO: 2021621 - RNA, 19 nt, Artificial Sequence
  Description of Artificial Sequence: Synthetic oligonucleotide
  Antisense strand to SEQ ID NO: 2021620
cauuauagagcugugcugu

SEQ ID NO: 2021622 - RNA, 19 nt, Artificial Sequence
  Description of Artificial Sequence: Synthetic oligonucleotide
  Sense strand starting at position 102 of SEQ ID NO: 1881145
cucuauaaugugcagauaa

SEQ ID NO: 2021623 - RNA, 19 nt, Artificial Sequence
  Description of Artificial Sequence: Synthetic oligonucleotide
  Antisense strand to SEQ ID NO: 2021622
uuaucugcacauuauagag

SEQ ID NO: 2021624 - RNA, 19 nt, Artificial Sequence
  Description of Artificial Sequence: Synthetic oligonucleotide
  Sense strand starting at position 104 of SEQ ID NO: 1881145
cuauaaugugcagauaaug

SEQ ID NO: 2021625 - RNA, 19 nt, Artificial Sequence
  Description of Artificial Sequence: Synthetic oligonucleotide
  Antisense strand to SEQ ID NO: 2021624
cauuaucugcacauuauag

SEQ ID NO: 2021626 - RNA, 19 nt, Artificial Sequence
  Description of Artificial Sequence: Synthetic oligonucleotide
  Sense strand starting at position 149 of SEQ ID NO: 1881145
ccucuuacugaaggauaau

SEQ ID NO: 2021627 - RNA, 19 nt, Artificial Sequence
  Description of Artificial Sequence: Synthetic oligonucleotide
  Antisense strand to SEQ ID NO: 2021626
auuauccuucaguaagagg

SEQ ID NO: 2021628 - RNA, 19 nt, Artificial Sequence
  Description of Artificial Sequence: Synthetic oligonucleotide
  Sense strand starting at position 241 of SEQ ID NO: 1881145
guucaaguaugguugaaag

SEQ ID NO: 2021629 - RNA, 19 nt, Artificial Sequence
  Description of Artificial Sequence: Synthetic oligonucleotide
  Antisense strand to SEQ ID NO: 2021628
cuuucaaccauacuugaac

SEQ ID NO: 2021630 - RNA, 19 nt, Artificial Sequence
  Description of Artificial Sequence: Synthetic oligonucleotide
  Sense strand starting at position 307 of SEQ ID NO: 1881145
agugacagugaccaucauu

SEQ ID NO: 2021631 - RNA, 19 nt, Artificial Sequence
  Description of Artificial Sequence: Synthetic oligonucleotide
  Antisense strand to SEQ ID NO: 2021630
aaugauggucacugucacu

SEQ ID NO: 2021632 - RNA, 19 nt, Artificial Sequence
  Description of Artificial Sequence: Synthetic oligonucleotide
  Sense strand starting at position 352 of SEQ ID NO: 1881145
ggaugaucuaucugcagag

SEQ ID NO: 2021633 - RNA, 19 nt, Artificial Sequence
  Description of Artificial Sequence: Synthetic oligonucleotide
  Antisense strand to SEQ ID NO: 2021632
cucugcagauagaucaucc

SEQ ID NO: 2021634 - RNA, 19 nt, Artificial Sequence
  Description of Artificial Sequence: Synthetic oligonucleotide
  Sense strand starting at position 353 of SEQ ID NO: 1881145
gaugaucuaucugcagaga

SEQ ID NO: 2021635 - RNA, 19 nt, Artificial Sequence
  Description of Artificial Sequence: Synthetic oligonucleotide
  Antisense strand to SEQ ID NO: 2021634
ucucugcagauagaucauc

SEQ ID NO: 2021636 - RNA, 19 nt, Artificial Sequence
  Description of Artificial Sequence: Synthetic oligonucleotide
  Sense strand starting at position 375 of SEQ ID NO: 1881145
gcaguuauacuugcagcga

SEQ ID NO: 2021637 - RNA, 19 nt, Artificial Sequence
  Description of Artificial Sequence: Synthetic oligonucleotide
  Antisense strand to SEQ ID NO: 2021636
ucgcugcaaguauaacugc

SEQ ID NO: 2021638 - RNA, 19 nt, Artificial Sequence
  Description of Artificial Sequence: Synthetic oligonucleotide
  Sense strand starting at position 403 of SEQ ID NO: 1881145
uaagcuugugcuuagagaa

SEQ ID NO: 2021639 - RNA, 19 nt, Artificial Sequence
  Description of Artificial Sequence: Synthetic oligonucleotide
  Antisense strand to SEQ ID NO: 2021638
uucucuaagcacaagcuua

SEQ ID NO: 2021640 - RNA, 19 nt, Artificial Sequence
  Description of Artificial Sequence: Synthetic oligonucleotide
  Sense strand starting at position 416 of SEQ ID NO: 1881145
agagaagucuguuucuaaa

SEQ ID NO: 2021641 - RNA, 19 nt, Artificial Sequence
  Description of Artificial Sequence: Synthetic oligonucleotide
  Antisense strand to SEQ ID NO: 2021640
uuuagaaacagacuucucu

SEQ ID NO: 2021642 - RNA, 19 nt, Artificial Sequence
  Description of Artificial Sequence: Synthetic oligonucleotide
  Sense strand starting at position 418 of SEQ ID NO: 1881145
agaagucuguuucuaaaug

SEQ ID NO: 2021643 - RNA, 19 nt, Artificial Sequence
  Description of Artificial Sequence: Synthetic oligonucleotide
  Antisense strand to SEQ ID NO: 2021642
cauuuagaaacagacuucu

SEQ ID NO: 2021644 - RNA, 19 nt, Artificial Sequence
  Description of Artificial Sequence: Synthetic oligonucleotide
  Sense strand starting at position 432 of SEQ ID NO: 1881145
aaaugaaaggcuuggcuau

SEQ ID NO: 2021645 - RNA, 19 nt, Artificial Sequence
  Description of Artificial Sequence: Synthetic oligonucleotide
  Antisense strand to SEQ ID NO: 2021644
auagccaagccuuucauuu

SEQ ID NO: 2021646 - RNA, 19 nt, Artificial Sequence
  Description of Artificial Sequence: Synthetic oligonucleotide
  Sense strand starting at position 502 of SEQ ID NO: 1881145
ucugaaaugaagugguuaa

SEQ ID NO: 2021647 - RNA, 19 nt, Artificial Sequence
  Description of Artificial Sequence: Synthetic oligonucleotide
  Antisense strand to SEQ ID NO: 2021646
uuaaccacuucauuucaga

SEQ ID NO: 2021648 - RNA, 19 nt, Artificial Sequence
  Description of Artificial Sequence: Synthetic oligonucleotide
  Sense strand starting at position 503 of SEQ ID NO: 1881145
cugaaaugaagugguuaaa

SEQ ID NO: 2021649 - RNA, 19 nt, Artificial Sequence
  Description of Artificial Sequence: Synthetic oligonucleotide
  Antisense strand to SEQ ID NO: 2021648
uuuaaccacuucauuucag

SEQ ID NO: 2021650 - RNA, 19 nt, Artificial Sequence
  Description of Artificial Sequence: Synthetic oligonucleotide
  Sense strand starting at position 972 of SEQ ID NO: 1881145
cucuaagggcaucauaauu

SEQ ID NO: 2021651 - RNA, 19 nt, Artificial Sequence
  Description of Artificial Sequence: Synthetic oligonucleotide
  Antisense strand to SEQ ID NO: 2021650
aauuaugaugcccuuagag

SEQ ID NO: 2021652 - RNA, 19 nt, Artificial Sequence
  Description of Artificial Sequence: Synthetic oligonucleotide
  Sense strand starting at position 1570 of SEQ ID NO: 1881145
ccuucuaggaaguguauga

SEQ ID NO: 2021653 - RNA, 19 nt, Artificial Sequence
  Description of Artificial Sequence: Synthetic oligonucleotide
  Antisense strand to SEQ ID NO: 2021652
ucauacacuuccuagaagg

SEQ ID NO: 2021654 - RNA, 19 nt, Artificial Sequence
  Description of Artificial Sequence: Synthetic oligonucleotide
  Sense strand starting at position 1581 of SEQ ID NO: 1881145
guguaugaugacuaagcau

SEQ ID NO: 2021655 - RNA, 19 nt, Artificial Sequence
  Description of Artificial Sequence: Synthetic oligonucleotide
  Antisense strand to SEQ ID NO: 2021654
augcuuagucaucauacac

SEQ ID NO: 2021656 - RNA, 19 nt, Artificial Sequence
  Description of Artificial Sequence: Synthetic oligonucleotide
  Sense strand starting at position 1620 of SEQ ID NO: 1881145
uuguuagugauuugagcuc

SEQ ID NO: 2021657 - RNA, 19 nt, Artificial Sequence
  Description of Artificial Sequence: Synthetic oligonucleotide
  Antisense strand to SEQ ID NO: 2021656
gagcucaaaucacuaacaa

SEQ ID NO: 2021658 - RNA, 19 nt, Artificial Sequence
  Description of Artificial Sequence: Synthetic oligonucleotide
  Sense strand starting at position 1690 of SEQ ID NO: 1881145
ggcuuugagccugaaggau

SEQ ID NO: 2021659 - RNA, 19 nt, Artificial Sequence
  Description of Artificial Sequence: Synthetic oligonucleotide
  Antisense strand to SEQ ID NO: 2021658
auccuucaggcucaaagcc

SEQ ID NO: 2021660 - RNA, 19 nt, Artificial Sequence
  Description of Artificial Sequence: Synthetic oligonucleotide
  Sense strand starting at position 1721 of SEQ ID NO: 1881145
gcuggcacucuggaaagua

SEQ ID NO: 2021661 - RNA, 19 nt, Artificial Sequence
  Description of Artificial Sequence: Synthetic oligonucleotide
  Antisense strand to SEQ ID NO: 2021660
uacuuuccagagugccagc

SEQ ID NO: 2021662 - RNA, 19 nt, Artificial Sequence
  Description of Artificial Sequence: Synthetic oligonucleotide
  Sense strand starting at position 1920 of SEQ ID NO: 1881145
guucuuguaagugagaauc

SEQ ID NO: 2021663 - RNA, 19 nt, Artificial Sequence
  Description of Artificial Sequence: Synthetic oligonucleotide
  Antisense strand to SEQ ID NO: 2021662
gauucucacuuacaagaac

SEQ ID NO: 2021664 - RNA, 19 nt, Artificial Sequence
  Description of Artificial Sequence: Synthetic oligonucleotide
  Sense strand starting at position 2156 of SEQ ID NO: 1881145
cuccaacuguauguggaaa

SEQ ID NO: 2021665 - RNA, 19 nt, Artificial Sequence
  Description of Artificial Sequence: Synthetic oligonucleotide
  Antisense strand to SEQ ID NO: 2021664
uuuccacauacaguuggag

SEQ ID NO: 2021666 - RNA, 19 nt, Artificial Sequence
  Description of Artificial Sequence: Synthetic oligonucleotide
  Sense strand starting at position 2171 of SEQ ID NO: 1881145
gaaagauuggguggcagaa

SEQ ID NO: 2021667 - RNA, 19 nt, Artificial Sequence
  Description of Artificial Sequence: Synthetic oligonucleotide
  Antisense strand to SEQ ID NO: 2021666
uucugccacccaaucuuuc

SEQ ID NO: 2021668 - RNA, 19 nt, Artificial Sequence
  Description of Artificial Sequence: Synthetic oligonucleotide
  Sense strand starting at position 2192 of SEQ ID NO: 1881145
uuacauguaggcugggaua

SEQ ID NO: 2021669 - RNA, 19 nt, Artificial Sequence
  Description of Artificial Sequence: Synthetic oligonucleotide
  Antisense strand to SEQ ID NO: 2021668
uaucccagccuacauguaa

SEQ ID NO: 2021670 - RNA, 19 nt, Artificial Sequence
  Description of Artificial Sequence: Synthetic oligonucleotide
  Sense strand starting at position 2194 of SEQ ID NO: 1881145
acauguaggcugggauaga

SEQ ID NO: 2021671 - RNA, 19 nt, Artificial Sequence
  Description of Artificial Sequence: Synthetic oligonucleotide
  Antisense strand to SEQ ID NO: 2021670
ucuaucccagccuacaugu

SEQ ID NO: 2021672 - RNA, 19 nt, Artificial Sequence
  Description of Artificial Sequence: Synthetic oligonucleotide
  Sense strand starting at position 2235 of SEQ ID NO: 1881145
uaacguuaaguauagucaa

SEQ ID NO: 2021673 - RNA, 19 nt, Artificial Sequence
  Description of Artificial Sequence: Synthetic oligonucleotide
  Antisense strand to SEQ ID NO: 2021672
uugacuauacuuaacguua

SEQ ID NO: 2021674 - RNA, 19 nt, Artificial Sequence
  Description of Artificial Sequence: Synthetic oligonucleotide
  Sense strand starting at position 2435 of SEQ ID NO: 1881145
cagugauugguccaggauc

SEQ ID NO: 2021675 - RNA, 19 nt, Artificial Sequence
  Description of Artificial Sequence: Synthetic oligonucleotide
  Antisense strand to SEQ ID NO: 2021674
gauccuggaccaaucacug

SEQ ID NO: 2021676 - RNA, 19 nt, Artificial Sequence
  Description of Artificial Sequence: Synthetic oligonucleotide
  Sense strand starting at position 2437 of SEQ ID NO: 1881145
gugauugguccaggaucca

SEQ ID NO: 2021677 - RNA, 19 nt, Artificial Sequence
  Description of Artificial Sequence: Synthetic oligonucleotide
  Antisense strand to SEQ ID NO: 2021676
uggauccuggaccaaucac

SEQ ID NO: 2021678 - RNA, 19 nt, Artificial Sequence
  Description of Artificial Sequence: Synthetic oligonucleotide
  Sense strand starting at position 3110 of SEQ ID NO: 1881145
gacccagaggaguguaaau

SEQ ID NO: 2021679 - RNA, 19 nt, Artificial Sequence
  Description of Artificial Sequence: Synthetic oligonucleotide
  Antisense strand to SEQ ID NO: 2021678
auuuacacuccucuggguc

SEQ ID NO: 2021680 - RNA, 19 nt, Artificial Sequence
  Description of Artificial Sequence: Synthetic oligonucleotide
  Sense strand starting at position 3253 of SEQ ID NO: 1881145
uucgaaguaccacauaauu

SEQ ID NO: 2021681 - RNA, 19 nt, Artificial Sequence
  Description of Artificial Sequence: Synthetic oligonucleotide
  Antisense strand to SEQ ID NO: 2021680
aauuaugugguacuucgaa

SEQ ID NO: 2021682 - RNA, 19 nt, Artificial Sequence
  Description of Artificial Sequence: Synthetic oligonucleotide
  Sense strand starting at position 3266 of SEQ ID NO: 1881145
auaauuguuccauagcuag

SEQ ID NO: 2021683 - RNA, 19 nt, Artificial Sequence
  Description of Artificial Sequence: Synthetic oligonucleotide
  Antisense strand to SEQ ID NO: 2021682
cuagcuauggaacaauuau

SEQ ID NO: 2021684 - RNA, 19 nt, Artificial Sequence
  Description of Artificial Sequence: Synthetic oligonucleotide
  Sense strand starting at position 3307 of SEQ ID NO: 1881145
uuguccuaauaucugagau

SEQ ID NO: 2021685 - RNA, 19 nt, Artificial Sequence
  Description of Artificial Sequence: Synthetic oligonucleotide
  Antisense strand to SEQ ID NO: 2021684
aucucagauauuaggacaa

SEQ ID NO: 2021686 - RNA, 19 nt, Artificial Sequence
  Description of Artificial Sequence: Synthetic oligonucleotide
  Sense strand starting at position 3353 of SEQ ID NO: 1881145
augggauccuacucagguu

SEQ ID NO: 2021687 - RNA, 19 nt, Artificial Sequence
  Description of Artificial Sequence: Synthetic oligonucleotide
  Antisense strand to SEQ ID NO: 2021686
aaccugaguaggaucccau

SEQ ID NO: 2021688 - RNA, 19 nt, Artificial Sequence
  Description of Artificial Sequence: Synthetic oligonucleotide
  Sense strand starting at position 3509 of SEQ ID NO: 1881145
gucagagucugacucaaga

SEQ ID NO: 2021689 - RNA, 19 nt, Artificial Sequence
  Description of Artificial Sequence: Synthetic oligonucleotide
  Antisense strand to SEQ ID NO: 2021688
ucuugagucagacucugac

SEQ ID NO: 2021690 - RNA, 19 nt, Artificial Sequence
  Description of Artificial Sequence: Synthetic oligonucleotide
  Sense strand starting at position 3538 of SEQ ID NO: 1881145
guaggaucuccagggauua

SEQ ID NO: 2021691 - RNA, 19 nt, Artificial Sequence
  Description of Artificial Sequence: Synthetic oligonucleotide
  Antisense strand to SEQ ID NO: 2021690
uaaucccuggagauccuac

SEQ ID NO: 2021692 - RNA, 19 nt, Artificial Sequence
  Description of Artificial Sequence: Synthetic oligonucleotide
  Sense strand starting at position 3725 of SEQ ID NO: 1881145
aaagguagccuguauauca

SEQ ID NO: 2021693 - RNA, 19 nt, Artificial Sequence
  Description of Artificial Sequence: Synthetic oligonucleotide
  Antisense strand to SEQ ID NO: 2021692
ugauauacaggcuaccuuu

SEQ ID NO: 2021694 - RNA, 19 nt, Artificial Sequence
  Description of Artificial Sequence: Synthetic oligonucleotide
  Sense strand starting at position 3831 of SEQ ID NO: 1881145
gcaguuguauaagccauuu

SEQ ID NO: 2021695 - RNA, 19 nt, Artificial Sequence
  Description of Artificial Sequence: Synthetic oligonucleotide
  Antisense strand to SEQ ID NO: 2021694
aaauggcuuauacaacugc

SEQ ID NO: 2021696 - RNA, 19 nt, Artificial Sequence
  Description of Artificial Sequence: Synthetic oligonucleotide
  Sense strand starting at position 3933 of SEQ ID NO: 1881145
guuuguucucucuugcauu

SEQ ID NO: 2021697 - RNA, 19 nt, Artificial Sequence
  Description of Artificial Sequence: Synthetic oligonucleotide
  Antisense strand to SEQ ID NO: 2021696
aaugcaagagagaacaaac

SEQ ID NO: 2021698 - RNA, 19 nt, Artificial Sequence
  Description of Artificial Sequence: Synthetic oligonucleotide
  Sense strand starting at position 3963 of SEQ ID NO: 1881145
ugugaaaguccauauauac

SEQ ID NO: 2021699 - RNA, 19 nt, Artificial Sequence
  Description of Artificial Sequence: Synthetic oligonucleotide
  Antisense strand to SEQ ID NO: 2021698
guauauauggacuuucaca

SEQ ID NO: 2021700 - RNA, 19 nt, Artificial Sequence
  Description of Artificial Sequence: Synthetic oligonucleotide
  Sense strand starting at position 360 of SEQ ID NO: 1881146
ugccauuucugaguacuuc

SEQ ID NO: 2021701 - RNA, 19 nt, Artificial Sequence
  Description of Artificial Sequence: Synthetic oligonucleotide
  Antisense strand to SEQ ID NO: 2021700
gaaguacucagaaauggca

SEQ ID NO: 2021702 - RNA, 19 nt, Artificial Sequence
  Description of Artificial Sequence: Synthetic oligonucleotide
  Sense strand starting at position 430 of SEQ ID NO: 1881146
uuagaauaaugcucucaag

SEQ ID NO: 2021703 - RNA, 19 nt, Artificial Sequence
  Description of Artificial Sequence: Synthetic oligonucleotide
  Antisense strand to SEQ ID NO: 2021702
cuugagagcauuauucuaa

SEQ ID NO: 2021704 - RNA, 19 nt, Artificial Sequence
  Description of Artificial Sequence: Synthetic oligonucleotide
  Sense strand starting at position 546 of SEQ ID NO: 1881146
ucaguugauggucaucuga

SEQ ID NO: 2021705 - RNA, 19 nt, Artificial Sequence
  Description of Artificial Sequence: Synthetic oligonucleotide
  Antisense strand to SEQ ID NO: 2021704
ucagaugaccaucaacuga

SEQ ID NO: 2021706 - RNA, 19 nt, Artificial Sequence
  Description of Artificial Sequence: Synthetic oligonucleotide
  Sense strand starting at position 1088 of SEQ ID NO: 1881146
cucugucaggcuuagaacu

SEQ ID NO: 2021707 - RNA, 19 nt, Artificial Sequence
  Description of Artificial Sequence: Synthetic oligonucleotide
  Antisense strand to SEQ ID NO: 2021706
aguucuaagccugacagag

SEQ ID NO: 2021708 - RNA, 19 nt, Artificial Sequence
  Description of Artificial Sequence: Synthetic oligonucleotide
  Sense strand starting at position 1197 of SEQ ID NO: 1881146
ucagauuucugccugcaga

SEQ ID NO: 2021709 - RNA, 19 nt, Artificial Sequence
  Description of Artificial Sequence: Synthetic oligonucleotide
  Antisense strand to SEQ ID NO: 2021708
ucugcaggcagaaaucuga

SEQ ID NO: 2021710 - RNA, 19 nt, Artificial Sequence
  Description of Artificial Sequence: Synthetic oligonucleotide
  Sense strand starting at position 1198 of SEQ ID NO: 1881146
cagauuucugccugcagau

SEQ ID NO: 2021711 - RNA, 19 nt, Artificial Sequence
  Description of Artificial Sequence: Synthetic oligonucleotide
  Antisense strand to SEQ ID NO: 2021710
aucugcaggcagaaaucug

SEQ ID NO: 2021712 - RNA, 19 nt, Artificial Sequence
  Description of Artificial Sequence: Synthetic oligonucleotide
  Sense strand starting at position 1559 of SEQ ID NO: 1881146
gugccuuucggaucuguuu

SEQ ID NO: 2021713 - RNA, 19 nt, Artificial Sequence
  Description of Artificial Sequence: Synthetic oligonucleotide
  Antisense strand to SEQ ID NO: 2021712
aaacagauccgaaaggcac

SEQ ID NO: 2021714 - RNA, 19 nt, Artificial Sequence
  Description of Artificial Sequence: Synthetic oligonucleotide
  Sense strand starting at position 1568 of SEQ ID NO: 1881146
ggaucuguuuccuuugaca

SEQ ID NO: 2021715 - RNA, 19 nt, Artificial Sequence
  Description of Artificial Sequence: Synthetic oligonucleotide
  Antisense strand to SEQ ID NO: 2021714
ugucaaaggaaacagaucc

SEQ ID NO: 2021716 - RNA, 19 nt, Artificial Sequence
  Description of Artificial Sequence: Synthetic oligonucleotide
  Sense strand starting at position 1655 of SEQ ID NO: 1881146
aagacugauccggguacaa

SEQ ID NO: 2021717 - RNA, 19 nt, Artificial Sequence
  Description of Artificial Sequence: Synthetic oligonucleotide
  Antisense strand to SEQ ID NO: 2021716
uuguacccggaucagucuu

SEQ ID NO: 2021718 - RNA, 19 nt, Artificial Sequence
  Description of Artificial Sequence: Synthetic oligonucleotide
  Sense strand starting at position 1657 of SEQ ID NO: 1881146
gacugauccggguacaauu

SEQ ID NO: 2021719 - RNA, 19 nt, Artificial Sequence
  Description of Artificial Sequence: Synthetic oligonucleotide
  Antisense strand to SEQ ID NO: 2021718
aauuguacccggaucaguc

SEQ ID NO: 2021720 - RNA, 19 nt, Artificial Sequence
  Description of Artificial Sequence: Synthetic oligonucleotide
  Sense strand starting at position 1789 of SEQ ID NO: 1881146
aaaggauccugacccagua

SEQ ID NO: 2021721 - RNA, 19 nt, Artificial Sequence
  Description of Artificial Sequence: Synthetic oligonucleotide
  Antisense strand to SEQ ID NO: 2021720
uacugggucaggauccuuu

SEQ ID NO: 2021722 - RNA, 19 nt, Artificial Sequence
  Description of Artificial Sequence: Synthetic oligonucleotide
  Sense strand starting at position 1845 of SEQ ID NO: 1881146
aaaguugagaggcauguua

SEQ ID NO: 2021723 - RNA, 19 nt, Artificial Sequence
  Description of Artificial Sequence: Synthetic oligonucleotide
  Antisense strand to SEQ ID NO: 2021722
uaacaugccucucaacuuu

SEQ ID NO: 2021724 - RNA, 19 nt, Artificial Sequence
  Description of Artificial Sequence: Synthetic oligonucleotide
  Sense strand starting at position 1990 of SEQ ID NO: 1881146
gugugauccgggaguccuc

SEQ ID NO: 2021725 - RNA, 19 nt, Artificial Sequence
  Description of Artificial Sequence: Synthetic oligonucleotide
  Antisense strand to SEQ ID NO: 2021724
gaggacucccggaucacac

SEQ ID NO: 2021726 - RNA, 19 nt, Artificial Sequence
  Description of Artificial Sequence: Synthetic oligonucleotide
  Sense strand starting at position 2089 of SEQ ID NO: 1881146
ugcagauucugauugacua

SEQ ID NO: 2021727 - RNA, 19 nt, Artificial Sequence
  Description of Artificial Sequence: Synthetic oligonucleotide
  Antisense strand to SEQ ID NO: 2021726
uagucaaucagaaucugca

SEQ ID NO: 2021728 - RNA, 19 nt, Artificial Sequence
  Description of Artificial Sequence: Synthetic oligonucleotide
  Sense strand starting at position 2090 of SEQ ID NO: 1881146
gcagauucugauugacuag

SEQ ID NO: 2021729 - RNA, 19 nt, Artificial Sequence
  Description of Artificial Sequence: Synthetic oligonucleotide
  Antisense strand to SEQ ID NO: 2021728
cuagucaaucagaaucugc

SEQ ID NO: 2021730 - RNA, 19 nt, Artificial Sequence
  Description of Artificial Sequence: Synthetic oligonucleotide
  Sense strand starting at position 2112 of SEQ ID NO: 1881146
uggagaggugccugagauu

SEQ ID NO: 2021731 - RNA, 19 nt, Artificial Sequence
  Description of Artificial Sequence: Synthetic oligonucleotide
  Antisense strand to SEQ ID NO: 2021730
aaucucaggcaccucucca

SEQ ID NO: 2021732 - RNA, 19 nt, Artificial Sequence
  Description of Artificial Sequence: Synthetic oligonucleotide
  Sense strand starting at position 2139 of SEQ ID NO: 1881146
auaucaagcugauugguga

SEQ ID NO: 2021733 - RNA, 19 nt, Artificial Sequence
  Description of Artificial Sequence: Synthetic oligonucleotide
  Antisense strand to SEQ ID NO: 2021732
ucaccaaucagcuugauau

SEQ ID NO: 2021734 - RNA, 19 nt, Artificial Sequence
  Description of Artificial Sequence: Synthetic oligonucleotide
  Sense strand starting at position 2140 of SEQ ID NO: 1881146
uaucaagcugauuggugaa

SEQ ID NO: 2021735 - RNA, 19 nt, Artificial Sequence
  Description of Artificial Sequence: Synthetic oligonucleotide
  Antisense strand to SEQ ID NO: 2021734
uucaccaaucagcuugaua

SEQ ID NO: 2021736 - RNA, 19 nt, Artificial Sequence
  Description of Artificial Sequence: Synthetic oligonucleotide
  Sense strand starting at position 2559 of SEQ ID NO: 1881146
gaucauuaguugcuugaaa

SEQ ID NO: 2021737 - RNA, 19 nt, Artificial Sequence
  Description of Artificial Sequence: Synthetic oligonucleotide
  Antisense strand to SEQ ID NO: 2021736
uuucaagcaacuaaugauc

SEQ ID NO: 2021738 - RNA, 19 nt, Artificial Sequence
  Description of Artificial Sequence: Synthetic oligonucleotide
  Sense strand starting at position 2680 of SEQ ID NO: 1881146
auguuaguugauugauuga

SEQ ID NO: 2021739 - RNA, 19 nt, Artificial Sequence
  Description of Artificial Sequence: Synthetic oligonucleotide
  Antisense strand to SEQ ID NO: 2021738
ucaaucaaucaacuaacau

SEQ ID NO: 2021740 - RNA, 19 nt, Artificial Sequence
  Description of Artificial Sequence: Synthetic oligonucleotide
  Sense strand starting at position 2683 of SEQ ID NO: 1881146
uuaguugauugauugagag

SEQ ID NO: 2021741 - RNA, 19 nt, Artificial Sequence
  Description of Artificial Sequence: Synthetic oligonucleotide
  Antisense strand to SEQ ID NO: 2021740
cucucaaucaaucaacuaa

SEQ ID NO: 2021742 - RNA, 19 nt, Artificial Sequence
  Description of Artificial Sequence: Synthetic oligonucleotide
  Sense strand starting at position 2843 of SEQ ID NO: 1881146
aggcuaagacauuaugugu

SEQ ID NO: 2021743 - RNA, 19 nt, Artificial Sequence
  Description of Artificial Sequence: Synthetic oligonucleotide
  Antisense strand to SEQ ID NO: 2021742
acacauaaugucuuagccu

SEQ ID NO: 2021744 - RNA, 19 nt, Artificial Sequence
  Description of Artificial Sequence: Synthetic oligonucleotide
  Sense strand starting at position 2848 of SEQ ID NO: 1881146
aagacauuauguguguaca

SEQ ID NO: 2021745 - RNA, 19 nt, Artificial Sequence
  Description of Artificial Sequence: Synthetic oligonucleotide
  Antisense strand to SEQ ID NO: 2021744
uguacacacauaaugucuu

SEQ ID NO: 2021746 - RNA, 19 nt, Artificial Sequence
  Description of Artificial Sequence: Synthetic oligonucleotide
  Sense strand starting at position 2849 of SEQ ID NO: 1881146
agacauuauguguguacaa

SEQ ID NO: 2021747 - RNA, 19 nt, Artificial Sequence
  Description of Artificial Sequence: Synthetic oligonucleotide
  Antisense strand to SEQ ID NO: 2021746
uuguacacacauaaugucu

SEQ ID NO: 2021748 - RNA, 19 nt, Artificial Sequence
  Description of Artificial Sequence: Synthetic oligonucleotide
  Sense strand starting at position 2850 of SEQ ID NO: 1881146
gacauuauguguguacaaa

SEQ ID NO: 2021749 - RNA, 19 nt, Artificial Sequence
  Description of Artificial Sequence: Synthetic oligonucleotide
  Antisense strand to SEQ ID NO: 2021748
uuuguacacacauaauguc

SEQ ID NO: 2021750 - RNA, 19 nt, Artificial Sequence
  Description of Artificial Sequence: Synthetic oligonucleotide
  Sense strand starting at position 3098 of SEQ ID NO: 1881146
aggagaaccuggucuuguu

SEQ ID NO: 2021751 - RNA, 19 nt, Artificial Sequence
  Description of Artificial Sequence: Synthetic oligonucleotide
  Antisense strand to SEQ ID NO: 2021750
aacaagaccagguucuccu

SEQ ID NO: 2021752 - RNA, 19 nt, Artificial Sequence
  Description of Artificial Sequence: Synthetic oligonucleotide
  Sense strand starting at position 3105 of SEQ ID NO: 1881146
ccuggucuuguuuagaacu

SEQ ID NO: 2021753 - RNA, 19 nt, Artificial Sequence
  Description of Artificial Sequence: Synthetic oligonucleotide
  Antisense strand to SEQ ID NO: 2021752
aguucuaaacaagaccagg

SEQ ID NO: 2021754 - RNA, 19 nt, Artificial Sequence
  Description of Artificial Sequence: Synthetic oligonucleotide
  Sense strand starting at position 3164 of SEQ ID NO: 1881146
augcaaagugcuuucguca

SEQ ID NO: 2021755 - RNA, 19 nt, Artificial Sequence
  Description of Artificial Sequence: Synthetic oligonucleotide
  Antisense strand to SEQ ID NO: 2021754
ugacgaaagcacuuugcau

SEQ ID NO: 2021756 - RNA, 19 nt, Artificial Sequence
  Description of Artificial Sequence: Synthetic oligonucleotide
  Sense strand starting at position 3165 of SEQ ID NO: 1881146
ugcaaagugcuuucgucaa

SEQ ID NO: 2021757 - RNA, 19 nt, Artificial Sequence
  Description of Artificial Sequence: Synthetic oligonucleotide
  Antisense strand to SEQ ID NO: 2021756
uugacgaaagcacuuugca

SEQ ID NO: 2021758 - RNA, 19 nt, Artificial Sequence
  Description of Artificial Sequence: Synthetic oligonucleotide
  Sense strand starting at position 3498 of SEQ ID NO: 1881146
cagugaaucgcagauggaa

SEQ ID NO: 2021759 - RNA, 19 nt, Artificial Sequence
  Description of Artificial Sequence: Synthetic oligonucleotide
  Antisense strand to SEQ ID NO: 2021758
uuccaucugcgauucacug

SEQ ID NO: 2021760 - RNA, 19 nt, Artificial Sequence
  Description of Artificial Sequence: Synthetic oligonucleotide
  Sense strand starting at position 3649 of SEQ ID NO: 1881146
auguguauuucugcaaagu

SEQ ID NO: 2021761 - RNA, 19 nt, Artificial Sequence
  Description of Artificial Sequence: Synthetic oligonucleotide
  Antisense strand to SEQ ID NO: 2021760
acuuugcagaaauacacau

SEQ ID NO: 2021762 - RNA, 19 nt, Artificial Sequence
  Description of Artificial Sequence: Synthetic oligonucleotide
  Sense strand starting at position 3706 of SEQ ID NO: 1881146
acauaaauuccaggguguu

SEQ ID NO: 2021763 - RNA, 19 nt, Artificial Sequence
  Description of Artificial Sequence: Synthetic oligonucleotide
  Antisense strand to SEQ ID NO: 2021762
aacacccuggaauuuaugu

SEQ ID NO: 2021764 - RNA, 19 nt, Artificial Sequence
  Description of Artificial Sequence: Synthetic oligonucleotide
  Sense strand starting at position 3707 of SEQ ID NO: 1881146
cauaaauuccaggguguua

SEQ ID NO: 2021765 - RNA, 19 nt, Artificial Sequence
  Description of Artificial Sequence: Synthetic oligonucleotide
  Antisense strand to SEQ ID NO: 2021764
uaacacccuggaauuuaug

SEQ ID NO: 2021766 - RNA, 19 nt, Artificial Sequence
  Description of Artificial Sequence: Synthetic oligonucleotide
  Sense strand starting at position 3709 of SEQ ID NO: 1881146
uaaauuccaggguguuaga

SEQ ID NO: 2021767 - RNA, 19 nt, Artificial Sequence
  Description of Artificial Sequence: Synthetic oligonucleotide
  Antisense strand to SEQ ID NO: 2021766
ucuaacacccuggaauuua

SEQ ID NO: 2021768 - RNA, 19 nt, Artificial Sequence
  Description of Artificial Sequence: Synthetic oligonucleotide
  Sense strand starting at position 3718 of SEQ ID NO: 1881146
ggguguuagagacaacuuu

SEQ ID NO: 2021769 - RNA, 19 nt, Artificial Sequence
  Description of Artificial Sequence: Synthetic oligonucleotide
  Antisense strand to SEQ ID NO: 2021768
aaaguugucucuaacaccc

SEQ ID NO: 2021770 - RNA, 19 nt, Artificial Sequence
  Description of Artificial Sequence: Synthetic oligonucleotide
  Sense strand starting at position 3801 of SEQ ID NO: 1881146
gugaaauagacuugcaaug

SEQ ID NO: 2021771 - RNA, 19 nt, Artificial Sequence
  Description of Artificial Sequence: Synthetic oligonucleotide
  Antisense strand to SEQ ID NO: 2021770
cauugcaagucuauuucac

SEQ ID NO: 2021772 - RNA, 19 nt, Artificial Sequence
  Description of Artificial Sequence: Synthetic oligonucleotide
  Sense strand starting at position 3824 of SEQ ID NO: 1881146
gauugaucucagggugagg

SEQ ID NO: 2021773 - RNA, 19 nt, Artificial Sequence
  Description of Artificial Sequence: Synthetic oligonucleotide
  Antisense strand to SEQ ID NO: 2021772
ccucacccugagaucaauc

SEQ ID NO: 2021774 - RNA, 19 nt, Artificial Sequence
  Description of Artificial Sequence: Synthetic oligonucleotide
  Sense strand starting at position 3852 of SEQ ID NO: 1881146
ggaaaugugggauguccca

SEQ ID NO: 2021775 - RNA, 19 nt, Artificial Sequence
  Description of Artificial Sequence: Synthetic oligonucleotide
  Antisense strand to SEQ ID NO: 2021774
ugggacaucccacauuucc

SEQ ID NO: 2021776 - RNA, 19 nt, Artificial Sequence
  Description of Artificial Sequence: Synthetic oligonucleotide
  Sense strand starting at position 3890 of SEQ ID NO: 1881146
gucugaaauugucccugaa

SEQ ID NO: 2021777 - RNA, 19 nt, Artificial Sequence
  Description of Artificial Sequence: Synthetic oligonucleotide
  Antisense strand to SEQ ID NO: 2021776
uucagggacaauuucagac

SEQ ID NO: 2021778 - RNA, 19 nt, Artificial Sequence
  Description of Artificial Sequence: Synthetic oligonucleotide
  Sense strand starting at position 3971 of SEQ ID NO: 1881146
uggagugggugaguuucaa

SEQ ID NO: 2021779 - RNA, 19 nt, Artificial Sequence
  Description of Artificial Sequence: Synthetic oligonucleotide
  Antisense strand to SEQ ID NO: 2021778
uugaaacucacccacucca

SEQ ID NO: 2021780 - RNA, 19 nt, Artificial Sequence
  Description of Artificial Sequence: Synthetic oligonucleotide
  Sense strand starting at position 47 of SEQ ID NO: 1881147
cuccuagaccaucguuaau

SEQ ID NO: 2021781 - RNA, 19 nt, Artificial Sequence
  Description of Artificial Sequence: Synthetic oligonucleotide
  Antisense strand to SEQ ID NO: 2021780
auuaacgauggucuaggag

SEQ ID NO: 2021782 - RNA, 19 nt, Artificial Sequence
  Description of Artificial Sequence: Synthetic oligonucleotide
  Sense strand starting at position 49 of SEQ ID NO: 1881147
ccuagaccaucguuaauaa

SEQ ID NO: 2021783 - RNA, 19 nt, Artificial Sequence
  Description of Artificial Sequence: Synthetic oligonucleotide
  Antisense strand to SEQ ID NO: 2021782
uuauuaacgauggucuagg

SEQ ID NO: 2021784 - RNA, 19 nt, Artificial Sequence
  Description of Artificial Sequence: Synthetic oligonucleotide
  Sense strand starting at position 249 of SEQ ID NO: 1881147
agcaguauugcuuaucaga

SEQ ID NO: 2021785 - RNA, 19 nt, Artificial Sequence
  Description of Artificial Sequence: Synthetic oligonucleotide
  Antisense strand to SEQ ID NO: 2021784
ucugauaagcaauacugcu

SEQ ID NO: 2021786 - RNA, 19 nt, Artificial Sequence
  Description of Artificial Sequence: Synthetic oligonucleotide
  Sense strand starting at position 691 of SEQ ID NO: 1881147
cagaauggcacucggagau

SEQ ID NO: 2021787 - RNA, 19 nt, Artificial Sequence
  Description of Artificial Sequence: Synthetic oligonucleotide
  Antisense strand to SEQ ID NO: 2021786
aucuccgagugccauucug

SEQ ID NO: 2021788 - RNA, 19 nt, Artificial Sequence
  Description of Artificial Sequence: Synthetic oligonucleotide
  Sense strand starting at position 706 of SEQ ID NO: 1881147
agauuugugcauugugucu

SEQ ID NO: 2021789 - RNA, 19 nt, Artificial Sequence
  Description of Artificial Sequence: Synthetic oligonucleotide
  Antisense strand to SEQ ID NO: 2021788
agacacaaugcacaaaucu

SEQ ID NO: 2021790 - RNA, 19 nt, Artificial Sequence
  Description of Artificial Sequence: Synthetic oligonucleotide
  Sense strand starting at position 941 of SEQ ID NO: 1881147
ucuaauaaauuuggaagga

SEQ ID NO: 2021791 - RNA, 19 nt, Artificial Sequence
  Description of Artificial Sequence: Synthetic oligonucleotide
  Antisense strand to SEQ ID NO: 2021790
uccuuccaaauuuauuaga

SEQ ID NO: 2021792 - RNA, 19 nt, Artificial Sequence
  Description of Artificial Sequence: Synthetic oligonucleotide
  Sense strand starting at position 957 of SEQ ID NO: 1881147
ggaaacaguucccugucuu

SEQ ID NO: 2021793 - RNA, 19 nt, Artificial Sequence
  Description of Artificial Sequence: Synthetic oligonucleotide
  Antisense strand to SEQ ID NO: 2021792
aagacagggaacuguuucc

SEQ ID NO: 2021794 - RNA, 19 nt, Artificial Sequence
  Description of Artificial Sequence: Synthetic oligonucleotide
  Sense strand starting at position 958 of SEQ ID NO: 1881147
gaaacaguucccugucuug

SEQ ID NO: 2021795 - RNA, 19 nt, Artificial Sequence
  Description of Artificial Sequence: Synthetic oligonucleotide
  Antisense strand to SEQ ID NO: 2021794
caagacagggaacuguuuc

SEQ ID NO: 2021796 - RNA, 19 nt, Artificial Sequence
  Description of Artificial Sequence: Synthetic oligonucleotide
  Sense strand starting at position 988 of SEQ ID NO: 1881147
acuccugacugauuagcau

SEQ ID NO: 2021797 - RNA, 19 nt, Artificial Sequence
  Description of Artificial Sequence: Synthetic oligonucleotide
  Antisense strand to SEQ ID NO: 2021796
augcuaaucagucaggagu

SEQ ID NO: 2021798 - RNA, 19 nt, Artificial Sequence
  Description of Artificial Sequence: Synthetic oligonucleotide
  Sense strand starting at position 1155 of SEQ ID NO: 1881147
ggcauuuguguaugagagc

SEQ ID NO: 2021799 - RNA, 19 nt, Artificial Sequence
  Description of Artificial Sequence: Synthetic oligonucleotide
  Antisense strand to SEQ ID NO: 2021798
gcucucauacacaaaugcc

SEQ ID NO: 2021800 - RNA, 19 nt, Artificial Sequence
  Description of Artificial Sequence: Synthetic oligonucleotide
  Sense strand starting at position 1210 of SEQ ID NO: 1881147
gaguauggaguauguuacu

SEQ ID NO: 2021801 - RNA, 19 nt, Artificial Sequence
  Description of Artificial Sequence: Synthetic oligonucleotide
  Antisense strand to SEQ ID NO: 2021800
aguaacauacuccauacuc

SEQ ID NO: 2021802 - RNA, 19 nt, Artificial Sequence
  Description of Artificial Sequence: Synthetic oligonucleotide
  Sense strand starting at position 1293 of SEQ ID NO: 1881147
acgggaguuacuuaacgcu

SEQ ID NO: 2021803 - RNA, 19 nt, Artificial Sequence
  Description of Artificial Sequence: Synthetic oligonucleotide
  Antisense strand to SEQ ID NO: 2021802
agcguuaaguaacucccgu

SEQ ID NO: 2021804 - RNA, 19 nt, Artificial Sequence
  Description of Artificial Sequence: Synthetic oligonucleotide
  Sense strand starting at position 1675 of SEQ ID NO: 1881147
ugagcuuaaugucugauau

SEQ ID NO: 2021805 - RNA, 19 nt, Artificial Sequence
  Description of Artificial Sequence: Synthetic oligonucleotide
  Antisense strand to SEQ ID NO: 2021804
auaucagacauuaagcuca

SEQ ID NO: 2021806 - RNA, 19 nt, Artificial Sequence
  Description of Artificial Sequence: Synthetic oligonucleotide
  Sense strand starting at position 1676 of SEQ ID NO: 1881147
gagcuuaaugucugauaua

SEQ ID NO: 2021807 - RNA, 19 nt, Artificial Sequence
  Description of Artificial Sequence: Synthetic oligonucleotide
  Antisense strand to SEQ ID NO: 2021806
uauaucagacauuaagcuc

SEQ ID NO: 2021808 - RNA, 19 nt, Artificial Sequence
  Description of Artificial Sequence: Synthetic oligonucleotide
  Sense strand starting at position 1914 of SEQ ID NO: 1881147
uguucuuaugcucacuuua

SEQ ID NO: 2021809 - RNA, 19 nt, Artificial Sequence
  Description of Artificial Sequence: Synthetic oligonucleotide
  Antisense strand to SEQ ID NO: 2021808
uaaagugagcauaagaaca

SEQ ID NO: 2021810 - RNA, 19 nt, Artificial Sequence
  Description of Artificial Sequence: Synthetic oligonucleotide
  Sense strand starting at position 2203 of SEQ ID NO: 1881147
acuugucaguuauuaagaa

SEQ ID NO: 2021811 - RNA, 19 nt, Artificial Sequence
  Description of Artificial Sequence: Synthetic oligonucleotide
  Antisense strand to SEQ ID NO: 2021810
uucuuaauaacugacaagu

SEQ ID NO: 2021812 - RNA, 19 nt, Artificial Sequence
  Description of Artificial Sequence: Synthetic oligonucleotide
  Sense strand starting at position 2225 of SEQ ID NO: 1881147
guaguaagggagcagauau

SEQ ID NO: 2021813 - RNA, 19 nt, Artificial Sequence
  Description of Artificial Sequence: Synthetic oligonucleotide
  Antisense strand to SEQ ID NO: 2021812
auaucugcucccuuacuac

SEQ ID NO: 2021814 - RNA, 19 nt, Artificial Sequence
  Description of Artificial Sequence: Synthetic oligonucleotide
  Sense strand starting at position 2334 of SEQ ID NO: 1881147
uauagucuagauggagauu

SEQ ID NO: 2021815 - RNA, 19 nt, Artificial Sequence
  Description of Artificial Sequence: Synthetic oligonucleotide
  Antisense strand to SEQ ID NO: 2021814
aaucuccaucuagacuaua

SEQ ID NO: 2021816 - RNA, 19 nt, Artificial Sequence
  Description of Artificial Sequence: Synthetic oligonucleotide
  Sense strand starting at position 2378 of SEQ ID NO: 1881147
agcuuuguguucuccauuu

SEQ ID NO: 2021817 - RNA, 19 nt, Artificial Sequence
  Description of Artificial Sequence: Synthetic oligonucleotide
  Antisense strand to SEQ ID NO: 2021816
aaauggagaacacaaagcu

SEQ ID NO: 2021818 - RNA, 19 nt, Artificial Sequence
  Description of Artificial Sequence: Synthetic oligonucleotide
  Sense strand starting at position 2645 of SEQ ID NO: 1881147
uuauauguugauugucacu

SEQ ID NO: 2021819 - RNA, 19 nt, Artificial Sequence
  Description of Artificial Sequence: Synthetic oligonucleotide
  Antisense strand to SEQ ID NO: 2021818
agugacaaucaacauauaa

SEQ ID NO: 2021820 - RNA, 19 nt, Artificial Sequence
  Description of Artificial Sequence: Synthetic oligonucleotide
  Sense strand starting at position 2647 of SEQ ID NO: 1881147
auauguugauugucacuua

SEQ ID NO: 2021821 - RNA, 19 nt, Artificial Sequence
  Description of Artificial Sequence: Synthetic oligonucleotide
  Antisense strand to SEQ ID NO: 2021820
uaagugacaaucaacauau

SEQ ID NO: 2021822 - RNA, 19 nt, Artificial Sequence
  Description of Artificial Sequence: Synthetic oligonucleotide
  Sense strand starting at position 2650 of SEQ ID NO: 1881147
uguugauugucacuuagaa

SEQ ID NO: 2021823 - RNA, 19 nt, Artificial Sequence
  Description of Artificial Sequence: Synthetic oligonucleotide
  Antisense strand to SEQ ID NO: 2021822
uucuaagugacaaucaaca

SEQ ID NO: 2021824 - RNA, 19 nt, Artificial Sequence
  Description of Artificial Sequence: Synthetic oligonucleotide
  Sense strand starting at position 2951 of SEQ ID NO: 1881147
uucuuaaggguguaauaca

SEQ ID NO: 2021825 - RNA, 19 nt, Artificial Sequence
  Description of Artificial Sequence: Synthetic oligonucleotide
  Antisense strand to SEQ ID NO: 2021824
uguauuacacccuuaagaa

SEQ ID NO: 2021826 - RNA, 19 nt, Artificial Sequence
  Description of Artificial Sequence: Synthetic oligonucleotide
  Sense strand starting at position 2980 of SEQ ID NO: 1881147
gagugugaugcucaucaaa

SEQ ID NO: 2021827 - RNA, 19 nt, Artificial Sequence
  Description of Artificial Sequence: Synthetic oligonucleotide
  Antisense strand to SEQ ID NO: 2021826
uuugaugagcaucacacuc

SEQ ID NO: 2021828 - RNA, 19 nt, Artificial Sequence
  Description of Artificial Sequence: Synthetic oligonucleotide
  Sense strand starting at position 3043 of SEQ ID NO: 1881147
acuugauaacaaggagucu

SEQ ID NO: 2021829 - RNA, 19 nt, Artificial Sequence
  Description of Artificial Sequence: Synthetic oligonucleotide
  Antisense strand to SEQ ID NO: 2021828
agacuccuuguuaucaagu

SEQ ID NO: 2021830 - RNA, 19 nt, Artificial Sequence
  Description of Artificial Sequence: Synthetic oligonucleotide
  Sense strand starting at position 3065 of SEQ ID NO: 1881147
cgggaaaccuuacuaugua

SEQ ID NO: 2021831 - RNA, 19 nt, Artificial Sequence
  Description of Artificial Sequence: Synthetic oligonucleotide
  Antisense strand to SEQ ID NO: 2021830
uacauaguaagguuucccg

SEQ ID NO: 2021832 - RNA, 19 nt, Artificial Sequence
  Description of Artificial Sequence: Synthetic oligonucleotide
  Sense strand starting at position 3135 of SEQ ID NO: 1881147
guguuagcacuugaacuca

SEQ ID NO: 2021833 - RNA, 19 nt, Artificial Sequence
  Description of Artificial Sequence: Synthetic oligonucleotide
  Antisense strand to SEQ ID NO: 2021832
ugaguucaagugcuaacac

SEQ ID NO: 2021834 - RNA, 19 nt, Artificial Sequence
  Description of Artificial Sequence: Synthetic oligonucleotide
  Sense strand starting at position 3298 of SEQ ID NO: 1881147
uuuaauagugcuuaaggag

SEQ ID NO: 2021835 - RNA, 19 nt, Artificial Sequence
  Description of Artificial Sequence: Synthetic oligonucleotide
  Antisense strand to SEQ ID NO: 2021834
cuccuuaagcacuauuaaa

SEQ ID NO: 2021836 - RNA, 19 nt, Artificial Sequence
  Description of Artificial Sequence: Synthetic oligonucleotide
  Sense strand starting at position 3585 of SEQ ID NO: 1881147
gggauaacaggcuguuacu

SEQ ID NO: 2021837 - RNA, 19 nt, Artificial Sequence
  Description of Artificial Sequence: Synthetic oligonucleotide
  Antisense strand to SEQ ID NO: 2021836
aguaacagccuguuauccc

SEQ ID NO: 2021838 - RNA, 19 nt, Artificial Sequence
  Description of Artificial Sequence: Synthetic oligonucleotide
  Sense strand starting at position 3652 of SEQ ID NO: 1881147
gcuaguugugccgccaaga

SEQ ID NO: 2021839 - RNA, 19 nt, Artificial Sequence
  Description of Artificial Sequence: Synthetic oligonucleotide
  Antisense strand to SEQ ID NO: 2021838
ucuuggcggcacaacuagc

SEQ ID NO: 2021840 - RNA, 19 nt, Artificial Sequence
  Description of Artificial Sequence: Synthetic oligonucleotide
  Sense strand starting at position 3670 of SEQ ID NO: 1881147
aguacagugacaggugaua

SEQ ID NO: 2021841 - RNA, 19 nt, Artificial Sequence
  Description of Artificial Sequence: Synthetic oligonucleotide
  Antisense strand to SEQ ID NO: 2021840
uaucaccugucacuguacu

SEQ ID NO: 2021842 - RNA, 19 nt, Artificial Sequence
  Description of Artificial Sequence: Synthetic oligonucleotide
  Sense strand starting at position 3698 of SEQ ID NO: 1881147
cugggauucuucguggauc

SEQ ID NO: 2021843 - RNA, 19 nt, Artificial Sequence
  Description of Artificial Sequence: Synthetic oligonucleotide
  Antisense strand to SEQ ID NO: 2021842
gauccacgaagaaucccag

SEQ ID NO: 2021844 - RNA, 19 nt, Artificial Sequence
  Description of Artificial Sequence: Synthetic oligonucleotide
  Sense strand starting at position 3700 of SEQ ID NO: 1881147
gggauucuucguggaucug

SEQ ID NO: 2021845 - RNA, 19 nt, Artificial Sequence
  Description of Artificial Sequence: Synthetic oligonucleotide
  Antisense strand to SEQ ID NO: 2021844
cagauccacgaagaauccc

SEQ ID NO: 2021846 - RNA, 19 nt, Artificial Sequence
  Description of Artificial Sequence: Synthetic oligonucleotide
  Sense strand starting at position 3701 of SEQ ID NO: 1881147
ggauucuucguggaucuga

SEQ ID NO: 2021847 - RNA, 19 nt, Artificial Sequence
  Description of Artificial Sequence: Synthetic oligonucleotide
  Antisense strand to SEQ ID NO: 2021846
ucagauccacgaagaaucc

SEQ ID NO: 2021848 - RNA, 19 nt, Artificial Sequence
  Description of Artificial Sequence: Synthetic oligonucleotide
  Sense strand starting at position 3710 of SEQ ID NO: 1881147
guggaucugaccugagagu

SEQ ID NO: 2021849 - RNA, 19 nt, Artificial Sequence
  Description of Artificial Sequence: Synthetic oligonucleotide
  Antisense strand to SEQ ID NO: 2021848
acucucaggucagauccac

SEQ ID NO: 2021850 - RNA, 19 nt, Artificial Sequence
  Description of Artificial Sequence: Synthetic oligonucleotide
  Sense strand starting at position 3734 of SEQ ID NO: 1881147
auucacagucgaggagaaa

SEQ ID NO: 2021851 - RNA, 19 nt, Artificial Sequence
  Description of Artificial Sequence: Synthetic oligonucleotide
  Antisense strand to SEQ ID NO: 2021850
uuucuccucgacugugaau

SEQ ID NO: 2021852 - RNA, 19 nt, Artificial Sequence
  Description of Artificial Sequence: Synthetic oligonucleotide
  Sense strand starting at position 3782 of SEQ ID NO: 1881147
aaagcucuuugagcuggaa

SEQ ID NO: 2021853 - RNA, 19 nt, Artificial Sequence
  Description of Artificial Sequence: Synthetic oligonucleotide
  Antisense strand to SEQ ID NO: 2021852
uuccagcucaaagagcuuu

SEQ ID NO: 2021854 - RNA, 19 nt, Artificial Sequence
  Description of Artificial Sequence: Synthetic oligonucleotide
  Sense strand starting at position 3784 of SEQ ID NO: 1881147
agcucuuugagcuggaaua

SEQ ID NO: 2021855 - RNA, 19 nt, Artificial Sequence
  Description of Artificial Sequence: Synthetic oligonucleotide
  Antisense strand to SEQ ID NO: 2021854
uauuccagcucaaagagcu

SEQ ID NO: 2021856 - RNA, 19 nt, Artificial Sequence
  Description of Artificial Sequence: Synthetic oligonucleotide
  Sense strand starting at position 3786 of SEQ ID NO: 1881147
cucuuugagcuggaauaca

SEQ ID NO: 2021857 - RNA, 19 nt, Artificial Sequence
  Description of Artificial Sequence: Synthetic oligonucleotide
  Antisense strand to SEQ ID NO: 2021856
uguauuccagcucaaagag

SEQ ID NO: 2021858 - RNA, 19 nt, Artificial Sequence
  Description of Artificial Sequence: Synthetic oligonucleotide
  Sense strand starting at position 3810 of SEQ ID NO: 1881147
ccuuucuuccuguaggcaa

SEQ ID NO: 2021859 - RNA, 19 nt, Artificial Sequence
  Description of Artificial Sequence: Synthetic oligonucleotide
  Antisense strand to SEQ ID NO: 2021858
uugccuacaggaagaaagg

SEQ ID NO: 2021860 - RNA, 19 nt, Artificial Sequence
  Description of Artificial Sequence: Synthetic oligonucleotide
  Sense strand starting at position 23 of SEQ ID NO: 1881148
ugcagaaguuguuucugga

SEQ ID NO: 2021861 - RNA, 19 nt, Artificial Sequence
  Description of Artificial Sequence: Synthetic oligonucleotide
  Antisense strand to SEQ ID NO: 2021860
uccagaaacaacuucugca

SEQ ID NO: 2021862 - RNA, 19 nt, Artificial Sequence
  Description of Artificial Sequence: Synthetic oligonucleotide
  Sense strand starting at position 26 of SEQ ID NO: 1881148
agaaguuguuucuggaaga

SEQ ID NO: 2021863 - RNA, 19 nt, Artificial Sequence
  Description of Artificial Sequence: Synthetic oligonucleotide
  Antisense strand to SEQ ID NO: 2021862
ucuuccagaaacaacuucu

SEQ ID NO: 2021864 - RNA, 19 nt, Artificial Sequence
  Description of Artificial Sequence: Synthetic oligonucleotide
  Sense strand starting at position 27 of SEQ ID NO: 1881148
gaaguuguuucuggaagau

SEQ ID NO: 2021865 - RNA, 19 nt, Artificial Sequence
  Description of Artificial Sequence: Synthetic oligonucleotide
  Antisense strand to SEQ ID NO: 2021864
aucuuccagaaacaacuuc

SEQ ID NO: 2021866 - RNA, 19 nt, Artificial Sequence
  Description of Artificial Sequence: Synthetic oligonucleotide
  Sense strand starting at position 205 of SEQ ID NO: 1881148
caguacuuaguguauugau

SEQ ID NO: 2021867 - RNA, 19 nt, Artificial Sequence
  Description of Artificial Sequence: Synthetic oligonucleotide
  Antisense strand to SEQ ID NO: 2021866
aucaauacacuaaguacug

SEQ ID NO: 2021868 - RNA, 19 nt, Artificial Sequence
  Description of Artificial Sequence: Synthetic oligonucleotide
  Sense strand starting at position 214 of SEQ ID NO: 1881148
guguauugauaccuuagaa

SEQ ID NO: 2021869 - RNA, 19 nt, Artificial Sequence
  Description of Artificial Sequence: Synthetic oligonucleotide
  Antisense strand to SEQ ID NO: 2021868
uucuaagguaucaauacac

SEQ ID NO: 2021870 - RNA, 19 nt, Artificial Sequence
  Description of Artificial Sequence: Synthetic oligonucleotide
  Sense strand starting at position 258 of SEQ ID NO: 1881148
uuucuagagcuuugguagu

SEQ ID NO: 2021871 - RNA, 19 nt, Artificial Sequence
  Description of Artificial Sequence: Synthetic oligonucleotide
  Antisense strand to SEQ ID NO: 2021870
acuaccaaagcucuagaaa

SEQ ID NO: 2021872 - RNA, 19 nt, Artificial Sequence
  Description of Artificial Sequence: Synthetic oligonucleotide
  Sense strand starting at position 264 of SEQ ID NO: 1881148
gagcuuugguaguacuguu

SEQ ID NO: 2021873 - RNA, 19 nt, Artificial Sequence
  Description of Artificial Sequence: Synthetic oligonucleotide
  Antisense strand to SEQ ID NO: 2021872
aacaguacuaccaaagcuc

SEQ ID NO: 2021874 - RNA, 19 nt, Artificial Sequence
  Description of Artificial Sequence: Synthetic oligonucleotide
  Sense strand starting at position 288 of SEQ ID NO: 1881148
aguuauuugucauguagau

SEQ ID NO: 2021875 - RNA, 19 nt, Artificial Sequence
  Description of Artificial Sequence: Synthetic oligonucleotide
  Antisense strand to SEQ ID NO: 2021874
aucuacaugacaaauaacu

SEQ ID NO: 2021876 - RNA, 19 nt, Artificial Sequence
  Description of Artificial Sequence: Synthetic oligonucleotide
  Sense strand starting at position 294 of SEQ ID NO: 1881148
uugucauguagauagauug

SEQ ID NO: 2021877 - RNA, 19 nt, Artificial Sequence
  Description of Artificial Sequence: Synthetic oligonucleotide
  Antisense strand to SEQ ID NO: 2021876
caaucuaucuacaugacaa

SEQ ID NO: 2021878 - RNA, 19 nt, Artificial Sequence
  Description of Artificial Sequence: Synthetic oligonucleotide
  Sense strand starting at position 304 of SEQ ID NO: 1881148
gauagauugguugguuggu

SEQ ID NO: 2021879 - RNA, 19 nt, Artificial Sequence
  Description of Artificial Sequence: Synthetic oligonucleotide
  Antisense strand to SEQ ID NO: 2021878
accaaccaaccaaucuauc

SEQ ID NO: 2021880 - RNA, 19 nt, Artificial Sequence
  Description of Artificial Sequence: Synthetic oligonucleotide
  Sense strand starting at position 579 of SEQ ID NO: 1881148
ucucgaguucucuaccuca

SEQ ID NO: 2021881 - RNA, 19 nt, Artificial Sequence
  Description of Artificial Sequence: Synthetic oligonucleotide
  Antisense strand to SEQ ID NO: 2021880
ugagguagagaacucgaga

SEQ ID NO: 2021882 - RNA, 19 nt, Artificial Sequence
  Description of Artificial Sequence: Synthetic oligonucleotide
  Sense strand starting at position 582 of SEQ ID NO: 1881148
cgaguucucuaccucaggu

SEQ ID NO: 2021883 - RNA, 19 nt, Artificial Sequence
  Description of Artificial Sequence: Synthetic oligonucleotide
  Antisense strand to SEQ ID NO: 2021882
accugagguagagaacucg

SEQ ID NO: 2021884 - RNA, 19 nt, Artificial Sequence
  Description of Artificial Sequence: Synthetic oligonucleotide
  Sense strand starting at position 1019 of SEQ ID NO: 1881148
agcaauauacaguguaaag

SEQ ID NO: 2021885 - RNA, 19 nt, Artificial Sequence
  Description of Artificial Sequence: Synthetic oligonucleotide
  Antisense strand to SEQ ID NO: 2021884
cuuuacacuguauauugcu

SEQ ID NO: 2021886 - RNA, 19 nt, Artificial Sequence
  Description of Artificial Sequence: Synthetic oligonucleotide
  Sense strand starting at position 1122 of SEQ ID NO: 1881148
ccucauuaaggaugugaag

SEQ ID NO: 2021887 - RNA, 19 nt, Artificial Sequence
  Description of Artificial Sequence: Synthetic oligonucleotide
  Antisense strand to SEQ ID NO: 2021886
cuucacauccuuaaugagg

SEQ ID NO: 2021888 - RNA, 19 nt, Artificial Sequence
  Description of Artificial Sequence: Synthetic oligonucleotide
  Sense strand starting at position 1125 of SEQ ID NO: 1881148
cauuaaggaugugaagaua

SEQ ID NO: 2021889 - RNA, 19 nt, Artificial Sequence
  Description of Artificial Sequence: Synthetic oligonucleotide
  Antisense strand to SEQ ID NO: 2021888
uaucuucacauccuuaaug

SEQ ID NO: 2021890 - RNA, 19 nt, Artificial Sequence
  Description of Artificial Sequence: Synthetic oligonucleotide
  Sense strand starting at position 1304 of SEQ ID NO: 1881148
cuauuuaaguuguaucaug

SEQ ID NO: 2021891 - RNA, 19 nt, Artificial Sequence
  Description of Artificial Sequence: Synthetic oligonucleotide
  Antisense strand to SEQ ID NO: 2021890
caugauacaacuuaaauag

SEQ ID NO: 2021892 - RNA, 19 nt, Artificial Sequence
  Description of Artificial Sequence: Synthetic oligonucleotide
  Sense strand starting at position 1309 of SEQ ID NO: 1881148
uaaguuguaucaugggauu

SEQ ID NO: 2021893 - RNA, 19 nt, Artificial Sequence
  Description of Artificial Sequence: Synthetic oligonucleotide
  Antisense strand to SEQ ID NO: 2021892
aaucccaugauacaacuua

SEQ ID NO: 2021894 - RNA, 19 nt, Artificial Sequence
  Description of Artificial Sequence: Synthetic oligonucleotide
  Sense strand starting at position 1607 of SEQ ID NO: 1881148
uaguucuggucccggauga

SEQ ID NO: 2021895 - RNA, 19 nt, Artificial Sequence
  Description of Artificial Sequence: Synthetic oligonucleotide
  Antisense strand to SEQ ID NO: 2021894
ucauccgggaccagaacua

SEQ ID NO: 2021896 - RNA, 19 nt, Artificial Sequence
  Description of Artificial Sequence: Synthetic oligonucleotide
  Sense strand starting at position 1608 of SEQ ID NO: 1881148
aguucuggucccggaugau

SEQ ID NO: 2021897 - RNA, 19 nt, Artificial Sequence
  Description of Artificial Sequence: Synthetic oligonucleotide
  Antisense strand to SEQ ID NO: 2021896
aucauccgggaccagaacu

SEQ ID NO: 2021898 - RNA, 19 nt, Artificial Sequence
  Description of Artificial Sequence: Synthetic oligonucleotide
  Sense strand starting at position 1618 of SEQ ID NO: 1881148
ccggaugauguugggugaa

SEQ ID NO: 2021899 - RNA, 19 nt, Artificial Sequence
  Description of Artificial Sequence: Synthetic oligonucleotide
  Antisense strand to SEQ ID NO: 2021898
uucacccaacaucauccgg

SEQ ID NO: 2021900 - RNA, 19 nt, Artificial Sequence
  Description of Artificial Sequence: Synthetic oligonucleotide
  Sense strand starting at position 1619 of SEQ ID NO: 1881148
cggaugauguugggugaau

SEQ ID NO: 2021901 - RNA, 19 nt, Artificial Sequence
  Description of Artificial Sequence: Synthetic oligonucleotide
  Antisense strand to SEQ ID NO: 2021900
auucacccaacaucauccg

SEQ ID NO: 2021902 - RNA, 19 nt, Artificial Sequence
  Description of Artificial Sequence: Synthetic oligonucleotide
  Sense strand starting at position 1631 of SEQ ID NO: 1881148
ggugaauaguggagagaaa

SEQ ID NO: 2021903 - RNA, 19 nt, Artificial Sequence
  Description of Artificial Sequence: Synthetic oligonucleotide
  Antisense strand to SEQ ID NO: 2021902
uuucucuccacuauucacc

SEQ ID NO: 2021904 - RNA, 19 nt, Artificial Sequence
  Description of Artificial Sequence: Synthetic oligonucleotide
  Sense strand starting at position 1671 of SEQ ID NO: 1881148
ugaagaaaguucuuaauug

SEQ ID NO: 2021905 - RNA, 19 nt, Artificial Sequence
  Description of Artificial Sequence: Synthetic oligonucleotide
  Antisense strand to SEQ ID NO: 2021904
caauuaagaacuuucuuca

SEQ ID NO: 2021906 - RNA, 19 nt, Artificial Sequence
  Description of Artificial Sequence: Synthetic oligonucleotide
  Sense strand starting at position 1675 of SEQ ID NO: 1881148
gaaaguucuuaauugaugu

SEQ ID NO: 2021907 - RNA, 19 nt, Artificial Sequence
  Description of Artificial Sequence: Synthetic oligonucleotide
  Antisense strand to SEQ ID NO: 2021906
acaucaauuaagaacuuuc

SEQ ID NO: 2021908 - RNA, 19 nt, Artificial Sequence
  Description of Artificial Sequence: Synthetic oligonucleotide
  Sense strand starting at position 1679 of SEQ ID NO: 1881148
guucuuaauugaugugauu

SEQ ID NO: 2021909 - RNA, 19 nt, Artificial Sequence
  Description of Artificial Sequence: Synthetic oligonucleotide
  Antisense strand to SEQ ID NO: 2021908
aaucacaucaauuaagaac

SEQ ID NO: 2021910 - RNA, 19 nt, Artificial Sequence
  Description of Artificial Sequence: Synthetic oligonucleotide
  Sense strand starting at position 1709 of SEQ ID NO: 1881148
cagcgaagugcugaguaga

SEQ ID NO: 2021911 - RNA, 19 nt, Artificial Sequence
  Description of Artificial Sequence: Synthetic oligonucleotide
  Antisense strand to SEQ ID NO: 2021910
ucuacucagcacuucgcug

SEQ ID NO: 2021912 - RNA, 19 nt, Artificial Sequence
  Description of Artificial Sequence: Synthetic oligonucleotide
  Sense strand starting at position 1711 of SEQ ID NO: 1881148
gcgaagugcugaguagaga

SEQ ID NO: 2021913 - RNA, 19 nt, Artificial Sequence
  Description of Artificial Sequence: Synthetic oligonucleotide
  Antisense strand to SEQ ID NO: 2021912
ucucuacucagcacuucgc

SEQ ID NO: 2021914 - RNA, 19 nt, Artificial Sequence
  Description of Artificial Sequence: Synthetic oligonucleotide
  Sense strand starting at position 1712 of SEQ ID NO: 1881148
cgaagugcugaguagagaa

SEQ ID NO: 2021915 - RNA, 19 nt, Artificial Sequence
  Description of Artificial Sequence: Synthetic oligonucleotide
  Antisense strand to SEQ ID NO: 2021914
uucucuacucagcacuucg

SEQ ID NO: 2021916 - RNA, 19 nt, Artificial Sequence
  Description of Artificial Sequence: Synthetic oligonucleotide
  Sense strand starting at position 1887 of SEQ ID NO: 1881148
acagcuguacgucgagaaa

SEQ ID NO: 2021917 - RNA, 19 nt, Artificial Sequence
  Description of Artificial Sequence: Synthetic oligonucleotide
  Antisense strand to SEQ ID NO: 2021916
uuucucgacguacagcugu

SEQ ID NO: 2021918 - RNA, 19 nt, Artificial Sequence
  Description of Artificial Sequence: Synthetic oligonucleotide
  Sense strand starting at position 1889 of SEQ ID NO: 1881148
agcuguacgucgagaaaga

SEQ ID NO: 2021919 - RNA, 19 nt, Artificial Sequence
  Description of Artificial Sequence: Synthetic oligonucleotide
  Antisense strand to SEQ ID NO: 2021918
ucuuucucgacguacagcu

SEQ ID NO: 2021920 - RNA, 19 nt, Artificial Sequence
  Description of Artificial Sequence: Synthetic oligonucleotide
  Sense strand starting at position 3643 of SEQ ID NO: 1881148
gaggguuaggguugaguga

SEQ ID NO: 2021921 - RNA, 19 nt, Artificial Sequence
  Description of Artificial Sequence: Synthetic oligonucleotide
  Antisense strand to SEQ ID NO: 2021920
ucacucaacccuaacccuc

SEQ ID NO: 2021922 - RNA, 19 nt, Artificial Sequence
  Description of Artificial Sequence: Synthetic oligonucleotide
  Sense strand starting at position 63 of SEQ ID NO: 1881149
ggcuaaauauauuccagca

SEQ ID NO: 2021923 - RNA, 19 nt, Artificial Sequence
  Description of Artificial Sequence: Synthetic oligonucleotide
  Antisense strand to SEQ ID NO: 2021922
ugcuggaauauauuuagcc

SEQ ID NO: 2021924 - RNA, 19 nt, Artificial Sequence
  Description of Artificial Sequence: Synthetic oligonucleotide
  Sense strand starting at position 504 of SEQ ID NO: 1881149
accucacuguguuuauaca

SEQ ID NO: 2021925 - RNA, 19 nt, Artificial Sequence
  Description of Artificial Sequence: Synthetic oligonucleotide
  Antisense strand to SEQ ID NO: 2021924
uguauaaacacagugaggu

SEQ ID NO: 2021926 - RNA, 19 nt, Artificial Sequence
  Description of Artificial Sequence: Synthetic oligonucleotide
  Sense strand starting at position 523 of SEQ ID NO: 1881149
guuaauaugcacuagcuaa

SEQ ID NO: 2021927 - RNA, 19 nt, Artificial Sequence
  Description of Artificial Sequence: Synthetic oligonucleotide
  Antisense strand to SEQ ID NO: 2021926
uuagcuagugcauauuaac

SEQ ID NO: 2021928 - RNA, 19 nt, Artificial Sequence
  Description of Artificial Sequence: Synthetic oligonucleotide
  Sense strand starting at position 647 of SEQ ID NO: 1881149
gugccuguugugccuuaua

SEQ ID NO: 2021929 - RNA, 19 nt, Artificial Sequence
  Description of Artificial Sequence: Synthetic oligonucleotide
  Antisense strand to SEQ ID NO: 2021928
uauaaggcacaacaggcac

SEQ ID NO: 2021930 - RNA, 19 nt, Artificial Sequence
  Description of Artificial Sequence: Synthetic oligonucleotide
  Sense strand starting at position 650 of SEQ ID NO: 1881149
ccuguugugccuuauaaag

SEQ ID NO: 2021931 - RNA, 19 nt, Artificial Sequence
  Description of Artificial Sequence: Synthetic oligonucleotide
  Antisense strand to SEQ ID NO: 2021930
cuuuauaaggcacaacagg

SEQ ID NO: 2021932 - RNA, 19 nt, Artificial Sequence
  Description of Artificial Sequence: Synthetic oligonucleotide
  Sense strand starting at position 735 of SEQ ID NO: 1881149
auucuugacgcugaugaga

SEQ ID NO: 2021933 - RNA, 19 nt, Artificial Sequence
  Description of Artificial Sequence: Synthetic oligonucleotide
  Antisense strand to SEQ ID NO: 2021932
ucucaucagcgucaagaau

SEQ ID NO: 2021934 - RNA, 19 nt, Artificial Sequence
  Description of Artificial Sequence: Synthetic oligonucleotide
  Sense strand starting at position 1000 of SEQ ID NO: 1881149
gcaguauugguugcgccau

SEQ ID NO: 2021935 - RNA, 19 nt, Artificial Sequence
  Description of Artificial Sequence: Synthetic oligonucleotide
  Antisense strand to SEQ ID NO: 2021934
auggcgcaaccaauacugc

SEQ ID NO: 2021936 - RNA, 19 nt, Artificial Sequence
  Description of Artificial Sequence: Synthetic oligonucleotide
  Sense strand starting at position 1220 of SEQ ID NO: 1881149
uuguuucugccucagauga

SEQ ID NO: 2021937 - RNA, 19 nt, Artificial Sequence
  Description of Artificial Sequence: Synthetic oligonucleotide
  Antisense strand to SEQ ID NO: 2021936
ucaucugaggcagaaacaa

SEQ ID NO: 2021938 - RNA, 19 nt, Artificial Sequence
  Description of Artificial Sequence: Synthetic oligonucleotide
  Sense strand starting at position 1406 of SEQ ID NO: 1881149
agaguaaccuuauccguua

SEQ ID NO: 2021939 - RNA, 19 nt, Artificial Sequence
  Description of Artificial Sequence: Synthetic oligonucleotide
  Antisense strand to SEQ ID NO: 2021938
uaacggauaagguuacucu

SEQ ID NO: 2021940 - RNA, 19 nt, Artificial Sequence
  Description of Artificial Sequence: Synthetic oligonucleotide
  Sense strand starting at position 1915 of SEQ ID NO: 1881149
caguuagguccgggacaga

SEQ ID NO: 2021941 - RNA, 19 nt, Artificial Sequence
  Description of Artificial Sequence: Synthetic oligonucleotide
  Antisense strand to SEQ ID NO: 2021940
ucugucccggaccuaacug

SEQ ID NO: 2021942 - RNA, 19 nt, Artificial Sequence
  Description of Artificial Sequence: Synthetic oligonucleotide
  Sense strand starting at position 2057 of SEQ ID NO: 1881149
uggucaucucggcucggua

SEQ ID NO: 2021943 - RNA, 19 nt, Artificial Sequence
  Description of Artificial Sequence: Synthetic oligonucleotide
  Antisense strand to SEQ ID NO: 2021942
uaccgagccgagaugacca

SEQ ID NO: 2021944 - RNA, 19 nt, Artificial Sequence
  Description of Artificial Sequence: Synthetic oligonucleotide
  Sense strand starting at position 2084 of SEQ ID NO: 1881149
agggacuuccuuugcacau

SEQ ID NO: 2021945 - RNA, 19 nt, Artificial Sequence
  Description of Artificial Sequence: Synthetic oligonucleotide
  Antisense strand to SEQ ID NO: 2021944
augugcaaaggaagucccu

SEQ ID NO: 2021946 - RNA, 19 nt, Artificial Sequence
  Description of Artificial Sequence: Synthetic oligonucleotide
  Sense strand starting at position 2121 of SEQ ID NO: 1881149
ggcuuuguuggagauugac

SEQ ID NO: 2021947 - RNA, 19 nt, Artificial Sequence
  Description of Artificial Sequence: Synthetic oligonucleotide
  Antisense strand to SEQ ID NO: 2021946
gucaaucuccaacaaagcc

SEQ ID NO: 2021948 - RNA, 19 nt, Artificial Sequence
  Description of Artificial Sequence: Synthetic oligonucleotide
  Sense strand starting at position 2330 of SEQ ID NO: 1881149
gugaaagaauacuuucugu

SEQ ID NO: 2021949 - RNA, 19 nt, Artificial Sequence
  Description of Artificial Sequence: Synthetic oligonucleotide
  Antisense strand to SEQ ID NO: 2021948
acagaaaguauucuuucac

SEQ ID NO: 2021950 - RNA, 19 nt, Artificial Sequence
  Description of Artificial Sequence: Synthetic oligonucleotide
  Sense strand starting at position 2335 of SEQ ID NO: 1881149
agaauacuuucuguagaga

SEQ ID NO: 2021951 - RNA, 19 nt, Artificial Sequence
  Description of Artificial Sequence: Synthetic oligonucleotide
  Antisense strand to SEQ ID NO: 2021950
ucucuacagaaaguauucu

SEQ ID NO: 2021952 - RNA, 19 nt, Artificial Sequence
  Description of Artificial Sequence: Synthetic oligonucleotide
  Sense strand starting at position 2375 of SEQ ID NO: 1881149
cuuugaaggcuuuauguau

SEQ ID NO: 2021953 - RNA, 19 nt, Artificial Sequence
  Description of Artificial Sequence: Synthetic oligonucleotide
  Antisense strand to SEQ ID NO: 2021952
auacauaaagccuucaaag

SEQ ID NO: 2021954 - RNA, 19 nt, Artificial Sequence
  Description of Artificial Sequence: Synthetic oligonucleotide
  Sense strand starting at position 2781 of SEQ ID NO: 1881149
uguacucuugugggacaca

SEQ ID NO: 2021955 - RNA, 19 nt, Artificial Sequence
  Description of Artificial Sequence: Synthetic oligonucleotide
  Antisense strand to SEQ ID NO: 2021954
ugugucccacaagaguaca

SEQ ID NO: 2021956 - RNA, 19 nt, Artificial Sequence
  Description of Artificial Sequence: Synthetic oligonucleotide
  Sense strand starting at position 2807 of SEQ ID NO: 1881149
agugucaucaguuaaguuu

SEQ ID NO: 2021957 - RNA, 19 nt, Artificial Sequence
  Description of Artificial Sequence: Synthetic oligonucleotide
  Antisense strand to SEQ ID NO: 2021956
aaacuuaacugaugacacu

SEQ ID NO: 2021958 - RNA, 19 nt, Artificial Sequence
  Description of Artificial Sequence: Synthetic oligonucleotide
  Sense strand starting at position 2816 of SEQ ID NO: 1881149
aguuaaguuuaguccuaau

SEQ ID NO: 2021959 - RNA, 19 nt, Artificial Sequence
  Description of Artificial Sequence: Synthetic oligonucleotide
  Antisense strand to SEQ ID NO: 2021958
auuaggacuaaacuuaacu

SEQ ID NO: 2021960 - RNA, 19 nt, Artificial Sequence
  Description of Artificial Sequence: Synthetic oligonucleotide
  Sense strand starting at position 2860 of SEQ ID NO: 1881149
cugauaggcuaaucauaau

SEQ ID NO: 2021961 - RNA, 19 nt, Artificial Sequence
  Description of Artificial Sequence: Synthetic oligonucleotide
  Antisense strand to SEQ ID NO: 2021960
auuaugauuagccuaucag

SEQ ID NO: 2021962 - RNA, 19 nt, Artificial Sequence
  Description of Artificial Sequence: Synthetic oligonucleotide
  Sense strand starting at position 2912 of SEQ ID NO: 1881149
acucuauggucauaauuug

SEQ ID NO: 2021963 - RNA, 19 nt, Artificial Sequence
  Description of Artificial Sequence: Synthetic oligonucleotide
  Antisense strand to SEQ ID NO: 2021962
caaauuaugaccauagagu

SEQ ID NO: 2021964 - RNA, 19 nt, Artificial Sequence
  Description of Artificial Sequence: Synthetic oligonucleotide
  Sense strand starting at position 2918 of SEQ ID NO: 1881149
uggucauaauuuggaaaua

SEQ ID NO: 2021965 - RNA, 19 nt, Artificial Sequence
  Description of Artificial Sequence: Synthetic oligonucleotide
  Antisense strand to SEQ ID NO: 2021964
uauuuccaaauuaugacca

SEQ ID NO: 2021966 - RNA, 19 nt, Artificial Sequence
  Description of Artificial Sequence: Synthetic oligonucleotide
  Sense strand starting at position 2919 of SEQ ID NO: 1881149
ggucauaauuuggaaauau

SEQ ID NO: 2021967 - RNA, 19 nt, Artificial Sequence
  Description of Artificial Sequence: Synthetic oligonucleotide
  Antisense strand to SEQ ID NO: 2021966
auauuuccaaauuaugacc

SEQ ID NO: 2021968 - RNA, 19 nt, Artificial Sequence
  Description of Artificial Sequence: Synthetic oligonucleotide
  Sense strand starting at position 2927 of SEQ ID NO: 1881149
uuuggaaauaucggauguu

SEQ ID NO: 2021969 - RNA, 19 nt, Artificial Sequence
  Description of Artificial Sequence: Synthetic oligonucleotide
  Antisense strand to SEQ ID NO: 2021968
aacauccgauauuuccaaa

SEQ ID NO: 2021970 - RNA, 19 nt, Artificial Sequence
  Description of Artificial Sequence: Synthetic oligonucleotide
  Sense strand starting at position 3092 of SEQ ID NO: 1881149
ccuuauaaucucgggaucu

SEQ ID NO: 2021971 - RNA, 19 nt, Artificial Sequence
  Description of Artificial Sequence: Synthetic oligonucleotide
  Antisense strand to SEQ ID NO: 2021970
agaucccgagauuauaagg

SEQ ID NO: 2021972 - RNA, 19 nt, Artificial Sequence
  Description of Artificial Sequence: Synthetic oligonucleotide
  Sense strand starting at position 3094 of SEQ ID NO: 1881149
uuauaaucucgggaucuuu

SEQ ID NO: 2021973 - RNA, 19 nt, Artificial Sequence
  Description of Artificial Sequence: Synthetic oligonucleotide
  Antisense strand to SEQ ID NO: 2021972
aaagaucccgagauuauaa

SEQ ID NO: 2021974 - RNA, 19 nt, Artificial Sequence
  Description of Artificial Sequence: Synthetic oligonucleotide
  Sense strand starting at position 3144 of SEQ ID NO: 1881149
acaggaaagugucucaaga

SEQ ID NO: 2021975 - RNA, 19 nt, Artificial Sequence
  Description of Artificial Sequence: Synthetic oligonucleotide
  Antisense strand to SEQ ID NO: 2021974
ucuugagacacuuuccugu

SEQ ID NO: 2021976 - RNA, 19 nt, Artificial Sequence
  Description of Artificial Sequence: Synthetic oligonucleotide
  Sense strand starting at position 3221 of SEQ ID NO: 1881149
gauagugucagguagcuau

SEQ ID NO: 2021977 - RNA, 19 nt, Artificial Sequence
  Description of Artificial Sequence: Synthetic oligonucleotide
  Antisense strand to SEQ ID NO: 2021976
auagcuaccugacacuauc

SEQ ID NO: 2021978 - RNA, 19 nt, Artificial Sequence
  Description of Artificial Sequence: Synthetic oligonucleotide
  Sense strand starting at position 3225 of SEQ ID NO: 1881149
gugucagguagcuaugaug

SEQ ID NO: 2021979 - RNA, 19 nt, Artificial Sequence
  Description of Artificial Sequence: Synthetic oligonucleotide
  Antisense strand to SEQ ID NO: 2021978
caucauagcuaccugacac

SEQ ID NO: 2021980 - RNA, 19 nt, Artificial Sequence
  Description of Artificial Sequence: Synthetic oligonucleotide
  Sense strand starting at position 3237 of SEQ ID NO: 1881149
uaugauggccucuguagaa

SEQ ID NO: 2021981 - RNA, 19 nt, Artificial Sequence
  Description of Artificial Sequence: Synthetic oligonucleotide
  Antisense strand to SEQ ID NO: 2021980
uucuacagaggccaucaua

SEQ ID NO: 2021982 - RNA, 19 nt, Artificial Sequence
  Description of Artificial Sequence: Synthetic oligonucleotide
  Sense strand starting at position 3375 of SEQ ID NO: 1881149
acucuuaaacuaugggauu

SEQ ID NO: 2021983 - RNA, 19 nt, Artificial Sequence
  Description of Artificial Sequence: Synthetic oligonucleotide
  Antisense strand to SEQ ID NO: 2021982
aaucccauaguuuaagagu

SEQ ID NO: 2021984 - RNA, 19 nt, Artificial Sequence
  Description of Artificial Sequence: Synthetic oligonucleotide
  Sense strand starting at position 3465 of SEQ ID NO: 1881149
ucaguuacugguggaaagu

SEQ ID NO: 2021985 - RNA, 19 nt, Artificial Sequence
  Description of Artificial Sequence: Synthetic oligonucleotide
  Antisense strand to SEQ ID NO: 2021984
acuuuccaccaguaacuga

SEQ ID NO: 2021986 - RNA, 19 nt, Artificial Sequence
  Description of Artificial Sequence: Synthetic oligonucleotide
  Sense strand starting at position 3500 of SEQ ID NO: 1881149
cgaggauaaccugguuuac

SEQ ID NO: 2021987 - RNA, 19 nt, Artificial Sequence
  Description of Artificial Sequence: Synthetic oligonucleotide
  Antisense strand to SEQ ID NO: 2021986
guaaaccagguuauccucg

SEQ ID NO: 2021988 - RNA, 19 nt, Artificial Sequence
  Description of Artificial Sequence: Synthetic oligonucleotide
  Sense strand starting at position 3502 of SEQ ID NO: 1881149
aggauaaccugguuuacau

SEQ ID NO: 2021989 - RNA, 19 nt, Artificial Sequence
  Description of Artificial Sequence: Synthetic oligonucleotide
  Antisense strand to SEQ ID NO: 2021988
auguaaaccagguuauccu

SEQ ID NO: 2021990 - RNA, 19 nt, Artificial Sequence
  Description of Artificial Sequence: Synthetic oligonucleotide
  Sense strand starting at position 3536 of SEQ ID NO: 1881149
uaaagagauugugcagaaa

SEQ ID NO: 2021991 - RNA, 19 nt, Artificial Sequence
  Description of Artificial Sequence: Synthetic oligonucleotide
  Antisense strand to SEQ ID NO: 2021990
uuucugcacaaucucuuua

SEQ ID NO: 2021992 - RNA, 19 nt, Artificial Sequence
  Description of Artificial Sequence: Synthetic oligonucleotide
  Sense strand starting at position 3646 of SEQ ID NO: 1881149
uuaaacuguggaugaguaa

SEQ ID NO: 2021993 - RNA, 19 nt, Artificial Sequence
  Description of Artificial Sequence: Synthetic oligonucleotide
  Antisense strand to SEQ ID NO: 2021992
uuacucauccacaguuuaa

SEQ ID NO: 2021994 - RNA, 19 nt, Artificial Sequence
  Description of Artificial Sequence: Synthetic oligonucleotide
  Sense strand starting at position 3653 of SEQ ID NO: 1881149
guggaugaguaaccacuaa

SEQ ID NO: 2021995 - RNA, 19 nt, Artificial Sequence
  Description of Artificial Sequence: Synthetic oligonucleotide
  Antisense strand to SEQ ID NO: 2021994
uuagugguuacucauccac

SEQ ID NO: 2021996 - RNA, 19 nt, Artificial Sequence
  Description of Artificial Sequence: Synthetic oligonucleotide
  Sense strand starting at position 3932 of SEQ ID NO: 1881149
uggugaaaucugggcuuag

SEQ ID NO: 2021997 - RNA, 19 nt, Artificial Sequence
  Description of Artificial Sequence: Synthetic oligonucleotide
  Antisense strand to SEQ ID NO: 2021996
cuaagcccagauuucacca

SEQ ID NO: 2021998 - RNA, 19 nt, Artificial Sequence
  Description of Artificial Sequence: Synthetic oligonucleotide
  Sense strand starting at position 3933 of SEQ ID NO: 1881149
ggugaaaucugggcuuagu

SEQ ID NO: 2021999 - RNA, 19 nt, Artificial Sequence
  Description of Artificial Sequence: Synthetic oligonucleotide
  Antisense strand to SEQ ID NO: 2021998
acuaagcccagauuucacc

SEQ ID NO: 2022000 - RNA, 19 nt, Artificial Sequence
  Description of Artificial Sequence: Synthetic oligonucleotide
  Sense strand starting at position 3936 of SEQ ID NO: 1881149
gaaaucugggcuuaguaua

SEQ ID NO: 2022001 - RNA, 19 nt, Artificial Sequence
  Description of Artificial Sequence: Synthetic oligonucleotide
  Antisense strand to SEQ ID NO: 2022000
uauacuaagcccagauuuc

SEQ ID NO: 2022002 - RNA, 19 nt, Artificial Sequence
  Description of Artificial Sequence: Synthetic oligonucleotide
  Sense strand starting at position 121 of SEQ ID NO: 1881150
ggcagaaugcugggaauca

SEQ ID NO: 2022003 - RNA, 19 nt, Artificial Sequence
  Description of Artificial Sequence: Synthetic oligonucleotide
  Antisense strand to SEQ ID NO: 2022002
ugauucccagcauucugcc

SEQ ID NO: 2022004 - RNA, 19 nt, Artificial Sequence
  Description of Artificial Sequence: Synthetic oligonucleotide
  Sense strand starting at position 160 of SEQ ID NO: 1881150
gaaagugaaggucaugcua

SEQ ID NO: 2022005 - RNA, 19 nt, Artificial Sequence
  Description of Artificial Sequence: Synthetic oligonucleotide
  Antisense strand to SEQ ID NO: 2022004
uagcaugaccuucacuuuc

SEQ ID NO: 2022006 - RNA, 19 nt, Artificial Sequence
  Description of Artificial Sequence: Synthetic oligonucleotide
  Sense strand starting at position 181 of SEQ ID NO: 1881150
auuaguaagccagggugau

SEQ ID NO: 2022007 - RNA, 19 nt, Artificial Sequence
  Description of Artificial Sequence: Synthetic oligonucleotide
  Antisense strand to SEQ ID NO: 2022006
aucacccuggcuuacuaau

SEQ ID NO: 2022008 - RNA, 19 nt, Artificial Sequence
  Description of Artificial Sequence: Synthetic oligonucleotide
  Sense strand starting at position 279 of SEQ ID NO: 1881150
cucacaugacucugugaca

SEQ ID NO: 2022009 - RNA, 19 nt, Artificial Sequence
  Description of Artificial Sequence: Synthetic oligonucleotide
  Antisense strand to SEQ ID NO: 2022008
ugucacagagucaugugag

SEQ ID NO: 2022010 - RNA, 19 nt, Artificial Sequence
  Description of Artificial Sequence: Synthetic oligonucleotide
  Sense strand starting at position 280 of SEQ ID NO: 1881150
ucacaugacucugugacau

SEQ ID NO: 2022011 - RNA, 19 nt, Artificial Sequence
  Description of Artificial Sequence: Synthetic oligonucleotide
  Antisense strand to SEQ ID NO: 2022010
augucacagagucauguga

SEQ ID NO: 2022012 - RNA, 19 nt, Artificial Sequence
  Description of Artificial Sequence: Synthetic oligonucleotide
  Sense strand starting at position 286 of SEQ ID NO: 1881150
gacucugugacaugcggua

SEQ ID NO: 2022013 - RNA, 19 nt, Artificial Sequence
  Description of Artificial Sequence: Synthetic oligonucleotide
  Antisense strand to SEQ ID NO: 2022012
uaccgcaugucacagaguc

SEQ ID NO: 2022014 - RNA, 19 nt, Artificial Sequence
  Description of Artificial Sequence: Synthetic oligonucleotide
  Sense strand starting at position 413 of SEQ ID NO: 1881150
ggaacugauccaugaguau

SEQ ID NO: 2022015 - RNA, 19 nt, Artificial Sequence
  Description of Artificial Sequence: Synthetic oligonucleotide
  Antisense strand to SEQ ID NO: 2022014
auacucauggaucaguucc

SEQ ID NO: 2022016 - RNA, 19 nt, Artificial Sequence
  Description of Artificial Sequence: Synthetic oligonucleotide
  Sense strand starting at position 426 of SEQ ID NO: 1881150
gaguaucgagaguaaagcu

SEQ ID NO: 2022017 - RNA, 19 nt, Artificial Sequence
  Description of Artificial Sequence: Synthetic oligonucleotide
  Antisense strand to SEQ ID NO: 2022016
agcuuuacucucgauacuc

SEQ ID NO: 2022018 - RNA, 19 nt, Artificial Sequence
  Description of Artificial Sequence: Synthetic oligonucleotide
  Sense strand starting at position 659 of SEQ ID NO: 1881150
aucaaacaucauuguguuu

SEQ ID NO: 2022019 - RNA, 19 nt, Artificial Sequence
  Description of Artificial Sequence: Synthetic oligonucleotide
  Antisense strand to SEQ ID NO: 2022018
aaacacaaugauguuugau

SEQ ID NO: 2022020 - RNA, 19 nt, Artificial Sequence
  Description of Artificial Sequence: Synthetic oligonucleotide
  Sense strand starting at position 664 of SEQ ID NO: 1881150
acaucauuguguuucucuu

SEQ ID NO: 2022021 - RNA, 19 nt, Artificial Sequence
  Description of Artificial Sequence: Synthetic oligonucleotide
  Antisense strand to SEQ ID NO: 2022020
aagagaaacacaaugaugu

SEQ ID NO: 2022022 - RNA, 19 nt, Artificial Sequence
  Description of Artificial Sequence: Synthetic oligonucleotide
  Sense strand starting at position 939 of SEQ ID NO: 1881150
cuggaaugucugggauuac

SEQ ID NO: 2022023 - RNA, 19 nt, Artificial Sequence
  Description of Artificial Sequence: Synthetic oligonucleotide
  Antisense strand to SEQ ID NO: 2022022
guaaucccagacauuccag

SEQ ID NO: 2022024 - RNA, 19 nt, Artificial Sequence
  Description of Artificial Sequence: Synthetic oligonucleotide
  Sense strand starting at position 993 of SEQ ID NO: 1881150
uguuuauagauccgggauc

SEQ ID NO: 2022025 - RNA, 19 nt, Artificial Sequence
  Description of Artificial Sequence: Synthetic oligonucleotide
  Antisense strand to SEQ ID NO: 2022024
gaucccggaucuauaaaca

SEQ ID NO: 2022026 - RNA, 19 nt, Artificial Sequence
  Description of Artificial Sequence: Synthetic oligonucleotide
  Sense strand starting at position 995 of SEQ ID NO: 1881150
uuuauagauccgggaucuc

SEQ ID NO: 2022027 - RNA, 19 nt, Artificial Sequence
  Description of Artificial Sequence: Synthetic oligonucleotide
  Antisense strand to SEQ ID NO: 2022026
gagaucccggaucuauaaa

SEQ ID NO: 2022028 - RNA, 19 nt, Artificial Sequence
  Description of Artificial Sequence: Synthetic oligonucleotide
  Sense strand starting at position 1110 of SEQ ID NO: 1881150
ccaggcuaguuucuuaauu

SEQ ID NO: 2022029 - RNA, 19 nt, Artificial Sequence
  Description of Artificial Sequence: Synthetic oligonucleotide
  Antisense strand to SEQ ID NO: 2022028
aauuaagaaacuagccugg

SEQ ID NO: 2022030 - RNA, 19 nt, Artificial Sequence
  Description of Artificial Sequence: Synthetic oligonucleotide
  Sense strand starting at position 1178 of SEQ ID NO: 1881150
gacacaucuuuggugggaa

SEQ ID NO: 2022031 - RNA, 19 nt, Artificial Sequence
  Description of Artificial Sequence: Synthetic oligonucleotide
  Antisense strand to SEQ ID NO: 2022030
uucccaccaaagauguguc

SEQ ID NO: 2022032 - RNA, 19 nt, Artificial Sequence
  Description of Artificial Sequence: Synthetic oligonucleotide
  Sense strand starting at position 1268 of SEQ ID NO: 1881150
ugcugagucguugacccaa

SEQ ID NO: 2022033 - RNA, 19 nt, Artificial Sequence
  Description of Artificial Sequence: Synthetic oligonucleotide
  Antisense strand to SEQ ID NO: 2022032
uugggucaacgacucagca

SEQ ID NO: 2022034 - RNA, 19 nt, Artificial Sequence
  Description of Artificial Sequence: Synthetic oligonucleotide
  Sense strand starting at position 1270 of SEQ ID NO: 1881150
cugagucguugacccaaga

SEQ ID NO: 2022035 - RNA, 19 nt, Artificial Sequence
  Description of Artificial Sequence: Synthetic oligonucleotide
  Antisense strand to SEQ ID NO: 2022034
ucuugggucaacgacucag

SEQ ID NO: 2022036 - RNA, 19 nt, Artificial Sequence
  Description of Artificial Sequence: Synthetic oligonucleotide
  Sense strand starting at position 1422 of SEQ ID NO: 1881150
cugggcuguucucucaauu

SEQ ID NO: 2022037 - RNA, 19 nt, Artificial Sequence
  Description of Artificial Sequence: Synthetic oligonucleotide
  Antisense strand to SEQ ID NO: 2022036
aauugagagaacagcccag

SEQ ID NO: 2022038 - RNA, 19 nt, Artificial Sequence
  Description of Artificial Sequence: Synthetic oligonucleotide
  Sense strand starting at position 1488 of SEQ ID NO: 1881150
ggguuaaacuuguccuccu

SEQ ID NO: 2022039 - RNA, 19 nt, Artificial Sequence
  Description of Artificial Sequence: Synthetic oligonucleotide
  Antisense strand to SEQ ID NO: 2022038
aggaggacaaguuuaaccc

SEQ ID NO: 2022040 - RNA, 19 nt, Artificial Sequence
  Description of Artificial Sequence: Synthetic oligonucleotide
  Sense strand starting at position 1541 of SEQ ID NO: 1881150
gugucaucaccacgggauu

SEQ ID NO: 2022041 - RNA, 19 nt, Artificial Sequence
  Description of Artificial Sequence: Synthetic oligonucleotide
  Antisense strand to SEQ ID NO: 2022040
aaucccguggugaugacac

SEQ ID NO: 2022042 - RNA, 19 nt, Artificial Sequence
  Description of Artificial Sequence: Synthetic oligonucleotide
  Sense strand starting at position 1881 of SEQ ID NO: 1881150
ggguggguuucugcgaaca

SEQ ID NO: 2022043 - RNA, 19 nt, Artificial Sequence
  Description of Artificial Sequence: Synthetic oligonucleotide
  Antisense strand to SEQ ID NO: 2022042
uguucgcagaaacccaccc

SEQ ID NO: 2022044 - RNA, 19 nt, Artificial Sequence
  Description of Artificial Sequence: Synthetic oligonucleotide
  Sense strand starting at position 1989 of SEQ ID NO: 1881150
ccuguuaccuacucagagu

SEQ ID NO: 2022045 - RNA, 19 nt, Artificial Sequence
  Description of Artificial Sequence: Synthetic oligonucleotide
  Antisense strand to SEQ ID NO: 2022044
acucugaguagguaacagg

SEQ ID NO: 2022046 - RNA, 19 nt, Artificial Sequence
  Description of Artificial Sequence: Synthetic oligonucleotide
  Sense strand starting at position 2091 of SEQ ID NO: 1881150
acaguucccuuaucucaga

SEQ ID NO: 2022047 - RNA, 19 nt, Artificial Sequence
  Description of Artificial Sequence: Synthetic oligonucleotide
  Antisense strand to SEQ ID NO: 2022046
ucugagauaagggaacugu

SEQ ID NO: 2022048 - RNA, 19 nt, Artificial Sequence
  Description of Artificial Sequence: Synthetic oligonucleotide
  Sense strand starting at position 2113 of SEQ ID NO: 1881150
ccagaagacggcugucaaa

SEQ ID NO: 2022049 - RNA, 19 nt, Artificial Sequence
  Description of Artificial Sequence: Synthetic oligonucleotide
  Antisense strand to SEQ ID NO: 2022048
uuugacagccgucuucugg

SEQ ID NO: 2022050 - RNA, 19 nt, Artificial Sequence
  Description of Artificial Sequence: Synthetic oligonucleotide
  Sense strand starting at position 2453 of SEQ ID NO: 1881150
cugugugucaucuauguau

SEQ ID NO: 2022051 - RNA, 19 nt, Artificial Sequence
  Description of Artificial Sequence: Synthetic oligonucleotide
  Antisense strand to SEQ ID NO: 2022050
auacauagaugacacacag

SEQ ID NO: 2022052 - RNA, 19 nt, Artificial Sequence
  Description of Artificial Sequence: Synthetic oligonucleotide
  Sense strand starting at position 2455 of SEQ ID NO: 1881150
gugugucaucuauguauuu

SEQ ID NO: 2022053 - RNA, 19 nt, Artificial Sequence
  Description of Artificial Sequence: Synthetic oligonucleotide
  Antisense strand to SEQ ID NO: 2022052
aaauacauagaugacacac

SEQ ID NO: 2022054 - RNA, 19 nt, Artificial Sequence
  Description of Artificial Sequence: Synthetic oligonucleotide
  Sense strand starting at position 2456 of SEQ ID NO: 1881150
ugugucaucuauguauuua

SEQ ID NO: 2022055 - RNA, 19 nt, Artificial Sequence
  Description of Artificial Sequence: Synthetic oligonucleotide
  Antisense strand to SEQ ID NO: 2022054
uaaauacauagaugacaca

SEQ ID NO: 2022056 - RNA, 19 nt, Artificial Sequence
  Description of Artificial Sequence: Synthetic oligonucleotide
  Sense strand starting at position 2477 of SEQ ID NO: 1881150
cccuuauggccauguugau

SEQ ID NO: 2022057 - RNA, 19 nt, Artificial Sequence
  Description of Artificial Sequence: Synthetic oligonucleotide
  Antisense strand to SEQ ID NO: 2022056
aucaacauggccauaaggg

SEQ ID NO: 2022058 - RNA, 19 nt, Artificial Sequence
  Description of Artificial Sequence: Synthetic oligonucleotide
  Sense strand starting at position 2633 of SEQ ID NO: 1881150
aaaguaagccaucguacuu

SEQ ID NO: 2022059 - RNA, 19 nt, Artificial Sequence
  Description of Artificial Sequence: Synthetic oligonucleotide
  Antisense strand to SEQ ID NO: 2022058
aaguacgauggcuuacuuu

SEQ ID NO: 2022060 - RNA, 19 nt, Artificial Sequence
  Description of Artificial Sequence: Synthetic oligonucleotide
  Sense strand starting at position 2645 of SEQ ID NO: 1881150
cguacuugguucucuuuaa

SEQ ID NO: 2022061 - RNA, 19 nt, Artificial Sequence
  Description of Artificial Sequence: Synthetic oligonucleotide
  Antisense strand to SEQ ID NO: 2022060
uuaaagagaaccaaguacg

SEQ ID NO: 2022062 - RNA, 19 nt, Artificial Sequence
  Description of Artificial Sequence: Synthetic oligonucleotide
  Sense strand starting at position 2646 of SEQ ID NO: 1881150
guacuugguucucuuuaau

SEQ ID NO: 2022063 - RNA, 19 nt, Artificial Sequence
  Description of Artificial Sequence: Synthetic oligonucleotide
  Antisense strand to SEQ ID NO: 2022062
auuaaagagaaccaaguac

SEQ ID NO: 2022064 - RNA, 19 nt, Artificial Sequence
  Description of Artificial Sequence: Synthetic oligonucleotide
  Sense strand starting at position 2697 of SEQ ID NO: 1881150
gcaaguccuguuucugcua

SEQ ID NO: 2022065 - RNA, 19 nt, Artificial Sequence
  Description of Artificial Sequence: Synthetic oligonucleotide
  Antisense strand to SEQ ID NO: 2022064
uagcagaaacaggacuugc

SEQ ID NO: 2022066 - RNA, 19 nt, Artificial Sequence
  Description of Artificial Sequence: Synthetic oligonucleotide
  Sense strand starting at position 2737 of SEQ ID NO: 1881150
ggcggugucaugccagcuu

SEQ ID NO: 2022067 - RNA, 19 nt, Artificial Sequence
  Description of Artificial Sequence: Synthetic oligonucleotide
  Antisense strand to SEQ ID NO: 2022066
aagcuggcaugacaccgcc

SEQ ID NO: 2022068 - RNA, 19 nt, Artificial Sequence
  Description of Artificial Sequence: Synthetic oligonucleotide
  Sense strand starting at position 2741 of SEQ ID NO: 1881150
gugucaugccagcuuuauu

SEQ ID NO: 2022069 - RNA, 19 nt, Artificial Sequence
  Description of Artificial Sequence: Synthetic oligonucleotide
  Antisense strand to SEQ ID NO: 2022068
aauaaagcuggcaugacac

SEQ ID NO: 2022070 - RNA, 19 nt, Artificial Sequence
  Description of Artificial Sequence: Synthetic oligonucleotide
  Sense strand starting at position 2802 of SEQ ID NO: 1881150
caacuagauugggaauggu

SEQ ID NO: 2022071 - RNA, 19 nt, Artificial Sequence
  Description of Artificial Sequence: Synthetic oligonucleotide
  Antisense strand to SEQ ID NO: 2022070
accauucccaaucuaguug

SEQ ID NO: 2022072 - RNA, 19 nt, Artificial Sequence
  Description of Artificial Sequence: Synthetic oligonucleotide
  Sense strand starting at position 2835 of SEQ ID NO: 1881150
gugggcacacguuaaagaa

SEQ ID NO: 2022073 - RNA, 19 nt, Artificial Sequence
  Description of Artificial Sequence: Synthetic oligonucleotide
  Antisense strand to SEQ ID NO: 2022072
uucuuuaacgugugcccac

SEQ ID NO: 2022074 - RNA, 19 nt, Artificial Sequence
  Description of Artificial Sequence: Synthetic oligonucleotide
  Sense strand starting at position 2878 of SEQ ID NO: 1881150
agggaauuacucuggcuaa

SEQ ID NO: 2022075 - RNA, 19 nt, Artificial Sequence
  Description of Artificial Sequence: Synthetic oligonucleotide
  Antisense strand to SEQ ID NO: 2022074
uuagccagaguaauucccu

SEQ ID NO: 2022076 - RNA, 19 nt, Artificial Sequence
  Description of Artificial Sequence: Synthetic oligonucleotide
  Sense strand starting at position 2945 of SEQ ID NO: 1881150
uuuguuguuuccuccagga

SEQ ID NO: 2022077 - RNA, 19 nt, Artificial Sequence
  Description of Artificial Sequence: Synthetic oligonucleotide
  Antisense strand to SEQ ID NO: 2022076
uccuggaggaaacaacaaa

SEQ ID NO: 2022078 - RNA, 19 nt, Artificial Sequence
  Description of Artificial Sequence: Synthetic oligonucleotide
  Sense strand starting at position 2947 of SEQ ID NO: 1881150
uguuguuuccuccaggaua

SEQ ID NO: 2022079 - RNA, 19 nt, Artificial Sequence
  Description of Artificial Sequence: Synthetic oligonucleotide
  Antisense strand to SEQ ID NO: 2022078
uauccuggaggaaacaaca

SEQ ID NO: 2022080 - RNA, 19 nt, Artificial Sequence
  Description of Artificial Sequence: Synthetic oligonucleotide
  Sense strand starting at position 2949 of SEQ ID NO: 1881150
uuguuuccuccaggauaag

SEQ ID NO: 2022081 - RNA, 19 nt, Artificial Sequence
  Description of Artificial Sequence: Synthetic oligonucleotide
  Antisense strand to SEQ ID NO: 2022080
cuuauccuggaggaaacaa

SEQ ID NO: 2022082 - RNA, 19 nt, Artificial Sequence
  Description of Artificial Sequence: Synthetic oligonucleotide
  Sense strand starting at position 160 of SEQ ID NO: 1881151
ucugaaauguaucuuggag

SEQ ID NO: 2022083 - RNA, 19 nt, Artificial Sequence
  Description of Artificial Sequence: Synthetic oligonucleotide
  Antisense strand to SEQ ID NO: 2022082
cuccaagauacauuucaga

SEQ ID NO: 2022084 - RNA, 19 nt, Artificial Sequence
  Description of Artificial Sequence: Synthetic oligonucleotide
  Sense strand starting at position 245 of SEQ ID NO: 1881151
gcauuuaaaugaucugugu

SEQ ID NO: 2022085 - RNA, 19 nt, Artificial Sequence
  Description of Artificial Sequence: Synthetic oligonucleotide
  Antisense strand to SEQ ID NO: 2022084
acacagaucauuuaaaugc

SEQ ID NO: 2022086 - RNA, 19 nt, Artificial Sequence
  Description of Artificial Sequence: Synthetic oligonucleotide
  Sense strand starting at position 611 of SEQ ID NO: 1881151
ucuguuaauucuuuggaga

SEQ ID NO: 2022087 - RNA, 19 nt, Artificial Sequence
  Description of Artificial Sequence: Synthetic oligonucleotide
  Antisense strand to SEQ ID NO: 2022086
ucuccaaagaauuaacaga

SEQ ID NO: 2022088 - RNA, 19 nt, Artificial Sequence
  Description of Artificial Sequence: Synthetic oligonucleotide
  Sense strand starting at position 612 of SEQ ID NO: 1881151
cuguuaauucuuuggagac

SEQ ID NO: 2022089 - RNA, 19 nt, Artificial Sequence
  Description of Artificial Sequence: Synthetic oligonucleotide
  Antisense strand to SEQ ID NO: 2022088
gucuccaaagaauuaacag

SEQ ID NO: 2022090 - RNA, 19 nt, Artificial Sequence
  Description of Artificial Sequence: Synthetic oligonucleotide
  Sense strand starting at position 703 of SEQ ID NO: 1881151
ccuugacuccuguaccaga

SEQ ID NO: 2022091 - RNA, 19 nt, Artificial Sequence
  Description of Artificial Sequence: Synthetic oligonucleotide
  Antisense strand to SEQ ID NO: 2022090
ucugguacaggagucaagg

SEQ ID NO: 2022092 - RNA, 19 nt, Artificial Sequence
  Description of Artificial Sequence: Synthetic oligonucleotide
  Sense strand starting at position 814 of SEQ ID NO: 1881151
cuacuuguccugcaggaaa

SEQ ID NO: 2022093 - RNA, 19 nt, Artificial Sequence
  Description of Artificial Sequence: Synthetic oligonucleotide
  Antisense strand to SEQ ID NO: 2022092
uuuccugcaggacaaguag

SEQ ID NO: 2022094 - RNA, 19 nt, Artificial Sequence
  Description of Artificial Sequence: Synthetic oligonucleotide
  Sense strand starting at position 926 of SEQ ID NO: 1881151
accugugauuucuccugca

SEQ ID NO: 2022095 - RNA, 19 nt, Artificial Sequence
  Description of Artificial Sequence: Synthetic oligonucleotide
  Antisense strand to SEQ ID NO: 2022094
ugcaggagaaaucacaggu

SEQ ID NO: 2022096 - RNA, 19 nt, Artificial Sequence
  Description of Artificial Sequence: Synthetic oligonucleotide
  Sense strand starting at position 1011 of SEQ ID NO: 1881151
accacauguguccauugaa

SEQ ID NO: 2022097 - RNA, 19 nt, Artificial Sequence
  Description of Artificial Sequence: Synthetic oligonucleotide
  Antisense strand to SEQ ID NO: 2022096
uucaauggacacauguggu

SEQ ID NO: 2022098 - RNA, 19 nt, Artificial Sequence
  Description of Artificial Sequence: Synthetic oligonucleotide
  Sense strand starting at position 1014 of SEQ ID NO: 1881151
acauguguccauugaacac

SEQ ID NO: 2022099 - RNA, 19 nt, Artificial Sequence
  Description of Artificial Sequence: Synthetic oligonucleotide
  Antisense strand to SEQ ID NO: 2022098
guguucaauggacacaugu

SEQ ID NO: 2022100 - RNA, 19 nt, Artificial Sequence
  Description of Artificial Sequence: Synthetic oligonucleotide
  Sense strand starting at position 1138 of SEQ ID NO: 1881151
uuauaucaaccacgugaua

SEQ ID NO: 2022101 - RNA, 19 nt, Artificial Sequence
  Description of Artificial Sequence: Synthetic oligonucleotide
  Antisense strand to SEQ ID NO: 2022100
uaucacgugguugauauaa

SEQ ID NO: 2022102 - RNA, 19 nt, Artificial Sequence
  Description of Artificial Sequence: Synthetic oligonucleotide
  Sense strand starting at position 1403 of SEQ ID NO: 1881151
uaaccagaucucuggguga

SEQ ID NO: 2022103 - RNA, 19 nt, Artificial Sequence
  Description of Artificial Sequence: Synthetic oligonucleotide
  Antisense strand to SEQ ID NO: 2022102
ucacccagagaucugguua

SEQ ID NO: 2022104 - RNA, 19 nt, Artificial Sequence
  Description of Artificial Sequence: Synthetic oligonucleotide
  Sense strand starting at position 1405 of SEQ ID NO: 1881151
accagaucucugggugaag

SEQ ID NO: 2022105 - RNA, 19 nt, Artificial Sequence
  Description of Artificial Sequence: Synthetic oligonucleotide
  Antisense strand to SEQ ID NO: 2022104
cuucacccagagaucuggu

SEQ ID NO: 2022106 - RNA, 19 nt, Artificial Sequence
  Description of Artificial Sequence: Synthetic oligonucleotide
  Sense strand starting at position 1406 of SEQ ID NO: 1881151
ccagaucucugggugaagu

SEQ ID NO: 2022107 - RNA, 19 nt, Artificial Sequence
  Description of Artificial Sequence: Synthetic oligonucleotide
  Antisense strand to SEQ ID NO: 2022106
acuucacccagagaucugg

SEQ ID NO: 2022108 - RNA, 19 nt, Artificial Sequence
  Description of Artificial Sequence: Synthetic oligonucleotide
  Sense strand starting at position 1407 of SEQ ID NO: 1881151
cagaucucugggugaaguu

SEQ ID NO: 2022109 - RNA, 19 nt, Artificial Sequence
  Description of Artificial Sequence: Synthetic oligonucleotide
  Antisense strand to SEQ ID NO: 2022108
aacuucacccagagaucug

SEQ ID NO: 2022110 - RNA, 19 nt, Artificial Sequence
  Description of Artificial Sequence: Synthetic oligonucleotide
  Sense strand starting at position 1422 of SEQ ID NO: 1881151
aguucugauguaggauaga

SEQ ID NO: 2022111 - RNA, 19 nt, Artificial Sequence
  Description of Artificial Sequence: Synthetic oligonucleotide
  Antisense strand to SEQ ID NO: 2022110
ucuauccuacaucagaacu

SEQ ID NO: 2022112 - RNA, 19 nt, Artificial Sequence
  Description of Artificial Sequence: Synthetic oligonucleotide
  Sense strand starting at position 1466 of SEQ ID NO: 1881151
ucauguugauucuuaacag

SEQ ID NO: 2022113 - RNA, 19 nt, Artificial Sequence
  Description of Artificial Sequence: Synthetic oligonucleotide
  Antisense strand to SEQ ID NO: 2022112
cuguuaagaaucaacauga

SEQ ID NO: 2022114 - RNA, 19 nt, Artificial Sequence
  Description of Artificial Sequence: Synthetic oligonucleotide
  Sense strand starting at position 1567 of SEQ ID NO: 1881151
cagaguauguaaccucuga

SEQ ID NO: 2022115 - RNA, 19 nt, Artificial Sequence
  Description of Artificial Sequence: Synthetic oligonucleotide
  Antisense strand to SEQ ID NO: 2022114
ucagagguuacauacucug

SEQ ID NO: 2022116 - RNA, 19 nt, Artificial Sequence
  Description of Artificial Sequence: Synthetic oligonucleotide
  Sense strand starting at position 1571 of SEQ ID NO: 1881151
guauguaaccucugaacau

SEQ ID NO: 2022117 - RNA, 19 nt, Artificial Sequence
  Description of Artificial Sequence: Synthetic oligonucleotide
  Antisense strand to SEQ ID NO: 2022116
auguucagagguuacauac

SEQ ID NO: 2022118 - RNA, 19 nt, Artificial Sequence
  Description of Artificial Sequence: Synthetic oligonucleotide
  Sense strand starting at position 1638 of SEQ ID NO: 1881151
ccugucacuccaugaugga

SEQ ID NO: 2022119 - RNA, 19 nt, Artificial Sequence
  Description of Artificial Sequence: Synthetic oligonucleotide
  Antisense strand to SEQ ID NO: 2022118
uccaucauggagugacagg

SEQ ID NO: 2022120 - RNA, 19 nt, Artificial Sequence
  Description of Artificial Sequence: Synthetic oligonucleotide
  Sense strand starting at position 1666 of SEQ ID NO: 1881151
gaaacagguugguccuuua

SEQ ID NO: 2022121 - RNA, 19 nt, Artificial Sequence
  Description of Artificial Sequence: Synthetic oligonucleotide
  Antisense strand to SEQ ID NO: 2022120
uaaaggaccaaccuguuuc

SEQ ID NO: 2022122 - RNA, 19 nt, Artificial Sequence
  Description of Artificial Sequence: Synthetic oligonucleotide
  Sense strand starting at position 1686 of SEQ ID NO: 1881151
cacagaaaguuugcaaagu

SEQ ID NO: 2022123 - RNA, 19 nt, Artificial Sequence
  Description of Artificial Sequence: Synthetic oligonucleotide
  Antisense strand to SEQ ID NO: 2022122
acuuugcaaacuuucugug

SEQ ID NO: 2022124 - RNA, 19 nt, Artificial Sequence
  Description of Artificial Sequence: Synthetic oligonucleotide
  Sense strand starting at position 1745 of SEQ ID NO: 1881151
ucucgaacucuguaagaug

SEQ ID NO: 2022125 - RNA, 19 nt, Artificial Sequence
  Description of Artificial Sequence: Synthetic oligonucleotide
  Antisense strand to SEQ ID NO: 2022124
caucuuacagaguucgaga

SEQ ID NO: 2022126 - RNA, 19 nt, Artificial Sequence
  Description of Artificial Sequence: Synthetic oligonucleotide
  Sense strand starting at position 1801 of SEQ ID NO: 1881151
accuuugcuccagaggguu

SEQ ID NO: 2022127 - RNA, 19 nt, Artificial Sequence
  Description of Artificial Sequence: Synthetic oligonucleotide
  Antisense strand to SEQ ID NO: 2022126
aacccucuggagcaaaggu

SEQ ID NO: 2022128 - RNA, 19 nt, Artificial Sequence
  Description of Artificial Sequence: Synthetic oligonucleotide
  Sense strand starting at position 2071 of SEQ ID NO: 1881151
augagaaaguucccagucu

SEQ ID NO: 2022129 - RNA, 19 nt, Artificial Sequence
  Description of Artificial Sequence: Synthetic oligonucleotide
  Antisense strand to SEQ ID NO: 2022128
agacugggaacuuucucau

SEQ ID NO: 2022130 - RNA, 19 nt, Artificial Sequence
  Description of Artificial Sequence: Synthetic oligonucleotide
  Sense strand starting at position 2246 of SEQ ID NO: 1881151
cuggaauaauauguaaucu

SEQ ID NO: 2022131 - RNA, 19 nt, Artificial Sequence
  Description of Artificial Sequence: Synthetic oligonucleotide
  Antisense strand to SEQ ID NO: 2022130
agauuacauauuauuccag

SEQ ID NO: 2022132 - RNA, 19 nt, Artificial Sequence
  Description of Artificial Sequence: Synthetic oligonucleotide
  Sense strand starting at position 2577 of SEQ ID NO: 1881151
aguuuauacccacauuagu

SEQ ID NO: 2022133 - RNA, 19 nt, Artificial Sequence
  Description of Artificial Sequence: Synthetic oligonucleotide
  Antisense strand to SEQ ID NO: 2022132
acuaauguggguauaaacu

SEQ ID NO: 2022134 - RNA, 19 nt, Artificial Sequence
  Description of Artificial Sequence: Synthetic oligonucleotide
  Sense strand starting at position 2857 of SEQ ID NO: 1881151
ucaagagucugggugauga

SEQ ID NO: 2022135 - RNA, 19 nt, Artificial Sequence
  Description of Artificial Sequence: Synthetic oligonucleotide
  Antisense strand to SEQ ID NO: 2022134
ucaucacccagacucuuga

SEQ ID NO: 2022136 - RNA, 19 nt, Artificial Sequence
  Description of Artificial Sequence: Synthetic oligonucleotide
  Sense strand starting at position 3004 of SEQ ID NO: 1881151
gaagaugaugccuggaacu

SEQ ID NO: 2022137 - RNA, 19 nt, Artificial Sequence
  Description of Artificial Sequence: Synthetic oligonucleotide
  Antisense strand to SEQ ID NO: 2022136
aguuccaggcaucaucuuc

SEQ ID NO: 2022138 - RNA, 19 nt, Artificial Sequence
  Description of Artificial Sequence: Synthetic oligonucleotide
  Sense strand starting at position 3092 of SEQ ID NO: 1881151
uggguacugcaugauuaaa

SEQ ID NO: 2022139 - RNA, 19 nt, Artificial Sequence
  Description of Artificial Sequence: Synthetic oligonucleotide
  Antisense strand to SEQ ID NO: 2022138
uuuaaucaugcaguaccca

SEQ ID NO: 2022140 - RNA, 19 nt, Artificial Sequence
  Description of Artificial Sequence: Synthetic oligonucleotide
  Sense strand starting at position 3094 of SEQ ID NO: 1881151
gguacugcaugauuaaaua

SEQ ID NO: 2022141 - RNA, 19 nt, Artificial Sequence
  Description of Artificial Sequence: Synthetic oligonucleotide
  Antisense strand to SEQ ID NO: 2022140
uauuuaaucaugcaguacc

SEQ ID NO: 2022142 - RNA, 19 nt, Artificial Sequence
  Description of Artificial Sequence: Synthetic oligonucleotide
  Sense strand starting at position 3140 of SEQ ID NO: 1881151
uuuagagcuaaguagguua

SEQ ID NO: 2022143 - RNA, 19 nt, Artificial Sequence
  Description of Artificial Sequence: Synthetic oligonucleotide
  Antisense strand to SEQ ID NO: 2022142
uaaccuacuuagcucuaaa

SEQ ID NO: 2022144 - RNA, 19 nt, Artificial Sequence
  Description of Artificial Sequence: Synthetic oligonucleotide
  Sense strand starting at position 3142 of SEQ ID NO: 1881151
uagagcuaaguagguuaaa

SEQ ID NO: 2022145 - RNA, 19 nt, Artificial Sequence
  Description of Artificial Sequence: Synthetic oligonucleotide
  Antisense strand to SEQ ID NO: 2022144
uuuaaccuacuuagcucua

SEQ ID NO: 2022146 - RNA, 19 nt, Artificial Sequence
  Description of Artificial Sequence: Synthetic oligonucleotide
  Sense strand starting at position 3194 of SEQ ID NO: 1881151
ggagacccugaauguuaca

SEQ ID NO: 2022147 - RNA, 19 nt, Artificial Sequence
  Description of Artificial Sequence: Synthetic oligonucleotide
  Antisense strand to SEQ ID NO: 2022146
uguaacauucagggucucc

SEQ ID NO: 2022148 - RNA, 19 nt, Artificial Sequence
  Description of Artificial Sequence: Synthetic oligonucleotide
  Sense strand starting at position 3341 of SEQ ID NO: 1881151
auauaaaccuuuguugagu

SEQ ID NO: 2022149 - RNA, 19 nt, Artificial Sequence
  Description of Artificial Sequence: Synthetic oligonucleotide
  Antisense strand to SEQ ID NO: 2022148
acucaacaaagguuuauau

SEQ ID NO: 2022150 - RNA, 19 nt, Artificial Sequence
  Description of Artificial Sequence: Synthetic oligonucleotide
  Sense strand starting at position 3386 of SEQ ID NO: 1881151
gaaugauagcgucagugaa

SEQ ID NO: 2022151 - RNA, 19 nt, Artificial Sequence
  Description of Artificial Sequence: Synthetic oligonucleotide
  Antisense strand to SEQ ID NO: 2022150
uucacugacgcuaucauuc

SEQ ID NO: 2022152 - RNA, 19 nt, Artificial Sequence
  Description of Artificial Sequence: Synthetic oligonucleotide
  Sense strand starting at position 3517 of SEQ ID NO: 1881151
uagagugacuuugugacau

SEQ ID NO: 2022153 - RNA, 19 nt, Artificial Sequence
  Description of Artificial Sequence: Synthetic oligonucleotide
  Antisense strand to SEQ ID NO: 2022152
augucacaaagucacucua

SEQ ID NO: 2022154 - RNA, 19 nt, Artificial Sequence
  Description of Artificial Sequence: Synthetic oligonucleotide
  Sense strand starting at position 3568 of SEQ ID NO: 1881151
uugagaaaguugccaccaa

SEQ ID NO: 2022155 - RNA, 19 nt, Artificial Sequence
  Description of Artificial Sequence: Synthetic oligonucleotide
  Antisense strand to SEQ ID NO: 2022154
uugguggcaacuuucucaa

SEQ ID NO: 2022156 - RNA, 19 nt, Artificial Sequence
  Description of Artificial Sequence: Synthetic oligonucleotide
  Sense strand starting at position 3716 of SEQ ID NO: 1881151
uuaagagguaauuguugau

SEQ ID NO: 2022157 - RNA, 19 nt, Artificial Sequence
  Description of Artificial Sequence: Synthetic oligonucleotide
  Antisense strand to SEQ ID NO: 2022156
aucaacaauuaccucuuaa

SEQ ID NO: 2022158 - RNA, 19 nt, Artificial Sequence
  Description of Artificial Sequence: Synthetic oligonucleotide
  Sense strand starting at position 3734 of SEQ ID NO: 1881151
uaacgaaugccauagguaa

SEQ ID NO: 2022159 - RNA, 19 nt, Artificial Sequence
  Description of Artificial Sequence: Synthetic oligonucleotide
  Antisense strand to SEQ ID NO: 2022158
uuaccuauggcauucguua

SEQ ID NO: 2022160 - RNA, 19 nt, Artificial Sequence
  Description of Artificial Sequence: Synthetic oligonucleotide
  Sense strand starting at position 3747 of SEQ ID NO: 1881151
agguaacauuacccugaca

SEQ ID NO: 2022161 - RNA, 19 nt, Artificial Sequence
  Description of Artificial Sequence: Synthetic oligonucleotide
  Antisense strand to SEQ ID NO: 2022160
ugucaggguaauguuaccu

SEQ ID NO: 2022162 - RNA, 19 nt, Artificial Sequence
  Description of Artificial Sequence: Synthetic oligonucleotide
  Sense strand starting at position 775 of SEQ ID NO: 1881152
aguggaaagaugugauuac

SEQ ID NO: 2022163 - RNA, 19 nt, Artificial Sequence
  Description of Artificial Sequence: Synthetic oligonucleotide
  Antisense strand to SEQ ID NO: 2022162
guaaucacaucuuuccacu

SEQ ID NO: 2022164 - RNA, 19 nt, Artificial Sequence
  Description of Artificial Sequence: Synthetic oligonucleotide
  Sense strand starting at position 1093 of SEQ ID NO: 1881152
aggguagucccagaauccu

SEQ ID NO: 2022165 - RNA, 19 nt, Artificial Sequence
  Description of Artificial Sequence: Synthetic oligonucleotide
  Antisense strand to SEQ ID NO: 2022164
aggauucugggacuacccu

SEQ ID NO: 2022166 - RNA, 19 nt, Artificial Sequence
  Description of Artificial Sequence: Synthetic oligonucleotide
  Sense strand starting at position 1314 of SEQ ID NO: 1881152
gggagauuagccugcaaua

SEQ ID NO: 2022167 - RNA, 19 nt, Artificial Sequence
  Description of Artificial Sequence: Synthetic oligonucleotide
  Antisense strand to SEQ ID NO: 2022166
uauugcaggcuaaucuccc

SEQ ID NO: 2022168 - RNA, 19 nt, Artificial Sequence
  Description of Artificial Sequence: Synthetic oligonucleotide
  Sense strand starting at position 1326 of SEQ ID NO: 1881152
ugcaauauuccugagucau

SEQ ID NO: 2022169 - RNA, 19 nt, Artificial Sequence
  Description of Artificial Sequence: Synthetic oligonucleotide
  Antisense strand to SEQ ID NO: 2022168
augacucaggaauauugca

SEQ ID NO: 2022170 - RNA, 19 nt, Artificial Sequence
  Description of Artificial Sequence: Synthetic oligonucleotide
  Sense strand starting at position 1338 of SEQ ID NO: 1881152
gagucaucuguggacaucu

SEQ ID NO: 2022171 - RNA, 19 nt, Artificial Sequence
  Description of Artificial Sequence: Synthetic oligonucleotide
  Antisense strand to SEQ ID NO: 2022170
agauguccacagaugacuc

SEQ ID NO: 2022172 - RNA, 19 nt, Artificial Sequence
  Description of Artificial Sequence: Synthetic oligonucleotide
  Sense strand starting at position 1529 of SEQ ID NO: 1881152
ucagucuugaggcaaguga

SEQ ID NO: 2022173 - RNA, 19 nt, Artificial Sequence
  Description of Artificial Sequence: Synthetic oligonucleotide
  Antisense strand to SEQ ID NO: 2022172
ucacuugccucaagacuga

SEQ ID NO: 2022174 - RNA, 19 nt, Artificial Sequence
  Description of Artificial Sequence: Synthetic oligonucleotide
  Sense strand starting at position 1606 of SEQ ID NO: 1881152
acuugcuacuggguugaaa

SEQ ID NO: 2022175 - RNA, 19 nt, Artificial Sequence
  Description of Artificial Sequence: Synthetic oligonucleotide
  Antisense strand to SEQ ID NO: 2022174
uuucaacccaguagcaagu

SEQ ID NO: 2022176 - RNA, 19 nt, Artificial Sequence
  Description of Artificial Sequence: Synthetic oligonucleotide
  Sense strand starting at position 1708 of SEQ ID NO: 1881152
aggccaugauggcuauuaa

SEQ ID NO: 2022177 - RNA, 19 nt, Artificial Sequence
  Description of Artificial Sequence: Synthetic oligonucleotide
  Antisense strand to SEQ ID NO: 2022176
uuaauagccaucauggccu

SEQ ID NO: 2022178 - RNA, 19 nt, Artificial Sequence
  Description of Artificial Sequence: Synthetic oligonucleotide
  Sense strand starting at position 1709 of SEQ ID NO: 1881152
ggccaugauggcuauuaag

SEQ ID NO: 2022179 - RNA, 19 nt, Artificial Sequence
  Description of Artificial Sequence: Synthetic oligonucleotide
  Antisense strand to SEQ ID NO: 2022178
cuuaauagccaucauggcc

SEQ ID NO: 2022180 - RNA, 19 nt, Artificial Sequence
  Description of Artificial Sequence: Synthetic oligonucleotide
  Sense strand starting at position 1717 of SEQ ID NO: 1881152
uggcuauuaagggacaguu

SEQ ID NO: 2022181 - RNA, 19 nt, Artificial Sequence
  Description of Artificial Sequence: Synthetic oligonucleotide
  Antisense strand to SEQ ID NO: 2022180
aacugucccuuaauagcca

SEQ ID NO: 2022182 - RNA, 19 nt, Artificial Sequence
  Description of Artificial Sequence: Synthetic oligonucleotide
  Sense strand starting at position 1750 of SEQ ID NO: 1881152
acagcuuucgaauagcaaa

SEQ ID NO: 2022183 - RNA, 19 nt, Artificial Sequence
  Description of Artificial Sequence: Synthetic oligonucleotide
  Antisense strand to SEQ ID NO: 2022182
uuugcuauucgaaagcugu

SEQ ID NO: 2022184 - RNA, 19 nt, Artificial Sequence
  Description of Artificial Sequence: Synthetic oligonucleotide
  Sense strand starting at position 1804 of SEQ ID NO: 1881152
cuucguaagacuuaagguu

SEQ ID NO: 2022185 - RNA, 19 nt, Artificial Sequence
  Description of Artificial Sequence: Synthetic oligonucleotide
  Antisense strand to SEQ ID NO: 2022184
aaccuuaagucuuacgaag

SEQ ID NO: 2022186 - RNA, 19 nt, Artificial Sequence
  Description of Artificial Sequence: Synthetic oligonucleotide
  Sense strand starting at position 1910 of SEQ ID NO: 1881152
uucuauugagcaugaagau

SEQ ID NO: 2022187 - RNA, 19 nt, Artificial Sequence
  Description of Artificial Sequence: Synthetic oligonucleotide
  Antisense strand to SEQ ID NO: 2022186
aucuucaugcucaauagaa

SEQ ID NO: 2022188 - RNA, 19 nt, Artificial Sequence
  Description of Artificial Sequence: Synthetic oligonucleotide
  Sense strand starting at position 1959 of SEQ ID NO: 1881152
ucagaagaguuucugcaca

SEQ ID NO: 2022189 - RNA, 19 nt, Artificial Sequence
  Description of Artificial Sequence: Synthetic oligonucleotide
  Antisense strand to SEQ ID NO: 2022188
ugugcagaaacucuucuga

SEQ ID NO: 2022190 - RNA, 19 nt, Artificial Sequence
  Description of Artificial Sequence: Synthetic oligonucleotide
  Sense strand starting at position 1961 of SEQ ID NO: 1881152
agaagaguuucugcacaca

SEQ ID NO: 2022191 - RNA, 19 nt, Artificial Sequence
  Description of Artificial Sequence: Synthetic oligonucleotide
  Antisense strand to SEQ ID NO: 2022190
ugugugcagaaacucuucu

SEQ ID NO: 2022192 - RNA, 19 nt, Artificial Sequence
  Description of Artificial Sequence: Synthetic oligonucleotide
  Sense strand starting at position 2033 of SEQ ID NO: 1881152
cuaggauacuuuguccaau

SEQ ID NO: 2022193 - RNA, 19 nt, Artificial Sequence
  Description of Artificial Sequence: Synthetic oligonucleotide
  Antisense strand to SEQ ID NO: 2022192
auuggacaaaguauccuag

SEQ ID NO: 2022194 - RNA, 19 nt, Artificial Sequence
  Description of Artificial Sequence: Synthetic oligonucleotide
  Sense strand starting at position 2034 of SEQ ID NO: 1881152
uaggauacuuuguccaaug

SEQ ID NO: 2022195 - RNA, 19 nt, Artificial Sequence
  Description of Artificial Sequence: Synthetic oligonucleotide
  Antisense strand to SEQ ID NO: 2022194
cauuggacaaaguauccua

SEQ ID NO: 2022196 - RNA, 19 nt, Artificial Sequence
  Description of Artificial Sequence: Synthetic oligonucleotide
  Sense strand starting at position 2035 of SEQ ID NO: 1881152
aggauacuuuguccaauga

SEQ ID NO: 2022197 - RNA, 19 nt, Artificial Sequence
  Description of Artificial Sequence: Synthetic oligonucleotide
  Antisense strand to SEQ ID NO: 2022196
ucauuggacaaaguauccu

SEQ ID NO: 2022198 - RNA, 19 nt, Artificial Sequence
  Description of Artificial Sequence: Synthetic oligonucleotide
  Sense strand starting at position 2179 of SEQ ID NO: 1881152
cauaauagucuggguagaa

SEQ ID NO: 2022199 - RNA, 19 nt, Artificial Sequence
  Description of Artificial Sequence: Synthetic oligonucleotide
  Antisense strand to SEQ ID NO: 2022198
uucuacccagacuauuaug

SEQ ID NO: 2022200 - RNA, 19 nt, Artificial Sequence
  Description of Artificial Sequence: Synthetic oligonucleotide
  Sense strand starting at position 2180 of SEQ ID NO: 1881152
auaauagucuggguagaag

SEQ ID NO: 2022201 - RNA, 19 nt, Artificial Sequence
  Description of Artificial Sequence: Synthetic oligonucleotide
  Antisense strand to SEQ ID NO: 2022200
cuucuacccagacuauuau

SEQ ID NO: 2022202 - RNA, 19 nt, Artificial Sequence
  Description of Artificial Sequence: Synthetic oligonucleotide
  Sense strand starting at position 2313 of SEQ ID NO: 1881152
uuuauacaguguuuaagga

SEQ ID NO: 2022203 - RNA, 19 nt, Artificial Sequence
  Description of Artificial Sequence: Synthetic oligonucleotide
  Antisense strand to SEQ ID NO: 2022202
uccuuaaacacuguauaaa

SEQ ID NO: 2022204 - RNA, 19 nt, Artificial Sequence
  Description of Artificial Sequence: Synthetic oligonucleotide
  Sense strand starting at position 2321 of SEQ ID NO: 1881152
guguuuaaggaauauugua

SEQ ID NO: 2022205 - RNA, 19 nt, Artificial Sequence
  Description of Artificial Sequence: Synthetic oligonucleotide
  Antisense strand to SEQ ID NO: 2022204
uacaauauuccuuaaacac

SEQ ID NO: 2022206 - RNA, 19 nt, Artificial Sequence
  Description of Artificial Sequence: Synthetic oligonucleotide
  Sense strand starting at position 2334 of SEQ ID NO: 1881152
auuguauauguaggaucaa

SEQ ID NO: 2022207 - RNA, 19 nt, Artificial Sequence
  Description of Artificial Sequence: Synthetic oligonucleotide
  Antisense strand to SEQ ID NO: 2022206
uugauccuacauauacaau

SEQ ID NO: 2022208 - RNA, 19 nt, Artificial Sequence
  Description of Artificial Sequence: Synthetic oligonucleotide
  Sense strand starting at position 2411 of SEQ ID NO: 1881152
ggaugcuuuaauugaggua

SEQ ID NO: 2022209 - RNA, 19 nt, Artificial Sequence
  Description of Artificial Sequence: Synthetic oligonucleotide
  Antisense strand to SEQ ID NO: 2022208
uaccucaauuaaagcaucc

SEQ ID NO: 2022210 - RNA, 19 nt, Artificial Sequence
  Description of Artificial Sequence: Synthetic oligonucleotide
  Sense strand starting at position 2423 of SEQ ID NO: 1881152
ugagguagauuacuagcua

SEQ ID NO: 2022211 - RNA, 19 nt, Artificial Sequence
  Description of Artificial Sequence: Synthetic oligonucleotide
  Antisense strand to SEQ ID NO: 2022210
uagcuaguaaucuaccuca

SEQ ID NO: 2022212 - RNA, 19 nt, Artificial Sequence
  Description of Artificial Sequence: Synthetic oligonucleotide
  Sense strand starting at position 2448 of SEQ ID NO: 1881152
gcuugaauacaguaauucu

SEQ ID NO: 2022213 - RNA, 19 nt, Artificial Sequence
  Description of Artificial Sequence: Synthetic oligonucleotide
  Antisense strand to SEQ ID NO: 2022212
agaauuacuguauucaagc

SEQ ID NO: 2022214 - RNA, 19 nt, Artificial Sequence
  Description of Artificial Sequence: Synthetic oligonucleotide
  Sense strand starting at position 2965 of SEQ ID NO: 1881152
guuacaugacaaugauauu

SEQ ID NO: 2022215 - RNA, 19 nt, Artificial Sequence
  Description of Artificial Sequence: Synthetic oligonucleotide
  Antisense strand to SEQ ID NO: 2022214
aauaucauugucauguaac

SEQ ID NO: 2022216 - RNA, 19 nt, Artificial Sequence
  Description of Artificial Sequence: Synthetic oligonucleotide
  Sense strand starting at position 3073 of SEQ ID NO: 1881152
aggauauugccacagaugu

SEQ ID NO: 2022217 - RNA, 19 nt, Artificial Sequence
  Description of Artificial Sequence: Synthetic oligonucleotide
  Antisense strand to SEQ ID NO: 2022216
acaucuguggcaauauccu

SEQ ID NO: 2022218 - RNA, 19 nt, Artificial Sequence
  Description of Artificial Sequence: Synthetic oligonucleotide
  Sense strand starting at position 3095 of SEQ ID NO: 1881152
uggcaugucaaugacgaau

SEQ ID NO: 2022219 - RNA, 19 nt, Artificial Sequence
  Description of Artificial Sequence: Synthetic oligonucleotide
  Antisense strand to SEQ ID NO: 2022218
auucgucauugacaugcca

SEQ ID NO: 2022220 - RNA, 19 nt, Artificial Sequence
  Description of Artificial Sequence: Synthetic oligonucleotide
  Sense strand starting at position 3228 of SEQ ID NO: 1881152
uuauguaacuuggugauau

SEQ ID NO: 2022221 - RNA, 19 nt, Artificial Sequence
  Description of Artificial Sequence: Synthetic oligonucleotide
  Antisense strand to SEQ ID NO: 2022220
auaucaccaaguuacauaa

SEQ ID NO: 2022222 - RNA, 19 nt, Artificial Sequence
  Description of Artificial Sequence: Synthetic oligonucleotide
  Sense strand starting at position 3269 of SEQ ID NO: 1881152
ggucauggcugauugggau

SEQ ID NO: 2022223 - RNA, 19 nt, Artificial Sequence
  Description of Artificial Sequence: Synthetic oligonucleotide
  Antisense strand to SEQ ID NO: 2022222
aucccaaucagccaugacc

SEQ ID NO: 2022224 - RNA, 19 nt, Artificial Sequence
  Description of Artificial Sequence: Synthetic oligonucleotide
  Sense strand starting at position 3275 of SEQ ID NO: 1881152
ggcugauugggaugacuaa

SEQ ID NO: 2022225 - RNA, 19 nt, Artificial Sequence
  Description of Artificial Sequence: Synthetic oligonucleotide
  Antisense strand to SEQ ID NO: 2022224
uuagucaucccaaucagcc

SEQ ID NO: 2022226 - RNA, 19 nt, Artificial Sequence
  Description of Artificial Sequence: Synthetic oligonucleotide
  Sense strand starting at position 3406 of SEQ ID NO: 1881152
cuuguuaagcuggauaaua

SEQ ID NO: 2022227 - RNA, 19 nt, Artificial Sequence
  Description of Artificial Sequence: Synthetic oligonucleotide
  Antisense strand to SEQ ID NO: 2022226
uauuauccagcuuaacaag

SEQ ID NO: 2022228 - RNA, 19 nt, Artificial Sequence
  Description of Artificial Sequence: Synthetic oligonucleotide
  Sense strand starting at position 3482 of SEQ ID NO: 1881152
ggauuacauuuacaagaug

SEQ ID NO: 2022229 - RNA, 19 nt, Artificial Sequence
  Description of Artificial Sequence: Synthetic oligonucleotide
  Antisense strand to SEQ ID NO: 2022228
caucuuguaaauguaaucc

SEQ ID NO: 2022230 - RNA, 19 nt, Artificial Sequence
  Description of Artificial Sequence: Synthetic oligonucleotide
  Sense strand starting at position 3782 of SEQ ID NO: 1881152
uaugcaucacauggguuaa

SEQ ID NO: 2022231 - RNA, 19 nt, Artificial Sequence
  Description of Artificial Sequence: Synthetic oligonucleotide
  Antisense strand to SEQ ID NO: 2022230
uuaacccaugugaugcaua

SEQ ID NO: 2022232 - RNA, 19 nt, Artificial Sequence
  Description of Artificial Sequence: Synthetic oligonucleotide
  Sense strand starting at position 3828 of SEQ ID NO: 1881152
guuauuuguccuggcucca

SEQ ID NO: 2022233 - RNA, 19 nt, Artificial Sequence
  Description of Artificial Sequence: Synthetic oligonucleotide
  Antisense strand to SEQ ID NO: 2022232
uggagccaggacaaauaac

SEQ ID NO: 2022234 - RNA, 19 nt, Artificial Sequence
  Description of Artificial Sequence: Synthetic oligonucleotide
  Sense strand starting at position 3917 of SEQ ID NO: 1881152
uuugauuauugugcaagga

SEQ ID NO: 2022235 - RNA, 19 nt, Artificial Sequence
  Description of Artificial Sequence: Synthetic oligonucleotide
  Antisense strand to SEQ ID NO: 2022234
uccuugcacaauaaucaaa

SEQ ID NO: 2022236 - RNA, 19 nt, Artificial Sequence
  Description of Artificial Sequence: Synthetic oligonucleotide
  Sense strand starting at position 3918 of SEQ ID NO: 1881152
uugauuauugugcaaggaa

SEQ ID NO: 2022237 - RNA, 19 nt, Artificial Sequence
  Description of Artificial Sequence: Synthetic oligonucleotide
  Antisense strand to SEQ ID NO: 2022236
uuccuugcacaauaaucaa

SEQ ID NO: 2022238 - RNA, 19 nt, Artificial Sequence
  Description of Artificial Sequence: Synthetic oligonucleotide
  Sense strand starting at position 3925 of SEQ ID NO: 1881152
uugugcaaggaauguaaga

SEQ ID NO: 2022239 - RNA, 19 nt, Artificial Sequence
  Description of Artificial Sequence: Synthetic oligonucleotide
  Antisense strand to SEQ ID NO: 2022238
ucuuacauuccuugcacaa

SEQ ID NO: 2022240 - RNA, 19 nt, Artificial Sequence
  Description of Artificial Sequence: Synthetic oligonucleotide
  Sense strand starting at position 3952 of SEQ ID NO: 1881152
agcuccauacuuugaugaa

SEQ ID NO: 2022241 - RNA, 19 nt, Artificial Sequence
  Description of Artificial Sequence: Synthetic oligonucleotide
  Antisense strand to SEQ ID NO: 2022240
uucaucaaaguauggagcu

SEQ ID NO: 2022242 - RNA, 19 nt, Artificial Sequence
  Description of Artificial Sequence: Synthetic oligonucleotide
  Sense strand starting at position 64 of SEQ ID NO: 1881153
uugacuagcuggcuauuau

SEQ ID NO: 2022243 - RNA, 19 nt, Artificial Sequence
  Description of Artificial Sequence: Synthetic oligonucleotide
  Antisense strand to SEQ ID NO: 2022242
auaauagccagcuagucaa

SEQ ID NO: 2022244 - RNA, 19 nt, Artificial Sequence
  Description of Artificial Sequence: Synthetic oligonucleotide
  Sense strand starting at position 184 of SEQ ID NO: 1881153
uggguuuacagaggugaaa

SEQ ID NO: 2022245 - RNA, 19 nt, Artificial Sequence
  Description of Artificial Sequence: Synthetic oligonucleotide
  Antisense strand to SEQ ID NO: 2022244
uuucaccucuguaaaccca

SEQ ID NO: 2022246 - RNA, 19 nt, Artificial Sequence
  Description of Artificial Sequence: Synthetic oligonucleotide
  Sense strand starting at position 471 of SEQ ID NO: 1881153
ugggaugugguuuguguua

SEQ ID NO: 2022247 - RNA, 19 nt, Artificial Sequence
  Description of Artificial Sequence: Synthetic oligonucleotide
  Antisense strand to SEQ ID NO: 2022246
uaacacaaaccacauccca

SEQ ID NO: 2022248 - RNA, 19 nt, Artificial Sequence
  Description of Artificial Sequence: Synthetic oligonucleotide
  Sense strand starting at position 518 of SEQ ID NO: 1881153
gcauuugugugaccuccca

SEQ ID NO: 2022249 - RNA, 19 nt, Artificial Sequence
  Description of Artificial Sequence: Synthetic oligonucleotide
  Antisense strand to SEQ ID NO: 2022248
ugggaggucacacaaaugc

SEQ ID NO: 2022250 - RNA, 19 nt, Artificial Sequence
  Description of Artificial Sequence: Synthetic oligonucleotide
  Sense strand starting at position 653 of SEQ ID NO: 1881153
uuucuaauuguggguuaua

SEQ ID NO: 2022251 - RNA, 19 nt, Artificial Sequence
  Description of Artificial Sequence: Synthetic oligonucleotide
  Antisense strand to SEQ ID NO: 2022250
uauaacccacaauuagaaa

SEQ ID NO: 2022252 - RNA, 19 nt, Artificial Sequence
  Description of Artificial Sequence: Synthetic oligonucleotide
  Sense strand starting at position 654 of SEQ ID NO: 1881153
uucuaauuguggguuauaa

SEQ ID NO: 2022253 - RNA, 19 nt, Artificial Sequence
  Description of Artificial Sequence: Synthetic oligonucleotide
  Antisense strand to SEQ ID NO: 2022252
uuauaacccacaauuagaa

SEQ ID NO: 2022254 - RNA, 19 nt, Artificial Sequence
  Description of Artificial Sequence: Synthetic oligonucleotide
  Sense strand starting at position 656 of SEQ ID NO: 1881153
cuaauuguggguuauaaca

SEQ ID NO: 2022255 - RNA, 19 nt, Artificial Sequence
  Description of Artificial Sequence: Synthetic oligonucleotide
  Antisense strand to SEQ ID NO: 2022254
uguuauaacccacaauuag

SEQ ID NO: 2022256 - RNA, 19 nt, Artificial Sequence
  Description of Artificial Sequence: Synthetic oligonucleotide
  Sense strand starting at position 658 of SEQ ID NO: 1881153
aauuguggguuauaacaca

SEQ ID NO: 2022257 - RNA, 19 nt, Artificial Sequence
  Description of Artificial Sequence: Synthetic oligonucleotide
  Antisense strand to SEQ ID NO: 2022256
uguguuauaacccacaauu

SEQ ID NO: 2022258 - RNA, 19 nt, Artificial Sequence
  Description of Artificial Sequence: Synthetic oligonucleotide
  Sense strand starting at position 674 of SEQ ID NO: 1881153
acauuauuaguaggucaua

SEQ ID NO: 2022259 - RNA, 19 nt, Artificial Sequence
  Description of Artificial Sequence: Synthetic oligonucleotide
  Antisense strand to SEQ ID NO: 2022258
uaugaccuacuaauaaugu

SEQ ID NO: 2022260 - RNA, 19 nt, Artificial Sequence
  Description of Artificial Sequence: Synthetic oligonucleotide
  Sense strand starting at position 820 of SEQ ID NO: 1881153
uguguacacugugucaaga

SEQ ID NO: 2022261 - RNA, 19 nt, Artificial Sequence
  Description of Artificial Sequence: Synthetic oligonucleotide
  Antisense strand to SEQ ID NO: 2022260
ucuugacacaguguacaca

SEQ ID NO: 2022262 - RNA, 19 nt, Artificial Sequence
  Description of Artificial Sequence: Synthetic oligonucleotide
  Sense strand starting at position 1382 of SEQ ID NO: 1881153
ggugucuauggcugacgaa

SEQ ID NO: 2022263 - RNA, 19 nt, Artificial Sequence
  Description of Artificial Sequence: Synthetic oligonucleotide
  Antisense strand to SEQ ID NO: 2022262
uucgucagccauagacacc

SEQ ID NO: 2022264 - RNA, 19 nt, Artificial Sequence
  Description of Artificial Sequence: Synthetic oligonucleotide
  Sense strand starting at position 1562 of SEQ ID NO: 1881153
gauagauggucauucuucu

SEQ ID NO: 2022265 - RNA, 19 nt, Artificial Sequence
  Description of Artificial Sequence: Synthetic oligonucleotide
  Antisense strand to SEQ ID NO: 2022264
agaagaaugaccaucuauc

SEQ ID NO: 2022266 - RNA, 19 nt, Artificial Sequence
  Description of Artificial Sequence: Synthetic oligonucleotide
  Sense strand starting at position 1569 of SEQ ID NO: 1881153
ggucauucuucuguccuca

SEQ ID NO: 2022267 - RNA, 19 nt, Artificial Sequence
  Description of Artificial Sequence: Synthetic oligonucleotide
  Antisense strand to SEQ ID NO: 2022266
ugaggacagaagaaugacc

SEQ ID NO: 2022268 - RNA, 19 nt, Artificial Sequence
  Description of Artificial Sequence: Synthetic oligonucleotide
  Sense strand starting at position 1584 of SEQ ID NO: 1881153
cucacugcucccggcauaa

SEQ ID NO: 2022269 - RNA, 19 nt, Artificial Sequence
  Description of Artificial Sequence: Synthetic oligonucleotide
  Antisense strand to SEQ ID NO: 2022268
uuaugccgggagcagugag

SEQ ID NO: 2022270 - RNA, 19 nt, Artificial Sequence
  Description of Artificial Sequence: Synthetic oligonucleotide
  Sense strand starting at position 1633 of SEQ ID NO: 1881153
agaggaaucucucaggguu

SEQ ID NO: 2022271 - RNA, 19 nt, Artificial Sequence
  Description of Artificial Sequence: Synthetic oligonucleotide
  Antisense strand to SEQ ID NO: 2022270
aacccugagagauuccucu

SEQ ID NO: 2022272 - RNA, 19 nt, Artificial Sequence
  Description of Artificial Sequence: Synthetic oligonucleotide
  Sense strand starting at position 2106 of SEQ ID NO: 1881153
ccugaauucucgccugagc

SEQ ID NO: 2022273 - RNA, 19 nt, Artificial Sequence
  Description of Artificial Sequence: Synthetic oligonucleotide
  Antisense strand to SEQ ID NO: 2022272
gcucaggcgagaauucagg

SEQ ID NO: 2022274 - RNA, 19 nt, Artificial Sequence
  Description of Artificial Sequence: Synthetic oligonucleotide
  Sense strand starting at position 2108 of SEQ ID NO: 1881153
ugaauucucgccugagcag

SEQ ID NO: 2022275 - RNA, 19 nt, Artificial Sequence
  Description of Artificial Sequence: Synthetic oligonucleotide
  Antisense strand to SEQ ID NO: 2022274
cugcucaggcgagaauuca

SEQ ID NO: 2022276 - RNA, 19 nt, Artificial Sequence
  Description of Artificial Sequence: Synthetic oligonucleotide
  Sense strand starting at position 2109 of SEQ ID NO: 1881153
gaauucucgccugagcaga

SEQ ID NO: 2022277 - RNA, 19 nt, Artificial Sequence
  Description of Artificial Sequence: Synthetic oligonucleotide
  Antisense strand to SEQ ID NO: 2022276
ucugcucaggcgagaauuc

SEQ ID NO: 2022278 - RNA, 19 nt, Artificial Sequence
  Description of Artificial Sequence: Synthetic oligonucleotide
  Sense strand starting at position 2156 of SEQ ID NO: 1881153
ggauuacucagccgagccu

SEQ ID NO: 2022279 - RNA, 19 nt, Artificial Sequence
  Description of Artificial Sequence: Synthetic oligonucleotide
  Antisense strand to SEQ ID NO: 2022278
aggcucggcugaguaaucc

SEQ ID NO: 2022280 - RNA, 19 nt, Artificial Sequence
  Description of Artificial Sequence: Synthetic oligonucleotide
  Sense strand starting at position 2394 of SEQ ID NO: 1881153
gguugugaggcuuaaacuu

SEQ ID NO: 2022281 - RNA, 19 nt, Artificial Sequence
  Description of Artificial Sequence: Synthetic oligonucleotide
  Antisense strand to SEQ ID NO: 2022280
aaguuuaagccucacaacc

SEQ ID NO: 2022282 - RNA, 19 nt, Artificial Sequence
  Description of Artificial Sequence: Synthetic oligonucleotide
  Sense strand starting at position 2401 of SEQ ID NO: 1881153
aggcuuaaacuuugacaaa

SEQ ID NO: 2022283 - RNA, 19 nt, Artificial Sequence
  Description of Artificial Sequence: Synthetic oligonucleotide
  Antisense strand to SEQ ID NO: 2022282
uuugucaaaguuuaagccu

SEQ ID NO: 2022284 - RNA, 19 nt, Artificial Sequence
  Description of Artificial Sequence: Synthetic oligonucleotide
  Sense strand starting at position 2402 of SEQ ID NO: 1881153
ggcuuaaacuuugacaaac

SEQ ID NO: 2022285 - RNA, 19 nt, Artificial Sequence
  Description of Artificial Sequence: Synthetic oligonucleotide
  Antisense strand to SEQ ID NO: 2022284
guuugucaaaguuuaagcc

SEQ ID NO: 2022286 - RNA, 19 nt, Artificial Sequence
  Description of Artificial Sequence: Synthetic oligonucleotide
  Sense strand starting at position 2442 of SEQ ID NO: 1881153
agggcaguugcugaguauu

SEQ ID NO: 2022287 - RNA, 19 nt, Artificial Sequence
  Description of Artificial Sequence: Synthetic oligonucleotide
  Antisense strand to SEQ ID NO: 2022286
aauacucagcaacugcccu

SEQ ID NO: 2022288 - RNA, 19 nt, Artificial Sequence
  Description of Artificial Sequence: Synthetic oligonucleotide
  Sense strand starting at position 2525 of SEQ ID NO: 1881153
gcaagacugauggguuuau

SEQ ID NO: 2022289 - RNA, 19 nt, Artificial Sequence
  Description of Artificial Sequence: Synthetic oligonucleotide
  Antisense strand to SEQ ID NO: 2022288
auaaacccaucagucuugc

SEQ ID NO: 2022290 - RNA, 19 nt, Artificial Sequence
  Description of Artificial Sequence: Synthetic oligonucleotide
  Sense strand starting at position 2529 of SEQ ID NO: 1881153
gacugauggguuuaucagu

SEQ ID NO: 2022291 - RNA, 19 nt, Artificial Sequence
  Description of Artificial Sequence: Synthetic oligonucleotide
  Antisense strand to SEQ ID NO: 2022290
acugauaaacccaucaguc

SEQ ID NO: 2022292 - RNA, 19 nt, Artificial Sequence
  Description of Artificial Sequence: Synthetic oligonucleotide
  Sense strand starting at position 2578 of SEQ ID NO: 1881153
cuugcuuguuccucuuauu

SEQ ID NO: 2022293 - RNA, 19 nt, Artificial Sequence
  Description of Artificial Sequence: Synthetic oligonucleotide
  Antisense strand to SEQ ID NO: 2022292
aauaagaggaacaagcaag

SEQ ID NO: 2022294 - RNA, 19 nt, Artificial Sequence
  Description of Artificial Sequence: Synthetic oligonucleotide
  Sense strand starting at position 2610 of SEQ ID NO: 1881153
agcagugacacuuggcaga

SEQ ID NO: 2022295 - RNA, 19 nt, Artificial Sequence
  Description of Artificial Sequence: Synthetic oligonucleotide
  Antisense strand to SEQ ID NO: 2022294
ucugccaagugucacugcu

SEQ ID NO: 2022296 - RNA, 19 nt, Artificial Sequence
  Description of Artificial Sequence: Synthetic oligonucleotide
  Sense strand starting at position 2651 of SEQ ID NO: 1881153
ggacauuaauuacgggaaa

SEQ ID NO: 2022297 - RNA, 19 nt, Artificial Sequence
  Description of Artificial Sequence: Synthetic oligonucleotide
  Antisense strand to SEQ ID NO: 2022296
uuucccguaauuaaugucc

SEQ ID NO: 2022298 - RNA, 19 nt, Artificial Sequence
  Description of Artificial Sequence: Synthetic oligonucleotide
  Sense strand starting at position 2652 of SEQ ID NO: 1881153
gacauuaauuacgggaaag

SEQ ID NO: 2022299 - RNA, 19 nt, Artificial Sequence
  Description of Artificial Sequence: Synthetic oligonucleotide
  Antisense strand to SEQ ID NO: 2022298
cuuucccguaauuaauguc

SEQ ID NO: 2022300 - RNA, 19 nt, Artificial Sequence
  Description of Artificial Sequence: Synthetic oligonucleotide
  Sense strand starting at position 2810 of SEQ ID NO: 1881153
ggacgcuucuucucaguga

SEQ ID NO: 2022301 - RNA, 19 nt, Artificial Sequence
  Description of Artificial Sequence: Synthetic oligonucleotide
  Antisense strand to SEQ ID NO: 2022300
ucacugagaagaagcgucc

SEQ ID NO: 2022302 - RNA, 19 nt, Artificial Sequence
  Description of Artificial Sequence: Synthetic oligonucleotide
  Sense strand starting at position 2813 of SEQ ID NO: 1881153
cgcuucuucucagugaauu

SEQ ID NO: 2022303 - RNA, 19 nt, Artificial Sequence
  Description of Artificial Sequence: Synthetic oligonucleotide
  Antisense strand to SEQ ID NO: 2022302
aauucacugagaagaagcg

SEQ ID NO: 2022304 - RNA, 19 nt, Artificial Sequence
  Description of Artificial Sequence: Synthetic oligonucleotide
  Sense strand starting at position 2814 of SEQ ID NO: 1881153
gcuucuucucagugaauua

SEQ ID NO: 2022305 - RNA, 19 nt, Artificial Sequence
  Description of Artificial Sequence: Synthetic oligonucleotide
  Antisense strand to SEQ ID NO: 2022304
uaauucacugagaagaagc

SEQ ID NO: 2022306 - RNA, 19 nt, Artificial Sequence
  Description of Artificial Sequence: Synthetic oligonucleotide
  Sense strand starting at position 2835 of SEQ ID NO: 1881153
gcauuucagcgcuggaaag

SEQ ID NO: 2022307 - RNA, 19 nt, Artificial Sequence
  Description of Artificial Sequence: Synthetic oligonucleotide
  Antisense strand to SEQ ID NO: 2022306
cuuuccagcgcugaaaugc

SEQ ID NO: 2022308 - RNA, 19 nt, Artificial Sequence
  Description of Artificial Sequence: Synthetic oligonucleotide
  Sense strand starting at position 3259 of SEQ ID NO: 1881153
cgaggucacuaguccucaa

SEQ ID NO: 2022309 - RNA, 19 nt, Artificial Sequence
  Description of Artificial Sequence: Synthetic oligonucleotide
  Antisense strand to SEQ ID NO: 2022308
uugaggacuagugaccucg

SEQ ID NO: 2022310 - RNA, 19 nt, Artificial Sequence
  Description of Artificial Sequence: Synthetic oligonucleotide
  Sense strand starting at position 3262 of SEQ ID NO: 1881153
ggucacuaguccucaaagu

SEQ ID NO: 2022311 - RNA, 19 nt, Artificial Sequence
  Description of Artificial Sequence: Synthetic oligonucleotide
  Antisense strand to SEQ ID NO: 2022310
acuuugaggacuagugacc

SEQ ID NO: 2022312 - RNA, 19 nt, Artificial Sequence
  Description of Artificial Sequence: Synthetic oligonucleotide
  Sense strand starting at position 3263 of SEQ ID NO: 1881153
gucacuaguccucaaagug

SEQ ID NO: 2022313 - RNA, 19 nt, Artificial Sequence
  Description of Artificial Sequence: Synthetic oligonucleotide
  Antisense strand to SEQ ID NO: 2022312
cacuuugaggacuagugac

SEQ ID NO: 2022314 - RNA, 19 nt, Artificial Sequence
  Description of Artificial Sequence: Synthetic oligonucleotide
  Sense strand starting at position 3456 of SEQ ID NO: 1881153
cagcaauaacucugagggu

SEQ ID NO: 2022315 - RNA, 19 nt, Artificial Sequence
  Description of Artificial Sequence: Synthetic oligonucleotide
  Antisense strand to SEQ ID NO: 2022314
acccucagaguuauugcug

SEQ ID NO: 2022316 - RNA, 19 nt, Artificial Sequence
  Description of Artificial Sequence: Synthetic oligonucleotide
  Sense strand starting at position 3624 of SEQ ID NO: 1881153
gugagugugagcgaggaaa

SEQ ID NO: 2022317 - RNA, 19 nt, Artificial Sequence
  Description of Artificial Sequence: Synthetic oligonucleotide
  Antisense strand to SEQ ID NO: 2022316
uuuccucgcucacacucac

SEQ ID NO: 2022318 - RNA, 19 nt, Artificial Sequence
  Description of Artificial Sequence: Synthetic oligonucleotide
  Sense strand starting at position 3672 of SEQ ID NO: 1881153
cugacuuucuucucggaau

SEQ ID NO: 2022319 - RNA, 19 nt, Artificial Sequence
  Description of Artificial Sequence: Synthetic oligonucleotide
  Antisense strand to SEQ ID NO: 2022318
auuccgagaagaaagucag

SEQ ID NO: 2022320 - RNA, 19 nt, Artificial Sequence
  Description of Artificial Sequence: Synthetic oligonucleotide
  Sense strand starting at position 3674 of SEQ ID NO: 1881153
gacuuucuucucggaauug

SEQ ID NO: 2022321 - RNA, 19 nt, Artificial Sequence
  Description of Artificial Sequence: Synthetic oligonucleotide
  Antisense strand to SEQ ID NO: 2022320
caauuccgagaagaaaguc

SEQ ID NO: 2022322 - RNA, 19 nt, Artificial Sequence
  Description of Artificial Sequence: Synthetic oligonucleotide
  Sense strand starting at position 245 of SEQ ID NO: 1881154
gaaguuugaugagcaaacu

SEQ ID NO: 2022323 - RNA, 19 nt, Artificial Sequence
  Description of Artificial Sequence: Synthetic oligonucleotide
  Antisense strand to SEQ ID NO: 2022322
aguuugcucaucaaacuuc

SEQ ID NO: 2022324 - RNA, 19 nt, Artificial Sequence
  Description of Artificial Sequence: Synthetic oligonucleotide
  Sense strand starting at position 246 of SEQ ID NO: 1881154
aaguuugaugagcaaacuu

SEQ ID NO: 2022325 - RNA, 19 nt, Artificial Sequence
  Description of Artificial Sequence: Synthetic oligonucleotide
  Antisense strand to SEQ ID NO: 2022324
aaguuugcucaucaaacuu

SEQ ID NO: 2022326 - RNA, 19 nt, Artificial Sequence
  Description of Artificial Sequence: Synthetic oligonucleotide
  Sense strand starting at position 310 of SEQ ID NO: 1881154
ucugaaaucggcgacagau

SEQ ID NO: 2022327 - RNA, 19 nt, Artificial Sequence
  Description of Artificial Sequence: Synthetic oligonucleotide
  Antisense strand to SEQ ID NO: 2022326
aucugucgccgauuucaga

SEQ ID NO: 2022328 - RNA, 19 nt, Artificial Sequence
  Description of Artificial Sequence: Synthetic oligonucleotide
  Sense strand starting at position 372 of SEQ ID NO: 1881154
gguaguggaaagcaagauu

SEQ ID NO: 2022329 - RNA, 19 nt, Artificial Sequence
  Description of Artificial Sequence: Synthetic oligonucleotide
  Antisense strand to SEQ ID NO: 2022328
aaucuugcuuuccacuacc

SEQ ID NO: 2022330 - RNA, 19 nt, Artificial Sequence
  Description of Artificial Sequence: Synthetic oligonucleotide
  Sense strand starting at position 383 of SEQ ID NO: 1881154
gcaagauugcaauauccug

SEQ ID NO: 2022331 - RNA, 19 nt, Artificial Sequence
  Description of Artificial Sequence: Synthetic oligonucleotide
  Antisense strand to SEQ ID NO: 2022330
caggauauugcaaucuugc

SEQ ID NO: 2022332 - RNA, 19 nt, Artificial Sequence
  Description of Artificial Sequence: Synthetic oligonucleotide
  Sense strand starting at position 451 of SEQ ID NO: 1881154
uucucacaugcugauugaa

SEQ ID NO: 2022333 - RNA, 19 nt, Artificial Sequence
  Description of Artificial Sequence: Synthetic oligonucleotide
  Antisense strand to SEQ ID NO: 2022332
uucaaucagcaugugagaa

SEQ ID NO: 2022334 - RNA, 19 nt, Artificial Sequence
  Description of Artificial Sequence: Synthetic oligonucleotide
  Sense strand starting at position 453 of SEQ ID NO: 1881154
cucacaugcugauugaaag

SEQ ID NO: 2022335 - RNA, 19 nt, Artificial Sequence
  Description of Artificial Sequence: Synthetic oligonucleotide
  Antisense strand to SEQ ID NO: 2022334
cuuucaaucagcaugugag

SEQ ID NO: 2022336 - RNA, 19 nt, Artificial Sequence
  Description of Artificial Sequence: Synthetic oligonucleotide
  Sense strand starting at position 517 of SEQ ID NO: 1881154
ucguuaauccuggaauaau

SEQ ID NO: 2022337 - RNA, 19 nt, Artificial Sequence
  Description of Artificial Sequence: Synthetic oligonucleotide
  Antisense strand to SEQ ID NO: 2022336
auuauuccaggauuaacga

SEQ ID NO: 2022338 - RNA, 19 nt, Artificial Sequence
  Description of Artificial Sequence: Synthetic oligonucleotide
  Sense strand starting at position 540 of SEQ ID NO: 1881154
guaugagaccacgaugcua

SEQ ID NO: 2022339 - RNA, 19 nt, Artificial Sequence
  Description of Artificial Sequence: Synthetic oligonucleotide
  Antisense strand to SEQ ID NO: 2022338
uagcaucguggucucauac

SEQ ID NO: 2022340 - RNA, 19 nt, Artificial Sequence
  Description of Artificial Sequence: Synthetic oligonucleotide
  Sense strand starting at position 944 of SEQ ID NO: 1881154
cugaguuauggguauauau

SEQ ID NO: 2022341 - RNA, 19 nt, Artificial Sequence
  Description of Artificial Sequence: Synthetic oligonucleotide
  Antisense strand to SEQ ID NO: 2022340
auauauacccauaacucag

SEQ ID NO: 2022342 - RNA, 19 nt, Artificial Sequence
  Description of Artificial Sequence: Synthetic oligonucleotide
  Sense strand starting at position 946 of SEQ ID NO: 1881154
gaguuauggguauauauuc

SEQ ID NO: 2022343 - RNA, 19 nt, Artificial Sequence
  Description of Artificial Sequence: Synthetic oligonucleotide
  Antisense strand to SEQ ID NO: 2022342
gaauauauacccauaacuc

SEQ ID NO: 2022344 - RNA, 19 nt, Artificial Sequence
  Description of Artificial Sequence: Synthetic oligonucleotide
  Sense strand starting at position 1100 of SEQ ID NO: 1881154
ugucuaauggagcaguaaa

SEQ ID NO: 2022345 - RNA, 19 nt, Artificial Sequence
  Description of Artificial Sequence: Synthetic oligonucleotide
  Antisense strand to SEQ ID NO: 2022344
uuuacugcuccauuagaca

SEQ ID NO: 2022346 - RNA, 19 nt, Artificial Sequence
  Description of Artificial Sequence: Synthetic oligonucleotide
  Sense strand starting at position 1312 of SEQ ID NO: 1881154
cuuggaugauauccaaguu

SEQ ID NO: 2022347 - RNA, 19 nt, Artificial Sequence
  Description of Artificial Sequence: Synthetic oligonucleotide
  Antisense strand to SEQ ID NO: 2022346
aacuuggauaucauccaag

SEQ ID NO: 2022348 - RNA, 19 nt, Artificial Sequence
  Description of Artificial Sequence: Synthetic oligonucleotide
  Sense strand starting at position 1354 of SEQ ID NO: 1881154
aaauaaguggcuuauguaa

SEQ ID NO: 2022349 - RNA, 19 nt, Artificial Sequence
  Description of Artificial Sequence: Synthetic oligonucleotide
  Antisense strand to SEQ ID NO: 2022348
uuacauaagccacuuauuu

SEQ ID NO: 2022350 - RNA, 19 nt, Artificial Sequence
  Description of Artificial Sequence: Synthetic oligonucleotide
  Sense strand starting at position 1386 of SEQ ID NO: 1881154
cuacaaaccguccaagauu

SEQ ID NO: 2022351 - RNA, 19 nt, Artificial Sequence
  Description of Artificial Sequence: Synthetic oligonucleotide
  Antisense strand to SEQ ID NO: 2022350
aaucuuggacgguuuguag

SEQ ID NO: 2022352 - RNA, 19 nt, Artificial Sequence
  Description of Artificial Sequence: Synthetic oligonucleotide
  Sense strand starting at position 1393 of SEQ ID NO: 1881154
ccguccaagauuuguguua

SEQ ID NO: 2022353 - RNA, 19 nt, Artificial Sequence
  Description of Artificial Sequence: Synthetic oligonucleotide
  Antisense strand to SEQ ID NO: 2022352
uaacacaaaucuuggacgg

SEQ ID NO: 2022354 - RNA, 19 nt, Artificial Sequence
  Description of Artificial Sequence: Synthetic oligonucleotide
  Sense strand starting at position 1400 of SEQ ID NO: 1881154
agauuuguguuaguucgac

SEQ ID NO: 2022355 - RNA, 19 nt, Artificial Sequence
  Description of Artificial Sequence: Synthetic oligonucleotide
  Antisense strand to SEQ ID NO: 2022354
gucgaacuaacacaaaucu

SEQ ID NO: 2022356 - RNA, 19 nt, Artificial Sequence
  Description of Artificial Sequence: Synthetic oligonucleotide
  Sense strand starting at position 1509 of SEQ ID NO: 1881154
ugcaguagucaauaaagua

SEQ ID NO: 2022357 - RNA, 19 nt, Artificial Sequence
  Description of Artificial Sequence: Synthetic oligonucleotide
  Antisense strand to SEQ ID NO: 2022356
uacuuuauugacuacugca

SEQ ID NO: 2022358 - RNA, 19 nt, Artificial Sequence
  Description of Artificial Sequence: Synthetic oligonucleotide
  Sense strand starting at position 1516 of SEQ ID NO: 1881154
gucaauaaaguacauguaa

SEQ ID NO: 2022359 - RNA, 19 nt, Artificial Sequence
  Description of Artificial Sequence: Synthetic oligonucleotide
  Antisense strand to SEQ ID NO: 2022358
uuacauguacuuuauugac

SEQ ID NO: 2022360 - RNA, 19 nt, Artificial Sequence
  Description of Artificial Sequence: Synthetic oligonucleotide
  Sense strand starting at position 1628 of SEQ ID NO: 1881154
caggcuaaucgauaauguu

SEQ ID NO: 2022361 - RNA, 19 nt, Artificial Sequence
  Description of Artificial Sequence: Synthetic oligonucleotide
  Antisense strand to SEQ ID NO: 2022360
aacauuaucgauuagccug

SEQ ID NO: 2022362 - RNA, 19 nt, Artificial Sequence
  Description of Artificial Sequence: Synthetic oligonucleotide
  Sense strand starting at position 1702 of SEQ ID NO: 1881154
uggguuuaucgggacuuaa

SEQ ID NO: 2022363 - RNA, 19 nt, Artificial Sequence
  Description of Artificial Sequence: Synthetic oligonucleotide
  Antisense strand to SEQ ID NO: 2022362
uuaagucccgauaaaccca

SEQ ID NO: 2022364 - RNA, 19 nt, Artificial Sequence
  Description of Artificial Sequence: Synthetic oligonucleotide
  Sense strand starting at position 1735 of SEQ ID NO: 1881154
gaggcacaucuguauuauu

SEQ ID NO: 2022365 - RNA, 19 nt, Artificial Sequence
  Description of Artificial Sequence: Synthetic oligonucleotide
  Antisense strand to SEQ ID NO: 2022364
aauaauacagaugugccuc

SEQ ID NO: 2022366 - RNA, 19 nt, Artificial Sequence
  Description of Artificial Sequence: Synthetic oligonucleotide
  Sense strand starting at position 2203 of SEQ ID NO: 1881154
uuggaauaguaaucauuac

SEQ ID NO: 2022367 - RNA, 19 nt, Artificial Sequence
  Description of Artificial Sequence: Synthetic oligonucleotide
  Antisense strand to SEQ ID NO: 2022366
guaaugauuacuauuccaa

SEQ ID NO: 2022368 - RNA, 19 nt, Artificial Sequence
  Description of Artificial Sequence: Synthetic oligonucleotide
  Sense strand starting at position 2218 of SEQ ID NO: 1881154
uuacacuaugccgagaauu

SEQ ID NO: 2022369 - RNA, 19 nt, Artificial Sequence
  Description of Artificial Sequence: Synthetic oligonucleotide
  Antisense strand to SEQ ID NO: 2022368
aauucucggcauaguguaa

SEQ ID NO: 2022370 - RNA, 19 nt, Artificial Sequence
  Description of Artificial Sequence: Synthetic oligonucleotide
  Sense strand starting at position 2445 of SEQ ID NO: 1881154
uucuguugucuauaagacu

SEQ ID NO: 2022371 - RNA, 19 nt, Artificial Sequence
  Description of Artificial Sequence: Synthetic oligonucleotide
  Antisense strand to SEQ ID NO: 2022370
agucuuauagacaacagaa

SEQ ID NO: 2022372 - RNA, 19 nt, Artificial Sequence
  Description of Artificial Sequence: Synthetic oligonucleotide
  Sense strand starting at position 2474 of SEQ ID NO: 1881154
agcauaggucuguauauca

SEQ ID NO: 2022373 - RNA, 19 nt, Artificial Sequence
  Description of Artificial Sequence: Synthetic oligonucleotide
  Antisense strand to SEQ ID NO: 2022372
ugauauacagaccuaugcu

SEQ ID NO: 2022374 - RNA, 19 nt, Artificial Sequence
  Description of Artificial Sequence: Synthetic oligonucleotide
  Sense strand starting at position 2881 of SEQ ID NO: 1881154
uaagaaagucauggcacau

SEQ ID NO: 2022375 - RNA, 19 nt, Artificial Sequence
  Description of Artificial Sequence: Synthetic oligonucleotide
  Antisense strand to SEQ ID NO: 2022374
augugccaugacuuucuua

SEQ ID NO: 2022376 - RNA, 19 nt, Artificial Sequence
  Description of Artificial Sequence: Synthetic oligonucleotide
  Sense strand starting at position 2965 of SEQ ID NO: 1881154
gaagucuucugagcagaag

SEQ ID NO: 2022377 - RNA, 19 nt, Artificial Sequence
  Description of Artificial Sequence: Synthetic oligonucleotide
  Antisense strand to SEQ ID NO: 2022376
cuucugcucagaagacuuc

SEQ ID NO: 2022378 - RNA, 19 nt, Artificial Sequence
  Description of Artificial Sequence: Synthetic oligonucleotide
  Sense strand starting at position 2983 of SEQ ID NO: 1881154
ggguguccuaaucagagca

SEQ ID NO: 2022379 - RNA, 19 nt, Artificial Sequence
  Description of Artificial Sequence: Synthetic oligonucleotide
  Antisense strand to SEQ ID NO: 2022378
ugcucugauuaggacaccc

SEQ ID NO: 2022380 - RNA, 19 nt, Artificial Sequence
  Description of Artificial Sequence: Synthetic oligonucleotide
  Sense strand starting at position 3037 of SEQ ID NO: 1881154
ggugaauccaaaugucuga

SEQ ID NO: 2022381 - RNA, 19 nt, Artificial Sequence
  Description of Artificial Sequence: Synthetic oligonucleotide
  Antisense strand to SEQ ID NO: 2022380
ucagacauuuggauucacc

SEQ ID NO: 2022382 - RNA, 19 nt, Artificial Sequence
  Description of Artificial Sequence: Synthetic oligonucleotide
  Sense strand starting at position 3084 of SEQ ID NO: 1881154
gcaacaauuguccagacaa

SEQ ID NO: 2022383 - RNA, 19 nt, Artificial Sequence
  Description of Artificial Sequence: Synthetic oligonucleotide
  Antisense strand to SEQ ID NO: 2022382
uugucuggacaauuguugc

SEQ ID NO: 2022384 - RNA, 19 nt, Artificial Sequence
  Description of Artificial Sequence: Synthetic oligonucleotide
  Sense strand starting at position 3238 of SEQ ID NO: 1881154
gugaguaugagaggcauaa

SEQ ID NO: 2022385 - RNA, 19 nt, Artificial Sequence
  Description of Artificial Sequence: Synthetic oligonucleotide
  Antisense strand to SEQ ID NO: 2022384
uuaugccucucauacucac

SEQ ID NO: 2022386 - RNA, 19 nt, Artificial Sequence
  Description of Artificial Sequence: Synthetic oligonucleotide
  Sense strand starting at position 3341 of SEQ ID NO: 1881154
cuagguagggaauguuaua

SEQ ID NO: 2022387 - RNA, 19 nt, Artificial Sequence
  Description of Artificial Sequence: Synthetic oligonucleotide
  Antisense strand to SEQ ID NO: 2022386
uauaacauucccuaccuag

SEQ ID NO: 2022388 - RNA, 19 nt, Artificial Sequence
  Description of Artificial Sequence: Synthetic oligonucleotide
  Sense strand starting at position 3385 of SEQ ID NO: 1881154
caagacucuggugagcuua

SEQ ID NO: 2022389 - RNA, 19 nt, Artificial Sequence
  Description of Artificial Sequence: Synthetic oligonucleotide
  Antisense strand to SEQ ID NO: 2022388
uaagcucaccagagucuug

SEQ ID NO: 2022390 - RNA, 19 nt, Artificial Sequence
  Description of Artificial Sequence: Synthetic oligonucleotide
  Sense strand starting at position 3401 of SEQ ID NO: 1881154
uuaacuaacuggcucaaga

SEQ ID NO: 2022391 - RNA, 19 nt, Artificial Sequence
  Description of Artificial Sequence: Synthetic oligonucleotide
  Antisense strand to SEQ ID NO: 2022390
ucuugagccaguuaguuaa

SEQ ID NO: 2022392 - RNA, 19 nt, Artificial Sequence
  Description of Artificial Sequence: Synthetic oligonucleotide
  Sense strand starting at position 3639 of SEQ ID NO: 1881154
gagacaaucaguuggaguu

SEQ ID NO: 2022393 - RNA, 19 nt, Artificial Sequence
  Description of Artificial Sequence: Synthetic oligonucleotide
  Antisense strand to SEQ ID NO: 2022392
aacuccaacugauugucuc

SEQ ID NO: 2022394 - RNA, 19 nt, Artificial Sequence
  Description of Artificial Sequence: Synthetic oligonucleotide
  Sense strand starting at position 3640 of SEQ ID NO: 1881154
agacaaucaguuggaguuu

SEQ ID NO: 2022395 - RNA, 19 nt, Artificial Sequence
  Description of Artificial Sequence: Synthetic oligonucleotide
  Antisense strand to SEQ ID NO: 2022394
aaacuccaacugauugucu

SEQ ID NO: 2022396 - RNA, 19 nt, Artificial Sequence
  Description of Artificial Sequence: Synthetic oligonucleotide
  Sense strand starting at position 3653 of SEQ ID NO: 1881154
gaguuuggaguuugaugaa

SEQ ID NO: 2022397 - RNA, 19 nt, Artificial Sequence
  Description of Artificial Sequence: Synthetic oligonucleotide
  Antisense strand to SEQ ID NO: 2022396
uucaucaaacuccaaacuc

SEQ ID NO: 2022398 - RNA, 19 nt, Artificial Sequence
  Description of Artificial Sequence: Synthetic oligonucleotide
  Sense strand starting at position 3720 of SEQ ID NO: 1881154
cugguuaccuaaguaagaa

SEQ ID NO: 2022399 - RNA, 19 nt, Artificial Sequence
  Description of Artificial Sequence: Synthetic oligonucleotide
  Antisense strand to SEQ ID NO: 2022398
uucuuacuuagguaaccag

SEQ ID NO: 2022400 - RNA, 19 nt, Artificial Sequence
  Description of Artificial Sequence: Synthetic oligonucleotide
  Sense strand starting at position 3832 of SEQ ID NO: 1881154
aaagcaaugugaguagaua

SEQ ID NO: 2022401 - RNA, 19 nt, Artificial Sequence
  Description of Artificial Sequence: Synthetic oligonucleotide
  Antisense strand to SEQ ID NO: 2022400
uaucuacucacauugcuuu

SEQ ID NO: 2022402 - RNA, 19 nt, Artificial Sequence
  Description of Artificial Sequence: Synthetic oligonucleotide
  Sense strand starting at position 294 of SEQ ID NO: 1881155
aagggucccucaucgaaua

SEQ ID NO: 2022403 - RNA, 19 nt, Artificial Sequence
  Description of Artificial Sequence: Synthetic oligonucleotide
  Antisense strand to SEQ ID NO: 2022402
uauucgaugagggacccuu

SEQ ID NO: 2022404 - RNA, 19 nt, Artificial Sequence
  Description of Artificial Sequence: Synthetic oligonucleotide
  Sense strand starting at position 295 of SEQ ID NO: 1881155
agggucccucaucgaauaa

SEQ ID NO: 2022405 - RNA, 19 nt, Artificial Sequence
  Description of Artificial Sequence: Synthetic oligonucleotide
  Antisense strand to SEQ ID NO: 2022404
uuauucgaugagggacccu

SEQ ID NO: 2022406 - RNA, 19 nt, Artificial Sequence
  Description of Artificial Sequence: Synthetic oligonucleotide
  Sense strand starting at position 296 of SEQ ID NO: 1881155
gggucccucaucgaauaaa

SEQ ID NO: 2022407 - RNA, 19 nt, Artificial Sequence
  Description of Artificial Sequence: Synthetic oligonucleotide
  Antisense strand to SEQ ID NO: 2022406
uuuauucgaugagggaccc

SEQ ID NO: 2022408 - RNA, 19 nt, Artificial Sequence
  Description of Artificial Sequence: Synthetic oligonucleotide
  Sense strand starting at position 2194 of SEQ ID NO: 1881155
ggcccuauuucggagaggu

SEQ ID NO: 2022409 - RNA, 19 nt, Artificial Sequence
  Description of Artificial Sequence: Synthetic oligonucleotide
  Antisense strand to SEQ ID NO: 2022408
accucuccgaaauagggcc

SEQ ID NO: 2022410 - RNA, 19 nt, Artificial Sequence
  Description of Artificial Sequence: Synthetic oligonucleotide
  Sense strand starting at position 2198 of SEQ ID NO: 1881155
cuauuucggagagguguuu

SEQ ID NO: 2022411 - RNA, 19 nt, Artificial Sequence
  Description of Artificial Sequence: Synthetic oligonucleotide
  Antisense strand to SEQ ID NO: 2022410
aaacaccucuccgaaauag

SEQ ID NO: 2022412 - RNA, 19 nt, Artificial Sequence
  Description of Artificial Sequence: Synthetic oligonucleotide
  Sense strand starting at position 2210 of SEQ ID NO: 1881155
gguguuuggcaccaacauu

SEQ ID NO: 2022413 - RNA, 19 nt, Artificial Sequence
  Description of Artificial Sequence: Synthetic oligonucleotide
  Antisense strand to SEQ ID NO: 2022412
aauguuggugccaaacacc

SEQ ID NO: 2022414 - RNA, 19 nt, Artificial Sequence
  Description of Artificial Sequence: Synthetic oligonucleotide
  Sense strand starting at position 2604 of SEQ ID NO: 1881155
gguagaucccuuuggcuua

SEQ ID NO: 2022415 - RNA, 19 nt, Artificial Sequence
  Description of Artificial Sequence: Synthetic oligonucleotide
  Antisense strand to SEQ ID NO: 2022414
uaagccaaagggaucuacc

SEQ ID NO: 2022416 - RNA, 19 nt, Artificial Sequence
  Description of Artificial Sequence: Synthetic oligonucleotide
  Sense strand starting at position 2605 of SEQ ID NO: 1881155
guagaucccuuuggcuuau

SEQ ID NO: 2022417 - RNA, 19 nt, Artificial Sequence
  Description of Artificial Sequence: Synthetic oligonucleotide
  Antisense strand to SEQ ID NO: 2022416
auaagccaaagggaucuac

SEQ ID NO: 2022418 - RNA, 19 nt, Artificial Sequence
  Description of Artificial Sequence: Synthetic oligonucleotide
  Sense strand starting at position 2760 of SEQ ID NO: 1881155
guaaguauguuuccugucu

SEQ ID NO: 2022419 - RNA, 19 nt, Artificial Sequence
  Description of Artificial Sequence: Synthetic oligonucleotide
  Antisense strand to SEQ ID NO: 2022418
agacaggaaacauacuuac

SEQ ID NO: 2022420 - RNA, 19 nt, Artificial Sequence
  Description of Artificial Sequence: Synthetic oligonucleotide
  Sense strand starting at position 3174 of SEQ ID NO: 1881155
cgagcuuacagugagcaga

SEQ ID NO: 2022421 - RNA, 19 nt, Artificial Sequence
  Description of Artificial Sequence: Synthetic oligonucleotide
  Antisense strand to SEQ ID NO: 2022420
ucugcucacuguaagcucg

SEQ ID NO: 2022422 - RNA, 19 nt, Artificial Sequence
  Description of Artificial Sequence: Synthetic oligonucleotide
  Sense strand starting at position 36 of SEQ ID NO: 1881156
agaguuggugcagauaaag

SEQ ID NO: 2022423 - RNA, 19 nt, Artificial Sequence
  Description of Artificial Sequence: Synthetic oligonucleotide
  Antisense strand to SEQ ID NO: 2022422
cuuuaucugcaccaacucu

SEQ ID NO: 2022424 - RNA, 19 nt, Artificial Sequence
  Description of Artificial Sequence: Synthetic oligonucleotide
  Sense strand starting at position 92 of SEQ ID NO: 1881156
aagacugauuugggagaua

SEQ ID NO: 2022425 - RNA, 19 nt, Artificial Sequence
  Description of Artificial Sequence: Synthetic oligonucleotide
  Antisense strand to SEQ ID NO: 2022424
uaucucccaaaucagucuu

SEQ ID NO: 2022426 - RNA, 19 nt, Artificial Sequence
  Description of Artificial Sequence: Synthetic oligonucleotide
  Sense strand starting at position 201 of SEQ ID NO: 1881156
ggcugaugggaucaucuca

SEQ ID NO: 2022427 - RNA, 19 nt, Artificial Sequence
  Description of Artificial Sequence: Synthetic oligonucleotide
  Antisense strand to SEQ ID NO: 2022426
ugagaugaucccaucagcc

SEQ ID NO: 2022428 - RNA, 19 nt, Artificial Sequence
  Description of Artificial Sequence: Synthetic oligonucleotide
  Sense strand starting at position 482 of SEQ ID NO: 1881156
agccauguccuggagcaga

SEQ ID NO: 2022429 - RNA, 19 nt, Artificial Sequence
  Description of Artificial Sequence: Synthetic oligonucleotide
  Antisense strand to SEQ ID NO: 2022428
ucugcuccaggacauggcu

SEQ ID NO: 2022430 - RNA, 19 nt, Artificial Sequence
  Description of Artificial Sequence: Synthetic oligonucleotide
  Sense strand starting at position 518 of SEQ ID NO: 1881156
cuaugugauaaaggaggua

SEQ ID NO: 2022431 - RNA, 19 nt, Artificial Sequence
  Description of Artificial Sequence: Synthetic oligonucleotide
  Antisense strand to SEQ ID NO: 2022430
uaccuccuuuaucacauag

SEQ ID NO: 2022432 - RNA, 19 nt, Artificial Sequence
  Description of Artificial Sequence: Synthetic oligonucleotide
  Sense strand starting at position 595 of SEQ ID NO: 1881156
acuguuaaauacguauaca

SEQ ID NO: 2022433 - RNA, 19 nt, Artificial Sequence
  Description of Artificial Sequence: Synthetic oligonucleotide
  Antisense strand to SEQ ID NO: 2022432
uguauacguauuuaacagu

SEQ ID NO: 2022434 - RNA, 19 nt, Artificial Sequence
  Description of Artificial Sequence: Synthetic oligonucleotide
  Sense strand starting at position 748 of SEQ ID NO: 1881156
agagcucucccagacacau

SEQ ID NO: 2022435 - RNA, 19 nt, Artificial Sequence
  Description of Artificial Sequence: Synthetic oligonucleotide
  Antisense strand to SEQ ID NO: 2022434
augugucugggagagcucu

SEQ ID NO: 2022436 - RNA, 19 nt, Artificial Sequence
  Description of Artificial Sequence: Synthetic oligonucleotide
  Sense strand starting at position 881 of SEQ ID NO: 1881156
cacuguucucuggagcaga

SEQ ID NO: 2022437 - RNA, 19 nt, Artificial Sequence
  Description of Artificial Sequence: Synthetic oligonucleotide
  Antisense strand to SEQ ID NO: 2022436
ucugcuccagagaacagug

SEQ ID NO: 2022438 - RNA, 19 nt, Artificial Sequence
  Description of Artificial Sequence: Synthetic oligonucleotide
  Sense strand starting at position 1156 of SEQ ID NO: 1881156
aggcaaaggccuugauauc

SEQ ID NO: 2022439 - RNA, 19 nt, Artificial Sequence
  Description of Artificial Sequence: Synthetic oligonucleotide
  Antisense strand to SEQ ID NO: 2022438
gauaucaaggccuuugccu

SEQ ID NO: 2022440 - RNA, 19 nt, Artificial Sequence
  Description of Artificial Sequence: Synthetic oligonucleotide
  Sense strand starting at position 1338 of SEQ ID NO: 1881156
agaaccauugacuguuaga

SEQ ID NO: 2022441 - RNA, 19 nt, Artificial Sequence
  Description of Artificial Sequence: Synthetic oligonucleotide
  Antisense strand to SEQ ID NO: 2022440
ucuaacagucaaugguucu

SEQ ID NO: 2022442 - RNA, 19 nt, Artificial Sequence
  Description of Artificial Sequence: Synthetic oligonucleotide
  Sense strand starting at position 1409 of SEQ ID NO: 1881156
aguuaccucccagguaaau

SEQ ID NO: 2022443 - RNA, 19 nt, Artificial Sequence
  Description of Artificial Sequence: Synthetic oligonucleotide
  Antisense strand to SEQ ID NO: 2022442
auuuaccugggagguaacu

SEQ ID NO: 2022444 - RNA, 19 nt, Artificial Sequence
  Description of Artificial Sequence: Synthetic oligonucleotide
  Sense strand starting at position 1455 of SEQ ID NO: 1881156
gguauuucuucugaggaaa

SEQ ID NO: 2022445 - RNA, 19 nt, Artificial Sequence
  Description of Artificial Sequence: Synthetic oligonucleotide
  Antisense strand to SEQ ID NO: 2022444
uuuccucagaagaaauacc

SEQ ID NO: 2022446 - RNA, 19 nt, Artificial Sequence
  Description of Artificial Sequence: Synthetic oligonucleotide
  Sense strand starting at position 1484 of SEQ ID NO: 1881156
caaugauguggccacaaca

SEQ ID NO: 2022447 - RNA, 19 nt, Artificial Sequence
  Description of Artificial Sequence: Synthetic oligonucleotide
  Antisense strand to SEQ ID NO: 2022446
uguuguggccacaucauug

SEQ ID NO: 2022448 - RNA, 19 nt, Artificial Sequence
  Description of Artificial Sequence: Synthetic oligonucleotide
  Sense strand starting at position 1494 of SEQ ID NO: 1881156
gccacaacaccuuguagau

SEQ ID NO: 2022449 - RNA, 19 nt, Artificial Sequence
  Description of Artificial Sequence: Synthetic oligonucleotide
  Antisense strand to SEQ ID NO: 2022448
aucuacaagguguuguggc

SEQ ID NO: 2022450 - RNA, 19 nt, Artificial Sequence
  Description of Artificial Sequence: Synthetic oligonucleotide
  Sense strand starting at position 1504 of SEQ ID NO: 1881156
cuuguagaugugggaagau

SEQ ID NO: 2022451 - RNA, 19 nt, Artificial Sequence
  Description of Artificial Sequence: Synthetic oligonucleotide
  Antisense strand to SEQ ID NO: 2022450
aucuucccacaucuacaag

SEQ ID NO: 2022452 - RNA, 19 nt, Artificial Sequence
  Description of Artificial Sequence: Synthetic oligonucleotide
  Sense strand starting at position 1569 of SEQ ID NO: 1881156
ugaaauaguacaugacgca

SEQ ID NO: 2022453 - RNA, 19 nt, Artificial Sequence
  Description of Artificial Sequence: Synthetic oligonucleotide
  Antisense strand to SEQ ID NO: 2022452
ugcgucauguacuauuuca

SEQ ID NO: 2022454 - RNA, 19 nt, Artificial Sequence
  Description of Artificial Sequence: Synthetic oligonucleotide
  Sense strand starting at position 1570 of SEQ ID NO: 1881156
gaaauaguacaugacgcaa

SEQ ID NO: 2022455 - RNA, 19 nt, Artificial Sequence
  Description of Artificial Sequence: Synthetic oligonucleotide
  Antisense strand to SEQ ID NO: 2022454
uugcgucauguacuauuuc

SEQ ID NO: 2022456 - RNA, 19 nt, Artificial Sequence
  Description of Artificial Sequence: Synthetic oligonucleotide
  Sense strand starting at position 1617 of SEQ ID NO: 1881156
acuacuauucccuggaagu

SEQ ID NO: 2022457 - RNA, 19 nt, Artificial Sequence
  Description of Artificial Sequence: Synthetic oligonucleotide
  Antisense strand to SEQ ID NO: 2022456
acuuccagggaauaguagu

SEQ ID NO: 2022458 - RNA, 19 nt, Artificial Sequence
  Description of Artificial Sequence: Synthetic oligonucleotide
  Sense strand starting at position 1618 of SEQ ID NO: 1881156
cuacuauucccuggaaguc

SEQ ID NO: 2022459 - RNA, 19 nt, Artificial Sequence
  Description of Artificial Sequence: Synthetic oligonucleotide
  Antisense strand to SEQ ID NO: 2022458
gacuuccagggaauaguag

SEQ ID NO: 2022460 - RNA, 19 nt, Artificial Sequence
  Description of Artificial Sequence: Synthetic oligonucleotide
  Sense strand starting at position 1716 of SEQ ID NO: 1881156
ugauaaugcccucagcacu

SEQ ID NO: 2022461 - RNA, 19 nt, Artificial Sequence
  Description of Artificial Sequence: Synthetic oligonucleotide
  Antisense strand to SEQ ID NO: 2022460
agugcugagggcauuauca

SEQ ID NO: 2022462 - RNA, 19 nt, Artificial Sequence
  Description of Artificial Sequence: Synthetic oligonucleotide
  Sense strand starting at position 1789 of SEQ ID NO: 1881156
gggaaauucugacuucucu

SEQ ID NO: 2022463 - RNA, 19 nt, Artificial Sequence
  Description of Artificial Sequence: Synthetic oligonucleotide
  Antisense strand to SEQ ID NO: 2022462
agagaagucagaauuuccc

SEQ ID NO: 2022464 - RNA, 19 nt, Artificial Sequence
  Description of Artificial Sequence: Synthetic oligonucleotide
  Sense strand starting at position 1903 of SEQ ID NO: 1881156
ugcugugaacuguaaagaa

SEQ ID NO: 2022465 - RNA, 19 nt, Artificial Sequence
  Description of Artificial Sequence: Synthetic oligonucleotide
  Antisense strand to SEQ ID NO: 2022464
uucuuuacaguucacagca

SEQ ID NO: 2022466 - RNA, 19 nt, Artificial Sequence
  Description of Artificial Sequence: Synthetic oligonucleotide
  Sense strand starting at position 2042 of SEQ ID NO: 1881156
uuuauauuacgccacagaa

SEQ ID NO: 2022467 - RNA, 19 nt, Artificial Sequence
  Description of Artificial Sequence: Synthetic oligonucleotide
  Antisense strand to SEQ ID NO: 2022466
uucuguggcguaauauaaa

SEQ ID NO: 2022468 - RNA, 19 nt, Artificial Sequence
  Description of Artificial Sequence: Synthetic oligonucleotide
  Sense strand starting at position 2072 of SEQ ID NO: 1881156
gacagugacgacuguaaca

SEQ ID NO: 2022469 - RNA, 19 nt, Artificial Sequence
  Description of Artificial Sequence: Synthetic oligonucleotide
  Antisense strand to SEQ ID NO: 2022468
uguuacagucgucacuguc

SEQ ID NO: 2022470 - RNA, 19 nt, Artificial Sequence
  Description of Artificial Sequence: Synthetic oligonucleotide
  Sense strand starting at position 2185 of SEQ ID NO: 1881156
gugggaaguccuggaagac

SEQ ID NO: 2022471 - RNA, 19 nt, Artificial Sequence
  Description of Artificial Sequence: Synthetic oligonucleotide
  Antisense strand to SEQ ID NO: 2022470
gucuuccaggacuucccac

SEQ ID NO: 2022472 - RNA, 19 nt, Artificial Sequence
  Description of Artificial Sequence: Synthetic oligonucleotide
  Sense strand starting at position 2609 of SEQ ID NO: 1881156
uuuccucaucuguacgaua

SEQ ID NO: 2022473 - RNA, 19 nt, Artificial Sequence
  Description of Artificial Sequence: Synthetic oligonucleotide
  Antisense strand to SEQ ID NO: 2022472
uaucguacagaugaggaaa

SEQ ID NO: 2022474 - RNA, 19 nt, Artificial Sequence
  Description of Artificial Sequence: Synthetic oligonucleotide
  Sense strand starting at position 2611 of SEQ ID NO: 1881156
uccucaucuguacgauaaa

SEQ ID NO: 2022475 - RNA, 19 nt, Artificial Sequence
  Description of Artificial Sequence: Synthetic oligonucleotide
  Antisense strand to SEQ ID NO: 2022474
uuuaucguacagaugagga

SEQ ID NO: 2022476 - RNA, 19 nt, Artificial Sequence
  Description of Artificial Sequence: Synthetic oligonucleotide
  Sense strand starting at position 2654 of SEQ ID NO: 1881156
gcucuuacacucuaggaau

SEQ ID NO: 2022477 - RNA, 19 nt, Artificial Sequence
  Description of Artificial Sequence: Synthetic oligonucleotide
  Antisense strand to SEQ ID NO: 2022476
auuccuagaguguaagagc

SEQ ID NO: 2022478 - RNA, 19 nt, Artificial Sequence
  Description of Artificial Sequence: Synthetic oligonucleotide
  Sense strand starting at position 3048 of SEQ ID NO: 1881156
guagcaugccuacagagaa

SEQ ID NO: 2022479 - RNA, 19 nt, Artificial Sequence
  Description of Artificial Sequence: Synthetic oligonucleotide
  Antisense strand to SEQ ID NO: 2022478
uucucuguaggcaugcuac

SEQ ID NO: 2022480 - RNA, 19 nt, Artificial Sequence
  Description of Artificial Sequence: Synthetic oligonucleotide
  Sense strand starting at position 3087 of SEQ ID NO: 1881156
aagugacauccuggaguga

SEQ ID NO: 2022481 - RNA, 19 nt, Artificial Sequence
  Description of Artificial Sequence: Synthetic oligonucleotide
  Antisense strand to SEQ ID NO: 2022480
ucacuccaggaugucacuu

SEQ ID NO: 2022482 - RNA, 19 nt, Artificial Sequence
  Description of Artificial Sequence: Synthetic oligonucleotide
  Sense strand starting at position 3412 of SEQ ID NO: 1881156
gcuagaaaugcugaccugu

SEQ ID NO: 2022483 - RNA, 19 nt, Artificial Sequence
  Description of Artificial Sequence: Synthetic oligonucleotide
  Antisense strand to SEQ ID NO: 2022482
acaggucagcauuucuagc

SEQ ID NO: 2022484 - RNA, 19 nt, Artificial Sequence
  Description of Artificial Sequence: Synthetic oligonucleotide
  Sense strand starting at position 3414 of SEQ ID NO: 1881156
uagaaaugcugaccuguuu

SEQ ID NO: 2022485 - RNA, 19 nt, Artificial Sequence
  Description of Artificial Sequence: Synthetic oligonucleotide
  Antisense strand to SEQ ID NO: 2022484
aaacaggucagcauuucua

SEQ ID NO: 2022486 - RNA, 19 nt, Artificial Sequence
  Description of Artificial Sequence: Synthetic oligonucleotide
  Sense strand starting at position 3518 of SEQ ID NO: 1881156
uuuacuagccggcaagaaa

SEQ ID NO: 2022487 - RNA, 19 nt, Artificial Sequence
  Description of Artificial Sequence: Synthetic oligonucleotide
  Antisense strand to SEQ ID NO: 2022486
uuucuugccggcuaguaaa

SEQ ID NO: 2022488 - RNA, 19 nt, Artificial Sequence
  Description of Artificial Sequence: Synthetic oligonucleotide
  Sense strand starting at position 3555 of SEQ ID NO: 1881156
uauggagacuaggagaaau

SEQ ID NO: 2022489 - RNA, 19 nt, Artificial Sequence
  Description of Artificial Sequence: Synthetic oligonucleotide
  Antisense strand to SEQ ID NO: 2022488
auuucuccuagucuccaua

SEQ ID NO: 2022490 - RNA, 19 nt, Artificial Sequence
  Description of Artificial Sequence: Synthetic oligonucleotide
  Sense strand starting at position 3739 of SEQ ID NO: 1881156
gauggagugcaggaguuua

SEQ ID NO: 2022491 - RNA, 19 nt, Artificial Sequence
  Description of Artificial Sequence: Synthetic oligonucleotide
  Antisense strand to SEQ ID NO: 2022490
uaaacuccugcacuccauc

SEQ ID NO: 2022492 - RNA, 19 nt, Artificial Sequence
  Description of Artificial Sequence: Synthetic oligonucleotide
  Sense strand starting at position 3762 of SEQ ID NO: 1881156
gggcuuuggagucauacga

SEQ ID NO: 2022493 - RNA, 19 nt, Artificial Sequence
  Description of Artificial Sequence: Synthetic oligonucleotide
  Antisense strand to SEQ ID NO: 2022492
ucguaugacuccaaagccc

SEQ ID NO: 2022494 - RNA, 19 nt, Artificial Sequence
  Description of Artificial Sequence: Synthetic oligonucleotide
  Sense strand starting at position 3766 of SEQ ID NO: 1881156
uuuggagucauacgaaagu

SEQ ID NO: 2022495 - RNA, 19 nt, Artificial Sequence
  Description of Artificial Sequence: Synthetic oligonucleotide
  Antisense strand to SEQ ID NO: 2022494
acuuucguaugacuccaaa

SEQ ID NO: 2022496 - RNA, 19 nt, Artificial Sequence
  Description of Artificial Sequence: Synthetic oligonucleotide
  Sense strand starting at position 3824 of SEQ ID NO: 1881156
gccacagcugauuagagua

SEQ ID NO: 2022497 - RNA, 19 nt, Artificial Sequence
  Description of Artificial Sequence: Synthetic oligonucleotide
  Antisense strand to SEQ ID NO: 2022496
uacucuaaucagcuguggc

SEQ ID NO: 2022498 - RNA, 19 nt, Artificial Sequence
  Description of Artificial Sequence: Synthetic oligonucleotide
  Sense strand starting at position 3847 of SEQ ID NO: 1881156
ggaguagaucccugaccuu

SEQ ID NO: 2022499 - RNA, 19 nt, Artificial Sequence
  Description of Artificial Sequence: Synthetic oligonucleotide
  Antisense strand to SEQ ID NO: 2022498
aaggucagggaucuacucc

SEQ ID NO: 2022500 - RNA, 19 nt, Artificial Sequence
  Description of Artificial Sequence: Synthetic oligonucleotide
  Sense strand starting at position 3850 of SEQ ID NO: 1881156
guagaucccugaccuuaag

SEQ ID NO: 2022501 - RNA, 19 nt, Artificial Sequence
  Description of Artificial Sequence: Synthetic oligonucleotide
  Antisense strand to SEQ ID NO: 2022500
cuuaaggucagggaucuac

SEQ ID NO: 2022502 - RNA, 19 nt, Artificial Sequence
  Description of Artificial Sequence: Synthetic oligonucleotide
  Sense strand starting at position 101 of SEQ ID NO: 1881157
ucauguugccuuugaaauc

SEQ ID NO: 2022503 - RNA, 19 nt, Artificial Sequence
  Description of Artificial Sequence: Synthetic oligonucleotide
  Antisense strand to SEQ ID NO: 2022502
gauuucaaaggcaacauga

SEQ ID NO: 2022504 - RNA, 19 nt, Artificial Sequence
  Description of Artificial Sequence: Synthetic oligonucleotide
  Sense strand starting at position 110 of SEQ ID NO: 1881157
cuuugaaaucuuugaaguc

SEQ ID NO: 2022505 - RNA, 19 nt, Artificial Sequence
  Description of Artificial Sequence: Synthetic oligonucleotide
  Antisense strand to SEQ ID NO: 2022504
gacuucaaagauuucaaag

SEQ ID NO: 2022506 - RNA, 19 nt, Artificial Sequence
  Description of Artificial Sequence: Synthetic oligonucleotide
  Sense strand starting at position 111 of SEQ ID NO: 1881157
uuugaaaucuuugaaguca

SEQ ID NO: 2022507 - RNA, 19 nt, Artificial Sequence
  Description of Artificial Sequence: Synthetic oligonucleotide
  Antisense strand to SEQ ID NO: 2022506
ugacuucaaagauuucaaa

SEQ ID NO: 2022508 - RNA, 19 nt, Artificial Sequence
  Description of Artificial Sequence: Synthetic oligonucleotide
  Sense strand starting at position 190 of SEQ ID NO: 1881157
cuggaaagggcauguuuga

SEQ ID NO: 2022509 - RNA, 19 nt, Artificial Sequence
  Description of Artificial Sequence: Synthetic oligonucleotide
  Antisense strand to SEQ ID NO: 2022508
ucaaacaugcccuuuccag

SEQ ID NO: 2022510 - RNA, 19 nt, Artificial Sequence
  Description of Artificial Sequence: Synthetic oligonucleotide
  Sense strand starting at position 197 of SEQ ID NO: 1881157
gggcauguuugauccuaaa

SEQ ID NO: 2022511 - RNA, 19 nt, Artificial Sequence
  Description of Artificial Sequence: Synthetic oligonucleotide
  Antisense strand to SEQ ID NO: 2022510
uuuaggaucaaacaugccc

SEQ ID NO: 2022512 - RNA, 19 nt, Artificial Sequence
  Description of Artificial Sequence: Synthetic oligonucleotide
  Sense strand starting at position 225 of SEQ ID NO: 1881157
guagccuaucuaggagaaa

SEQ ID NO: 2022513 - RNA, 19 nt, Artificial Sequence
  Description of Artificial Sequence: Synthetic oligonucleotide
  Antisense strand to SEQ ID NO: 2022512
uuucuccuagauaggcuac

SEQ ID NO: 2022514 - RNA, 19 nt, Artificial Sequence
  Description of Artificial Sequence: Synthetic oligonucleotide
  Sense strand starting at position 293 of SEQ ID NO: 1881157
ccacccugguuauuaguua

SEQ ID NO: 2022515 - RNA, 19 nt, Artificial Sequence
  Description of Artificial Sequence: Synthetic oligonucleotide
  Antisense strand to SEQ ID NO: 2022514
uaacuaauaaccagggugg

SEQ ID NO: 2022516 - RNA, 19 nt, Artificial Sequence
  Description of Artificial Sequence: Synthetic oligonucleotide
  Sense strand starting at position 297 of SEQ ID NO: 1881157
ccugguuauuaguuaccua

SEQ ID NO: 2022517 - RNA, 19 nt, Artificial Sequence
  Description of Artificial Sequence: Synthetic oligonucleotide
  Antisense strand to SEQ ID NO: 2022516
uagguaacuaauaaccagg

SEQ ID NO: 2022518 - RNA, 19 nt, Artificial Sequence
  Description of Artificial Sequence: Synthetic oligonucleotide
  Sense strand starting at position 333 of SEQ ID NO: 1881157
cgcauaugucccuguagga

SEQ ID NO: 2022519 - RNA, 19 nt, Artificial Sequence
  Description of Artificial Sequence: Synthetic oligonucleotide
  Antisense strand to SEQ ID NO: 2022518
uccuacagggacauaugcg

SEQ ID NO: 2022520 - RNA, 19 nt, Artificial Sequence
  Description of Artificial Sequence: Synthetic oligonucleotide
  Sense strand starting at position 439 of SEQ ID NO: 1881157
auguuaaagcagggcuauu

SEQ ID NO: 2022521 - RNA, 19 nt, Artificial Sequence
  Description of Artificial Sequence: Synthetic oligonucleotide
  Antisense strand to SEQ ID NO: 2022520
aauagcccugcuuuaacau

SEQ ID NO: 2022522 - RNA, 19 nt, Artificial Sequence
  Description of Artificial Sequence: Synthetic oligonucleotide
  Sense strand starting at position 476 of SEQ ID NO: 1881157
cuagcaggccagugacaau

SEQ ID NO: 2022523 - RNA, 19 nt, Artificial Sequence
  Description of Artificial Sequence: Synthetic oligonucleotide
  Antisense strand to SEQ ID NO: 2022522
auugucacuggccugcuag

SEQ ID NO: 2022524 - RNA, 19 nt, Artificial Sequence
  Description of Artificial Sequence: Synthetic oligonucleotide
  Sense strand starting at position 573 of SEQ ID NO: 1881157
agacuaagcuaggaaagau

SEQ ID NO: 2022525 - RNA, 19 nt, Artificial Sequence
  Description of Artificial Sequence: Synthetic oligonucleotide
  Antisense strand to SEQ ID NO: 2022524
aucuuuccuagcuuagucu

SEQ ID NO: 2022526 - RNA, 19 nt, Artificial Sequence
  Description of Artificial Sequence: Synthetic oligonucleotide
  Sense strand starting at position 582 of SEQ ID NO: 1881157
uaggaaagaugaugucaua

SEQ ID NO: 2022527 - RNA, 19 nt, Artificial Sequence
  Description of Artificial Sequence: Synthetic oligonucleotide
  Antisense strand to SEQ ID NO: 2022526
uaugacaucaucuuuccua

SEQ ID NO: 2022528 - RNA, 19 nt, Artificial Sequence
  Description of Artificial Sequence: Synthetic oligonucleotide
  Sense strand starting at position 585 of SEQ ID NO: 1881157
gaaagaugaugucauacag

SEQ ID NO: 2022529 - RNA, 19 nt, Artificial Sequence
  Description of Artificial Sequence: Synthetic oligonucleotide
  Antisense strand to SEQ ID NO: 2022528
cuguaugacaucaucuuuc

SEQ ID NO: 2022530 - RNA, 19 nt, Artificial Sequence
  Description of Artificial Sequence: Synthetic oligonucleotide
  Sense strand starting at position 628 of SEQ ID NO: 1881157
gcgugaugagugcagcuca

SEQ ID NO: 2022531 - RNA, 19 nt, Artificial Sequence
  Description of Artificial Sequence: Synthetic oligonucleotide
  Antisense strand to SEQ ID NO: 2022530
ugagcugcacucaucacgc

SEQ ID NO: 2022532 - RNA, 19 nt, Artificial Sequence
  Description of Artificial Sequence: Synthetic oligonucleotide
  Sense strand starting at position 797 of SEQ ID NO: 1881157
cuggcuccucaacguaaga

SEQ ID NO: 2022533 - RNA, 19 nt, Artificial Sequence
  Description of Artificial Sequence: Synthetic oligonucleotide
  Antisense strand to SEQ ID NO: 2022532
ucuuacguugaggagccag

SEQ ID NO: 2022534 - RNA, 19 nt, Artificial Sequence
  Description of Artificial Sequence: Synthetic oligonucleotide
  Sense strand starting at position 799 of SEQ ID NO: 1881157
ggcuccucaacguaagaca

SEQ ID NO: 2022535 - RNA, 19 nt, Artificial Sequence
  Description of Artificial Sequence: Synthetic oligonucleotide
  Antisense strand to SEQ ID NO: 2022534
ugucuuacguugaggagcc

SEQ ID NO: 2022536 - RNA, 19 nt, Artificial Sequence
  Description of Artificial Sequence: Synthetic oligonucleotide
  Sense strand starting at position 841 of SEQ ID NO: 1881157
cuccaagaauggcuacauu

SEQ ID NO: 2022537 - RNA, 19 nt, Artificial Sequence
  Description of Artificial Sequence: Synthetic oligonucleotide
  Antisense strand to SEQ ID NO: 2022536
aauguagccauucuuggag

SEQ ID NO: 2022538 - RNA, 19 nt, Artificial Sequence
  Description of Artificial Sequence: Synthetic oligonucleotide
  Sense strand starting at position 877 of SEQ ID NO: 1881157
uguucuaagugccuaacau

SEQ ID NO: 2022539 - RNA, 19 nt, Artificial Sequence
  Description of Artificial Sequence: Synthetic oligonucleotide
  Antisense strand to SEQ ID NO: 2022538
auguuaggcacuuagaaca

SEQ ID NO: 2022540 - RNA, 19 nt, Artificial Sequence
  Description of Artificial Sequence: Synthetic oligonucleotide
  Sense strand starting at position 878 of SEQ ID NO: 1881157
guucuaagugccuaacaua

SEQ ID NO: 2022541 - RNA, 19 nt, Artificial Sequence
  Description of Artificial Sequence: Synthetic oligonucleotide
  Antisense strand to SEQ ID NO: 2022540
uauguuaggcacuuagaac

SEQ ID NO: 2022542 - RNA, 19 nt, Artificial Sequence
  Description of Artificial Sequence: Synthetic oligonucleotide
  Sense strand starting at position 906 of SEQ ID NO: 1881157
cccuaauagguugguauca

SEQ ID NO: 2022543 - RNA, 19 nt, Artificial Sequence
  Description of Artificial Sequence: Synthetic oligonucleotide
  Antisense strand to SEQ ID NO: 2022542
ugauaccaaccuauuaggg

SEQ ID NO: 2022544 - RNA, 19 nt, Artificial Sequence
  Description of Artificial Sequence: Synthetic oligonucleotide
  Sense strand starting at position 907 of SEQ ID NO: 1881157
ccuaauagguugguaucau

SEQ ID NO: 2022545 - RNA, 19 nt, Artificial Sequence
  Description of Artificial Sequence: Synthetic oligonucleotide
  Antisense strand to SEQ ID NO: 2022544
augauaccaaccuauuagg

SEQ ID NO: 2022546 - RNA, 19 nt, Artificial Sequence
  Description of Artificial Sequence: Synthetic oligonucleotide
  Sense strand starting at position 916 of SEQ ID NO: 1881157
uugguaucaucuccacuua

SEQ ID NO: 2022547 - RNA, 19 nt, Artificial Sequence
  Description of Artificial Sequence: Synthetic oligonucleotide
  Antisense strand to SEQ ID NO: 2022546
uaaguggagaugauaccaa

SEQ ID NO: 2022548 - RNA, 19 nt, Artificial Sequence
  Description of Artificial Sequence: Synthetic oligonucleotide
  Sense strand starting at position 943 of SEQ ID NO: 1881157
gcugcugggaucugagaga

SEQ ID NO: 2022549 - RNA, 19 nt, Artificial Sequence
  Description of Artificial Sequence: Synthetic oligonucleotide
  Antisense strand to SEQ ID NO: 2022548
ucucucagaucccagcagc

SEQ ID NO: 2022550 - RNA, 19 nt, Artificial Sequence
  Description of Artificial Sequence: Synthetic oligonucleotide
  Sense strand starting at position 956 of SEQ ID NO: 1881157
gagagaguuaagugacuug

SEQ ID NO: 2022551 - RNA, 19 nt, Artificial Sequence
  Description of Artificial Sequence: Synthetic oligonucleotide
  Antisense strand to SEQ ID NO: 2022550
caagucacuuaacucucuc

SEQ ID NO: 2022552 - RNA, 19 nt, Artificial Sequence
  Description of Artificial Sequence: Synthetic oligonucleotide
  Sense strand starting at position 961 of SEQ ID NO: 1881157
aguuaagugacuuguuaag

SEQ ID NO: 2022553 - RNA, 19 nt, Artificial Sequence
  Description of Artificial Sequence: Synthetic oligonucleotide
  Antisense strand to SEQ ID NO: 2022552
cuuaacaagucacuuaacu

SEQ ID NO: 2022554 - RNA, 19 nt, Artificial Sequence
  Description of Artificial Sequence: Synthetic oligonucleotide
  Sense strand starting at position 1274 of SEQ ID NO: 1881157
cuaggaggcuucuucuauc

SEQ ID NO: 2022555 - RNA, 19 nt, Artificial Sequence
  Description of Artificial Sequence: Synthetic oligonucleotide
  Antisense strand to SEQ ID NO: 2022554
gauagaagaagccuccuag

SEQ ID NO: 2022556 - RNA, 19 nt, Artificial Sequence
  Description of Artificial Sequence: Synthetic oligonucleotide
  Sense strand starting at position 1313 of SEQ ID NO: 1881157
aguccugugccacaggauu

SEQ ID NO: 2022557 - RNA, 19 nt, Artificial Sequence
  Description of Artificial Sequence: Synthetic oligonucleotide
  Antisense strand to SEQ ID NO: 2022556
aauccuguggcacaggacu

SEQ ID NO: 2022558 - RNA, 19 nt, Artificial Sequence
  Description of Artificial Sequence: Synthetic oligonucleotide
  Sense strand starting at position 1380 of SEQ ID NO: 1881157
cccugugacuucucuaugu

SEQ ID NO: 2022559 - RNA, 19 nt, Artificial Sequence
  Description of Artificial Sequence: Synthetic oligonucleotide
  Antisense strand to SEQ ID NO: 2022558
acauagagaagucacaggg

SEQ ID NO: 2022560 - RNA, 19 nt, Artificial Sequence
  Description of Artificial Sequence: Synthetic oligonucleotide
  Sense strand starting at position 1384 of SEQ ID NO: 1881157
gugacuucucuaugugcca

SEQ ID NO: 2022561 - RNA, 19 nt, Artificial Sequence
  Description of Artificial Sequence: Synthetic oligonucleotide
  Antisense strand to SEQ ID NO: 2022560
uggcacauagagaagucac

SEQ ID NO: 2022562 - RNA, 19 nt, Artificial Sequence
  Description of Artificial Sequence: Synthetic oligonucleotide
  Sense strand starting at position 1939 of SEQ ID NO: 1881157
aggccuugugcuuugugua

SEQ ID NO: 2022563 - RNA, 19 nt, Artificial Sequence
  Description of Artificial Sequence: Synthetic oligonucleotide
  Antisense strand to SEQ ID NO: 2022562
uacacaaagcacaaggccu

SEQ ID NO: 2022564 - RNA, 19 nt, Artificial Sequence
  Description of Artificial Sequence: Synthetic oligonucleotide
  Sense strand starting at position 1974 of SEQ ID NO: 1881157
aagcuaguucccugacuug

SEQ ID NO: 2022565 - RNA, 19 nt, Artificial Sequence
  Description of Artificial Sequence: Synthetic oligonucleotide
  Antisense strand to SEQ ID NO: 2022564
caagucagggaacuagcuu

SEQ ID NO: 2022566 - RNA, 19 nt, Artificial Sequence
  Description of Artificial Sequence: Synthetic oligonucleotide
  Sense strand starting at position 2091 of SEQ ID NO: 1881157
gcugcuuucgguuacccua

SEQ ID NO: 2022567 - RNA, 19 nt, Artificial Sequence
  Description of Artificial Sequence: Synthetic oligonucleotide
  Antisense strand to SEQ ID NO: 2022566
uaggguaaccgaaagcagc

SEQ ID NO: 2022568 - RNA, 19 nt, Artificial Sequence
  Description of Artificial Sequence: Synthetic oligonucleotide
  Sense strand starting at position 3370 of SEQ ID NO: 1881157
ccaaauaaugcugaugcaa

SEQ ID NO: 2022569 - RNA, 19 nt, Artificial Sequence
  Description of Artificial Sequence: Synthetic oligonucleotide
  Antisense strand to SEQ ID NO: 2022568
uugcaucagcauuauuugg

SEQ ID NO: 2022570 - RNA, 19 nt, Artificial Sequence
  Description of Artificial Sequence: Synthetic oligonucleotide
  Sense strand starting at position 3420 of SEQ ID NO: 1881157
ggugaaaggguaugaauac

SEQ ID NO: 2022571 - RNA, 19 nt, Artificial Sequence
  Description of Artificial Sequence: Synthetic oligonucleotide
  Antisense strand to SEQ ID NO: 2022570
guauucauacccuuucacc

SEQ ID NO: 2022572 - RNA, 19 nt, Artificial Sequence
  Description of Artificial Sequence: Synthetic oligonucleotide
  Sense strand starting at position 3421 of SEQ ID NO: 1881157
gugaaaggguaugaauaca

SEQ ID NO: 2022573 - RNA, 19 nt, Artificial Sequence
  Description of Artificial Sequence: Synthetic oligonucleotide
  Antisense strand to SEQ ID NO: 2022572
uguauucauacccuuucac

SEQ ID NO: 2022574 - RNA, 19 nt, Artificial Sequence
  Description of Artificial Sequence: Synthetic oligonucleotide
  Sense strand starting at position 3432 of SEQ ID NO: 1881157
ugaauacaucuuugaggca

SEQ ID NO: 2022575 - RNA, 19 nt, Artificial Sequence
  Description of Artificial Sequence: Synthetic oligonucleotide
  Antisense strand to SEQ ID NO: 2022574
ugccucaaagauguauuca

SEQ ID NO: 2022576 - RNA, 19 nt, Artificial Sequence
  Description of Artificial Sequence: Synthetic oligonucleotide
  Sense strand starting at position 3461 of SEQ ID NO: 1881157
gagguuuagaagcagaugu

SEQ ID NO: 2022577 - RNA, 19 nt, Artificial Sequence
  Description of Artificial Sequence: Synthetic oligonucleotide
  Antisense strand to SEQ ID NO: 2022576
acaucugcuucuaaaccuc

SEQ ID NO: 2022578 - RNA, 19 nt, Artificial Sequence
  Description of Artificial Sequence: Synthetic oligonucleotide
  Sense strand starting at position 3576 of SEQ ID NO: 1881157
cugguucugcuggaguauu

SEQ ID NO: 2022579 - RNA, 19 nt, Artificial Sequence
  Description of Artificial Sequence: Synthetic oligonucleotide
  Antisense strand to SEQ ID NO: 2022578
aauacuccagcagaaccag

SEQ ID NO: 2022580 - RNA, 19 nt, Artificial Sequence
  Description of Artificial Sequence: Synthetic oligonucleotide
  Sense strand starting at position 3605 of SEQ ID NO: 1881157
gccugaucugcuggagaaa

SEQ ID NO: 2022581 - RNA, 19 nt, Artificial Sequence
  Description of Artificial Sequence: Synthetic oligonucleotide
  Antisense strand to SEQ ID NO: 2022580
uuucuccagcagaucaggc

SEQ ID NO: 2022582 - RNA, 19 nt, Artificial Sequence
  Description of Artificial Sequence: Synthetic oligonucleotide
  Sense strand starting at position 429 of SEQ ID NO: 1881158
ggaggaguuuggcugagga

SEQ ID NO: 2022583 - RNA, 19 nt, Artificial Sequence
  Description of Artificial Sequence: Synthetic oligonucleotide
  Antisense strand to SEQ ID NO: 2022582
uccucagccaaacuccucc

SEQ ID NO: 2022584 - RNA, 19 nt, Artificial Sequence
  Description of Artificial Sequence: Synthetic oligonucleotide
  Sense strand starting at position 483 of SEQ ID NO: 1881158
agggcaagaucauauuucu

SEQ ID NO: 2022585 - RNA, 19 nt, Artificial Sequence
  Description of Artificial Sequence: Synthetic oligonucleotide
  Antisense strand to SEQ ID NO: 2022584
agaaauaugaucuugcccu

SEQ ID NO: 2022586 - RNA, 19 nt, Artificial Sequence
  Description of Artificial Sequence: Synthetic oligonucleotide
  Sense strand starting at position 752 of SEQ ID NO: 1881158
acacuugggcuuugaaagu

SEQ ID NO: 2022587 - RNA, 19 nt, Artificial Sequence
  Description of Artificial Sequence: Synthetic oligonucleotide
  Antisense strand to SEQ ID NO: 2022586
acuuucaaagcccaagugu

SEQ ID NO: 2022588 - RNA, 19 nt, Artificial Sequence
  Description of Artificial Sequence: Synthetic oligonucleotide
  Sense strand starting at position 759 of SEQ ID NO: 1881158
ggcuuugaaaguuacagac

SEQ ID NO: 2022589 - RNA, 19 nt, Artificial Sequence
  Description of Artificial Sequence: Synthetic oligonucleotide
  Antisense strand to SEQ ID NO: 2022588
gucuguaacuuucaaagcc

SEQ ID NO: 2022590 - RNA, 19 nt, Artificial Sequence
  Description of Artificial Sequence: Synthetic oligonucleotide
  Sense strand starting at position 863 of SEQ ID NO: 1881158
ucuuaaagaguuugagcuu

SEQ ID NO: 2022591 - RNA, 19 nt, Artificial Sequence
  Description of Artificial Sequence: Synthetic oligonucleotide
  Antisense strand to SEQ ID NO: 2022590
aagcucaaacucuuuaaga

SEQ ID NO: 2022592 - RNA, 19 nt, Artificial Sequence
  Description of Artificial Sequence: Synthetic oligonucleotide
  Sense strand starting at position 866 of SEQ ID NO: 1881158
uaaagaguuugagcuugca

SEQ ID NO: 2022593 - RNA, 19 nt, Artificial Sequence
  Description of Artificial Sequence: Synthetic oligonucleotide
  Antisense strand to SEQ ID NO: 2022592
ugcaagcucaaacucuuua

SEQ ID NO: 2022594 - RNA, 19 nt, Artificial Sequence
  Description of Artificial Sequence: Synthetic oligonucleotide
  Sense strand starting at position 1014 of SEQ ID NO: 1881158
uggucacucguaugacaug

SEQ ID NO: 2022595 - RNA, 19 nt, Artificial Sequence
  Description of Artificial Sequence: Synthetic oligonucleotide
  Antisense strand to SEQ ID NO: 2022594
caugucauacgagugacca

SEQ ID NO: 2022596 - RNA, 19 nt, Artificial Sequence
  Description of Artificial Sequence: Synthetic oligonucleotide
  Sense strand starting at position 1021 of SEQ ID NO: 1881158
ucguaugacauguagggau

SEQ ID NO: 2022597 - RNA, 19 nt, Artificial Sequence
  Description of Artificial Sequence: Synthetic oligonucleotide
  Antisense strand to SEQ ID NO: 2022596
aucccuacaugucauacga

SEQ ID NO: 2022598 - RNA, 19 nt, Artificial Sequence
  Description of Artificial Sequence: Synthetic oligonucleotide
  Sense strand starting at position 1104 of SEQ ID NO: 1881158
gggagaucauucuagguug

SEQ ID NO: 2022599 - RNA, 19 nt, Artificial Sequence
  Description of Artificial Sequence: Synthetic oligonucleotide
  Antisense strand to SEQ ID NO: 2022598
caaccuagaaugaucuccc

SEQ ID NO: 2022600 - RNA, 19 nt, Artificial Sequence
  Description of Artificial Sequence: Synthetic oligonucleotide
  Sense strand starting at position 1106 of SEQ ID NO: 1881158
gagaucauucuagguugaa

SEQ ID NO: 2022601 - RNA, 19 nt, Artificial Sequence
  Description of Artificial Sequence: Synthetic oligonucleotide
  Antisense strand to SEQ ID NO: 2022600
uucaaccuagaaugaucuc

SEQ ID NO: 2022602 - RNA, 19 nt, Artificial Sequence
  Description of Artificial Sequence: Synthetic oligonucleotide
  Sense strand starting at position 1107 of SEQ ID NO: 1881158
agaucauucuagguugaag

SEQ ID NO: 2022603 - RNA, 19 nt, Artificial Sequence
  Description of Artificial Sequence: Synthetic oligonucleotide
  Antisense strand to SEQ ID NO: 2022602
cuucaaccuagaaugaucu

SEQ ID NO: 2022604 - RNA, 19 nt, Artificial Sequence
  Description of Artificial Sequence: Synthetic oligonucleotide
  Sense strand starting at position 1109 of SEQ ID NO: 1881158
aucauucuagguugaagaa

SEQ ID NO: 2022605 - RNA, 19 nt, Artificial Sequence
  Description of Artificial Sequence: Synthetic oligonucleotide
  Antisense strand to SEQ ID NO: 2022604
uucuucaaccuagaaugau

SEQ ID NO: 2022606 - RNA, 19 nt, Artificial Sequence
  Description of Artificial Sequence: Synthetic oligonucleotide
  Sense strand starting at position 1148 of SEQ ID NO: 1881158
agccuuuguauuuguggga

SEQ ID NO: 2022607 - RNA, 19 nt, Artificial Sequence
  Description of Artificial Sequence: Synthetic oligonucleotide
  Antisense strand to SEQ ID NO: 2022606
ucccacaaauacaaaggcu

SEQ ID NO: 2022608 - RNA, 19 nt, Artificial Sequence
  Description of Artificial Sequence: Synthetic oligonucleotide
  Sense strand starting at position 1149 of SEQ ID NO: 1881158
gccuuuguauuugugggau

SEQ ID NO: 2022609 - RNA, 19 nt, Artificial Sequence
  Description of Artificial Sequence: Synthetic oligonucleotide
  Antisense strand to SEQ ID NO: 2022608
aucccacaaauacaaaggc

SEQ ID NO: 2022610 - RNA, 19 nt, Artificial Sequence
  Description of Artificial Sequence: Synthetic oligonucleotide
  Sense strand starting at position 1152 of SEQ ID NO: 1881158
uuuguauuugugggauugu

SEQ ID NO: 2022611 - RNA, 19 nt, Artificial Sequence
  Description of Artificial Sequence: Synthetic oligonucleotide
  Antisense strand to SEQ ID NO: 2022610
acaaucccacaaauacaaa

SEQ ID NO: 2022612 - RNA, 19 nt, Artificial Sequence
  Description of Artificial Sequence: Synthetic oligonucleotide
  Sense strand starting at position 1183 of SEQ ID NO: 1881158
gcaagaaagccaggguaau

SEQ ID NO: 2022613 - RNA, 19 nt, Artificial Sequence
  Description of Artificial Sequence: Synthetic oligonucleotide
  Antisense strand to SEQ ID NO: 2022612
auuacccuggcuuucuugc

SEQ ID NO: 2022614 - RNA, 19 nt, Artificial Sequence
  Description of Artificial Sequence: Synthetic oligonucleotide
  Sense strand starting at position 1419 of SEQ ID NO: 1881158
ugauuuauauugugcaaag

SEQ ID NO: 2022615 - RNA, 19 nt, Artificial Sequence
  Description of Artificial Sequence: Synthetic oligonucleotide
  Antisense strand to SEQ ID NO: 2022614
cuuugcacaauauaaauca

SEQ ID NO: 2022616 - RNA, 19 nt, Artificial Sequence
  Description of Artificial Sequence: Synthetic oligonucleotide
  Sense strand starting at position 1433 of SEQ ID NO: 1881158
caaagauggcucugacugu

SEQ ID NO: 2022617 - RNA, 19 nt, Artificial Sequence
  Description of Artificial Sequence: Synthetic oligonucleotide
  Antisense strand to SEQ ID NO: 2022616
acagucagagccaucuuug

SEQ ID NO: 2022618 - RNA, 19 nt, Artificial Sequence
  Description of Artificial Sequence: Synthetic oligonucleotide
  Sense strand starting at position 1507 of SEQ ID NO: 1881158
ugcagacucccuggaagau

SEQ ID NO: 2022619 - RNA, 19 nt, Artificial Sequence
  Description of Artificial Sequence: Synthetic oligonucleotide
  Antisense strand to SEQ ID NO: 2022618
aucuuccagggagucugca

SEQ ID NO: 2022620 - RNA, 19 nt, Artificial Sequence
  Description of Artificial Sequence: Synthetic oligonucleotide
  Sense strand starting at position 1517 of SEQ ID NO: 1881158
cuggaagauuggucaggca

SEQ ID NO: 2022621 - RNA, 19 nt, Artificial Sequence
  Description of Artificial Sequence: Synthetic oligonucleotide
  Antisense strand to SEQ ID NO: 2022620
ugccugaccaaucuuccag

SEQ ID NO: 2022622 - RNA, 19 nt, Artificial Sequence
  Description of Artificial Sequence: Synthetic oligonucleotide
  Sense strand starting at position 1525 of SEQ ID NO: 1881158
uuggucaggcauuggauau

SEQ ID NO: 2022623 - RNA, 19 nt, Artificial Sequence
  Description of Artificial Sequence: Synthetic oligonucleotide
  Antisense strand to SEQ ID NO: 2022622
auauccaaugccugaccaa

SEQ ID NO: 2022624 - RNA, 19 nt, Artificial Sequence
  Description of Artificial Sequence: Synthetic oligonucleotide
  Sense strand starting at position 1526 of SEQ ID NO: 1881158
uggucaggcauuggauauu

SEQ ID NO: 2022625 - RNA, 19 nt, Artificial Sequence
  Description of Artificial Sequence: Synthetic oligonucleotide
  Antisense strand to SEQ ID NO: 2022624
aauauccaaugccugacca

SEQ ID NO: 2022626 - RNA, 19 nt, Artificial Sequence
  Description of Artificial Sequence: Synthetic oligonucleotide
  Sense strand starting at position 1617 of SEQ ID NO: 1881158
aguauagcuuauguugaaa

SEQ ID NO: 2022627 - RNA, 19 nt, Artificial Sequence
  Description of Artificial Sequence: Synthetic oligonucleotide
  Antisense strand to SEQ ID NO: 2022626
uuucaacauaagcuauacu

SEQ ID NO: 2022628 - RNA, 19 nt, Artificial Sequence
  Description of Artificial Sequence: Synthetic oligonucleotide
  Sense strand starting at position 1620 of SEQ ID NO: 1881158
auagcuuauguugaaauga

SEQ ID NO: 2022629 - RNA, 19 nt, Artificial Sequence
  Description of Artificial Sequence: Synthetic oligonucleotide
  Antisense strand to SEQ ID NO: 2022628
ucauuucaacauaagcuau

SEQ ID NO: 2022630 - RNA, 19 nt, Artificial Sequence
  Description of Artificial Sequence: Synthetic oligonucleotide
  Sense strand starting at position 1675 of SEQ ID NO: 1881158
gggagauuacgucaguguc

SEQ ID NO: 2022631 - RNA, 19 nt, Artificial Sequence
  Description of Artificial Sequence: Synthetic oligonucleotide
  Antisense strand to SEQ ID NO: 2022630
gacacugacguaaucuccc

SEQ ID NO: 2022632 - RNA, 19 nt, Artificial Sequence
  Description of Artificial Sequence: Synthetic oligonucleotide
  Sense strand starting at position 1677 of SEQ ID NO: 1881158
gagauuacgucaguguccu

SEQ ID NO: 2022633 - RNA, 19 nt, Artificial Sequence
  Description of Artificial Sequence: Synthetic oligonucleotide
  Antisense strand to SEQ ID NO: 2022632
aggacacugacguaaucuc

SEQ ID NO: 2022634 - RNA, 19 nt, Artificial Sequence
  Description of Artificial Sequence: Synthetic oligonucleotide
  Sense strand starting at position 1678 of SEQ ID NO: 1881158
agauuacgucaguguccuu

SEQ ID NO: 2022635 - RNA, 19 nt, Artificial Sequence
  Description of Artificial Sequence: Synthetic oligonucleotide
  Antisense strand to SEQ ID NO: 2022634
aaggacacugacguaaucu

SEQ ID NO: 2022636 - RNA, 19 nt, Artificial Sequence
  Description of Artificial Sequence: Synthetic oligonucleotide
  Sense strand starting at position 1693 of SEQ ID NO: 1881158
ccuuguccugcugagauca

SEQ ID NO: 2022637 - RNA, 19 nt, Artificial Sequence
  Description of Artificial Sequence: Synthetic oligonucleotide
  Antisense strand to SEQ ID NO: 2022636
ugaucucagcaggacaagg

SEQ ID NO: 2022638 - RNA, 19 nt, Artificial Sequence
  Description of Artificial Sequence: Synthetic oligonucleotide
  Sense strand starting at position 1698 of SEQ ID NO: 1881158
uccugcugagaucaaguua

SEQ ID NO: 2022639 - RNA, 19 nt, Artificial Sequence
  Description of Artificial Sequence: Synthetic oligonucleotide
  Antisense strand to SEQ ID NO: 2022638
uaacuugaucucagcagga

SEQ ID NO: 2022640 - RNA, 19 nt, Artificial Sequence
  Description of Artificial Sequence: Synthetic oligonucleotide
  Sense strand starting at position 1811 of SEQ ID NO: 1881158
acuugcaggcucuaaaguu

SEQ ID NO: 2022641 - RNA, 19 nt, Artificial Sequence
  Description of Artificial Sequence: Synthetic oligonucleotide
  Antisense strand to SEQ ID NO: 2022640
aacuuuagagccugcaagu

SEQ ID NO: 2022642 - RNA, 19 nt, Artificial Sequence
  Description of Artificial Sequence: Synthetic oligonucleotide
  Sense strand starting at position 2002 of SEQ ID NO: 1881158
uguguuucuucucugguga

SEQ ID NO: 2022643 - RNA, 19 nt, Artificial Sequence
  Description of Artificial Sequence: Synthetic oligonucleotide
  Antisense strand to SEQ ID NO: 2022642
ucaccagagaagaaacaca

SEQ ID NO: 2022644 - RNA, 19 nt, Artificial Sequence
  Description of Artificial Sequence: Synthetic oligonucleotide
  Sense strand starting at position 2007 of SEQ ID NO: 1881158
uucuucucuggugagaauu

SEQ ID NO: 2022645 - RNA, 19 nt, Artificial Sequence
  Description of Artificial Sequence: Synthetic oligonucleotide
  Antisense strand to SEQ ID NO: 2022644
aauucucaccagagaagaa

SEQ ID NO: 2022646 - RNA, 19 nt, Artificial Sequence
  Description of Artificial Sequence: Synthetic oligonucleotide
  Sense strand starting at position 2088 of SEQ ID NO: 1881158
ccacuuacucacugugaca

SEQ ID NO: 2022647 - RNA, 19 nt, Artificial Sequence
  Description of Artificial Sequence: Synthetic oligonucleotide
  Antisense strand to SEQ ID NO: 2022646
ugucacagugaguaagugg

SEQ ID NO: 2022648 - RNA, 19 nt, Artificial Sequence
  Description of Artificial Sequence: Synthetic oligonucleotide
  Sense strand starting at position 2201 of SEQ ID NO: 1881158
gcuugagugcaaugucaca

SEQ ID NO: 2022649 - RNA, 19 nt, Artificial Sequence
  Description of Artificial Sequence: Synthetic oligonucleotide
  Antisense strand to SEQ ID NO: 2022648
ugugacauugcacucaagc

SEQ ID NO: 2022650 - RNA, 19 nt, Artificial Sequence
  Description of Artificial Sequence: Synthetic oligonucleotide
  Sense strand starting at position 3083 of SEQ ID NO: 1881158
gucauuuauucagggagug

SEQ ID NO: 2022651 - RNA, 19 nt, Artificial Sequence
  Description of Artificial Sequence: Synthetic oligonucleotide
  Antisense strand to SEQ ID NO: 2022650
cacucccugaauaaaugac

SEQ ID NO: 2022652 - RNA, 19 nt, Artificial Sequence
  Description of Artificial Sequence: Synthetic oligonucleotide
  Sense strand starting at position 3177 of SEQ ID NO: 1881158
ucaugauggcugcagcaau

SEQ ID NO: 2022653 - RNA, 19 nt, Artificial Sequence
  Description of Artificial Sequence: Synthetic oligonucleotide
  Antisense strand to SEQ ID NO: 2022652
auugcugcagccaucauga

SEQ ID NO: 2022654 - RNA, 19 nt, Artificial Sequence
  Description of Artificial Sequence: Synthetic oligonucleotide
  Sense strand starting at position 3326 of SEQ ID NO: 1881158
aguaguggcuggguugaaa

SEQ ID NO: 2022655 - RNA, 19 nt, Artificial Sequence
  Description of Artificial Sequence: Synthetic oligonucleotide
  Antisense strand to SEQ ID NO: 2022654
uuucaacccagccacuacu

SEQ ID NO: 2022656 - RNA, 19 nt, Artificial Sequence
  Description of Artificial Sequence: Synthetic oligonucleotide
  Sense strand starting at position 3329 of SEQ ID NO: 1881158
aguggcuggguugaaauaa

SEQ ID NO: 2022657 - RNA, 19 nt, Artificial Sequence
  Description of Artificial Sequence: Synthetic oligonucleotide
  Antisense strand to SEQ ID NO: 2022656
uuauuucaacccagccacu

SEQ ID NO: 2022658 - RNA, 19 nt, Artificial Sequence
  Description of Artificial Sequence: Synthetic oligonucleotide
  Sense strand starting at position 3370 of SEQ ID NO: 1881158
guccuaagcuuauccugaa

SEQ ID NO: 2022659 - RNA, 19 nt, Artificial Sequence
  Description of Artificial Sequence: Synthetic oligonucleotide
  Antisense strand to SEQ ID NO: 2022658
uucaggauaagcuuaggac

SEQ ID NO: 2022660 - RNA, 19 nt, Artificial Sequence
  Description of Artificial Sequence: Synthetic oligonucleotide
  Sense strand starting at position 3824 of SEQ ID NO: 1881158
caugccuggccuggagaua

SEQ ID NO: 2022661 - RNA, 19 nt, Artificial Sequence
  Description of Artificial Sequence: Synthetic oligonucleotide
  Antisense strand to SEQ ID NO: 2022660
uaucuccaggccaggcaug

SEQ ID NO: 2022662 - RNA, 19 nt, Artificial Sequence
  Description of Artificial Sequence: Synthetic oligonucleotide
  Sense strand starting at position 56 of SEQ ID NO: 1881159
caguuagcgggcucuguua

SEQ ID NO: 2022663 - RNA, 19 nt, Artificial Sequence
  Description of Artificial Sequence: Synthetic oligonucleotide
  Antisense strand to SEQ ID NO: 2022662
uaacagagcccgcuaacug

SEQ ID NO: 2022664 - RNA, 19 nt, Artificial Sequence
  Description of Artificial Sequence: Synthetic oligonucleotide
  Sense strand starting at position 339 of SEQ ID NO: 1881159
cuccaaagucugggaauaa

SEQ ID NO: 2022665 - RNA, 19 nt, Artificial Sequence
  Description of Artificial Sequence: Synthetic oligonucleotide
  Antisense strand to SEQ ID NO: 2022664
uuauucccagacuuuggag

SEQ ID NO: 2022666 - RNA, 19 nt, Artificial Sequence
  Description of Artificial Sequence: Synthetic oligonucleotide
  Sense strand starting at position 438 of SEQ ID NO: 1881159
cugccugguggauauaaau

SEQ ID NO: 2022667 - RNA, 19 nt, Artificial Sequence
  Description of Artificial Sequence: Synthetic oligonucleotide
  Antisense strand to SEQ ID NO: 2022666
auuuauauccaccaggcag

SEQ ID NO: 2022668 - RNA, 19 nt, Artificial Sequence
  Description of Artificial Sequence: Synthetic oligonucleotide
  Sense strand starting at position 447 of SEQ ID NO: 1881159
ggauauaaauugucacacu

SEQ ID NO: 2022669 - RNA, 19 nt, Artificial Sequence
  Description of Artificial Sequence: Synthetic oligonucleotide
  Antisense strand to SEQ ID NO: 2022668
agugugacaauuuauaucc

SEQ ID NO: 2022670 - RNA, 19 nt, Artificial Sequence
  Description of Artificial Sequence: Synthetic oligonucleotide
  Sense strand starting at position 468 of SEQ ID NO: 1881159
aguaucuccagcgaguaaa

SEQ ID NO: 2022671 - RNA, 19 nt, Artificial Sequence
  Description of Artificial Sequence: Synthetic oligonucleotide
  Antisense strand to SEQ ID NO: 2022670
uuuacucgcuggagauacu

SEQ ID NO: 2022672 - RNA, 19 nt, Artificial Sequence
  Description of Artificial Sequence: Synthetic oligonucleotide
  Sense strand starting at position 597 of SEQ ID NO: 1881159
uaggauuucuuagaacgga

SEQ ID NO: 2022673 - RNA, 19 nt, Artificial Sequence
  Description of Artificial Sequence: Synthetic oligonucleotide
  Antisense strand to SEQ ID NO: 2022672
uccguucuaagaaauccua

SEQ ID NO: 2022674 - RNA, 19 nt, Artificial Sequence
  Description of Artificial Sequence: Synthetic oligonucleotide
  Sense strand starting at position 627 of SEQ ID NO: 1881159
ggaggugauuaaccuuauu

SEQ ID NO: 2022675 - RNA, 19 nt, Artificial Sequence
  Description of Artificial Sequence: Synthetic oligonucleotide
  Antisense strand to SEQ ID NO: 2022674
aauaagguuaaucaccucc

SEQ ID NO: 2022676 - RNA, 19 nt, Artificial Sequence
  Description of Artificial Sequence: Synthetic oligonucleotide
  Sense strand starting at position 648 of SEQ ID NO: 1881159
uaagcauugccucaaagug

SEQ ID NO: 2022677 - RNA, 19 nt, Artificial Sequence
  Description of Artificial Sequence: Synthetic oligonucleotide
  Antisense strand to SEQ ID NO: 2022676
cacuuugaggcaaugcuua

SEQ ID NO: 2022678 - RNA, 19 nt, Artificial Sequence
  Description of Artificial Sequence: Synthetic oligonucleotide
  Sense strand starting at position 833 of SEQ ID NO: 1881159
gagaaauuggacugccuga

SEQ ID NO: 2022679 - RNA, 19 nt, Artificial Sequence
  Description of Artificial Sequence: Synthetic oligonucleotide
  Antisense strand to SEQ ID NO: 2022678
ucaggcaguccaauuucuc

SEQ ID NO: 2022680 - RNA, 19 nt, Artificial Sequence
  Description of Artificial Sequence: Synthetic oligonucleotide
  Sense strand starting at position 855 of SEQ ID NO: 1881159
uugauuaagccucaggacu

SEQ ID NO: 2022681 - RNA, 19 nt, Artificial Sequence
  Description of Artificial Sequence: Synthetic oligonucleotide
  Antisense strand to SEQ ID NO: 2022680
aguccugaggcuuaaucaa

SEQ ID NO: 2022682 - RNA, 19 nt, Artificial Sequence
  Description of Artificial Sequence: Synthetic oligonucleotide
  Sense strand starting at position 907 of SEQ ID NO: 1881159
cgaaaucuggauugagagu

SEQ ID NO: 2022683 - RNA, 19 nt, Artificial Sequence
  Description of Artificial Sequence: Synthetic oligonucleotide
  Antisense strand to SEQ ID NO: 2022682
acucucaauccagauuucg

SEQ ID NO: 2022684 - RNA, 19 nt, Artificial Sequence
  Description of Artificial Sequence: Synthetic oligonucleotide
  Sense strand starting at position 918 of SEQ ID NO: 1881159
uugagaguguagguuuaca

SEQ ID NO: 2022685 - RNA, 19 nt, Artificial Sequence
  Description of Artificial Sequence: Synthetic oligonucleotide
  Antisense strand to SEQ ID NO: 2022684
uguaaaccuacacucucaa

SEQ ID NO: 2022686 - RNA, 19 nt, Artificial Sequence
  Description of Artificial Sequence: Synthetic oligonucleotide
  Sense strand starting at position 960 of SEQ ID NO: 1881159
aucaaauccucguuaacga

SEQ ID NO: 2022687 - RNA, 19 nt, Artificial Sequence
  Description of Artificial Sequence: Synthetic oligonucleotide
  Antisense strand to SEQ ID NO: 2022686
ucguuaacgaggauuugau

SEQ ID NO: 2022688 - RNA, 19 nt, Artificial Sequence
  Description of Artificial Sequence: Synthetic oligonucleotide
  Sense strand starting at position 961 of SEQ ID NO: 1881159
ucaaauccucguuaacgaa

SEQ ID NO: 2022689 - RNA, 19 nt, Artificial Sequence
  Description of Artificial Sequence: Synthetic oligonucleotide
  Antisense strand to SEQ ID NO: 2022688
uucguuaacgaggauuuga

SEQ ID NO: 2022690 - RNA, 19 nt, Artificial Sequence
  Description of Artificial Sequence: Synthetic oligonucleotide
  Sense strand starting at position 1128 of SEQ ID NO: 1881159
uagaaaugccaagguuguu

SEQ ID NO: 2022691 - RNA, 19 nt, Artificial Sequence
  Description of Artificial Sequence: Synthetic oligonucleotide
  Antisense strand to SEQ ID NO: 2022690
aacaaccuuggcauuucua

SEQ ID NO: 2022692 - RNA, 19 nt, Artificial Sequence
  Description of Artificial Sequence: Synthetic oligonucleotide
  Sense strand starting at position 1172 of SEQ ID NO: 1881159
auuagugacauguaaacga

SEQ ID NO: 2022693 - RNA, 19 nt, Artificial Sequence
  Description of Artificial Sequence: Synthetic oligonucleotide
  Antisense strand to SEQ ID NO: 2022692
ucguuuacaugucacuaau

SEQ ID NO: 2022694 - RNA, 19 nt, Artificial Sequence
  Description of Artificial Sequence: Synthetic oligonucleotide
  Sense strand starting at position 1248 of SEQ ID NO: 1881159
gcaguuaguggacaaggua

SEQ ID NO: 2022695 - RNA, 19 nt, Artificial Sequence
  Description of Artificial Sequence: Synthetic oligonucleotide
  Antisense strand to SEQ ID NO: 2022694
uaccuuguccacuaacugc

SEQ ID NO: 2022696 - RNA, 19 nt, Artificial Sequence
  Description of Artificial Sequence: Synthetic oligonucleotide
  Sense strand starting at position 1251 of SEQ ID NO: 1881159
guuaguggacaagguaauu

SEQ ID NO: 2022697 - RNA, 19 nt, Artificial Sequence
  Description of Artificial Sequence: Synthetic oligonucleotide
  Antisense strand to SEQ ID NO: 2022696
aauuaccuuguccacuaac

SEQ ID NO: 2022698 - RNA, 19 nt, Artificial Sequence
  Description of Artificial Sequence: Synthetic oligonucleotide
  Sense strand starting at position 1257 of SEQ ID NO: 1881159
ggacaagguaauugucgaa

SEQ ID NO: 2022699 - RNA, 19 nt, Artificial Sequence
  Description of Artificial Sequence: Synthetic oligonucleotide
  Antisense strand to SEQ ID NO: 2022698
uucgacaauuaccuugucc

SEQ ID NO: 2022700 - RNA, 19 nt, Artificial Sequence
  Description of Artificial Sequence: Synthetic oligonucleotide
  Sense strand starting at position 1261 of SEQ ID NO: 1881159
aagguaauugucgaagcau

SEQ ID NO: 2022701 - RNA, 19 nt, Artificial Sequence
  Description of Artificial Sequence: Synthetic oligonucleotide
  Antisense strand to SEQ ID NO: 2022700
augcuucgacaauuaccuu

SEQ ID NO: 2022702 - RNA, 19 nt, Artificial Sequence
  Description of Artificial Sequence: Synthetic oligonucleotide
  Sense strand starting at position 1376 of SEQ ID NO: 1881159
cccaguaaacuuuguugaa

SEQ ID NO: 2022703 - RNA, 19 nt, Artificial Sequence
  Description of Artificial Sequence: Synthetic oligonucleotide
  Antisense strand to SEQ ID NO: 2022702
uucaacaaaguuuacuggg

SEQ ID NO: 2022704 - RNA, 19 nt, Artificial Sequence
  Description of Artificial Sequence: Synthetic oligonucleotide
  Sense strand starting at position 1377 of SEQ ID NO: 1881159
ccaguaaacuuuguugaag

SEQ ID NO: 2022705 - RNA, 19 nt, Artificial Sequence
  Description of Artificial Sequence: Synthetic oligonucleotide
  Antisense strand to SEQ ID NO: 2022704
cuucaacaaaguuuacugg

SEQ ID NO: 2022706 - RNA, 19 nt, Artificial Sequence
  Description of Artificial Sequence: Synthetic oligonucleotide
  Sense strand starting at position 1378 of SEQ ID NO: 1881159
caguaaacuuuguugaaga

SEQ ID NO: 2022707 - RNA, 19 nt, Artificial Sequence
  Description of Artificial Sequence: Synthetic oligonucleotide
  Antisense strand to SEQ ID NO: 2022706
ucuucaacaaaguuuacug

SEQ ID NO: 2022708 - RNA, 19 nt, Artificial Sequence
  Description of Artificial Sequence: Synthetic oligonucleotide
  Sense strand starting at position 1405 of SEQ ID NO: 1881159
auuagaaacugcuuaggga

SEQ ID NO: 2022709 - RNA, 19 nt, Artificial Sequence
  Description of Artificial Sequence: Synthetic oligonucleotide
  Antisense strand to SEQ ID NO: 2022708
ucccuaagcaguuucuaau

SEQ ID NO: 2022710 - RNA, 19 nt, Artificial Sequence
  Description of Artificial Sequence: Synthetic oligonucleotide
  Sense strand starting at position 1472 of SEQ ID NO: 1881159
gcagaaagcuuauucuuaa

SEQ ID NO: 2022711 - RNA, 19 nt, Artificial Sequence
  Description of Artificial Sequence: Synthetic oligonucleotide
  Antisense strand to SEQ ID NO: 2022710
uuaagaauaagcuuucugc

SEQ ID NO: 2022712 - RNA, 19 nt, Artificial Sequence
  Description of Artificial Sequence: Synthetic oligonucleotide
  Sense strand starting at position 1596 of SEQ ID NO: 1881159
ggagcguacggcguauaaa

SEQ ID NO: 2022713 - RNA, 19 nt, Artificial Sequence
  Description of Artificial Sequence: Synthetic oligonucleotide
  Antisense strand to SEQ ID NO: 2022712
uuuauacgccguacgcucc

SEQ ID NO: 2022714 - RNA, 19 nt, Artificial Sequence
  Description of Artificial Sequence: Synthetic oligonucleotide
  Sense strand starting at position 2342 of SEQ ID NO: 1881159
guccuuagagucuagauag

SEQ ID NO: 2022715 - RNA, 19 nt, Artificial Sequence
  Description of Artificial Sequence: Synthetic oligonucleotide
  Antisense strand to SEQ ID NO: 2022714
cuaucuagacucuaaggac

SEQ ID NO: 2022716 - RNA, 19 nt, Artificial Sequence
  Description of Artificial Sequence: Synthetic oligonucleotide
  Sense strand starting at position 2407 of SEQ ID NO: 1881159
ggguuucuucuggaguggu

SEQ ID NO: 2022717 - RNA, 19 nt, Artificial Sequence
  Description of Artificial Sequence: Synthetic oligonucleotide
  Antisense strand to SEQ ID NO: 2022716
accacuccagaagaaaccc

SEQ ID NO: 2022718 - RNA, 19 nt, Artificial Sequence
  Description of Artificial Sequence: Synthetic oligonucleotide
  Sense strand starting at position 2539 of SEQ ID NO: 1881159
cuuccuagucaugaguagu

SEQ ID NO: 2022719 - RNA, 19 nt, Artificial Sequence
  Description of Artificial Sequence: Synthetic oligonucleotide
  Antisense strand to SEQ ID NO: 2022718
acuacucaugacuaggaag

SEQ ID NO: 2022720 - RNA, 19 nt, Artificial Sequence
  Description of Artificial Sequence: Synthetic oligonucleotide
  Sense strand starting at position 2658 of SEQ ID NO: 1881159
ucagccauccuugcguuau

SEQ ID NO: 2022721 - RNA, 19 nt, Artificial Sequence
  Description of Artificial Sequence: Synthetic oligonucleotide
  Antisense strand to SEQ ID NO: 2022720
auaacgcaaggauggcuga

SEQ ID NO: 2022722 - RNA, 19 nt, Artificial Sequence
  Description of Artificial Sequence: Synthetic oligonucleotide
  Sense strand starting at position 2661 of SEQ ID NO: 1881159
gccauccuugcguuauuga

SEQ ID NO: 2022723 - RNA, 19 nt, Artificial Sequence
  Description of Artificial Sequence: Synthetic oligonucleotide
  Antisense strand to SEQ ID NO: 2022722
ucaauaacgcaaggauggc

SEQ ID NO: 2022724 - RNA, 19 nt, Artificial Sequence
  Description of Artificial Sequence: Synthetic oligonucleotide
  Sense strand starting at position 2690 of SEQ ID NO: 1881159
ucgggaguuuggguaggaa

SEQ ID NO: 2022725 - RNA, 19 nt, Artificial Sequence
  Description of Artificial Sequence: Synthetic oligonucleotide
  Antisense strand to SEQ ID NO: 2022724
uuccuacccaaacucccga

SEQ ID NO: 2022726 - RNA, 19 nt, Artificial Sequence
  Description of Artificial Sequence: Synthetic oligonucleotide
  Sense strand starting at position 2691 of SEQ ID NO: 1881159
cgggaguuuggguaggaaa

SEQ ID NO: 2022727 - RNA, 19 nt, Artificial Sequence
  Description of Artificial Sequence: Synthetic oligonucleotide
  Antisense strand to SEQ ID NO: 2022726
uuuccuacccaaacucccg

SEQ ID NO: 2022728 - RNA, 19 nt, Artificial Sequence
  Description of Artificial Sequence: Synthetic oligonucleotide
  Sense strand starting at position 2844 of SEQ ID NO: 1881159
uggaacuggcccugggaua

SEQ ID NO: 2022729 - RNA, 19 nt, Artificial Sequence
  Description of Artificial Sequence: Synthetic oligonucleotide
  Antisense strand to SEQ ID NO: 2022728
uaucccagggccaguucca

SEQ ID NO: 2022730 - RNA, 19 nt, Artificial Sequence
  Description of Artificial Sequence: Synthetic oligonucleotide
  Sense strand starting at position 3051 of SEQ ID NO: 1881159
agauguuagucggucagag

SEQ ID NO: 2022731 - RNA, 19 nt, Artificial Sequence
  Description of Artificial Sequence: Synthetic oligonucleotide
  Antisense strand to SEQ ID NO: 2022730
cucugaccgacuaacaucu

SEQ ID NO: 2022732 - RNA, 19 nt, Artificial Sequence
  Description of Artificial Sequence: Synthetic oligonucleotide
  Sense strand starting at position 3145 of SEQ ID NO: 1881159
auacgcucacucuggaaau

SEQ ID NO: 2022733 - RNA, 19 nt, Artificial Sequence
  Description of Artificial Sequence: Synthetic oligonucleotide
  Antisense strand to SEQ ID NO: 2022732
auuuccagagugagcguau

SEQ ID NO: 2022734 - RNA, 19 nt, Artificial Sequence
  Description of Artificial Sequence: Synthetic oligonucleotide
  Sense strand starting at position 3147 of SEQ ID NO: 1881159
acgcucacucuggaaaugu

SEQ ID NO: 2022735 - RNA, 19 nt, Artificial Sequence
  Description of Artificial Sequence: Synthetic oligonucleotide
  Antisense strand to SEQ ID NO: 2022734
acauuuccagagugagcgu

SEQ ID NO: 2022736 - RNA, 19 nt, Artificial Sequence
  Description of Artificial Sequence: Synthetic oligonucleotide
  Sense strand starting at position 3156 of SEQ ID NO: 1881159
cuggaaaugucagcacauu

SEQ ID NO: 2022737 - RNA, 19 nt, Artificial Sequence
  Description of Artificial Sequence: Synthetic oligonucleotide
  Antisense strand to SEQ ID NO: 2022736
aaugugcugacauuuccag

SEQ ID NO: 2022738 - RNA, 19 nt, Artificial Sequence
  Description of Artificial Sequence: Synthetic oligonucleotide
  Sense strand starting at position 3157 of SEQ ID NO: 1881159
uggaaaugucagcacauug

SEQ ID NO: 2022739 - RNA, 19 nt, Artificial Sequence
  Description of Artificial Sequence: Synthetic oligonucleotide
  Antisense strand to SEQ ID NO: 2022738
caaugugcugacauuucca

SEQ ID NO: 2022740 - RNA, 19 nt, Artificial Sequence
  Description of Artificial Sequence: Synthetic oligonucleotide
  Sense strand starting at position 3435 of SEQ ID NO: 1881159
ggcuccuaguaucucaaau

SEQ ID NO: 2022741 - RNA, 19 nt, Artificial Sequence
  Description of Artificial Sequence: Synthetic oligonucleotide
  Antisense strand to SEQ ID NO: 2022740
auuugagauacuaggagcc

SEQ ID NO: 2022742 - RNA, 19 nt, Artificial Sequence
  Description of Artificial Sequence: Synthetic oligonucleotide
  Sense strand starting at position 8 of SEQ ID NO: 1881160
ggagucucaucucaauaaa

SEQ ID NO: 2022743 - RNA, 19 nt, Artificial Sequence
  Description of Artificial Sequence: Synthetic oligonucleotide
  Antisense strand to SEQ ID NO: 2022742
uuuauugagaugagacucc

SEQ ID NO: 2022744 - RNA, 19 nt, Artificial Sequence
  Description of Artificial Sequence: Synthetic oligonucleotide
  Sense strand starting at position 2407 of SEQ ID NO: 1881160
gugcgaagggcucgaagau

SEQ ID NO: 2022745 - RNA, 19 nt, Artificial Sequence
  Description of Artificial Sequence: Synthetic oligonucleotide
  Antisense strand to SEQ ID NO: 2022744
aucuucgagcccuucgcac

SEQ ID NO: 2022746 - RNA, 19 nt, Artificial Sequence
  Description of Artificial Sequence: Synthetic oligonucleotide
  Sense strand starting at position 2434 of SEQ ID NO: 1881160
ggcagagcuacguggauaa

SEQ ID NO: 2022747 - RNA, 19 nt, Artificial Sequence
  Description of Artificial Sequence: Synthetic oligonucleotide
  Antisense strand to SEQ ID NO: 2022746
uuauccacguagcucugcc

SEQ ID NO: 2022748 - RNA, 19 nt, Artificial Sequence
  Description of Artificial Sequence: Synthetic oligonucleotide
  Sense strand starting at position 2920 of SEQ ID NO: 1881160
cccugagguuugcuaugca

SEQ ID NO: 2022749 - RNA, 19 nt, Artificial Sequence
  Description of Artificial Sequence: Synthetic oligonucleotide
  Antisense strand to SEQ ID NO: 2022748
ugcauagcaaaccucaggg

SEQ ID NO: 2022750 - RNA, 19 nt, Artificial Sequence
  Description of Artificial Sequence: Synthetic oligonucleotide
  Sense strand starting at position 2923 of SEQ ID NO: 1881160
ugagguuugcuaugcacgu

SEQ ID NO: 2022751 - RNA, 19 nt, Artificial Sequence
  Description of Artificial Sequence: Synthetic oligonucleotide
  Antisense strand to SEQ ID NO: 2022750
acgugcauagcaaaccuca

SEQ ID NO: 2022752 - RNA, 19 nt, Artificial Sequence
  Description of Artificial Sequence: Synthetic oligonucleotide
  Sense strand starting at position 2924 of SEQ ID NO: 1881160
gagguuugcuaugcacguu

SEQ ID NO: 2022753 - RNA, 19 nt, Artificial Sequence
  Description of Artificial Sequence: Synthetic oligonucleotide
  Antisense strand to SEQ ID NO: 2022752
aacgugcauagcaaaccuc

SEQ ID NO: 2022754 - RNA, 19 nt, Artificial Sequence
  Description of Artificial Sequence: Synthetic oligonucleotide
  Sense strand starting at position 3089 of SEQ ID NO: 1881160
ccgggauucucgaagcgac

SEQ ID NO: 2022755 - RNA, 19 nt, Artificial Sequence
  Description of Artificial Sequence: Synthetic oligonucleotide
  Antisense strand to SEQ ID NO: 2022754
gucgcuucgagaaucccgg

SEQ ID NO: 2022756 - RNA, 19 nt, Artificial Sequence
  Description of Artificial Sequence: Synthetic oligonucleotide
  Sense strand starting at position 3090 of SEQ ID NO: 1881160
cgggauucucgaagcgacu

SEQ ID NO: 2022757 - RNA, 19 nt, Artificial Sequence
  Description of Artificial Sequence: Synthetic oligonucleotide
  Antisense strand to SEQ ID NO: 2022756
agucgcuucgagaaucccg

SEQ ID NO: 2022758 - RNA, 19 nt, Artificial Sequence
  Description of Artificial Sequence: Synthetic oligonucleotide
  Sense strand starting at position 3092 of SEQ ID NO: 1881160
ggauucucgaagcgacuuu

SEQ ID NO: 2022759 - RNA, 19 nt, Artificial Sequence
  Description of Artificial Sequence: Synthetic oligonucleotide
  Antisense strand to SEQ ID NO: 2022758
aaagucgcuucgagaaucc

SEQ ID NO: 2022760 - RNA, 19 nt, Artificial Sequence
  Description of Artificial Sequence: Synthetic oligonucleotide
  Sense strand starting at position 3103 of SEQ ID NO: 1881160
gcgacuuugcguagguuua

SEQ ID NO: 2022761 - RNA, 19 nt, Artificial Sequence
  Description of Artificial Sequence: Synthetic oligonucleotide
  Antisense strand to SEQ ID NO: 2022760
uaaaccuacgcaaagucgc

SEQ ID NO: 2022762 - RNA, 19 nt, Artificial Sequence
  Description of Artificial Sequence: Synthetic oligonucleotide
  Sense strand starting at position 3168 of SEQ ID NO: 1881160
guagguggauucgugaauc

SEQ ID NO: 2022763 - RNA, 19 nt, Artificial Sequence
  Description of Artificial Sequence: Synthetic oligonucleotide
  Antisense strand to SEQ ID NO: 2022762
gauucacgaauccaccuac

SEQ ID NO: 2022764 - RNA, 19 nt, Artificial Sequence
  Description of Artificial Sequence: Synthetic oligonucleotide
  Sense strand starting at position 3246 of SEQ ID NO: 1881160
gcgaacugccauugauuuc

SEQ ID NO: 2022765 - RNA, 19 nt, Artificial Sequence
  Description of Artificial Sequence: Synthetic oligonucleotide
  Antisense strand to SEQ ID NO: 2022764
gaaaucaauggcaguucgc

SEQ ID NO: 2022766 - RNA, 19 nt, Artificial Sequence
  Description of Artificial Sequence: Synthetic oligonucleotide
  Sense strand starting at position 3302 of SEQ ID NO: 1881160
ccaguuaugcaacauagcu

SEQ ID NO: 2022767 - RNA, 19 nt, Artificial Sequence
  Description of Artificial Sequence: Synthetic oligonucleotide
  Antisense strand to SEQ ID NO: 2022766
agcuauguugcauaacugg

SEQ ID NO: 2022768 - RNA, 19 nt, Artificial Sequence
  Description of Artificial Sequence: Synthetic oligonucleotide
  Sense strand starting at position 3398 of SEQ ID NO: 1881160
cucuuuagugguggcagua

SEQ ID NO: 2022769 - RNA, 19 nt, Artificial Sequence
  Description of Artificial Sequence: Synthetic oligonucleotide
  Antisense strand to SEQ ID NO: 2022768
uacugccaccacuaaagag

SEQ ID NO: 2022770 - RNA, 19 nt, Artificial Sequence
  Description of Artificial Sequence: Synthetic oligonucleotide
  Sense strand starting at position 3455 of SEQ ID NO: 1881160
uuucuugagacuugauggu

SEQ ID NO: 2022771 - RNA, 19 nt, Artificial Sequence
  Description of Artificial Sequence: Synthetic oligonucleotide
  Antisense strand to SEQ ID NO: 2022770
accaucaagucucaagaaa

SEQ ID NO: 2022772 - RNA, 19 nt, Artificial Sequence
  Description of Artificial Sequence: Synthetic oligonucleotide
  Sense strand starting at position 3483 of SEQ ID NO: 1881160
guugcaauauguuuggaga

SEQ ID NO: 2022773 - RNA, 19 nt, Artificial Sequence
  Description of Artificial Sequence: Synthetic oligonucleotide
  Antisense strand to SEQ ID NO: 2022772
ucuccaaacauauugcaac

SEQ ID NO: 2022774 - RNA, 19 nt, Artificial Sequence
  Description of Artificial Sequence: Synthetic oligonucleotide
  Sense strand starting at position 3484 of SEQ ID NO: 1881160
uugcaauauguuuggagaa

SEQ ID NO: 2022775 - RNA, 19 nt, Artificial Sequence
  Description of Artificial Sequence: Synthetic oligonucleotide
  Antisense strand to SEQ ID NO: 2022774
uucuccaaacauauugcaa

SEQ ID NO: 2022776 - RNA, 19 nt, Artificial Sequence
  Description of Artificial Sequence: Synthetic oligonucleotide
  Sense strand starting at position 3486 of SEQ ID NO: 1881160
gcaauauguuuggagaaua

SEQ ID NO: 2022777 - RNA, 19 nt, Artificial Sequence
  Description of Artificial Sequence: Synthetic oligonucleotide
  Antisense strand to SEQ ID NO: 2022776
uauucuccaaacauauugc

SEQ ID NO: 2022778 - RNA, 19 nt, Artificial Sequence
  Description of Artificial Sequence: Synthetic oligonucleotide
  Sense strand starting at position 3545 of SEQ ID NO: 1881160
gcccaaggcuguuucuaaa

SEQ ID NO: 2022779 - RNA, 19 nt, Artificial Sequence
  Description of Artificial Sequence: Synthetic oligonucleotide
  Antisense strand to SEQ ID NO: 2022778
uuuagaaacagccuugggc

SEQ ID NO: 2022780 - RNA, 19 nt, Artificial Sequence
  Description of Artificial Sequence: Synthetic oligonucleotide
  Sense strand starting at position 3585 of SEQ ID NO: 1881160
acgagaccauucucuuuau

SEQ ID NO: 2022781 - RNA, 19 nt, Artificial Sequence
  Description of Artificial Sequence: Synthetic oligonucleotide
  Antisense strand to SEQ ID NO: 2022780
auaaagagaauggucucgu

SEQ ID NO: 2022782 - RNA, 19 nt, Artificial Sequence
  Description of Artificial Sequence: Synthetic oligonucleotide
  Sense strand starting at position 3586 of SEQ ID NO: 1881160
cgagaccauucucuuuauu

SEQ ID NO: 2022783 - RNA, 19 nt, Artificial Sequence
  Description of Artificial Sequence: Synthetic oligonucleotide
  Antisense strand to SEQ ID NO: 2022782
aauaaagagaauggucucg

SEQ ID NO: 2022784 - RNA, 19 nt, Artificial Sequence
  Description of Artificial Sequence: Synthetic oligonucleotide
  Sense strand starting at position 3650 of SEQ ID NO: 1881160
cccuauuaagggugcuaau

SEQ ID NO: 2022785 - RNA, 19 nt, Artificial Sequence
  Description of Artificial Sequence: Synthetic oligonucleotide
  Antisense strand to SEQ ID NO: 2022784
auuagcacccuuaauaggg

SEQ ID NO: 2022786 - RNA, 19 nt, Artificial Sequence
  Description of Artificial Sequence: Synthetic oligonucleotide
  Sense strand starting at position 3689 of SEQ ID NO: 1881160
ugguuuaaagucuaacuuu

SEQ ID NO: 2022787 - RNA, 19 nt, Artificial Sequence
  Description of Artificial Sequence: Synthetic oligonucleotide
  Antisense strand to SEQ ID NO: 2022786
aaaguuagacuuuaaacca

SEQ ID NO: 2022788 - RNA, 19 nt, Artificial Sequence
  Description of Artificial Sequence: Synthetic oligonucleotide
  Sense strand starting at position 3708 of SEQ ID NO: 1881160
agaacucaguccuugauag

SEQ ID NO: 2022789 - RNA, 19 nt, Artificial Sequence
  Description of Artificial Sequence: Synthetic oligonucleotide
  Antisense strand to SEQ ID NO: 2022788
cuaucaaggacugaguucu

SEQ ID NO: 2022790 - RNA, 19 nt, Artificial Sequence
  Description of Artificial Sequence: Synthetic oligonucleotide
  Sense strand starting at position 3709 of SEQ ID NO: 1881160
gaacucaguccuugauagu

SEQ ID NO: 2022791 - RNA, 19 nt, Artificial Sequence
  Description of Artificial Sequence: Synthetic oligonucleotide
  Antisense strand to SEQ ID NO: 2022790
acuaucaaggacugaguuc

SEQ ID NO: 2022792 - RNA, 19 nt, Artificial Sequence
  Description of Artificial Sequence: Synthetic oligonucleotide
  Sense strand starting at position 3760 of SEQ ID NO: 1881160
cuacaauucuuguagggaa

SEQ ID NO: 2022793 - RNA, 19 nt, Artificial Sequence
  Description of Artificial Sequence: Synthetic oligonucleotide
  Antisense strand to SEQ ID NO: 2022792
uucccuacaagaauuguag

SEQ ID NO: 2022794 - RNA, 19 nt, Artificial Sequence
  Description of Artificial Sequence: Synthetic oligonucleotide
  Sense strand starting at position 3762 of SEQ ID NO: 1881160
acaauucuuguagggaauu

SEQ ID NO: 2022795 - RNA, 19 nt, Artificial Sequence
  Description of Artificial Sequence: Synthetic oligonucleotide
  Antisense strand to SEQ ID NO: 2022794
aauucccuacaagaauugu

SEQ ID NO: 2022796 - RNA, 19 nt, Artificial Sequence
  Description of Artificial Sequence: Synthetic oligonucleotide
  Sense strand starting at position 3775 of SEQ ID NO: 1881160
ggaauuggcaucuggucau

SEQ ID NO: 2022797 - RNA, 19 nt, Artificial Sequence
  Description of Artificial Sequence: Synthetic oligonucleotide
  Antisense strand to SEQ ID NO: 2022796
augaccagaugccaauucc

SEQ ID NO: 2022798 - RNA, 19 nt, Artificial Sequence
  Description of Artificial Sequence: Synthetic oligonucleotide
  Sense strand starting at position 3778 of SEQ ID NO: 1881160
auuggcaucuggucaucaa

SEQ ID NO: 2022799 - RNA, 19 nt, Artificial Sequence
  Description of Artificial Sequence: Synthetic oligonucleotide
  Antisense strand to SEQ ID NO: 2022798
uugaugaccagaugccaau

SEQ ID NO: 2022800 - RNA, 19 nt, Artificial Sequence
  Description of Artificial Sequence: Synthetic oligonucleotide
  Sense strand starting at position 3781 of SEQ ID NO: 1881160
ggcaucuggucaucaacuu

SEQ ID NO: 2022801 - RNA, 19 nt, Artificial Sequence
  Description of Artificial Sequence: Synthetic oligonucleotide
  Antisense strand to SEQ ID NO: 2022800
aaguugaugaccagaugcc

SEQ ID NO: 2022802 - RNA, 19 nt, Artificial Sequence
  Description of Artificial Sequence: Synthetic oligonucleotide
  Sense strand starting at position 3782 of SEQ ID NO: 1881160
gcaucuggucaucaacuuu

SEQ ID NO: 2022803 - RNA, 19 nt, Artificial Sequence
  Description of Artificial Sequence: Synthetic oligonucleotide
  Antisense strand to SEQ ID NO: 2022802
aaaguugaugaccagaugc

SEQ ID NO: 2022804 - RNA, 19 nt, Artificial Sequence
  Description of Artificial Sequence: Synthetic oligonucleotide
  Sense strand starting at position 3826 of SEQ ID NO: 1881160
gugugaguucccgcugucu

SEQ ID NO: 2022805 - RNA, 19 nt, Artificial Sequence
  Description of Artificial Sequence: Synthetic oligonucleotide
  Antisense strand to SEQ ID NO: 2022804
agacagcgggaacucacac

SEQ ID NO: 2022806 - RNA, 19 nt, Artificial Sequence
  Description of Artificial Sequence: Synthetic oligonucleotide
  Sense strand starting at position 3828 of SEQ ID NO: 1881160
gugaguucccgcugucuga

SEQ ID NO: 2022807 - RNA, 19 nt, Artificial Sequence
  Description of Artificial Sequence: Synthetic oligonucleotide
  Antisense strand to SEQ ID NO: 2022806
ucagacagcgggaacucac

SEQ ID NO: 2022808 - RNA, 19 nt, Artificial Sequence
  Description of Artificial Sequence: Synthetic oligonucleotide
  Sense strand starting at position 3838 of SEQ ID NO: 1881160
gcugucugacuaggaagau

SEQ ID NO: 2022809 - RNA, 19 nt, Artificial Sequence
  Description of Artificial Sequence: Synthetic oligonucleotide
  Antisense strand to SEQ ID NO: 2022808
aucuuccuagucagacagc

SEQ ID NO: 2022810 - RNA, 19 nt, Artificial Sequence
  Description of Artificial Sequence: Synthetic oligonucleotide
  Sense strand starting at position 3839 of SEQ ID NO: 1881160
cugucugacuaggaagauu

SEQ ID NO: 2022811 - RNA, 19 nt, Artificial Sequence
  Description of Artificial Sequence: Synthetic oligonucleotide
  Antisense strand to SEQ ID NO: 2022810
aaucuuccuagucagacag

SEQ ID NO: 2022812 - RNA, 19 nt, Artificial Sequence
  Description of Artificial Sequence: Synthetic oligonucleotide
  Sense strand starting at position 3858 of SEQ ID NO: 1881160
gcgggagugugcuuggaaa

SEQ ID NO: 2022813 - RNA, 19 nt, Artificial Sequence
  Description of Artificial Sequence: Synthetic oligonucleotide
  Antisense strand to SEQ ID NO: 2022812
uuuccaagcacacucccgc

SEQ ID NO: 2022814 - RNA, 19 nt, Artificial Sequence
  Description of Artificial Sequence: Synthetic oligonucleotide
  Sense strand starting at position 3859 of SEQ ID NO: 1881160
cgggagugugcuuggaaau

SEQ ID NO: 2022815 - RNA, 19 nt, Artificial Sequence
  Description of Artificial Sequence: Synthetic oligonucleotide
  Antisense strand to SEQ ID NO: 2022814
auuuccaagcacacucccg

SEQ ID NO: 2022816 - RNA, 19 nt, Artificial Sequence
  Description of Artificial Sequence: Synthetic oligonucleotide
  Sense strand starting at position 3860 of SEQ ID NO: 1881160
gggagugugcuuggaaaug

SEQ ID NO: 2022817 - RNA, 19 nt, Artificial Sequence
  Description of Artificial Sequence: Synthetic oligonucleotide
  Antisense strand to SEQ ID NO: 2022816
cauuuccaagcacacuccc

SEQ ID NO: 2022818 - RNA, 19 nt, Artificial Sequence
  Description of Artificial Sequence: Synthetic oligonucleotide
  Sense strand starting at position 3887 of SEQ ID NO: 1881160
cugcuaugacucugcaguu

SEQ ID NO: 2022819 - RNA, 19 nt, Artificial Sequence
  Description of Artificial Sequence: Synthetic oligonucleotide
  Antisense strand to SEQ ID NO: 2022818
aacugcagagucauagcag

SEQ ID NO: 2022820 - RNA, 19 nt, Artificial Sequence
  Description of Artificial Sequence: Synthetic oligonucleotide
  Sense strand starting at position 3935 of SEQ ID NO: 1881160
cauggaauguuagaaugca

SEQ ID NO: 2022821 - RNA, 19 nt, Artificial Sequence
  Description of Artificial Sequence: Synthetic oligonucleotide
  Antisense strand to SEQ ID NO: 2022820
ugcauucuaacauuccaug

SEQ ID NO: 2022822 - RNA, 19 nt, Artificial Sequence
  Description of Artificial Sequence: Synthetic oligonucleotide
  Sense strand starting at position 81 of SEQ ID NO: 1881161
aggagcaguccaggaaagu

SEQ ID NO: 2022823 - RNA, 19 nt, Artificial Sequence
  Description of Artificial Sequence: Synthetic oligonucleotide
  Antisense strand to SEQ ID NO: 2022822
acuuuccuggacugcuccu

SEQ ID NO: 2022824 - RNA, 19 nt, Artificial Sequence
  Description of Artificial Sequence: Synthetic oligonucleotide
  Sense strand starting at position 82 of SEQ ID NO: 1881161
ggagcaguccaggaaaguu

SEQ ID NO: 2022825 - RNA, 19 nt, Artificial Sequence
  Description of Artificial Sequence: Synthetic oligonucleotide
  Antisense strand to SEQ ID NO: 2022824
aacuuuccuggacugcucc

SEQ ID NO: 2022826 - RNA, 19 nt, Artificial Sequence
  Description of Artificial Sequence: Synthetic oligonucleotide
  Sense strand starting at position 384 of SEQ ID NO: 1881161
cuccacuauuugucuggua

SEQ ID NO: 2022827 - RNA, 19 nt, Artificial Sequence
  Description of Artificial Sequence: Synthetic oligonucleotide
  Antisense strand to SEQ ID NO: 2022826
uaccagacaaauaguggag

SEQ ID NO: 2022828 - RNA, 19 nt, Artificial Sequence
  Description of Artificial Sequence: Synthetic oligonucleotide
  Sense strand starting at position 505 of SEQ ID NO: 1881161
cccucuguucuagagaguu

SEQ ID NO: 2022829 - RNA, 19 nt, Artificial Sequence
  Description of Artificial Sequence: Synthetic oligonucleotide
  Antisense strand to SEQ ID NO: 2022828
aacucucuagaacagaggg

SEQ ID NO: 2022830 - RNA, 19 nt, Artificial Sequence
  Description of Artificial Sequence: Synthetic oligonucleotide
  Sense strand starting at position 507 of SEQ ID NO: 1881161
cucuguucuagagaguuag

SEQ ID NO: 2022831 - RNA, 19 nt, Artificial Sequence
  Description of Artificial Sequence: Synthetic oligonucleotide
  Antisense strand to SEQ ID NO: 2022830
cuaacucucuagaacagag

SEQ ID NO: 2022832 - RNA, 19 nt, Artificial Sequence
  Description of Artificial Sequence: Synthetic oligonucleotide
  Sense strand starting at position 523 of SEQ ID NO: 1881161
uagggaaauuuagaaguua

SEQ ID NO: 2022833 - RNA, 19 nt, Artificial Sequence
  Description of Artificial Sequence: Synthetic oligonucleotide
  Antisense strand to SEQ ID NO: 2022832
uaacuucuaaauuucccua

SEQ ID NO: 2022834 - RNA, 19 nt, Artificial Sequence
  Description of Artificial Sequence: Synthetic oligonucleotide
  Sense strand starting at position 531 of SEQ ID NO: 1881161
uuuagaaguuaggcaaaca

SEQ ID NO: 2022835 - RNA, 19 nt, Artificial Sequence
  Description of Artificial Sequence: Synthetic oligonucleotide
  Antisense strand to SEQ ID NO: 2022834
uguuugccuaacuucuaaa

SEQ ID NO: 2022836 - RNA, 19 nt, Artificial Sequence
  Description of Artificial Sequence: Synthetic oligonucleotide
  Sense strand starting at position 710 of SEQ ID NO: 1881161
aggcaaugucccuaaacca

SEQ ID NO: 2022837 - RNA, 19 nt, Artificial Sequence
  Description of Artificial Sequence: Synthetic oligonucleotide
  Antisense strand to SEQ ID NO: 2022836
ugguuuagggacauugccu

SEQ ID NO: 2022838 - RNA, 19 nt, Artificial Sequence
  Description of Artificial Sequence: Synthetic oligonucleotide
  Sense strand starting at position 888 of SEQ ID NO: 1881161
cuaucuucugaaggacuga

SEQ ID NO: 2022839 - RNA, 19 nt, Artificial Sequence
  Description of Artificial Sequence: Synthetic oligonucleotide
  Antisense strand to SEQ ID NO: 2022838
ucaguccuucagaagauag

SEQ ID NO: 2022840 - RNA, 19 nt, Artificial Sequence
  Description of Artificial Sequence: Synthetic oligonucleotide
  Sense strand starting at position 936 of SEQ ID NO: 1881161
ugaaucaagccuuaaugca

SEQ ID NO: 2022841 - RNA, 19 nt, Artificial Sequence
  Description of Artificial Sequence: Synthetic oligonucleotide
  Antisense strand to SEQ ID NO: 2022840
ugcauuaaggcuugauuca

SEQ ID NO: 2022842 - RNA, 19 nt, Artificial Sequence
  Description of Artificial Sequence: Synthetic oligonucleotide
  Sense strand starting at position 960 of SEQ ID NO: 1881161
acaguaaaugcaggugaaa

SEQ ID NO: 2022843 - RNA, 19 nt, Artificial Sequence
  Description of Artificial Sequence: Synthetic oligonucleotide
  Antisense strand to SEQ ID NO: 2022842
uuucaccugcauuuacugu

SEQ ID NO: 2022844 - RNA, 19 nt, Artificial Sequence
  Description of Artificial Sequence: Synthetic oligonucleotide
  Sense strand starting at position 962 of SEQ ID NO: 1881161
aguaaaugcaggugaaaug

SEQ ID NO: 2022845 - RNA, 19 nt, Artificial Sequence
  Description of Artificial Sequence: Synthetic oligonucleotide
  Antisense strand to SEQ ID NO: 2022844
cauuucaccugcauuuacu

SEQ ID NO: 2022846 - RNA, 19 nt, Artificial Sequence
  Description of Artificial Sequence: Synthetic oligonucleotide
  Sense strand starting at position 1383 of SEQ ID NO: 1881161
cauuuauauuuggacggua

SEQ ID NO: 2022847 - RNA, 19 nt, Artificial Sequence
  Description of Artificial Sequence: Synthetic oligonucleotide
  Antisense strand to SEQ ID NO: 2022846
uaccguccaaauauaaaug

SEQ ID NO: 2022848 - RNA, 19 nt, Artificial Sequence
  Description of Artificial Sequence: Synthetic oligonucleotide
  Sense strand starting at position 1634 of SEQ ID NO: 1881161
gauccuaaucaguguggga

SEQ ID NO: 2022849 - RNA, 19 nt, Artificial Sequence
  Description of Artificial Sequence: Synthetic oligonucleotide
  Antisense strand to SEQ ID NO: 2022848
ucccacacugauuaggauc

SEQ ID NO: 2022850 - RNA, 19 nt, Artificial Sequence
  Description of Artificial Sequence: Synthetic oligonucleotide
  Sense strand starting at position 1636 of SEQ ID NO: 1881161
uccuaaucagugugggaaa

SEQ ID NO: 2022851 - RNA, 19 nt, Artificial Sequence
  Description of Artificial Sequence: Synthetic oligonucleotide
  Antisense strand to SEQ ID NO: 2022850
uuucccacacugauuagga

SEQ ID NO: 2022852 - RNA, 19 nt, Artificial Sequence
  Description of Artificial Sequence: Synthetic oligonucleotide
  Sense strand starting at position 1874 of SEQ ID NO: 1881161
agaccaaggccguaaauaa

SEQ ID NO: 2022853 - RNA, 19 nt, Artificial Sequence
  Description of Artificial Sequence: Synthetic oligonucleotide
  Antisense strand to SEQ ID NO: 2022852
uuauuuacggccuuggucu

SEQ ID NO: 2022854 - RNA, 19 nt, Artificial Sequence
  Description of Artificial Sequence: Synthetic oligonucleotide
  Sense strand starting at position 1929 of SEQ ID NO: 1881161
uugucuugugcauuccgua

SEQ ID NO: 2022855 - RNA, 19 nt, Artificial Sequence
  Description of Artificial Sequence: Synthetic oligonucleotide
  Antisense strand to SEQ ID NO: 2022854
uacggaaugcacaagacaa

SEQ ID NO: 2022856 - RNA, 19 nt, Artificial Sequence
  Description of Artificial Sequence: Synthetic oligonucleotide
  Sense strand starting at position 1930 of SEQ ID NO: 1881161
ugucuugugcauuccguaa

SEQ ID NO: 2022857 - RNA, 19 nt, Artificial Sequence
  Description of Artificial Sequence: Synthetic oligonucleotide
  Antisense strand to SEQ ID NO: 2022856
uuacggaaugcacaagaca

SEQ ID NO: 2022858 - RNA, 19 nt, Artificial Sequence
  Description of Artificial Sequence: Synthetic oligonucleotide
  Sense strand starting at position 2258 of SEQ ID NO: 1881161
agcugagucaucgaggaac

SEQ ID NO: 2022859 - RNA, 19 nt, Artificial Sequence
  Description of Artificial Sequence: Synthetic oligonucleotide
  Antisense strand to SEQ ID NO: 2022858
guuccucgaugacucagcu

SEQ ID NO: 2022860 - RNA, 19 nt, Artificial Sequence
  Description of Artificial Sequence: Synthetic oligonucleotide
  Sense strand starting at position 2309 of SEQ ID NO: 1881161
agugcauacccugaucaca

SEQ ID NO: 2022861 - RNA, 19 nt, Artificial Sequence
  Description of Artificial Sequence: Synthetic oligonucleotide
  Antisense strand to SEQ ID NO: 2022860
ugugaucaggguaugcacu

SEQ ID NO: 2022862 - RNA, 19 nt, Artificial Sequence
  Description of Artificial Sequence: Synthetic oligonucleotide
  Sense strand starting at position 2421 of SEQ ID NO: 1881161
gaaguuaaucuaugguaca

SEQ ID NO: 2022863 - RNA, 19 nt, Artificial Sequence
  Description of Artificial Sequence: Synthetic oligonucleotide
  Antisense strand to SEQ ID NO: 2022862
uguaccauagauuaacuuc

SEQ ID NO: 2022864 - RNA, 19 nt, Artificial Sequence
  Description of Artificial Sequence: Synthetic oligonucleotide
  Sense strand starting at position 2446 of SEQ ID NO: 1881161
gggaguagaguuugaggau

SEQ ID NO: 2022865 - RNA, 19 nt, Artificial Sequence
  Description of Artificial Sequence: Synthetic oligonucleotide
  Antisense strand to SEQ ID NO: 2022864
auccucaaacucuacuccc

SEQ ID NO: 2022866 - RNA, 19 nt, Artificial Sequence
  Description of Artificial Sequence: Synthetic oligonucleotide
  Sense strand starting at position 2455 of SEQ ID NO: 1881161
guuugaggaugauuccaug

SEQ ID NO: 2022867 - RNA, 19 nt, Artificial Sequence
  Description of Artificial Sequence: Synthetic oligonucleotide
  Antisense strand to SEQ ID NO: 2022866
cauggaaucauccucaaac

SEQ ID NO: 2022868 - RNA, 19 nt, Artificial Sequence
  Description of Artificial Sequence: Synthetic oligonucleotide
  Sense strand starting at position 2808 of SEQ ID NO: 1881161
cgagauuagcacuggaaau

SEQ ID NO: 2022869 - RNA, 19 nt, Artificial Sequence
  Description of Artificial Sequence: Synthetic oligonucleotide
  Antisense strand to SEQ ID NO: 2022868
auuuccagugcuaaucucg

SEQ ID NO: 2022870 - RNA, 19 nt, Artificial Sequence
  Description of Artificial Sequence: Synthetic oligonucleotide
  Sense strand starting at position 2858 of SEQ ID NO: 1881161
gcccucuagccagaauaaa

SEQ ID NO: 2022871 - RNA, 19 nt, Artificial Sequence
  Description of Artificial Sequence: Synthetic oligonucleotide
  Antisense strand to SEQ ID NO: 2022870
uuuauucuggcuagagggc

SEQ ID NO: 2022872 - RNA, 19 nt, Artificial Sequence
  Description of Artificial Sequence: Synthetic oligonucleotide
  Sense strand starting at position 2998 of SEQ ID NO: 1881161
gaaggauuggcuggcuuga

SEQ ID NO: 2022873 - RNA, 19 nt, Artificial Sequence
  Description of Artificial Sequence: Synthetic oligonucleotide
  Antisense strand to SEQ ID NO: 2022872
ucaagccagccaauccuuc

SEQ ID NO: 2022874 - RNA, 19 nt, Artificial Sequence
  Description of Artificial Sequence: Synthetic oligonucleotide
  Sense strand starting at position 3000 of SEQ ID NO: 1881161
aggauuggcuggcuugaaa

SEQ ID NO: 2022875 - RNA, 19 nt, Artificial Sequence
  Description of Artificial Sequence: Synthetic oligonucleotide
  Antisense strand to SEQ ID NO: 2022874
uuucaagccagccaauccu

SEQ ID NO: 2022876 - RNA, 19 nt, Artificial Sequence
  Description of Artificial Sequence: Synthetic oligonucleotide
  Sense strand starting at position 3003 of SEQ ID NO: 1881161
auuggcuggcuugaaacau

SEQ ID NO: 2022877 - RNA, 19 nt, Artificial Sequence
  Description of Artificial Sequence: Synthetic oligonucleotide
  Antisense strand to SEQ ID NO: 2022876
auguuucaagccagccaau

SEQ ID NO: 2022878 - RNA, 19 nt, Artificial Sequence
  Description of Artificial Sequence: Synthetic oligonucleotide
  Sense strand starting at position 3034 of SEQ ID NO: 1881161
agucaaauguuuccuuuag

SEQ ID NO: 2022879 - RNA, 19 nt, Artificial Sequence
  Description of Artificial Sequence: Synthetic oligonucleotide
  Antisense strand to SEQ ID NO: 2022878
cuaaaggaaacauuugacu

SEQ ID NO: 2022880 - RNA, 19 nt, Artificial Sequence
  Description of Artificial Sequence: Synthetic oligonucleotide
  Sense strand starting at position 3040 of SEQ ID NO: 1881161
auguuuccuuuagugggaa

SEQ ID NO: 2022881 - RNA, 19 nt, Artificial Sequence
  Description of Artificial Sequence: Synthetic oligonucleotide
  Antisense strand to SEQ ID NO: 2022880
uucccacuaaaggaaacau

SEQ ID NO: 2022882 - RNA, 19 nt, Artificial Sequence
  Description of Artificial Sequence: Synthetic oligonucleotide
  Sense strand starting at position 3542 of SEQ ID NO: 1881161
gaacaaaggccugguucuu

SEQ ID NO: 2022883 - RNA, 19 nt, Artificial Sequence
  Description of Artificial Sequence: Synthetic oligonucleotide
  Antisense strand to SEQ ID NO: 2022882
aagaaccaggccuuuguuc

SEQ ID NO: 2022884 - RNA, 19 nt, Artificial Sequence
  Description of Artificial Sequence: Synthetic oligonucleotide
  Sense strand starting at position 3580 of SEQ ID NO: 1881161
ccacaugucccaggaaaca

SEQ ID NO: 2022885 - RNA, 19 nt, Artificial Sequence
  Description of Artificial Sequence: Synthetic oligonucleotide
  Antisense strand to SEQ ID NO: 2022884
uguuuccugggacaugugg

SEQ ID NO: 2022886 - RNA, 19 nt, Artificial Sequence
  Description of Artificial Sequence: Synthetic oligonucleotide
  Sense strand starting at position 3622 of SEQ ID NO: 1881161
uccugcucuccggacagaa

SEQ ID NO: 2022887 - RNA, 19 nt, Artificial Sequence
  Description of Artificial Sequence: Synthetic oligonucleotide
  Antisense strand to SEQ ID NO: 2022886
uucuguccggagagcagga

SEQ ID NO: 2022888 - RNA, 19 nt, Artificial Sequence
  Description of Artificial Sequence: Synthetic oligonucleotide
  Sense strand starting at position 3654 of SEQ ID NO: 1881161
uguuuccuuuauuugcaua

SEQ ID NO: 2022889 - RNA, 19 nt, Artificial Sequence
  Description of Artificial Sequence: Synthetic oligonucleotide
  Antisense strand to SEQ ID NO: 2022888
uaugcaaauaaaggaaaca

SEQ ID NO: 2022890 - RNA, 19 nt, Artificial Sequence
  Description of Artificial Sequence: Synthetic oligonucleotide
  Sense strand starting at position 3729 of SEQ ID NO: 1881161
guuuccaacugaguuuaga

SEQ ID NO: 2022891 - RNA, 19 nt, Artificial Sequence
  Description of Artificial Sequence: Synthetic oligonucleotide
  Antisense strand to SEQ ID NO: 2022890
ucuaaacucaguuggaaac

SEQ ID NO: 2022892 - RNA, 19 nt, Artificial Sequence
  Description of Artificial Sequence: Synthetic oligonucleotide
  Sense strand starting at position 3749 of SEQ ID NO: 1881161
uugauuucuuaccaaggaa

SEQ ID NO: 2022893 - RNA, 19 nt, Artificial Sequence
  Description of Artificial Sequence: Synthetic oligonucleotide
  Antisense strand to SEQ ID NO: 2022892
uuccuugguaagaaaucaa

SEQ ID NO: 2022894 - RNA, 19 nt, Artificial Sequence
  Description of Artificial Sequence: Synthetic oligonucleotide
  Sense strand starting at position 3800 of SEQ ID NO: 1881161
ugugaaugugaucauucuc

SEQ ID NO: 2022895 - RNA, 19 nt, Artificial Sequence
  Description of Artificial Sequence: Synthetic oligonucleotide
  Antisense strand to SEQ ID NO: 2022894
gagaaugaucacauucaca

SEQ ID NO: 2022896 - RNA, 19 nt, Artificial Sequence
  Description of Artificial Sequence: Synthetic oligonucleotide
  Sense strand starting at position 3835 of SEQ ID NO: 1881161
auccaugaauccuugugau

SEQ ID NO: 2022897 - RNA, 19 nt, Artificial Sequence
  Description of Artificial Sequence: Synthetic oligonucleotide
  Antisense strand to SEQ ID NO: 2022896
aucacaaggauucauggau

SEQ ID NO: 2022898 - RNA, 19 nt, Artificial Sequence
  Description of Artificial Sequence: Synthetic oligonucleotide
  Sense strand starting at position 3869 of SEQ ID NO: 1881161
uaggacugucacgagaagu

SEQ ID NO: 2022899 - RNA, 19 nt, Artificial Sequence
  Description of Artificial Sequence: Synthetic oligonucleotide
  Antisense strand to SEQ ID NO: 2022898
acuucucgugacaguccua

SEQ ID NO: 2022900 - RNA, 19 nt, Artificial Sequence
  Description of Artificial Sequence: Synthetic oligonucleotide
  Sense strand starting at position 3875 of SEQ ID NO: 1881161
ugucacgagaaguaagauu

SEQ ID NO: 2022901 - RNA, 19 nt, Artificial Sequence
  Description of Artificial Sequence: Synthetic oligonucleotide
  Antisense strand to SEQ ID NO: 2022900
aaucuuacuucucgugaca

SEQ ID NO: 2022902 - RNA, 19 nt, Artificial Sequence
  Description of Artificial Sequence: Synthetic oligonucleotide
  Sense strand starting at position 25 of SEQ ID NO: 1881162
ugcucugacuucuuagaga

SEQ ID NO: 2022903 - RNA, 19 nt, Artificial Sequence
  Description of Artificial Sequence: Synthetic oligonucleotide
  Antisense strand to SEQ ID NO: 2022902
ucucuaagaagucagagca

SEQ ID NO: 2022904 - RNA, 19 nt, Artificial Sequence
  Description of Artificial Sequence: Synthetic oligonucleotide
  Sense strand starting at position 32 of SEQ ID NO: 1881162
acuucuuagagauggcaga

SEQ ID NO: 2022905 - RNA, 19 nt, Artificial Sequence
  Description of Artificial Sequence: Synthetic oligonucleotide
  Antisense strand to SEQ ID NO: 2022904
ucugccaucucuaagaagu

SEQ ID NO: 2022906 - RNA, 19 nt, Artificial Sequence
  Description of Artificial Sequence: Synthetic oligonucleotide
  Sense strand starting at position 33 of SEQ ID NO: 1881162
cuucuuagagauggcagaa

SEQ ID NO: 2022907 - RNA, 19 nt, Artificial Sequence
  Description of Artificial Sequence: Synthetic oligonucleotide
  Antisense strand to SEQ ID NO: 2022906
uucugccaucucuaagaag

SEQ ID NO: 2022908 - RNA, 19 nt, Artificial Sequence
  Description of Artificial Sequence: Synthetic oligonucleotide
  Sense strand starting at position 150 of SEQ ID NO: 1881162
gaagaagaguccucccuuc

SEQ ID NO: 2022909 - RNA, 19 nt, Artificial Sequence
  Description of Artificial Sequence: Synthetic oligonucleotide
  Antisense strand to SEQ ID NO: 2022908
gaagggaggacucuucuuc

SEQ ID NO: 2022910 - RNA, 19 nt, Artificial Sequence
  Description of Artificial Sequence: Synthetic oligonucleotide
  Sense strand starting at position 583 of SEQ ID NO: 1881162
ggacucaucugaucugaau

SEQ ID NO: 2022911 - RNA, 19 nt, Artificial Sequence
  Description of Artificial Sequence: Synthetic oligonucleotide
  Antisense strand to SEQ ID NO: 2022910
auucagaucagaugagucc

SEQ ID NO: 2022912 - RNA, 19 nt, Artificial Sequence
  Description of Artificial Sequence: Synthetic oligonucleotide
  Sense strand starting at position 606 of SEQ ID NO: 1881162
cuuugauuugucugugcac

SEQ ID NO: 2022913 - RNA, 19 nt, Artificial Sequence
  Description of Artificial Sequence: Synthetic oligonucleotide
  Antisense strand to SEQ ID NO: 2022912
gugcacagacaaaucaaag

SEQ ID NO: 2022914 - RNA, 19 nt, Artificial Sequence
  Description of Artificial Sequence: Synthetic oligonucleotide
  Sense strand starting at position 607 of SEQ ID NO: 1881162
uuugauuugucugugcacu

SEQ ID NO: 2022915 - RNA, 19 nt, Artificial Sequence
  Description of Artificial Sequence: Synthetic oligonucleotide
  Antisense strand to SEQ ID NO: 2022914
agugcacagacaaaucaaa

SEQ ID NO: 2022916 - RNA, 19 nt, Artificial Sequence
  Description of Artificial Sequence: Synthetic oligonucleotide
  Sense strand starting at position 608 of SEQ ID NO: 1881162
uugauuugucugugcacuu

SEQ ID NO: 2022917 - RNA, 19 nt, Artificial Sequence
  Description of Artificial Sequence: Synthetic oligonucleotide
  Antisense strand to SEQ ID NO: 2022916
aagugcacagacaaaucaa

SEQ ID NO: 2022918 - RNA, 19 nt, Artificial Sequence
  Description of Artificial Sequence: Synthetic oligonucleotide
  Sense strand starting at position 726 of SEQ ID NO: 1881162
cauguugguugagugagua

SEQ ID NO: 2022919 - RNA, 19 nt, Artificial Sequence
  Description of Artificial Sequence: Synthetic oligonucleotide
  Antisense strand to SEQ ID NO: 2022918
uacucacucaaccaacaug

SEQ ID NO: 2022920 - RNA, 19 nt, Artificial Sequence
  Description of Artificial Sequence: Synthetic oligonucleotide
  Sense strand starting at position 822 of SEQ ID NO: 1881162
ccuuguuccuuucugggau

SEQ ID NO: 2022921 - RNA, 19 nt, Artificial Sequence
  Description of Artificial Sequence: Synthetic oligonucleotide
  Antisense strand to SEQ ID NO: 2022920
aucccagaaaggaacaagg

SEQ ID NO: 2022922 - RNA, 19 nt, Artificial Sequence
  Description of Artificial Sequence: Synthetic oligonucleotide
  Sense strand starting at position 952 of SEQ ID NO: 1881162
cuccaaguaucccuggcaa

SEQ ID NO: 2022923 - RNA, 19 nt, Artificial Sequence
  Description of Artificial Sequence: Synthetic oligonucleotide
  Antisense strand to SEQ ID NO: 2022922
uugccagggauacuuggag

SEQ ID NO: 2022924 - RNA, 19 nt, Artificial Sequence
  Description of Artificial Sequence: Synthetic oligonucleotide
  Sense strand starting at position 954 of SEQ ID NO: 1881162
ccaaguaucccuggcaaca

SEQ ID NO: 2022925 - RNA, 19 nt, Artificial Sequence
  Description of Artificial Sequence: Synthetic oligonucleotide
  Antisense strand to SEQ ID NO: 2022924
uguugccagggauacuugg

SEQ ID NO: 2022926 - RNA, 19 nt, Artificial Sequence
  Description of Artificial Sequence: Synthetic oligonucleotide
  Sense strand starting at position 1138 of SEQ ID NO: 1881162
gccaucuugucaccuugaa

SEQ ID NO: 2022927 - RNA, 19 nt, Artificial Sequence
  Description of Artificial Sequence: Synthetic oligonucleotide
  Antisense strand to SEQ ID NO: 2022926
uucaaggugacaagauggc

SEQ ID NO: 2022928 - RNA, 19 nt, Artificial Sequence
  Description of Artificial Sequence: Synthetic oligonucleotide
  Sense strand starting at position 1355 of SEQ ID NO: 1881162
agcugugaagucgauauaa

SEQ ID NO: 2022929 - RNA, 19 nt, Artificial Sequence
  Description of Artificial Sequence: Synthetic oligonucleotide
  Antisense strand to SEQ ID NO: 2022928
uuauaucgacuucacagcu

SEQ ID NO: 2022930 - RNA, 19 nt, Artificial Sequence
  Description of Artificial Sequence: Synthetic oligonucleotide
  Sense strand starting at position 1357 of SEQ ID NO: 1881162
cugugaagucgauauaaua

SEQ ID NO: 2022931 - RNA, 19 nt, Artificial Sequence
  Description of Artificial Sequence: Synthetic oligonucleotide
  Antisense strand to SEQ ID NO: 2022930
uauuauaucgacuucacag

SEQ ID NO: 2022932 - RNA, 19 nt, Artificial Sequence
  Description of Artificial Sequence: Synthetic oligonucleotide
  Sense strand starting at position 1594 of SEQ ID NO: 1881162
cccagaauguacuuguauu

SEQ ID NO: 2022933 - RNA, 19 nt, Artificial Sequence
  Description of Artificial Sequence: Synthetic oligonucleotide
  Antisense strand to SEQ ID NO: 2022932
aauacaaguacauucuggg

SEQ ID NO: 2022934 - RNA, 19 nt, Artificial Sequence
  Description of Artificial Sequence: Synthetic oligonucleotide
  Sense strand starting at position 1656 of SEQ ID NO: 1881162
ccagauuuaugauaggcua

SEQ ID NO: 2022935 - RNA, 19 nt, Artificial Sequence
  Description of Artificial Sequence: Synthetic oligonucleotide
  Antisense strand to SEQ ID NO: 2022934
uagccuaucauaaaucugg

SEQ ID NO: 2022936 - RNA, 19 nt, Artificial Sequence
  Description of Artificial Sequence: Synthetic oligonucleotide
  Sense strand starting at position 1706 of SEQ ID NO: 1881162
uauacugcccuauggugaa

SEQ ID NO: 2022937 - RNA, 19 nt, Artificial Sequence
  Description of Artificial Sequence: Synthetic oligonucleotide
  Antisense strand to SEQ ID NO: 2022936
uucaccauagggcaguaua

SEQ ID NO: 2022938 - RNA, 19 nt, Artificial Sequence
  Description of Artificial Sequence: Synthetic oligonucleotide
  Sense strand starting at position 1730 of SEQ ID NO: 1881162
agagguggaaucuggagua

SEQ ID NO: 2022939 - RNA, 19 nt, Artificial Sequence
  Description of Artificial Sequence: Synthetic oligonucleotide
  Antisense strand to SEQ ID NO: 2022938
uacuccagauuccaccucu

SEQ ID NO: 2022940 - RNA, 19 nt, Artificial Sequence
  Description of Artificial Sequence: Synthetic oligonucleotide
  Sense strand starting at position 1810 of SEQ ID NO: 1881162
acaaauacuguguggcaaa

SEQ ID NO: 2022941 - RNA, 19 nt, Artificial Sequence
  Description of Artificial Sequence: Synthetic oligonucleotide
  Antisense strand to SEQ ID NO: 2022940
uuugccacacaguauuugu

SEQ ID NO: 2022942 - RNA, 19 nt, Artificial Sequence
  Description of Artificial Sequence: Synthetic oligonucleotide
  Sense strand starting at position 1817 of SEQ ID NO: 1881162
cuguguggcaaauauaaga

SEQ ID NO: 2022943 - RNA, 19 nt, Artificial Sequence
  Description of Artificial Sequence: Synthetic oligonucleotide
  Antisense strand to SEQ ID NO: 2022942
ucuuauauuugccacacag

SEQ ID NO: 2022944 - RNA, 19 nt, Artificial Sequence
  Description of Artificial Sequence: Synthetic oligonucleotide
  Sense strand starting at position 2296 of SEQ ID NO: 1881162
aggagcugcucuuugauca

SEQ ID NO: 2022945 - RNA, 19 nt, Artificial Sequence
  Description of Artificial Sequence: Synthetic oligonucleotide
  Antisense strand to SEQ ID NO: 2022944
ugaucaaagagcagcuccu

SEQ ID NO: 2022946 - RNA, 19 nt, Artificial Sequence
  Description of Artificial Sequence: Synthetic oligonucleotide
  Sense strand starting at position 2378 of SEQ ID NO: 1881162
aaggaaagagcucgugaug

SEQ ID NO: 2022947 - RNA, 19 nt, Artificial Sequence
  Description of Artificial Sequence: Synthetic oligonucleotide
  Antisense strand to SEQ ID NO: 2022946
caucacgagcucuuuccuu

SEQ ID NO: 2022948 - RNA, 19 nt, Artificial Sequence
  Description of Artificial Sequence: Synthetic oligonucleotide
  Sense strand starting at position 2387 of SEQ ID NO: 1881162
gcucgugauguccauggaa

SEQ ID NO: 2022949 - RNA, 19 nt, Artificial Sequence
  Description of Artificial Sequence: Synthetic oligonucleotide
  Antisense strand to SEQ ID NO: 2022948
uuccauggacaucacgagc

SEQ ID NO: 2022950 - RNA, 19 nt, Artificial Sequence
  Description of Artificial Sequence: Synthetic oligonucleotide
  Sense strand starting at position 2389 of SEQ ID NO: 1881162
ucgugauguccauggaauu

SEQ ID NO: 2022951 - RNA, 19 nt, Artificial Sequence
  Description of Artificial Sequence: Synthetic oligonucleotide
  Antisense strand to SEQ ID NO: 2022950
aauuccauggacaucacga

SEQ ID NO: 2022952 - RNA, 19 nt, Artificial Sequence
  Description of Artificial Sequence: Synthetic oligonucleotide
  Sense strand starting at position 2390 of SEQ ID NO: 1881162
cgugauguccauggaauuc

SEQ ID NO: 2022953 - RNA, 19 nt, Artificial Sequence
  Description of Artificial Sequence: Synthetic oligonucleotide
  Antisense strand to SEQ ID NO: 2022952
gaauuccauggacaucacg

SEQ ID NO: 2022954 - RNA, 19 nt, Artificial Sequence
  Description of Artificial Sequence: Synthetic oligonucleotide
  Sense strand starting at position 2495 of SEQ ID NO: 1881162
ggcagagagcuccaucauc

SEQ ID NO: 2022955 - RNA, 19 nt, Artificial Sequence
  Description of Artificial Sequence: Synthetic oligonucleotide
  Antisense strand to SEQ ID NO: 2022954
gaugauggagcucucugcc

SEQ ID NO: 2022956 - RNA, 19 nt, Artificial Sequence
  Description of Artificial Sequence: Synthetic oligonucleotide
  Sense strand starting at position 2640 of SEQ ID NO: 1881162
guucucauuuguuuaucuu

SEQ ID NO: 2022957 - RNA, 19 nt, Artificial Sequence
  Description of Artificial Sequence: Synthetic oligonucleotide
  Antisense strand to SEQ ID NO: 2022956
aagauaaacaaaugagaac

SEQ ID NO: 2022958 - RNA, 19 nt, Artificial Sequence
  Description of Artificial Sequence: Synthetic oligonucleotide
  Sense strand starting at position 2649 of SEQ ID NO: 1881162
uguuuaucuuguguccaaa

SEQ ID NO: 2022959 - RNA, 19 nt, Artificial Sequence
  Description of Artificial Sequence: Synthetic oligonucleotide
  Antisense strand to SEQ ID NO: 2022958
uuuggacacaagauaaaca

SEQ ID NO: 2022960 - RNA, 19 nt, Artificial Sequence
  Description of Artificial Sequence: Synthetic oligonucleotide
  Sense strand starting at position 2651 of SEQ ID NO: 1881162
uuuaucuuguguccaaagu

SEQ ID NO: 2022961 - RNA, 19 nt, Artificial Sequence
  Description of Artificial Sequence: Synthetic oligonucleotide
  Antisense strand to SEQ ID NO: 2022960
acuuuggacacaagauaaa

SEQ ID NO: 2022962 - RNA, 19 nt, Artificial Sequence
  Description of Artificial Sequence: Synthetic oligonucleotide
  Sense strand starting at position 2686 of SEQ ID NO: 1881162
ccacucuauuucuugugua

SEQ ID NO: 2022963 - RNA, 19 nt, Artificial Sequence
  Description of Artificial Sequence: Synthetic oligonucleotide
  Antisense strand to SEQ ID NO: 2022962
uacacaagaaauagagugg

SEQ ID NO: 2022964 - RNA, 19 nt, Artificial Sequence
  Description of Artificial Sequence: Synthetic oligonucleotide
  Sense strand starting at position 2969 of SEQ ID NO: 1881162
guaggauaauggucccagu

SEQ ID NO: 2022965 - RNA, 19 nt, Artificial Sequence
  Description of Artificial Sequence: Synthetic oligonucleotide
  Antisense strand to SEQ ID NO: 2022964
acugggaccauuauccuac

SEQ ID NO: 2022966 - RNA, 19 nt, Artificial Sequence
  Description of Artificial Sequence: Synthetic oligonucleotide
  Sense strand starting at position 3071 of SEQ ID NO: 1881162
gcacaacugugaucccauc

SEQ ID NO: 2022967 - RNA, 19 nt, Artificial Sequence
  Description of Artificial Sequence: Synthetic oligonucleotide
  Antisense strand to SEQ ID NO: 2022966
gaugggaucacaguugugc

SEQ ID NO: 2022968 - RNA, 19 nt, Artificial Sequence
  Description of Artificial Sequence: Synthetic oligonucleotide
  Sense strand starting at position 3344 of SEQ ID NO: 1881162
aaguguacccuucggagga

SEQ ID NO: 2022969 - RNA, 19 nt, Artificial Sequence
  Description of Artificial Sequence: Synthetic oligonucleotide
  Antisense strand to SEQ ID NO: 2022968
uccuccgaaggguacacuu

SEQ ID NO: 2022970 - RNA, 19 nt, Artificial Sequence
  Description of Artificial Sequence: Synthetic oligonucleotide
  Sense strand starting at position 3348 of SEQ ID NO: 1881162
guacccuucggaggaagau

SEQ ID NO: 2022971 - RNA, 19 nt, Artificial Sequence
  Description of Artificial Sequence: Synthetic oligonucleotide
  Antisense strand to SEQ ID NO: 2022970
aucuuccuccgaaggguac

SEQ ID NO: 2022972 - RNA, 19 nt, Artificial Sequence
  Description of Artificial Sequence: Synthetic oligonucleotide
  Sense strand starting at position 3379 of SEQ ID NO: 1881162
gaaggugacgugggagaua

SEQ ID NO: 2022973 - RNA, 19 nt, Artificial Sequence
  Description of Artificial Sequence: Synthetic oligonucleotide
  Antisense strand to SEQ ID NO: 2022972
uaucucccacgucaccuuc

SEQ ID NO: 2022974 - RNA, 19 nt, Artificial Sequence
  Description of Artificial Sequence: Synthetic oligonucleotide
  Sense strand starting at position 3412 of SEQ ID NO: 1881162
ggugacuuggcauaucaug

SEQ ID NO: 2022975 - RNA, 19 nt, Artificial Sequence
  Description of Artificial Sequence: Synthetic oligonucleotide
  Antisense strand to SEQ ID NO: 2022974
caugauaugccaagucacc

SEQ ID NO: 2022976 - RNA, 19 nt, Artificial Sequence
  Description of Artificial Sequence: Synthetic oligonucleotide
  Sense strand starting at position 3443 of SEQ ID NO: 1881162
acaugacgucccgcguaua

SEQ ID NO: 2022977 - RNA, 19 nt, Artificial Sequence
  Description of Artificial Sequence: Synthetic oligonucleotide
  Antisense strand to SEQ ID NO: 2022976
uauacgcgggacgucaugu

SEQ ID NO: 2022978 - RNA, 19 nt, Artificial Sequence
  Description of Artificial Sequence: Synthetic oligonucleotide
  Sense strand starting at position 3474 of SEQ ID NO: 1881162
guguuaaagcuccaaguuc

SEQ ID NO: 2022979 - RNA, 19 nt, Artificial Sequence
  Description of Artificial Sequence: Synthetic oligonucleotide
  Antisense strand to SEQ ID NO: 2022978
gaacuuggagcuuuaacac

SEQ ID NO: 2022980 - RNA, 19 nt, Artificial Sequence
  Description of Artificial Sequence: Synthetic oligonucleotide
  Sense strand starting at position 3958 of SEQ ID NO: 1881162
gaucauggcugagcacaua

SEQ ID NO: 2022981 - RNA, 19 nt, Artificial Sequence
  Description of Artificial Sequence: Synthetic oligonucleotide
  Antisense strand to SEQ ID NO: 2022980
uaugugcucagccaugauc

SEQ ID NO: 2022982 - RNA, 19 nt, Artificial Sequence
  Description of Artificial Sequence: Synthetic oligonucleotide
  Sense strand starting at position 33 of SEQ ID NO: 1881163
ccuagacuguuguugagaa

SEQ ID NO: 2022983 - RNA, 19 nt, Artificial Sequence
  Description of Artificial Sequence: Synthetic oligonucleotide
  Antisense strand to SEQ ID NO: 2022982
uucucaacaacagucuagg

SEQ ID NO: 2022984 - RNA, 19 nt, Artificial Sequence
  Description of Artificial Sequence: Synthetic oligonucleotide
  Sense strand starting at position 34 of SEQ ID NO: 1881163
cuagacuguuguugagaau

SEQ ID NO: 2022985 - RNA, 19 nt, Artificial Sequence
  Description of Artificial Sequence: Synthetic oligonucleotide
  Antisense strand to SEQ ID NO: 2022984
auucucaacaacagucuag

SEQ ID NO: 2022986 - RNA, 19 nt, Artificial Sequence
  Description of Artificial Sequence: Synthetic oligonucleotide
  Sense strand starting at position 37 of SEQ ID NO: 1881163
gacuguuguugagaauacu

SEQ ID NO: 2022987 - RNA, 19 nt, Artificial Sequence
  Description of Artificial Sequence: Synthetic oligonucleotide
  Antisense strand to SEQ ID NO: 2022986
aguauucucaacaacaguc

SEQ ID NO: 2022988 - RNA, 19 nt, Artificial Sequence
  Description of Artificial Sequence: Synthetic oligonucleotide
  Sense strand starting at position 40 of SEQ ID NO: 1881163
uguuguugagaauacucga

SEQ ID NO: 2022989 - RNA, 19 nt, Artificial Sequence
  Description of Artificial Sequence: Synthetic oligonucleotide
  Antisense strand to SEQ ID NO: 2022988
ucgaguauucucaacaaca

SEQ ID NO: 2022990 - RNA, 19 nt, Artificial Sequence
  Description of Artificial Sequence: Synthetic oligonucleotide
  Sense strand starting at position 182 of SEQ ID NO: 1881163
ucccauauccugugggauc

SEQ ID NO: 2022991 - RNA, 19 nt, Artificial Sequence
  Description of Artificial Sequence: Synthetic oligonucleotide
  Antisense strand to SEQ ID NO: 2022990
gaucccacaggauauggga

SEQ ID NO: 2022992 - RNA, 19 nt, Artificial Sequence
  Description of Artificial Sequence: Synthetic oligonucleotide
  Sense strand starting at position 184 of SEQ ID NO: 1881163
ccauauccugugggaucuu

SEQ ID NO: 2022993 - RNA, 19 nt, Artificial Sequence
  Description of Artificial Sequence: Synthetic oligonucleotide
  Antisense strand to SEQ ID NO: 2022992
aagaucccacaggauaugg

SEQ ID NO: 2022994 - RNA, 19 nt, Artificial Sequence
  Description of Artificial Sequence: Synthetic oligonucleotide
  Sense strand starting at position 193 of SEQ ID NO: 1881163
gugggaucuugcuuccuca

SEQ ID NO: 2022995 - RNA, 19 nt, Artificial Sequence
  Description of Artificial Sequence: Synthetic oligonucleotide
  Antisense strand to SEQ ID NO: 2022994
ugaggaagcaagaucccac

SEQ ID NO: 2022996 - RNA, 19 nt, Artificial Sequence
  Description of Artificial Sequence: Synthetic oligonucleotide
  Sense strand starting at position 200 of SEQ ID NO: 1881163
cuugcuuccucauaggacu

SEQ ID NO: 2022997 - RNA, 19 nt, Artificial Sequence
  Description of Artificial Sequence: Synthetic oligonucleotide
  Antisense strand to SEQ ID NO: 2022996
aguccuaugaggaagcaag

SEQ ID NO: 2022998 - RNA, 19 nt, Artificial Sequence
  Description of Artificial Sequence: Synthetic oligonucleotide
  Sense strand starting at position 249 of SEQ ID NO: 1881163
ggcucuaaguccuaccuga

SEQ ID NO: 2022999 - RNA, 19 nt, Artificial Sequence
  Description of Artificial Sequence: Synthetic oligonucleotide
  Antisense strand to SEQ ID NO: 2022998
ucagguaggacuuagagcc

SEQ ID NO: 2023000 - RNA, 19 nt, Artificial Sequence
  Description of Artificial Sequence: Synthetic oligonucleotide
  Sense strand starting at position 267 of SEQ ID NO: 1881163
agccaagaguucuuuccau

SEQ ID NO: 2023001 - RNA, 19 nt, Artificial Sequence
  Description of Artificial Sequence: Synthetic oligonucleotide
  Antisense strand to SEQ ID NO: 2023000
auggaaagaacucuuggcu

SEQ ID NO: 2023002 - RNA, 19 nt, Artificial Sequence
  Description of Artificial Sequence: Synthetic oligonucleotide
  Sense strand starting at position 271 of SEQ ID NO: 1881163
aagaguucuuuccaugcag

SEQ ID NO: 2023003 - RNA, 19 nt, Artificial Sequence
  Description of Artificial Sequence: Synthetic oligonucleotide
  Antisense strand to SEQ ID NO: 2023002
cugcauggaaagaacucuu

SEQ ID NO: 2023004 - RNA, 19 nt, Artificial Sequence
  Description of Artificial Sequence: Synthetic oligonucleotide
  Sense strand starting at position 273 of SEQ ID NO: 1881163
gaguucuuuccaugcagcu

SEQ ID NO: 2023005 - RNA, 19 nt, Artificial Sequence
  Description of Artificial Sequence: Synthetic oligonucleotide
  Antisense strand to SEQ ID NO: 2023004
agcugcauggaaagaacuc

SEQ ID NO: 2023006 - RNA, 19 nt, Artificial Sequence
  Description of Artificial Sequence: Synthetic oligonucleotide
  Sense strand starting at position 690 of SEQ ID NO: 1881163
uccuuuauguauuccguau

SEQ ID NO: 2023007 - RNA, 19 nt, Artificial Sequence
  Description of Artificial Sequence: Synthetic oligonucleotide
  Antisense strand to SEQ ID NO: 2023006
auacggaauacauaaagga

SEQ ID NO: 2023008 - RNA, 19 nt, Artificial Sequence
  Description of Artificial Sequence: Synthetic oligonucleotide
  Sense strand starting at position 710 of SEQ ID NO: 1881163
cccauuuccucuguuguua

SEQ ID NO: 2023009 - RNA, 19 nt, Artificial Sequence
  Description of Artificial Sequence: Synthetic oligonucleotide
  Antisense strand to SEQ ID NO: 2023008
uaacaacagaggaaauggg

SEQ ID NO: 2023010 - RNA, 19 nt, Artificial Sequence
  Description of Artificial Sequence: Synthetic oligonucleotide
  Sense strand starting at position 718 of SEQ ID NO: 1881163
cucuguuguuaacaucuua

SEQ ID NO: 2023011 - RNA, 19 nt, Artificial Sequence
  Description of Artificial Sequence: Synthetic oligonucleotide
  Antisense strand to SEQ ID NO: 2023010
uaagauguuaacaacagag

SEQ ID NO: 2023012 - RNA, 19 nt, Artificial Sequence
  Description of Artificial Sequence: Synthetic oligonucleotide
  Sense strand starting at position 740 of SEQ ID NO: 1881163
auugcauuggugugguaca

SEQ ID NO: 2023013 - RNA, 19 nt, Artificial Sequence
  Description of Artificial Sequence: Synthetic oligonucleotide
  Antisense strand to SEQ ID NO: 2023012
uguaccacaccaaugcaau

SEQ ID NO: 2023014 - RNA, 19 nt, Artificial Sequence
  Description of Artificial Sequence: Synthetic oligonucleotide
  Sense strand starting at position 750 of SEQ ID NO: 1881163
ugugguacauuuguuauca

SEQ ID NO: 2023015 - RNA, 19 nt, Artificial Sequence
  Description of Artificial Sequence: Synthetic oligonucleotide
  Antisense strand to SEQ ID NO: 2023014
ugauaacaaauguaccaca

SEQ ID NO: 2023016 - RNA, 19 nt, Artificial Sequence
  Description of Artificial Sequence: Synthetic oligonucleotide
  Sense strand starting at position 777 of SEQ ID NO: 1881163
acuauacugguauguuauu

SEQ ID NO: 2023017 - RNA, 19 nt, Artificial Sequence
  Description of Artificial Sequence: Synthetic oligonucleotide
  Antisense strand to SEQ ID NO: 2023016
aauaacauaccaguauagu

SEQ ID NO: 2023018 - RNA, 19 nt, Artificial Sequence
  Description of Artificial Sequence: Synthetic oligonucleotide
  Sense strand starting at position 778 of SEQ ID NO: 1881163
cuauacugguauguuauua

SEQ ID NO: 2023019 - RNA, 19 nt, Artificial Sequence
  Description of Artificial Sequence: Synthetic oligonucleotide
  Antisense strand to SEQ ID NO: 2023018
uaauaacauaccaguauag

SEQ ID NO: 2023020 - RNA, 19 nt, Artificial Sequence
  Description of Artificial Sequence: Synthetic oligonucleotide
  Sense strand starting at position 1019 of SEQ ID NO: 1881163
uuuguaaagcuauggucuu

SEQ ID NO: 2023021 - RNA, 19 nt, Artificial Sequence
  Description of Artificial Sequence: Synthetic oligonucleotide
  Antisense strand to SEQ ID NO: 2023020
aagaccauagcuuuacaaa

SEQ ID NO: 2023022 - RNA, 19 nt, Artificial Sequence
  Description of Artificial Sequence: Synthetic oligonucleotide
  Sense strand starting at position 1160 of SEQ ID NO: 1881163
ugcacaggucuacaaguuu

SEQ ID NO: 2023023 - RNA, 19 nt, Artificial Sequence
  Description of Artificial Sequence: Synthetic oligonucleotide
  Antisense strand to SEQ ID NO: 2023022
aaacuuguagaccugugca

SEQ ID NO: 2023024 - RNA, 19 nt, Artificial Sequence
  Description of Artificial Sequence: Synthetic oligonucleotide
  Sense strand starting at position 1195 of SEQ ID NO: 1881163
cuguguauccaccaguaaa

SEQ ID NO: 2023025 - RNA, 19 nt, Artificial Sequence
  Description of Artificial Sequence: Synthetic oligonucleotide
  Antisense strand to SEQ ID NO: 2023024
uuuacugguggauacacag

SEQ ID NO: 2023026 - RNA, 19 nt, Artificial Sequence
  Description of Artificial Sequence: Synthetic oligonucleotide
  Sense strand starting at position 1198 of SEQ ID NO: 1881163
uguauccaccaguaaagua

SEQ ID NO: 2023027 - RNA, 19 nt, Artificial Sequence
  Description of Artificial Sequence: Synthetic oligonucleotide
  Antisense strand to SEQ ID NO: 2023026
uacuuuacugguggauaca

SEQ ID NO: 2023028 - RNA, 19 nt, Artificial Sequence
  Description of Artificial Sequence: Synthetic oligonucleotide
  Sense strand starting at position 1508 of SEQ ID NO: 1881163
guaugaguguaccagguua

SEQ ID NO: 2023029 - RNA, 19 nt, Artificial Sequence
  Description of Artificial Sequence: Synthetic oligonucleotide
  Antisense strand to SEQ ID NO: 2023028
uaaccugguacacucauac

SEQ ID NO: 2023030 - RNA, 19 nt, Artificial Sequence
  Description of Artificial Sequence: Synthetic oligonucleotide
  Sense strand starting at position 1510 of SEQ ID NO: 1881163
augaguguaccagguuauc

SEQ ID NO: 2023031 - RNA, 19 nt, Artificial Sequence
  Description of Artificial Sequence: Synthetic oligonucleotide
  Antisense strand to SEQ ID NO: 2023030
gauaaccugguacacucau

SEQ ID NO: 2023032 - RNA, 19 nt, Artificial Sequence
  Description of Artificial Sequence: Synthetic oligonucleotide
  Sense strand starting at position 2154 of SEQ ID NO: 1881163
auuuacaauugcugagcua

SEQ ID NO: 2023033 - RNA, 19 nt, Artificial Sequence
  Description of Artificial Sequence: Synthetic oligonucleotide
  Antisense strand to SEQ ID NO: 2023032
uagcucagcaauuguaaau

SEQ ID NO: 2023034 - RNA, 19 nt, Artificial Sequence
  Description of Artificial Sequence: Synthetic oligonucleotide
  Sense strand starting at position 2216 of SEQ ID NO: 1881163
gaaugucaauuggugcauu

SEQ ID NO: 2023035 - RNA, 19 nt, Artificial Sequence
  Description of Artificial Sequence: Synthetic oligonucleotide
  Antisense strand to SEQ ID NO: 2023034
aaugcaccaauugacauuc

SEQ ID NO: 2023036 - RNA, 19 nt, Artificial Sequence
  Description of Artificial Sequence: Synthetic oligonucleotide
  Sense strand starting at position 3112 of SEQ ID NO: 1881163
guggauauauuguuaaacu

SEQ ID NO: 2023037 - RNA, 19 nt, Artificial Sequence
  Description of Artificial Sequence: Synthetic oligonucleotide
  Antisense strand to SEQ ID NO: 2023036
aguuuaacaauauauccac

SEQ ID NO: 2023038 - RNA, 19 nt, Artificial Sequence
  Description of Artificial Sequence: Synthetic oligonucleotide
  Sense strand starting at position 3113 of SEQ ID NO: 1881163
uggauauauuguuaaacuc

SEQ ID NO: 2023039 - RNA, 19 nt, Artificial Sequence
  Description of Artificial Sequence: Synthetic oligonucleotide
  Antisense strand to SEQ ID NO: 2023038
gaguuuaacaauauaucca

SEQ ID NO: 2023040 - RNA, 19 nt, Artificial Sequence
  Description of Artificial Sequence: Synthetic oligonucleotide
  Sense strand starting at position 3150 of SEQ ID NO: 1881163
acuggaucauauggcaaga

SEQ ID NO: 2023041 - RNA, 19 nt, Artificial Sequence
  Description of Artificial Sequence: Synthetic oligonucleotide
  Antisense strand to SEQ ID NO: 2023040
ucuugccauaugauccagu

SEQ ID NO: 2023042 - RNA, 19 nt, Artificial Sequence
  Description of Artificial Sequence: Synthetic oligonucleotide
  Sense strand starting at position 3152 of SEQ ID NO: 1881163
uggaucauauggcaagacu

SEQ ID NO: 2023043 - RNA, 19 nt, Artificial Sequence
  Description of Artificial Sequence: Synthetic oligonucleotide
  Antisense strand to SEQ ID NO: 2023042
agucuugccauaugaucca

SEQ ID NO: 2023044 - RNA, 19 nt, Artificial Sequence
  Description of Artificial Sequence: Synthetic oligonucleotide
  Sense strand starting at position 3161 of SEQ ID NO: 1881163
uggcaagacuguuuagcuu

SEQ ID NO: 2023045 - RNA, 19 nt, Artificial Sequence
  Description of Artificial Sequence: Synthetic oligonucleotide
  Antisense strand to SEQ ID NO: 2023044
aagcuaaacagucuugcca

SEQ ID NO: 2023046 - RNA, 19 nt, Artificial Sequence
  Description of Artificial Sequence: Synthetic oligonucleotide
  Sense strand starting at position 3165 of SEQ ID NO: 1881163
aagacuguuuagcuuugaa

SEQ ID NO: 2023047 - RNA, 19 nt, Artificial Sequence
  Description of Artificial Sequence: Synthetic oligonucleotide
  Antisense strand to SEQ ID NO: 2023046
uucaaagcuaaacagucuu

SEQ ID NO: 2023048 - RNA, 19 nt, Artificial Sequence
  Description of Artificial Sequence: Synthetic oligonucleotide
  Sense strand starting at position 3393 of SEQ ID NO: 1881163
augucuauuugccauccau

SEQ ID NO: 2023049 - RNA, 19 nt, Artificial Sequence
  Description of Artificial Sequence: Synthetic oligonucleotide
  Antisense strand to SEQ ID NO: 2023048
auggauggcaaauagacau

SEQ ID NO: 2023050 - RNA, 19 nt, Artificial Sequence
  Description of Artificial Sequence: Synthetic oligonucleotide
  Sense strand starting at position 3425 of SEQ ID NO: 1881163
ugaggaguuuguucagauc

SEQ ID NO: 2023051 - RNA, 19 nt, Artificial Sequence
  Description of Artificial Sequence: Synthetic oligonucleotide
  Antisense strand to SEQ ID NO: 2023050
gaucugaacaaacuccuca

SEQ ID NO: 2023052 - RNA, 19 nt, Artificial Sequence
  Description of Artificial Sequence: Synthetic oligonucleotide
  Sense strand starting at position 3800 of SEQ ID NO: 1881163
ucagaauucuuuguauaug

SEQ ID NO: 2023053 - RNA, 19 nt, Artificial Sequence
  Description of Artificial Sequence: Synthetic oligonucleotide
  Antisense strand to SEQ ID NO: 2023052
cauauacaaagaauucuga

SEQ ID NO: 2023054 - RNA, 19 nt, Artificial Sequence
  Description of Artificial Sequence: Synthetic oligonucleotide
  Sense strand starting at position 3809 of SEQ ID NO: 1881163
uuuguauauguuggaugua

SEQ ID NO: 2023055 - RNA, 19 nt, Artificial Sequence
  Description of Artificial Sequence: Synthetic oligonucleotide
  Antisense strand to SEQ ID NO: 2023054
uacauccaacauauacaaa

SEQ ID NO: 2023056 - RNA, 19 nt, Artificial Sequence
  Description of Artificial Sequence: Synthetic oligonucleotide
  Sense strand starting at position 3812 of SEQ ID NO: 1881163
guauauguuggauguaguc

SEQ ID NO: 2023057 - RNA, 19 nt, Artificial Sequence
  Description of Artificial Sequence: Synthetic oligonucleotide
  Antisense strand to SEQ ID NO: 2023056
gacuacauccaacauauac

SEQ ID NO: 2023058 - RNA, 19 nt, Artificial Sequence
  Description of Artificial Sequence: Synthetic oligonucleotide
  Sense strand starting at position 3822 of SEQ ID NO: 1881163
gauguaguccuuugucaaa

SEQ ID NO: 2023059 - RNA, 19 nt, Artificial Sequence
  Description of Artificial Sequence: Synthetic oligonucleotide
  Antisense strand to SEQ ID NO: 2023058
uuugacaaaggacuacauc

SEQ ID NO: 2023060 - RNA, 19 nt, Artificial Sequence
  Description of Artificial Sequence: Synthetic oligonucleotide
  Sense strand starting at position 3824 of SEQ ID NO: 1881163
uguaguccuuugucaaaua

SEQ ID NO: 2023061 - RNA, 19 nt, Artificial Sequence
  Description of Artificial Sequence: Synthetic oligonucleotide
  Antisense strand to SEQ ID NO: 2023060
uauuugacaaaggacuaca

SEQ ID NO: 2023062 - RNA, 19 nt, Artificial Sequence
  Description of Artificial Sequence: Synthetic oligonucleotide
  Sense strand starting at position 1993 of SEQ ID NO: 1881164
ccuuucuccugugaaugga

SEQ ID NO: 2023063 - RNA, 19 nt, Artificial Sequence
  Description of Artificial Sequence: Synthetic oligonucleotide
  Antisense strand to SEQ ID NO: 2023062
uccauucacaggagaaagg

SEQ ID NO: 2023064 - RNA, 19 nt, Artificial Sequence
  Description of Artificial Sequence: Synthetic oligonucleotide
  Sense strand starting at position 2033 of SEQ ID NO: 1881164
guuacugugguuguguuua

SEQ ID NO: 2023065 - RNA, 19 nt, Artificial Sequence
  Description of Artificial Sequence: Synthetic oligonucleotide
  Antisense strand to SEQ ID NO: 2023064
uaaacacaaccacaguaac

SEQ ID NO: 2023066 - RNA, 19 nt, Artificial Sequence
  Description of Artificial Sequence: Synthetic oligonucleotide
  Sense strand starting at position 2035 of SEQ ID NO: 1881164
uacugugguuguguuuaua

SEQ ID NO: 2023067 - RNA, 19 nt, Artificial Sequence
  Description of Artificial Sequence: Synthetic oligonucleotide
  Antisense strand to SEQ ID NO: 2023066
uauaaacacaaccacagua

SEQ ID NO: 2023068 - RNA, 19 nt, Artificial Sequence
  Description of Artificial Sequence: Synthetic oligonucleotide
  Sense strand starting at position 2038 of SEQ ID NO: 1881164
ugugguuguguuuauauca

SEQ ID NO: 2023069 - RNA, 19 nt, Artificial Sequence
  Description of Artificial Sequence: Synthetic oligonucleotide
  Antisense strand to SEQ ID NO: 2023068
ugauauaaacacaaccaca

SEQ ID NO: 2023070 - RNA, 19 nt, Artificial Sequence
  Description of Artificial Sequence: Synthetic oligonucleotide
  Sense strand starting at position 2043 of SEQ ID NO: 1881164
uuguguuuauaucagugga

SEQ ID NO: 2023071 - RNA, 19 nt, Artificial Sequence
  Description of Artificial Sequence: Synthetic oligonucleotide
  Antisense strand to SEQ ID NO: 2023070
uccacugauauaaacacaa

SEQ ID NO: 2023072 - RNA, 19 nt, Artificial Sequence
  Description of Artificial Sequence: Synthetic oligonucleotide
  Sense strand starting at position 2045 of SEQ ID NO: 1881164
guguuuauaucaguggaug

SEQ ID NO: 2023073 - RNA, 19 nt, Artificial Sequence
  Description of Artificial Sequence: Synthetic oligonucleotide
  Antisense strand to SEQ ID NO: 2023072
cauccacugauauaaacac

SEQ ID NO: 2023074 - RNA, 19 nt, Artificial Sequence
  Description of Artificial Sequence: Synthetic oligonucleotide
  Sense strand starting at position 2047 of SEQ ID NO: 1881164
guuuauaucaguggaugcu

SEQ ID NO: 2023075 - RNA, 19 nt, Artificial Sequence
  Description of Artificial Sequence: Synthetic oligonucleotide
  Antisense strand to SEQ ID NO: 2023074
agcauccacugauauaaac

SEQ ID NO: 2023076 - RNA, 19 nt, Artificial Sequence
  Description of Artificial Sequence: Synthetic oligonucleotide
  Sense strand starting at position 2116 of SEQ ID NO: 1881164
ccuuguuaguguugccaaa

SEQ ID NO: 2023077 - RNA, 19 nt, Artificial Sequence
  Description of Artificial Sequence: Synthetic oligonucleotide
  Antisense strand to SEQ ID NO: 2023076
uuuggcaacacuaacaagg

SEQ ID NO: 2023078 - RNA, 19 nt, Artificial Sequence
  Description of Artificial Sequence: Synthetic oligonucleotide
  Sense strand starting at position 2118 of SEQ ID NO: 1881164
uuguuaguguugccaaauu

SEQ ID NO: 2023079 - RNA, 19 nt, Artificial Sequence
  Description of Artificial Sequence: Synthetic oligonucleotide
  Antisense strand to SEQ ID NO: 2023078
aauuuggcaacacuaacaa

SEQ ID NO: 2023080 - RNA, 19 nt, Artificial Sequence
  Description of Artificial Sequence: Synthetic oligonucleotide
  Sense strand starting at position 2235 of SEQ ID NO: 1881164
uuaauuucuuccugcagga

SEQ ID NO: 2023081 - RNA, 19 nt, Artificial Sequence
  Description of Artificial Sequence: Synthetic oligonucleotide
  Antisense strand to SEQ ID NO: 2023080
uccugcaggaagaaauuaa

SEQ ID NO: 2023082 - RNA, 19 nt, Artificial Sequence
  Description of Artificial Sequence: Synthetic oligonucleotide
  Sense strand starting at position 2289 of SEQ ID NO: 1881164
acaggaauaugcuuccuau

SEQ ID NO: 2023083 - RNA, 19 nt, Artificial Sequence
  Description of Artificial Sequence: Synthetic oligonucleotide
  Antisense strand to SEQ ID NO: 2023082
auaggaagcauauuccugu

SEQ ID NO: 2023084 - RNA, 19 nt, Artificial Sequence
  Description of Artificial Sequence: Synthetic oligonucleotide
  Sense strand starting at position 2301 of SEQ ID NO: 1881164
uuccuauuccuuugccagu

SEQ ID NO: 2023085 - RNA, 19 nt, Artificial Sequence
  Description of Artificial Sequence: Synthetic oligonucleotide
  Antisense strand to SEQ ID NO: 2023084
acuggcaaaggaauaggaa

SEQ ID NO: 2023086 - RNA, 19 nt, Artificial Sequence
  Description of Artificial Sequence: Synthetic oligonucleotide
  Sense strand starting at position 2494 of SEQ ID NO: 1881164
ggagcucaucauggaggau

SEQ ID NO: 2023087 - RNA, 19 nt, Artificial Sequence
  Description of Artificial Sequence: Synthetic oligonucleotide
  Antisense strand to SEQ ID NO: 2023086
auccuccaugaugagcucc

SEQ ID NO: 2023088 - RNA, 19 nt, Artificial Sequence
  Description of Artificial Sequence: Synthetic oligonucleotide
  Sense strand starting at position 2506 of SEQ ID NO: 1881164
ggaggauucuggguguuga

SEQ ID NO: 2023089 - RNA, 19 nt, Artificial Sequence
  Description of Artificial Sequence: Synthetic oligonucleotide
  Antisense strand to SEQ ID NO: 2023088
ucaacacccagaauccucc

SEQ ID NO: 2023090 - RNA, 19 nt, Artificial Sequence
  Description of Artificial Sequence: Synthetic oligonucleotide
  Sense strand starting at position 2507 of SEQ ID NO: 1881164
gaggauucuggguguugau

SEQ ID NO: 2023091 - RNA, 19 nt, Artificial Sequence
  Description of Artificial Sequence: Synthetic oligonucleotide
  Antisense strand to SEQ ID NO: 2023090
aucaacacccagaauccuc

SEQ ID NO: 2023092 - RNA, 19 nt, Artificial Sequence
  Description of Artificial Sequence: Synthetic oligonucleotide
  Sense strand starting at position 2566 of SEQ ID NO: 1881164
gaagcaacuugggcuaaau

SEQ ID NO: 2023093 - RNA, 19 nt, Artificial Sequence
  Description of Artificial Sequence: Synthetic oligonucleotide
  Antisense strand to SEQ ID NO: 2023092
auuuagcccaaguugcuuc

SEQ ID NO: 2023094 - RNA, 19 nt, Artificial Sequence
  Description of Artificial Sequence: Synthetic oligonucleotide
  Sense strand starting at position 2621 of SEQ ID NO: 1881164
gcagaaugccacggccaua

SEQ ID NO: 2023095 - RNA, 19 nt, Artificial Sequence
  Description of Artificial Sequence: Synthetic oligonucleotide
  Antisense strand to SEQ ID NO: 2023094
uauggccguggcauucugc

SEQ ID NO: 2023096 - RNA, 19 nt, Artificial Sequence
  Description of Artificial Sequence: Synthetic oligonucleotide
  Sense strand starting at position 2723 of SEQ ID NO: 1881164
gugcuaaggugaguugaga

SEQ ID NO: 2023097 - RNA, 19 nt, Artificial Sequence
  Description of Artificial Sequence: Synthetic oligonucleotide
  Antisense strand to SEQ ID NO: 2023096
ucucaacucaccuuagcac

SEQ ID NO: 2023098 - RNA, 19 nt, Artificial Sequence
  Description of Artificial Sequence: Synthetic oligonucleotide
  Sense strand starting at position 2760 of SEQ ID NO: 1881164
acuguuuauugagguccua

SEQ ID NO: 2023099 - RNA, 19 nt, Artificial Sequence
  Description of Artificial Sequence: Synthetic oligonucleotide
  Antisense strand to SEQ ID NO: 2023098
uaggaccucaauaaacagu

SEQ ID NO: 2023100 - RNA, 19 nt, Artificial Sequence
  Description of Artificial Sequence: Synthetic oligonucleotide
  Sense strand starting at position 2804 of SEQ ID NO: 1881164
gcuccagaugcagaagaua

SEQ ID NO: 2023101 - RNA, 19 nt, Artificial Sequence
  Description of Artificial Sequence: Synthetic oligonucleotide
  Antisense strand to SEQ ID NO: 2023100
uaucuucugcaucuggagc

SEQ ID NO: 2023102 - RNA, 19 nt, Artificial Sequence
  Description of Artificial Sequence: Synthetic oligonucleotide
  Sense strand starting at position 3116 of SEQ ID NO: 1881164
ggccuugggcucugguaau

SEQ ID NO: 2023103 - RNA, 19 nt, Artificial Sequence
  Description of Artificial Sequence: Synthetic oligonucleotide
  Antisense strand to SEQ ID NO: 2023102
auuaccagagcccaaggcc

SEQ ID NO: 2023104 - RNA, 19 nt, Artificial Sequence
  Description of Artificial Sequence: Synthetic oligonucleotide
  Sense strand starting at position 3332 of SEQ ID NO: 1881164
ccucucuucguguugugua

SEQ ID NO: 2023105 - RNA, 19 nt, Artificial Sequence
  Description of Artificial Sequence: Synthetic oligonucleotide
  Antisense strand to SEQ ID NO: 2023104
uacacaacacgaagagagg

SEQ ID NO: 2023106 - RNA, 19 nt, Artificial Sequence
  Description of Artificial Sequence: Synthetic oligonucleotide
  Sense strand starting at position 3334 of SEQ ID NO: 1881164
ucucuucguguuguguaua

SEQ ID NO: 2023107 - RNA, 19 nt, Artificial Sequence
  Description of Artificial Sequence: Synthetic oligonucleotide
  Antisense strand to SEQ ID NO: 2023106
uauacacaacacgaagaga

SEQ ID NO: 2023108 - RNA, 19 nt, Artificial Sequence
  Description of Artificial Sequence: Synthetic oligonucleotide
  Sense strand starting at position 3337 of SEQ ID NO: 1881164
cuucguguuguguauauua

SEQ ID NO: 2023109 - RNA, 19 nt, Artificial Sequence
  Description of Artificial Sequence: Synthetic oligonucleotide
  Antisense strand to SEQ ID NO: 2023108
uaauauacacaacacgaag

SEQ ID NO: 2023110 - RNA, 19 nt, Artificial Sequence
  Description of Artificial Sequence: Synthetic oligonucleotide
  Sense strand starting at position 3339 of SEQ ID NO: 1881164
ucguguuguguauauuaga

SEQ ID NO: 2023111 - RNA, 19 nt, Artificial Sequence
  Description of Artificial Sequence: Synthetic oligonucleotide
  Antisense strand to SEQ ID NO: 2023110
ucuaauauacacaacacga

SEQ ID NO: 2023112 - RNA, 19 nt, Artificial Sequence
  Description of Artificial Sequence: Synthetic oligonucleotide
  Sense strand starting at position 3340 of SEQ ID NO: 1881164
cguguuguguauauuagag

SEQ ID NO: 2023113 - RNA, 19 nt, Artificial Sequence
  Description of Artificial Sequence: Synthetic oligonucleotide
  Antisense strand to SEQ ID NO: 2023112
cucuaauauacacaacacg

SEQ ID NO: 2023114 - RNA, 19 nt, Artificial Sequence
  Description of Artificial Sequence: Synthetic oligonucleotide
  Sense strand starting at position 3344 of SEQ ID NO: 1881164
uuguguauauuagagugga

SEQ ID NO: 2023115 - RNA, 19 nt, Artificial Sequence
  Description of Artificial Sequence: Synthetic oligonucleotide
  Antisense strand to SEQ ID NO: 2023114
uccacucuaauauacacaa

SEQ ID NO: 2023116 - RNA, 19 nt, Artificial Sequence
  Description of Artificial Sequence: Synthetic oligonucleotide
  Sense strand starting at position 3347 of SEQ ID NO: 1881164
uguauauuagaguggagag

SEQ ID NO: 2023117 - RNA, 19 nt, Artificial Sequence
  Description of Artificial Sequence: Synthetic oligonucleotide
  Antisense strand to SEQ ID NO: 2023116
cucuccacucuaauauaca

SEQ ID NO: 2023118 - RNA, 19 nt, Artificial Sequence
  Description of Artificial Sequence: Synthetic oligonucleotide
  Sense strand starting at position 3348 of SEQ ID NO: 1881164
guauauuagaguggagaga

SEQ ID NO: 2023119 - RNA, 19 nt, Artificial Sequence
  Description of Artificial Sequence: Synthetic oligonucleotide
  Antisense strand to SEQ ID NO: 2023118
ucucuccacucuaauauac

SEQ ID NO: 2023120 - RNA, 19 nt, Artificial Sequence
  Description of Artificial Sequence: Synthetic oligonucleotide
  Sense strand starting at position 3400 of SEQ ID NO: 1881164
uaugguaaaugaugugaag

SEQ ID NO: 2023121 - RNA, 19 nt, Artificial Sequence
  Description of Artificial Sequence: Synthetic oligonucleotide
  Antisense strand to SEQ ID NO: 2023120
cuucacaucauuuaccaua

SEQ ID NO: 2023122 - RNA, 19 nt, Artificial Sequence
  Description of Artificial Sequence: Synthetic oligonucleotide
  Sense strand starting at position 3663 of SEQ ID NO: 1881164
ucacgucagucauuacaua

SEQ ID NO: 2023123 - RNA, 19 nt, Artificial Sequence
  Description of Artificial Sequence: Synthetic oligonucleotide
  Antisense strand to SEQ ID NO: 2023122
uauguaaugacugacguga

SEQ ID NO: 2023124 - RNA, 19 nt, Artificial Sequence
  Description of Artificial Sequence: Synthetic oligonucleotide
  Sense strand starting at position 3704 of SEQ ID NO: 1881164
ggcagagacugucagguau

SEQ ID NO: 2023125 - RNA, 19 nt, Artificial Sequence
  Description of Artificial Sequence: Synthetic oligonucleotide
  Antisense strand to SEQ ID NO: 2023124
auaccugacagucucugcc

SEQ ID NO: 2023126 - RNA, 19 nt, Artificial Sequence
  Description of Artificial Sequence: Synthetic oligonucleotide
  Sense strand starting at position 3706 of SEQ ID NO: 1881164
cagagacugucagguaucu

SEQ ID NO: 2023127 - RNA, 19 nt, Artificial Sequence
  Description of Artificial Sequence: Synthetic oligonucleotide
  Antisense strand to SEQ ID NO: 2023126
agauaccugacagucucug

SEQ ID NO: 2023128 - RNA, 19 nt, Artificial Sequence
  Description of Artificial Sequence: Synthetic oligonucleotide
  Sense strand starting at position 3817 of SEQ ID NO: 1881164
uggucaugugacugugcuu

SEQ ID NO: 2023129 - RNA, 19 nt, Artificial Sequence
  Description of Artificial Sequence: Synthetic oligonucleotide
  Antisense strand to SEQ ID NO: 2023128
aagcacagucacaugacca

SEQ ID NO: 2023130 - RNA, 19 nt, Artificial Sequence
  Description of Artificial Sequence: Synthetic oligonucleotide
  Sense strand starting at position 3824 of SEQ ID NO: 1881164
gugacugugcuuuagccaa

SEQ ID NO: 2023131 - RNA, 19 nt, Artificial Sequence
  Description of Artificial Sequence: Synthetic oligonucleotide
  Antisense strand to SEQ ID NO: 2023130
uuggcuaaagcacagucac

SEQ ID NO: 2023132 - RNA, 19 nt, Artificial Sequence
  Description of Artificial Sequence: Synthetic oligonucleotide
  Sense strand starting at position 3831 of SEQ ID NO: 1881164
ugcuuuagccaaugggaua

SEQ ID NO: 2023133 - RNA, 19 nt, Artificial Sequence
  Description of Artificial Sequence: Synthetic oligonucleotide
  Antisense strand to SEQ ID NO: 2023132
uaucccauuggcuaaagca

SEQ ID NO: 2023134 - RNA, 19 nt, Artificial Sequence
  Description of Artificial Sequence: Synthetic oligonucleotide
  Sense strand starting at position 3846 of SEQ ID NO: 1881164
gauacaaguggauguguca

SEQ ID NO: 2023135 - RNA, 19 nt, Artificial Sequence
  Description of Artificial Sequence: Synthetic oligonucleotide
  Antisense strand to SEQ ID NO: 2023134
ugacacauccacuuguauc

SEQ ID NO: 2023136 - RNA, 19 nt, Artificial Sequence
  Description of Artificial Sequence: Synthetic oligonucleotide
  Sense strand starting at position 3853 of SEQ ID NO: 1881164
guggaugugucagcuuuca

SEQ ID NO: 2023137 - RNA, 19 nt, Artificial Sequence
  Description of Artificial Sequence: Synthetic oligonucleotide
  Antisense strand to SEQ ID NO: 2023136
ugaaagcugacacauccac

SEQ ID NO: 2023138 - RNA, 19 nt, Artificial Sequence
  Description of Artificial Sequence: Synthetic oligonucleotide
  Sense strand starting at position 3888 of SEQ ID NO: 1881164
gacagcugaugugaacauu

SEQ ID NO: 2023139 - RNA, 19 nt, Artificial Sequence
  Description of Artificial Sequence: Synthetic oligonucleotide
  Antisense strand to SEQ ID NO: 2023138
aauguucacaucagcuguc

SEQ ID NO: 2023140 - RNA, 19 nt, Artificial Sequence
  Description of Artificial Sequence: Synthetic oligonucleotide
  Sense strand starting at position 3930 of SEQ ID NO: 1881164
ugcugcucccuggaaugua

SEQ ID NO: 2023141 - RNA, 19 nt, Artificial Sequence
  Description of Artificial Sequence: Synthetic oligonucleotide
  Antisense strand to SEQ ID NO: 2023140
uacauuccagggagcagca

SEQ ID NO: 2023142 - RNA, 19 nt, Artificial Sequence
  Description of Artificial Sequence: Synthetic oligonucleotide
  Sense strand starting at position 45 of SEQ ID NO: 1881165
uuaauaucaugcuuuggga

SEQ ID NO: 2023143 - RNA, 19 nt, Artificial Sequence
  Description of Artificial Sequence: Synthetic oligonucleotide
  Antisense strand to SEQ ID NO: 2023142
ucccaaagcaugauauuaa

SEQ ID NO: 2023144 - RNA, 19 nt, Artificial Sequence
  Description of Artificial Sequence: Synthetic oligonucleotide
  Sense strand starting at position 52 of SEQ ID NO: 1881165
caugcuuugggauaugaug

SEQ ID NO: 2023145 - RNA, 19 nt, Artificial Sequence
  Description of Artificial Sequence: Synthetic oligonucleotide
  Antisense strand to SEQ ID NO: 2023144
caucauaucccaaagcaug

SEQ ID NO: 2023146 - RNA, 19 nt, Artificial Sequence
  Description of Artificial Sequence: Synthetic oligonucleotide
  Sense strand starting at position 388 of SEQ ID NO: 1881165
auacuuugccaugagaauu

SEQ ID NO: 2023147 - RNA, 19 nt, Artificial Sequence
  Description of Artificial Sequence: Synthetic oligonucleotide
  Antisense strand to SEQ ID NO: 2023146
aauucucauggcaaaguau

SEQ ID NO: 2023148 - RNA, 19 nt, Artificial Sequence
  Description of Artificial Sequence: Synthetic oligonucleotide
  Sense strand starting at position 458 of SEQ ID NO: 1881165
uuguaugauuuagagaaac

SEQ ID NO: 2023149 - RNA, 19 nt, Artificial Sequence
  Description of Artificial Sequence: Synthetic oligonucleotide
  Antisense strand to SEQ ID NO: 2023148
guuucucuaaaucauacaa

SEQ ID NO: 2023150 - RNA, 19 nt, Artificial Sequence
  Description of Artificial Sequence: Synthetic oligonucleotide
  Sense strand starting at position 751 of SEQ ID NO: 1881165
cuaugauugaugugguaag

SEQ ID NO: 2023151 - RNA, 19 nt, Artificial Sequence
  Description of Artificial Sequence: Synthetic oligonucleotide
  Antisense strand to SEQ ID NO: 2023150
cuuaccacaucaaucauag

SEQ ID NO: 2023152 - RNA, 19 nt, Artificial Sequence
  Description of Artificial Sequence: Synthetic oligonucleotide
  Sense strand starting at position 762 of SEQ ID NO: 1881165
gugguaagaaaccauugua

SEQ ID NO: 2023153 - RNA, 19 nt, Artificial Sequence
  Description of Artificial Sequence: Synthetic oligonucleotide
  Antisense strand to SEQ ID NO: 2023152
uacaaugguuucuuaccac

SEQ ID NO: 2023154 - RNA, 19 nt, Artificial Sequence
  Description of Artificial Sequence: Synthetic oligonucleotide
  Sense strand starting at position 765 of SEQ ID NO: 1881165
guaagaaaccauuguaaca

SEQ ID NO: 2023155 - RNA, 19 nt, Artificial Sequence
  Description of Artificial Sequence: Synthetic oligonucleotide
  Antisense strand to SEQ ID NO: 2023154
uguuacaaugguuucuuac

SEQ ID NO: 2023156 - RNA, 19 nt, Artificial Sequence
  Description of Artificial Sequence: Synthetic oligonucleotide
  Sense strand starting at position 907 of SEQ ID NO: 1881165
guuggucuuauagaaugau

SEQ ID NO: 2023157 - RNA, 19 nt, Artificial Sequence
  Description of Artificial Sequence: Synthetic oligonucleotide
  Antisense strand to SEQ ID NO: 2023156
aucauucuauaagaccaac

SEQ ID NO: 2023158 - RNA, 19 nt, Artificial Sequence
  Description of Artificial Sequence: Synthetic oligonucleotide
  Sense strand starting at position 1027 of SEQ ID NO: 1881165
cuggucuuugaguaaauag

SEQ ID NO: 2023159 - RNA, 19 nt, Artificial Sequence
  Description of Artificial Sequence: Synthetic oligonucleotide
  Antisense strand to SEQ ID NO: 2023158
cuauuuacucaaagaccag

SEQ ID NO: 2023160 - RNA, 19 nt, Artificial Sequence
  Description of Artificial Sequence: Synthetic oligonucleotide
  Sense strand starting at position 1258 of SEQ ID NO: 1881165
ugacuacugugauuacaac

SEQ ID NO: 2023161 - RNA, 19 nt, Artificial Sequence
  Description of Artificial Sequence: Synthetic oligonucleotide
  Antisense strand to SEQ ID NO: 2023160
guuguaaucacaguaguca

SEQ ID NO: 2023162 - RNA, 19 nt, Artificial Sequence
  Description of Artificial Sequence: Synthetic oligonucleotide
  Sense strand starting at position 1264 of SEQ ID NO: 1881165
cugugauuacaacagucuu

SEQ ID NO: 2023163 - RNA, 19 nt, Artificial Sequence
  Description of Artificial Sequence: Synthetic oligonucleotide
  Antisense strand to SEQ ID NO: 2023162
aagacuguuguaaucacag

SEQ ID NO: 2023164 - RNA, 19 nt, Artificial Sequence
  Description of Artificial Sequence: Synthetic oligonucleotide
  Sense strand starting at position 1387 of SEQ ID NO: 1881165
gugaaaugugaauguugaa

SEQ ID NO: 2023165 - RNA, 19 nt, Artificial Sequence
  Description of Artificial Sequence: Synthetic oligonucleotide
  Antisense strand to SEQ ID NO: 2023164
uucaacauucacauuucac

SEQ ID NO: 2023166 - RNA, 19 nt, Artificial Sequence
  Description of Artificial Sequence: Synthetic oligonucleotide
  Sense strand starting at position 1400 of SEQ ID NO: 1881165
guugaaagcagugaaucuu

SEQ ID NO: 2023167 - RNA, 19 nt, Artificial Sequence
  Description of Artificial Sequence: Synthetic oligonucleotide
  Antisense strand to SEQ ID NO: 2023166
aagauucacugcuuucaac

SEQ ID NO: 2023168 - RNA, 19 nt, Artificial Sequence
  Description of Artificial Sequence: Synthetic oligonucleotide
  Sense strand starting at position 1421 of SEQ ID NO: 1881165
agcugcuugauuugugaua

SEQ ID NO: 2023169 - RNA, 19 nt, Artificial Sequence
  Description of Artificial Sequence: Synthetic oligonucleotide
  Antisense strand to SEQ ID NO: 2023168
uaucacaaaucaagcagcu

SEQ ID NO: 2023170 - RNA, 19 nt, Artificial Sequence
  Description of Artificial Sequence: Synthetic oligonucleotide
  Sense strand starting at position 1422 of SEQ ID NO: 1881165
gcugcuugauuugugauau

SEQ ID NO: 2023171 - RNA, 19 nt, Artificial Sequence
  Description of Artificial Sequence: Synthetic oligonucleotide
  Antisense strand to SEQ ID NO: 2023170
auaucacaaaucaagcagc

SEQ ID NO: 2023172 - RNA, 19 nt, Artificial Sequence
  Description of Artificial Sequence: Synthetic oligonucleotide
  Sense strand starting at position 1761 of SEQ ID NO: 1881165
accgauauugagcaucuga

SEQ ID NO: 2023173 - RNA, 19 nt, Artificial Sequence
  Description of Artificial Sequence: Synthetic oligonucleotide
  Antisense strand to SEQ ID NO: 2023172
ucagaugcucaauaucggu

SEQ ID NO: 2023174 - RNA, 19 nt, Artificial Sequence
  Description of Artificial Sequence: Synthetic oligonucleotide
  Sense strand starting at position 1777 of SEQ ID NO: 1881165
ugauaugugccagagacuu

SEQ ID NO: 2023175 - RNA, 19 nt, Artificial Sequence
  Description of Artificial Sequence: Synthetic oligonucleotide
  Antisense strand to SEQ ID NO: 2023174
aagucucuggcacauauca

SEQ ID NO: 2023176 - RNA, 19 nt, Artificial Sequence
  Description of Artificial Sequence: Synthetic oligonucleotide
  Sense strand starting at position 1913 of SEQ ID NO: 1881165
gaggguacucuggaagcau

SEQ ID NO: 2023177 - RNA, 19 nt, Artificial Sequence
  Description of Artificial Sequence: Synthetic oligonucleotide
  Antisense strand to SEQ ID NO: 2023176
augcuuccagaguacccuc

SEQ ID NO: 2023178 - RNA, 19 nt, Artificial Sequence
  Description of Artificial Sequence: Synthetic oligonucleotide
  Sense strand starting at position 1947 of SEQ ID NO: 1881165
aaaccuagucuuggaagau

SEQ ID NO: 2023179 - RNA, 19 nt, Artificial Sequence
  Description of Artificial Sequence: Synthetic oligonucleotide
  Antisense strand to SEQ ID NO: 2023178
aucuuccaagacuagguuu

SEQ ID NO: 2023180 - RNA, 19 nt, Artificial Sequence
  Description of Artificial Sequence: Synthetic oligonucleotide
  Sense strand starting at position 1967 of SEQ ID NO: 1881165
ugaggaaguuuccuaugau

SEQ ID NO: 2023181 - RNA, 19 nt, Artificial Sequence
  Description of Artificial Sequence: Synthetic oligonucleotide
  Antisense strand to SEQ ID NO: 2023180
aucauaggaaacuuccuca

SEQ ID NO: 2023182 - RNA, 19 nt, Artificial Sequence
  Description of Artificial Sequence: Synthetic oligonucleotide
  Sense strand starting at position 1970 of SEQ ID NO: 1881165
ggaaguuuccuaugaucau

SEQ ID NO: 2023183 - RNA, 19 nt, Artificial Sequence
  Description of Artificial Sequence: Synthetic oligonucleotide
  Antisense strand to SEQ ID NO: 2023182
augaucauaggaaacuucc

SEQ ID NO: 2023184 - RNA, 19 nt, Artificial Sequence
  Description of Artificial Sequence: Synthetic oligonucleotide
  Sense strand starting at position 2045 of SEQ ID NO: 1881165
gacaaacuuguaggaguuu

SEQ ID NO: 2023185 - RNA, 19 nt, Artificial Sequence
  Description of Artificial Sequence: Synthetic oligonucleotide
  Antisense strand to SEQ ID NO: 2023184
aaacuccuacaaguuuguc

SEQ ID NO: 2023186 - RNA, 19 nt, Artificial Sequence
  Description of Artificial Sequence: Synthetic oligonucleotide
  Sense strand starting at position 2332 of SEQ ID NO: 1881165
aaaggauguacaggaguuu

SEQ ID NO: 2023187 - RNA, 19 nt, Artificial Sequence
  Description of Artificial Sequence: Synthetic oligonucleotide
  Antisense strand to SEQ ID NO: 2023186
aaacuccuguacauccuuu

SEQ ID NO: 2023188 - RNA, 19 nt, Artificial Sequence
  Description of Artificial Sequence: Synthetic oligonucleotide
  Sense strand starting at position 2385 of SEQ ID NO: 1881165
gcaauugugaaaggaagau

SEQ ID NO: 2023189 - RNA, 19 nt, Artificial Sequence
  Description of Artificial Sequence: Synthetic oligonucleotide
  Antisense strand to SEQ ID NO: 2023188
aucuuccuuucacaauugc

SEQ ID NO: 2023190 - RNA, 19 nt, Artificial Sequence
  Description of Artificial Sequence: Synthetic oligonucleotide
  Sense strand starting at position 2559 of SEQ ID NO: 1881165
augcaaugacuuuauaugu

SEQ ID NO: 2023191 - RNA, 19 nt, Artificial Sequence
  Description of Artificial Sequence: Synthetic oligonucleotide
  Antisense strand to SEQ ID NO: 2023190
acauauaaagucauugcau

SEQ ID NO: 2023192 - RNA, 19 nt, Artificial Sequence
  Description of Artificial Sequence: Synthetic oligonucleotide
  Sense strand starting at position 2748 of SEQ ID NO: 1881165
aucuguauuguguaggaua

SEQ ID NO: 2023193 - RNA, 19 nt, Artificial Sequence
  Description of Artificial Sequence: Synthetic oligonucleotide
  Antisense strand to SEQ ID NO: 2023192
uauccuacacaauacagau

SEQ ID NO: 2023194 - RNA, 19 nt, Artificial Sequence
  Description of Artificial Sequence: Synthetic oligonucleotide
  Sense strand starting at position 2760 of SEQ ID NO: 1881165
uaggauagugcuuaucuac

SEQ ID NO: 2023195 - RNA, 19 nt, Artificial Sequence
  Description of Artificial Sequence: Synthetic oligonucleotide
  Antisense strand to SEQ ID NO: 2023194
guagauaagcacuauccua

SEQ ID NO: 2023196 - RNA, 19 nt, Artificial Sequence
  Description of Artificial Sequence: Synthetic oligonucleotide
  Sense strand starting at position 2766 of SEQ ID NO: 1881165
agugcuuaucuacaaagaa

SEQ ID NO: 2023197 - RNA, 19 nt, Artificial Sequence
  Description of Artificial Sequence: Synthetic oligonucleotide
  Antisense strand to SEQ ID NO: 2023196
uucuuuguagauaagcacu

SEQ ID NO: 2023198 - RNA, 19 nt, Artificial Sequence
  Description of Artificial Sequence: Synthetic oligonucleotide
  Sense strand starting at position 2960 of SEQ ID NO: 1881165
gccugucauuucucccauu

SEQ ID NO: 2023199 - RNA, 19 nt, Artificial Sequence
  Description of Artificial Sequence: Synthetic oligonucleotide
  Antisense strand to SEQ ID NO: 2023198
aaugggagaaaugacaggc

SEQ ID NO: 2023200 - RNA, 19 nt, Artificial Sequence
  Description of Artificial Sequence: Synthetic oligonucleotide
  Sense strand starting at position 2988 of SEQ ID NO: 1881165
aggaaauuguggcccagaa

SEQ ID NO: 2023201 - RNA, 19 nt, Artificial Sequence
  Description of Artificial Sequence: Synthetic oligonucleotide
  Antisense strand to SEQ ID NO: 2023200
uucugggccacaauuuccu

SEQ ID NO: 2023202 - RNA, 19 nt, Artificial Sequence
  Description of Artificial Sequence: Synthetic oligonucleotide
  Sense strand starting at position 3085 of SEQ ID NO: 1881165
guaugaauuggccacuaaa

SEQ ID NO: 2023203 - RNA, 19 nt, Artificial Sequence
  Description of Artificial Sequence: Synthetic oligonucleotide
  Antisense strand to SEQ ID NO: 2023202
uuuaguggccaauucauac

SEQ ID NO: 2023204 - RNA, 19 nt, Artificial Sequence
  Description of Artificial Sequence: Synthetic oligonucleotide
  Sense strand starting at position 3131 of SEQ ID NO: 1881165
uguguuagugaagagggau

SEQ ID NO: 2023205 - RNA, 19 nt, Artificial Sequence
  Description of Artificial Sequence: Synthetic oligonucleotide
  Antisense strand to SEQ ID NO: 2023204
aucccucuucacuaacaca

SEQ ID NO: 2023206 - RNA, 19 nt, Artificial Sequence
  Description of Artificial Sequence: Synthetic oligonucleotide
  Sense strand starting at position 3134 of SEQ ID NO: 1881165
guuagugaagagggauauu

SEQ ID NO: 2023207 - RNA, 19 nt, Artificial Sequence
  Description of Artificial Sequence: Synthetic oligonucleotide
  Antisense strand to SEQ ID NO: 2023206
aauaucccucuucacuaac

SEQ ID NO: 2023208 - RNA, 19 nt, Artificial Sequence
  Description of Artificial Sequence: Synthetic oligonucleotide
  Sense strand starting at position 3418 of SEQ ID NO: 1881165
auuguuugaccauaucauu

SEQ ID NO: 2023209 - RNA, 19 nt, Artificial Sequence
  Description of Artificial Sequence: Synthetic oligonucleotide
  Antisense strand to SEQ ID NO: 2023208
aaugauauggucaaacaau

SEQ ID NO: 2023210 - RNA, 19 nt, Artificial Sequence
  Description of Artificial Sequence: Synthetic oligonucleotide
  Sense strand starting at position 3520 of SEQ ID NO: 1881165
uggucaaaggcauaugagu

SEQ ID NO: 2023211 - RNA, 19 nt, Artificial Sequence
  Description of Artificial Sequence: Synthetic oligonucleotide
  Antisense strand to SEQ ID NO: 2023210
acucauaugccuuugacca

SEQ ID NO: 2023212 - RNA, 19 nt, Artificial Sequence
  Description of Artificial Sequence: Synthetic oligonucleotide
  Sense strand starting at position 3627 of SEQ ID NO: 1881165
uguagaaauccugauguuu

SEQ ID NO: 2023213 - RNA, 19 nt, Artificial Sequence
  Description of Artificial Sequence: Synthetic oligonucleotide
  Antisense strand to SEQ ID NO: 2023212
aaacaucaggauuucuaca

SEQ ID NO: 2023214 - RNA, 19 nt, Artificial Sequence
  Description of Artificial Sequence: Synthetic oligonucleotide
  Sense strand starting at position 3677 of SEQ ID NO: 1881165
ccuggaagucauugaauug

SEQ ID NO: 2023215 - RNA, 19 nt, Artificial Sequence
  Description of Artificial Sequence: Synthetic oligonucleotide
  Antisense strand to SEQ ID NO: 2023214
caauucaaugacuuccagg

SEQ ID NO: 2023216 - RNA, 19 nt, Artificial Sequence
  Description of Artificial Sequence: Synthetic oligonucleotide
  Sense strand starting at position 3678 of SEQ ID NO: 1881165
cuggaagucauugaauugu

SEQ ID NO: 2023217 - RNA, 19 nt, Artificial Sequence
  Description of Artificial Sequence: Synthetic oligonucleotide
  Antisense strand to SEQ ID NO: 2023216
acaauucaaugacuuccag

SEQ ID NO: 2023218 - RNA, 19 nt, Artificial Sequence
  Description of Artificial Sequence: Synthetic oligonucleotide
  Sense strand starting at position 3724 of SEQ ID NO: 1881165
uuuggaaugcuuggcauuu

SEQ ID NO: 2023219 - RNA, 19 nt, Artificial Sequence
  Description of Artificial Sequence: Synthetic oligonucleotide
  Antisense strand to SEQ ID NO: 2023218
aaaugccaagcauuccaaa

SEQ ID NO: 2023220 - RNA, 19 nt, Artificial Sequence
  Description of Artificial Sequence: Synthetic oligonucleotide
  Sense strand starting at position 3906 of SEQ ID NO: 1881165
ucucaauuaguguaccuau

SEQ ID NO: 2023221 - RNA, 19 nt, Artificial Sequence
  Description of Artificial Sequence: Synthetic oligonucleotide
  Antisense strand to SEQ ID NO: 2023220
auagguacacuaauugaga

SEQ ID NO: 2023222 - RNA, 19 nt, Artificial Sequence
  Description of Artificial Sequence: Synthetic oligonucleotide
  Sense strand starting at position 136 of SEQ ID NO: 1881166
uuuguauguguacauuaga

SEQ ID NO: 2023223 - RNA, 19 nt, Artificial Sequence
  Description of Artificial Sequence: Synthetic oligonucleotide
  Antisense strand to SEQ ID NO: 2023222
ucuaauguacacauacaaa

SEQ ID NO: 2023224 - RNA, 19 nt, Artificial Sequence
  Description of Artificial Sequence: Synthetic oligonucleotide
  Sense strand starting at position 139 of SEQ ID NO: 1881166
guauguguacauuagauag

SEQ ID NO: 2023225 - RNA, 19 nt, Artificial Sequence
  Description of Artificial Sequence: Synthetic oligonucleotide
  Antisense strand to SEQ ID NO: 2023224
cuaucuaauguacacauac

SEQ ID NO: 2023226 - RNA, 19 nt, Artificial Sequence
  Description of Artificial Sequence: Synthetic oligonucleotide
  Sense strand starting at position 143 of SEQ ID NO: 1881166
guguacauuagauaguuga

SEQ ID NO: 2023227 - RNA, 19 nt, Artificial Sequence
  Description of Artificial Sequence: Synthetic oligonucleotide
  Antisense strand to SEQ ID NO: 2023226
ucaacuaucuaauguacac

SEQ ID NO: 2023228 - RNA, 19 nt, Artificial Sequence
  Description of Artificial Sequence: Synthetic oligonucleotide
  Sense strand starting at position 190 of SEQ ID NO: 1881166
cccugaaaugucugaauuc

SEQ ID NO: 2023229 - RNA, 19 nt, Artificial Sequence
  Description of Artificial Sequence: Synthetic oligonucleotide
  Antisense strand to SEQ ID NO: 2023228
gaauucagacauuucaggg

SEQ ID NO: 2023230 - RNA, 19 nt, Artificial Sequence
  Description of Artificial Sequence: Synthetic oligonucleotide
  Sense strand starting at position 225 of SEQ ID NO: 1881166
caaggaaggugcuuaauaa

SEQ ID NO: 2023231 - RNA, 19 nt, Artificial Sequence
  Description of Artificial Sequence: Synthetic oligonucleotide
  Antisense strand to SEQ ID NO: 2023230
uuauuaagcaccuuccuug

SEQ ID NO: 2023232 - RNA, 19 nt, Artificial Sequence
  Description of Artificial Sequence: Synthetic oligonucleotide
  Sense strand starting at position 358 of SEQ ID NO: 1881166
guguacucucaacaguuau

SEQ ID NO: 2023233 - RNA, 19 nt, Artificial Sequence
  Description of Artificial Sequence: Synthetic oligonucleotide
  Antisense strand to SEQ ID NO: 2023232
auaacuguugagaguacac

SEQ ID NO: 2023234 - RNA, 19 nt, Artificial Sequence
  Description of Artificial Sequence: Synthetic oligonucleotide
  Sense strand starting at position 466 of SEQ ID NO: 1881166
aggugcuuggucagucagu

SEQ ID NO: 2023235 - RNA, 19 nt, Artificial Sequence
  Description of Artificial Sequence: Synthetic oligonucleotide
  Antisense strand to SEQ ID NO: 2023234
acugacugaccaagcaccu

SEQ ID NO: 2023236 - RNA, 19 nt, Artificial Sequence
  Description of Artificial Sequence: Synthetic oligonucleotide
  Sense strand starting at position 610 of SEQ ID NO: 1881166
gcuaacgugagggauuacu

SEQ ID NO: 2023237 - RNA, 19 nt, Artificial Sequence
  Description of Artificial Sequence: Synthetic oligonucleotide
  Antisense strand to SEQ ID NO: 2023236
aguaaucccucacguuagc

SEQ ID NO: 2023238 - RNA, 19 nt, Artificial Sequence
  Description of Artificial Sequence: Synthetic oligonucleotide
  Sense strand starting at position 631 of SEQ ID NO: 1881166
agauauuaauaggagagaa

SEQ ID NO: 2023239 - RNA, 19 nt, Artificial Sequence
  Description of Artificial Sequence: Synthetic oligonucleotide
  Antisense strand to SEQ ID NO: 2023238
uucucuccuauuaauaucu

SEQ ID NO: 2023240 - RNA, 19 nt, Artificial Sequence
  Description of Artificial Sequence: Synthetic oligonucleotide
  Sense strand starting at position 828 of SEQ ID NO: 1881166
aguucaucucguucgcaga

SEQ ID NO: 2023241 - RNA, 19 nt, Artificial Sequence
  Description of Artificial Sequence: Synthetic oligonucleotide
  Antisense strand to SEQ ID NO: 2023240
ucugcgaacgagaugaacu

SEQ ID NO: 2023242 - RNA, 19 nt, Artificial Sequence
  Description of Artificial Sequence: Synthetic oligonucleotide
  Sense strand starting at position 893 of SEQ ID NO: 1881166
agaaguaaacguuaaacuc

SEQ ID NO: 2023243 - RNA, 19 nt, Artificial Sequence
  Description of Artificial Sequence: Synthetic oligonucleotide
  Antisense strand to SEQ ID NO: 2023242
gaguuuaacguuuacuucu

SEQ ID NO: 2023244 - RNA, 19 nt, Artificial Sequence
  Description of Artificial Sequence: Synthetic oligonucleotide
  Sense strand starting at position 902 of SEQ ID NO: 1881166
cguuaaacuccagggauuc

SEQ ID NO: 2023245 - RNA, 19 nt, Artificial Sequence
  Description of Artificial Sequence: Synthetic oligonucleotide
  Antisense strand to SEQ ID NO: 2023244
gaaucccuggaguuuaacg

SEQ ID NO: 2023246 - RNA, 19 nt, Artificial Sequence
  Description of Artificial Sequence: Synthetic oligonucleotide
  Sense strand starting at position 943 of SEQ ID NO: 1881166
ggaaguugcccugaagcaa

SEQ ID NO: 2023247 - RNA, 19 nt, Artificial Sequence
  Description of Artificial Sequence: Synthetic oligonucleotide
  Antisense strand to SEQ ID NO: 2023246
uugcuucagggcaacuucc

SEQ ID NO: 2023248 - RNA, 19 nt, Artificial Sequence
  Description of Artificial Sequence: Synthetic oligonucleotide
  Sense strand starting at position 954 of SEQ ID NO: 1881166
ugaagcaacugauugucau

SEQ ID NO: 2023249 - RNA, 19 nt, Artificial Sequence
  Description of Artificial Sequence: Synthetic oligonucleotide
  Antisense strand to SEQ ID NO: 2023248
augacaaucaguugcuuca

SEQ ID NO: 2023250 - RNA, 19 nt, Artificial Sequence
  Description of Artificial Sequence: Synthetic oligonucleotide
  Sense strand starting at position 955 of SEQ ID NO: 1881166
gaagcaacugauugucauu

SEQ ID NO: 2023251 - RNA, 19 nt, Artificial Sequence
  Description of Artificial Sequence: Synthetic oligonucleotide
  Antisense strand to SEQ ID NO: 2023250
aaugacaaucaguugcuuc

SEQ ID NO: 2023252 - RNA, 19 nt, Artificial Sequence
  Description of Artificial Sequence: Synthetic oligonucleotide
  Sense strand starting at position 957 of SEQ ID NO: 1881166
agcaacugauugucauuga

SEQ ID NO: 2023253 - RNA, 19 nt, Artificial Sequence
  Description of Artificial Sequence: Synthetic oligonucleotide
  Antisense strand to SEQ ID NO: 2023252
ucaaugacaaucaguugcu

SEQ ID NO: 2023254 - RNA, 19 nt, Artificial Sequence
  Description of Artificial Sequence: Synthetic oligonucleotide
  Sense strand starting at position 961 of SEQ ID NO: 1881166
acugauugucauugauauu

SEQ ID NO: 2023255 - RNA, 19 nt, Artificial Sequence
  Description of Artificial Sequence: Synthetic oligonucleotide
  Antisense strand to SEQ ID NO: 2023254
aauaucaaugacaaucagu

SEQ ID NO: 2023256 - RNA, 19 nt, Artificial Sequence
  Description of Artificial Sequence: Synthetic oligonucleotide
  Sense strand starting at position 1022 of SEQ ID NO: 1881166
ggccaagagcaguagaaau

SEQ ID NO: 2023257 - RNA, 19 nt, Artificial Sequence
  Description of Artificial Sequence: Synthetic oligonucleotide
  Antisense strand to SEQ ID NO: 2023256
auuucuacugcucuuggcc

SEQ ID NO: 2023258 - RNA, 19 nt, Artificial Sequence
  Description of Artificial Sequence: Synthetic oligonucleotide
  Sense strand starting at position 1033 of SEQ ID NO: 1881166
guagaaaucacuggguggu

SEQ ID NO: 2023259 - RNA, 19 nt, Artificial Sequence
  Description of Artificial Sequence: Synthetic oligonucleotide
  Antisense strand to SEQ ID NO: 2023258
accacccagugauuucuac

SEQ ID NO: 2023260 - RNA, 19 nt, Artificial Sequence
  Description of Artificial Sequence: Synthetic oligonucleotide
  Sense strand starting at position 1174 of SEQ ID NO: 1881166
gagugacgacccuguacaa

SEQ ID NO: 2023261 - RNA, 19 nt, Artificial Sequence
  Description of Artificial Sequence: Synthetic oligonucleotide
  Antisense strand to SEQ ID NO: 2023260
uuguacagggucgucacuc

SEQ ID NO: 2023262 - RNA, 19 nt, Artificial Sequence
  Description of Artificial Sequence: Synthetic oligonucleotide
  Sense strand starting at position 1475 of SEQ ID NO: 1881166
gggcaaagucuccacaucu

SEQ ID NO: 2023263 - RNA, 19 nt, Artificial Sequence
  Description of Artificial Sequence: Synthetic oligonucleotide
  Antisense strand to SEQ ID NO: 2023262
agauguggagacuuugccc

SEQ ID NO: 2023264 - RNA, 19 nt, Artificial Sequence
  Description of Artificial Sequence: Synthetic oligonucleotide
  Sense strand starting at position 2477 of SEQ ID NO: 1881166
cggaaucacaguugucaca

SEQ ID NO: 2023265 - RNA, 19 nt, Artificial Sequence
  Description of Artificial Sequence: Synthetic oligonucleotide
  Antisense strand to SEQ ID NO: 2023264
ugugacaacugugauuccg

SEQ ID NO: 2023266 - RNA, 19 nt, Artificial Sequence
  Description of Artificial Sequence: Synthetic oligonucleotide
  Sense strand starting at position 2698 of SEQ ID NO: 1881166
ggacguugcccucaaggaa

SEQ ID NO: 2023267 - RNA, 19 nt, Artificial Sequence
  Description of Artificial Sequence: Synthetic oligonucleotide
  Antisense strand to SEQ ID NO: 2023266
uuccuugagggcaacgucc

SEQ ID NO: 2023268 - RNA, 19 nt, Artificial Sequence
  Description of Artificial Sequence: Synthetic oligonucleotide
  Sense strand starting at position 2730 of SEQ ID NO: 1881166
gggagucaaaccuggccua

SEQ ID NO: 2023269 - RNA, 19 nt, Artificial Sequence
  Description of Artificial Sequence: Synthetic oligonucleotide
  Antisense strand to SEQ ID NO: 2023268
uaggccagguuugacuccc

SEQ ID NO: 2023270 - RNA, 19 nt, Artificial Sequence
  Description of Artificial Sequence: Synthetic oligonucleotide
  Sense strand starting at position 2845 of SEQ ID NO: 1881166
uggagaguccugcacugaa

SEQ ID NO: 2023271 - RNA, 19 nt, Artificial Sequence
  Description of Artificial Sequence: Synthetic oligonucleotide
  Antisense strand to SEQ ID NO: 2023270
uucagugcaggacucucca

SEQ ID NO: 2023272 - RNA, 19 nt, Artificial Sequence
  Description of Artificial Sequence: Synthetic oligonucleotide
  Sense strand starting at position 2916 of SEQ ID NO: 1881166
aagacaucucuucgaggga

SEQ ID NO: 2023273 - RNA, 19 nt, Artificial Sequence
  Description of Artificial Sequence: Synthetic oligonucleotide
  Antisense strand to SEQ ID NO: 2023272
ucccucgaagagaugucuu

SEQ ID NO: 2023274 - RNA, 19 nt, Artificial Sequence
  Description of Artificial Sequence: Synthetic oligonucleotide
  Sense strand starting at position 2951 of SEQ ID NO: 1881166
gacuaaguagugugggaaa

SEQ ID NO: 2023275 - RNA, 19 nt, Artificial Sequence
  Description of Artificial Sequence: Synthetic oligonucleotide
  Antisense strand to SEQ ID NO: 2023274
uuucccacacuacuuaguc

SEQ ID NO: 2023276 - RNA, 19 nt, Artificial Sequence
  Description of Artificial Sequence: Synthetic oligonucleotide
  Sense strand starting at position 2953 of SEQ ID NO: 1881166
cuaaguagugugggaaaug

SEQ ID NO: 2023277 - RNA, 19 nt, Artificial Sequence
  Description of Artificial Sequence: Synthetic oligonucleotide
  Antisense strand to SEQ ID NO: 2023276
cauuucccacacuacuuag

SEQ ID NO: 2023278 - RNA, 19 nt, Artificial Sequence
  Description of Artificial Sequence: Synthetic oligonucleotide
  Sense strand starting at position 3024 of SEQ ID NO: 1881166
gagguugugauaugagaug

SEQ ID NO: 2023279 - RNA, 19 nt, Artificial Sequence
  Description of Artificial Sequence: Synthetic oligonucleotide
  Antisense strand to SEQ ID NO: 2023278
caucucauaucacaaccuc

SEQ ID NO: 2023280 - RNA, 19 nt, Artificial Sequence
  Description of Artificial Sequence: Synthetic oligonucleotide
  Sense strand starting at position 3029 of SEQ ID NO: 1881166
ugugauaugagaugagcua

SEQ ID NO: 2023281 - RNA, 19 nt, Artificial Sequence
  Description of Artificial Sequence: Synthetic oligonucleotide
  Antisense strand to SEQ ID NO: 2023280
uagcucaucucauaucaca

SEQ ID NO: 2023282 - RNA, 19 nt, Artificial Sequence
  Description of Artificial Sequence: Synthetic oligonucleotide
  Sense strand starting at position 3040 of SEQ ID NO: 1881166
augagcuaaucaguggaau

SEQ ID NO: 2023283 - RNA, 19 nt, Artificial Sequence
  Description of Artificial Sequence: Synthetic oligonucleotide
  Antisense strand to SEQ ID NO: 2023282
auuccacugauuagcucau

SEQ ID NO: 2023284 - RNA, 19 nt, Artificial Sequence
  Description of Artificial Sequence: Synthetic oligonucleotide
  Sense strand starting at position 3041 of SEQ ID NO: 1881166
ugagcuaaucaguggaauu

SEQ ID NO: 2023285 - RNA, 19 nt, Artificial Sequence
  Description of Artificial Sequence: Synthetic oligonucleotide
  Antisense strand to SEQ ID NO: 2023284
aauuccacugauuagcuca

SEQ ID NO: 2023286 - RNA, 19 nt, Artificial Sequence
  Description of Artificial Sequence: Synthetic oligonucleotide
  Sense strand starting at position 3043 of SEQ ID NO: 1881166
agcuaaucaguggaauugu

SEQ ID NO: 2023287 - RNA, 19 nt, Artificial Sequence
  Description of Artificial Sequence: Synthetic oligonucleotide
  Antisense strand to SEQ ID NO: 2023286
acaauuccacugauuagcu

SEQ ID NO: 2023288 - RNA, 19 nt, Artificial Sequence
  Description of Artificial Sequence: Synthetic oligonucleotide
  Sense strand starting at position 3078 of SEQ ID NO: 1881166
agggcagagucuuuggaac

SEQ ID NO: 2023289 - RNA, 19 nt, Artificial Sequence
  Description of Artificial Sequence: Synthetic oligonucleotide
  Antisense strand to SEQ ID NO: 2023288
guuccaaagacucugcccu

SEQ ID NO: 2023290 - RNA, 19 nt, Artificial Sequence
  Description of Artificial Sequence: Synthetic oligonucleotide
  Sense strand starting at position 3323 of SEQ ID NO: 1881166
agguguugaugacuuaaug

SEQ ID NO: 2023291 - RNA, 19 nt, Artificial Sequence
  Description of Artificial Sequence: Synthetic oligonucleotide
  Antisense strand to SEQ ID NO: 2023290
cauuaagucaucaacaccu

SEQ ID NO: 2023292 - RNA, 19 nt, Artificial Sequence
  Description of Artificial Sequence: Synthetic oligonucleotide
  Sense strand starting at position 3479 of SEQ ID NO: 1881166
gguaaagguccacgaaggu

SEQ ID NO: 2023293 - RNA, 19 nt, Artificial Sequence
  Description of Artificial Sequence: Synthetic oligonucleotide
  Antisense strand to SEQ ID NO: 2023292
accuucguggaccuuuacc

SEQ ID NO: 2023294 - RNA, 19 nt, Artificial Sequence
  Description of Artificial Sequence: Synthetic oligonucleotide
  Sense strand starting at position 3510 of SEQ ID NO: 1881166
uagagccuauggucaauaa

SEQ ID NO: 2023295 - RNA, 19 nt, Artificial Sequence
  Description of Artificial Sequence: Synthetic oligonucleotide
  Antisense strand to SEQ ID NO: 2023294
uuauugaccauaggcucua

SEQ ID NO: 2023296 - RNA, 19 nt, Artificial Sequence
  Description of Artificial Sequence: Synthetic oligonucleotide
  Sense strand starting at position 3511 of SEQ ID NO: 1881166
agagccuauggucaauaau

SEQ ID NO: 2023297 - RNA, 19 nt, Artificial Sequence
  Description of Artificial Sequence: Synthetic oligonucleotide
  Antisense strand to SEQ ID NO: 2023296
auuauugaccauaggcucu

SEQ ID NO: 2023298 - RNA, 19 nt, Artificial Sequence
  Description of Artificial Sequence: Synthetic oligonucleotide
  Sense strand starting at position 3514 of SEQ ID NO: 1881166
gccuauggucaauaauggu

SEQ ID NO: 2023299 - RNA, 19 nt, Artificial Sequence
  Description of Artificial Sequence: Synthetic oligonucleotide
  Antisense strand to SEQ ID NO: 2023298
accauuauugaccauaggc

SEQ ID NO: 2023300 - RNA, 19 nt, Artificial Sequence
  Description of Artificial Sequence: Synthetic oligonucleotide
  Sense strand starting at position 3521 of SEQ ID NO: 1881166
gucaauaaugguggacagu

SEQ ID NO: 2023301 - RNA, 19 nt, Artificial Sequence
  Description of Artificial Sequence: Synthetic oligonucleotide
  Antisense strand to SEQ ID NO: 2023300
acuguccaccauuauugac

SEQ ID NO: 2023302 - RNA, 19 nt, Artificial Sequence
  Description of Artificial Sequence: Synthetic oligonucleotide
  Sense strand starting at position 496 of SEQ ID NO: 1881167
acucuacuucuacgaguuc

SEQ ID NO: 2023303 - RNA, 19 nt, Artificial Sequence
  Description of Artificial Sequence: Synthetic oligonucleotide
  Antisense strand to SEQ ID NO: 2023302
gaacucguagaaguagagu

SEQ ID NO: 2023304 - RNA, 19 nt, Artificial Sequence
  Description of Artificial Sequence: Synthetic oligonucleotide
  Sense strand starting at position 563 of SEQ ID NO: 1881167
uucugauuggaggagcuau

SEQ ID NO: 2023305 - RNA, 19 nt, Artificial Sequence
  Description of Artificial Sequence: Synthetic oligonucleotide
  Antisense strand to SEQ ID NO: 2023304
auagcuccuccaaucagaa

SEQ ID NO: 2023306 - RNA, 19 nt, Artificial Sequence
  Description of Artificial Sequence: Synthetic oligonucleotide
  Sense strand starting at position 622 of SEQ ID NO: 1881167
ucuuaaaucuucgcugcuu

SEQ ID NO: 2023307 - RNA, 19 nt, Artificial Sequence
  Description of Artificial Sequence: Synthetic oligonucleotide
  Antisense strand to SEQ ID NO: 2023306
aagcagcgaagauuuaaga

SEQ ID NO: 2023308 - RNA, 19 nt, Artificial Sequence
  Description of Artificial Sequence: Synthetic oligonucleotide
  Sense strand starting at position 782 of SEQ ID NO: 1881167
aggaaacagcuccguaagu

SEQ ID NO: 2023309 - RNA, 19 nt, Artificial Sequence
  Description of Artificial Sequence: Synthetic oligonucleotide
  Antisense strand to SEQ ID NO: 2023308
acuuacggagcuguuuccu

SEQ ID NO: 2023310 - RNA, 19 nt, Artificial Sequence
  Description of Artificial Sequence: Synthetic oligonucleotide
  Sense strand starting at position 783 of SEQ ID NO: 1881167
ggaaacagcuccguaaguu

SEQ ID NO: 2023311 - RNA, 19 nt, Artificial Sequence
  Description of Artificial Sequence: Synthetic oligonucleotide
  Antisense strand to SEQ ID NO: 2023310
aacuuacggagcuguuucc

SEQ ID NO: 2023312 - RNA, 19 nt, Artificial Sequence
  Description of Artificial Sequence: Synthetic oligonucleotide
  Sense strand starting at position 784 of SEQ ID NO: 1881167
gaaacagcuccguaaguuu

SEQ ID NO: 2023313 - RNA, 19 nt, Artificial Sequence
  Description of Artificial Sequence: Synthetic oligonucleotide
  Antisense strand to SEQ ID NO: 2023312
aaacuuacggagcuguuuc

SEQ ID NO: 2023314 - RNA, 19 nt, Artificial Sequence
  Description of Artificial Sequence: Synthetic oligonucleotide
  Sense strand starting at position 863 of SEQ ID NO: 1881167
gaaguuagaccuggacacu

SEQ ID NO: 2023315 - RNA, 19 nt, Artificial Sequence
  Description of Artificial Sequence: Synthetic oligonucleotide
  Antisense strand to SEQ ID NO: 2023314
aguguccaggucuaacuuc

SEQ ID NO: 2023316 - RNA, 19 nt, Artificial Sequence
  Description of Artificial Sequence: Synthetic oligonucleotide
  Sense strand starting at position 928 of SEQ ID NO: 1881167
cacggaacauagcugaaua

SEQ ID NO: 2023317 - RNA, 19 nt, Artificial Sequence
  Description of Artificial Sequence: Synthetic oligonucleotide
  Antisense strand to SEQ ID NO: 2023316
uauucagcuauguuccgug

SEQ ID NO: 2023318 - RNA, 19 nt, Artificial Sequence
  Description of Artificial Sequence: Synthetic oligonucleotide
  Sense strand starting at position 1003 of SEQ ID NO: 1881167
guuggaauuugaggucaga

SEQ ID NO: 2023319 - RNA, 19 nt, Artificial Sequence
  Description of Artificial Sequence: Synthetic oligonucleotide
  Antisense strand to SEQ ID NO: 2023318
ucugaccucaaauuccaac

SEQ ID NO: 2023320 - RNA, 19 nt, Artificial Sequence
  Description of Artificial Sequence: Synthetic oligonucleotide
  Sense strand starting at position 1044 of SEQ ID NO: 1881167
cggugucaguuaucaacuu

SEQ ID NO: 2023321 - RNA, 19 nt, Artificial Sequence
  Description of Artificial Sequence: Synthetic oligonucleotide
  Antisense strand to SEQ ID NO: 2023320
aaguugauaacugacaccg

SEQ ID NO: 2023322 - RNA, 19 nt, Artificial Sequence
  Description of Artificial Sequence: Synthetic oligonucleotide
  Sense strand starting at position 1075 of SEQ ID NO: 1881167
cuuugaaugcgccacucaa

SEQ ID NO: 2023323 - RNA, 19 nt, Artificial Sequence
  Description of Artificial Sequence: Synthetic oligonucleotide
  Antisense strand to SEQ ID NO: 2023322
uugaguggcgcauucaaag

SEQ ID NO: 2023324 - RNA, 19 nt, Artificial Sequence
  Description of Artificial Sequence: Synthetic oligonucleotide
  Sense strand starting at position 1082 of SEQ ID NO: 1881167
ugcgccacucaauaaauau

SEQ ID NO: 2023325 - RNA, 19 nt, Artificial Sequence
  Description of Artificial Sequence: Synthetic oligonucleotide
  Antisense strand to SEQ ID NO: 2023324
auauuuauugaguggcgca

SEQ ID NO: 2023326 - RNA, 19 nt, Artificial Sequence
  Description of Artificial Sequence: Synthetic oligonucleotide
  Sense strand starting at position 1093 of SEQ ID NO: 1881167
auaaauauacccuguguua

SEQ ID NO: 2023327 - RNA, 19 nt, Artificial Sequence
  Description of Artificial Sequence: Synthetic oligonucleotide
  Antisense strand to SEQ ID NO: 2023326
uaacacaggguauauuuau

SEQ ID NO: 2023328 - RNA, 19 nt, Artificial Sequence
  Description of Artificial Sequence: Synthetic oligonucleotide
  Sense strand starting at position 1105 of SEQ ID NO: 1881167
uguguuauacaauggcauu

SEQ ID NO: 2023329 - RNA, 19 nt, Artificial Sequence
  Description of Artificial Sequence: Synthetic oligonucleotide
  Antisense strand to SEQ ID NO: 2023328
aaugccauuguauaacaca

SEQ ID NO: 2023330 - RNA, 19 nt, Artificial Sequence
  Description of Artificial Sequence: Synthetic oligonucleotide
  Sense strand starting at position 1160 of SEQ ID NO: 1881167
ugugcuuucucaguagaag

SEQ ID NO: 2023331 - RNA, 19 nt, Artificial Sequence
  Description of Artificial Sequence: Synthetic oligonucleotide
  Antisense strand to SEQ ID NO: 2023330
cuucuacugagaaagcaca

SEQ ID NO: 2023332 - RNA, 19 nt, Artificial Sequence
  Description of Artificial Sequence: Synthetic oligonucleotide
  Sense strand starting at position 1161 of SEQ ID NO: 1881167
gugcuuucucaguagaagg

SEQ ID NO: 2023333 - RNA, 19 nt, Artificial Sequence
  Description of Artificial Sequence: Synthetic oligonucleotide
  Antisense strand to SEQ ID NO: 2023332
ccuucuacugagaaagcac

SEQ ID NO: 2023334 - RNA, 19 nt, Artificial Sequence
  Description of Artificial Sequence: Synthetic oligonucleotide
  Sense strand starting at position 1257 of SEQ ID NO: 1881167
gagaauauccaucggaauc

SEQ ID NO: 2023335 - RNA, 19 nt, Artificial Sequence
  Description of Artificial Sequence: Synthetic oligonucleotide
  Antisense strand to SEQ ID NO: 2023334
gauuccgauggauauucuc

SEQ ID NO: 2023336 - RNA, 19 nt, Artificial Sequence
  Description of Artificial Sequence: Synthetic oligonucleotide
  Sense strand starting at position 1281 of SEQ ID NO: 1881167
caagcaugggcucagaaca

SEQ ID NO: 2023337 - RNA, 19 nt, Artificial Sequence
  Description of Artificial Sequence: Synthetic oligonucleotide
  Antisense strand to SEQ ID NO: 2023336
uguucugagcccaugcuug

SEQ ID NO: 2023338 - RNA, 19 nt, Artificial Sequence
  Description of Artificial Sequence: Synthetic oligonucleotide
  Sense strand starting at position 1381 of SEQ ID NO: 1881167
gcccacgugcucugaagaa

SEQ ID NO: 2023339 - RNA, 19 nt, Artificial Sequence
  Description of Artificial Sequence: Synthetic oligonucleotide
  Antisense strand to SEQ ID NO: 2023338
uucuucagagcacgugggc

SEQ ID NO: 2023340 - RNA, 19 nt, Artificial Sequence
  Description of Artificial Sequence: Synthetic oligonucleotide
  Sense strand starting at position 1656 of SEQ ID NO: 1881167
ggacuuaccugcuaucuga

SEQ ID NO: 2023341 - RNA, 19 nt, Artificial Sequence
  Description of Artificial Sequence: Synthetic oligonucleotide
  Antisense strand to SEQ ID NO: 2023340
ucagauagcagguaagucc

SEQ ID NO: 2023342 - RNA, 19 nt, Artificial Sequence
  Description of Artificial Sequence: Synthetic oligonucleotide
  Sense strand starting at position 1841 of SEQ ID NO: 1881167
ucacaaacguaauggagau

SEQ ID NO: 2023343 - RNA, 19 nt, Artificial Sequence
  Description of Artificial Sequence: Synthetic oligonucleotide
  Antisense strand to SEQ ID NO: 2023342
aucuccauuacguuuguga

SEQ ID NO: 2023344 - RNA, 19 nt, Artificial Sequence
  Description of Artificial Sequence: Synthetic oligonucleotide
  Sense strand starting at position 1847 of SEQ ID NO: 1881167
acguaauggagauggcaua

SEQ ID NO: 2023345 - RNA, 19 nt, Artificial Sequence
  Description of Artificial Sequence: Synthetic oligonucleotide
  Antisense strand to SEQ ID NO: 2023344
uaugccaucuccauuacgu

SEQ ID NO: 2023346 - RNA, 19 nt, Artificial Sequence
  Description of Artificial Sequence: Synthetic oligonucleotide
  Sense strand starting at position 2412 of SEQ ID NO: 1881167
ucaagaaucuauggaacaa

SEQ ID NO: 2023347 - RNA, 19 nt, Artificial Sequence
  Description of Artificial Sequence: Synthetic oligonucleotide
  Antisense strand to SEQ ID NO: 2023346
uuguuccauagauucuuga

SEQ ID NO: 2023348 - RNA, 19 nt, Artificial Sequence
  Description of Artificial Sequence: Synthetic oligonucleotide
  Sense strand starting at position 2479 of SEQ ID NO: 1881167
ggaagaguguaaugcagaa

SEQ ID NO: 2023349 - RNA, 19 nt, Artificial Sequence
  Description of Artificial Sequence: Synthetic oligonucleotide
  Antisense strand to SEQ ID NO: 2023348
uucugcauuacacucuucc

SEQ ID NO: 2023350 - RNA, 19 nt, Artificial Sequence
  Description of Artificial Sequence: Synthetic oligonucleotide
  Sense strand starting at position 2735 of SEQ ID NO: 1881167
ugagguugcaguuauugga

SEQ ID NO: 2023351 - RNA, 19 nt, Artificial Sequence
  Description of Artificial Sequence: Synthetic oligonucleotide
  Antisense strand to SEQ ID NO: 2023350
uccaauaacugcaaccuca

SEQ ID NO: 2023352 - RNA, 19 nt, Artificial Sequence
  Description of Artificial Sequence: Synthetic oligonucleotide
  Sense strand starting at position 2739 of SEQ ID NO: 1881167
guugcaguuauuggagauc

SEQ ID NO: 2023353 - RNA, 19 nt, Artificial Sequence
  Description of Artificial Sequence: Synthetic oligonucleotide
  Antisense strand to SEQ ID NO: 2023352
gaucuccaauaacugcaac

SEQ ID NO: 2023354 - RNA, 19 nt, Artificial Sequence
  Description of Artificial Sequence: Synthetic oligonucleotide
  Sense strand starting at position 3076 of SEQ ID NO: 1881167
gagaccuuaucgcugcaaa

SEQ ID NO: 2023355 - RNA, 19 nt, Artificial Sequence
  Description of Artificial Sequence: Synthetic oligonucleotide
  Antisense strand to SEQ ID NO: 2023354
uuugcagcgauaaggucuc

SEQ ID NO: 2023356 - RNA, 19 nt, Artificial Sequence
  Description of Artificial Sequence: Synthetic oligonucleotide
  Sense strand starting at position 3204 of SEQ ID NO: 1881167
gugaguugugauggcauca

SEQ ID NO: 2023357 - RNA, 19 nt, Artificial Sequence
  Description of Artificial Sequence: Synthetic oligonucleotide
  Antisense strand to SEQ ID NO: 2023356
ugaugccaucacaacucac

SEQ ID NO: 2023358 - RNA, 19 nt, Artificial Sequence
  Description of Artificial Sequence: Synthetic oligonucleotide
  Sense strand starting at position 3247 of SEQ ID NO: 1881167
gugagaucuugucuuugga

SEQ ID NO: 2023359 - RNA, 19 nt, Artificial Sequence
  Description of Artificial Sequence: Synthetic oligonucleotide
  Antisense strand to SEQ ID NO: 2023358
uccaaagacaagaucucac

SEQ ID NO: 2023360 - RNA, 19 nt, Artificial Sequence
  Description of Artificial Sequence: Synthetic oligonucleotide
  Sense strand starting at position 3307 of SEQ ID NO: 1881167
ugaugcaucuccuauagga

SEQ ID NO: 2023361 - RNA, 19 nt, Artificial Sequence
  Description of Artificial Sequence: Synthetic oligonucleotide
  Antisense strand to SEQ ID NO: 2023360
uccuauaggagaugcauca

SEQ ID NO: 2023362 - RNA, 19 nt, Artificial Sequence
  Description of Artificial Sequence: Synthetic oligonucleotide
  Sense strand starting at position 3317 of SEQ ID NO: 1881167
ccuauaggaaagugugauu

SEQ ID NO: 2023363 - RNA, 19 nt, Artificial Sequence
  Description of Artificial Sequence: Synthetic oligonucleotide
  Antisense strand to SEQ ID NO: 2023362
aaucacacuuuccuauagg

SEQ ID NO: 2023364 - RNA, 19 nt, Artificial Sequence
  Description of Artificial Sequence: Synthetic oligonucleotide
  Sense strand starting at position 3482 of SEQ ID NO: 1881167
aagacauccucaguugaag

SEQ ID NO: 2023365 - RNA, 19 nt, Artificial Sequence
  Description of Artificial Sequence: Synthetic oligonucleotide
  Antisense strand to SEQ ID NO: 2023364
cuucaacugaggaugucuu

SEQ ID NO: 2023366 - RNA, 19 nt, Artificial Sequence
  Description of Artificial Sequence: Synthetic oligonucleotide
  Sense strand starting at position 3504 of SEQ ID NO: 1881167
accagaauaugucaguaua

SEQ ID NO: 2023367 - RNA, 19 nt, Artificial Sequence
  Description of Artificial Sequence: Synthetic oligonucleotide
  Antisense strand to SEQ ID NO: 2023366
uauacugacauauucuggu

SEQ ID NO: 2023368 - RNA, 19 nt, Artificial Sequence
  Description of Artificial Sequence: Synthetic oligonucleotide
  Sense strand starting at position 3564 of SEQ ID NO: 1881167
gggaaaugauaacagaugu

SEQ ID NO: 2023369 - RNA, 19 nt, Artificial Sequence
  Description of Artificial Sequence: Synthetic oligonucleotide
  Antisense strand to SEQ ID NO: 2023368
acaucuguuaucauuuccc

SEQ ID NO: 2023370 - RNA, 19 nt, Artificial Sequence
  Description of Artificial Sequence: Synthetic oligonucleotide
  Sense strand starting at position 3728 of SEQ ID NO: 1881167
gcaacauaaaggugggaau

SEQ ID NO: 2023371 - RNA, 19 nt, Artificial Sequence
  Description of Artificial Sequence: Synthetic oligonucleotide
  Antisense strand to SEQ ID NO: 2023370
auucccaccuuuauguugc

SEQ ID NO: 2023372 - RNA, 19 nt, Artificial Sequence
  Description of Artificial Sequence: Synthetic oligonucleotide
  Sense strand starting at position 3731 of SEQ ID NO: 1881167
acauaaaggugggaaugua

SEQ ID NO: 2023373 - RNA, 19 nt, Artificial Sequence
  Description of Artificial Sequence: Synthetic oligonucleotide
  Antisense strand to SEQ ID NO: 2023372
uacauucccaccuuuaugu

SEQ ID NO: 2023374 - RNA, 19 nt, Artificial Sequence
  Description of Artificial Sequence: Synthetic oligonucleotide
  Sense strand starting at position 3754 of SEQ ID NO: 1881167
gaccuauauggugguaaga

SEQ ID NO: 2023375 - RNA, 19 nt, Artificial Sequence
  Description of Artificial Sequence: Synthetic oligonucleotide
  Antisense strand to SEQ ID NO: 2023374
ucuuaccaccauauagguc

SEQ ID NO: 2023376 - RNA, 19 nt, Artificial Sequence
  Description of Artificial Sequence: Synthetic oligonucleotide
  Sense strand starting at position 3756 of SEQ ID NO: 1881167
ccuauauggugguaagauu

SEQ ID NO: 2023377 - RNA, 19 nt, Artificial Sequence
  Description of Artificial Sequence: Synthetic oligonucleotide
  Antisense strand to SEQ ID NO: 2023376
aaucuuaccaccauauagg

SEQ ID NO: 2023378 - RNA, 19 nt, Artificial Sequence
  Description of Artificial Sequence: Synthetic oligonucleotide
  Sense strand starting at position 3795 of SEQ ID NO: 1881167
guaacauacuguuucuaag

SEQ ID NO: 2023379 - RNA, 19 nt, Artificial Sequence
  Description of Artificial Sequence: Synthetic oligonucleotide
  Antisense strand to SEQ ID NO: 2023378
cuuagaaacaguauguuac

SEQ ID NO: 2023380 - RNA, 19 nt, Artificial Sequence
  Description of Artificial Sequence: Synthetic oligonucleotide
  Sense strand starting at position 3801 of SEQ ID NO: 1881167
uacuguuucuaaguggacu

SEQ ID NO: 2023381 - RNA, 19 nt, Artificial Sequence
  Description of Artificial Sequence: Synthetic oligonucleotide
  Antisense strand to SEQ ID NO: 2023380
aguccacuuagaaacagua

SEQ ID NO: 2023382 - RNA, 19 nt, Artificial Sequence
  Description of Artificial Sequence: Synthetic oligonucleotide
  Sense strand starting at position 1703 of SEQ ID NO: 1881168
uggugcgccguuucuuaau

SEQ ID NO: 2023383 - RNA, 19 nt, Artificial Sequence
  Description of Artificial Sequence: Synthetic oligonucleotide
  Antisense strand to SEQ ID NO: 2023382
auuaagaaacggcgcacca

SEQ ID NO: 2023384 - RNA, 19 nt, Artificial Sequence
  Description of Artificial Sequence: Synthetic oligonucleotide
  Sense strand starting at position 2326 of SEQ ID NO: 1881168
agguuugucaaagaucugu

SEQ ID NO: 2023385 - RNA, 19 nt, Artificial Sequence
  Description of Artificial Sequence: Synthetic oligonucleotide
  Antisense strand to SEQ ID NO: 2023384
acagaucuuugacaaaccu

SEQ ID NO: 2023386 - RNA, 19 nt, Artificial Sequence
  Description of Artificial Sequence: Synthetic oligonucleotide
  Sense strand starting at position 2330 of SEQ ID NO: 1881168
uugucaaagaucuguguag

SEQ ID NO: 2023387 - RNA, 19 nt, Artificial Sequence
  Description of Artificial Sequence: Synthetic oligonucleotide
  Antisense strand to SEQ ID NO: 2023386
cuacacagaucuuugacaa

SEQ ID NO: 2023388 - RNA, 19 nt, Artificial Sequence
  Description of Artificial Sequence: Synthetic oligonucleotide
  Sense strand starting at position 2332 of SEQ ID NO: 1881168
gucaaagaucuguguagca

SEQ ID NO: 2023389 - RNA, 19 nt, Artificial Sequence
  Description of Artificial Sequence: Synthetic oligonucleotide
  Antisense strand to SEQ ID NO: 2023388
ugcuacacagaucuuugac

SEQ ID NO: 2023390 - RNA, 19 nt, Artificial Sequence
  Description of Artificial Sequence: Synthetic oligonucleotide
  Sense strand starting at position 2334 of SEQ ID NO: 1881168
caaagaucuguguagcaaa

SEQ ID NO: 2023391 - RNA, 19 nt, Artificial Sequence
  Description of Artificial Sequence: Synthetic oligonucleotide
  Antisense strand to SEQ ID NO: 2023390
uuugcuacacagaucuuug

SEQ ID NO: 2023392 - RNA, 19 nt, Artificial Sequence
  Description of Artificial Sequence: Synthetic oligonucleotide
  Sense strand starting at position 2477 of SEQ ID NO: 1881168
cagguuguuguccagggua

SEQ ID NO: 2023393 - RNA, 19 nt, Artificial Sequence
  Description of Artificial Sequence: Synthetic oligonucleotide
  Antisense strand to SEQ ID NO: 2023392
uacccuggacaacaaccug

SEQ ID NO: 2023394 - RNA, 19 nt, Artificial Sequence
  Description of Artificial Sequence: Synthetic oligonucleotide
  Sense strand starting at position 2480 of SEQ ID NO: 1881168
guuguuguccaggguaaua

SEQ ID NO: 2023395 - RNA, 19 nt, Artificial Sequence
  Description of Artificial Sequence: Synthetic oligonucleotide
  Antisense strand to SEQ ID NO: 2023394
uauuacccuggacaacaac

SEQ ID NO: 2023396 - RNA, 19 nt, Artificial Sequence
  Description of Artificial Sequence: Synthetic oligonucleotide
  Sense strand starting at position 2482 of SEQ ID NO: 1881168
uguuguccaggguaauaug

SEQ ID NO: 2023397 - RNA, 19 nt, Artificial Sequence
  Description of Artificial Sequence: Synthetic oligonucleotide
  Antisense strand to SEQ ID NO: 2023396
cauauuacccuggacaaca

SEQ ID NO: 2023398 - RNA, 19 nt, Artificial Sequence
  Description of Artificial Sequence: Synthetic oligonucleotide
  Sense strand starting at position 2490 of SEQ ID NO: 1881168
aggguaauaugagucaagu

SEQ ID NO: 2023399 - RNA, 19 nt, Artificial Sequence
  Description of Artificial Sequence: Synthetic oligonucleotide
  Antisense strand to SEQ ID NO: 2023398
acuugacucauauuacccu

SEQ ID NO: 2023400 - RNA, 19 nt, Artificial Sequence
  Description of Artificial Sequence: Synthetic oligonucleotide
  Sense strand starting at position 2492 of SEQ ID NO: 1881168
gguaauaugagucaaguuu

SEQ ID NO: 2023401 - RNA, 19 nt, Artificial Sequence
  Description of Artificial Sequence: Synthetic oligonucleotide
  Antisense strand to SEQ ID NO: 2023400
aaacuugacucauauuacc

SEQ ID NO: 2023402 - RNA, 19 nt, Artificial Sequence
  Description of Artificial Sequence: Synthetic oligonucleotide
  Sense strand starting at position 2520 of SEQ ID NO: 1881168
cuacuuaaugcauaggcua

SEQ ID NO: 2023403 - RNA, 19 nt, Artificial Sequence
  Description of Artificial Sequence: Synthetic oligonucleotide
  Antisense strand to SEQ ID NO: 2023402
uagccuaugcauuaaguag

SEQ ID NO: 2023404 - RNA, 19 nt, Artificial Sequence
  Description of Artificial Sequence: Synthetic oligonucleotide
  Sense strand starting at position 2590 of SEQ ID NO: 1881168
uaccaagaugucuaugguu

SEQ ID NO: 2023405 - RNA, 19 nt, Artificial Sequence
  Description of Artificial Sequence: Synthetic oligonucleotide
  Antisense strand to SEQ ID NO: 2023404
aaccauagacaucuuggua

SEQ ID NO: 2023406 - RNA, 19 nt, Artificial Sequence
  Description of Artificial Sequence: Synthetic oligonucleotide
  Sense strand starting at position 2599 of SEQ ID NO: 1881168
gucuaugguuggucuggau

SEQ ID NO: 2023407 - RNA, 19 nt, Artificial Sequence
  Description of Artificial Sequence: Synthetic oligonucleotide
  Antisense strand to SEQ ID NO: 2023406
auccagaccaaccauagac

SEQ ID NO: 2023408 - RNA, 19 nt, Artificial Sequence
  Description of Artificial Sequence: Synthetic oligonucleotide
  Sense strand starting at position 2603 of SEQ ID NO: 1881168
augguuggucuggauauga

SEQ ID NO: 2023409 - RNA, 19 nt, Artificial Sequence
  Description of Artificial Sequence: Synthetic oligonucleotide
  Antisense strand to SEQ ID NO: 2023408
ucauauccagaccaaccau

SEQ ID NO: 2023410 - RNA, 19 nt, Artificial Sequence
  Description of Artificial Sequence: Synthetic oligonucleotide
  Sense strand starting at position 2625 of SEQ ID NO: 1881168
cauacugcuuuguuggaga

SEQ ID NO: 2023411 - RNA, 19 nt, Artificial Sequence
  Description of Artificial Sequence: Synthetic oligonucleotide
  Antisense strand to SEQ ID NO: 2023410
ucuccaacaaagcaguaug

SEQ ID NO: 2023412 - RNA, 19 nt, Artificial Sequence
  Description of Artificial Sequence: Synthetic oligonucleotide
  Sense strand starting at position 2627 of SEQ ID NO: 1881168
uacugcuuuguuggagaga

SEQ ID NO: 2023413 - RNA, 19 nt, Artificial Sequence
  Description of Artificial Sequence: Synthetic oligonucleotide
  Antisense strand to SEQ ID NO: 2023412
ucucuccaacaaagcagua

SEQ ID NO: 2023414 - RNA, 19 nt, Artificial Sequence
  Description of Artificial Sequence: Synthetic oligonucleotide
  Sense strand starting at position 2692 of SEQ ID NO: 1881168
gcaucuugaucuuauuuga

SEQ ID NO: 2023415 - RNA, 19 nt, Artificial Sequence
  Description of Artificial Sequence: Synthetic oligonucleotide
  Antisense strand to SEQ ID NO: 2023414
ucaaauaagaucaagaugc

SEQ ID NO: 2023416 - RNA, 19 nt, Artificial Sequence
  Description of Artificial Sequence: Synthetic oligonucleotide
  Sense strand starting at position 2887 of SEQ ID NO: 1881168
cucuguucucaauaaguuu

SEQ ID NO: 2023417 - RNA, 19 nt, Artificial Sequence
  Description of Artificial Sequence: Synthetic oligonucleotide
  Antisense strand to SEQ ID NO: 2023416
aaacuuauugagaacagag

SEQ ID NO: 2023418 - RNA, 19 nt, Artificial Sequence
  Description of Artificial Sequence: Synthetic oligonucleotide
  Sense strand starting at position 2978 of SEQ ID NO: 1881168
cguagaaacuagguuuagu

SEQ ID NO: 2023419 - RNA, 19 nt, Artificial Sequence
  Description of Artificial Sequence: Synthetic oligonucleotide
  Antisense strand to SEQ ID NO: 2023418
acuaaaccuaguuucuacg

SEQ ID NO: 2023420 - RNA, 19 nt, Artificial Sequence
  Description of Artificial Sequence: Synthetic oligonucleotide
  Sense strand starting at position 2981 of SEQ ID NO: 1881168
agaaacuagguuuagugua

SEQ ID NO: 2023421 - RNA, 19 nt, Artificial Sequence
  Description of Artificial Sequence: Synthetic oligonucleotide
  Antisense strand to SEQ ID NO: 2023420
uacacuaaaccuaguuucu

SEQ ID NO: 2023422 - RNA, 19 nt, Artificial Sequence
  Description of Artificial Sequence: Synthetic oligonucleotide
  Sense strand starting at position 2986 of SEQ ID NO: 1881168
cuagguuuaguguaguuua

SEQ ID NO: 2023423 - RNA, 19 nt, Artificial Sequence
  Description of Artificial Sequence: Synthetic oligonucleotide
  Antisense strand to SEQ ID NO: 2023422
uaaacuacacuaaaccuag

SEQ ID NO: 2023424 - RNA, 19 nt, Artificial Sequence
  Description of Artificial Sequence: Synthetic oligonucleotide
  Sense strand starting at position 2996 of SEQ ID NO: 1881168
uguaguuuaguaugacaaa

SEQ ID NO: 2023425 - RNA, 19 nt, Artificial Sequence
  Description of Artificial Sequence: Synthetic oligonucleotide
  Antisense strand to SEQ ID NO: 2023424
uuugucauacuaaacuaca

SEQ ID NO: 2023426 - RNA, 19 nt, Artificial Sequence
  Description of Artificial Sequence: Synthetic oligonucleotide
  Sense strand starting at position 3189 of SEQ ID NO: 1881168
uuagcuuucuauuuguaca

SEQ ID NO: 2023427 - RNA, 19 nt, Artificial Sequence
  Description of Artificial Sequence: Synthetic oligonucleotide
  Antisense strand to SEQ ID NO: 2023426
uguacaaauagaaagcuaa

SEQ ID NO: 2023428 - RNA, 19 nt, Artificial Sequence
  Description of Artificial Sequence: Synthetic oligonucleotide
  Sense strand starting at position 3307 of SEQ ID NO: 1881168
cagucagcauuucugugua

SEQ ID NO: 2023429 - RNA, 19 nt, Artificial Sequence
  Description of Artificial Sequence: Synthetic oligonucleotide
  Antisense strand to SEQ ID NO: 2023428
uacacagaaaugcugacug

SEQ ID NO: 2023430 - RNA, 19 nt, Artificial Sequence
  Description of Artificial Sequence: Synthetic oligonucleotide
  Sense strand starting at position 3309 of SEQ ID NO: 1881168
gucagcauuucuguguaga

SEQ ID NO: 2023431 - RNA, 19 nt, Artificial Sequence
  Description of Artificial Sequence: Synthetic oligonucleotide
  Antisense strand to SEQ ID NO: 2023430
ucuacacagaaaugcugac

SEQ ID NO: 2023432 - RNA, 19 nt, Artificial Sequence
  Description of Artificial Sequence: Synthetic oligonucleotide
  Sense strand starting at position 3362 of SEQ ID NO: 1881168
ucuaguaaaucagucauau

SEQ ID NO: 2023433 - RNA, 19 nt, Artificial Sequence
  Description of Artificial Sequence: Synthetic oligonucleotide
  Antisense strand to SEQ ID NO: 2023432
auaugacugauuuacuaga

SEQ ID NO: 2023434 - RNA, 19 nt, Artificial Sequence
  Description of Artificial Sequence: Synthetic oligonucleotide
  Sense strand starting at position 3392 of SEQ ID NO: 1881168
aagcauuucgaucggugga

SEQ ID NO: 2023435 - RNA, 19 nt, Artificial Sequence
  Description of Artificial Sequence: Synthetic oligonucleotide
  Antisense strand to SEQ ID NO: 2023434
uccaccgaucgaaaugcuu

SEQ ID NO: 2023436 - RNA, 19 nt, Artificial Sequence
  Description of Artificial Sequence: Synthetic oligonucleotide
  Sense strand starting at position 3393 of SEQ ID NO: 1881168
agcauuucgaucgguggau

SEQ ID NO: 2023437 - RNA, 19 nt, Artificial Sequence
  Description of Artificial Sequence: Synthetic oligonucleotide
  Antisense strand to SEQ ID NO: 2023436
auccaccgaucgaaaugcu

SEQ ID NO: 2023438 - RNA, 19 nt, Artificial Sequence
  Description of Artificial Sequence: Synthetic oligonucleotide
  Sense strand starting at position 3394 of SEQ ID NO: 1881168
gcauuucgaucgguggauu

SEQ ID NO: 2023439 - RNA, 19 nt, Artificial Sequence
  Description of Artificial Sequence: Synthetic oligonucleotide
  Antisense strand to SEQ ID NO: 2023438
aauccaccgaucgaaaugc

SEQ ID NO: 2023440 - RNA, 19 nt, Artificial Sequence
  Description of Artificial Sequence: Synthetic oligonucleotide
  Sense strand starting at position 3477 of SEQ ID NO: 1881168
agauguaacuuugcauaac

SEQ ID NO: 2023441 - RNA, 19 nt, Artificial Sequence
  Description of Artificial Sequence: Synthetic oligonucleotide
  Antisense strand to SEQ ID NO: 2023440
guuaugcaaaguuacaucu

SEQ ID NO: 2023442 - RNA, 19 nt, Artificial Sequence
  Description of Artificial Sequence: Synthetic oligonucleotide
  Sense strand starting at position 3607 of SEQ ID NO: 1881168
ucuagacuauugucaucca

SEQ ID NO: 2023443 - RNA, 19 nt, Artificial Sequence
  Description of Artificial Sequence: Synthetic oligonucleotide
  Antisense strand to SEQ ID NO: 2023442
uggaugacaauagucuaga

SEQ ID NO: 2023444 - RNA, 19 nt, Artificial Sequence
  Description of Artificial Sequence: Synthetic oligonucleotide
  Sense strand starting at position 3610 of SEQ ID NO: 1881168
agacuauugucauccagca

SEQ ID NO: 2023445 - RNA, 19 nt, Artificial Sequence
  Description of Artificial Sequence: Synthetic oligonucleotide
  Antisense strand to SEQ ID NO: 2023444
ugcuggaugacaauagucu

SEQ ID NO: 2023446 - RNA, 19 nt, Artificial Sequence
  Description of Artificial Sequence: Synthetic oligonucleotide
  Sense strand starting at position 3758 of SEQ ID NO: 1881168
cuaagagggcucugguguu

SEQ ID NO: 2023447 - RNA, 19 nt, Artificial Sequence
  Description of Artificial Sequence: Synthetic oligonucleotide
  Antisense strand to SEQ ID NO: 2023446
aacaccagagcccucuuag

SEQ ID NO: 2023448 - RNA, 19 nt, Artificial Sequence
  Description of Artificial Sequence: Synthetic oligonucleotide
  Sense strand starting at position 3850 of SEQ ID NO: 1881168
uauguucuaccuggugaca

SEQ ID NO: 2023449 - RNA, 19 nt, Artificial Sequence
  Description of Artificial Sequence: Synthetic oligonucleotide
  Antisense strand to SEQ ID NO: 2023448
ugucaccagguagaacaua

SEQ ID NO: 2023450 - RNA, 19 nt, Artificial Sequence
  Description of Artificial Sequence: Synthetic oligonucleotide
  Sense strand starting at position 3863 of SEQ ID NO: 1881168
gugacauucugccugucaa

SEQ ID NO: 2023451 - RNA, 19 nt, Artificial Sequence
  Description of Artificial Sequence: Synthetic oligonucleotide
  Antisense strand to SEQ ID NO: 2023450
uugacaggcagaaugucac

SEQ ID NO: 2023452 - RNA, 19 nt, Artificial Sequence
  Description of Artificial Sequence: Synthetic oligonucleotide
  Sense strand starting at position 3864 of SEQ ID NO: 1881168
ugacauucugccugucaac

SEQ ID NO: 2023453 - RNA, 19 nt, Artificial Sequence
  Description of Artificial Sequence: Synthetic oligonucleotide
  Antisense strand to SEQ ID NO: 2023452
guugacaggcagaauguca

SEQ ID NO: 2023454 - RNA, 19 nt, Artificial Sequence
  Description of Artificial Sequence: Synthetic oligonucleotide
  Sense strand starting at position 3873 of SEQ ID NO: 1881168
gccugucaaccaugaagca

SEQ ID NO: 2023455 - RNA, 19 nt, Artificial Sequence
  Description of Artificial Sequence: Synthetic oligonucleotide
  Antisense strand to SEQ ID NO: 2023454
ugcuucaugguugacaggc

SEQ ID NO: 2023456 - RNA, 19 nt, Artificial Sequence
  Description of Artificial Sequence: Synthetic oligonucleotide
  Sense strand starting at position 3885 of SEQ ID NO: 1881168
ugaagcauucucuaucuag

SEQ ID NO: 2023457 - RNA, 19 nt, Artificial Sequence
  Description of Artificial Sequence: Synthetic oligonucleotide
  Antisense strand to SEQ ID NO: 2023456
cuagauagagaaugcuuca

SEQ ID NO: 2023458 - RNA, 19 nt, Artificial Sequence
  Description of Artificial Sequence: Synthetic oligonucleotide
  Sense strand starting at position 3900 of SEQ ID NO: 1881168
cuagauuaaggcgguuaga

SEQ ID NO: 2023459 - RNA, 19 nt, Artificial Sequence
  Description of Artificial Sequence: Synthetic oligonucleotide
  Antisense strand to SEQ ID NO: 2023458
ucuaaccgccuuaaucuag

SEQ ID NO: 2023460 - RNA, 19 nt, Artificial Sequence
  Description of Artificial Sequence: Synthetic oligonucleotide
  Sense strand starting at position 3903 of SEQ ID NO: 1881168
gauuaaggcgguuagacua

SEQ ID NO: 2023461 - RNA, 19 nt, Artificial Sequence
  Description of Artificial Sequence: Synthetic oligonucleotide
  Antisense strand to SEQ ID NO: 2023460
uagucuaaccgccuuaauc

SEQ ID NO: 2023462 - RNA, 19 nt, Artificial Sequence
  Description of Artificial Sequence: Synthetic oligonucleotide
  Sense strand starting at position 125 of SEQ ID NO: 1881169
auagcaucagccuaggaaa

SEQ ID NO: 2023463 - RNA, 19 nt, Artificial Sequence
  Description of Artificial Sequence: Synthetic oligonucleotide
  Antisense strand to SEQ ID NO: 2023462
uuuccuaggcugaugcuau

SEQ ID NO: 2023464 - RNA, 19 nt, Artificial Sequence
  Description of Artificial Sequence: Synthetic oligonucleotide
  Sense strand starting at position 217 of SEQ ID NO: 1881169
auagguagauaugugguau

SEQ ID NO: 2023465 - RNA, 19 nt, Artificial Sequence
  Description of Artificial Sequence: Synthetic oligonucleotide
  Antisense strand to SEQ ID NO: 2023464
auaccacauaucuaccuau

SEQ ID NO: 2023466 - RNA, 19 nt, Artificial Sequence
  Description of Artificial Sequence: Synthetic oligonucleotide
  Sense strand starting at position 349 of SEQ ID NO: 1881169
ugcuaaaugagagguagau

SEQ ID NO: 2023467 - RNA, 19 nt, Artificial Sequence
  Description of Artificial Sequence: Synthetic oligonucleotide
  Antisense strand to SEQ ID NO: 2023466
aucuaccucucauuuagca

SEQ ID NO: 2023468 - RNA, 19 nt, Artificial Sequence
  Description of Artificial Sequence: Synthetic oligonucleotide
  Sense strand starting at position 366 of SEQ ID NO: 1881169
auaugaugaucaguccuaa

SEQ ID NO: 2023469 - RNA, 19 nt, Artificial Sequence
  Description of Artificial Sequence: Synthetic oligonucleotide
  Antisense strand to SEQ ID NO: 2023468
uuaggacugaucaucauau

SEQ ID NO: 2023470 - RNA, 19 nt, Artificial Sequence
  Description of Artificial Sequence: Synthetic oligonucleotide
  Sense strand starting at position 686 of SEQ ID NO: 1881169
augagcacaguuuaauaau

SEQ ID NO: 2023471 - RNA, 19 nt, Artificial Sequence
  Description of Artificial Sequence: Synthetic oligonucleotide
  Antisense strand to SEQ ID NO: 2023470
auuauuaaacugugcucau

SEQ ID NO: 2023472 - RNA, 19 nt, Artificial Sequence
  Description of Artificial Sequence: Synthetic oligonucleotide
  Sense strand starting at position 710 of SEQ ID NO: 1881169
ucagauacugaaugcuuaa

SEQ ID NO: 2023473 - RNA, 19 nt, Artificial Sequence
  Description of Artificial Sequence: Synthetic oligonucleotide
  Antisense strand to SEQ ID NO: 2023472
uuaagcauucaguaucuga

SEQ ID NO: 2023474 - RNA, 19 nt, Artificial Sequence
  Description of Artificial Sequence: Synthetic oligonucleotide
  Sense strand starting at position 822 of SEQ ID NO: 1881169
accugagccugauuccaaa

SEQ ID NO: 2023475 - RNA, 19 nt, Artificial Sequence
  Description of Artificial Sequence: Synthetic oligonucleotide
  Antisense strand to SEQ ID NO: 2023474
uuuggaaucaggcucaggu

SEQ ID NO: 2023476 - RNA, 19 nt, Artificial Sequence
  Description of Artificial Sequence: Synthetic oligonucleotide
  Sense strand starting at position 844 of SEQ ID NO: 1881169
ucaguuguuaacugaugga

SEQ ID NO: 2023477 - RNA, 19 nt, Artificial Sequence
  Description of Artificial Sequence: Synthetic oligonucleotide
  Antisense strand to SEQ ID NO: 2023476
uccaucaguuaacaacuga

SEQ ID NO: 2023478 - RNA, 19 nt, Artificial Sequence
  Description of Artificial Sequence: Synthetic oligonucleotide
  Sense strand starting at position 987 of SEQ ID NO: 1881169
gagggagcaaucuguuuag

SEQ ID NO: 2023479 - RNA, 19 nt, Artificial Sequence
  Description of Artificial Sequence: Synthetic oligonucleotide
  Antisense strand to SEQ ID NO: 2023478
cuaaacagauugcucccuc

SEQ ID NO: 2023480 - RNA, 19 nt, Artificial Sequence
  Description of Artificial Sequence: Synthetic oligonucleotide
  Sense strand starting at position 1062 of SEQ ID NO: 1881169
agaaauucugguugcugaa

SEQ ID NO: 2023481 - RNA, 19 nt, Artificial Sequence
  Description of Artificial Sequence: Synthetic oligonucleotide
  Antisense strand to SEQ ID NO: 2023480
uucagcaaccagaauuucu

SEQ ID NO: 2023482 - RNA, 19 nt, Artificial Sequence
  Description of Artificial Sequence: Synthetic oligonucleotide
  Sense strand starting at position 1192 of SEQ ID NO: 1881169
cuauauucgcuggagggau

SEQ ID NO: 2023483 - RNA, 19 nt, Artificial Sequence
  Description of Artificial Sequence: Synthetic oligonucleotide
  Antisense strand to SEQ ID NO: 2023482
aucccuccagcgaauauag

SEQ ID NO: 2023484 - RNA, 19 nt, Artificial Sequence
  Description of Artificial Sequence: Synthetic oligonucleotide
  Sense strand starting at position 1196 of SEQ ID NO: 1881169
auucgcuggagggauuaau

SEQ ID NO: 2023485 - RNA, 19 nt, Artificial Sequence
  Description of Artificial Sequence: Synthetic oligonucleotide
  Antisense strand to SEQ ID NO: 2023484
auuaaucccuccagcgaau

SEQ ID NO: 2023486 - RNA, 19 nt, Artificial Sequence
  Description of Artificial Sequence: Synthetic oligonucleotide
  Sense strand starting at position 1937 of SEQ ID NO: 1881169
gaggguagguuguuuagaa

SEQ ID NO: 2023487 - RNA, 19 nt, Artificial Sequence
  Description of Artificial Sequence: Synthetic oligonucleotide
  Antisense strand to SEQ ID NO: 2023486
uucuaaacaaccuacccuc

SEQ ID NO: 2023488 - RNA, 19 nt, Artificial Sequence
  Description of Artificial Sequence: Synthetic oligonucleotide
  Sense strand starting at position 2225 of SEQ ID NO: 1881169
ggaaguucuuguccagaac

SEQ ID NO: 2023489 - RNA, 19 nt, Artificial Sequence
  Description of Artificial Sequence: Synthetic oligonucleotide
  Antisense strand to SEQ ID NO: 2023488
guucuggacaagaacuucc

SEQ ID NO: 2023490 - RNA, 19 nt, Artificial Sequence
  Description of Artificial Sequence: Synthetic oligonucleotide
  Sense strand starting at position 2226 of SEQ ID NO: 1881169
gaaguucuuguccagaacu

SEQ ID NO: 2023491 - RNA, 19 nt, Artificial Sequence
  Description of Artificial Sequence: Synthetic oligonucleotide
  Antisense strand to SEQ ID NO: 2023490
aguucuggacaagaacuuc

SEQ ID NO: 2023492 - RNA, 19 nt, Artificial Sequence
  Description of Artificial Sequence: Synthetic oligonucleotide
  Sense strand starting at position 2228 of SEQ ID NO: 1881169
aguucuuguccagaacuuc

SEQ ID NO: 2023493 - RNA, 19 nt, Artificial Sequence
  Description of Artificial Sequence: Synthetic oligonucleotide
  Antisense strand to SEQ ID NO: 2023492
gaaguucuggacaagaacu

SEQ ID NO: 2023494 - RNA, 19 nt, Artificial Sequence
  Description of Artificial Sequence: Synthetic oligonucleotide
  Sense strand starting at position 2585 of SEQ ID NO: 1881169
uauggaagcuuguugaaca

SEQ ID NO: 2023495 - RNA, 19 nt, Artificial Sequence
  Description of Artificial Sequence: Synthetic oligonucleotide
  Antisense strand to SEQ ID NO: 2023494
uguucaacaagcuuccaua

SEQ ID NO: 2023496 - RNA, 19 nt, Artificial Sequence
  Description of Artificial Sequence: Synthetic oligonucleotide
  Sense strand starting at position 2601 of SEQ ID NO: 1881169
acaaauuccugggccuuau

SEQ ID NO: 2023497 - RNA, 19 nt, Artificial Sequence
  Description of Artificial Sequence: Synthetic oligonucleotide
  Antisense strand to SEQ ID NO: 2023496
auaaggcccaggaauuugu

SEQ ID NO: 2023498 - RNA, 19 nt, Artificial Sequence
  Description of Artificial Sequence: Synthetic oligonucleotide
  Sense strand starting at position 2610 of SEQ ID NO: 1881169
ugggccuuaucuccagaaa

SEQ ID NO: 2023499 - RNA, 19 nt, Artificial Sequence
  Description of Artificial Sequence: Synthetic oligonucleotide
  Antisense strand to SEQ ID NO: 2023498
uuucuggagauaaggccca

SEQ ID NO: 2023500 - RNA, 19 nt, Artificial Sequence
  Description of Artificial Sequence: Synthetic oligonucleotide
  Sense strand starting at position 2611 of SEQ ID NO: 1881169
gggccuuaucuccagaaau

SEQ ID NO: 2023501 - RNA, 19 nt, Artificial Sequence
  Description of Artificial Sequence: Synthetic oligonucleotide
  Antisense strand to SEQ ID NO: 2023500
auuucuggagauaaggccc

SEQ ID NO: 2023502 - RNA, 19 nt, Artificial Sequence
  Description of Artificial Sequence: Synthetic oligonucleotide
  Sense strand starting at position 2742 of SEQ ID NO: 1881169
guaggaugagaucgauuau

SEQ ID NO: 2023503 - RNA, 19 nt, Artificial Sequence
  Description of Artificial Sequence: Synthetic oligonucleotide
  Antisense strand to SEQ ID NO: 2023502
auaaucgaucucauccuac

SEQ ID NO: 2023504 - RNA, 19 nt, Artificial Sequence
  Description of Artificial Sequence: Synthetic oligonucleotide
  Sense strand starting at position 2748 of SEQ ID NO: 1881169
ugagaucgauuauugcaaa

SEQ ID NO: 2023505 - RNA, 19 nt, Artificial Sequence
  Description of Artificial Sequence: Synthetic oligonucleotide
  Antisense strand to SEQ ID NO: 2023504
uuugcaauaaucgaucuca

SEQ ID NO: 2023506 - RNA, 19 nt, Artificial Sequence
  Description of Artificial Sequence: Synthetic oligonucleotide
  Sense strand starting at position 2804 of SEQ ID NO: 1881169
aggugaugugcaggcauuu

SEQ ID NO: 2023507 - RNA, 19 nt, Artificial Sequence
  Description of Artificial Sequence: Synthetic oligonucleotide
  Antisense strand to SEQ ID NO: 2023506
aaaugccugcacaucaccu

SEQ ID NO: 2023508 - RNA, 19 nt, Artificial Sequence
  Description of Artificial Sequence: Synthetic oligonucleotide
  Sense strand starting at position 2813 of SEQ ID NO: 1881169
gcaggcauuugcccacaga

SEQ ID NO: 2023509 - RNA, 19 nt, Artificial Sequence
  Description of Artificial Sequence: Synthetic oligonucleotide
  Antisense strand to SEQ ID NO: 2023508
ucugugggcaaaugccugc

SEQ ID NO: 2023510 - RNA, 19 nt, Artificial Sequence
  Description of Artificial Sequence: Synthetic oligonucleotide
  Sense strand starting at position 2905 of SEQ ID NO: 1881169
gaaugauggccugaaggca

SEQ ID NO: 2023511 - RNA, 19 nt, Artificial Sequence
  Description of Artificial Sequence: Synthetic oligonucleotide
  Antisense strand to SEQ ID NO: 2023510
ugccuucaggccaucauuc

SEQ ID NO: 2023512 - RNA, 19 nt, Artificial Sequence
  Description of Artificial Sequence: Synthetic oligonucleotide
  Sense strand starting at position 2999 of SEQ ID NO: 1881169
cccugucuucuugaaagau

SEQ ID NO: 2023513 - RNA, 19 nt, Artificial Sequence
  Description of Artificial Sequence: Synthetic oligonucleotide
  Antisense strand to SEQ ID NO: 2023512
aucuuucaagaagacaggg

SEQ ID NO: 2023514 - RNA, 19 nt, Artificial Sequence
  Description of Artificial Sequence: Synthetic oligonucleotide
  Sense strand starting at position 3119 of SEQ ID NO: 1881169
uguugaauuugguugccau

SEQ ID NO: 2023515 - RNA, 19 nt, Artificial Sequence
  Description of Artificial Sequence: Synthetic oligonucleotide
  Antisense strand to SEQ ID NO: 2023514
auggcaaccaaauucaaca

SEQ ID NO: 2023516 - RNA, 19 nt, Artificial Sequence
  Description of Artificial Sequence: Synthetic oligonucleotide
  Sense strand starting at position 3120 of SEQ ID NO: 1881169
guugaauuugguugccauu

SEQ ID NO: 2023517 - RNA, 19 nt, Artificial Sequence
  Description of Artificial Sequence: Synthetic oligonucleotide
  Antisense strand to SEQ ID NO: 2023516
aauggcaaccaaauucaac

SEQ ID NO: 2023518 - RNA, 19 nt, Artificial Sequence
  Description of Artificial Sequence: Synthetic oligonucleotide
  Sense strand starting at position 3172 of SEQ ID NO: 1881169
auuccauuccaguaguuaa

SEQ ID NO: 2023519 - RNA, 19 nt, Artificial Sequence
  Description of Artificial Sequence: Synthetic oligonucleotide
  Antisense strand to SEQ ID NO: 2023518
uuaacuacuggaauggaau

SEQ ID NO: 2023520 - RNA, 19 nt, Artificial Sequence
  Description of Artificial Sequence: Synthetic oligonucleotide
  Sense strand starting at position 3182 of SEQ ID NO: 1881169
aguaguuaauccucauaau

SEQ ID NO: 2023521 - RNA, 19 nt, Artificial Sequence
  Description of Artificial Sequence: Synthetic oligonucleotide
  Antisense strand to SEQ ID NO: 2023520
auuaugaggauuaacuacu

SEQ ID NO: 2023522 - RNA, 19 nt, Artificial Sequence
  Description of Artificial Sequence: Synthetic oligonucleotide
  Sense strand starting at position 3183 of SEQ ID NO: 1881169
guaguuaauccucauaaua

SEQ ID NO: 2023523 - RNA, 19 nt, Artificial Sequence
  Description of Artificial Sequence: Synthetic oligonucleotide
  Antisense strand to SEQ ID NO: 2023522
uauuaugaggauuaacuac

SEQ ID NO: 2023524 - RNA, 19 nt, Artificial Sequence
  Description of Artificial Sequence: Synthetic oligonucleotide
  Sense strand starting at position 3207 of SEQ ID NO: 1881169
uucuuuccucuguagacau

SEQ ID NO: 2023525 - RNA, 19 nt, Artificial Sequence
  Description of Artificial Sequence: Synthetic oligonucleotide
  Antisense strand to SEQ ID NO: 2023524
augucuacagaggaaagaa

SEQ ID NO: 2023526 - RNA, 19 nt, Artificial Sequence
  Description of Artificial Sequence: Synthetic oligonucleotide
  Sense strand starting at position 3240 of SEQ ID NO: 1881169
uagugagagggucacuuua

SEQ ID NO: 2023527 - RNA, 19 nt, Artificial Sequence
  Description of Artificial Sequence: Synthetic oligonucleotide
  Antisense strand to SEQ ID NO: 2023526
uaaagugacccucucacua

SEQ ID NO: 2023528 - RNA, 19 nt, Artificial Sequence
  Description of Artificial Sequence: Synthetic oligonucleotide
  Sense strand starting at position 3242 of SEQ ID NO: 1881169
gugagagggucacuuuaca

SEQ ID NO: 2023529 - RNA, 19 nt, Artificial Sequence
  Description of Artificial Sequence: Synthetic oligonucleotide
  Antisense strand to SEQ ID NO: 2023528
uguaaagugacccucucac

SEQ ID NO: 2023530 - RNA, 19 nt, Artificial Sequence
  Description of Artificial Sequence: Synthetic oligonucleotide
  Sense strand starting at position 3262 of SEQ ID NO: 1881169
gguguugugggugcgagau

SEQ ID NO: 2023531 - RNA, 19 nt, Artificial Sequence
  Description of Artificial Sequence: Synthetic oligonucleotide
  Antisense strand to SEQ ID NO: 2023530
aucucgcacccacaacacc

SEQ ID NO: 2023532 - RNA, 19 nt, Artificial Sequence
  Description of Artificial Sequence: Synthetic oligonucleotide
  Sense strand starting at position 3527 of SEQ ID NO: 1881169
cuucuauaccaaggagguu

SEQ ID NO: 2023533 - RNA, 19 nt, Artificial Sequence
  Description of Artificial Sequence: Synthetic oligonucleotide
  Antisense strand to SEQ ID NO: 2023532
aaccuccuugguauagaag

SEQ ID NO: 2023534 - RNA, 19 nt, Artificial Sequence
  Description of Artificial Sequence: Synthetic oligonucleotide
  Sense strand starting at position 3536 of SEQ ID NO: 1881169
caaggagguuaaucaccau

SEQ ID NO: 2023535 - RNA, 19 nt, Artificial Sequence
  Description of Artificial Sequence: Synthetic oligonucleotide
  Antisense strand to SEQ ID NO: 2023534
auggugauuaaccuccuug

SEQ ID NO: 2023536 - RNA, 19 nt, Artificial Sequence
  Description of Artificial Sequence: Synthetic oligonucleotide
  Sense strand starting at position 3539 of SEQ ID NO: 1881169
ggagguuaaucaccauuag

SEQ ID NO: 2023537 - RNA, 19 nt, Artificial Sequence
  Description of Artificial Sequence: Synthetic oligonucleotide
  Antisense strand to SEQ ID NO: 2023536
cuaauggugauuaaccucc

SEQ ID NO: 2023538 - RNA, 19 nt, Artificial Sequence
  Description of Artificial Sequence: Synthetic oligonucleotide
  Sense strand starting at position 3588 of SEQ ID NO: 1881169
acauaagcugucuaaauag

SEQ ID NO: 2023539 - RNA, 19 nt, Artificial Sequence
  Description of Artificial Sequence: Synthetic oligonucleotide
  Antisense strand to SEQ ID NO: 2023538
cuauuuagacagcuuaugu

SEQ ID NO: 2023540 - RNA, 19 nt, Artificial Sequence
  Description of Artificial Sequence: Synthetic oligonucleotide
  Sense strand starting at position 3966 of SEQ ID NO: 1881169
guucccagucaucauacua

SEQ ID NO: 2023541 - RNA, 19 nt, Artificial Sequence
  Description of Artificial Sequence: Synthetic oligonucleotide
  Antisense strand to SEQ ID NO: 2023540
uaguaugaugacugggaac

SEQ ID NO: 2023542 - RNA, 19 nt, Artificial Sequence
  Description of Artificial Sequence: Synthetic oligonucleotide
  Sense strand starting at position 218 of SEQ ID NO: 1881170
cggauagauagauggucau

SEQ ID NO: 2023543 - RNA, 19 nt, Artificial Sequence
  Description of Artificial Sequence: Synthetic oligonucleotide
  Antisense strand to SEQ ID NO: 2023542
augaccaucuaucuauccg

SEQ ID NO: 2023544 - RNA, 19 nt, Artificial Sequence
  Description of Artificial Sequence: Synthetic oligonucleotide
  Sense strand starting at position 224 of SEQ ID NO: 1881170
gauagauggucauugauca

SEQ ID NO: 2023545 - RNA, 19 nt, Artificial Sequence
  Description of Artificial Sequence: Synthetic oligonucleotide
  Antisense strand to SEQ ID NO: 2023544
ugaucaaugaccaucuauc

SEQ ID NO: 2023546 - RNA, 19 nt, Artificial Sequence
  Description of Artificial Sequence: Synthetic oligonucleotide
  Sense strand starting at position 225 of SEQ ID NO: 1881170
auagauggucauugaucau

SEQ ID NO: 2023547 - RNA, 19 nt, Artificial Sequence
  Description of Artificial Sequence: Synthetic oligonucleotide
  Antisense strand to SEQ ID NO: 2023546
augaucaaugaccaucuau

SEQ ID NO: 2023548 - RNA, 19 nt, Artificial Sequence
  Description of Artificial Sequence: Synthetic oligonucleotide
  Sense strand starting at position 228 of SEQ ID NO: 1881170
gauggucauugaucauaua

SEQ ID NO: 2023549 - RNA, 19 nt, Artificial Sequence
  Description of Artificial Sequence: Synthetic oligonucleotide
  Antisense strand to SEQ ID NO: 2023548
uauaugaucaaugaccauc

SEQ ID NO: 2023550 - RNA, 19 nt, Artificial Sequence
  Description of Artificial Sequence: Synthetic oligonucleotide
  Sense strand starting at position 245 of SEQ ID NO: 1881170
uaaagagucuuuguaggga

SEQ ID NO: 2023551 - RNA, 19 nt, Artificial Sequence
  Description of Artificial Sequence: Synthetic oligonucleotide
  Antisense strand to SEQ ID NO: 2023550
ucccuacaaagacucuuua

SEQ ID NO: 2023552 - RNA, 19 nt, Artificial Sequence
  Description of Artificial Sequence: Synthetic oligonucleotide
  Sense strand starting at position 280 of SEQ ID NO: 1881170
uagauuauuguuugaagac

SEQ ID NO: 2023553 - RNA, 19 nt, Artificial Sequence
  Description of Artificial Sequence: Synthetic oligonucleotide
  Antisense strand to SEQ ID NO: 2023552
gucuucaaacaauaaucua

SEQ ID NO: 2023554 - RNA, 19 nt, Artificial Sequence
  Description of Artificial Sequence: Synthetic oligonucleotide
  Sense strand starting at position 349 of SEQ ID NO: 1881170
ugagaauucuggucucuga

SEQ ID NO: 2023555 - RNA, 19 nt, Artificial Sequence
  Description of Artificial Sequence: Synthetic oligonucleotide
  Antisense strand to SEQ ID NO: 2023554
ucagagaccagaauucuca

SEQ ID NO: 2023556 - RNA, 19 nt, Artificial Sequence
  Description of Artificial Sequence: Synthetic oligonucleotide
  Sense strand starting at position 376 of SEQ ID NO: 1881170
guggcaguuuaauuucuga

SEQ ID NO: 2023557 - RNA, 19 nt, Artificial Sequence
  Description of Artificial Sequence: Synthetic oligonucleotide
  Antisense strand to SEQ ID NO: 2023556
ucagaaauuaaacugccac

SEQ ID NO: 2023558 - RNA, 19 nt, Artificial Sequence
  Description of Artificial Sequence: Synthetic oligonucleotide
  Sense strand starting at position 504 of SEQ ID NO: 1881170
agaagaggugcugaaguuu

SEQ ID NO: 2023559 - RNA, 19 nt, Artificial Sequence
  Description of Artificial Sequence: Synthetic oligonucleotide
  Antisense strand to SEQ ID NO: 2023558
aaacuucagcaccucuucu

SEQ ID NO: 2023560 - RNA, 19 nt, Artificial Sequence
  Description of Artificial Sequence: Synthetic oligonucleotide
  Sense strand starting at position 553 of SEQ ID NO: 1881170
ugugaacccgucuagggaa

SEQ ID NO: 2023561 - RNA, 19 nt, Artificial Sequence
  Description of Artificial Sequence: Synthetic oligonucleotide
  Antisense strand to SEQ ID NO: 2023560
uucccuagacggguucaca

SEQ ID NO: 2023562 - RNA, 19 nt, Artificial Sequence
  Description of Artificial Sequence: Synthetic oligonucleotide
  Sense strand starting at position 600 of SEQ ID NO: 1881170
agacacauuuguuaaagaa

SEQ ID NO: 2023563 - RNA, 19 nt, Artificial Sequence
  Description of Artificial Sequence: Synthetic oligonucleotide
  Antisense strand to SEQ ID NO: 2023562
uucuuuaacaaaugugucu

SEQ ID NO: 2023564 - RNA, 19 nt, Artificial Sequence
  Description of Artificial Sequence: Synthetic oligonucleotide
  Sense strand starting at position 645 of SEQ ID NO: 1881170
uuaguuaaccaguagcaaa

SEQ ID NO: 2023565 - RNA, 19 nt, Artificial Sequence
  Description of Artificial Sequence: Synthetic oligonucleotide
  Antisense strand to SEQ ID NO: 2023564
uuugcuacugguuaacuaa

SEQ ID NO: 2023566 - RNA, 19 nt, Artificial Sequence
  Description of Artificial Sequence: Synthetic oligonucleotide
  Sense strand starting at position 823 of SEQ ID NO: 1881170
uuggaaaugccacagugau

SEQ ID NO: 2023567 - RNA, 19 nt, Artificial Sequence
  Description of Artificial Sequence: Synthetic oligonucleotide
  Antisense strand to SEQ ID NO: 2023566
aucacuguggcauuuccaa

SEQ ID NO: 2023568 - RNA, 19 nt, Artificial Sequence
  Description of Artificial Sequence: Synthetic oligonucleotide
  Sense strand starting at position 918 of SEQ ID NO: 1881170
agugaaucuggaugaggca

SEQ ID NO: 2023569 - RNA, 19 nt, Artificial Sequence
  Description of Artificial Sequence: Synthetic oligonucleotide
  Antisense strand to SEQ ID NO: 2023568
ugccucauccagauucacu

SEQ ID NO: 2023570 - RNA, 19 nt, Artificial Sequence
  Description of Artificial Sequence: Synthetic oligonucleotide
  Sense strand starting at position 1025 of SEQ ID NO: 1881170
guugauggugaugagugau

SEQ ID NO: 2023571 - RNA, 19 nt, Artificial Sequence
  Description of Artificial Sequence: Synthetic oligonucleotide
  Antisense strand to SEQ ID NO: 2023570
aucacucaucaccaucaac

SEQ ID NO: 2023572 - RNA, 19 nt, Artificial Sequence
  Description of Artificial Sequence: Synthetic oligonucleotide
  Sense strand starting at position 1028 of SEQ ID NO: 1881170
gauggugaugagugauaac

SEQ ID NO: 2023573 - RNA, 19 nt, Artificial Sequence
  Description of Artificial Sequence: Synthetic oligonucleotide
  Antisense strand to SEQ ID NO: 2023572
guuaucacucaucaccauc

SEQ ID NO: 2023574 - RNA, 19 nt, Artificial Sequence
  Description of Artificial Sequence: Synthetic oligonucleotide
  Sense strand starting at position 1275 of SEQ ID NO: 1881170
guaaacuaagaaugcuuua

SEQ ID NO: 2023575 - RNA, 19 nt, Artificial Sequence
  Description of Artificial Sequence: Synthetic oligonucleotide
  Antisense strand to SEQ ID NO: 2023574
uaaagcauucuuaguuuac

SEQ ID NO: 2023576 - RNA, 19 nt, Artificial Sequence
  Description of Artificial Sequence: Synthetic oligonucleotide
  Sense strand starting at position 1365 of SEQ ID NO: 1881170
gguggaaugguucacuuua

SEQ ID NO: 2023577 - RNA, 19 nt, Artificial Sequence
  Description of Artificial Sequence: Synthetic oligonucleotide
  Antisense strand to SEQ ID NO: 2023576
uaaagugaaccauuccacc

SEQ ID NO: 2023578 - RNA, 19 nt, Artificial Sequence
  Description of Artificial Sequence: Synthetic oligonucleotide
  Sense strand starting at position 1433 of SEQ ID NO: 1881170
ucaguuuagauggaauguu

SEQ ID NO: 2023579 - RNA, 19 nt, Artificial Sequence
  Description of Artificial Sequence: Synthetic oligonucleotide
  Antisense strand to SEQ ID NO: 2023578
aacauuccaucuaaacuga

SEQ ID NO: 2023580 - RNA, 19 nt, Artificial Sequence
  Description of Artificial Sequence: Synthetic oligonucleotide
  Sense strand starting at position 1524 of SEQ ID NO: 1881170
uuauuuauugugugaccuu

SEQ ID NO: 2023581 - RNA, 19 nt, Artificial Sequence
  Description of Artificial Sequence: Synthetic oligonucleotide
  Antisense strand to SEQ ID NO: 2023580
aaggucacacaauaaauaa

SEQ ID NO: 2023582 - RNA, 19 nt, Artificial Sequence
  Description of Artificial Sequence: Synthetic oligonucleotide
  Sense strand starting at position 1652 of SEQ ID NO: 1881170
uugagauucuuuccauagg

SEQ ID NO: 2023583 - RNA, 19 nt, Artificial Sequence
  Description of Artificial Sequence: Synthetic oligonucleotide
  Antisense strand to SEQ ID NO: 2023582
ccuauggaaagaaucucaa

SEQ ID NO: 2023584 - RNA, 19 nt, Artificial Sequence
  Description of Artificial Sequence: Synthetic oligonucleotide
  Sense strand starting at position 1675 of SEQ ID NO: 1881170
cggguagugaugucucguu

SEQ ID NO: 2023585 - RNA, 19 nt, Artificial Sequence
  Description of Artificial Sequence: Synthetic oligonucleotide
  Antisense strand to SEQ ID NO: 2023584
aacgagacaucacuacccg

SEQ ID NO: 2023586 - RNA, 19 nt, Artificial Sequence
  Description of Artificial Sequence: Synthetic oligonucleotide
  Sense strand starting at position 1889 of SEQ ID NO: 1881170
gugaaacacaccugagguu

SEQ ID NO: 2023587 - RNA, 19 nt, Artificial Sequence
  Description of Artificial Sequence: Synthetic oligonucleotide
  Antisense strand to SEQ ID NO: 2023586
aaccucagguguguuucac

SEQ ID NO: 2023588 - RNA, 19 nt, Artificial Sequence
  Description of Artificial Sequence: Synthetic oligonucleotide
  Sense strand starting at position 2059 of SEQ ID NO: 1881170
aguuuaagccguuauauuu

SEQ ID NO: 2023589 - RNA, 19 nt, Artificial Sequence
  Description of Artificial Sequence: Synthetic oligonucleotide
  Antisense strand to SEQ ID NO: 2023588
aaauauaacggcuuaaacu

SEQ ID NO: 2023590 - RNA, 19 nt, Artificial Sequence
  Description of Artificial Sequence: Synthetic oligonucleotide
  Sense strand starting at position 2083 of SEQ ID NO: 1881170
ugauuuauuacgcagcagu

SEQ ID NO: 2023591 - RNA, 19 nt, Artificial Sequence
  Description of Artificial Sequence: Synthetic oligonucleotide
  Antisense strand to SEQ ID NO: 2023590
acugcugcguaauaaauca

SEQ ID NO: 2023592 - RNA, 19 nt, Artificial Sequence
  Description of Artificial Sequence: Synthetic oligonucleotide
  Sense strand starting at position 2290 of SEQ ID NO: 1881170
acuugauacgcucaauaaa

SEQ ID NO: 2023593 - RNA, 19 nt, Artificial Sequence
  Description of Artificial Sequence: Synthetic oligonucleotide
  Antisense strand to SEQ ID NO: 2023592
uuuauugagcguaucaagu

SEQ ID NO: 2023594 - RNA, 19 nt, Artificial Sequence
  Description of Artificial Sequence: Synthetic oligonucleotide
  Sense strand starting at position 2367 of SEQ ID NO: 1881170
gaaacuuaacguuaauugu

SEQ ID NO: 2023595 - RNA, 19 nt, Artificial Sequence
  Description of Artificial Sequence: Synthetic oligonucleotide
  Antisense strand to SEQ ID NO: 2023594
acaauuaacguuaaguuuc

SEQ ID NO: 2023596 - RNA, 19 nt, Artificial Sequence
  Description of Artificial Sequence: Synthetic oligonucleotide
  Sense strand starting at position 2505 of SEQ ID NO: 1881170
auguuaguaucugccauuu

SEQ ID NO: 2023597 - RNA, 19 nt, Artificial Sequence
  Description of Artificial Sequence: Synthetic oligonucleotide
  Antisense strand to SEQ ID NO: 2023596
aaauggcagauacuaacau

SEQ ID NO: 2023598 - RNA, 19 nt, Artificial Sequence
  Description of Artificial Sequence: Synthetic oligonucleotide
  Sense strand starting at position 2716 of SEQ ID NO: 1881170
cuucuuagauacucugaga

SEQ ID NO: 2023599 - RNA, 19 nt, Artificial Sequence
  Description of Artificial Sequence: Synthetic oligonucleotide
  Antisense strand to SEQ ID NO: 2023598
ucucagaguaucuaagaag

SEQ ID NO: 2023600 - RNA, 19 nt, Artificial Sequence
  Description of Artificial Sequence: Synthetic oligonucleotide
  Sense strand starting at position 2733 of SEQ ID NO: 1881170
gagagauaauaagagaaga

SEQ ID NO: 2023601 - RNA, 19 nt, Artificial Sequence
  Description of Artificial Sequence: Synthetic oligonucleotide
  Antisense strand to SEQ ID NO: 2023600
ucuucucuuauuaucucuc

SEQ ID NO: 2023602 - RNA, 19 nt, Artificial Sequence
  Description of Artificial Sequence: Synthetic oligonucleotide
  Sense strand starting at position 2748 of SEQ ID NO: 1881170
aagaauggauuguuacuua

SEQ ID NO: 2023603 - RNA, 19 nt, Artificial Sequence
  Description of Artificial Sequence: Synthetic oligonucleotide
  Antisense strand to SEQ ID NO: 2023602
uaaguaacaauccauucuu

SEQ ID NO: 2023604 - RNA, 19 nt, Artificial Sequence
  Description of Artificial Sequence: Synthetic oligonucleotide
  Sense strand starting at position 2952 of SEQ ID NO: 1881170
gucaaaugggucuaauagu

SEQ ID NO: 2023605 - RNA, 19 nt, Artificial Sequence
  Description of Artificial Sequence: Synthetic oligonucleotide
  Antisense strand to SEQ ID NO: 2023604
acuauuagacccauuugac

SEQ ID NO: 2023606 - RNA, 19 nt, Artificial Sequence
  Description of Artificial Sequence: Synthetic oligonucleotide
  Sense strand starting at position 3006 of SEQ ID NO: 1881170
augagaaucuguuuccuaa

SEQ ID NO: 2023607 - RNA, 19 nt, Artificial Sequence
  Description of Artificial Sequence: Synthetic oligonucleotide
  Antisense strand to SEQ ID NO: 2023606
uuaggaaacagauucucau

SEQ ID NO: 2023608 - RNA, 19 nt, Artificial Sequence
  Description of Artificial Sequence: Synthetic oligonucleotide
  Sense strand starting at position 3107 of SEQ ID NO: 1881170
gggauucugugauuaagug

SEQ ID NO: 2023609 - RNA, 19 nt, Artificial Sequence
  Description of Artificial Sequence: Synthetic oligonucleotide
  Antisense strand to SEQ ID NO: 2023608
cacuuaaucacagaauccc

SEQ ID NO: 2023610 - RNA, 19 nt, Artificial Sequence
  Description of Artificial Sequence: Synthetic oligonucleotide
  Sense strand starting at position 3176 of SEQ ID NO: 1881170
uguaaaguugaacaguuaa

SEQ ID NO: 2023611 - RNA, 19 nt, Artificial Sequence
  Description of Artificial Sequence: Synthetic oligonucleotide
  Antisense strand to SEQ ID NO: 2023610
uuaacuguucaacuuuaca

SEQ ID NO: 2023612 - RNA, 19 nt, Artificial Sequence
  Description of Artificial Sequence: Synthetic oligonucleotide
  Sense strand starting at position 3484 of SEQ ID NO: 1881170
agacgaucauaacuaaguu

SEQ ID NO: 2023613 - RNA, 19 nt, Artificial Sequence
  Description of Artificial Sequence: Synthetic oligonucleotide
  Antisense strand to SEQ ID NO: 2023612
aacuuaguuaugaucgucu

SEQ ID NO: 2023614 - RNA, 19 nt, Artificial Sequence
  Description of Artificial Sequence: Synthetic oligonucleotide
  Sense strand starting at position 3605 of SEQ ID NO: 1881170
gucacugaaccuugaggga

SEQ ID NO: 2023615 - RNA, 19 nt, Artificial Sequence
  Description of Artificial Sequence: Synthetic oligonucleotide
  Antisense strand to SEQ ID NO: 2023614
ucccucaagguucagugac

SEQ ID NO: 2023616 - RNA, 19 nt, Artificial Sequence
  Description of Artificial Sequence: Synthetic oligonucleotide
  Sense strand starting at position 3644 of SEQ ID NO: 1881170
ucaggcugugaucagaagu

SEQ ID NO: 2023617 - RNA, 19 nt, Artificial Sequence
  Description of Artificial Sequence: Synthetic oligonucleotide
  Antisense strand to SEQ ID NO: 2023616
acuucugaucacagccuga

SEQ ID NO: 2023618 - RNA, 19 nt, Artificial Sequence
  Description of Artificial Sequence: Synthetic oligonucleotide
  Sense strand starting at position 3673 of SEQ ID NO: 1881170
uguguuacauaauuaagga

SEQ ID NO: 2023619 - RNA, 19 nt, Artificial Sequence
  Description of Artificial Sequence: Synthetic oligonucleotide
  Antisense strand to SEQ ID NO: 2023618
uccuuaauuauguaacaca

SEQ ID NO: 2023620 - RNA, 19 nt, Artificial Sequence
  Description of Artificial Sequence: Synthetic oligonucleotide
  Sense strand starting at position 3863 of SEQ ID NO: 1881170
gagcaacacggguauauau

SEQ ID NO: 2023621 - RNA, 19 nt, Artificial Sequence
  Description of Artificial Sequence: Synthetic oligonucleotide
  Antisense strand to SEQ ID NO: 2023620
auauauacccguguugcuc

SEQ ID NO: 2023622 - RNA, 19 nt, Artificial Sequence
  Description of Artificial Sequence: Synthetic oligonucleotide
  Sense strand starting at position 221 of SEQ ID NO: 1881171
uuuauaguuccugaggagu

SEQ ID NO: 2023623 - RNA, 19 nt, Artificial Sequence
  Description of Artificial Sequence: Synthetic oligonucleotide
  Antisense strand to SEQ ID NO: 2023622
acuccucaggaacuauaaa

SEQ ID NO: 2023624 - RNA, 19 nt, Artificial Sequence
  Description of Artificial Sequence: Synthetic oligonucleotide
  Sense strand starting at position 753 of SEQ ID NO: 1881171
guaguacacuuacuuauaa

SEQ ID NO: 2023625 - RNA, 19 nt, Artificial Sequence
  Description of Artificial Sequence: Synthetic oligonucleotide
  Antisense strand to SEQ ID NO: 2023624
uuauaaguaaguguacuac

SEQ ID NO: 2023626 - RNA, 19 nt, Artificial Sequence
  Description of Artificial Sequence: Synthetic oligonucleotide
  Sense strand starting at position 1097 of SEQ ID NO: 1881171
aagaacagucagugcuaca

SEQ ID NO: 2023627 - RNA, 19 nt, Artificial Sequence
  Description of Artificial Sequence: Synthetic oligonucleotide
  Antisense strand to SEQ ID NO: 2023626
uguagcacugacuguucuu

SEQ ID NO: 2023628 - RNA, 19 nt, Artificial Sequence
  Description of Artificial Sequence: Synthetic oligonucleotide
  Sense strand starting at position 1233 of SEQ ID NO: 1881171
ggauaagaauacuaagaca

SEQ ID NO: 2023629 - RNA, 19 nt, Artificial Sequence
  Description of Artificial Sequence: Synthetic oligonucleotide
  Antisense strand to SEQ ID NO: 2023628
ugucuuaguauucuuaucc

SEQ ID NO: 2023630 - RNA, 19 nt, Artificial Sequence
  Description of Artificial Sequence: Synthetic oligonucleotide
  Sense strand starting at position 1391 of SEQ ID NO: 1881171
acugaaauuugggagaggu

SEQ ID NO: 2023631 - RNA, 19 nt, Artificial Sequence
  Description of Artificial Sequence: Synthetic oligonucleotide
  Antisense strand to SEQ ID NO: 2023630
accucucccaaauuucagu

SEQ ID NO: 2023632 - RNA, 19 nt, Artificial Sequence
  Description of Artificial Sequence: Synthetic oligonucleotide
  Sense strand starting at position 1572 of SEQ ID NO: 1881171
guaggugaacccuagguca

SEQ ID NO: 2023633 - RNA, 19 nt, Artificial Sequence
  Description of Artificial Sequence: Synthetic oligonucleotide
  Antisense strand to SEQ ID NO: 2023632
ugaccuaggguucaccuac

SEQ ID NO: 2023634 - RNA, 19 nt, Artificial Sequence
  Description of Artificial Sequence: Synthetic oligonucleotide
  Sense strand starting at position 1622 of SEQ ID NO: 1881171
caacauaagcgccagugau

SEQ ID NO: 2023635 - RNA, 19 nt, Artificial Sequence
  Description of Artificial Sequence: Synthetic oligonucleotide
  Antisense strand to SEQ ID NO: 2023634
aucacuggcgcuuauguug

SEQ ID NO: 2023636 - RNA, 19 nt, Artificial Sequence
  Description of Artificial Sequence: Synthetic oligonucleotide
  Sense strand starting at position 1662 of SEQ ID NO: 1881171
caugucugauuccuagaag

SEQ ID NO: 2023637 - RNA, 19 nt, Artificial Sequence
  Description of Artificial Sequence: Synthetic oligonucleotide
  Antisense strand to SEQ ID NO: 2023636
cuucuaggaaucagacaug

SEQ ID NO: 2023638 - RNA, 19 nt, Artificial Sequence
  Description of Artificial Sequence: Synthetic oligonucleotide
  Sense strand starting at position 1681 of SEQ ID NO: 1881171
acucaaccugucuguauuu

SEQ ID NO: 2023639 - RNA, 19 nt, Artificial Sequence
  Description of Artificial Sequence: Synthetic oligonucleotide
  Antisense strand to SEQ ID NO: 2023638
aaauacagacagguugagu

SEQ ID NO: 2023640 - RNA, 19 nt, Artificial Sequence
  Description of Artificial Sequence: Synthetic oligonucleotide
  Sense strand starting at position 1690 of SEQ ID NO: 1881171
gucuguauuuccucgacga

SEQ ID NO: 2023641 - RNA, 19 nt, Artificial Sequence
  Description of Artificial Sequence: Synthetic oligonucleotide
  Antisense strand to SEQ ID NO: 2023640
ucgucgaggaaauacagac

SEQ ID NO: 2023642 - RNA, 19 nt, Artificial Sequence
  Description of Artificial Sequence: Synthetic oligonucleotide
  Sense strand starting at position 1691 of SEQ ID NO: 1881171
ucuguauuuccucgacgac

SEQ ID NO: 2023643 - RNA, 19 nt, Artificial Sequence
  Description of Artificial Sequence: Synthetic oligonucleotide
  Antisense strand to SEQ ID NO: 2023642
gucgucgaggaaauacaga

SEQ ID NO: 2023644 - RNA, 19 nt, Artificial Sequence
  Description of Artificial Sequence: Synthetic oligonucleotide
  Sense strand starting at position 1694 of SEQ ID NO: 1881171
guauuuccucgacgacuuc

SEQ ID NO: 2023645 - RNA, 19 nt, Artificial Sequence
  Description of Artificial Sequence: Synthetic oligonucleotide
  Antisense strand to SEQ ID NO: 2023644
gaagucgucgaggaaauac

SEQ ID NO: 2023646 - RNA, 19 nt, Artificial Sequence
  Description of Artificial Sequence: Synthetic oligonucleotide
  Sense strand starting at position 1724 of SEQ ID NO: 1881171
ccaaguucccaagaguucu

SEQ ID NO: 2023647 - RNA, 19 nt, Artificial Sequence
  Description of Artificial Sequence: Synthetic oligonucleotide
  Antisense strand to SEQ ID NO: 2023646
agaacucuugggaacuugg

SEQ ID NO: 2023648 - RNA, 19 nt, Artificial Sequence
  Description of Artificial Sequence: Synthetic oligonucleotide
  Sense strand starting at position 2268 of SEQ ID NO: 1881171
uggacucaucacuggucaa

SEQ ID NO: 2023649 - RNA, 19 nt, Artificial Sequence
  Description of Artificial Sequence: Synthetic oligonucleotide
  Antisense strand to SEQ ID NO: 2023648
uugaccagugaugagucca

SEQ ID NO: 2023650 - RNA, 19 nt, Artificial Sequence
  Description of Artificial Sequence: Synthetic oligonucleotide
  Sense strand starting at position 2304 of SEQ ID NO: 1881171
gagaaaucaugauuguuac

SEQ ID NO: 2023651 - RNA, 19 nt, Artificial Sequence
  Description of Artificial Sequence: Synthetic oligonucleotide
  Antisense strand to SEQ ID NO: 2023650
guaacaaucaugauuucuc

SEQ ID NO: 2023652 - RNA, 19 nt, Artificial Sequence
  Description of Artificial Sequence: Synthetic oligonucleotide
  Sense strand starting at position 2305 of SEQ ID NO: 1881171
agaaaucaugauuguuacu

SEQ ID NO: 2023653 - RNA, 19 nt, Artificial Sequence
  Description of Artificial Sequence: Synthetic oligonucleotide
  Antisense strand to SEQ ID NO: 2023652
aguaacaaucaugauuucu

SEQ ID NO: 2023654 - RNA, 19 nt, Artificial Sequence
  Description of Artificial Sequence: Synthetic oligonucleotide
  Sense strand starting at position 2310 of SEQ ID NO: 1881171
ucaugauuguuacuaugau

SEQ ID NO: 2023655 - RNA, 19 nt, Artificial Sequence
  Description of Artificial Sequence: Synthetic oligonucleotide
  Antisense strand to SEQ ID NO: 2023654
aucauaguaacaaucauga

SEQ ID NO: 2023656 - RNA, 19 nt, Artificial Sequence
  Description of Artificial Sequence: Synthetic oligonucleotide
  Sense strand starting at position 2419 of SEQ ID NO: 1881171
guguuaccugggcaugaua

SEQ ID NO: 2023657 - RNA, 19 nt, Artificial Sequence
  Description of Artificial Sequence: Synthetic oligonucleotide
  Antisense strand to SEQ ID NO: 2023656
uaucaugcccagguaacac

SEQ ID NO: 2023658 - RNA, 19 nt, Artificial Sequence
  Description of Artificial Sequence: Synthetic oligonucleotide
  Sense strand starting at position 2497 of SEQ ID NO: 1881171
acgauuguauuacuugaga

SEQ ID NO: 2023659 - RNA, 19 nt, Artificial Sequence
  Description of Artificial Sequence: Synthetic oligonucleotide
  Antisense strand to SEQ ID NO: 2023658
ucucaaguaauacaaucgu

SEQ ID NO: 2023660 - RNA, 19 nt, Artificial Sequence
  Description of Artificial Sequence: Synthetic oligonucleotide
  Sense strand starting at position 2522 of SEQ ID NO: 1881171
guggaaagcacuggcauau

SEQ ID NO: 2023661 - RNA, 19 nt, Artificial Sequence
  Description of Artificial Sequence: Synthetic oligonucleotide
  Antisense strand to SEQ ID NO: 2023660
auaugccagugcuuuccac

SEQ ID NO: 2023662 - RNA, 19 nt, Artificial Sequence
  Description of Artificial Sequence: Synthetic oligonucleotide
  Sense strand starting at position 2535 of SEQ ID NO: 1881171
gcauauugaaagcauucga

SEQ ID NO: 2023663 - RNA, 19 nt, Artificial Sequence
  Description of Artificial Sequence: Synthetic oligonucleotide
  Antisense strand to SEQ ID NO: 2023662
ucgaaugcuuucaauaugc

SEQ ID NO: 2023664 - RNA, 19 nt, Artificial Sequence
  Description of Artificial Sequence: Synthetic oligonucleotide
  Sense strand starting at position 2539 of SEQ ID NO: 1881171
auugaaagcauucgaugag

SEQ ID NO: 2023665 - RNA, 19 nt, Artificial Sequence
  Description of Artificial Sequence: Synthetic oligonucleotide
  Antisense strand to SEQ ID NO: 2023664
cucaucgaaugcuuucaau

SEQ ID NO: 2023666 - RNA, 19 nt, Artificial Sequence
  Description of Artificial Sequence: Synthetic oligonucleotide
  Sense strand starting at position 2543 of SEQ ID NO: 1881171
aaagcauucgaugaguguu

SEQ ID NO: 2023667 - RNA, 19 nt, Artificial Sequence
  Description of Artificial Sequence: Synthetic oligonucleotide
  Antisense strand to SEQ ID NO: 2023666
aacacucaucgaaugcuuu

SEQ ID NO: 2023668 - RNA, 19 nt, Artificial Sequence
  Description of Artificial Sequence: Synthetic oligonucleotide
  Sense strand starting at position 2588 of SEQ ID NO: 1881171
acucuuauucccuguugga

SEQ ID NO: 2023669 - RNA, 19 nt, Artificial Sequence
  Description of Artificial Sequence: Synthetic oligonucleotide
  Antisense strand to SEQ ID NO: 2023668
uccaacagggaauaagagu

SEQ ID NO: 2023670 - RNA, 19 nt, Artificial Sequence
  Description of Artificial Sequence: Synthetic oligonucleotide
  Sense strand starting at position 2604 of SEQ ID NO: 1881171
ggaacauaccugugcuuaa

SEQ ID NO: 2023671 - RNA, 19 nt, Artificial Sequence
  Description of Artificial Sequence: Synthetic oligonucleotide
  Antisense strand to SEQ ID NO: 2023670
uuaagcacagguauguucc

SEQ ID NO: 2023672 - RNA, 19 nt, Artificial Sequence
  Description of Artificial Sequence: Synthetic oligonucleotide
  Sense strand starting at position 2605 of SEQ ID NO: 1881171
gaacauaccugugcuuaag

SEQ ID NO: 2023673 - RNA, 19 nt, Artificial Sequence
  Description of Artificial Sequence: Synthetic oligonucleotide
  Antisense strand to SEQ ID NO: 2023672
cuuaagcacagguauguuc

SEQ ID NO: 2023674 - RNA, 19 nt, Artificial Sequence
  Description of Artificial Sequence: Synthetic oligonucleotide
  Sense strand starting at position 2780 of SEQ ID NO: 1881171
uuuaacccugcuggaaaua

SEQ ID NO: 2023675 - RNA, 19 nt, Artificial Sequence
  Description of Artificial Sequence: Synthetic oligonucleotide
  Antisense strand to SEQ ID NO: 2023674
uauuuccagcaggguuaaa

SEQ ID NO: 2023676 - RNA, 19 nt, Artificial Sequence
  Description of Artificial Sequence: Synthetic oligonucleotide
  Sense strand starting at position 2857 of SEQ ID NO: 1881171
ccucaagaacguggagaua

SEQ ID NO: 2023677 - RNA, 19 nt, Artificial Sequence
  Description of Artificial Sequence: Synthetic oligonucleotide
  Antisense strand to SEQ ID NO: 2023676
uaucuccacguucuugagg

SEQ ID NO: 2023678 - RNA, 19 nt, Artificial Sequence
  Description of Artificial Sequence: Synthetic oligonucleotide
  Sense strand starting at position 2929 of SEQ ID NO: 1881171
accagcugagcugaagauu

SEQ ID NO: 2023679 - RNA, 19 nt, Artificial Sequence
  Description of Artificial Sequence: Synthetic oligonucleotide
  Antisense strand to SEQ ID NO: 2023678
aaucuucagcucagcuggu

SEQ ID NO: 2023680 - RNA, 19 nt, Artificial Sequence
  Description of Artificial Sequence: Synthetic oligonucleotide
  Sense strand starting at position 3022 of SEQ ID NO: 1881171
ugcuguuacagguaaggaa

SEQ ID NO: 2023681 - RNA, 19 nt, Artificial Sequence
  Description of Artificial Sequence: Synthetic oligonucleotide
  Antisense strand to SEQ ID NO: 2023680
uuccuuaccuguaacagca

SEQ ID NO: 2023682 - RNA, 19 nt, Artificial Sequence
  Description of Artificial Sequence: Synthetic oligonucleotide
  Sense strand starting at position 3050 of SEQ ID NO: 1881171
caaagaagcgucuaaaugu

SEQ ID NO: 2023683 - RNA, 19 nt, Artificial Sequence
  Description of Artificial Sequence: Synthetic oligonucleotide
  Antisense strand to SEQ ID NO: 2023682
acauuuagacgcuucuuug

SEQ ID NO: 2023684 - RNA, 19 nt, Artificial Sequence
  Description of Artificial Sequence: Synthetic oligonucleotide
  Sense strand starting at position 3238 of SEQ ID NO: 1881171
agggcaauguaaccuagau

SEQ ID NO: 2023685 - RNA, 19 nt, Artificial Sequence
  Description of Artificial Sequence: Synthetic oligonucleotide
  Antisense strand to SEQ ID NO: 2023684
aucuagguuacauugcccu

SEQ ID NO: 2023686 - RNA, 19 nt, Artificial Sequence
  Description of Artificial Sequence: Synthetic oligonucleotide
  Sense strand starting at position 3587 of SEQ ID NO: 1881171
uuauuauggaaauguuggu

SEQ ID NO: 2023687 - RNA, 19 nt, Artificial Sequence
  Description of Artificial Sequence: Synthetic oligonucleotide
  Antisense strand to SEQ ID NO: 2023686
accaacauuuccauaauaa

SEQ ID NO: 2023688 - RNA, 19 nt, Artificial Sequence
  Description of Artificial Sequence: Synthetic oligonucleotide
  Sense strand starting at position 3802 of SEQ ID NO: 1881171
acaauuuacgcaggucuua

SEQ ID NO: 2023689 - RNA, 19 nt, Artificial Sequence
  Description of Artificial Sequence: Synthetic oligonucleotide
  Antisense strand to SEQ ID NO: 2023688
uaagaccugcguaaauugu

SEQ ID NO: 2023690 - RNA, 19 nt, Artificial Sequence
  Description of Artificial Sequence: Synthetic oligonucleotide
  Sense strand starting at position 3854 of SEQ ID NO: 1881171
gcuauuaacuagccauaug

SEQ ID NO: 2023691 - RNA, 19 nt, Artificial Sequence
  Description of Artificial Sequence: Synthetic oligonucleotide
  Antisense strand to SEQ ID NO: 2023690
cauauggcuaguuaauagc

SEQ ID NO: 2023692 - RNA, 19 nt, Artificial Sequence
  Description of Artificial Sequence: Synthetic oligonucleotide
  Sense strand starting at position 3903 of SEQ ID NO: 1881171
auuuccuguuuguuccaua

SEQ ID NO: 2023693 - RNA, 19 nt, Artificial Sequence
  Description of Artificial Sequence: Synthetic oligonucleotide
  Antisense strand to SEQ ID NO: 2023692
uauggaacaaacaggaaau

SEQ ID NO: 2023694 - RNA, 19 nt, Artificial Sequence
  Description of Artificial Sequence: Synthetic oligonucleotide
  Sense strand starting at position 3908 of SEQ ID NO: 1881171
cuguuuguuccauagaaca

SEQ ID NO: 2023695 - RNA, 19 nt, Artificial Sequence
  Description of Artificial Sequence: Synthetic oligonucleotide
  Antisense strand to SEQ ID NO: 2023694
uguucuauggaacaaacag

SEQ ID NO: 2023696 - RNA, 19 nt, Artificial Sequence
  Description of Artificial Sequence: Synthetic oligonucleotide
  Sense strand starting at position 3933 of SEQ ID NO: 1881171
guauuaaucuguuuaguag

SEQ ID NO: 2023697 - RNA, 19 nt, Artificial Sequence
  Description of Artificial Sequence: Synthetic oligonucleotide
  Antisense strand to SEQ ID NO: 2023696
cuacuaaacagauuaauac

SEQ ID NO: 2023698 - RNA, 19 nt, Artificial Sequence
  Description of Artificial Sequence: Synthetic oligonucleotide
  Sense strand starting at position 3955 of SEQ ID NO: 1881171
acaugcauguuacuuauca

SEQ ID NO: 2023699 - RNA, 19 nt, Artificial Sequence
  Description of Artificial Sequence: Synthetic oligonucleotide
  Antisense strand to SEQ ID NO: 2023698
ugauaaguaacaugcaugu

SEQ ID NO: 2023700 - RNA, 19 nt, Artificial Sequence
  Description of Artificial Sequence: Synthetic oligonucleotide
  Sense strand starting at position 3983 of SEQ ID NO: 1881171
cuagauggcagguguuaag

SEQ ID NO: 2023701 - RNA, 19 nt, Artificial Sequence
  Description of Artificial Sequence: Synthetic oligonucleotide
  Antisense strand to SEQ ID NO: 2023700
cuuaacaccugccaucuag

SEQ ID NO: 2023702 - RNA, 19 nt, Artificial Sequence
  Description of Artificial Sequence: Synthetic oligonucleotide
  Sense strand starting at position 206 of SEQ ID NO: 1881172
ggaugcucacucuggaaua

SEQ ID NO: 2023703 - RNA, 19 nt, Artificial Sequence
  Description of Artificial Sequence: Synthetic oligonucleotide
  Antisense strand to SEQ ID NO: 2023702
uauuccagagugagcaucc

SEQ ID NO: 2023704 - RNA, 19 nt, Artificial Sequence
  Description of Artificial Sequence: Synthetic oligonucleotide
  Sense strand starting at position 219 of SEQ ID NO: 1881172
ggaauaugguggucaggag

SEQ ID NO: 2023705 - RNA, 19 nt, Artificial Sequence
  Description of Artificial Sequence: Synthetic oligonucleotide
  Antisense strand to SEQ ID NO: 2023704
cuccugaccaccauauucc

SEQ ID NO: 2023706 - RNA, 19 nt, Artificial Sequence
  Description of Artificial Sequence: Synthetic oligonucleotide
  Sense strand starting at position 244 of SEQ ID NO: 1881172
agagauauuugugccagcu

SEQ ID NO: 2023707 - RNA, 19 nt, Artificial Sequence
  Description of Artificial Sequence: Synthetic oligonucleotide
  Antisense strand to SEQ ID NO: 2023706
agcuggcacaaauaucucu

SEQ ID NO: 2023708 - RNA, 19 nt, Artificial Sequence
  Description of Artificial Sequence: Synthetic oligonucleotide
  Sense strand starting at position 270 of SEQ ID NO: 1881172
ucaggucuucuagguggaa

SEQ ID NO: 2023709 - RNA, 19 nt, Artificial Sequence
  Description of Artificial Sequence: Synthetic oligonucleotide
  Antisense strand to SEQ ID NO: 2023708
uuccaccuagaagaccuga

SEQ ID NO: 2023710 - RNA, 19 nt, Artificial Sequence
  Description of Artificial Sequence: Synthetic oligonucleotide
  Sense strand starting at position 271 of SEQ ID NO: 1881172
caggucuucuagguggaaa

SEQ ID NO: 2023711 - RNA, 19 nt, Artificial Sequence
  Description of Artificial Sequence: Synthetic oligonucleotide
  Antisense strand to SEQ ID NO: 2023710
uuuccaccuagaagaccug

SEQ ID NO: 2023712 - RNA, 19 nt, Artificial Sequence
  Description of Artificial Sequence: Synthetic oligonucleotide
  Sense strand starting at position 558 of SEQ ID NO: 1881172
ugguuaucucucugaacca

SEQ ID NO: 2023713 - RNA, 19 nt, Artificial Sequence
  Description of Artificial Sequence: Synthetic oligonucleotide
  Antisense strand to SEQ ID NO: 2023712
ugguucagagagauaacca

SEQ ID NO: 2023714 - RNA, 19 nt, Artificial Sequence
  Description of Artificial Sequence: Synthetic oligonucleotide
  Sense strand starting at position 596 of SEQ ID NO: 1881172
gaguuaacauagucugaag

SEQ ID NO: 2023715 - RNA, 19 nt, Artificial Sequence
  Description of Artificial Sequence: Synthetic oligonucleotide
  Antisense strand to SEQ ID NO: 2023714
cuucagacuauguuaacuc

SEQ ID NO: 2023716 - RNA, 19 nt, Artificial Sequence
  Description of Artificial Sequence: Synthetic oligonucleotide
  Sense strand starting at position 646 of SEQ ID NO: 1881172
cuagguuacuuugcagaag

SEQ ID NO: 2023717 - RNA, 19 nt, Artificial Sequence
  Description of Artificial Sequence: Synthetic oligonucleotide
  Antisense strand to SEQ ID NO: 2023716
cuucugcaaaguaaccuag

SEQ ID NO: 2023718 - RNA, 19 nt, Artificial Sequence
  Description of Artificial Sequence: Synthetic oligonucleotide
  Sense strand starting at position 776 of SEQ ID NO: 1881172
guguaacagcauuaacacu

SEQ ID NO: 2023719 - RNA, 19 nt, Artificial Sequence
  Description of Artificial Sequence: Synthetic oligonucleotide
  Antisense strand to SEQ ID NO: 2023718
aguguuaaugcuguuacac

SEQ ID NO: 2023720 - RNA, 19 nt, Artificial Sequence
  Description of Artificial Sequence: Synthetic oligonucleotide
  Sense strand starting at position 850 of SEQ ID NO: 1881172
guaugaaaggucugguaag

SEQ ID NO: 2023721 - RNA, 19 nt, Artificial Sequence
  Description of Artificial Sequence: Synthetic oligonucleotide
  Antisense strand to SEQ ID NO: 2023720
cuuaccagaccuuucauac

SEQ ID NO: 2023722 - RNA, 19 nt, Artificial Sequence
  Description of Artificial Sequence: Synthetic oligonucleotide
  Sense strand starting at position 867 of SEQ ID NO: 1881172
aggagugucaaguauaaug

SEQ ID NO: 2023723 - RNA, 19 nt, Artificial Sequence
  Description of Artificial Sequence: Synthetic oligonucleotide
  Antisense strand to SEQ ID NO: 2023722
cauuauacuugacacuccu

SEQ ID NO: 2023724 - RNA, 19 nt, Artificial Sequence
  Description of Artificial Sequence: Synthetic oligonucleotide
  Sense strand starting at position 924 of SEQ ID NO: 1881172
auuugaaguucuugauuuc

SEQ ID NO: 2023725 - RNA, 19 nt, Artificial Sequence
  Description of Artificial Sequence: Synthetic oligonucleotide
  Antisense strand to SEQ ID NO: 2023724
gaaaucaagaacuucaaau

SEQ ID NO: 2023726 - RNA, 19 nt, Artificial Sequence
  Description of Artificial Sequence: Synthetic oligonucleotide
  Sense strand starting at position 975 of SEQ ID NO: 1881172
augauaucucuuuaagagc

SEQ ID NO: 2023727 - RNA, 19 nt, Artificial Sequence
  Description of Artificial Sequence: Synthetic oligonucleotide
  Antisense strand to SEQ ID NO: 2023726
gcucuuaaagagauaucau

SEQ ID NO: 2023728 - RNA, 19 nt, Artificial Sequence
  Description of Artificial Sequence: Synthetic oligonucleotide
  Sense strand starting at position 1235 of SEQ ID NO: 1881172
gagagaaagcaaugcucuu

SEQ ID NO: 2023729 - RNA, 19 nt, Artificial Sequence
  Description of Artificial Sequence: Synthetic oligonucleotide
  Antisense strand to SEQ ID NO: 2023728
aagagcauugcuuucucuc

SEQ ID NO: 2023730 - RNA, 19 nt, Artificial Sequence
  Description of Artificial Sequence: Synthetic oligonucleotide
  Sense strand starting at position 1248 of SEQ ID NO: 1881172
gcucuuuccagaggaggaa

SEQ ID NO: 2023731 - RNA, 19 nt, Artificial Sequence
  Description of Artificial Sequence: Synthetic oligonucleotide
  Antisense strand to SEQ ID NO: 2023730
uuccuccucuggaaagagc

SEQ ID NO: 2023732 - RNA, 19 nt, Artificial Sequence
  Description of Artificial Sequence: Synthetic oligonucleotide
  Sense strand starting at position 1340 of SEQ ID NO: 1881172
gugggagaaaucugagcuu

SEQ ID NO: 2023733 - RNA, 19 nt, Artificial Sequence
  Description of Artificial Sequence: Synthetic oligonucleotide
  Antisense strand to SEQ ID NO: 2023732
aagcucagauuucucccac

SEQ ID NO: 2023734 - RNA, 19 nt, Artificial Sequence
  Description of Artificial Sequence: Synthetic oligonucleotide
  Sense strand starting at position 1373 of SEQ ID NO: 1881172
gcaggauuugcacgaaguc

SEQ ID NO: 2023735 - RNA, 19 nt, Artificial Sequence
  Description of Artificial Sequence: Synthetic oligonucleotide
  Antisense strand to SEQ ID NO: 2023734
gacuucgugcaaauccugc

SEQ ID NO: 2023736 - RNA, 19 nt, Artificial Sequence
  Description of Artificial Sequence: Synthetic oligonucleotide
  Sense strand starting at position 1456 of SEQ ID NO: 1881172
uucucagagcccuaagaau

SEQ ID NO: 2023737 - RNA, 19 nt, Artificial Sequence
  Description of Artificial Sequence: Synthetic oligonucleotide
  Antisense strand to SEQ ID NO: 2023736
auucuuagggcucugagaa

SEQ ID NO: 2023738 - RNA, 19 nt, Artificial Sequence
  Description of Artificial Sequence: Synthetic oligonucleotide
  Sense strand starting at position 1691 of SEQ ID NO: 1881172
guccgugaugccuuaucuu

SEQ ID NO: 2023739 - RNA, 19 nt, Artificial Sequence
  Description of Artificial Sequence: Synthetic oligonucleotide
  Antisense strand to SEQ ID NO: 2023738
aagauaaggcaucacggac

SEQ ID NO: 2023740 - RNA, 19 nt, Artificial Sequence
  Description of Artificial Sequence: Synthetic oligonucleotide
  Sense strand starting at position 2085 of SEQ ID NO: 1881172
uuugccagaugacuauaau

SEQ ID NO: 2023741 - RNA, 19 nt, Artificial Sequence
  Description of Artificial Sequence: Synthetic oligonucleotide
  Antisense strand to SEQ ID NO: 2023740
auuauagucaucuggcaaa

SEQ ID NO: 2023742 - RNA, 19 nt, Artificial Sequence
  Description of Artificial Sequence: Synthetic oligonucleotide
  Sense strand starting at position 2086 of SEQ ID NO: 1881172
uugccagaugacuauaauu

SEQ ID NO: 2023743 - RNA, 19 nt, Artificial Sequence
  Description of Artificial Sequence: Synthetic oligonucleotide
  Antisense strand to SEQ ID NO: 2023742
aauuauagucaucuggcaa

SEQ ID NO: 2023744 - RNA, 19 nt, Artificial Sequence
  Description of Artificial Sequence: Synthetic oligonucleotide
  Sense strand starting at position 2495 of SEQ ID NO: 1881172
aagaccugggccuguauau

SEQ ID NO: 2023745 - RNA, 19 nt, Artificial Sequence
  Description of Artificial Sequence: Synthetic oligonucleotide
  Antisense strand to SEQ ID NO: 2023744
auauacaggcccaggucuu

SEQ ID NO: 2023746 - RNA, 19 nt, Artificial Sequence
  Description of Artificial Sequence: Synthetic oligonucleotide
  Sense strand starting at position 2526 of SEQ ID NO: 1881172
auggcuuccggagaaauca

SEQ ID NO: 2023747 - RNA, 19 nt, Artificial Sequence
  Description of Artificial Sequence: Synthetic oligonucleotide
  Antisense strand to SEQ ID NO: 2023746
ugauuucuccggaagccau

SEQ ID NO: 2023748 - RNA, 19 nt, Artificial Sequence
  Description of Artificial Sequence: Synthetic oligonucleotide
  Sense strand starting at position 2551 of SEQ ID NO: 1881172
gaucuaagaugagcugaau

SEQ ID NO: 2023749 - RNA, 19 nt, Artificial Sequence
  Description of Artificial Sequence: Synthetic oligonucleotide
  Antisense strand to SEQ ID NO: 2023748
auucagcucaucuuagauc

SEQ ID NO: 2023750 - RNA, 19 nt, Artificial Sequence
  Description of Artificial Sequence: Synthetic oligonucleotide
  Sense strand starting at position 2664 of SEQ ID NO: 1881172
uucuguguuagacacagua

SEQ ID NO: 2023751 - RNA, 19 nt, Artificial Sequence
  Description of Artificial Sequence: Synthetic oligonucleotide
  Antisense strand to SEQ ID NO: 2023750
uacugugucuaacacagaa

SEQ ID NO: 2023752 - RNA, 19 nt, Artificial Sequence
  Description of Artificial Sequence: Synthetic oligonucleotide
  Sense strand starting at position 2666 of SEQ ID NO: 1881172
cuguguuagacacaguacu

SEQ ID NO: 2023753 - RNA, 19 nt, Artificial Sequence
  Description of Artificial Sequence: Synthetic oligonucleotide
  Antisense strand to SEQ ID NO: 2023752
aguacugugucuaacacag

SEQ ID NO: 2023754 - RNA, 19 nt, Artificial Sequence
  Description of Artificial Sequence: Synthetic oligonucleotide
  Sense strand starting at position 2679 of SEQ ID NO: 1881172
aguacuagucauuaacauc

SEQ ID NO: 2023755 - RNA, 19 nt, Artificial Sequence
  Description of Artificial Sequence: Synthetic oligonucleotide
  Antisense strand to SEQ ID NO: 2023754
gauguuaaugacuaguacu

SEQ ID NO: 2023756 - RNA, 19 nt, Artificial Sequence
  Description of Artificial Sequence: Synthetic oligonucleotide
  Sense strand starting at position 2853 of SEQ ID NO: 1881172
gagugcuacgugucaggca

SEQ ID NO: 2023757 - RNA, 19 nt, Artificial Sequence
  Description of Artificial Sequence: Synthetic oligonucleotide
  Antisense strand to SEQ ID NO: 2023756
ugccugacacguagcacuc

SEQ ID NO: 2023758 - RNA, 19 nt, Artificial Sequence
  Description of Artificial Sequence: Synthetic oligonucleotide
  Sense strand starting at position 3158 of SEQ ID NO: 1881172
agaguuuagcuguaaucuu

SEQ ID NO: 2023759 - RNA, 19 nt, Artificial Sequence
  Description of Artificial Sequence: Synthetic oligonucleotide
  Antisense strand to SEQ ID NO: 2023758
aagauuacagcuaaacucu

SEQ ID NO: 2023760 - RNA, 19 nt, Artificial Sequence
  Description of Artificial Sequence: Synthetic oligonucleotide
  Sense strand starting at position 3198 of SEQ ID NO: 1881172
guguacuuugggcacaaua

SEQ ID NO: 2023761 - RNA, 19 nt, Artificial Sequence
  Description of Artificial Sequence: Synthetic oligonucleotide
  Antisense strand to SEQ ID NO: 2023760
uauugugcccaaaguacac

SEQ ID NO: 2023762 - RNA, 19 nt, Artificial Sequence
  Description of Artificial Sequence: Synthetic oligonucleotide
  Sense strand starting at position 3200 of SEQ ID NO: 1881172
guacuuugggcacaauacu

SEQ ID NO: 2023763 - RNA, 19 nt, Artificial Sequence
  Description of Artificial Sequence: Synthetic oligonucleotide
  Antisense strand to SEQ ID NO: 2023762
aguauugugcccaaaguac

SEQ ID NO: 2023764 - RNA, 19 nt, Artificial Sequence
  Description of Artificial Sequence: Synthetic oligonucleotide
  Sense strand starting at position 3502 of SEQ ID NO: 1881172
agaggcugugguugauaaa

SEQ ID NO: 2023765 - RNA, 19 nt, Artificial Sequence
  Description of Artificial Sequence: Synthetic oligonucleotide
  Antisense strand to SEQ ID NO: 2023764
uuuaucaaccacagccucu

SEQ ID NO: 2023766 - RNA, 19 nt, Artificial Sequence
  Description of Artificial Sequence: Synthetic oligonucleotide
  Sense strand starting at position 3503 of SEQ ID NO: 1881172
gaggcugugguugauaaag

SEQ ID NO: 2023767 - RNA, 19 nt, Artificial Sequence
  Description of Artificial Sequence: Synthetic oligonucleotide
  Antisense strand to SEQ ID NO: 2023766
cuuuaucaaccacagccuc

SEQ ID NO: 2023768 - RNA, 19 nt, Artificial Sequence
  Description of Artificial Sequence: Synthetic oligonucleotide
  Sense strand starting at position 3524 of SEQ ID NO: 1881172
gguacaaguauaugagaug

SEQ ID NO: 2023769 - RNA, 19 nt, Artificial Sequence
  Description of Artificial Sequence: Synthetic oligonucleotide
  Antisense strand to SEQ ID NO: 2023768
caucucauauacuuguacc

SEQ ID NO: 2023770 - RNA, 19 nt, Artificial Sequence
  Description of Artificial Sequence: Synthetic oligonucleotide
  Sense strand starting at position 3543 of SEQ ID NO: 1881172
ggaggauauguuugaacuc

SEQ ID NO: 2023771 - RNA, 19 nt, Artificial Sequence
  Description of Artificial Sequence: Synthetic oligonucleotide
  Antisense strand to SEQ ID NO: 2023770
gaguucaaacauauccucc

SEQ ID NO: 2023772 - RNA, 19 nt, Artificial Sequence
  Description of Artificial Sequence: Synthetic oligonucleotide
  Sense strand starting at position 3761 of SEQ ID NO: 1881172
ggagaaagagcuuggcaaa

SEQ ID NO: 2023773 - RNA, 19 nt, Artificial Sequence
  Description of Artificial Sequence: Synthetic oligonucleotide
  Antisense strand to SEQ ID NO: 2023772
uuugccaagcucuuucucc

SEQ ID NO: 2023774 - RNA, 19 nt, Artificial Sequence
  Description of Artificial Sequence: Synthetic oligonucleotide
  Sense strand starting at position 3886 of SEQ ID NO: 1881172
gcagucauuuguucugggu

SEQ ID NO: 2023775 - RNA, 19 nt, Artificial Sequence
  Description of Artificial Sequence: Synthetic oligonucleotide
  Antisense strand to SEQ ID NO: 2023774
acccagaacaaaugacugc

SEQ ID NO: 2023776 - RNA, 19 nt, Artificial Sequence
  Description of Artificial Sequence: Synthetic oligonucleotide
  Sense strand starting at position 3934 of SEQ ID NO: 1881172
aucagcuucuccuuggaaa

SEQ ID NO: 2023777 - RNA, 19 nt, Artificial Sequence
  Description of Artificial Sequence: Synthetic oligonucleotide
  Antisense strand to SEQ ID NO: 2023776
uuuccaaggagaagcugau

SEQ ID NO: 2023778 - RNA, 19 nt, Artificial Sequence
  Description of Artificial Sequence: Synthetic oligonucleotide
  Sense strand starting at position 3935 of SEQ ID NO: 1881172
ucagcuucuccuuggaaag

SEQ ID NO: 2023779 - RNA, 19 nt, Artificial Sequence
  Description of Artificial Sequence: Synthetic oligonucleotide
  Antisense strand to SEQ ID NO: 2023778
cuuuccaaggagaagcuga

SEQ ID NO: 2023780 - RNA, 19 nt, Artificial Sequence
  Description of Artificial Sequence: Synthetic oligonucleotide
  Sense strand starting at position 3967 of SEQ ID NO: 1881172
uuaggccuccuggaauaau

SEQ ID NO: 2023781 - RNA, 19 nt, Artificial Sequence
  Description of Artificial Sequence: Synthetic oligonucleotide
  Antisense strand to SEQ ID NO: 2023780
auuauuccaggaggccuaa

SEQ ID NO: 2023782 - RNA, 19 nt, Artificial Sequence
  Description of Artificial Sequence: Synthetic oligonucleotide
  Sense strand starting at position 9 of SEQ ID NO: 1881173
aacgauuaacgcugggaag

SEQ ID NO: 2023783 - RNA, 19 nt, Artificial Sequence
  Description of Artificial Sequence: Synthetic oligonucleotide
  Antisense strand to SEQ ID NO: 2023782
cuucccagcguuaaucguu

SEQ ID NO: 2023784 - RNA, 19 nt, Artificial Sequence
  Description of Artificial Sequence: Synthetic oligonucleotide
  Sense strand starting at position 10 of SEQ ID NO: 1881173
acgauuaacgcugggaaga

SEQ ID NO: 2023785 - RNA, 19 nt, Artificial Sequence
  Description of Artificial Sequence: Synthetic oligonucleotide
  Antisense strand to SEQ ID NO: 2023784
ucuucccagcguuaaucgu

SEQ ID NO: 2023786 - RNA, 19 nt, Artificial Sequence
  Description of Artificial Sequence: Synthetic oligonucleotide
  Sense strand starting at position 92 of SEQ ID NO: 1881173
uguggaucuagcuaaaggu

SEQ ID NO: 2023787 - RNA, 19 nt, Artificial Sequence
  Description of Artificial Sequence: Synthetic oligonucleotide
  Antisense strand to SEQ ID NO: 2023786
accuuuagcuagauccaca

SEQ ID NO: 2023788 - RNA, 19 nt, Artificial Sequence
  Description of Artificial Sequence: Synthetic oligonucleotide
  Sense strand starting at position 303 of SEQ ID NO: 1881173
uugaacaaguuauccgaau

SEQ ID NO: 2023789 - RNA, 19 nt, Artificial Sequence
  Description of Artificial Sequence: Synthetic oligonucleotide
  Antisense strand to SEQ ID NO: 2023788
auucggauaacuuguucaa

SEQ ID NO: 2023790 - RNA, 19 nt, Artificial Sequence
  Description of Artificial Sequence: Synthetic oligonucleotide
  Sense strand starting at position 304 of SEQ ID NO: 1881173
ugaacaaguuauccgaauu

SEQ ID NO: 2023791 - RNA, 19 nt, Artificial Sequence
  Description of Artificial Sequence: Synthetic oligonucleotide
  Antisense strand to SEQ ID NO: 2023790
aauucggauaacuuguuca

SEQ ID NO: 2023792 - RNA, 19 nt, Artificial Sequence
  Description of Artificial Sequence: Synthetic oligonucleotide
  Sense strand starting at position 1606 of SEQ ID NO: 1881173
guugguuucgcgucccuca

SEQ ID NO: 2023793 - RNA, 19 nt, Artificial Sequence
  Description of Artificial Sequence: Synthetic oligonucleotide
  Antisense strand to SEQ ID NO: 2023792
ugagggacgcgaaaccaac

SEQ ID NO: 2023794 - RNA, 19 nt, Artificial Sequence
  Description of Artificial Sequence: Synthetic oligonucleotide
  Sense strand starting at position 1966 of SEQ ID NO: 1881173
auaaauuacgcaugacaug

SEQ ID NO: 2023795 - RNA, 19 nt, Artificial Sequence
  Description of Artificial Sequence: Synthetic oligonucleotide
  Antisense strand to SEQ ID NO: 2023794
caugucaugcguaauuuau

SEQ ID NO: 2023796 - RNA, 19 nt, Artificial Sequence
  Description of Artificial Sequence: Synthetic oligonucleotide
  Sense strand starting at position 1967 of SEQ ID NO: 1881173
uaaauuacgcaugacaugu

SEQ ID NO: 2023797 - RNA, 19 nt, Artificial Sequence
  Description of Artificial Sequence: Synthetic oligonucleotide
  Antisense strand to SEQ ID NO: 2023796
acaugucaugcguaauuua

SEQ ID NO: 2023798 - RNA, 19 nt, Artificial Sequence
  Description of Artificial Sequence: Synthetic oligonucleotide
  Sense strand starting at position 2344 of SEQ ID NO: 1881173
augugagaauacuuugauu

SEQ ID NO: 2023799 - RNA, 19 nt, Artificial Sequence
  Description of Artificial Sequence: Synthetic oligonucleotide
  Antisense strand to SEQ ID NO: 2023798
aaucaaaguauucucacau

SEQ ID NO: 2023800 - RNA, 19 nt, Artificial Sequence
  Description of Artificial Sequence: Synthetic oligonucleotide
  Sense strand starting at position 2346 of SEQ ID NO: 1881173
gugagaauacuuugauucc

SEQ ID NO: 2023801 - RNA, 19 nt, Artificial Sequence
  Description of Artificial Sequence: Synthetic oligonucleotide
  Antisense strand to SEQ ID NO: 2023800
ggaaucaaaguauucucac

SEQ ID NO: 2023802 - RNA, 19 nt, Artificial Sequence
  Description of Artificial Sequence: Synthetic oligonucleotide
  Sense strand starting at position 2359 of SEQ ID NO: 1881173
gauuccagagccuguaaca

SEQ ID NO: 2023803 - RNA, 19 nt, Artificial Sequence
  Description of Artificial Sequence: Synthetic oligonucleotide
  Antisense strand to SEQ ID NO: 2023802
uguuacaggcucuggaauc

SEQ ID NO: 2023804 - RNA, 19 nt, Artificial Sequence
  Description of Artificial Sequence: Synthetic oligonucleotide
  Sense strand starting at position 2512 of SEQ ID NO: 1881173
ggguguauuuccguggagu

SEQ ID NO: 2023805 - RNA, 19 nt, Artificial Sequence
  Description of Artificial Sequence: Synthetic oligonucleotide
  Antisense strand to SEQ ID NO: 2023804
acuccacggaaauacaccc

SEQ ID NO: 2023806 - RNA, 19 nt, Artificial Sequence
  Description of Artificial Sequence: Synthetic oligonucleotide
  Sense strand starting at position 2513 of SEQ ID NO: 1881173
gguguauuuccguggagua

SEQ ID NO: 2023807 - RNA, 19 nt, Artificial Sequence
  Description of Artificial Sequence: Synthetic oligonucleotide
  Antisense strand to SEQ ID NO: 2023806
uacuccacggaaauacacc

SEQ ID NO: 2023808 - RNA, 19 nt, Artificial Sequence
  Description of Artificial Sequence: Synthetic oligonucleotide
  Sense strand starting at position 2514 of SEQ ID NO: 1881173
guguauuuccguggaguau

SEQ ID NO: 2023809 - RNA, 19 nt, Artificial Sequence
  Description of Artificial Sequence: Synthetic oligonucleotide
  Antisense strand to SEQ ID NO: 2023808
auacuccacggaaauacac

SEQ ID NO: 2023810 - RNA, 19 nt, Artificial Sequence
  Description of Artificial Sequence: Synthetic oligonucleotide
  Sense strand starting at position 2642 of SEQ ID NO: 1881173
ugccauauacucugaggag

SEQ ID NO: 2023811 - RNA, 19 nt, Artificial Sequence
  Description of Artificial Sequence: Synthetic oligonucleotide
  Antisense strand to SEQ ID NO: 2023810
cuccucagaguauauggca

SEQ ID NO: 2023812 - RNA, 19 nt, Artificial Sequence
  Description of Artificial Sequence: Synthetic oligonucleotide
  Sense strand starting at position 2669 of SEQ ID NO: 1881173
auuaauacgcuaggagaga

SEQ ID NO: 2023813 - RNA, 19 nt, Artificial Sequence
  Description of Artificial Sequence: Synthetic oligonucleotide
  Antisense strand to SEQ ID NO: 2023812
ucucuccuagcguauuaau

SEQ ID NO: 2023814 - RNA, 19 nt, Artificial Sequence
  Description of Artificial Sequence: Synthetic oligonucleotide
  Sense strand starting at position 2815 of SEQ ID NO: 1881173
guaccuaaguauucuauac

SEQ ID NO: 2023815 - RNA, 19 nt, Artificial Sequence
  Description of Artificial Sequence: Synthetic oligonucleotide
  Antisense strand to SEQ ID NO: 2023814
guauagaauacuuagguac

SEQ ID NO: 2023816 - RNA, 19 nt, Artificial Sequence
  Description of Artificial Sequence: Synthetic oligonucleotide
  Sense strand starting at position 2896 of SEQ ID NO: 1881173
cuccuugcuguugagauaa

SEQ ID NO: 2023817 - RNA, 19 nt, Artificial Sequence
  Description of Artificial Sequence: Synthetic oligonucleotide
  Antisense strand to SEQ ID NO: 2023816
uuaucucaacagcaaggag

SEQ ID NO: 2023818 - RNA, 19 nt, Artificial Sequence
  Description of Artificial Sequence: Synthetic oligonucleotide
  Sense strand starting at position 2993 of SEQ ID NO: 1881173
augucuuagauguaguuau

SEQ ID NO: 2023819 - RNA, 19 nt, Artificial Sequence
  Description of Artificial Sequence: Synthetic oligonucleotide
  Antisense strand to SEQ ID NO: 2023818
auaacuacaucuaagacau

SEQ ID NO: 2023820 - RNA, 19 nt, Artificial Sequence
  Description of Artificial Sequence: Synthetic oligonucleotide
  Sense strand starting at position 3081 of SEQ ID NO: 1881173
cuuaaaguuggugacaacu

SEQ ID NO: 2023821 - RNA, 19 nt, Artificial Sequence
  Description of Artificial Sequence: Synthetic oligonucleotide
  Antisense strand to SEQ ID NO: 2023820
aguugucaccaacuuuaag

SEQ ID NO: 2023822 - RNA, 19 nt, Artificial Sequence
  Description of Artificial Sequence: Synthetic oligonucleotide
  Sense strand starting at position 3101 of SEQ ID NO: 1881173
aggcuaaacuucuuuagaa

SEQ ID NO: 2023823 - RNA, 19 nt, Artificial Sequence
  Description of Artificial Sequence: Synthetic oligonucleotide
  Antisense strand to SEQ ID NO: 2023822
uucuaaagaaguuuagccu

SEQ ID NO: 2023824 - RNA, 19 nt, Artificial Sequence
  Description of Artificial Sequence: Synthetic oligonucleotide
  Sense strand starting at position 3102 of SEQ ID NO: 1881173
ggcuaaacuucuuuagaaa

SEQ ID NO: 2023825 - RNA, 19 nt, Artificial Sequence
  Description of Artificial Sequence: Synthetic oligonucleotide
  Antisense strand to SEQ ID NO: 2023824
uuucuaaagaaguuuagcc

SEQ ID NO: 2023826 - RNA, 19 nt, Artificial Sequence
  Description of Artificial Sequence: Synthetic oligonucleotide
  Sense strand starting at position 3148 of SEQ ID NO: 1881173
uguguauuugcaugggagu

SEQ ID NO: 2023827 - RNA, 19 nt, Artificial Sequence
  Description of Artificial Sequence: Synthetic oligonucleotide
  Antisense strand to SEQ ID NO: 2023826
acucccaugcaaauacaca

SEQ ID NO: 2023828 - RNA, 19 nt, Artificial Sequence
  Description of Artificial Sequence: Synthetic oligonucleotide
  Sense strand starting at position 3149 of SEQ ID NO: 1881173
guguauuugcaugggaguu

SEQ ID NO: 2023829 - RNA, 19 nt, Artificial Sequence
  Description of Artificial Sequence: Synthetic oligonucleotide
  Antisense strand to SEQ ID NO: 2023828
aacucccaugcaaauacac

SEQ ID NO: 2023830 - RNA, 19 nt, Artificial Sequence
  Description of Artificial Sequence: Synthetic oligonucleotide
  Sense strand starting at position 3150 of SEQ ID NO: 1881173
uguauuugcaugggaguua

SEQ ID NO: 2023831 - RNA, 19 nt, Artificial Sequence
  Description of Artificial Sequence: Synthetic oligonucleotide
  Antisense strand to SEQ ID NO: 2023830
uaacucccaugcaaauaca

SEQ ID NO: 2023832 - RNA, 19 nt, Artificial Sequence
  Description of Artificial Sequence: Synthetic oligonucleotide
  Sense strand starting at position 3155 of SEQ ID NO: 1881173
uugcaugggaguuacuuua

SEQ ID NO: 2023833 - RNA, 19 nt, Artificial Sequence
  Description of Artificial Sequence: Synthetic oligonucleotide
  Antisense strand to SEQ ID NO: 2023832
uaaaguaacucccaugcaa

SEQ ID NO: 2023834 - RNA, 19 nt, Artificial Sequence
  Description of Artificial Sequence: Synthetic oligonucleotide
  Sense strand starting at position 3248 of SEQ ID NO: 1881173
gguuuccuugcugaagacu

SEQ ID NO: 2023835 - RNA, 19 nt, Artificial Sequence
  Description of Artificial Sequence: Synthetic oligonucleotide
  Antisense strand to SEQ ID NO: 2023834
agucuucagcaaggaaacc

SEQ ID NO: 2023836 - RNA, 19 nt, Artificial Sequence
  Description of Artificial Sequence: Synthetic oligonucleotide
  Sense strand starting at position 3333 of SEQ ID NO: 1881173
auuauagugucacuuaaga

SEQ ID NO: 2023837 - RNA, 19 nt, Artificial Sequence
  Description of Artificial Sequence: Synthetic oligonucleotide
  Antisense strand to SEQ ID NO: 2023836
ucuuaagugacacuauaau

SEQ ID NO: 2023838 - RNA, 19 nt, Artificial Sequence
  Description of Artificial Sequence: Synthetic oligonucleotide
  Sense strand starting at position 3395 of SEQ ID NO: 1881173
cucacauaugccuaguuua

SEQ ID NO: 2023839 - RNA, 19 nt, Artificial Sequence
  Description of Artificial Sequence: Synthetic oligonucleotide
  Antisense strand to SEQ ID NO: 2023838
uaaacuaggcauaugugag

SEQ ID NO: 2023840 - RNA, 19 nt, Artificial Sequence
  Description of Artificial Sequence: Synthetic oligonucleotide
  Sense strand starting at position 3454 of SEQ ID NO: 1881173
auacacaucaaguguggua

SEQ ID NO: 2023841 - RNA, 19 nt, Artificial Sequence
  Description of Artificial Sequence: Synthetic oligonucleotide
  Antisense strand to SEQ ID NO: 2023840
uaccacacuugauguguau

SEQ ID NO: 2023842 - RNA, 19 nt, Artificial Sequence
  Description of Artificial Sequence: Synthetic oligonucleotide
  Sense strand starting at position 3505 of SEQ ID NO: 1881173
uguuauaugguuugagaua

SEQ ID NO: 2023843 - RNA, 19 nt, Artificial Sequence
  Description of Artificial Sequence: Synthetic oligonucleotide
  Antisense strand to SEQ ID NO: 2023842
uaucucaaaccauauaaca

SEQ ID NO: 2023844 - RNA, 19 nt, Artificial Sequence
  Description of Artificial Sequence: Synthetic oligonucleotide
  Sense strand starting at position 3526 of SEQ ID NO: 1881173
auugcuuguguuuacauuu

SEQ ID NO: 2023845 - RNA, 19 nt, Artificial Sequence
  Description of Artificial Sequence: Synthetic oligonucleotide
  Antisense strand to SEQ ID NO: 2023844
aaauguaaacacaagcaau

SEQ ID NO: 2023846 - RNA, 19 nt, Artificial Sequence
  Description of Artificial Sequence: Synthetic oligonucleotide
  Sense strand starting at position 3610 of SEQ ID NO: 1881173
uuccuuugggcacagaauu

SEQ ID NO: 2023847 - RNA, 19 nt, Artificial Sequence
  Description of Artificial Sequence: Synthetic oligonucleotide
  Antisense strand to SEQ ID NO: 2023846
aauucugugcccaaaggaa

SEQ ID NO: 2023848 - RNA, 19 nt, Artificial Sequence
  Description of Artificial Sequence: Synthetic oligonucleotide
  Sense strand starting at position 3746 of SEQ ID NO: 1881173
ugaggaaggguguguuacu

SEQ ID NO: 2023849 - RNA, 19 nt, Artificial Sequence
  Description of Artificial Sequence: Synthetic oligonucleotide
  Antisense strand to SEQ ID NO: 2023848
aguaacacacccuuccuca

SEQ ID NO: 2023850 - RNA, 19 nt, Artificial Sequence
  Description of Artificial Sequence: Synthetic oligonucleotide
  Sense strand starting at position 3747 of SEQ ID NO: 1881173
gaggaaggguguguuacuu

SEQ ID NO: 2023851 - RNA, 19 nt, Artificial Sequence
  Description of Artificial Sequence: Synthetic oligonucleotide
  Antisense strand to SEQ ID NO: 2023850
aaguaacacacccuuccuc

SEQ ID NO: 2023852 - RNA, 19 nt, Artificial Sequence
  Description of Artificial Sequence: Synthetic oligonucleotide
  Sense strand starting at position 3912 of SEQ ID NO: 1881173
gauagaugugcggauuaga

SEQ ID NO: 2023853 - RNA, 19 nt, Artificial Sequence
  Description of Artificial Sequence: Synthetic oligonucleotide
  Antisense strand to SEQ ID NO: 2023852
ucuaauccgcacaucuauc

SEQ ID NO: 2023854 - RNA, 19 nt, Artificial Sequence
  Description of Artificial Sequence: Synthetic oligonucleotide
  Sense strand starting at position 3915 of SEQ ID NO: 1881173
agaugugcggauuagagaa

SEQ ID NO: 2023855 - RNA, 19 nt, Artificial Sequence
  Description of Artificial Sequence: Synthetic oligonucleotide
  Antisense strand to SEQ ID NO: 2023854
uucucuaauccgcacaucu

SEQ ID NO: 2023856 - RNA, 19 nt, Artificial Sequence
  Description of Artificial Sequence: Synthetic oligonucleotide
  Sense strand starting at position 3938 of SEQ ID NO: 1881173
ucaggucuugguuaggaga

SEQ ID NO: 2023857 - RNA, 19 nt, Artificial Sequence
  Description of Artificial Sequence: Synthetic oligonucleotide
  Antisense strand to SEQ ID NO: 2023856
ucuccuaaccaagaccuga

SEQ ID NO: 2023858 - RNA, 19 nt, Artificial Sequence
  Description of Artificial Sequence: Synthetic oligonucleotide
  Sense strand starting at position 3964 of SEQ ID NO: 1881173
aagaauaggugauuggguu

SEQ ID NO: 2023859 - RNA, 19 nt, Artificial Sequence
  Description of Artificial Sequence: Synthetic oligonucleotide
  Antisense strand to SEQ ID NO: 2023858
aacccaaucaccuauucuu

SEQ ID NO: 2023860 - RNA, 19 nt, Artificial Sequence
  Description of Artificial Sequence: Synthetic oligonucleotide
  Sense strand starting at position 3965 of SEQ ID NO: 1881173
agaauaggugauuggguuu

SEQ ID NO: 2023861 - RNA, 19 nt, Artificial Sequence
  Description of Artificial Sequence: Synthetic oligonucleotide
  Antisense strand to SEQ ID NO: 2023860
aaacccaaucaccuauucu

SEQ ID NO: 2023862 - RNA, 19 nt, Artificial Sequence
  Description of Artificial Sequence: Synthetic oligonucleotide
  Sense strand starting at position 172 of SEQ ID NO: 1881175
acuugaggauaguucuuua

SEQ ID NO: 2023863 - RNA, 19 nt, Artificial Sequence
  Description of Artificial Sequence: Synthetic oligonucleotide
  Antisense strand to SEQ ID NO: 2023862
uaaagaacuauccucaagu

SEQ ID NO: 2023864 - RNA, 19 nt, Artificial Sequence
  Description of Artificial Sequence: Synthetic oligonucleotide
  Sense strand starting at position 175 of SEQ ID NO: 1881175
ugaggauaguucuuuagac

SEQ ID NO: 2023865 - RNA, 19 nt, Artificial Sequence
  Description of Artificial Sequence: Synthetic oligonucleotide
  Antisense strand to SEQ ID NO: 2023864
gucuaaagaacuauccuca

SEQ ID NO: 2023866 - RNA, 19 nt, Artificial Sequence
  Description of Artificial Sequence: Synthetic oligonucleotide
  Sense strand starting at position 176 of SEQ ID NO: 1881175
gaggauaguucuuuagaca

SEQ ID NO: 2023867 - RNA, 19 nt, Artificial Sequence
  Description of Artificial Sequence: Synthetic oligonucleotide
  Antisense strand to SEQ ID NO: 2023866
ugucuaaagaacuauccuc

SEQ ID NO: 2023868 - RNA, 19 nt, Artificial Sequence
  Description of Artificial Sequence: Synthetic oligonucleotide
  Sense strand starting at position 743 of SEQ ID NO: 1881175
ucauauaaaugguugaguu

SEQ ID NO: 2023869 - RNA, 19 nt, Artificial Sequence
  Description of Artificial Sequence: Synthetic oligonucleotide
  Antisense strand to SEQ ID NO: 2023868
aacucaaccauuuauauga

SEQ ID NO: 2023870 - RNA, 19 nt, Artificial Sequence
  Description of Artificial Sequence: Synthetic oligonucleotide
  Sense strand starting at position 744 of SEQ ID NO: 1881175
cauauaaaugguugaguuu

SEQ ID NO: 2023871 - RNA, 19 nt, Artificial Sequence
  Description of Artificial Sequence: Synthetic oligonucleotide
  Antisense strand to SEQ ID NO: 2023870
aaacucaaccauuuauaug

SEQ ID NO: 2023872 - RNA, 19 nt, Artificial Sequence
  Description of Artificial Sequence: Synthetic oligonucleotide
  Sense strand starting at position 750 of SEQ ID NO: 1881175
aaugguugaguuugcauuu

SEQ ID NO: 2023873 - RNA, 19 nt, Artificial Sequence
  Description of Artificial Sequence: Synthetic oligonucleotide
  Antisense strand to SEQ ID NO: 2023872
aaaugcaaacucaaccauu

SEQ ID NO: 2023874 - RNA, 19 nt, Artificial Sequence
  Description of Artificial Sequence: Synthetic oligonucleotide
  Sense strand starting at position 751 of SEQ ID NO: 1881175
augguugaguuugcauuua

SEQ ID NO: 2023875 - RNA, 19 nt, Artificial Sequence
  Description of Artificial Sequence: Synthetic oligonucleotide
  Antisense strand to SEQ ID NO: 2023874
uaaaugcaaacucaaccau

SEQ ID NO: 2023876 - RNA, 19 nt, Artificial Sequence
  Description of Artificial Sequence: Synthetic oligonucleotide
  Sense strand starting at position 766 of SEQ ID NO: 1881175
uuuauagacugaucuuaug

SEQ ID NO: 2023877 - RNA, 19 nt, Artificial Sequence
  Description of Artificial Sequence: Synthetic oligonucleotide
  Antisense strand to SEQ ID NO: 2023876
cauaagaucagucuauaaa

SEQ ID NO: 2023878 - RNA, 19 nt, Artificial Sequence
  Description of Artificial Sequence: Synthetic oligonucleotide
  Sense strand starting at position 784 of SEQ ID NO: 1881175
guaccagauugugcuuaaa

SEQ ID NO: 2023879 - RNA, 19 nt, Artificial Sequence
  Description of Artificial Sequence: Synthetic oligonucleotide
  Antisense strand to SEQ ID NO: 2023878
uuuaagcacaaucugguac

SEQ ID NO: 2023880 - RNA, 19 nt, Artificial Sequence
  Description of Artificial Sequence: Synthetic oligonucleotide
  Sense strand starting at position 787 of SEQ ID NO: 1881175
ccagauugugcuuaaaccu

SEQ ID NO: 2023881 - RNA, 19 nt, Artificial Sequence
  Description of Artificial Sequence: Synthetic oligonucleotide
  Antisense strand to SEQ ID NO: 2023880
agguuuaagcacaaucugg

SEQ ID NO: 2023882 - RNA, 19 nt, Artificial Sequence
  Description of Artificial Sequence: Synthetic oligonucleotide
  Sense strand starting at position 845 of SEQ ID NO: 1881175
guacucguaucaucuccaa

SEQ ID NO: 2023883 - RNA, 19 nt, Artificial Sequence
  Description of Artificial Sequence: Synthetic oligonucleotide
  Antisense strand to SEQ ID NO: 2023882
uuggagaugauacgaguac

SEQ ID NO: 2023884 - RNA, 19 nt, Artificial Sequence
  Description of Artificial Sequence: Synthetic oligonucleotide
  Sense strand starting at position 914 of SEQ ID NO: 1881175
ccuagugaguagcuaacua

SEQ ID NO: 2023885 - RNA, 19 nt, Artificial Sequence
  Description of Artificial Sequence: Synthetic oligonucleotide
  Antisense strand to SEQ ID NO: 2023884
uaguuagcuacucacuagg

SEQ ID NO: 2023886 - RNA, 19 nt, Artificial Sequence
  Description of Artificial Sequence: Synthetic oligonucleotide
  Sense strand starting at position 951 of SEQ ID NO: 1881175
cagagucugugcccuugaa

SEQ ID NO: 2023887 - RNA, 19 nt, Artificial Sequence
  Description of Artificial Sequence: Synthetic oligonucleotide
  Antisense strand to SEQ ID NO: 2023886
uucaagggcacagacucug

SEQ ID NO: 2023888 - RNA, 19 nt, Artificial Sequence
  Description of Artificial Sequence: Synthetic oligonucleotide
  Sense strand starting at position 955 of SEQ ID NO: 1881175
gucugugcccuugaacacu

SEQ ID NO: 2023889 - RNA, 19 nt, Artificial Sequence
  Description of Artificial Sequence: Synthetic oligonucleotide
  Antisense strand to SEQ ID NO: 2023888
aguguucaagggcacagac

SEQ ID NO: 2023890 - RNA, 19 nt, Artificial Sequence
  Description of Artificial Sequence: Synthetic oligonucleotide
  Sense strand starting at position 996 of SEQ ID NO: 1881175
gaugaaggaugauaacgau

SEQ ID NO: 2023891 - RNA, 19 nt, Artificial Sequence
  Description of Artificial Sequence: Synthetic oligonucleotide
  Antisense strand to SEQ ID NO: 2023890
aucguuaucauccuucauc

SEQ ID NO: 2023892 - RNA, 19 nt, Artificial Sequence
  Description of Artificial Sequence: Synthetic oligonucleotide
  Sense strand starting at position 999 of SEQ ID NO: 1881175
gaaggaugauaacgaugaa

SEQ ID NO: 2023893 - RNA, 19 nt, Artificial Sequence
  Description of Artificial Sequence: Synthetic oligonucleotide
  Antisense strand to SEQ ID NO: 2023892
uucaucguuaucauccuuc

SEQ ID NO: 2023894 - RNA, 19 nt, Artificial Sequence
  Description of Artificial Sequence: Synthetic oligonucleotide
  Sense strand starting at position 1002 of SEQ ID NO: 1881175
ggaugauaacgaugaagca

SEQ ID NO: 2023895 - RNA, 19 nt, Artificial Sequence
  Description of Artificial Sequence: Synthetic oligonucleotide
  Antisense strand to SEQ ID NO: 2023894
ugcuucaucguuaucaucc

SEQ ID NO: 2023896 - RNA, 19 nt, Artificial Sequence
  Description of Artificial Sequence: Synthetic oligonucleotide
  Sense strand starting at position 1076 of SEQ ID NO: 1881175
aguuauugccaccaaagcu

SEQ ID NO: 2023897 - RNA, 19 nt, Artificial Sequence
  Description of Artificial Sequence: Synthetic oligonucleotide
  Antisense strand to SEQ ID NO: 2023896
agcuuugguggcaauaacu

SEQ ID NO: 2023898 - RNA, 19 nt, Artificial Sequence
  Description of Artificial Sequence: Synthetic oligonucleotide
  Sense strand starting at position 1118 of SEQ ID NO: 1881175
gcuggagucaggugagcua

SEQ ID NO: 2023899 - RNA, 19 nt, Artificial Sequence
  Description of Artificial Sequence: Synthetic oligonucleotide
  Antisense strand to SEQ ID NO: 2023898
uagcucaccugacuccagc

SEQ ID NO: 2023900 - RNA, 19 nt, Artificial Sequence
  Description of Artificial Sequence: Synthetic oligonucleotide
  Sense strand starting at position 1129 of SEQ ID NO: 1881175
gugagcuagacugagucau

SEQ ID NO: 2023901 - RNA, 19 nt, Artificial Sequence
  Description of Artificial Sequence: Synthetic oligonucleotide
  Antisense strand to SEQ ID NO: 2023900
augacucagucuagcucac

SEQ ID NO: 2023902 - RNA, 19 nt, Artificial Sequence
  Description of Artificial Sequence: Synthetic oligonucleotide
  Sense strand starting at position 1133 of SEQ ID NO: 1881175
gcuagacugagucaucuga

SEQ ID NO: 2023903 - RNA, 19 nt, Artificial Sequence
  Description of Artificial Sequence: Synthetic oligonucleotide
  Antisense strand to SEQ ID NO: 2023902
ucagaugacucagucuagc

SEQ ID NO: 2023904 - RNA, 19 nt, Artificial Sequence
  Description of Artificial Sequence: Synthetic oligonucleotide
  Sense strand starting at position 1135 of SEQ ID NO: 1881175
uagacugagucaucugaua

SEQ ID NO: 2023905 - RNA, 19 nt, Artificial Sequence
  Description of Artificial Sequence: Synthetic oligonucleotide
  Antisense strand to SEQ ID NO: 2023904
uaucagaugacucagucua

SEQ ID NO: 2023906 - RNA, 19 nt, Artificial Sequence
  Description of Artificial Sequence: Synthetic oligonucleotide
  Sense strand starting at position 1265 of SEQ ID NO: 1881175
ccaggagucuuucucugaa

SEQ ID NO: 2023907 - RNA, 19 nt, Artificial Sequence
  Description of Artificial Sequence: Synthetic oligonucleotide
  Antisense strand to SEQ ID NO: 2023906
uucagagaaagacuccugg

SEQ ID NO: 2023908 - RNA, 19 nt, Artificial Sequence
  Description of Artificial Sequence: Synthetic oligonucleotide
  Sense strand starting at position 1267 of SEQ ID NO: 1881175
aggagucuuucucugaacu

SEQ ID NO: 2023909 - RNA, 19 nt, Artificial Sequence
  Description of Artificial Sequence: Synthetic oligonucleotide
  Antisense strand to SEQ ID NO: 2023908
aguucagagaaagacuccu

SEQ ID NO: 2023910 - RNA, 19 nt, Artificial Sequence
  Description of Artificial Sequence: Synthetic oligonucleotide
  Sense strand starting at position 1268 of SEQ ID NO: 1881175
ggagucuuucucugaacug

SEQ ID NO: 2023911 - RNA, 19 nt, Artificial Sequence
  Description of Artificial Sequence: Synthetic oligonucleotide
  Antisense strand to SEQ ID NO: 2023910
caguucagagaaagacucc

SEQ ID NO: 2023912 - RNA, 19 nt, Artificial Sequence
  Description of Artificial Sequence: Synthetic oligonucleotide
  Sense strand starting at position 1355 of SEQ ID NO: 1881175
cuguguuucguugaggaag

SEQ ID NO: 2023913 - RNA, 19 nt, Artificial Sequence
  Description of Artificial Sequence: Synthetic oligonucleotide
  Antisense strand to SEQ ID NO: 2023912
cuuccucaacgaaacacag

SEQ ID NO: 2023914 - RNA, 19 nt, Artificial Sequence
  Description of Artificial Sequence: Synthetic oligonucleotide
  Sense strand starting at position 1369 of SEQ ID NO: 1881175
ggaagucguugaucccuuu

SEQ ID NO: 2023915 - RNA, 19 nt, Artificial Sequence
  Description of Artificial Sequence: Synthetic oligonucleotide
  Antisense strand to SEQ ID NO: 2023914
aaagggaucaacgacuucc

SEQ ID NO: 2023916 - RNA, 19 nt, Artificial Sequence
  Description of Artificial Sequence: Synthetic oligonucleotide
  Sense strand starting at position 1435 of SEQ ID NO: 1881175
cugcgaaagcccgauguaa

SEQ ID NO: 2023917 - RNA, 19 nt, Artificial Sequence
  Description of Artificial Sequence: Synthetic oligonucleotide
  Antisense strand to SEQ ID NO: 2023916
uuacaucgggcuuucgcag

SEQ ID NO: 2023918 - RNA, 19 nt, Artificial Sequence
  Description of Artificial Sequence: Synthetic oligonucleotide
  Sense strand starting at position 1437 of SEQ ID NO: 1881175
gcgaaagcccgauguaaac

SEQ ID NO: 2023919 - RNA, 19 nt, Artificial Sequence
  Description of Artificial Sequence: Synthetic oligonucleotide
  Antisense strand to SEQ ID NO: 2023918
guuuacaucgggcuuucgc

SEQ ID NO: 2023920 - RNA, 19 nt, Artificial Sequence
  Description of Artificial Sequence: Synthetic oligonucleotide
  Sense strand starting at position 1498 of SEQ ID NO: 1881175
cgggcccaguccucagaaa

SEQ ID NO: 2023921 - RNA, 19 nt, Artificial Sequence
  Description of Artificial Sequence: Synthetic oligonucleotide
  Antisense strand to SEQ ID NO: 2023920
uuucugaggacugggcccg

SEQ ID NO: 2023922 - RNA, 19 nt, Artificial Sequence
  Description of Artificial Sequence: Synthetic oligonucleotide
  Sense strand starting at position 1499 of SEQ ID NO: 1881175
gggcccaguccucagaaau

SEQ ID NO: 2023923 - RNA, 19 nt, Artificial Sequence
  Description of Artificial Sequence: Synthetic oligonucleotide
  Antisense strand to SEQ ID NO: 2023922
auuucugaggacugggccc

SEQ ID NO: 2023924 - RNA, 19 nt, Artificial Sequence
  Description of Artificial Sequence: Synthetic oligonucleotide
  Sense strand starting at position 2279 of SEQ ID NO: 1881175
uagugcucucagggaugaa

SEQ ID NO: 2023925 - RNA, 19 nt, Artificial Sequence
  Description of Artificial Sequence: Synthetic oligonucleotide
  Antisense strand to SEQ ID NO: 2023924
uucaucccugagagcacua

SEQ ID NO: 2023926 - RNA, 19 nt, Artificial Sequence
  Description of Artificial Sequence: Synthetic oligonucleotide
  Sense strand starting at position 2462 of SEQ ID NO: 1881175
gggagaaauuagggaagau

SEQ ID NO: 2023927 - RNA, 19 nt, Artificial Sequence
  Description of Artificial Sequence: Synthetic oligonucleotide
  Antisense strand to SEQ ID NO: 2023926
aucuucccuaauuucuccc

SEQ ID NO: 2023928 - RNA, 19 nt, Artificial Sequence
  Description of Artificial Sequence: Synthetic oligonucleotide
  Sense strand starting at position 2501 of SEQ ID NO: 1881175
ucaggaaaccagugucaaa

SEQ ID NO: 2023929 - RNA, 19 nt, Artificial Sequence
  Description of Artificial Sequence: Synthetic oligonucleotide
  Antisense strand to SEQ ID NO: 2023928
uuugacacugguuuccuga

SEQ ID NO: 2023930 - RNA, 19 nt, Artificial Sequence
  Description of Artificial Sequence: Synthetic oligonucleotide
  Sense strand starting at position 2557 of SEQ ID NO: 1881175
guuaucuaaucagaaauag

SEQ ID NO: 2023931 - RNA, 19 nt, Artificial Sequence
  Description of Artificial Sequence: Synthetic oligonucleotide
  Antisense strand to SEQ ID NO: 2023930
cuauuucugauuagauaac

SEQ ID NO: 2023932 - RNA, 19 nt, Artificial Sequence
  Description of Artificial Sequence: Synthetic oligonucleotide
  Sense strand starting at position 2582 of SEQ ID NO: 1881175
augcacauuugacaugauu

SEQ ID NO: 2023933 - RNA, 19 nt, Artificial Sequence
  Description of Artificial Sequence: Synthetic oligonucleotide
  Antisense strand to SEQ ID NO: 2023932
aaucaugucaaaugugcau

SEQ ID NO: 2023934 - RNA, 19 nt, Artificial Sequence
  Description of Artificial Sequence: Synthetic oligonucleotide
  Sense strand starting at position 2644 of SEQ ID NO: 1881175
auagauuuguaagaugcua

SEQ ID NO: 2023935 - RNA, 19 nt, Artificial Sequence
  Description of Artificial Sequence: Synthetic oligonucleotide
  Antisense strand to SEQ ID NO: 2023934
uagcaucuuacaaaucuau

SEQ ID NO: 2023936 - RNA, 19 nt, Artificial Sequence
  Description of Artificial Sequence: Synthetic oligonucleotide
  Sense strand starting at position 2702 of SEQ ID NO: 1881175
aauggaugauguuacaaga

SEQ ID NO: 2023937 - RNA, 19 nt, Artificial Sequence
  Description of Artificial Sequence: Synthetic oligonucleotide
  Antisense strand to SEQ ID NO: 2023936
ucuuguaacaucauccauu

SEQ ID NO: 2023938 - RNA, 19 nt, Artificial Sequence
  Description of Artificial Sequence: Synthetic oligonucleotide
  Sense strand starting at position 2789 of SEQ ID NO: 1881175
agagaaguuuaucaaagaa

SEQ ID NO: 2023939 - RNA, 19 nt, Artificial Sequence
  Description of Artificial Sequence: Synthetic oligonucleotide
  Antisense strand to SEQ ID NO: 2023938
uucuuugauaaacuucucu

SEQ ID NO: 2023940 - RNA, 19 nt, Artificial Sequence
  Description of Artificial Sequence: Synthetic oligonucleotide
  Sense strand starting at position 3049 of SEQ ID NO: 1881175
auguaaguaucaguggaaa

SEQ ID NO: 2023941 - RNA, 19 nt, Artificial Sequence
  Description of Artificial Sequence: Synthetic oligonucleotide
  Antisense strand to SEQ ID NO: 2023940
uuuccacugauacuuacau

SEQ ID NO: 2023942 - RNA, 19 nt, Artificial Sequence
  Description of Artificial Sequence: Synthetic oligonucleotide
  Sense strand starting at position 16 of SEQ ID NO: 1881174
agaagcugcuucccugauu

SEQ ID NO: 2023943 - RNA, 19 nt, Artificial Sequence
  Description of Artificial Sequence: Synthetic oligonucleotide
  Antisense strand to SEQ ID NO: 2023942
aaucagggaagcagcuucu

SEQ ID NO: 2023944 - RNA, 19 nt, Artificial Sequence
  Description of Artificial Sequence: Synthetic oligonucleotide
  Sense strand starting at position 58 of SEQ ID NO: 1881174
uugucaugucuauaauucu

SEQ ID NO: 2023945 - RNA, 19 nt, Artificial Sequence
  Description of Artificial Sequence: Synthetic oligonucleotide
  Antisense strand to SEQ ID NO: 2023944
agaauuauagacaugacaa

SEQ ID NO: 2023946 - RNA, 19 nt, Artificial Sequence
  Description of Artificial Sequence: Synthetic oligonucleotide
  Sense strand starting at position 182 of SEQ ID NO: 1881174
ggaugucacccaggaugga

SEQ ID NO: 2023947 - RNA, 19 nt, Artificial Sequence
  Description of Artificial Sequence: Synthetic oligonucleotide
  Antisense strand to SEQ ID NO: 2023946
uccauccugggugacaucc

SEQ ID NO: 2023948 - RNA, 19 nt, Artificial Sequence
  Description of Artificial Sequence: Synthetic oligonucleotide
  Sense strand starting at position 516 of SEQ ID NO: 1881174
acuugaggauaguucuuua

SEQ ID NO: 2023949 - RNA, 19 nt, Artificial Sequence
  Description of Artificial Sequence: Synthetic oligonucleotide
  Antisense strand to SEQ ID NO: 2023948
uaaagaacuauccucaagu

SEQ ID NO: 2023950 - RNA, 19 nt, Artificial Sequence
  Description of Artificial Sequence: Synthetic oligonucleotide
  Sense strand starting at position 519 of SEQ ID NO: 1881174
ugaggauaguucuuuagac

SEQ ID NO: 2023951 - RNA, 19 nt, Artificial Sequence
  Description of Artificial Sequence: Synthetic oligonucleotide
  Antisense strand to SEQ ID NO: 2023950
gucuaaagaacuauccuca

SEQ ID NO: 2023952 - RNA, 19 nt, Artificial Sequence
  Description of Artificial Sequence: Synthetic oligonucleotide
  Sense strand starting at position 520 of SEQ ID NO: 1881174
gaggauaguucuuuagaca

SEQ ID NO: 2023953 - RNA, 19 nt, Artificial Sequence
  Description of Artificial Sequence: Synthetic oligonucleotide
  Antisense strand to SEQ ID NO: 2023952
ugucuaaagaacuauccuc

SEQ ID NO: 2023954 - RNA, 19 nt, Artificial Sequence
  Description of Artificial Sequence: Synthetic oligonucleotide
  Sense strand starting at position 1087 of SEQ ID NO: 1881174
ucauauaaaugguugaguu

SEQ ID NO: 2023955 - RNA, 19 nt, Artificial Sequence
  Description of Artificial Sequence: Synthetic oligonucleotide
  Antisense strand to SEQ ID NO: 2023954
aacucaaccauuuauauga

SEQ ID NO: 2023956 - RNA, 19 nt, Artificial Sequence
  Description of Artificial Sequence: Synthetic oligonucleotide
  Sense strand starting at position 1088 of SEQ ID NO: 1881174
cauauaaaugguugaguuu

SEQ ID NO: 2023957 - RNA, 19 nt, Artificial Sequence
  Description of Artificial Sequence: Synthetic oligonucleotide
  Antisense strand to SEQ ID NO: 2023956
aaacucaaccauuuauaug

SEQ ID NO: 2023958 - RNA, 19 nt, Artificial Sequence
  Description of Artificial Sequence: Synthetic oligonucleotide
  Sense strand starting at position 1094 of SEQ ID NO: 1881174
aaugguugaguuugcauuu

SEQ ID NO: 2023959 - RNA, 19 nt, Artificial Sequence
  Description of Artificial Sequence: Synthetic oligonucleotide
  Antisense strand to SEQ ID NO: 2023958
aaaugcaaacucaaccauu

SEQ ID NO: 2023960 - RNA, 19 nt, Artificial Sequence
  Description of Artificial Sequence: Synthetic oligonucleotide
  Sense strand starting at position 1095 of SEQ ID NO: 1881174
augguugaguuugcauuua

SEQ ID NO: 2023961 - RNA, 19 nt, Artificial Sequence
  Description of Artificial Sequence: Synthetic oligonucleotide
  Antisense strand to SEQ ID NO: 2023960
uaaaugcaaacucaaccau

SEQ ID NO: 2023962 - RNA, 19 nt, Artificial Sequence
  Description of Artificial Sequence: Synthetic oligonucleotide
  Sense strand starting at position 1110 of SEQ ID NO: 1881174
uuuauagacugaucuuaug

SEQ ID NO: 2023963 - RNA, 19 nt, Artificial Sequence
  Description of Artificial Sequence: Synthetic oligonucleotide
  Antisense strand to SEQ ID NO: 2023962
cauaagaucagucuauaaa

SEQ ID NO: 2023964 - RNA, 19 nt, Artificial Sequence
  Description of Artificial Sequence: Synthetic oligonucleotide
  Sense strand starting at position 1128 of SEQ ID NO: 1881174
guaccagauugugcuuaaa

SEQ ID NO: 2023965 - RNA, 19 nt, Artificial Sequence
  Description of Artificial Sequence: Synthetic oligonucleotide
  Antisense strand to SEQ ID NO: 2023964
uuuaagcacaaucugguac

SEQ ID NO: 2023966 - RNA, 19 nt, Artificial Sequence
  Description of Artificial Sequence: Synthetic oligonucleotide
  Sense strand starting at position 1131 of SEQ ID NO: 1881174
ccagauugugcuuaaaccu

SEQ ID NO: 2023967 - RNA, 19 nt, Artificial Sequence
  Description of Artificial Sequence: Synthetic oligonucleotide
  Antisense strand to SEQ ID NO: 2023966
agguuuaagcacaaucugg

SEQ ID NO: 2023968 - RNA, 19 nt, Artificial Sequence
  Description of Artificial Sequence: Synthetic oligonucleotide
  Sense strand starting at position 1189 of SEQ ID NO: 1881174
guacucguaucaucuccaa

SEQ ID NO: 2023969 - RNA, 19 nt, Artificial Sequence
  Description of Artificial Sequence: Synthetic oligonucleotide
  Antisense strand to SEQ ID NO: 2023968
uuggagaugauacgaguac

SEQ ID NO: 2023970 - RNA, 19 nt, Artificial Sequence
  Description of Artificial Sequence: Synthetic oligonucleotide
  Sense strand starting at position 1258 of SEQ ID NO: 1881174
ccuagugaguagcuaacua

SEQ ID NO: 2023971 - RNA, 19 nt, Artificial Sequence
  Description of Artificial Sequence: Synthetic oligonucleotide
  Antisense strand to SEQ ID NO: 2023970
uaguuagcuacucacuagg

SEQ ID NO: 2023972 - RNA, 19 nt, Artificial Sequence
  Description of Artificial Sequence: Synthetic oligonucleotide
  Sense strand starting at position 1295 of SEQ ID NO: 1881174
cagagucugugcccuugaa

SEQ ID NO: 2023973 - RNA, 19 nt, Artificial Sequence
  Description of Artificial Sequence: Synthetic oligonucleotide
  Antisense strand to SEQ ID NO: 2023972
uucaagggcacagacucug

SEQ ID NO: 2023974 - RNA, 19 nt, Artificial Sequence
  Description of Artificial Sequence: Synthetic oligonucleotide
  Sense strand starting at position 1299 of SEQ ID NO: 1881174
gucugugcccuugaacacu

SEQ ID NO: 2023975 - RNA, 19 nt, Artificial Sequence
  Description of Artificial Sequence: Synthetic oligonucleotide
  Antisense strand to SEQ ID NO: 2023974
aguguucaagggcacagac

SEQ ID NO: 2023976 - RNA, 19 nt, Artificial Sequence
  Description of Artificial Sequence: Synthetic oligonucleotide
  Sense strand starting at position 1340 of SEQ ID NO: 1881174
gaugaaggaugauaacgau

SEQ ID NO: 2023977 - RNA, 19 nt, Artificial Sequence
  Description of Artificial Sequence: Synthetic oligonucleotide
  Antisense strand to SEQ ID NO: 2023976
aucguuaucauccuucauc

SEQ ID NO: 2023978 - RNA, 19 nt, Artificial Sequence
  Description of Artificial Sequence: Synthetic oligonucleotide
  Sense strand starting at position 1346 of SEQ ID NO: 1881174
ggaugauaacgaugaagca

SEQ ID NO: 2023979 - RNA, 19 nt, Artificial Sequence
  Description of Artificial Sequence: Synthetic oligonucleotide
  Antisense strand to SEQ ID NO: 2023978
ugcuucaucguuaucaucc

SEQ ID NO: 2023980 - RNA, 19 nt, Artificial Sequence
  Description of Artificial Sequence: Synthetic oligonucleotide
  Sense strand starting at position 1420 of SEQ ID NO: 1881174
aguuauugccaccaaagcu

SEQ ID NO: 2023981 - RNA, 19 nt, Artificial Sequence
  Description of Artificial Sequence: Synthetic oligonucleotide
  Antisense strand to SEQ ID NO: 2023980
agcuuugguggcaauaacu

SEQ ID NO: 2023982 - RNA, 19 nt, Artificial Sequence
  Description of Artificial Sequence: Synthetic oligonucleotide
  Sense strand starting at position 1462 of SEQ ID NO: 1881174
gcuggagucaggugagcua

SEQ ID NO: 2023983 - RNA, 19 nt, Artificial Sequence
  Description of Artificial Sequence: Synthetic oligonucleotide
  Antisense strand to SEQ ID NO: 2023982
uagcucaccugacuccagc

SEQ ID NO: 2023984 - RNA, 19 nt, Artificial Sequence
  Description of Artificial Sequence: Synthetic oligonucleotide
  Sense strand starting at position 1473 of SEQ ID NO: 1881174
gugagcuagacugagucau

SEQ ID NO: 2023985 - RNA, 19 nt, Artificial Sequence
  Description of Artificial Sequence: Synthetic oligonucleotide
  Antisense strand to SEQ ID NO: 2023984
augacucagucuagcucac

SEQ ID NO: 2023986 - RNA, 19 nt, Artificial Sequence
  Description of Artificial Sequence: Synthetic oligonucleotide
  Sense strand starting at position 1477 of SEQ ID NO: 1881174
gcuagacugagucaucuga

SEQ ID NO: 2023987 - RNA, 19 nt, Artificial Sequence
  Description of Artificial Sequence: Synthetic oligonucleotide
  Antisense strand to SEQ ID NO: 2023986
ucagaugacucagucuagc

SEQ ID NO: 2023988 - RNA, 19 nt, Artificial Sequence
  Description of Artificial Sequence: Synthetic oligonucleotide
  Sense strand starting at position 1479 of SEQ ID NO: 1881174
uagacugagucaucugaua

SEQ ID NO: 2023989 - RNA, 19 nt, Artificial Sequence
  Description of Artificial Sequence: Synthetic oligonucleotide
  Antisense strand to SEQ ID NO: 2023988
uaucagaugacucagucua

SEQ ID NO: 2023990 - RNA, 19 nt, Artificial Sequence
  Description of Artificial Sequence: Synthetic oligonucleotide
  Sense strand starting at position 1609 of SEQ ID NO: 1881174
ccaggagucuuucucugaa

SEQ ID NO: 2023991 - RNA, 19 nt, Artificial Sequence
  Description of Artificial Sequence: Synthetic oligonucleotide
  Antisense strand to SEQ ID NO: 2023990
uucagagaaagacuccugg

SEQ ID NO: 2023992 - RNA, 19 nt, Artificial Sequence
  Description of Artificial Sequence: Synthetic oligonucleotide
  Sense strand starting at position 1611 of SEQ ID NO: 1881174
aggagucuuucucugaacu

SEQ ID NO: 2023993 - RNA, 19 nt, Artificial Sequence
  Description of Artificial Sequence: Synthetic oligonucleotide
  Antisense strand to SEQ ID NO: 2023992
aguucagagaaagacuccu

SEQ ID NO: 2023994 - RNA, 19 nt, Artificial Sequence
  Description of Artificial Sequence: Synthetic oligonucleotide
  Sense strand starting at position 1612 of SEQ ID NO: 1881174
ggagucuuucucugaacug

SEQ ID NO: 2023995 - RNA, 19 nt, Artificial Sequence
  Description of Artificial Sequence: Synthetic oligonucleotide
  Antisense strand to SEQ ID NO: 2023994
caguucagagaaagacucc

SEQ ID NO: 2023996 - RNA, 19 nt, Artificial Sequence
  Description of Artificial Sequence: Synthetic oligonucleotide
  Sense strand starting at position 1699 of SEQ ID NO: 1881174
cuguguuucguugaggaag

SEQ ID NO: 2023997 - RNA, 19 nt, Artificial Sequence
  Description of Artificial Sequence: Synthetic oligonucleotide
  Antisense strand to SEQ ID NO: 2023996
cuuccucaacgaaacacag

SEQ ID NO: 2023998 - RNA, 19 nt, Artificial Sequence
  Description of Artificial Sequence: Synthetic oligonucleotide
  Sense strand starting at position 1713 of SEQ ID NO: 1881174
ggaagucguugaucccuuu

SEQ ID NO: 2023999 - RNA, 19 nt, Artificial Sequence
  Description of Artificial Sequence: Synthetic oligonucleotide
  Antisense strand to SEQ ID NO: 2023998
aaagggaucaacgacuucc

SEQ ID NO: 2024000 - RNA, 19 nt, Artificial Sequence
  Description of Artificial Sequence: Synthetic oligonucleotide
  Sense strand starting at position 1779 of SEQ ID NO: 1881174
cugcgaaagcccgauguaa

SEQ ID NO: 2024001 - RNA, 19 nt, Artificial Sequence
  Description of Artificial Sequence: Synthetic oligonucleotide
  Antisense strand to SEQ ID NO: 2024000
uuacaucgggcuuucgcag

SEQ ID NO: 2024002 - RNA, 19 nt, Artificial Sequence
  Description of Artificial Sequence: Synthetic oligonucleotide
  Sense strand starting at position 1842 of SEQ ID NO: 1881174
cgggcccaguccucagaaa

SEQ ID NO: 2024003 - RNA, 19 nt, Artificial Sequence
  Description of Artificial Sequence: Synthetic oligonucleotide
  Antisense strand to SEQ ID NO: 2024002
uuucugaggacugggcccg

SEQ ID NO: 2024004 - RNA, 19 nt, Artificial Sequence
  Description of Artificial Sequence: Synthetic oligonucleotide
  Sense strand starting at position 1843 of SEQ ID NO: 1881174
gggcccaguccucagaaau

SEQ ID NO: 2024005 - RNA, 19 nt, Artificial Sequence
  Description of Artificial Sequence: Synthetic oligonucleotide
  Antisense strand to SEQ ID NO: 2024004
auuucugaggacugggccc

SEQ ID NO: 2024006 - RNA, 19 nt, Artificial Sequence
  Description of Artificial Sequence: Synthetic oligonucleotide
  Sense strand starting at position 2623 of SEQ ID NO: 1881174
uagugcucucagggaugaa

SEQ ID NO: 2024007 - RNA, 19 nt, Artificial Sequence
  Description of Artificial Sequence: Synthetic oligonucleotide
  Antisense strand to SEQ ID NO: 2024006
uucaucccugagagcacua

SEQ ID NO: 2024008 - RNA, 19 nt, Artificial Sequence
  Description of Artificial Sequence: Synthetic oligonucleotide
  Sense strand starting at position 2806 of SEQ ID NO: 1881174
gggagaaauuagggaagau

SEQ ID NO: 2024009 - RNA, 19 nt, Artificial Sequence
  Description of Artificial Sequence: Synthetic oligonucleotide
  Antisense strand to SEQ ID NO: 2024008
aucuucccuaauuucuccc

SEQ ID NO: 2024010 - RNA, 19 nt, Artificial Sequence
  Description of Artificial Sequence: Synthetic oligonucleotide
  Sense strand starting at position 2845 of SEQ ID NO: 1881174
ucaggaaaccagugucaaa

SEQ ID NO: 2024011 - RNA, 19 nt, Artificial Sequence
  Description of Artificial Sequence: Synthetic oligonucleotide
  Antisense strand to SEQ ID NO: 2024010
uuugacacugguuuccuga

SEQ ID NO: 2024012 - RNA, 19 nt, Artificial Sequence
  Description of Artificial Sequence: Synthetic oligonucleotide
  Sense strand starting at position 2926 of SEQ ID NO: 1881174
augcacauuugacaugauu

SEQ ID NO: 2024013 - RNA, 19 nt, Artificial Sequence
  Description of Artificial Sequence: Synthetic oligonucleotide
  Antisense strand to SEQ ID NO: 2024012
aaucaugucaaaugugcau

SEQ ID NO: 2024014 - RNA, 19 nt, Artificial Sequence
  Description of Artificial Sequence: Synthetic oligonucleotide
  Sense strand starting at position 2988 of SEQ ID NO: 1881174
auagauuuguaagaugcua

SEQ ID NO: 2024015 - RNA, 19 nt, Artificial Sequence
  Description of Artificial Sequence: Synthetic oligonucleotide
  Antisense strand to SEQ ID NO: 2024014
uagcaucuuacaaaucuau

SEQ ID NO: 2024016 - RNA, 19 nt, Artificial Sequence
  Description of Artificial Sequence: Synthetic oligonucleotide
  Sense strand starting at position 3046 of SEQ ID NO: 1881174
aauggaugauguuacaaga

SEQ ID NO: 2024017 - RNA, 19 nt, Artificial Sequence
  Description of Artificial Sequence: Synthetic oligonucleotide
  Antisense strand to SEQ ID NO: 2024016
ucuuguaacaucauccauu

SEQ ID NO: 2024018 - RNA, 19 nt, Artificial Sequence
  Description of Artificial Sequence: Synthetic oligonucleotide
  Sense strand starting at position 3133 of SEQ ID NO: 1881174
agagaaguuuaucaaagaa

SEQ ID NO: 2024019 - RNA, 19 nt, Artificial Sequence
  Description of Artificial Sequence: Synthetic oligonucleotide
  Antisense strand to SEQ ID NO: 2024018
uucuuugauaaacuucucu

SEQ ID NO: 2024020 - RNA, 19 nt, Artificial Sequence
  Description of Artificial Sequence: Synthetic oligonucleotide
  Sense strand starting at position 3393 of SEQ ID NO: 1881174
auguaaguaucaguggaaa

SEQ ID NO: 2024021 - RNA, 19 nt, Artificial Sequence
  Description of Artificial Sequence: Synthetic oligonucleotide
  Antisense strand to SEQ ID NO: 2024020
uuuccacugauacuuacau

SEQ ID NO: 2024022 - RNA, 19 nt, Artificial Sequence
  Description of Artificial Sequence: Synthetic oligonucleotide
  Sense strand starting at position 615 of SEQ ID NO: 1881176
aguuacaugcaguaaguua

SEQ ID NO: 2024023 - RNA, 19 nt, Artificial Sequence
  Description of Artificial Sequence: Synthetic oligonucleotide
  Antisense strand to SEQ ID NO: 2024022
uaacuuacugcauguaacu

SEQ ID NO: 2024024 - RNA, 19 nt, Artificial Sequence
  Description of Artificial Sequence: Synthetic oligonucleotide
  Sense strand starting at position 630 of SEQ ID NO: 1881176
guuaaagagaccuguguca

SEQ ID NO: 2024025 - RNA, 19 nt, Artificial Sequence
  Description of Artificial Sequence: Synthetic oligonucleotide
  Antisense strand to SEQ ID NO: 2024024
ugacacaggucucuuuaac

SEQ ID NO: 2024026 - RNA, 19 nt, Artificial Sequence
  Description of Artificial Sequence: Synthetic oligonucleotide
  Sense strand starting at position 632 of SEQ ID NO: 1881176
uaaagagaccugugucaug

SEQ ID NO: 2024027 - RNA, 19 nt, Artificial Sequence
  Description of Artificial Sequence: Synthetic oligonucleotide
  Antisense strand to SEQ ID NO: 2024026
caugacacaggucucuuua

SEQ ID NO: 2024028 - RNA, 19 nt, Artificial Sequence
  Description of Artificial Sequence: Synthetic oligonucleotide
  Sense strand starting at position 656 of SEQ ID NO: 1881176
guaaaccugucuccucaga

SEQ ID NO: 2024029 - RNA, 19 nt, Artificial Sequence
  Description of Artificial Sequence: Synthetic oligonucleotide
  Antisense strand to SEQ ID NO: 2024028
ucugaggagacagguuuac

SEQ ID NO: 2024030 - RNA, 19 nt, Artificial Sequence
  Description of Artificial Sequence: Synthetic oligonucleotide
  Sense strand starting at position 680 of SEQ ID NO: 1881176
ggaucaagcugugcucaaa

SEQ ID NO: 2024031 - RNA, 19 nt, Artificial Sequence
  Description of Artificial Sequence: Synthetic oligonucleotide
  Antisense strand to SEQ ID NO: 2024030
uuugagcacagcuugaucc

SEQ ID NO: 2024032 - RNA, 19 nt, Artificial Sequence
  Description of Artificial Sequence: Synthetic oligonucleotide
  Sense strand starting at position 689 of SEQ ID NO: 1881176
ugugcucaaaggcaagaau

SEQ ID NO: 2024033 - RNA, 19 nt, Artificial Sequence
  Description of Artificial Sequence: Synthetic oligonucleotide
  Antisense strand to SEQ ID NO: 2024032
auucuugccuuugagcaca

SEQ ID NO: 2024034 - RNA, 19 nt, Artificial Sequence
  Description of Artificial Sequence: Synthetic oligonucleotide
  Sense strand starting at position 790 of SEQ ID NO: 1881176
cagggccuugaaugaaauu

SEQ ID NO: 2024035 - RNA, 19 nt, Artificial Sequence
  Description of Artificial Sequence: Synthetic oligonucleotide
  Antisense strand to SEQ ID NO: 2024034
aauuucauucaaggcccug

SEQ ID NO: 2024036 - RNA, 19 nt, Artificial Sequence
  Description of Artificial Sequence: Synthetic oligonucleotide
  Sense strand starting at position 1032 of SEQ ID NO: 1881176
cgaugauuccugcaagaga

SEQ ID NO: 2024037 - RNA, 19 nt, Artificial Sequence
  Description of Artificial Sequence: Synthetic oligonucleotide
  Antisense strand to SEQ ID NO: 2024036
ucucuugcaggaaucaucg

SEQ ID NO: 2024038 - RNA, 19 nt, Artificial Sequence
  Description of Artificial Sequence: Synthetic oligonucleotide
  Sense strand starting at position 1077 of SEQ ID NO: 1881176
gcuggugaggcaugauaca

SEQ ID NO: 2024039 - RNA, 19 nt, Artificial Sequence
  Description of Artificial Sequence: Synthetic oligonucleotide
  Antisense strand to SEQ ID NO: 2024038
uguaucaugccucaccagc

SEQ ID NO: 2024040 - RNA, 19 nt, Artificial Sequence
  Description of Artificial Sequence: Synthetic oligonucleotide
  Sense strand starting at position 1215 of SEQ ID NO: 1881176
augcucucagcugagcaau

SEQ ID NO: 2024041 - RNA, 19 nt, Artificial Sequence
  Description of Artificial Sequence: Synthetic oligonucleotide
  Antisense strand to SEQ ID NO: 2024040
auugcucagcugagagcau

SEQ ID NO: 2024042 - RNA, 19 nt, Artificial Sequence
  Description of Artificial Sequence: Synthetic oligonucleotide
  Sense strand starting at position 1223 of SEQ ID NO: 1881176
agcugagcaaucugaguca

SEQ ID NO: 2024043 - RNA, 19 nt, Artificial Sequence
  Description of Artificial Sequence: Synthetic oligonucleotide
  Antisense strand to SEQ ID NO: 2024042
ugacucagauugcucagcu

SEQ ID NO: 2024044 - RNA, 19 nt, Artificial Sequence
  Description of Artificial Sequence: Synthetic oligonucleotide
  Sense strand starting at position 1226 of SEQ ID NO: 1881176
ugagcaaucugagucagug

SEQ ID NO: 2024045 - RNA, 19 nt, Artificial Sequence
  Description of Artificial Sequence: Synthetic oligonucleotide
  Antisense strand to SEQ ID NO: 2024044
cacugacucagauugcuca

SEQ ID NO: 2024046 - RNA, 19 nt, Artificial Sequence
  Description of Artificial Sequence: Synthetic oligonucleotide
  Sense strand starting at position 1294 of SEQ ID NO: 1881176
ccgugcuuucuccaugaaa

SEQ ID NO: 2024047 - RNA, 19 nt, Artificial Sequence
  Description of Artificial Sequence: Synthetic oligonucleotide
  Antisense strand to SEQ ID NO: 2024046
uuucauggagaaagcacgg

SEQ ID NO: 2024048 - RNA, 19 nt, Artificial Sequence
  Description of Artificial Sequence: Synthetic oligonucleotide
  Sense strand starting at position 1320 of SEQ ID NO: 1881176
gagguuaugucauuugccu

SEQ ID NO: 2024049 - RNA, 19 nt, Artificial Sequence
  Description of Artificial Sequence: Synthetic oligonucleotide
  Antisense strand to SEQ ID NO: 2024048
aggcaaaugacauaaccuc

SEQ ID NO: 2024050 - RNA, 19 nt, Artificial Sequence
  Description of Artificial Sequence: Synthetic oligonucleotide
  Sense strand starting at position 1333 of SEQ ID NO: 1881176
uugccuauuuaccuguuua

SEQ ID NO: 2024051 - RNA, 19 nt, Artificial Sequence
  Description of Artificial Sequence: Synthetic oligonucleotide
  Antisense strand to SEQ ID NO: 2024050
uaaacagguaaauaggcaa

SEQ ID NO: 2024052 - RNA, 19 nt, Artificial Sequence
  Description of Artificial Sequence: Synthetic oligonucleotide
  Sense strand starting at position 1337 of SEQ ID NO: 1881176
cuauuuaccuguuuacugu

SEQ ID NO: 2024053 - RNA, 19 nt, Artificial Sequence
  Description of Artificial Sequence: Synthetic oligonucleotide
  Antisense strand to SEQ ID NO: 2024052
acaguaaacagguaaauag

SEQ ID NO: 2024054 - RNA, 19 nt, Artificial Sequence
  Description of Artificial Sequence: Synthetic oligonucleotide
  Sense strand starting at position 1345 of SEQ ID NO: 1881176
cuguuuacugucuauuauc

SEQ ID NO: 2024055 - RNA, 19 nt, Artificial Sequence
  Description of Artificial Sequence: Synthetic oligonucleotide
  Antisense strand to SEQ ID NO: 2024054
gauaauagacaguaaacag

SEQ ID NO: 2024056 - RNA, 19 nt, Artificial Sequence
  Description of Artificial Sequence: Synthetic oligonucleotide
  Sense strand starting at position 1411 of SEQ ID NO: 1881176
uugugauagagauggcaua

SEQ ID NO: 2024057 - RNA, 19 nt, Artificial Sequence
  Description of Artificial Sequence: Synthetic oligonucleotide
  Antisense strand to SEQ ID NO: 2024056
uaugccaucucuaucacaa

SEQ ID NO: 2024058 - RNA, 19 nt, Artificial Sequence
  Description of Artificial Sequence: Synthetic oligonucleotide
  Sense strand starting at position 1516 of SEQ ID NO: 1881176
aaguguaguguuuggaaca

SEQ ID NO: 2024059 - RNA, 19 nt, Artificial Sequence
  Description of Artificial Sequence: Synthetic oligonucleotide
  Antisense strand to SEQ ID NO: 2024058
uguuccaaacacuacacuu

SEQ ID NO: 2024060 - RNA, 19 nt, Artificial Sequence
  Description of Artificial Sequence: Synthetic oligonucleotide
  Sense strand starting at position 1534 of SEQ ID NO: 1881176
aaggaucauugggaaauua

SEQ ID NO: 2024061 - RNA, 19 nt, Artificial Sequence
  Description of Artificial Sequence: Synthetic oligonucleotide
  Antisense strand to SEQ ID NO: 2024060
uaauuucccaaugauccuu

SEQ ID NO: 2024062 - RNA, 19 nt, Artificial Sequence
  Description of Artificial Sequence: Synthetic oligonucleotide
  Sense strand starting at position 2594 of SEQ ID NO: 1881176
ggagcacaaugguuuaacu

SEQ ID NO: 2024063 - RNA, 19 nt, Artificial Sequence
  Description of Artificial Sequence: Synthetic oligonucleotide
  Antisense strand to SEQ ID NO: 2024062
aguuaaaccauugugcucc

SEQ ID NO: 2024064 - RNA, 19 nt, Artificial Sequence
  Description of Artificial Sequence: Synthetic oligonucleotide
  Sense strand starting at position 2604 of SEQ ID NO: 1881176
gguuuaacuucucccaaag

SEQ ID NO: 2024065 - RNA, 19 nt, Artificial Sequence
  Description of Artificial Sequence: Synthetic oligonucleotide
  Antisense strand to SEQ ID NO: 2024064
cuuugggagaaguuaaacc

SEQ ID NO: 2024066 - RNA, 19 nt, Artificial Sequence
  Description of Artificial Sequence: Synthetic oligonucleotide
  Sense strand starting at position 2647 of SEQ ID NO: 1881176
gcuggacaacucugggauu

SEQ ID NO: 2024067 - RNA, 19 nt, Artificial Sequence
  Description of Artificial Sequence: Synthetic oligonucleotide
  Antisense strand to SEQ ID NO: 2024066
aaucccagaguuguccagc

SEQ ID NO: 2024068 - RNA, 19 nt, Artificial Sequence
  Description of Artificial Sequence: Synthetic oligonucleotide
  Sense strand starting at position 2648 of SEQ ID NO: 1881176
cuggacaacucugggauuu

SEQ ID NO: 2024069 - RNA, 19 nt, Artificial Sequence
  Description of Artificial Sequence: Synthetic oligonucleotide
  Antisense strand to SEQ ID NO: 2024068
aaaucccagaguuguccag

SEQ ID NO: 2024070 - RNA, 19 nt, Artificial Sequence
  Description of Artificial Sequence: Synthetic oligonucleotide
  Sense strand starting at position 2684 of SEQ ID NO: 1881176
gaggcuuuaguaggaguua

SEQ ID NO: 2024071 - RNA, 19 nt, Artificial Sequence
  Description of Artificial Sequence: Synthetic oligonucleotide
  Antisense strand to SEQ ID NO: 2024070
uaacuccuacuaaagccuc

SEQ ID NO: 2024072 - RNA, 19 nt, Artificial Sequence
  Description of Artificial Sequence: Synthetic oligonucleotide
  Sense strand starting at position 2695 of SEQ ID NO: 1881176
aggaguuaucuuugcccag

SEQ ID NO: 2024073 - RNA, 19 nt, Artificial Sequence
  Description of Artificial Sequence: Synthetic oligonucleotide
  Antisense strand to SEQ ID NO: 2024072
cugggcaaagauaacuccu

SEQ ID NO: 2024074 - RNA, 19 nt, Artificial Sequence
  Description of Artificial Sequence: Synthetic oligonucleotide
  Sense strand starting at position 2900 of SEQ ID NO: 1881176
uagagaguuugacuauucu

SEQ ID NO: 2024075 - RNA, 19 nt, Artificial Sequence
  Description of Artificial Sequence: Synthetic oligonucleotide
  Antisense strand to SEQ ID NO: 2024074
agaauagucaaacucucua

SEQ ID NO: 2024076 - RNA, 19 nt, Artificial Sequence
  Description of Artificial Sequence: Synthetic oligonucleotide
  Sense strand starting at position 2904 of SEQ ID NO: 1881176
gaguuugacuauucuguau

SEQ ID NO: 2024077 - RNA, 19 nt, Artificial Sequence
  Description of Artificial Sequence: Synthetic oligonucleotide
  Antisense strand to SEQ ID NO: 2024076
auacagaauagucaaacuc

SEQ ID NO: 2024078 - RNA, 19 nt, Artificial Sequence
  Description of Artificial Sequence: Synthetic oligonucleotide
  Sense strand starting at position 2959 of SEQ ID NO: 1881176
cagggugagacgugaacua

SEQ ID NO: 2024079 - RNA, 19 nt, Artificial Sequence
  Description of Artificial Sequence: Synthetic oligonucleotide
  Antisense strand to SEQ ID NO: 2024078
uaguucacgucucacccug

SEQ ID NO: 2024080 - RNA, 19 nt, Artificial Sequence
  Description of Artificial Sequence: Synthetic oligonucleotide
  Sense strand starting at position 3019 of SEQ ID NO: 1881176
uggauugaacgagguugaa

SEQ ID NO: 2024081 - RNA, 19 nt, Artificial Sequence
  Description of Artificial Sequence: Synthetic oligonucleotide
  Antisense strand to SEQ ID NO: 2024080
uucaaccucguucaaucca

SEQ ID NO: 2024082 - RNA, 19 nt, Artificial Sequence
  Description of Artificial Sequence: Synthetic oligonucleotide
  Sense strand starting at position 3210 of SEQ ID NO: 1881176
agauguuuaggagguggaa

SEQ ID NO: 2024083 - RNA, 19 nt, Artificial Sequence
  Description of Artificial Sequence: Synthetic oligonucleotide
  Antisense strand to SEQ ID NO: 2024082
uuccaccuccuaaacaucu

SEQ ID NO: 2024084 - RNA, 19 nt, Artificial Sequence
  Description of Artificial Sequence: Synthetic oligonucleotide
  Sense strand starting at position 3540 of SEQ ID NO: 1881176
agguguuggugauugagga

SEQ ID NO: 2024085 - RNA, 19 nt, Artificial Sequence
  Description of Artificial Sequence: Synthetic oligonucleotide
  Antisense strand to SEQ ID NO: 2024084
uccucaaucaccaacaccu

SEQ ID NO: 2024086 - RNA, 19 nt, Artificial Sequence
  Description of Artificial Sequence: Synthetic oligonucleotide
  Sense strand starting at position 3605 of SEQ ID NO: 1881176
gguggaugauagcugagau

SEQ ID NO: 2024087 - RNA, 19 nt, Artificial Sequence
  Description of Artificial Sequence: Synthetic oligonucleotide
  Antisense strand to SEQ ID NO: 2024086
aucucagcuaucauccacc

SEQ ID NO: 2024088 - RNA, 19 nt, Artificial Sequence
  Description of Artificial Sequence: Synthetic oligonucleotide
  Sense strand starting at position 3606 of SEQ ID NO: 1881176
guggaugauagcugagaua

SEQ ID NO: 2024089 - RNA, 19 nt, Artificial Sequence
  Description of Artificial Sequence: Synthetic oligonucleotide
  Antisense strand to SEQ ID NO: 2024088
uaucucagcuaucauccac

SEQ ID NO: 2024090 - RNA, 19 nt, Artificial Sequence
  Description of Artificial Sequence: Synthetic oligonucleotide
  Sense strand starting at position 3656 of SEQ ID NO: 1881176
ggaagaagaugaguuuguu

SEQ ID NO: 2024091 - RNA, 19 nt, Artificial Sequence
  Description of Artificial Sequence: Synthetic oligonucleotide
  Antisense strand to SEQ ID NO: 2024090
aacaaacucaucuucuucc

SEQ ID NO: 2024092 - RNA, 19 nt, Artificial Sequence
  Description of Artificial Sequence: Synthetic oligonucleotide
  Sense strand starting at position 3659 of SEQ ID NO: 1881176
agaagaugaguuuguuucu

SEQ ID NO: 2024093 - RNA, 19 nt, Artificial Sequence
  Description of Artificial Sequence: Synthetic oligonucleotide
  Antisense strand to SEQ ID NO: 2024092
agaaacaaacucaucuucu

SEQ ID NO: 2024094 - RNA, 19 nt, Artificial Sequence
  Description of Artificial Sequence: Synthetic oligonucleotide
  Sense strand starting at position 3701 of SEQ ID NO: 1881176
gggacauauccaggaagcu

SEQ ID NO: 2024095 - RNA, 19 nt, Artificial Sequence
  Description of Artificial Sequence: Synthetic oligonucleotide
  Antisense strand to SEQ ID NO: 2024094
agcuuccuggauauguccc

SEQ ID NO: 2024096 - RNA, 19 nt, Artificial Sequence
  Description of Artificial Sequence: Synthetic oligonucleotide
  Sense strand starting at position 3714 of SEQ ID NO: 1881176
gaagcuguuggauauccau

SEQ ID NO: 2024097 - RNA, 19 nt, Artificial Sequence
  Description of Artificial Sequence: Synthetic oligonucleotide
  Antisense strand to SEQ ID NO: 2024096
auggauauccaacagcuuc

SEQ ID NO: 2024098 - RNA, 19 nt, Artificial Sequence
  Description of Artificial Sequence: Synthetic oligonucleotide
  Sense strand starting at position 3720 of SEQ ID NO: 1881176
guuggauauccauguaugg

SEQ ID NO: 2024099 - RNA, 19 nt, Artificial Sequence
  Description of Artificial Sequence: Synthetic oligonucleotide
  Antisense strand to SEQ ID NO: 2024098
ccauacauggauauccaac

SEQ ID NO: 2024100 - RNA, 19 nt, Artificial Sequence
  Description of Artificial Sequence: Synthetic oligonucleotide
  Sense strand starting at position 3785 of SEQ ID NO: 1881176
gguuguauaauccagagug

SEQ ID NO: 2024101 - RNA, 19 nt, Artificial Sequence
  Description of Artificial Sequence: Synthetic oligonucleotide
  Antisense strand to SEQ ID NO: 2024100
cacucuggauuauacaacc

SEQ ID NO: 2024102 - RNA, 19 nt, Artificial Sequence
  Description of Artificial Sequence: Synthetic oligonucleotide
  Sense strand starting at position 39 of SEQ ID NO: 1881177
ggagaaggcugacagcuuu

SEQ ID NO: 2024103 - RNA, 19 nt, Artificial Sequence
  Description of Artificial Sequence: Synthetic oligonucleotide
  Antisense strand to SEQ ID NO: 2024102
aaagcugucagccuucucc

SEQ ID NO: 2024104 - RNA, 19 nt, Artificial Sequence
  Description of Artificial Sequence: Synthetic oligonucleotide
  Sense strand starting at position 117 of SEQ ID NO: 1881177
cuucguuccuccuugauca

SEQ ID NO: 2024105 - RNA, 19 nt, Artificial Sequence
  Description of Artificial Sequence: Synthetic oligonucleotide
  Antisense strand to SEQ ID NO: 2024104
ugaucaaggaggaacgaag

SEQ ID NO: 2024106 - RNA, 19 nt, Artificial Sequence
  Description of Artificial Sequence: Synthetic oligonucleotide
  Sense strand starting at position 124 of SEQ ID NO: 1881177
ccuccuugaucaguacuua

SEQ ID NO: 2024107 - RNA, 19 nt, Artificial Sequence
  Description of Artificial Sequence: Synthetic oligonucleotide
  Antisense strand to SEQ ID NO: 2024106
uaaguacugaucaaggagg

SEQ ID NO: 2024108 - RNA, 19 nt, Artificial Sequence
  Description of Artificial Sequence: Synthetic oligonucleotide
  Sense strand starting at position 161 of SEQ ID NO: 1881177
caugcauguucuccagaug

SEQ ID NO: 2024109 - RNA, 19 nt, Artificial Sequence
  Description of Artificial Sequence: Synthetic oligonucleotide
  Antisense strand to SEQ ID NO: 2024108
caucuggagaacaugcaug

SEQ ID NO: 2024110 - RNA, 19 nt, Artificial Sequence
  Description of Artificial Sequence: Synthetic oligonucleotide
  Sense strand starting at position 162 of SEQ ID NO: 1881177
augcauguucuccagaugu

SEQ ID NO: 2024111 - RNA, 19 nt, Artificial Sequence
  Description of Artificial Sequence: Synthetic oligonucleotide
  Antisense strand to SEQ ID NO: 2024110
acaucuggagaacaugcau

SEQ ID NO: 2024112 - RNA, 19 nt, Artificial Sequence
  Description of Artificial Sequence: Synthetic oligonucleotide
  Sense strand starting at position 503 of SEQ ID NO: 1881177
cccucauuucugggucuuu

SEQ ID NO: 2024113 - RNA, 19 nt, Artificial Sequence
  Description of Artificial Sequence: Synthetic oligonucleotide
  Antisense strand to SEQ ID NO: 2024112
aaagacccagaaaugaggg

SEQ ID NO: 2024114 - RNA, 19 nt, Artificial Sequence
  Description of Artificial Sequence: Synthetic oligonucleotide
  Sense strand starting at position 515 of SEQ ID NO: 1881177
ggucuuucuuccuggacau

SEQ ID NO: 2024115 - RNA, 19 nt, Artificial Sequence
  Description of Artificial Sequence: Synthetic oligonucleotide
  Antisense strand to SEQ ID NO: 2024114
auguccaggaagaaagacc

SEQ ID NO: 2024116 - RNA, 19 nt, Artificial Sequence
  Description of Artificial Sequence: Synthetic oligonucleotide
  Sense strand starting at position 516 of SEQ ID NO: 1881177
gucuuucuuccuggacauc

SEQ ID NO: 2024117 - RNA, 19 nt, Artificial Sequence
  Description of Artificial Sequence: Synthetic oligonucleotide
  Antisense strand to SEQ ID NO: 2024116
gauguccaggaagaaagac

SEQ ID NO: 2024118 - RNA, 19 nt, Artificial Sequence
  Description of Artificial Sequence: Synthetic oligonucleotide
  Sense strand starting at position 849 of SEQ ID NO: 1881177
guucgacuccuccaacuau

SEQ ID NO: 2024119 - RNA, 19 nt, Artificial Sequence
  Description of Artificial Sequence: Synthetic oligonucleotide
  Antisense strand to SEQ ID NO: 2024118
auaguuggaggagucgaac

SEQ ID NO: 2024120 - RNA, 19 nt, Artificial Sequence
  Description of Artificial Sequence: Synthetic oligonucleotide
  Sense strand starting at position 1348 of SEQ ID NO: 1881177
cggcgaguucggucccgaa

SEQ ID NO: 2024121 - RNA, 19 nt, Artificial Sequence
  Description of Artificial Sequence: Synthetic oligonucleotide
  Antisense strand to SEQ ID NO: 2024120
uucgggaccgaacucgccg

SEQ ID NO: 2024122 - RNA, 19 nt, Artificial Sequence
  Description of Artificial Sequence: Synthetic oligonucleotide
  Sense strand starting at position 1349 of SEQ ID NO: 1881177
ggcgaguucggucccgaaa

SEQ ID NO: 2024123 - RNA, 19 nt, Artificial Sequence
  Description of Artificial Sequence: Synthetic oligonucleotide
  Antisense strand to SEQ ID NO: 2024122
uuucgggaccgaacucgcc

SEQ ID NO: 2024124 - RNA, 19 nt, Artificial Sequence
  Description of Artificial Sequence: Synthetic oligonucleotide
  Sense strand starting at position 1350 of SEQ ID NO: 1881177
gcgaguucggucccgaaag

SEQ ID NO: 2024125 - RNA, 19 nt, Artificial Sequence
  Description of Artificial Sequence: Synthetic oligonucleotide
  Antisense strand to SEQ ID NO: 2024124
cuuucgggaccgaacucgc

SEQ ID NO: 2024126 - RNA, 19 nt, Artificial Sequence
  Description of Artificial Sequence: Synthetic oligonucleotide
  Sense strand starting at position 1352 of SEQ ID NO: 1881177
gaguucggucccgaaagau

SEQ ID NO: 2024127 - RNA, 19 nt, Artificial Sequence
  Description of Artificial Sequence: Synthetic oligonucleotide
  Antisense strand to SEQ ID NO: 2024126
aucuuucgggaccgaacuc

SEQ ID NO: 2024128 - RNA, 19 nt, Artificial Sequence
  Description of Artificial Sequence: Synthetic oligonucleotide
  Sense strand starting at position 1586 of SEQ ID NO: 1881177
ggcggcuucgcgcuggaau

SEQ ID NO: 2024129 - RNA, 19 nt, Artificial Sequence
  Description of Artificial Sequence: Synthetic oligonucleotide
  Antisense strand to SEQ ID NO: 2024128
auuccagcgcgaagccgcc

SEQ ID NO: 2024130 - RNA, 19 nt, Artificial Sequence
  Description of Artificial Sequence: Synthetic oligonucleotide
  Sense strand starting at position 2525 of SEQ ID NO: 1881177
uugccacaguugucugaga

SEQ ID NO: 2024131 - RNA, 19 nt, Artificial Sequence
  Description of Artificial Sequence: Synthetic oligonucleotide
  Antisense strand to SEQ ID NO: 2024130
ucucagacaacuguggcaa

SEQ ID NO: 2024132 - RNA, 19 nt, Artificial Sequence
  Description of Artificial Sequence: Synthetic oligonucleotide
  Sense strand starting at position 2526 of SEQ ID NO: 1881177
ugccacaguugucugagaa

SEQ ID NO: 2024133 - RNA, 19 nt, Artificial Sequence
  Description of Artificial Sequence: Synthetic oligonucleotide
  Antisense strand to SEQ ID NO: 2024132
uucucagacaacuguggca

SEQ ID NO: 2024134 - RNA, 19 nt, Artificial Sequence
  Description of Artificial Sequence: Synthetic oligonucleotide
  Sense strand starting at position 2527 of SEQ ID NO: 1881177
gccacaguugucugagaag

SEQ ID NO: 2024135 - RNA, 19 nt, Artificial Sequence
  Description of Artificial Sequence: Synthetic oligonucleotide
  Antisense strand to SEQ ID NO: 2024134
cuucucagacaacuguggc

SEQ ID NO: 2024136 - RNA, 19 nt, Artificial Sequence
  Description of Artificial Sequence: Synthetic oligonucleotide
  Sense strand starting at position 2530 of SEQ ID NO: 1881177
acaguugucugagaagcca

SEQ ID NO: 2024137 - RNA, 19 nt, Artificial Sequence
  Description of Artificial Sequence: Synthetic oligonucleotide
  Antisense strand to SEQ ID NO: 2024136
uggcuucucagacaacugu

SEQ ID NO: 2024138 - RNA, 19 nt, Artificial Sequence
  Description of Artificial Sequence: Synthetic oligonucleotide
  Sense strand starting at position 2736 of SEQ ID NO: 1881177
cgggaaggaucccuuccau

SEQ ID NO: 2024139 - RNA, 19 nt, Artificial Sequence
  Description of Artificial Sequence: Synthetic oligonucleotide
  Antisense strand to SEQ ID NO: 2024138
auggaagggauccuucccg

SEQ ID NO: 2024140 - RNA, 19 nt, Artificial Sequence
  Description of Artificial Sequence: Synthetic oligonucleotide
  Sense strand starting at position 2898 of SEQ ID NO: 1881177
gcuagugauucuccuccga

SEQ ID NO: 2024141 - RNA, 19 nt, Artificial Sequence
  Description of Artificial Sequence: Synthetic oligonucleotide
  Antisense strand to SEQ ID NO: 2024140
ucggaggagaaucacuagc

SEQ ID NO: 2024142 - RNA, 19 nt, Artificial Sequence
  Description of Artificial Sequence: Synthetic oligonucleotide
  Sense strand starting at position 2954 of SEQ ID NO: 1881177
ugcggugagaaguguguuu

SEQ ID NO: 2024143 - RNA, 19 nt, Artificial Sequence
  Description of Artificial Sequence: Synthetic oligonucleotide
  Antisense strand to SEQ ID NO: 2024142
aaacacacuucucaccgca

SEQ ID NO: 2024144 - RNA, 19 nt, Artificial Sequence
  Description of Artificial Sequence: Synthetic oligonucleotide
  Sense strand starting at position 2956 of SEQ ID NO: 1881177
cggugagaaguguguuucu

SEQ ID NO: 2024145 - RNA, 19 nt, Artificial Sequence
  Description of Artificial Sequence: Synthetic oligonucleotide
  Antisense strand to SEQ ID NO: 2024144
agaaacacacuucucaccg

SEQ ID NO: 2024146 - RNA, 19 nt, Artificial Sequence
  Description of Artificial Sequence: Synthetic oligonucleotide
  Sense strand starting at position 2959 of SEQ ID NO: 1881177
ugagaaguguguuucugug

SEQ ID NO: 2024147 - RNA, 19 nt, Artificial Sequence
  Description of Artificial Sequence: Synthetic oligonucleotide
  Antisense strand to SEQ ID NO: 2024146
cacagaaacacacuucuca

SEQ ID NO: 2024148 - RNA, 19 nt, Artificial Sequence
  Description of Artificial Sequence: Synthetic oligonucleotide
  Sense strand starting at position 2965 of SEQ ID NO: 1881177
guguguuucuguguggcua

SEQ ID NO: 2024149 - RNA, 19 nt, Artificial Sequence
  Description of Artificial Sequence: Synthetic oligonucleotide
  Antisense strand to SEQ ID NO: 2024148
uagccacacagaaacacac

SEQ ID NO: 2024150 - RNA, 19 nt, Artificial Sequence
  Description of Artificial Sequence: Synthetic oligonucleotide
  Sense strand starting at position 2966 of SEQ ID NO: 1881177
uguguuucuguguggcuaa

SEQ ID NO: 2024151 - RNA, 19 nt, Artificial Sequence
  Description of Artificial Sequence: Synthetic oligonucleotide
  Antisense strand to SEQ ID NO: 2024150
uuagccacacagaaacaca

SEQ ID NO: 2024152 - RNA, 19 nt, Artificial Sequence
  Description of Artificial Sequence: Synthetic oligonucleotide
  Sense strand starting at position 3037 of SEQ ID NO: 1881177
guaagugacgcuggauugu

SEQ ID NO: 2024153 - RNA, 19 nt, Artificial Sequence
  Description of Artificial Sequence: Synthetic oligonucleotide
  Antisense strand to SEQ ID NO: 2024152
acaauccagcgucacuuac

SEQ ID NO: 2024154 - RNA, 19 nt, Artificial Sequence
  Description of Artificial Sequence: Synthetic oligonucleotide
  Sense strand starting at position 3075 of SEQ ID NO: 1881177
ccugcugugucagugcuaa

SEQ ID NO: 2024155 - RNA, 19 nt, Artificial Sequence
  Description of Artificial Sequence: Synthetic oligonucleotide
  Antisense strand to SEQ ID NO: 2024154
uuagcacugacacagcagg

SEQ ID NO: 2024156 - RNA, 19 nt, Artificial Sequence
  Description of Artificial Sequence: Synthetic oligonucleotide
  Sense strand starting at position 3077 of SEQ ID NO: 1881177
ugcugugucagugcuaaug

SEQ ID NO: 2024157 - RNA, 19 nt, Artificial Sequence
  Description of Artificial Sequence: Synthetic oligonucleotide
  Antisense strand to SEQ ID NO: 2024156
cauuagcacugacacagca

SEQ ID NO: 2024158 - RNA, 19 nt, Artificial Sequence
  Description of Artificial Sequence: Synthetic oligonucleotide
  Sense strand starting at position 3079 of SEQ ID NO: 1881177
cugugucagugcuaaugaa

SEQ ID NO: 2024159 - RNA, 19 nt, Artificial Sequence
  Description of Artificial Sequence: Synthetic oligonucleotide
  Antisense strand to SEQ ID NO: 2024158
uucauuagcacugacacag

SEQ ID NO: 2024160 - RNA, 19 nt, Artificial Sequence
  Description of Artificial Sequence: Synthetic oligonucleotide
  Sense strand starting at position 3095 of SEQ ID NO: 1881177
gaaacauguugguugguuu

SEQ ID NO: 2024161 - RNA, 19 nt, Artificial Sequence
  Description of Artificial Sequence: Synthetic oligonucleotide
  Antisense strand to SEQ ID NO: 2024160
aaaccaaccaacauguuuc

SEQ ID NO: 2024162 - RNA, 19 nt, Artificial Sequence
  Description of Artificial Sequence: Synthetic oligonucleotide
  Sense strand starting at position 3099 of SEQ ID NO: 1881177
cauguugguugguuucuaa

SEQ ID NO: 2024163 - RNA, 19 nt, Artificial Sequence
  Description of Artificial Sequence: Synthetic oligonucleotide
  Antisense strand to SEQ ID NO: 2024162
uuagaaaccaaccaacaug

SEQ ID NO: 2024164 - RNA, 19 nt, Artificial Sequence
  Description of Artificial Sequence: Synthetic oligonucleotide
  Sense strand starting at position 3147 of SEQ ID NO: 1881177
aggcuuggacccugauaga

SEQ ID NO: 2024165 - RNA, 19 nt, Artificial Sequence
  Description of Artificial Sequence: Synthetic oligonucleotide
  Antisense strand to SEQ ID NO: 2024164
ucuaucaggguccaagccu

SEQ ID NO: 2024166 - RNA, 19 nt, Artificial Sequence
  Description of Artificial Sequence: Synthetic oligonucleotide
  Sense strand starting at position 3163 of SEQ ID NO: 1881177
agaaacuucugcugccgau

SEQ ID NO: 2024167 - RNA, 19 nt, Artificial Sequence
  Description of Artificial Sequence: Synthetic oligonucleotide
  Antisense strand to SEQ ID NO: 2024166
aucggcagcagaaguuucu

SEQ ID NO: 2024168 - RNA, 19 nt, Artificial Sequence
  Description of Artificial Sequence: Synthetic oligonucleotide
  Sense strand starting at position 3752 of SEQ ID NO: 1881177
gaagucggcucaguuauca

SEQ ID NO: 2024169 - RNA, 19 nt, Artificial Sequence
  Description of Artificial Sequence: Synthetic oligonucleotide
  Antisense strand to SEQ ID NO: 2024168
ugauaacugagccgacuuc

SEQ ID NO: 2024170 - RNA, 19 nt, Artificial Sequence
  Description of Artificial Sequence: Synthetic oligonucleotide
  Sense strand starting at position 3756 of SEQ ID NO: 1881177
ucggcucaguuaucacaaa

SEQ ID NO: 2024171 - RNA, 19 nt, Artificial Sequence
  Description of Artificial Sequence: Synthetic oligonucleotide
  Antisense strand to SEQ ID NO: 2024170
uuugugauaacugagccga

SEQ ID NO: 2024172 - RNA, 19 nt, Artificial Sequence
  Description of Artificial Sequence: Synthetic oligonucleotide
  Sense strand starting at position 3794 of SEQ ID NO: 1881177
ccuggauggccagaguuga

SEQ ID NO: 2024173 - RNA, 19 nt, Artificial Sequence
  Description of Artificial Sequence: Synthetic oligonucleotide
  Antisense strand to SEQ ID NO: 2024172
ucaacucuggccauccagg

SEQ ID NO: 2024174 - RNA, 19 nt, Artificial Sequence
  Description of Artificial Sequence: Synthetic oligonucleotide
  Sense strand starting at position 3802 of SEQ ID NO: 1881177
gccagaguugaccgacuuu

SEQ ID NO: 2024175 - RNA, 19 nt, Artificial Sequence
  Description of Artificial Sequence: Synthetic oligonucleotide
  Antisense strand to SEQ ID NO: 2024174
aaagucggucaacucuggc

SEQ ID NO: 2024176 - RNA, 19 nt, Artificial Sequence
  Description of Artificial Sequence: Synthetic oligonucleotide
  Sense strand starting at position 3814 of SEQ ID NO: 1881177
cgacuuugucucugcauca

SEQ ID NO: 2024177 - RNA, 19 nt, Artificial Sequence
  Description of Artificial Sequence: Synthetic oligonucleotide
  Antisense strand to SEQ ID NO: 2024176
ugaugcagagacaaagucg

SEQ ID NO: 2024178 - RNA, 19 nt, Artificial Sequence
  Description of Artificial Sequence: Synthetic oligonucleotide
  Sense strand starting at position 3970 of SEQ ID NO: 1881177
uuggugaggugguugugaa

SEQ ID NO: 2024179 - RNA, 19 nt, Artificial Sequence
  Description of Artificial Sequence: Synthetic oligonucleotide
  Antisense strand to SEQ ID NO: 2024178
uucacaaccaccucaccaa

SEQ ID NO: 2024180 - RNA, 19 nt, Artificial Sequence
  Description of Artificial Sequence: Synthetic oligonucleotide
  Sense strand starting at position 3973 of SEQ ID NO: 1881177
gugaggugguugugaagau

SEQ ID NO: 2024181 - RNA, 19 nt, Artificial Sequence
  Description of Artificial Sequence: Synthetic oligonucleotide
  Antisense strand to SEQ ID NO: 2024180
aucuucacaaccaccucac

SEQ ID NO: 2024182 - RNA, 19 nt, Artificial Sequence
  Description of Artificial Sequence: Synthetic oligonucleotide
  Sense strand starting at position 240 of SEQ ID NO: 1881178
aauugagauuccuucguag

SEQ ID NO: 2024183 - RNA, 19 nt, Artificial Sequence
  Description of Artificial Sequence: Synthetic oligonucleotide
  Antisense strand to SEQ ID NO: 2024182
cuacgaaggaaucucaauu

SEQ ID NO: 2024184 - RNA, 19 nt, Artificial Sequence
  Description of Artificial Sequence: Synthetic oligonucleotide
  Sense strand starting at position 251 of SEQ ID NO: 1881178
cuucguaggcuacaagaaa

SEQ ID NO: 2024185 - RNA, 19 nt, Artificial Sequence
  Description of Artificial Sequence: Synthetic oligonucleotide
  Antisense strand to SEQ ID NO: 2024184
uuucuuguagccuacgaag

SEQ ID NO: 2024186 - RNA, 19 nt, Artificial Sequence
  Description of Artificial Sequence: Synthetic oligonucleotide
  Sense strand starting at position 307 of SEQ ID NO: 1881178
cgaggcuauugguucuaau

SEQ ID NO: 2024187 - RNA, 19 nt, Artificial Sequence
  Description of Artificial Sequence: Synthetic oligonucleotide
  Antisense strand to SEQ ID NO: 2024186
auuagaaccaauagccucg

SEQ ID NO: 2024188 - RNA, 19 nt, Artificial Sequence
  Description of Artificial Sequence: Synthetic oligonucleotide
  Sense strand starting at position 351 of SEQ ID NO: 1881178
gaaugaaucuggcuucuga

SEQ ID NO: 2024189 - RNA, 19 nt, Artificial Sequence
  Description of Artificial Sequence: Synthetic oligonucleotide
  Antisense strand to SEQ ID NO: 2024188
ucagaagccagauucauuc

SEQ ID NO: 2024190 - RNA, 19 nt, Artificial Sequence
  Description of Artificial Sequence: Synthetic oligonucleotide
  Sense strand starting at position 364 of SEQ ID NO: 1881178
uucugaauucuaggcagau

SEQ ID NO: 2024191 - RNA, 19 nt, Artificial Sequence
  Description of Artificial Sequence: Synthetic oligonucleotide
  Antisense strand to SEQ ID NO: 2024190
aucugccuagaauucagaa

SEQ ID NO: 2024192 - RNA, 19 nt, Artificial Sequence
  Description of Artificial Sequence: Synthetic oligonucleotide
  Sense strand starting at position 365 of SEQ ID NO: 1881178
ucugaauucuaggcagaua

SEQ ID NO: 2024193 - RNA, 19 nt, Artificial Sequence
  Description of Artificial Sequence: Synthetic oligonucleotide
  Antisense strand to SEQ ID NO: 2024192
uaucugccuagaauucaga

SEQ ID NO: 2024194 - RNA, 19 nt, Artificial Sequence
  Description of Artificial Sequence: Synthetic oligonucleotide
  Sense strand starting at position 641 of SEQ ID NO: 1881178
aguuauccaccauaauguu

SEQ ID NO: 2024195 - RNA, 19 nt, Artificial Sequence
  Description of Artificial Sequence: Synthetic oligonucleotide
  Antisense strand to SEQ ID NO: 2024194
aacauuaugguggauaacu

SEQ ID NO: 2024196 - RNA, 19 nt, Artificial Sequence
  Description of Artificial Sequence: Synthetic oligonucleotide
  Sense strand starting at position 853 of SEQ ID NO: 1881178
agucccguccaauaugauu

SEQ ID NO: 2024197 - RNA, 19 nt, Artificial Sequence
  Description of Artificial Sequence: Synthetic oligonucleotide
  Antisense strand to SEQ ID NO: 2024196
aaucauauuggacgggacu

SEQ ID NO: 2024198 - RNA, 19 nt, Artificial Sequence
  Description of Artificial Sequence: Synthetic oligonucleotide
  Sense strand starting at position 888 of SEQ ID NO: 1881178
guggaagauuaagagaaca

SEQ ID NO: 2024199 - RNA, 19 nt, Artificial Sequence
  Description of Artificial Sequence: Synthetic oligonucleotide
  Antisense strand to SEQ ID NO: 2024198
uguucucuuaaucuuccac

SEQ ID NO: 2024200 - RNA, 19 nt, Artificial Sequence
  Description of Artificial Sequence: Synthetic oligonucleotide
  Sense strand starting at position 919 of SEQ ID NO: 1881178
ugaagcuaucagcaagaca

SEQ ID NO: 2024201 - RNA, 19 nt, Artificial Sequence
  Description of Artificial Sequence: Synthetic oligonucleotide
  Antisense strand to SEQ ID NO: 2024200
ugucuugcugauagcuuca

SEQ ID NO: 2024202 - RNA, 19 nt, Artificial Sequence
  Description of Artificial Sequence: Synthetic oligonucleotide
  Sense strand starting at position 1012 of SEQ ID NO: 1881178
gcuggacaacauuguaaga

SEQ ID NO: 2024203 - RNA, 19 nt, Artificial Sequence
  Description of Artificial Sequence: Synthetic oligonucleotide
  Antisense strand to SEQ ID NO: 2024202
ucuuacaauguuguccagc

SEQ ID NO: 2024204 - RNA, 19 nt, Artificial Sequence
  Description of Artificial Sequence: Synthetic oligonucleotide
  Sense strand starting at position 1231 of SEQ ID NO: 1881178
guuguuuaggaacaguuaa

SEQ ID NO: 2024205 - RNA, 19 nt, Artificial Sequence
  Description of Artificial Sequence: Synthetic oligonucleotide
  Antisense strand to SEQ ID NO: 2024204
uuaacuguuccuaaacaac

SEQ ID NO: 2024206 - RNA, 19 nt, Artificial Sequence
  Description of Artificial Sequence: Synthetic oligonucleotide
  Sense strand starting at position 1244 of SEQ ID NO: 1881178
aguuaaagcuuucugaauu

SEQ ID NO: 2024207 - RNA, 19 nt, Artificial Sequence
  Description of Artificial Sequence: Synthetic oligonucleotide
  Antisense strand to SEQ ID NO: 2024206
aauucagaaagcuuuaacu

SEQ ID NO: 2024208 - RNA, 19 nt, Artificial Sequence
  Description of Artificial Sequence: Synthetic oligonucleotide
  Sense strand starting at position 2259 of SEQ ID NO: 1881178
ccacaaacuugaucggaca

SEQ ID NO: 2024209 - RNA, 19 nt, Artificial Sequence
  Description of Artificial Sequence: Synthetic oligonucleotide
  Antisense strand to SEQ ID NO: 2024208
uguccgaucaaguuugugg

SEQ ID NO: 2024210 - RNA, 19 nt, Artificial Sequence
  Description of Artificial Sequence: Synthetic oligonucleotide
  Sense strand starting at position 2299 of SEQ ID NO: 1881178
gugucacguacugggaaua

SEQ ID NO: 2024211 - RNA, 19 nt, Artificial Sequence
  Description of Artificial Sequence: Synthetic oligonucleotide
  Antisense strand to SEQ ID NO: 2024210
uauucccaguacgugacac

SEQ ID NO: 2024212 - RNA, 19 nt, Artificial Sequence
  Description of Artificial Sequence: Synthetic oligonucleotide
  Sense strand starting at position 2336 of SEQ ID NO: 1881178
gcucccugaccucaaagau

SEQ ID NO: 2024213 - RNA, 19 nt, Artificial Sequence
  Description of Artificial Sequence: Synthetic oligonucleotide
  Antisense strand to SEQ ID NO: 2024212
aucuuugaggucagggagc

SEQ ID NO: 2024214 - RNA, 19 nt, Artificial Sequence
  Description of Artificial Sequence: Synthetic oligonucleotide
  Sense strand starting at position 2457 of SEQ ID NO: 1881178
auagaaauaucuggaaagg

SEQ ID NO: 2024215 - RNA, 19 nt, Artificial Sequence
  Description of Artificial Sequence: Synthetic oligonucleotide
  Antisense strand to SEQ ID NO: 2024214
ccuuuccagauauuucuau

SEQ ID NO: 2024216 - RNA, 19 nt, Artificial Sequence
  Description of Artificial Sequence: Synthetic oligonucleotide
  Sense strand starting at position 2578 of SEQ ID NO: 1881178
guaagaaugcgccagucag

SEQ ID NO: 2024217 - RNA, 19 nt, Artificial Sequence
  Description of Artificial Sequence: Synthetic oligonucleotide
  Antisense strand to SEQ ID NO: 2024216
cugacuggcgcauucuuac

SEQ ID NO: 2024218 - RNA, 19 nt, Artificial Sequence
  Description of Artificial Sequence: Synthetic oligonucleotide
  Sense strand starting at position 2629 of SEQ ID NO: 1881178
ggcaguuacgagggauaau

SEQ ID NO: 2024219 - RNA, 19 nt, Artificial Sequence
  Description of Artificial Sequence: Synthetic oligonucleotide
  Antisense strand to SEQ ID NO: 2024218
auuaucccucguaacugcc

SEQ ID NO: 2024220 - RNA, 19 nt, Artificial Sequence
  Description of Artificial Sequence: Synthetic oligonucleotide
  Sense strand starting at position 2630 of SEQ ID NO: 1881178
gcaguuacgagggauaaua

SEQ ID NO: 2024221 - RNA, 19 nt, Artificial Sequence
  Description of Artificial Sequence: Synthetic oligonucleotide
  Antisense strand to SEQ ID NO: 2024220
uauuaucccucguaacugc

SEQ ID NO: 2024222 - RNA, 19 nt, Artificial Sequence
  Description of Artificial Sequence: Synthetic oligonucleotide
  Sense strand starting at position 2664 of SEQ ID NO: 1881178
aacagaacuggguguguau

SEQ ID NO: 2024223 - RNA, 19 nt, Artificial Sequence
  Description of Artificial Sequence: Synthetic oligonucleotide
  Antisense strand to SEQ ID NO: 2024222
auacacacccaguucuguu

SEQ ID NO: 2024224 - RNA, 19 nt, Artificial Sequence
  Description of Artificial Sequence: Synthetic oligonucleotide
  Sense strand starting at position 2685 of SEQ ID NO: 1881178
guuuguguugaacgacaga

SEQ ID NO: 2024225 - RNA, 19 nt, Artificial Sequence
  Description of Artificial Sequence: Synthetic oligonucleotide
  Antisense strand to SEQ ID NO: 2024224
ucugucguucaacacaaac

SEQ ID NO: 2024226 - RNA, 19 nt, Artificial Sequence
  Description of Artificial Sequence: Synthetic oligonucleotide
  Sense strand starting at position 2688 of SEQ ID NO: 1881178
uguguugaacgacagagaa

SEQ ID NO: 2024227 - RNA, 19 nt, Artificial Sequence
  Description of Artificial Sequence: Synthetic oligonucleotide
  Antisense strand to SEQ ID NO: 2024226
uucucugucguucaacaca

SEQ ID NO: 2024228 - RNA, 19 nt, Artificial Sequence
  Description of Artificial Sequence: Synthetic oligonucleotide
  Sense strand starting at position 2900 of SEQ ID NO: 1881178
gaggauuauuaggaagaug

SEQ ID NO: 2024229 - RNA, 19 nt, Artificial Sequence
  Description of Artificial Sequence: Synthetic oligonucleotide
  Antisense strand to SEQ ID NO: 2024228
caucuuccuaauaauccuc

SEQ ID NO: 2024230 - RNA, 19 nt, Artificial Sequence
  Description of Artificial Sequence: Synthetic oligonucleotide
  Sense strand starting at position 2920 of SEQ ID NO: 1881178
ugcagucguaacgauuaga

SEQ ID NO: 2024231 - RNA, 19 nt, Artificial Sequence
  Description of Artificial Sequence: Synthetic oligonucleotide
  Antisense strand to SEQ ID NO: 2024230
ucuaaucguuacgacugca

SEQ ID NO: 2024232 - RNA, 19 nt, Artificial Sequence
  Description of Artificial Sequence: Synthetic oligonucleotide
  Sense strand starting at position 2923 of SEQ ID NO: 1881178
agucguaacgauuagagau

SEQ ID NO: 2024233 - RNA, 19 nt, Artificial Sequence
  Description of Artificial Sequence: Synthetic oligonucleotide
  Antisense strand to SEQ ID NO: 2024232
aucucuaaucguuacgacu

SEQ ID NO: 2024234 - RNA, 19 nt, Artificial Sequence
  Description of Artificial Sequence: Synthetic oligonucleotide
  Sense strand starting at position 2945 of SEQ ID NO: 1881178
gagggccuguuagcaauaa

SEQ ID NO: 2024235 - RNA, 19 nt, Artificial Sequence
  Description of Artificial Sequence: Synthetic oligonucleotide
  Antisense strand to SEQ ID NO: 2024234
uuauugcuaacaggcccuc

SEQ ID NO: 2024236 - RNA, 19 nt, Artificial Sequence
  Description of Artificial Sequence: Synthetic oligonucleotide
  Sense strand starting at position 3034 of SEQ ID NO: 1881178
gccuaugcgaucugaaaga

SEQ ID NO: 2024237 - RNA, 19 nt, Artificial Sequence
  Description of Artificial Sequence: Synthetic oligonucleotide
  Antisense strand to SEQ ID NO: 2024236
ucuuucagaucgcauaggc

SEQ ID NO: 2024238 - RNA, 19 nt, Artificial Sequence
  Description of Artificial Sequence: Synthetic oligonucleotide
  Sense strand starting at position 3063 of SEQ ID NO: 1881178
uugagagugucucccagau

SEQ ID NO: 2024239 - RNA, 19 nt, Artificial Sequence
  Description of Artificial Sequence: Synthetic oligonucleotide
  Antisense strand to SEQ ID NO: 2024238
aucugggagacacucucaa

SEQ ID NO: 2024240 - RNA, 19 nt, Artificial Sequence
  Description of Artificial Sequence: Synthetic oligonucleotide
  Sense strand starting at position 3065 of SEQ ID NO: 1881178
gagagugucucccagauuu

SEQ ID NO: 2024241 - RNA, 19 nt, Artificial Sequence
  Description of Artificial Sequence: Synthetic oligonucleotide
  Antisense strand to SEQ ID NO: 2024240
aaaucugggagacacucuc

SEQ ID NO: 2024242 - RNA, 19 nt, Artificial Sequence
  Description of Artificial Sequence: Synthetic oligonucleotide
  Sense strand starting at position 3161 of SEQ ID NO: 1881178
cuuugagaugucuauacau

SEQ ID NO: 2024243 - RNA, 19 nt, Artificial Sequence
  Description of Artificial Sequence: Synthetic oligonucleotide
  Antisense strand to SEQ ID NO: 2024242
auguauagacaucucaaag

SEQ ID NO: 2024244 - RNA, 19 nt, Artificial Sequence
  Description of Artificial Sequence: Synthetic oligonucleotide
  Sense strand starting at position 3219 of SEQ ID NO: 1881178
ggaggagcucccgaucuaa

SEQ ID NO: 2024245 - RNA, 19 nt, Artificial Sequence
  Description of Artificial Sequence: Synthetic oligonucleotide
  Antisense strand to SEQ ID NO: 2024244
uuagaucgggagcuccucc

SEQ ID NO: 2024246 - RNA, 19 nt, Artificial Sequence
  Description of Artificial Sequence: Synthetic oligonucleotide
  Sense strand starting at position 3241 of SEQ ID NO: 1881178
aacugucuugccgagagga

SEQ ID NO: 2024247 - RNA, 19 nt, Artificial Sequence
  Description of Artificial Sequence: Synthetic oligonucleotide
  Antisense strand to SEQ ID NO: 2024246
uccucucggcaagacaguu

SEQ ID NO: 2024248 - RNA, 19 nt, Artificial Sequence
  Description of Artificial Sequence: Synthetic oligonucleotide
  Sense strand starting at position 3243 of SEQ ID NO: 1881178
cugucuugccgagaggagu

SEQ ID NO: 2024249 - RNA, 19 nt, Artificial Sequence
  Description of Artificial Sequence: Synthetic oligonucleotide
  Antisense strand to SEQ ID NO: 2024248
acuccucucggcaagacag

SEQ ID NO: 2024250 - RNA, 19 nt, Artificial Sequence
  Description of Artificial Sequence: Synthetic oligonucleotide
  Sense strand starting at position 3286 of SEQ ID NO: 1881178
uuagucacuucucugucau

SEQ ID NO: 2024251 - RNA, 19 nt, Artificial Sequence
  Description of Artificial Sequence: Synthetic oligonucleotide
  Antisense strand to SEQ ID NO: 2024250
augacagagaagugacuaa

SEQ ID NO: 2024252 - RNA, 19 nt, Artificial Sequence
  Description of Artificial Sequence: Synthetic oligonucleotide
  Sense strand starting at position 3554 of SEQ ID NO: 1881178
ggcuguugaucauuuguaa

SEQ ID NO: 2024253 - RNA, 19 nt, Artificial Sequence
  Description of Artificial Sequence: Synthetic oligonucleotide
  Antisense strand to SEQ ID NO: 2024252
uuacaaaugaucaacagcc

SEQ ID NO: 2024254 - RNA, 19 nt, Artificial Sequence
  Description of Artificial Sequence: Synthetic oligonucleotide
  Sense strand starting at position 3557 of SEQ ID NO: 1881178
uguugaucauuuguaaugu

SEQ ID NO: 2024255 - RNA, 19 nt, Artificial Sequence
  Description of Artificial Sequence: Synthetic oligonucleotide
  Antisense strand to SEQ ID NO: 2024254
acauuacaaaugaucaaca

SEQ ID NO: 2024256 - RNA, 19 nt, Artificial Sequence
  Description of Artificial Sequence: Synthetic oligonucleotide
  Sense strand starting at position 3570 of SEQ ID NO: 1881178
uaauguggauaguuggaaa

SEQ ID NO: 2024257 - RNA, 19 nt, Artificial Sequence
  Description of Artificial Sequence: Synthetic oligonucleotide
  Antisense strand to SEQ ID NO: 2024256
uuuccaacuauccacauua

SEQ ID NO: 2024258 - RNA, 19 nt, Artificial Sequence
  Description of Artificial Sequence: Synthetic oligonucleotide
  Sense strand starting at position 3589 of SEQ ID NO: 1881178
ggagaugugcaauacguau

SEQ ID NO: 2024259 - RNA, 19 nt, Artificial Sequence
  Description of Artificial Sequence: Synthetic oligonucleotide
  Antisense strand to SEQ ID NO: 2024258
auacguauugcacaucucc

SEQ ID NO: 2024260 - RNA, 19 nt, Artificial Sequence
  Description of Artificial Sequence: Synthetic oligonucleotide
  Sense strand starting at position 3591 of SEQ ID NO: 1881178
agaugugcaauacguauaa

SEQ ID NO: 2024261 - RNA, 19 nt, Artificial Sequence
  Description of Artificial Sequence: Synthetic oligonucleotide
  Antisense strand to SEQ ID NO: 2024260
uuauacguauugcacaucu

SEQ ID NO: 2024262 - RNA, 19 nt, Artificial Sequence
  Description of Artificial Sequence: Synthetic oligonucleotide
  Sense strand starting at position 1997 of SEQ ID NO: 1881179
ugaggacaguaggcuuaaa

SEQ ID NO: 2024263 - RNA, 19 nt, Artificial Sequence
  Description of Artificial Sequence: Synthetic oligonucleotide
  Antisense strand to SEQ ID NO: 2024262
uuuaagccuacuguccuca

SEQ ID NO: 2024264 - RNA, 19 nt, Artificial Sequence
  Description of Artificial Sequence: Synthetic oligonucleotide
  Sense strand starting at position 2057 of SEQ ID NO: 1881179
uuaauagcuguguaaccua

SEQ ID NO: 2024265 - RNA, 19 nt, Artificial Sequence
  Description of Artificial Sequence: Synthetic oligonucleotide
  Antisense strand to SEQ ID NO: 2024264
uagguuacacagcuauuaa

SEQ ID NO: 2024266 - RNA, 19 nt, Artificial Sequence
  Description of Artificial Sequence: Synthetic oligonucleotide
  Sense strand starting at position 2062 of SEQ ID NO: 1881179
agcuguguaaccuagggaa

SEQ ID NO: 2024267 - RNA, 19 nt, Artificial Sequence
  Description of Artificial Sequence: Synthetic oligonucleotide
  Antisense strand to SEQ ID NO: 2024266
uucccuagguuacacagcu

SEQ ID NO: 2024268 - RNA, 19 nt, Artificial Sequence
  Description of Artificial Sequence: Synthetic oligonucleotide
  Sense strand starting at position 2064 of SEQ ID NO: 1881179
cuguguaaccuagggaaga

SEQ ID NO: 2024269 - RNA, 19 nt, Artificial Sequence
  Description of Artificial Sequence: Synthetic oligonucleotide
  Antisense strand to SEQ ID NO: 2024268
ucuucccuagguuacacag

SEQ ID NO: 2024270 - RNA, 19 nt, Artificial Sequence
  Description of Artificial Sequence: Synthetic oligonucleotide
  Sense strand starting at position 2065 of SEQ ID NO: 1881179
uguguaaccuagggaagaa

SEQ ID NO: 2024271 - RNA, 19 nt, Artificial Sequence
  Description of Artificial Sequence: Synthetic oligonucleotide
  Antisense strand to SEQ ID NO: 2024270
uucuucccuagguuacaca

SEQ ID NO: 2024272 - RNA, 19 nt, Artificial Sequence
  Description of Artificial Sequence: Synthetic oligonucleotide
  Sense strand starting at position 2133 of SEQ ID NO: 1881179
guggauaagcuccguuguu

SEQ ID NO: 2024273 - RNA, 19 nt, Artificial Sequence
  Description of Artificial Sequence: Synthetic oligonucleotide
  Antisense strand to SEQ ID NO: 2024272
aacaacggagcuuauccac

SEQ ID NO: 2024274 - RNA, 19 nt, Artificial Sequence
  Description of Artificial Sequence: Synthetic oligonucleotide
  Sense strand starting at position 2142 of SEQ ID NO: 1881179
cuccguuguucucuaguca

SEQ ID NO: 2024275 - RNA, 19 nt, Artificial Sequence
  Description of Artificial Sequence: Synthetic oligonucleotide
  Antisense strand to SEQ ID NO: 2024274
ugacuagagaacaacggag

SEQ ID NO: 2024276 - RNA, 19 nt, Artificial Sequence
  Description of Artificial Sequence: Synthetic oligonucleotide
  Sense strand starting at position 2143 of SEQ ID NO: 1881179
uccguuguucucuagucau

SEQ ID NO: 2024277 - RNA, 19 nt, Artificial Sequence
  Description of Artificial Sequence: Synthetic oligonucleotide
  Antisense strand to SEQ ID NO: 2024276
augacuagagaacaacgga

SEQ ID NO: 2024278 - RNA, 19 nt, Artificial Sequence
  Description of Artificial Sequence: Synthetic oligonucleotide
  Sense strand starting at position 2145 of SEQ ID NO: 1881179
cguuguucucuagucaugu

SEQ ID NO: 2024279 - RNA, 19 nt, Artificial Sequence
  Description of Artificial Sequence: Synthetic oligonucleotide
  Antisense strand to SEQ ID NO: 2024278
acaugacuagagaacaacg

SEQ ID NO: 2024280 - RNA, 19 nt, Artificial Sequence
  Description of Artificial Sequence: Synthetic oligonucleotide
  Sense strand starting at position 2146 of SEQ ID NO: 1881179
guuguucucuagucauguc

SEQ ID NO: 2024281 - RNA, 19 nt, Artificial Sequence
  Description of Artificial Sequence: Synthetic oligonucleotide
  Antisense strand to SEQ ID NO: 2024280
gacaugacuagagaacaac

SEQ ID NO: 2024282 - RNA, 19 nt, Artificial Sequence
  Description of Artificial Sequence: Synthetic oligonucleotide
  Sense strand starting at position 2177 of SEQ ID NO: 1881179
uugccaguugguuagaaca

SEQ ID NO: 2024283 - RNA, 19 nt, Artificial Sequence
  Description of Artificial Sequence: Synthetic oligonucleotide
  Antisense strand to SEQ ID NO: 2024282
uguucuaaccaacuggcaa

SEQ ID NO: 2024284 - RNA, 19 nt, Artificial Sequence
  Description of Artificial Sequence: Synthetic oligonucleotide
  Sense strand starting at position 2837 of SEQ ID NO: 1881179
cgccgcgguuauaaagaua

SEQ ID NO: 2024285 - RNA, 19 nt, Artificial Sequence
  Description of Artificial Sequence: Synthetic oligonucleotide
  Antisense strand to SEQ ID NO: 2024284
uaucuuuauaaccgcggcg

SEQ ID NO: 2024286 - RNA, 19 nt, Artificial Sequence
  Description of Artificial Sequence: Synthetic oligonucleotide
  Sense strand starting at position 2840 of SEQ ID NO: 1881179
cgcgguuauaaagauaauc

SEQ ID NO: 2024287 - RNA, 19 nt, Artificial Sequence
  Description of Artificial Sequence: Synthetic oligonucleotide
  Antisense strand to SEQ ID NO: 2024286
gauuaucuuuauaaccgcg

SEQ ID NO: 2024288 - RNA, 19 nt, Artificial Sequence
  Description of Artificial Sequence: Synthetic oligonucleotide
  Sense strand starting at position 2864 of SEQ ID NO: 1881179
uguugagcccaggaauguu

SEQ ID NO: 2024289 - RNA, 19 nt, Artificial Sequence
  Description of Artificial Sequence: Synthetic oligonucleotide
  Antisense strand to SEQ ID NO: 2024288
aacauuccugggcucaaca

SEQ ID NO: 2024290 - RNA, 19 nt, Artificial Sequence
  Description of Artificial Sequence: Synthetic oligonucleotide
  Sense strand starting at position 2872 of SEQ ID NO: 1881179
ccaggaauguucggguaca

SEQ ID NO: 2024291 - RNA, 19 nt, Artificial Sequence
  Description of Artificial Sequence: Synthetic oligonucleotide
  Antisense strand to SEQ ID NO: 2024290
uguacccgaacauuccugg

SEQ ID NO: 2024292 - RNA, 19 nt, Artificial Sequence
  Description of Artificial Sequence: Synthetic oligonucleotide
  Sense strand starting at position 2873 of SEQ ID NO: 1881179
caggaauguucggguacac

SEQ ID NO: 2024293 - RNA, 19 nt, Artificial Sequence
  Description of Artificial Sequence: Synthetic oligonucleotide
  Antisense strand to SEQ ID NO: 2024292
guguacccgaacauuccug

SEQ ID NO: 2024294 - RNA, 19 nt, Artificial Sequence
  Description of Artificial Sequence: Synthetic oligonucleotide
  Sense strand starting at position 2884 of SEQ ID NO: 1881179
ggguacacccaucaugagu

SEQ ID NO: 2024295 - RNA, 19 nt, Artificial Sequence
  Description of Artificial Sequence: Synthetic oligonucleotide
  Antisense strand to SEQ ID NO: 2024294
acucaugauggguguaccc

SEQ ID NO: 2024296 - RNA, 19 nt, Artificial Sequence
  Description of Artificial Sequence: Synthetic oligonucleotide
  Sense strand starting at position 2980 of SEQ ID NO: 1881179
gggucuuugagucagcaaa

SEQ ID NO: 2024297 - RNA, 19 nt, Artificial Sequence
  Description of Artificial Sequence: Synthetic oligonucleotide
  Antisense strand to SEQ ID NO: 2024296
uuugcugacucaaagaccc

SEQ ID NO: 2024298 - RNA, 19 nt, Artificial Sequence
  Description of Artificial Sequence: Synthetic oligonucleotide
  Sense strand starting at position 2982 of SEQ ID NO: 1881179
gucuuugagucagcaaagu

SEQ ID NO: 2024299 - RNA, 19 nt, Artificial Sequence
  Description of Artificial Sequence: Synthetic oligonucleotide
  Antisense strand to SEQ ID NO: 2024298
acuuugcugacucaaagac

SEQ ID NO: 2024300 - RNA, 19 nt, Artificial Sequence
  Description of Artificial Sequence: Synthetic oligonucleotide
  Sense strand starting at position 3218 of SEQ ID NO: 1881179
ccaggauauggcugugagu

SEQ ID NO: 2024301 - RNA, 19 nt, Artificial Sequence
  Description of Artificial Sequence: Synthetic oligonucleotide
  Antisense strand to SEQ ID NO: 2024300
acucacagccauauccugg

SEQ ID NO: 2024302 - RNA, 19 nt, Artificial Sequence
  Description of Artificial Sequence: Synthetic oligonucleotide
  Sense strand starting at position 3220 of SEQ ID NO: 1881179
aggauauggcugugaguuu

SEQ ID NO: 2024303 - RNA, 19 nt, Artificial Sequence
  Description of Artificial Sequence: Synthetic oligonucleotide
  Antisense strand to SEQ ID NO: 2024302
aaacucacagccauauccu

SEQ ID NO: 2024304 - RNA, 19 nt, Artificial Sequence
  Description of Artificial Sequence: Synthetic oligonucleotide
  Sense strand starting at position 3221 of SEQ ID NO: 1881179
ggauauggcugugaguuua

SEQ ID NO: 2024305 - RNA, 19 nt, Artificial Sequence
  Description of Artificial Sequence: Synthetic oligonucleotide
  Antisense strand to SEQ ID NO: 2024304
uaaacucacagccauaucc

SEQ ID NO: 2024306 - RNA, 19 nt, Artificial Sequence
  Description of Artificial Sequence: Synthetic oligonucleotide
  Sense strand starting at position 3483 of SEQ ID NO: 1881179
uugucauaaugggauaaca

SEQ ID NO: 2024307 - RNA, 19 nt, Artificial Sequence
  Description of Artificial Sequence: Synthetic oligonucleotide
  Antisense strand to SEQ ID NO: 2024306
uguuaucccauuaugacaa

SEQ ID NO: 2024308 - RNA, 19 nt, Artificial Sequence
  Description of Artificial Sequence: Synthetic oligonucleotide
  Sense strand starting at position 3530 of SEQ ID NO: 1881179
aagcuauuggguuguguua

SEQ ID NO: 2024309 - RNA, 19 nt, Artificial Sequence
  Description of Artificial Sequence: Synthetic oligonucleotide
  Antisense strand to SEQ ID NO: 2024308
uaacacaacccaauagcuu

SEQ ID NO: 2024310 - RNA, 19 nt, Artificial Sequence
  Description of Artificial Sequence: Synthetic oligonucleotide
  Sense strand starting at position 3541 of SEQ ID NO: 1881179
uuguguuaugaagguuaag

SEQ ID NO: 2024311 - RNA, 19 nt, Artificial Sequence
  Description of Artificial Sequence: Synthetic oligonucleotide
  Antisense strand to SEQ ID NO: 2024310
cuuaaccuucauaacacaa

SEQ ID NO: 2024312 - RNA, 19 nt, Artificial Sequence
  Description of Artificial Sequence: Synthetic oligonucleotide
  Sense strand starting at position 3550 of SEQ ID NO: 1881179
gaagguuaagggugaaucu

SEQ ID NO: 2024313 - RNA, 19 nt, Artificial Sequence
  Description of Artificial Sequence: Synthetic oligonucleotide
  Antisense strand to SEQ ID NO: 2024312
agauucacccuuaaccuuc

SEQ ID NO: 2024314 - RNA, 19 nt, Artificial Sequence
  Description of Artificial Sequence: Synthetic oligonucleotide
  Sense strand starting at position 3557 of SEQ ID NO: 1881179
aagggugaaucugagugau

SEQ ID NO: 2024315 - RNA, 19 nt, Artificial Sequence
  Description of Artificial Sequence: Synthetic oligonucleotide
  Antisense strand to SEQ ID NO: 2024314
aucacucagauucacccuu

SEQ ID NO: 2024316 - RNA, 19 nt, Artificial Sequence
  Description of Artificial Sequence: Synthetic oligonucleotide
  Sense strand starting at position 3559 of SEQ ID NO: 1881179
gggugaaucugagugaucu

SEQ ID NO: 2024317 - RNA, 19 nt, Artificial Sequence
  Description of Artificial Sequence: Synthetic oligonucleotide
  Antisense strand to SEQ ID NO: 2024316
agaucacucagauucaccc

SEQ ID NO: 2024318 - RNA, 19 nt, Artificial Sequence
  Description of Artificial Sequence: Synthetic oligonucleotide
  Sense strand starting at position 3560 of SEQ ID NO: 1881179
ggugaaucugagugaucug

SEQ ID NO: 2024319 - RNA, 19 nt, Artificial Sequence
  Description of Artificial Sequence: Synthetic oligonucleotide
  Antisense strand to SEQ ID NO: 2024318
cagaucacucagauucacc

SEQ ID NO: 2024320 - RNA, 19 nt, Artificial Sequence
  Description of Artificial Sequence: Synthetic oligonucleotide
  Sense strand starting at position 3561 of SEQ ID NO: 1881179
gugaaucugagugaucuga

SEQ ID NO: 2024321 - RNA, 19 nt, Artificial Sequence
  Description of Artificial Sequence: Synthetic oligonucleotide
  Antisense strand to SEQ ID NO: 2024320
ucagaucacucagauucac

SEQ ID NO: 2024322 - RNA, 19 nt, Artificial Sequence
  Description of Artificial Sequence: Synthetic oligonucleotide
  Sense strand starting at position 3635 of SEQ ID NO: 1881179
cguaauuauugacaaagug

SEQ ID NO: 2024323 - RNA, 19 nt, Artificial Sequence
  Description of Artificial Sequence: Synthetic oligonucleotide
  Antisense strand to SEQ ID NO: 2024322
cacuuugucaauaauuacg

SEQ ID NO: 2024324 - RNA, 19 nt, Artificial Sequence
  Description of Artificial Sequence: Synthetic oligonucleotide
  Sense strand starting at position 3797 of SEQ ID NO: 1881179
augcauuugcuuuauguuu

SEQ ID NO: 2024325 - RNA, 19 nt, Artificial Sequence
  Description of Artificial Sequence: Synthetic oligonucleotide
  Antisense strand to SEQ ID NO: 2024324
aaacauaaagcaaaugcau

SEQ ID NO: 2024326 - RNA, 19 nt, Artificial Sequence
  Description of Artificial Sequence: Synthetic oligonucleotide
  Sense strand starting at position 3824 of SEQ ID NO: 1881179
uuucgauggagucaucacu

SEQ ID NO: 2024327 - RNA, 19 nt, Artificial Sequence
  Description of Artificial Sequence: Synthetic oligonucleotide
  Antisense strand to SEQ ID NO: 2024326
agugaugacuccaucgaaa

SEQ ID NO: 2024328 - RNA, 19 nt, Artificial Sequence
  Description of Artificial Sequence: Synthetic oligonucleotide
  Sense strand starting at position 3900 of SEQ ID NO: 1881179
uccugcuuaugagccaaau

SEQ ID NO: 2024329 - RNA, 19 nt, Artificial Sequence
  Description of Artificial Sequence: Synthetic oligonucleotide
  Antisense strand to SEQ ID NO: 2024328
auuuggcucauaagcagga

SEQ ID NO: 2024330 - RNA, 19 nt, Artificial Sequence
  Description of Artificial Sequence: Synthetic oligonucleotide
  Sense strand starting at position 3919 of SEQ ID NO: 1881179
uuauuauguuugcuagguu

SEQ ID NO: 2024331 - RNA, 19 nt, Artificial Sequence
  Description of Artificial Sequence: Synthetic oligonucleotide
  Antisense strand to SEQ ID NO: 2024330
aaccuagcaaacauaauaa

SEQ ID NO: 2024332 - RNA, 19 nt, Artificial Sequence
  Description of Artificial Sequence: Synthetic oligonucleotide
  Sense strand starting at position 3920 of SEQ ID NO: 1881179
uauuauguuugcuagguua

SEQ ID NO: 2024333 - RNA, 19 nt, Artificial Sequence
  Description of Artificial Sequence: Synthetic oligonucleotide
  Antisense strand to SEQ ID NO: 2024332
uaaccuagcaaacauaaua

SEQ ID NO: 2024334 - RNA, 19 nt, Artificial Sequence
  Description of Artificial Sequence: Synthetic oligonucleotide
  Sense strand starting at position 3922 of SEQ ID NO: 1881179
uuauguuugcuagguuaau

SEQ ID NO: 2024335 - RNA, 19 nt, Artificial Sequence
  Description of Artificial Sequence: Synthetic oligonucleotide
  Antisense strand to SEQ ID NO: 2024334
auuaaccuagcaaacauaa

SEQ ID NO: 2024336 - RNA, 19 nt, Artificial Sequence
  Description of Artificial Sequence: Synthetic oligonucleotide
  Sense strand starting at position 3923 of SEQ ID NO: 1881179
uauguuugcuagguuaauc

SEQ ID NO: 2024337 - RNA, 19 nt, Artificial Sequence
  Description of Artificial Sequence: Synthetic oligonucleotide
  Antisense strand to SEQ ID NO: 2024336
gauuaaccuagcaaacaua

SEQ ID NO: 2024338 - RNA, 19 nt, Artificial Sequence
  Description of Artificial Sequence: Synthetic oligonucleotide
  Sense strand starting at position 3928 of SEQ ID NO: 1881179
uugcuagguuaaucuguuu

SEQ ID NO: 2024339 - RNA, 19 nt, Artificial Sequence
  Description of Artificial Sequence: Synthetic oligonucleotide
  Antisense strand to SEQ ID NO: 2024338
aaacagauuaaccuagcaa

SEQ ID NO: 2024340 - RNA, 19 nt, Artificial Sequence
  Description of Artificial Sequence: Synthetic oligonucleotide
  Sense strand starting at position 3976 of SEQ ID NO: 1881179
uccucucugcguuauggau

SEQ ID NO: 2024341 - RNA, 19 nt, Artificial Sequence
  Description of Artificial Sequence: Synthetic oligonucleotide
  Antisense strand to SEQ ID NO: 2024340
auccauaacgcagagagga

SEQ ID NO: 2024342 - RNA, 19 nt, Artificial Sequence
  Description of Artificial Sequence: Synthetic oligonucleotide
  Sense strand starting at position 54 of SEQ ID NO: 1881180
aguacuucucccugguacu

SEQ ID NO: 2024343 - RNA, 19 nt, Artificial Sequence
  Description of Artificial Sequence: Synthetic oligonucleotide
  Antisense strand to SEQ ID NO: 2024342
aguaccagggagaaguacu

SEQ ID NO: 2024344 - RNA, 19 nt, Artificial Sequence
  Description of Artificial Sequence: Synthetic oligonucleotide
  Sense strand starting at position 55 of SEQ ID NO: 1881180
guacuucucccugguacua

SEQ ID NO: 2024345 - RNA, 19 nt, Artificial Sequence
  Description of Artificial Sequence: Synthetic oligonucleotide
  Antisense strand to SEQ ID NO: 2024344
uaguaccagggagaaguac

SEQ ID NO: 2024346 - RNA, 19 nt, Artificial Sequence
  Description of Artificial Sequence: Synthetic oligonucleotide
  Sense strand starting at position 60 of SEQ ID NO: 1881180
ucucccugguacuaucaua

SEQ ID NO: 2024347 - RNA, 19 nt, Artificial Sequence
  Description of Artificial Sequence: Synthetic oligonucleotide
  Antisense strand to SEQ ID NO: 2024346
uaugauaguaccagggaga

SEQ ID NO: 2024348 - RNA, 19 nt, Artificial Sequence
  Description of Artificial Sequence: Synthetic oligonucleotide
  Sense strand starting at position 65 of SEQ ID NO: 1881180
cugguacuaucauaagaga

SEQ ID NO: 2024349 - RNA, 19 nt, Artificial Sequence
  Description of Artificial Sequence: Synthetic oligonucleotide
  Antisense strand to SEQ ID NO: 2024348
ucucuuaugauaguaccag

SEQ ID NO: 2024350 - RNA, 19 nt, Artificial Sequence
  Description of Artificial Sequence: Synthetic oligonucleotide
  Sense strand starting at position 68 of SEQ ID NO: 1881180
guacuaucauaagagauuu

SEQ ID NO: 2024351 - RNA, 19 nt, Artificial Sequence
  Description of Artificial Sequence: Synthetic oligonucleotide
  Antisense strand to SEQ ID NO: 2024350
aaaucucuuaugauaguac

SEQ ID NO: 2024352 - RNA, 19 nt, Artificial Sequence
  Description of Artificial Sequence: Synthetic oligonucleotide
  Sense strand starting at position 101 of SEQ ID NO: 1881180
auugaaagcucacaagaga

SEQ ID NO: 2024353 - RNA, 19 nt, Artificial Sequence
  Description of Artificial Sequence: Synthetic oligonucleotide
  Antisense strand to SEQ ID NO: 2024352
ucucuugugagcuuucaau

SEQ ID NO: 2024354 - RNA, 19 nt, Artificial Sequence
  Description of Artificial Sequence: Synthetic oligonucleotide
  Sense strand starting at position 196 of SEQ ID NO: 1881180
guaacuuaccaaggucaca

SEQ ID NO: 2024355 - RNA, 19 nt, Artificial Sequence
  Description of Artificial Sequence: Synthetic oligonucleotide
  Antisense strand to SEQ ID NO: 2024354
ugugaccuugguaaguuac

SEQ ID NO: 2024356 - RNA, 19 nt, Artificial Sequence
  Description of Artificial Sequence: Synthetic oligonucleotide
  Sense strand starting at position 247 of SEQ ID NO: 1881180
accuuauggcccuagguau

SEQ ID NO: 2024357 - RNA, 19 nt, Artificial Sequence
  Description of Artificial Sequence: Synthetic oligonucleotide
  Antisense strand to SEQ ID NO: 2024356
auaccuagggccauaaggu

SEQ ID NO: 2024358 - RNA, 19 nt, Artificial Sequence
  Description of Artificial Sequence: Synthetic oligonucleotide
  Sense strand starting at position 260 of SEQ ID NO: 1881180
agguauuacucucuccaua

SEQ ID NO: 2024359 - RNA, 19 nt, Artificial Sequence
  Description of Artificial Sequence: Synthetic oligonucleotide
  Antisense strand to SEQ ID NO: 2024358
uauggagagaguaauaccu

SEQ ID NO: 2024360 - RNA, 19 nt, Artificial Sequence
  Description of Artificial Sequence: Synthetic oligonucleotide
  Sense strand starting at position 514 of SEQ ID NO: 1881180
caguucuacgucugguauu

SEQ ID NO: 2024361 - RNA, 19 nt, Artificial Sequence
  Description of Artificial Sequence: Synthetic oligonucleotide
  Antisense strand to SEQ ID NO: 2024360
aauaccagacguagaacug

SEQ ID NO: 2024362 - RNA, 19 nt, Artificial Sequence
  Description of Artificial Sequence: Synthetic oligonucleotide
  Sense strand starting at position 648 of SEQ ID NO: 1881180
gguuuaugucuagggcaug

SEQ ID NO: 2024363 - RNA, 19 nt, Artificial Sequence
  Description of Artificial Sequence: Synthetic oligonucleotide
  Antisense strand to SEQ ID NO: 2024362
caugcccuagacauaaacc

SEQ ID NO: 2024364 - RNA, 19 nt, Artificial Sequence
  Description of Artificial Sequence: Synthetic oligonucleotide
  Sense strand starting at position 705 of SEQ ID NO: 1881180
cguggaaccuguuucucau

SEQ ID NO: 2024365 - RNA, 19 nt, Artificial Sequence
  Description of Artificial Sequence: Synthetic oligonucleotide
  Antisense strand to SEQ ID NO: 2024364
augagaaacagguuccacg

SEQ ID NO: 2024366 - RNA, 19 nt, Artificial Sequence
  Description of Artificial Sequence: Synthetic oligonucleotide
  Sense strand starting at position 717 of SEQ ID NO: 1881180
uucucaucuccagguuguu

SEQ ID NO: 2024367 - RNA, 19 nt, Artificial Sequence
  Description of Artificial Sequence: Synthetic oligonucleotide
  Antisense strand to SEQ ID NO: 2024366
aacaaccuggagaugagaa

SEQ ID NO: 2024368 - RNA, 19 nt, Artificial Sequence
  Description of Artificial Sequence: Synthetic oligonucleotide
  Sense strand starting at position 751 of SEQ ID NO: 1881180
cgagcucuccuggaacaca

SEQ ID NO: 2024369 - RNA, 19 nt, Artificial Sequence
  Description of Artificial Sequence: Synthetic oligonucleotide
  Antisense strand to SEQ ID NO: 2024368
uguguuccaggagagcucg

SEQ ID NO: 2024370 - RNA, 19 nt, Artificial Sequence
  Description of Artificial Sequence: Synthetic oligonucleotide
  Sense strand starting at position 1041 of SEQ ID NO: 1881180
acacguauggagcagauaa

SEQ ID NO: 2024371 - RNA, 19 nt, Artificial Sequence
  Description of Artificial Sequence: Synthetic oligonucleotide
  Antisense strand to SEQ ID NO: 2024370
uuaucugcuccauacgugu

SEQ ID NO: 2024372 - RNA, 19 nt, Artificial Sequence
  Description of Artificial Sequence: Synthetic oligonucleotide
  Sense strand starting at position 2290 of SEQ ID NO: 1881180
ggguguuaccuuuagagua

SEQ ID NO: 2024373 - RNA, 19 nt, Artificial Sequence
  Description of Artificial Sequence: Synthetic oligonucleotide
  Antisense strand to SEQ ID NO: 2024372
uacucuaaagguaacaccc

SEQ ID NO: 2024374 - RNA, 19 nt, Artificial Sequence
  Description of Artificial Sequence: Synthetic oligonucleotide
  Sense strand starting at position 2408 of SEQ ID NO: 1881180
cagguuuguccaggagagu

SEQ ID NO: 2024375 - RNA, 19 nt, Artificial Sequence
  Description of Artificial Sequence: Synthetic oligonucleotide
  Antisense strand to SEQ ID NO: 2024374
acucuccuggacaaaccug

SEQ ID NO: 2024376 - RNA, 19 nt, Artificial Sequence
  Description of Artificial Sequence: Synthetic oligonucleotide
  Sense strand starting at position 2712 of SEQ ID NO: 1881180
uaucgacuuuaacagagua

SEQ ID NO: 2024377 - RNA, 19 nt, Artificial Sequence
  Description of Artificial Sequence: Synthetic oligonucleotide
  Antisense strand to SEQ ID NO: 2024376
uacucuguuaaagucgaua

SEQ ID NO: 2024378 - RNA, 19 nt, Artificial Sequence
  Description of Artificial Sequence: Synthetic oligonucleotide
  Sense strand starting at position 2725 of SEQ ID NO: 1881180
agaguagauugccuugcua

SEQ ID NO: 2024379 - RNA, 19 nt, Artificial Sequence
  Description of Artificial Sequence: Synthetic oligonucleotide
  Antisense strand to SEQ ID NO: 2024378
uagcaaggcaaucuacucu

SEQ ID NO: 2024380 - RNA, 19 nt, Artificial Sequence
  Description of Artificial Sequence: Synthetic oligonucleotide
  Sense strand starting at position 2781 of SEQ ID NO: 1881180
aagugaucaggcugaaucu

SEQ ID NO: 2024381 - RNA, 19 nt, Artificial Sequence
  Description of Artificial Sequence: Synthetic oligonucleotide
  Antisense strand to SEQ ID NO: 2024380
agauucagccugaucacuu

SEQ ID NO: 2024382 - RNA, 19 nt, Artificial Sequence
  Description of Artificial Sequence: Synthetic oligonucleotide
  Sense strand starting at position 2782 of SEQ ID NO: 1881180
agugaucaggcugaaucuu

SEQ ID NO: 2024383 - RNA, 19 nt, Artificial Sequence
  Description of Artificial Sequence: Synthetic oligonucleotide
  Antisense strand to SEQ ID NO: 2024382
aagauucagccugaucacu

SEQ ID NO: 2024384 - RNA, 19 nt, Artificial Sequence
  Description of Artificial Sequence: Synthetic oligonucleotide
  Sense strand starting at position 2866 of SEQ ID NO: 1881180
ggaagcauuagcuggcaca

SEQ ID NO: 2024385 - RNA, 19 nt, Artificial Sequence
  Description of Artificial Sequence: Synthetic oligonucleotide
  Antisense strand to SEQ ID NO: 2024384
ugugccagcuaaugcuucc

SEQ ID NO: 2024386 - RNA, 19 nt, Artificial Sequence
  Description of Artificial Sequence: Synthetic oligonucleotide
  Sense strand starting at position 2867 of SEQ ID NO: 1881180
gaagcauuagcuggcacau

SEQ ID NO: 2024387 - RNA, 19 nt, Artificial Sequence
  Description of Artificial Sequence: Synthetic oligonucleotide
  Antisense strand to SEQ ID NO: 2024386
augugccagcuaaugcuuc

SEQ ID NO: 2024388 - RNA, 19 nt, Artificial Sequence
  Description of Artificial Sequence: Synthetic oligonucleotide
  Sense strand starting at position 2869 of SEQ ID NO: 1881180
agcauuagcuggcacauuu

SEQ ID NO: 2024389 - RNA, 19 nt, Artificial Sequence
  Description of Artificial Sequence: Synthetic oligonucleotide
  Antisense strand to SEQ ID NO: 2024388
aaaugugccagcuaaugcu

SEQ ID NO: 2024390 - RNA, 19 nt, Artificial Sequence
  Description of Artificial Sequence: Synthetic oligonucleotide
  Sense strand starting at position 2958 of SEQ ID NO: 1881180
cuagucacauuugacuauu

SEQ ID NO: 2024391 - RNA, 19 nt, Artificial Sequence
  Description of Artificial Sequence: Synthetic oligonucleotide
  Antisense strand to SEQ ID NO: 2024390
aauagucaaaugugacuag

SEQ ID NO: 2024392 - RNA, 19 nt, Artificial Sequence
  Description of Artificial Sequence: Synthetic oligonucleotide
  Sense strand starting at position 2964 of SEQ ID NO: 1881180
acauuugacuauugaguac

SEQ ID NO: 2024393 - RNA, 19 nt, Artificial Sequence
  Description of Artificial Sequence: Synthetic oligonucleotide
  Antisense strand to SEQ ID NO: 2024392
guacucaauagucaaaugu

SEQ ID NO: 2024394 - RNA, 19 nt, Artificial Sequence
  Description of Artificial Sequence: Synthetic oligonucleotide
  Sense strand starting at position 3061 of SEQ ID NO: 1881180
ggugcugugaaucaugaca

SEQ ID NO: 2024395 - RNA, 19 nt, Artificial Sequence
  Description of Artificial Sequence: Synthetic oligonucleotide
  Antisense strand to SEQ ID NO: 2024394
ugucaugauucacagcacc

SEQ ID NO: 2024396 - RNA, 19 nt, Artificial Sequence
  Description of Artificial Sequence: Synthetic oligonucleotide
  Sense strand starting at position 3066 of SEQ ID NO: 1881180
ugugaaucaugacaggauc

SEQ ID NO: 2024397 - RNA, 19 nt, Artificial Sequence
  Description of Artificial Sequence: Synthetic oligonucleotide
  Antisense strand to SEQ ID NO: 2024396
gauccugucaugauucaca

SEQ ID NO: 2024398 - RNA, 19 nt, Artificial Sequence
  Description of Artificial Sequence: Synthetic oligonucleotide
  Sense strand starting at position 3107 of SEQ ID NO: 1881180
cuaggaagcuugucaguuc

SEQ ID NO: 2024399 - RNA, 19 nt, Artificial Sequence
  Description of Artificial Sequence: Synthetic oligonucleotide
  Antisense strand to SEQ ID NO: 2024398
gaacugacaagcuuccuag

SEQ ID NO: 2024400 - RNA, 19 nt, Artificial Sequence
  Description of Artificial Sequence: Synthetic oligonucleotide
  Sense strand starting at position 3116 of SEQ ID NO: 1881180
uugucaguucuggaucuga

SEQ ID NO: 2024401 - RNA, 19 nt, Artificial Sequence
  Description of Artificial Sequence: Synthetic oligonucleotide
  Antisense strand to SEQ ID NO: 2024400
ucagauccagaacugacaa

SEQ ID NO: 2024402 - RNA, 19 nt, Artificial Sequence
  Description of Artificial Sequence: Synthetic oligonucleotide
  Sense strand starting at position 3127 of SEQ ID NO: 1881180
ggaucugauccuugcaaga

SEQ ID NO: 2024403 - RNA, 19 nt, Artificial Sequence
  Description of Artificial Sequence: Synthetic oligonucleotide
  Antisense strand to SEQ ID NO: 2024402
ucuugcaaggaucagaucc

SEQ ID NO: 2024404 - RNA, 19 nt, Artificial Sequence
  Description of Artificial Sequence: Synthetic oligonucleotide
  Sense strand starting at position 3129 of SEQ ID NO: 1881180
aucugauccuugcaagagu

SEQ ID NO: 2024405 - RNA, 19 nt, Artificial Sequence
  Description of Artificial Sequence: Synthetic oligonucleotide
  Antisense strand to SEQ ID NO: 2024404
acucuugcaaggaucagau

SEQ ID NO: 2024406 - RNA, 19 nt, Artificial Sequence
  Description of Artificial Sequence: Synthetic oligonucleotide
  Sense strand starting at position 3132 of SEQ ID NO: 1881180
ugauccuugcaagaguaua

SEQ ID NO: 2024407 - RNA, 19 nt, Artificial Sequence
  Description of Artificial Sequence: Synthetic oligonucleotide
  Antisense strand to SEQ ID NO: 2024406
uauacucuugcaaggauca

SEQ ID NO: 2024408 - RNA, 19 nt, Artificial Sequence
  Description of Artificial Sequence: Synthetic oligonucleotide
  Sense strand starting at position 3234 of SEQ ID NO: 1881180
uuuaucuugucugugauga

SEQ ID NO: 2024409 - RNA, 19 nt, Artificial Sequence
  Description of Artificial Sequence: Synthetic oligonucleotide
  Antisense strand to SEQ ID NO: 2024408
ucaucacagacaagauaaa

SEQ ID NO: 2024410 - RNA, 19 nt, Artificial Sequence
  Description of Artificial Sequence: Synthetic oligonucleotide
  Sense strand starting at position 3235 of SEQ ID NO: 1881180
uuaucuugucugugaugag

SEQ ID NO: 2024411 - RNA, 19 nt, Artificial Sequence
  Description of Artificial Sequence: Synthetic oligonucleotide
  Antisense strand to SEQ ID NO: 2024410
cucaucacagacaagauaa

SEQ ID NO: 2024412 - RNA, 19 nt, Artificial Sequence
  Description of Artificial Sequence: Synthetic oligonucleotide
  Sense strand starting at position 3252 of SEQ ID NO: 1881180
agccucaaauccuuuguga

SEQ ID NO: 2024413 - RNA, 19 nt, Artificial Sequence
  Description of Artificial Sequence: Synthetic oligonucleotide
  Antisense strand to SEQ ID NO: 2024412
ucacaaaggauuugaggcu

SEQ ID NO: 2024414 - RNA, 19 nt, Artificial Sequence
  Description of Artificial Sequence: Synthetic oligonucleotide
  Sense strand starting at position 3265 of SEQ ID NO: 1881180
uugugaucaaagcgaggua

SEQ ID NO: 2024415 - RNA, 19 nt, Artificial Sequence
  Description of Artificial Sequence: Synthetic oligonucleotide
  Antisense strand to SEQ ID NO: 2024414
uaccucgcuuugaucacaa

SEQ ID NO: 2024416 - RNA, 19 nt, Artificial Sequence
  Description of Artificial Sequence: Synthetic oligonucleotide
  Sense strand starting at position 3266 of SEQ ID NO: 1881180
ugugaucaaagcgagguau

SEQ ID NO: 2024417 - RNA, 19 nt, Artificial Sequence
  Description of Artificial Sequence: Synthetic oligonucleotide
  Antisense strand to SEQ ID NO: 2024416
auaccucgcuuugaucaca

SEQ ID NO: 2024418 - RNA, 19 nt, Artificial Sequence
  Description of Artificial Sequence: Synthetic oligonucleotide
  Sense strand starting at position 3268 of SEQ ID NO: 1881180
ugaucaaagcgagguauag

SEQ ID NO: 2024419 - RNA, 19 nt, Artificial Sequence
  Description of Artificial Sequence: Synthetic oligonucleotide
  Antisense strand to SEQ ID NO: 2024418
cuauaccucgcuuugauca

SEQ ID NO: 2024420 - RNA, 19 nt, Artificial Sequence
  Description of Artificial Sequence: Synthetic oligonucleotide
  Sense strand starting at position 3780 of SEQ ID NO: 1881180
ccucuuuggugucagggaa

SEQ ID NO: 2024421 - RNA, 19 nt, Artificial Sequence
  Description of Artificial Sequence: Synthetic oligonucleotide
  Antisense strand to SEQ ID NO: 2024420
uucccugacaccaaagagg

SEQ ID NO: 2024422 - RNA, 19 nt, Artificial Sequence
  Description of Artificial Sequence: Synthetic oligonucleotide
  Sense strand starting at position 5 of SEQ ID NO: 1881181
agugaaauggccugggaga

SEQ ID NO: 2024423 - RNA, 19 nt, Artificial Sequence
  Description of Artificial Sequence: Synthetic oligonucleotide
  Antisense strand to SEQ ID NO: 2024422
ucucccaggccauuucacu

SEQ ID NO: 2024424 - RNA, 19 nt, Artificial Sequence
  Description of Artificial Sequence: Synthetic oligonucleotide
  Sense strand starting at position 6 of SEQ ID NO: 1881181
gugaaauggccugggagau

SEQ ID NO: 2024425 - RNA, 19 nt, Artificial Sequence
  Description of Artificial Sequence: Synthetic oligonucleotide
  Antisense strand to SEQ ID NO: 2024424
aucucccaggccauuucac

SEQ ID NO: 2024426 - RNA, 19 nt, Artificial Sequence
  Description of Artificial Sequence: Synthetic oligonucleotide
  Sense strand starting at position 7 of SEQ ID NO: 1881181
ugaaauggccugggagauu

SEQ ID NO: 2024427 - RNA, 19 nt, Artificial Sequence
  Description of Artificial Sequence: Synthetic oligonucleotide
  Antisense strand to SEQ ID NO: 2024426
aaucucccaggccauuuca

SEQ ID NO: 2024428 - RNA, 19 nt, Artificial Sequence
  Description of Artificial Sequence: Synthetic oligonucleotide
  Sense strand starting at position 57 of SEQ ID NO: 1881181
aguguagauuugccucuga

SEQ ID NO: 2024429 - RNA, 19 nt, Artificial Sequence
  Description of Artificial Sequence: Synthetic oligonucleotide
  Antisense strand to SEQ ID NO: 2024428
ucagaggcaaaucuacacu

SEQ ID NO: 2024430 - RNA, 19 nt, Artificial Sequence
  Description of Artificial Sequence: Synthetic oligonucleotide
  Sense strand starting at position 165 of SEQ ID NO: 1881181
gaccuaaguuuagauuuga

SEQ ID NO: 2024431 - RNA, 19 nt, Artificial Sequence
  Description of Artificial Sequence: Synthetic oligonucleotide
  Antisense strand to SEQ ID NO: 2024430
ucaaaucuaaacuuagguc

SEQ ID NO: 2024432 - RNA, 19 nt, Artificial Sequence
  Description of Artificial Sequence: Synthetic oligonucleotide
  Sense strand starting at position 244 of SEQ ID NO: 1881181
gugccuuguggagguuuga

SEQ ID NO: 2024433 - RNA, 19 nt, Artificial Sequence
  Description of Artificial Sequence: Synthetic oligonucleotide
  Antisense strand to SEQ ID NO: 2024432
ucaaaccuccacaaggcac

SEQ ID NO: 2024434 - RNA, 19 nt, Artificial Sequence
  Description of Artificial Sequence: Synthetic oligonucleotide
  Sense strand starting at position 342 of SEQ ID NO: 1881181
ccagcuuuccuccguagag

SEQ ID NO: 2024435 - RNA, 19 nt, Artificial Sequence
  Description of Artificial Sequence: Synthetic oligonucleotide
  Antisense strand to SEQ ID NO: 2024434
cucuacggaggaaagcugg

SEQ ID NO: 2024436 - RNA, 19 nt, Artificial Sequence
  Description of Artificial Sequence: Synthetic oligonucleotide
  Sense strand starting at position 343 of SEQ ID NO: 1881181
cagcuuuccuccguagaga

SEQ ID NO: 2024437 - RNA, 19 nt, Artificial Sequence
  Description of Artificial Sequence: Synthetic oligonucleotide
  Antisense strand to SEQ ID NO: 2024436
ucucuacggaggaaagcug

SEQ ID NO: 2024438 - RNA, 19 nt, Artificial Sequence
  Description of Artificial Sequence: Synthetic oligonucleotide
  Sense strand starting at position 344 of SEQ ID NO: 1881181
agcuuuccuccguagagac

SEQ ID NO: 2024439 - RNA, 19 nt, Artificial Sequence
  Description of Artificial Sequence: Synthetic oligonucleotide
  Antisense strand to SEQ ID NO: 2024438
gucucuacggaggaaagcu

SEQ ID NO: 2024440 - RNA, 19 nt, Artificial Sequence
  Description of Artificial Sequence: Synthetic oligonucleotide
  Sense strand starting at position 624 of SEQ ID NO: 1881181
cgugcucucuagguagaca

SEQ ID NO: 2024441 - RNA, 19 nt, Artificial Sequence
  Description of Artificial Sequence: Synthetic oligonucleotide
  Antisense strand to SEQ ID NO: 2024440
ugucuaccuagagagcacg

SEQ ID NO: 2024442 - RNA, 19 nt, Artificial Sequence
  Description of Artificial Sequence: Synthetic oligonucleotide
  Sense strand starting at position 625 of SEQ ID NO: 1881181
gugcucucuagguagacaa

SEQ ID NO: 2024443 - RNA, 19 nt, Artificial Sequence
  Description of Artificial Sequence: Synthetic oligonucleotide
  Antisense strand to SEQ ID NO: 2024442
uugucuaccuagagagcac

SEQ ID NO: 2024444 - RNA, 19 nt, Artificial Sequence
  Description of Artificial Sequence: Synthetic oligonucleotide
  Sense strand starting at position 650 of SEQ ID NO: 1881181
uggucagaguucccucaaa

SEQ ID NO: 2024445 - RNA, 19 nt, Artificial Sequence
  Description of Artificial Sequence: Synthetic oligonucleotide
  Antisense strand to SEQ ID NO: 2024444
uuugagggaacucugacca

SEQ ID NO: 2024446 - RNA, 19 nt, Artificial Sequence
  Description of Artificial Sequence: Synthetic oligonucleotide
  Sense strand starting at position 716 of SEQ ID NO: 1881181
gugugauguguacuccgca

SEQ ID NO: 2024447 - RNA, 19 nt, Artificial Sequence
  Description of Artificial Sequence: Synthetic oligonucleotide
  Antisense strand to SEQ ID NO: 2024446
ugcggaguacacaucacac

SEQ ID NO: 2024448 - RNA, 19 nt, Artificial Sequence
  Description of Artificial Sequence: Synthetic oligonucleotide
  Sense strand starting at position 745 of SEQ ID NO: 1881181
gugggacauuucuguacuu

SEQ ID NO: 2024449 - RNA, 19 nt, Artificial Sequence
  Description of Artificial Sequence: Synthetic oligonucleotide
  Antisense strand to SEQ ID NO: 2024448
aaguacagaaaugucccac

SEQ ID NO: 2024450 - RNA, 19 nt, Artificial Sequence
  Description of Artificial Sequence: Synthetic oligonucleotide
  Sense strand starting at position 763 of SEQ ID NO: 1881181
ucucgauuugcuuauggcu

SEQ ID NO: 2024451 - RNA, 19 nt, Artificial Sequence
  Description of Artificial Sequence: Synthetic oligonucleotide
  Antisense strand to SEQ ID NO: 2024450
agccauaagcaaaucgaga

SEQ ID NO: 2024452 - RNA, 19 nt, Artificial Sequence
  Description of Artificial Sequence: Synthetic oligonucleotide
  Sense strand starting at position 765 of SEQ ID NO: 1881181
ucgauuugcuuauggcuca

SEQ ID NO: 2024453 - RNA, 19 nt, Artificial Sequence
  Description of Artificial Sequence: Synthetic oligonucleotide
  Antisense strand to SEQ ID NO: 2024452
ugagccauaagcaaaucga

SEQ ID NO: 2024454 - RNA, 19 nt, Artificial Sequence
  Description of Artificial Sequence: Synthetic oligonucleotide
  Sense strand starting at position 772 of SEQ ID NO: 1881181
gcuuauggcucagccauua

SEQ ID NO: 2024455 - RNA, 19 nt, Artificial Sequence
  Description of Artificial Sequence: Synthetic oligonucleotide
  Antisense strand to SEQ ID NO: 2024454
uaauggcugagccauaagc

SEQ ID NO: 2024456 - RNA, 19 nt, Artificial Sequence
  Description of Artificial Sequence: Synthetic oligonucleotide
  Sense strand starting at position 783 of SEQ ID NO: 1881181
agccauuaccugugucagu

SEQ ID NO: 2024457 - RNA, 19 nt, Artificial Sequence
  Description of Artificial Sequence: Synthetic oligonucleotide
  Antisense strand to SEQ ID NO: 2024456
acugacacagguaauggcu

SEQ ID NO: 2024458 - RNA, 19 nt, Artificial Sequence
  Description of Artificial Sequence: Synthetic oligonucleotide
  Sense strand starting at position 793 of SEQ ID NO: 1881181
ugugucaguccaugauucu

SEQ ID NO: 2024459 - RNA, 19 nt, Artificial Sequence
  Description of Artificial Sequence: Synthetic oligonucleotide
  Antisense strand to SEQ ID NO: 2024458
agaaucauggacugacaca

SEQ ID NO: 2024460 - RNA, 19 nt, Artificial Sequence
  Description of Artificial Sequence: Synthetic oligonucleotide
  Sense strand starting at position 794 of SEQ ID NO: 1881181
gugucaguccaugauucug

SEQ ID NO: 2024461 - RNA, 19 nt, Artificial Sequence
  Description of Artificial Sequence: Synthetic oligonucleotide
  Antisense strand to SEQ ID NO: 2024460
cagaaucauggacugacac

SEQ ID NO: 2024462 - RNA, 19 nt, Artificial Sequence
  Description of Artificial Sequence: Synthetic oligonucleotide
  Sense strand starting at position 799 of SEQ ID NO: 1881181
aguccaugauucuguugua

SEQ ID NO: 2024463 - RNA, 19 nt, Artificial Sequence
  Description of Artificial Sequence: Synthetic oligonucleotide
  Antisense strand to SEQ ID NO: 2024462
uacaacagaaucauggacu

SEQ ID NO: 2024464 - RNA, 19 nt, Artificial Sequence
  Description of Artificial Sequence: Synthetic oligonucleotide
  Sense strand starting at position 800 of SEQ ID NO: 1881181
guccaugauucuguuguaa

SEQ ID NO: 2024465 - RNA, 19 nt, Artificial Sequence
  Description of Artificial Sequence: Synthetic oligonucleotide
  Antisense strand to SEQ ID NO: 2024464
uuacaacagaaucauggac

SEQ ID NO: 2024466 - RNA, 19 nt, Artificial Sequence
  Description of Artificial Sequence: Synthetic oligonucleotide
  Sense strand starting at position 802 of SEQ ID NO: 1881181
ccaugauucuguuguaaca

SEQ ID NO: 2024467 - RNA, 19 nt, Artificial Sequence
  Description of Artificial Sequence: Synthetic oligonucleotide
  Antisense strand to SEQ ID NO: 2024466
uguuacaacagaaucaugg

SEQ ID NO: 2024468 - RNA, 19 nt, Artificial Sequence
  Description of Artificial Sequence: Synthetic oligonucleotide
  Sense strand starting at position 804 of SEQ ID NO: 1881181
augauucuguuguaacagu

SEQ ID NO: 2024469 - RNA, 19 nt, Artificial Sequence
  Description of Artificial Sequence: Synthetic oligonucleotide
  Antisense strand to SEQ ID NO: 2024468
acuguuacaacagaaucau

SEQ ID NO: 2024470 - RNA, 19 nt, Artificial Sequence
  Description of Artificial Sequence: Synthetic oligonucleotide
  Sense strand starting at position 836 of SEQ ID NO: 1881181
aaauaaagcugccugaugu

SEQ ID NO: 2024471 - RNA, 19 nt, Artificial Sequence
  Description of Artificial Sequence: Synthetic oligonucleotide
  Antisense strand to SEQ ID NO: 2024470
acaucaggcagcuuuauuu

SEQ ID NO: 2024472 - RNA, 19 nt, Artificial Sequence
  Description of Artificial Sequence: Synthetic oligonucleotide
  Sense strand starting at position 1017 of SEQ ID NO: 1881181
ccuagucugccugauaaag

SEQ ID NO: 2024473 - RNA, 19 nt, Artificial Sequence
  Description of Artificial Sequence: Synthetic oligonucleotide
  Antisense strand to SEQ ID NO: 2024472
cuuuaucaggcagacuagg

SEQ ID NO: 2024474 - RNA, 19 nt, Artificial Sequence
  Description of Artificial Sequence: Synthetic oligonucleotide
  Sense strand starting at position 1171 of SEQ ID NO: 1881181
caugcucuuucuuggugaa

SEQ ID NO: 2024475 - RNA, 19 nt, Artificial Sequence
  Description of Artificial Sequence: Synthetic oligonucleotide
  Antisense strand to SEQ ID NO: 2024474
uucaccaagaaagagcaug

SEQ ID NO: 2024476 - RNA, 19 nt, Artificial Sequence
  Description of Artificial Sequence: Synthetic oligonucleotide
  Sense strand starting at position 1175 of SEQ ID NO: 1881181
cucuuucuuggugaaggga

SEQ ID NO: 2024477 - RNA, 19 nt, Artificial Sequence
  Description of Artificial Sequence: Synthetic oligonucleotide
  Antisense strand to SEQ ID NO: 2024476
ucccuucaccaagaaagag

SEQ ID NO: 2024478 - RNA, 19 nt, Artificial Sequence
  Description of Artificial Sequence: Synthetic oligonucleotide
  Sense strand starting at position 1682 of SEQ ID NO: 1881181
cccgucaucugagggaaug

SEQ ID NO: 2024479 - RNA, 19 nt, Artificial Sequence
  Description of Artificial Sequence: Synthetic oligonucleotide
  Antisense strand to SEQ ID NO: 2024478
cauucccucagaugacggg

SEQ ID NO: 2024480 - RNA, 19 nt, Artificial Sequence
  Description of Artificial Sequence: Synthetic oligonucleotide
  Sense strand starting at position 2354 of SEQ ID NO: 1881181
cuugaugaguccuagggag

SEQ ID NO: 2024481 - RNA, 19 nt, Artificial Sequence
  Description of Artificial Sequence: Synthetic oligonucleotide
  Antisense strand to SEQ ID NO: 2024480
cucccuaggacucaucaag

SEQ ID NO: 2024482 - RNA, 19 nt, Artificial Sequence
  Description of Artificial Sequence: Synthetic oligonucleotide
  Sense strand starting at position 2356 of SEQ ID NO: 1881181
ugaugaguccuagggagac

SEQ ID NO: 2024483 - RNA, 19 nt, Artificial Sequence
  Description of Artificial Sequence: Synthetic oligonucleotide
  Antisense strand to SEQ ID NO: 2024482
gucucccuaggacucauca

SEQ ID NO: 2024484 - RNA, 19 nt, Artificial Sequence
  Description of Artificial Sequence: Synthetic oligonucleotide
  Sense strand starting at position 3003 of SEQ ID NO: 1881181
uaccgaucuccuggagcaa

SEQ ID NO: 2024485 - RNA, 19 nt, Artificial Sequence
  Description of Artificial Sequence: Synthetic oligonucleotide
  Antisense strand to SEQ ID NO: 2024484
uugcuccaggagaucggua

SEQ ID NO: 2024486 - RNA, 19 nt, Artificial Sequence
  Description of Artificial Sequence: Synthetic oligonucleotide
  Sense strand starting at position 11 of SEQ ID NO: 1881182
acaaauauuugguauggua

SEQ ID NO: 2024487 - RNA, 19 nt, Artificial Sequence
  Description of Artificial Sequence: Synthetic oligonucleotide
  Antisense strand to SEQ ID NO: 2024486
uaccauaccaaauauuugu

SEQ ID NO: 2024488 - RNA, 19 nt, Artificial Sequence
  Description of Artificial Sequence: Synthetic oligonucleotide
  Sense strand starting at position 84 of SEQ ID NO: 1881182
cucuaaacguguuuaacug

SEQ ID NO: 2024489 - RNA, 19 nt, Artificial Sequence
  Description of Artificial Sequence: Synthetic oligonucleotide
  Antisense strand to SEQ ID NO: 2024488
caguuaaacacguuuagag

SEQ ID NO: 2024490 - RNA, 19 nt, Artificial Sequence
  Description of Artificial Sequence: Synthetic oligonucleotide
  Sense strand starting at position 88 of SEQ ID NO: 1881182
aaacguguuuaacugccaa

SEQ ID NO: 2024491 - RNA, 19 nt, Artificial Sequence
  Description of Artificial Sequence: Synthetic oligonucleotide
  Antisense strand to SEQ ID NO: 2024490
uuggcaguuaaacacguuu

SEQ ID NO: 2024492 - RNA, 19 nt, Artificial Sequence
  Description of Artificial Sequence: Synthetic oligonucleotide
  Sense strand starting at position 108 of SEQ ID NO: 1881182
cagcuaccugcauguuaga

SEQ ID NO: 2024493 - RNA, 19 nt, Artificial Sequence
  Description of Artificial Sequence: Synthetic oligonucleotide
  Antisense strand to SEQ ID NO: 2024492
ucuaacaugcagguagcug

SEQ ID NO: 2024494 - RNA, 19 nt, Artificial Sequence
  Description of Artificial Sequence: Synthetic oligonucleotide
  Sense strand starting at position 273 of SEQ ID NO: 1881182
cagugugcuguuucgcuua

SEQ ID NO: 2024495 - RNA, 19 nt, Artificial Sequence
  Description of Artificial Sequence: Synthetic oligonucleotide
  Antisense strand to SEQ ID NO: 2024494
uaagcgaaacagcacacug

SEQ ID NO: 2024496 - RNA, 19 nt, Artificial Sequence
  Description of Artificial Sequence: Synthetic oligonucleotide
  Sense strand starting at position 350 of SEQ ID NO: 1881182
gcugcuaucgacuccugua

SEQ ID NO: 2024497 - RNA, 19 nt, Artificial Sequence
  Description of Artificial Sequence: Synthetic oligonucleotide
  Antisense strand to SEQ ID NO: 2024496
uacaggagucgauagcagc

SEQ ID NO: 2024498 - RNA, 19 nt, Artificial Sequence
  Description of Artificial Sequence: Synthetic oligonucleotide
  Sense strand starting at position 593 of SEQ ID NO: 1881182
ccacaaucugggcaauguu

SEQ ID NO: 2024499 - RNA, 19 nt, Artificial Sequence
  Description of Artificial Sequence: Synthetic oligonucleotide
  Antisense strand to SEQ ID NO: 2024498
aacauugcccagauugugg

SEQ ID NO: 2024500 - RNA, 19 nt, Artificial Sequence
  Description of Artificial Sequence: Synthetic oligonucleotide
  Sense strand starting at position 702 of SEQ ID NO: 1881182
auuccuugauuugauguua

SEQ ID NO: 2024501 - RNA, 19 nt, Artificial Sequence
  Description of Artificial Sequence: Synthetic oligonucleotide
  Antisense strand to SEQ ID NO: 2024500
uaacaucaaaucaaggaau

SEQ ID NO: 2024502 - RNA, 19 nt, Artificial Sequence
  Description of Artificial Sequence: Synthetic oligonucleotide
  Sense strand starting at position 771 of SEQ ID NO: 1881182
ccaagaugcuggcuucuca

SEQ ID NO: 2024503 - RNA, 19 nt, Artificial Sequence
  Description of Artificial Sequence: Synthetic oligonucleotide
  Antisense strand to SEQ ID NO: 2024502
ugagaagccagcaucuugg

SEQ ID NO: 2024504 - RNA, 19 nt, Artificial Sequence
  Description of Artificial Sequence: Synthetic oligonucleotide
  Sense strand starting at position 782 of SEQ ID NO: 1881182
gcuucucaccugugaauau

SEQ ID NO: 2024505 - RNA, 19 nt, Artificial Sequence
  Description of Artificial Sequence: Synthetic oligonucleotide
  Antisense strand to SEQ ID NO: 2024504
auauucacaggugagaagc

SEQ ID NO: 2024506 - RNA, 19 nt, Artificial Sequence
  Description of Artificial Sequence: Synthetic oligonucleotide
  Sense strand starting at position 1170 of SEQ ID NO: 1881182
gucaccaugcugcaaauua

SEQ ID NO: 2024507 - RNA, 19 nt, Artificial Sequence
  Description of Artificial Sequence: Synthetic oligonucleotide
  Antisense strand to SEQ ID NO: 2024506
uaauuugcagcauggugac

SEQ ID NO: 2024508 - RNA, 19 nt, Artificial Sequence
  Description of Artificial Sequence: Synthetic oligonucleotide
  Sense strand starting at position 1210 of SEQ ID NO: 1881182
accagucaggucgguauuu

SEQ ID NO: 2024509 - RNA, 19 nt, Artificial Sequence
  Description of Artificial Sequence: Synthetic oligonucleotide
  Antisense strand to SEQ ID NO: 2024508
aaauaccgaccugacuggu

SEQ ID NO: 2024510 - RNA, 19 nt, Artificial Sequence
  Description of Artificial Sequence: Synthetic oligonucleotide
  Sense strand starting at position 1211 of SEQ ID NO: 1881182
ccagucaggucgguauuua

SEQ ID NO: 2024511 - RNA, 19 nt, Artificial Sequence
  Description of Artificial Sequence: Synthetic oligonucleotide
  Antisense strand to SEQ ID NO: 2024510
uaaauaccgaccugacugg

SEQ ID NO: 2024512 - RNA, 19 nt, Artificial Sequence
  Description of Artificial Sequence: Synthetic oligonucleotide
  Sense strand starting at position 1360 of SEQ ID NO: 1881182
ucugaauccugcuuuagug

SEQ ID NO: 2024513 - RNA, 19 nt, Artificial Sequence
  Description of Artificial Sequence: Synthetic oligonucleotide
  Antisense strand to SEQ ID NO: 2024512
cacuaaagcaggauucaga

SEQ ID NO: 2024514 - RNA, 19 nt, Artificial Sequence
  Description of Artificial Sequence: Synthetic oligonucleotide
  Sense strand starting at position 1364 of SEQ ID NO: 1881182
aauccugcuuuaguggaaa

SEQ ID NO: 2024515 - RNA, 19 nt, Artificial Sequence
  Description of Artificial Sequence: Synthetic oligonucleotide
  Antisense strand to SEQ ID NO: 2024514
uuuccacuaaagcaggauu

SEQ ID NO: 2024516 - RNA, 19 nt, Artificial Sequence
  Description of Artificial Sequence: Synthetic oligonucleotide
  Sense strand starting at position 1538 of SEQ ID NO: 1881182
cuuccauuccuguaauguu

SEQ ID NO: 2024517 - RNA, 19 nt, Artificial Sequence
  Description of Artificial Sequence: Synthetic oligonucleotide
  Antisense strand to SEQ ID NO: 2024516
aacauuacaggaauggaag

SEQ ID NO: 2024518 - RNA, 19 nt, Artificial Sequence
  Description of Artificial Sequence: Synthetic oligonucleotide
  Sense strand starting at position 1545 of SEQ ID NO: 1881182
uccuguaauguuuagaagu

SEQ ID NO: 2024519 - RNA, 19 nt, Artificial Sequence
  Description of Artificial Sequence: Synthetic oligonucleotide
  Antisense strand to SEQ ID NO: 2024518
acuucuaaacauuacagga

SEQ ID NO: 2024520 - RNA, 19 nt, Artificial Sequence
  Description of Artificial Sequence: Synthetic oligonucleotide
  Sense strand starting at position 1665 of SEQ ID NO: 1881182
gcacuuagagcccagaguu

SEQ ID NO: 2024521 - RNA, 19 nt, Artificial Sequence
  Description of Artificial Sequence: Synthetic oligonucleotide
  Antisense strand to SEQ ID NO: 2024520
aacucugggcucuaagugc

SEQ ID NO: 2024522 - RNA, 19 nt, Artificial Sequence
  Description of Artificial Sequence: Synthetic oligonucleotide
  Sense strand starting at position 1801 of SEQ ID NO: 1881182
ucauucuguuaggucuaau

SEQ ID NO: 2024523 - RNA, 19 nt, Artificial Sequence
  Description of Artificial Sequence: Synthetic oligonucleotide
  Antisense strand to SEQ ID NO: 2024522
auuagaccuaacagaauga

SEQ ID NO: 2024524 - RNA, 19 nt, Artificial Sequence
  Description of Artificial Sequence: Synthetic oligonucleotide
  Sense strand starting at position 1804 of SEQ ID NO: 1881182
uucuguuaggucuaaugag

SEQ ID NO: 2024525 - RNA, 19 nt, Artificial Sequence
  Description of Artificial Sequence: Synthetic oligonucleotide
  Antisense strand to SEQ ID NO: 2024524
cucauuagaccuaacagaa

SEQ ID NO: 2024526 - RNA, 19 nt, Artificial Sequence
  Description of Artificial Sequence: Synthetic oligonucleotide
  Sense strand starting at position 1812 of SEQ ID NO: 1881182
ggucuaaugagauauugca

SEQ ID NO: 2024527 - RNA, 19 nt, Artificial Sequence
  Description of Artificial Sequence: Synthetic oligonucleotide
  Antisense strand to SEQ ID NO: 2024526
ugcaauaucucauuagacc

SEQ ID NO: 2024528 - RNA, 19 nt, Artificial Sequence
  Description of Artificial Sequence: Synthetic oligonucleotide
  Sense strand starting at position 2249 of SEQ ID NO: 1881182
ugucuuacuacggaaugaa

SEQ ID NO: 2024529 - RNA, 19 nt, Artificial Sequence
  Description of Artificial Sequence: Synthetic oligonucleotide
  Antisense strand to SEQ ID NO: 2024528
uucauuccguaguaagaca

SEQ ID NO: 2024530 - RNA, 19 nt, Artificial Sequence
  Description of Artificial Sequence: Synthetic oligonucleotide
  Sense strand starting at position 2268 of SEQ ID NO: 1881182
gguagacagaguuaugcau

SEQ ID NO: 2024531 - RNA, 19 nt, Artificial Sequence
  Description of Artificial Sequence: Synthetic oligonucleotide
  Antisense strand to SEQ ID NO: 2024530
augcauaacucugucuacc

SEQ ID NO: 2024532 - RNA, 19 nt, Artificial Sequence
  Description of Artificial Sequence: Synthetic oligonucleotide
  Sense strand starting at position 2388 of SEQ ID NO: 1881182
aguaaugcuuaccugaaua

SEQ ID NO: 2024533 - RNA, 19 nt, Artificial Sequence
  Description of Artificial Sequence: Synthetic oligonucleotide
  Antisense strand to SEQ ID NO: 2024532
uauucagguaagcauuacu

SEQ ID NO: 2024534 - RNA, 19 nt, Artificial Sequence
  Description of Artificial Sequence: Synthetic oligonucleotide
  Sense strand starting at position 2541 of SEQ ID NO: 1881182
agaucuacucagugauaca

SEQ ID NO: 2024535 - RNA, 19 nt, Artificial Sequence
  Description of Artificial Sequence: Synthetic oligonucleotide
  Antisense strand to SEQ ID NO: 2024534
uguaucacugaguagaucu

SEQ ID NO: 2024536 - RNA, 19 nt, Artificial Sequence
  Description of Artificial Sequence: Synthetic oligonucleotide
  Sense strand starting at position 2609 of SEQ ID NO: 1881182
agacaauacuuacaaaggu

SEQ ID NO: 2024537 - RNA, 19 nt, Artificial Sequence
  Description of Artificial Sequence: Synthetic oligonucleotide
  Antisense strand to SEQ ID NO: 2024536
accuuuguaaguauugucu

SEQ ID NO: 2024538 - RNA, 19 nt, Artificial Sequence
  Description of Artificial Sequence: Synthetic oligonucleotide
  Sense strand starting at position 2808 of SEQ ID NO: 1881182
auuauuauuccgcagaacu

SEQ ID NO: 2024539 - RNA, 19 nt, Artificial Sequence
  Description of Artificial Sequence: Synthetic oligonucleotide
  Antisense strand to SEQ ID NO: 2024538
aguucugcggaauaauaau

SEQ ID NO: 2024540 - RNA, 19 nt, Artificial Sequence
  Description of Artificial Sequence: Synthetic oligonucleotide
  Sense strand starting at position 2818 of SEQ ID NO: 1881182
cgcagaacuccaggaucaa

SEQ ID NO: 2024541 - RNA, 19 nt, Artificial Sequence
  Description of Artificial Sequence: Synthetic oligonucleotide
  Antisense strand to SEQ ID NO: 2024540
uugauccuggaguucugcg

SEQ ID NO: 2024542 - RNA, 19 nt, Artificial Sequence
  Description of Artificial Sequence: Synthetic oligonucleotide
  Sense strand starting at position 3030 of SEQ ID NO: 1881182
agaauaacguuuccuacau

SEQ ID NO: 2024543 - RNA, 19 nt, Artificial Sequence
  Description of Artificial Sequence: Synthetic oligonucleotide
  Antisense strand to SEQ ID NO: 2024542
auguaggaaacguuauucu

SEQ ID NO: 2024544 - RNA, 19 nt, Artificial Sequence
  Description of Artificial Sequence: Synthetic oligonucleotide
  Sense strand starting at position 3076 of SEQ ID NO: 1881182
uagugaaauuuauguucug

SEQ ID NO: 2024545 - RNA, 19 nt, Artificial Sequence
  Description of Artificial Sequence: Synthetic oligonucleotide
  Antisense strand to SEQ ID NO: 2024544
cagaacauaaauuucacua

SEQ ID NO: 2024546 - RNA, 19 nt, Artificial Sequence
  Description of Artificial Sequence: Synthetic oligonucleotide
  Sense strand starting at position 3131 of SEQ ID NO: 1881182
aggguauugugccuuauau

SEQ ID NO: 2024547 - RNA, 19 nt, Artificial Sequence
  Description of Artificial Sequence: Synthetic oligonucleotide
  Antisense strand to SEQ ID NO: 2024546
auauaaggcacaauacccu

SEQ ID NO: 2024548 - RNA, 19 nt, Artificial Sequence
  Description of Artificial Sequence: Synthetic oligonucleotide
  Sense strand starting at position 3133 of SEQ ID NO: 1881182
gguauugugccuuauauaa

SEQ ID NO: 2024549 - RNA, 19 nt, Artificial Sequence
  Description of Artificial Sequence: Synthetic oligonucleotide
  Antisense strand to SEQ ID NO: 2024548
uuauauaaggcacaauacc

SEQ ID NO: 2024550 - RNA, 19 nt, Artificial Sequence
  Description of Artificial Sequence: Synthetic oligonucleotide
  Sense strand starting at position 3169 of SEQ ID NO: 1881182
ccuacagcuuuauuaggaa

SEQ ID NO: 2024551 - RNA, 19 nt, Artificial Sequence
  Description of Artificial Sequence: Synthetic oligonucleotide
  Antisense strand to SEQ ID NO: 2024550
uuccuaauaaagcuguagg

SEQ ID NO: 2024552 - RNA, 19 nt, Artificial Sequence
  Description of Artificial Sequence: Synthetic oligonucleotide
  Sense strand starting at position 3202 of SEQ ID NO: 1881182
ccaauauagcagugagcuu

SEQ ID NO: 2024553 - RNA, 19 nt, Artificial Sequence
  Description of Artificial Sequence: Synthetic oligonucleotide
  Antisense strand to SEQ ID NO: 2024552
aagcucacugcuauauugg

SEQ ID NO: 2024554 - RNA, 19 nt, Artificial Sequence
  Description of Artificial Sequence: Synthetic oligonucleotide
  Sense strand starting at position 3272 of SEQ ID NO: 1881182
gguaacaugucacugcagu

SEQ ID NO: 2024555 - RNA, 19 nt, Artificial Sequence
  Description of Artificial Sequence: Synthetic oligonucleotide
  Antisense strand to SEQ ID NO: 2024554
acugcagugacauguuacc

SEQ ID NO: 2024556 - RNA, 19 nt, Artificial Sequence
  Description of Artificial Sequence: Synthetic oligonucleotide
  Sense strand starting at position 3273 of SEQ ID NO: 1881182
guaacaugucacugcaguu

SEQ ID NO: 2024557 - RNA, 19 nt, Artificial Sequence
  Description of Artificial Sequence: Synthetic oligonucleotide
  Antisense strand to SEQ ID NO: 2024556
aacugcagugacauguuac

SEQ ID NO: 2024558 - RNA, 19 nt, Artificial Sequence
  Description of Artificial Sequence: Synthetic oligonucleotide
  Sense strand starting at position 3775 of SEQ ID NO: 1881182
uguauuccauuuggaacau

SEQ ID NO: 2024559 - RNA, 19 nt, Artificial Sequence
  Description of Artificial Sequence: Synthetic oligonucleotide
  Antisense strand to SEQ ID NO: 2024558
auguuccaaauggaauaca

SEQ ID NO: 2024560 - RNA, 19 nt, Artificial Sequence
  Description of Artificial Sequence: Synthetic oligonucleotide
  Sense strand starting at position 3776 of SEQ ID NO: 1881182
guauuccauuuggaacauu

SEQ ID NO: 2024561 - RNA, 19 nt, Artificial Sequence
  Description of Artificial Sequence: Synthetic oligonucleotide
  Antisense strand to SEQ ID NO: 2024560
aauguuccaaauggaauac

SEQ ID NO: 2024562 - RNA, 19 nt, Artificial Sequence
  Description of Artificial Sequence: Synthetic oligonucleotide
  Sense strand starting at position 3787 of SEQ ID NO: 1881182
ggaacauuaugcccaaaua

SEQ ID NO: 2024563 - RNA, 19 nt, Artificial Sequence
  Description of Artificial Sequence: Synthetic oligonucleotide
  Antisense strand to SEQ ID NO: 2024562
uauuugggcauaauguucc

SEQ ID NO: 2024564 - RNA, 19 nt, Artificial Sequence
  Description of Artificial Sequence: Synthetic oligonucleotide
  Sense strand starting at position 3803 of SEQ ID NO: 1881182
auaaucaagugaucagcaa

SEQ ID NO: 2024565 - RNA, 19 nt, Artificial Sequence
  Description of Artificial Sequence: Synthetic oligonucleotide
  Antisense strand to SEQ ID NO: 2024564
uugcugaucacuugauuau

SEQ ID NO: 2024566 - RNA, 19 nt, Artificial Sequence
  Description of Artificial Sequence: Synthetic oligonucleotide
  Sense strand starting at position 342 of SEQ ID NO: 1881183
uugaaucuugacugauguu

SEQ ID NO: 2024567 - RNA, 19 nt, Artificial Sequence
  Description of Artificial Sequence: Synthetic oligonucleotide
  Antisense strand to SEQ ID NO: 2024566
aacaucagucaagauucaa

SEQ ID NO: 2024568 - RNA, 19 nt, Artificial Sequence
  Description of Artificial Sequence: Synthetic oligonucleotide
  Sense strand starting at position 464 of SEQ ID NO: 1881183
cagaaaccucagugucaga

SEQ ID NO: 2024569 - RNA, 19 nt, Artificial Sequence
  Description of Artificial Sequence: Synthetic oligonucleotide
  Antisense strand to SEQ ID NO: 2024568
ucugacacugagguuucug

SEQ ID NO: 2024570 - RNA, 19 nt, Artificial Sequence
  Description of Artificial Sequence: Synthetic oligonucleotide
  Sense strand starting at position 843 of SEQ ID NO: 1881183
aaauguucugacuggcaau

SEQ ID NO: 2024571 - RNA, 19 nt, Artificial Sequence
  Description of Artificial Sequence: Synthetic oligonucleotide
  Antisense strand to SEQ ID NO: 2024570
auugccagucagaacauuu

SEQ ID NO: 2024572 - RNA, 19 nt, Artificial Sequence
  Description of Artificial Sequence: Synthetic oligonucleotide
  Sense strand starting at position 980 of SEQ ID NO: 1881183
uugagaauguuucuuauca

SEQ ID NO: 2024573 - RNA, 19 nt, Artificial Sequence
  Description of Artificial Sequence: Synthetic oligonucleotide
  Antisense strand to SEQ ID NO: 2024572
ugauaagaaacauucucaa

SEQ ID NO: 2024574 - RNA, 19 nt, Artificial Sequence
  Description of Artificial Sequence: Synthetic oligonucleotide
  Sense strand starting at position 981 of SEQ ID NO: 1881183
ugagaauguuucuuaucac

SEQ ID NO: 2024575 - RNA, 19 nt, Artificial Sequence
  Description of Artificial Sequence: Synthetic oligonucleotide
  Antisense strand to SEQ ID NO: 2024574
gugauaagaaacauucuca

SEQ ID NO: 2024576 - RNA, 19 nt, Artificial Sequence
  Description of Artificial Sequence: Synthetic oligonucleotide
  Sense strand starting at position 998 of SEQ ID NO: 1881183
acacauaaggucugugaug

SEQ ID NO: 2024577 - RNA, 19 nt, Artificial Sequence
  Description of Artificial Sequence: Synthetic oligonucleotide
  Antisense strand to SEQ ID NO: 2024576
caucacagaccuuaugugu

SEQ ID NO: 2024578 - RNA, 19 nt, Artificial Sequence
  Description of Artificial Sequence: Synthetic oligonucleotide
  Sense strand starting at position 999 of SEQ ID NO: 1881183
cacauaaggucugugauga

SEQ ID NO: 2024579 - RNA, 19 nt, Artificial Sequence
  Description of Artificial Sequence: Synthetic oligonucleotide
  Antisense strand to SEQ ID NO: 2024578
ucaucacagaccuuaugug

SEQ ID NO: 2024580 - RNA, 19 nt, Artificial Sequence
  Description of Artificial Sequence: Synthetic oligonucleotide
  Sense strand starting at position 1000 of SEQ ID NO: 1881183
acauaaggucugugaugau

SEQ ID NO: 2024581 - RNA, 19 nt, Artificial Sequence
  Description of Artificial Sequence: Synthetic oligonucleotide
  Antisense strand to SEQ ID NO: 2024580
aucaucacagaccuuaugu

SEQ ID NO: 2024582 - RNA, 19 nt, Artificial Sequence
  Description of Artificial Sequence: Synthetic oligonucleotide
  Sense strand starting at position 1004 of SEQ ID NO: 1881183
aaggucugugaugauguua

SEQ ID NO: 2024583 - RNA, 19 nt, Artificial Sequence
  Description of Artificial Sequence: Synthetic oligonucleotide
  Antisense strand to SEQ ID NO: 2024582
uaacaucaucacagaccuu

SEQ ID NO: 2024584 - RNA, 19 nt, Artificial Sequence
  Description of Artificial Sequence: Synthetic oligonucleotide
  Sense strand starting at position 1088 of SEQ ID NO: 1881183
agguuaacucuggaauguc

SEQ ID NO: 2024585 - RNA, 19 nt, Artificial Sequence
  Description of Artificial Sequence: Synthetic oligonucleotide
  Antisense strand to SEQ ID NO: 2024584
gacauuccagaguuaaccu

SEQ ID NO: 2024586 - RNA, 19 nt, Artificial Sequence
  Description of Artificial Sequence: Synthetic oligonucleotide
  Sense strand starting at position 1405 of SEQ ID NO: 1881183
uuugacacauuguuagaca

SEQ ID NO: 2024587 - RNA, 19 nt, Artificial Sequence
  Description of Artificial Sequence: Synthetic oligonucleotide
  Antisense strand to SEQ ID NO: 2024586
ugucuaacaaugugucaaa

SEQ ID NO: 2024588 - RNA, 19 nt, Artificial Sequence
  Description of Artificial Sequence: Synthetic oligonucleotide
  Sense strand starting at position 1491 of SEQ ID NO: 1881183
guaaguugauaacuuuaga

SEQ ID NO: 2024589 - RNA, 19 nt, Artificial Sequence
  Description of Artificial Sequence: Synthetic oligonucleotide
  Antisense strand to SEQ ID NO: 2024588
ucuaaaguuaucaacuuac

SEQ ID NO: 2024590 - RNA, 19 nt, Artificial Sequence
  Description of Artificial Sequence: Synthetic oligonucleotide
  Sense strand starting at position 1857 of SEQ ID NO: 1881183
ugaacucauagugggacua

SEQ ID NO: 2024591 - RNA, 19 nt, Artificial Sequence
  Description of Artificial Sequence: Synthetic oligonucleotide
  Antisense strand to SEQ ID NO: 2024590
uagucccacuaugaguuca

SEQ ID NO: 2024592 - RNA, 19 nt, Artificial Sequence
  Description of Artificial Sequence: Synthetic oligonucleotide
  Sense strand starting at position 1858 of SEQ ID NO: 1881183
gaacucauagugggacuau

SEQ ID NO: 2024593 - RNA, 19 nt, Artificial Sequence
  Description of Artificial Sequence: Synthetic oligonucleotide
  Antisense strand to SEQ ID NO: 2024592
auagucccacuaugaguuc

SEQ ID NO: 2024594 - RNA, 19 nt, Artificial Sequence
  Description of Artificial Sequence: Synthetic oligonucleotide
  Sense strand starting at position 1891 of SEQ ID NO: 1881183
uugguacugaugggacuua

SEQ ID NO: 2024595 - RNA, 19 nt, Artificial Sequence
  Description of Artificial Sequence: Synthetic oligonucleotide
  Antisense strand to SEQ ID NO: 2024594
uaagucccaucaguaccaa

SEQ ID NO: 2024596 - RNA, 19 nt, Artificial Sequence
  Description of Artificial Sequence: Synthetic oligonucleotide
  Sense strand starting at position 2162 of SEQ ID NO: 1881183
aaaggagugucauuauccu

SEQ ID NO: 2024597 - RNA, 19 nt, Artificial Sequence
  Description of Artificial Sequence: Synthetic oligonucleotide
  Antisense strand to SEQ ID NO: 2024596
aggauaaugacacuccuuu

SEQ ID NO: 2024598 - RNA, 19 nt, Artificial Sequence
  Description of Artificial Sequence: Synthetic oligonucleotide
  Sense strand starting at position 2166 of SEQ ID NO: 1881183
gagugucauuauccuggaa

SEQ ID NO: 2024599 - RNA, 19 nt, Artificial Sequence
  Description of Artificial Sequence: Synthetic oligonucleotide
  Antisense strand to SEQ ID NO: 2024598
uuccaggauaaugacacuc

SEQ ID NO: 2024600 - RNA, 19 nt, Artificial Sequence
  Description of Artificial Sequence: Synthetic oligonucleotide
  Sense strand starting at position 2651 of SEQ ID NO: 1881183
ccauucucauguuugauau

SEQ ID NO: 2024601 - RNA, 19 nt, Artificial Sequence
  Description of Artificial Sequence: Synthetic oligonucleotide
  Antisense strand to SEQ ID NO: 2024600
auaucaaacaugagaaugg

SEQ ID NO: 2024602 - RNA, 19 nt, Artificial Sequence
  Description of Artificial Sequence: Synthetic oligonucleotide
  Sense strand starting at position 2700 of SEQ ID NO: 1881183
gucaguguaacggaauuau

SEQ ID NO: 2024603 - RNA, 19 nt, Artificial Sequence
  Description of Artificial Sequence: Synthetic oligonucleotide
  Antisense strand to SEQ ID NO: 2024602
auaauuccguuacacugac

SEQ ID NO: 2024604 - RNA, 19 nt, Artificial Sequence
  Description of Artificial Sequence: Synthetic oligonucleotide
  Sense strand starting at position 2704 of SEQ ID NO: 1881183
guguaacggaauuauauaa

SEQ ID NO: 2024605 - RNA, 19 nt, Artificial Sequence
  Description of Artificial Sequence: Synthetic oligonucleotide
  Antisense strand to SEQ ID NO: 2024604
uuauauaauuccguuacac

SEQ ID NO: 2024606 - RNA, 19 nt, Artificial Sequence
  Description of Artificial Sequence: Synthetic oligonucleotide
  Sense strand starting at position 2770 of SEQ ID NO: 1881183
aaauuauguucugugaaag

SEQ ID NO: 2024607 - RNA, 19 nt, Artificial Sequence
  Description of Artificial Sequence: Synthetic oligonucleotide
  Antisense strand to SEQ ID NO: 2024606
cuuucacagaacauaauuu

SEQ ID NO: 2024608 - RNA, 19 nt, Artificial Sequence
  Description of Artificial Sequence: Synthetic oligonucleotide
  Sense strand starting at position 2782 of SEQ ID NO: 1881183
gugaaaguugcauauauua

SEQ ID NO: 2024609 - RNA, 19 nt, Artificial Sequence
  Description of Artificial Sequence: Synthetic oligonucleotide
  Antisense strand to SEQ ID NO: 2024608
uaauauaugcaacuuucac

SEQ ID NO: 2024610 - RNA, 19 nt, Artificial Sequence
  Description of Artificial Sequence: Synthetic oligonucleotide
  Sense strand starting at position 3093 of SEQ ID NO: 1881183
aauugagagucccuggaau

SEQ ID NO: 2024611 - RNA, 19 nt, Artificial Sequence
  Description of Artificial Sequence: Synthetic oligonucleotide
  Antisense strand to SEQ ID NO: 2024610
auuccagggacucucaauu

SEQ ID NO: 2024612 - RNA, 19 nt, Artificial Sequence
  Description of Artificial Sequence: Synthetic oligonucleotide
  Sense strand starting at position 3095 of SEQ ID NO: 1881183
uugagagucccuggaauuc

SEQ ID NO: 2024613 - RNA, 19 nt, Artificial Sequence
  Description of Artificial Sequence: Synthetic oligonucleotide
  Antisense strand to SEQ ID NO: 2024612
gaauuccagggacucucaa

SEQ ID NO: 2024614 - RNA, 19 nt, Artificial Sequence
  Description of Artificial Sequence: Synthetic oligonucleotide
  Sense strand starting at position 3121 of SEQ ID NO: 1881183
uagugucuagcagauuaua

SEQ ID NO: 2024615 - RNA, 19 nt, Artificial Sequence
  Description of Artificial Sequence: Synthetic oligonucleotide
  Antisense strand to SEQ ID NO: 2024614
uauaaucugcuagacacua

SEQ ID NO: 2024616 - RNA, 19 nt, Artificial Sequence
  Description of Artificial Sequence: Synthetic oligonucleotide
  Sense strand starting at position 3124 of SEQ ID NO: 1881183
ugucuagcagauuauauau

SEQ ID NO: 2024617 - RNA, 19 nt, Artificial Sequence
  Description of Artificial Sequence: Synthetic oligonucleotide
  Antisense strand to SEQ ID NO: 2024616
auauauaaucugcuagaca

SEQ ID NO: 2024618 - RNA, 19 nt, Artificial Sequence
  Description of Artificial Sequence: Synthetic oligonucleotide
  Sense strand starting at position 3186 of SEQ ID NO: 1881183
gccaaaugggcguaacaga

SEQ ID NO: 2024619 - RNA, 19 nt, Artificial Sequence
  Description of Artificial Sequence: Synthetic oligonucleotide
  Antisense strand to SEQ ID NO: 2024618
ucuguuacgcccauuuggc

SEQ ID NO: 2024620 - RNA, 19 nt, Artificial Sequence
  Description of Artificial Sequence: Synthetic oligonucleotide
  Sense strand starting at position 3399 of SEQ ID NO: 1881183
guucuucuagguuauauaa

SEQ ID NO: 2024621 - RNA, 19 nt, Artificial Sequence
  Description of Artificial Sequence: Synthetic oligonucleotide
  Antisense strand to SEQ ID NO: 2024620
uuauauaaccuagaagaac

SEQ ID NO: 2024622 - RNA, 19 nt, Artificial Sequence
  Description of Artificial Sequence: Synthetic oligonucleotide
  Sense strand starting at position 3408 of SEQ ID NO: 1881183
gguuauauaaggugauccu

SEQ ID NO: 2024623 - RNA, 19 nt, Artificial Sequence
  Description of Artificial Sequence: Synthetic oligonucleotide
  Antisense strand to SEQ ID NO: 2024622
aggaucaccuuauauaacc

SEQ ID NO: 2024624 - RNA, 19 nt, Artificial Sequence
  Description of Artificial Sequence: Synthetic oligonucleotide
  Sense strand starting at position 3409 of SEQ ID NO: 1881183
guuauauaaggugauccua

SEQ ID NO: 2024625 - RNA, 19 nt, Artificial Sequence
  Description of Artificial Sequence: Synthetic oligonucleotide
  Antisense strand to SEQ ID NO: 2024624
uaggaucaccuuauauaac

SEQ ID NO: 2024626 - RNA, 19 nt, Artificial Sequence
  Description of Artificial Sequence: Synthetic oligonucleotide
  Sense strand starting at position 3474 of SEQ ID NO: 1881183
ucugacaacugauuagcau

SEQ ID NO: 2024627 - RNA, 19 nt, Artificial Sequence
  Description of Artificial Sequence: Synthetic oligonucleotide
  Antisense strand to SEQ ID NO: 2024626
augcuaaucaguugucaga

SEQ ID NO: 2024628 - RNA, 19 nt, Artificial Sequence
  Description of Artificial Sequence: Synthetic oligonucleotide
  Sense strand starting at position 3475 of SEQ ID NO: 1881183
cugacaacugauuagcauu

SEQ ID NO: 2024629 - RNA, 19 nt, Artificial Sequence
  Description of Artificial Sequence: Synthetic oligonucleotide
  Antisense strand to SEQ ID NO: 2024628
aaugcuaaucaguugucag

SEQ ID NO: 2024630 - RNA, 19 nt, Artificial Sequence
  Description of Artificial Sequence: Synthetic oligonucleotide
  Sense strand starting at position 3595 of SEQ ID NO: 1881183
uuaaauaauugguugccaa

SEQ ID NO: 2024631 - RNA, 19 nt, Artificial Sequence
  Description of Artificial Sequence: Synthetic oligonucleotide
  Antisense strand to SEQ ID NO: 2024630
uuggcaaccaauuauuuaa

SEQ ID NO: 2024632 - RNA, 19 nt, Artificial Sequence
  Description of Artificial Sequence: Synthetic oligonucleotide
  Sense strand starting at position 3644 of SEQ ID NO: 1881183
cugauuaccgcagagguaa

SEQ ID NO: 2024633 - RNA, 19 nt, Artificial Sequence
  Description of Artificial Sequence: Synthetic oligonucleotide
  Antisense strand to SEQ ID NO: 2024632
uuaccucugcgguaaucag

SEQ ID NO: 2024634 - RNA, 19 nt, Artificial Sequence
  Description of Artificial Sequence: Synthetic oligonucleotide
  Sense strand starting at position 3656 of SEQ ID NO: 1881183
gagguaaagcugugaccaa

SEQ ID NO: 2024635 - RNA, 19 nt, Artificial Sequence
  Description of Artificial Sequence: Synthetic oligonucleotide
  Antisense strand to SEQ ID NO: 2024634
uuggucacagcuuuaccuc

SEQ ID NO: 2024636 - RNA, 19 nt, Artificial Sequence
  Description of Artificial Sequence: Synthetic oligonucleotide
  Sense strand starting at position 3712 of SEQ ID NO: 1881183
cugucaauuuagucugcua

SEQ ID NO: 2024637 - RNA, 19 nt, Artificial Sequence
  Description of Artificial Sequence: Synthetic oligonucleotide
  Antisense strand to SEQ ID NO: 2024636
uagcagacuaaauugacag

SEQ ID NO: 2024638 - RNA, 19 nt, Artificial Sequence
  Description of Artificial Sequence: Synthetic oligonucleotide
  Sense strand starting at position 3714 of SEQ ID NO: 1881183
gucaauuuagucugcuaaa

SEQ ID NO: 2024639 - RNA, 19 nt, Artificial Sequence
  Description of Artificial Sequence: Synthetic oligonucleotide
  Antisense strand to SEQ ID NO: 2024638
uuuagcagacuaaauugac

SEQ ID NO: 2024640 - RNA, 19 nt, Artificial Sequence
  Description of Artificial Sequence: Synthetic oligonucleotide
  Sense strand starting at position 3799 of SEQ ID NO: 1881183
auuaucagagaguguugau

SEQ ID NO: 2024641 - RNA, 19 nt, Artificial Sequence
  Description of Artificial Sequence: Synthetic oligonucleotide
  Antisense strand to SEQ ID NO: 2024640
aucaacacucucugauaau

SEQ ID NO: 2024642 - RNA, 19 nt, Artificial Sequence
  Description of Artificial Sequence: Synthetic oligonucleotide
  Sense strand starting at position 3948 of SEQ ID NO: 1881183
auuaauugccguuagaaug

SEQ ID NO: 2024643 - RNA, 19 nt, Artificial Sequence
  Description of Artificial Sequence: Synthetic oligonucleotide
  Antisense strand to SEQ ID NO: 2024642
cauucuaacggcaauuaau

SEQ ID NO: 2024644 - RNA, 19 nt, Artificial Sequence
  Description of Artificial Sequence: Synthetic oligonucleotide
  Sense strand starting at position 3954 of SEQ ID NO: 1881183
ugccguuagaaugaugauc

SEQ ID NO: 2024645 - RNA, 19 nt, Artificial Sequence
  Description of Artificial Sequence: Synthetic oligonucleotide
  Antisense strand to SEQ ID NO: 2024644
gaucaucauucuaacggca

SEQ ID NO: 2024646 - RNA, 19 nt, Artificial Sequence
  Description of Artificial Sequence: Synthetic oligonucleotide
  Sense strand starting at position 14 of SEQ ID NO: 1881184
cuuauacaguuaucugaag

SEQ ID NO: 2024647 - RNA, 19 nt, Artificial Sequence
  Description of Artificial Sequence: Synthetic oligonucleotide
  Antisense strand to SEQ ID NO: 2024646
cuucagauaacuguauaag

SEQ ID NO: 2024648 - RNA, 19 nt, Artificial Sequence
  Description of Artificial Sequence: Synthetic oligonucleotide
  Sense strand starting at position 15 of SEQ ID NO: 1881184
uuauacaguuaucugaaga

SEQ ID NO: 2024649 - RNA, 19 nt, Artificial Sequence
  Description of Artificial Sequence: Synthetic oligonucleotide
  Antisense strand to SEQ ID NO: 2024648
ucuucagauaacuguauaa

SEQ ID NO: 2024650 - RNA, 19 nt, Artificial Sequence
  Description of Artificial Sequence: Synthetic oligonucleotide
  Sense strand starting at position 34 of SEQ ID NO: 1881184
ggcucuuuccucuaugaga

SEQ ID NO: 2024651 - RNA, 19 nt, Artificial Sequence
  Description of Artificial Sequence: Synthetic oligonucleotide
  Antisense strand to SEQ ID NO: 2024650
ucucauagaggaaagagcc

SEQ ID NO: 2024652 - RNA, 19 nt, Artificial Sequence
  Description of Artificial Sequence: Synthetic oligonucleotide
  Sense strand starting at position 219 of SEQ ID NO: 1881184
agaagugauucucuguaag

SEQ ID NO: 2024653 - RNA, 19 nt, Artificial Sequence
  Description of Artificial Sequence: Synthetic oligonucleotide
  Antisense strand to SEQ ID NO: 2024652
cuuacagagaaucacuucu

SEQ ID NO: 2024654 - RNA, 19 nt, Artificial Sequence
  Description of Artificial Sequence: Synthetic oligonucleotide
  Sense strand starting at position 397 of SEQ ID NO: 1881184
ggacaauacuguuuaugau

SEQ ID NO: 2024655 - RNA, 19 nt, Artificial Sequence
  Description of Artificial Sequence: Synthetic oligonucleotide
  Antisense strand to SEQ ID NO: 2024654
aucauaaacaguauugucc

SEQ ID NO: 2024656 - RNA, 19 nt, Artificial Sequence
  Description of Artificial Sequence: Synthetic oligonucleotide
  Sense strand starting at position 501 of SEQ ID NO: 1881184
cuauauuuagcuugaugcu

SEQ ID NO: 2024657 - RNA, 19 nt, Artificial Sequence
  Description of Artificial Sequence: Synthetic oligonucleotide
  Antisense strand to SEQ ID NO: 2024656
agcaucaagcuaaauauag

SEQ ID NO: 2024658 - RNA, 19 nt, Artificial Sequence
  Description of Artificial Sequence: Synthetic oligonucleotide
  Sense strand starting at position 550 of SEQ ID NO: 1881184
ucauuaucuuaccuuggga

SEQ ID NO: 2024659 - RNA, 19 nt, Artificial Sequence
  Description of Artificial Sequence: Synthetic oligonucleotide
  Antisense strand to SEQ ID NO: 2024658
ucccaagguaagauaauga

SEQ ID NO: 2024660 - RNA, 19 nt, Artificial Sequence
  Description of Artificial Sequence: Synthetic oligonucleotide
  Sense strand starting at position 616 of SEQ ID NO: 1881184
cagguugccauggaaugua

SEQ ID NO: 2024661 - RNA, 19 nt, Artificial Sequence
  Description of Artificial Sequence: Synthetic oligonucleotide
  Antisense strand to SEQ ID NO: 2024660
uacauuccauggcaaccug

SEQ ID NO: 2024662 - RNA, 19 nt, Artificial Sequence
  Description of Artificial Sequence: Synthetic oligonucleotide
  Sense strand starting at position 643 of SEQ ID NO: 1881184
cagugaggucucuaacuga

SEQ ID NO: 2024663 - RNA, 19 nt, Artificial Sequence
  Description of Artificial Sequence: Synthetic oligonucleotide
  Antisense strand to SEQ ID NO: 2024662
ucaguuagagaccucacug

SEQ ID NO: 2024664 - RNA, 19 nt, Artificial Sequence
  Description of Artificial Sequence: Synthetic oligonucleotide
  Sense strand starting at position 646 of SEQ ID NO: 1881184
ugaggucucuaacugaaug

SEQ ID NO: 2024665 - RNA, 19 nt, Artificial Sequence
  Description of Artificial Sequence: Synthetic oligonucleotide
  Antisense strand to SEQ ID NO: 2024664
cauucaguuagagaccuca

SEQ ID NO: 2024666 - RNA, 19 nt, Artificial Sequence
  Description of Artificial Sequence: Synthetic oligonucleotide
  Sense strand starting at position 889 of SEQ ID NO: 1881184
aguuuauggguuuagugga

SEQ ID NO: 2024667 - RNA, 19 nt, Artificial Sequence
  Description of Artificial Sequence: Synthetic oligonucleotide
  Antisense strand to SEQ ID NO: 2024666
uccacuaaacccauaaacu

SEQ ID NO: 2024668 - RNA, 19 nt, Artificial Sequence
  Description of Artificial Sequence: Synthetic oligonucleotide
  Sense strand starting at position 1291 of SEQ ID NO: 1881184
uuugaaacccuuuaguguu

SEQ ID NO: 2024669 - RNA, 19 nt, Artificial Sequence
  Description of Artificial Sequence: Synthetic oligonucleotide
  Antisense strand to SEQ ID NO: 2024668
aacacuaaaggguuucaaa

SEQ ID NO: 2024670 - RNA, 19 nt, Artificial Sequence
  Description of Artificial Sequence: Synthetic oligonucleotide
  Sense strand starting at position 1405 of SEQ ID NO: 1881184
agauauagguuucucuaau

SEQ ID NO: 2024671 - RNA, 19 nt, Artificial Sequence
  Description of Artificial Sequence: Synthetic oligonucleotide
  Antisense strand to SEQ ID NO: 2024670
auuagagaaaccuauaucu

SEQ ID NO: 2024672 - RNA, 19 nt, Artificial Sequence
  Description of Artificial Sequence: Synthetic oligonucleotide
  Sense strand starting at position 1636 of SEQ ID NO: 1881184
acauacauguaucuguaua

SEQ ID NO: 2024673 - RNA, 19 nt, Artificial Sequence
  Description of Artificial Sequence: Synthetic oligonucleotide
  Antisense strand to SEQ ID NO: 2024672
uauacagauacauguaugu

SEQ ID NO: 2024674 - RNA, 19 nt, Artificial Sequence
  Description of Artificial Sequence: Synthetic oligonucleotide
  Sense strand starting at position 1650 of SEQ ID NO: 1881184
guauacauuccauaugcau

SEQ ID NO: 2024675 - RNA, 19 nt, Artificial Sequence
  Description of Artificial Sequence: Synthetic oligonucleotide
  Antisense strand to SEQ ID NO: 2024674
augcauauggaauguauac

SEQ ID NO: 2024676 - RNA, 19 nt, Artificial Sequence
  Description of Artificial Sequence: Synthetic oligonucleotide
  Sense strand starting at position 1699 of SEQ ID NO: 1881184
ggagcaggcaucuaugagu

SEQ ID NO: 2024677 - RNA, 19 nt, Artificial Sequence
  Description of Artificial Sequence: Synthetic oligonucleotide
  Antisense strand to SEQ ID NO: 2024676
acucauagaugccugcucc

SEQ ID NO: 2024678 - RNA, 19 nt, Artificial Sequence
  Description of Artificial Sequence: Synthetic oligonucleotide
  Sense strand starting at position 1815 of SEQ ID NO: 1881184
caguuuggucagcaggaau

SEQ ID NO: 2024679 - RNA, 19 nt, Artificial Sequence
  Description of Artificial Sequence: Synthetic oligonucleotide
  Antisense strand to SEQ ID NO: 2024678
auuccugcugaccaaacug

SEQ ID NO: 2024680 - RNA, 19 nt, Artificial Sequence
  Description of Artificial Sequence: Synthetic oligonucleotide
  Sense strand starting at position 1905 of SEQ ID NO: 1881184
ccauuaggagugugacaca

SEQ ID NO: 2024681 - RNA, 19 nt, Artificial Sequence
  Description of Artificial Sequence: Synthetic oligonucleotide
  Antisense strand to SEQ ID NO: 2024680
ugugucacacuccuaaugg

SEQ ID NO: 2024682 - RNA, 19 nt, Artificial Sequence
  Description of Artificial Sequence: Synthetic oligonucleotide
  Sense strand starting at position 2027 of SEQ ID NO: 1881184
gcauguggccaucaugaaa

SEQ ID NO: 2024683 - RNA, 19 nt, Artificial Sequence
  Description of Artificial Sequence: Synthetic oligonucleotide
  Antisense strand to SEQ ID NO: 2024682
uuucaugauggccacaugc

SEQ ID NO: 2024684 - RNA, 19 nt, Artificial Sequence
  Description of Artificial Sequence: Synthetic oligonucleotide
  Sense strand starting at position 2080 of SEQ ID NO: 1881184
cuggauugucaauagccuu

SEQ ID NO: 2024685 - RNA, 19 nt, Artificial Sequence
  Description of Artificial Sequence: Synthetic oligonucleotide
  Antisense strand to SEQ ID NO: 2024684
aaggcuauugacaauccag

SEQ ID NO: 2024686 - RNA, 19 nt, Artificial Sequence
  Description of Artificial Sequence: Synthetic oligonucleotide
  Sense strand starting at position 2283 of SEQ ID NO: 1881184
uauggagacuguuuaacau

SEQ ID NO: 2024687 - RNA, 19 nt, Artificial Sequence
  Description of Artificial Sequence: Synthetic oligonucleotide
  Antisense strand to SEQ ID NO: 2024686
auguuaaacagucuccaua

SEQ ID NO: 2024688 - RNA, 19 nt, Artificial Sequence
  Description of Artificial Sequence: Synthetic oligonucleotide
  Sense strand starting at position 2308 of SEQ ID NO: 1881184
cagggaugcuagucugaca

SEQ ID NO: 2024689 - RNA, 19 nt, Artificial Sequence
  Description of Artificial Sequence: Synthetic oligonucleotide
  Antisense strand to SEQ ID NO: 2024688
ugucagacuagcaucccug

SEQ ID NO: 2024690 - RNA, 19 nt, Artificial Sequence
  Description of Artificial Sequence: Synthetic oligonucleotide
  Sense strand starting at position 2385 of SEQ ID NO: 1881184
uaucuucucuggguagaga

SEQ ID NO: 2024691 - RNA, 19 nt, Artificial Sequence
  Description of Artificial Sequence: Synthetic oligonucleotide
  Antisense strand to SEQ ID NO: 2024690
ucucuacccagagaagaua

SEQ ID NO: 2024692 - RNA, 19 nt, Artificial Sequence
  Description of Artificial Sequence: Synthetic oligonucleotide
  Sense strand starting at position 2785 of SEQ ID NO: 1881184
cuacuucucccguaaagag

SEQ ID NO: 2024693 - RNA, 19 nt, Artificial Sequence
  Description of Artificial Sequence: Synthetic oligonucleotide
  Antisense strand to SEQ ID NO: 2024692
cucuuuacgggagaaguag

SEQ ID NO: 2024694 - RNA, 19 nt, Artificial Sequence
  Description of Artificial Sequence: Synthetic oligonucleotide
  Sense strand starting at position 2861 of SEQ ID NO: 1881184
cgccaugaggcagaaauga

SEQ ID NO: 2024695 - RNA, 19 nt, Artificial Sequence
  Description of Artificial Sequence: Synthetic oligonucleotide
  Antisense strand to SEQ ID NO: 2024694
ucauuucugccucauggcg

SEQ ID NO: 2024696 - RNA, 19 nt, Artificial Sequence
  Description of Artificial Sequence: Synthetic oligonucleotide
  Sense strand starting at position 2871 of SEQ ID NO: 1881184
cagaaaugaugucugaguc

SEQ ID NO: 2024697 - RNA, 19 nt, Artificial Sequence
  Description of Artificial Sequence: Synthetic oligonucleotide
  Antisense strand to SEQ ID NO: 2024696
gacucagacaucauuucug

SEQ ID NO: 2024698 - RNA, 19 nt, Artificial Sequence
  Description of Artificial Sequence: Synthetic oligonucleotide
  Sense strand starting at position 2872 of SEQ ID NO: 1881184
agaaaugaugucugagucu

SEQ ID NO: 2024699 - RNA, 19 nt, Artificial Sequence
  Description of Artificial Sequence: Synthetic oligonucleotide
  Antisense strand to SEQ ID NO: 2024698
agacucagacaucauuucu

SEQ ID NO: 2024700 - RNA, 19 nt, Artificial Sequence
  Description of Artificial Sequence: Synthetic oligonucleotide
  Sense strand starting at position 3091 of SEQ ID NO: 1881184
agaugagccaucugugaua

SEQ ID NO: 2024701 - RNA, 19 nt, Artificial Sequence
  Description of Artificial Sequence: Synthetic oligonucleotide
  Antisense strand to SEQ ID NO: 2024700
uaucacagauggcucaucu

SEQ ID NO: 2024702 - RNA, 19 nt, Artificial Sequence
  Description of Artificial Sequence: Synthetic oligonucleotide
  Sense strand starting at position 3093 of SEQ ID NO: 1881184
augagccaucugugauaaa

SEQ ID NO: 2024703 - RNA, 19 nt, Artificial Sequence
  Description of Artificial Sequence: Synthetic oligonucleotide
  Antisense strand to SEQ ID NO: 2024702
uuuaucacagauggcucau

SEQ ID NO: 2024704 - RNA, 19 nt, Artificial Sequence
  Description of Artificial Sequence: Synthetic oligonucleotide
  Sense strand starting at position 3129 of SEQ ID NO: 1881184
ccuagucgugaucauacaa

SEQ ID NO: 2024705 - RNA, 19 nt, Artificial Sequence
  Description of Artificial Sequence: Synthetic oligonucleotide
  Antisense strand to SEQ ID NO: 2024704
uuguaugaucacgacuagg

SEQ ID NO: 2024706 - RNA, 19 nt, Artificial Sequence
  Description of Artificial Sequence: Synthetic oligonucleotide
  Sense strand starting at position 3198 of SEQ ID NO: 1881184
gugaaacaguuaucaucaa

SEQ ID NO: 2024707 - RNA, 19 nt, Artificial Sequence
  Description of Artificial Sequence: Synthetic oligonucleotide
  Antisense strand to SEQ ID NO: 2024706
uugaugauaacuguuucac

SEQ ID NO: 2024708 - RNA, 19 nt, Artificial Sequence
  Description of Artificial Sequence: Synthetic oligonucleotide
  Sense strand starting at position 3335 of SEQ ID NO: 1881184
gaaauaugguagucuauca

SEQ ID NO: 2024709 - RNA, 19 nt, Artificial Sequence
  Description of Artificial Sequence: Synthetic oligonucleotide
  Antisense strand to SEQ ID NO: 2024708
ugauagacuaccauauuuc

SEQ ID NO: 2024710 - RNA, 19 nt, Artificial Sequence
  Description of Artificial Sequence: Synthetic oligonucleotide
  Sense strand starting at position 3363 of SEQ ID NO: 1881184
gcagaaugauugguacaca

SEQ ID NO: 2024711 - RNA, 19 nt, Artificial Sequence
  Description of Artificial Sequence: Synthetic oligonucleotide
  Antisense strand to SEQ ID NO: 2024710
uguguaccaaucauucugc

SEQ ID NO: 2024712 - RNA, 19 nt, Artificial Sequence
  Description of Artificial Sequence: Synthetic oligonucleotide
  Sense strand starting at position 3455 of SEQ ID NO: 1881184
cuuucuuaugacugagaau

SEQ ID NO: 2024713 - RNA, 19 nt, Artificial Sequence
  Description of Artificial Sequence: Synthetic oligonucleotide
  Antisense strand to SEQ ID NO: 2024712
auucucagucauaagaaag

SEQ ID NO: 2024714 - RNA, 19 nt, Artificial Sequence
  Description of Artificial Sequence: Synthetic oligonucleotide
  Sense strand starting at position 3706 of SEQ ID NO: 1881184
agucaauuauuugagaacu

SEQ ID NO: 2024715 - RNA, 19 nt, Artificial Sequence
  Description of Artificial Sequence: Synthetic oligonucleotide
  Antisense strand to SEQ ID NO: 2024714
aguucucaaauaauugacu

SEQ ID NO: 2024716 - RNA, 19 nt, Artificial Sequence
  Description of Artificial Sequence: Synthetic oligonucleotide
  Sense strand starting at position 3799 of SEQ ID NO: 1881184
guugaaacauauguaacau

SEQ ID NO: 2024717 - RNA, 19 nt, Artificial Sequence
  Description of Artificial Sequence: Synthetic oligonucleotide
  Antisense strand to SEQ ID NO: 2024716
auguuacauauguuucaac

SEQ ID NO: 2024718 - RNA, 19 nt, Artificial Sequence
  Description of Artificial Sequence: Synthetic oligonucleotide
  Sense strand starting at position 3852 of SEQ ID NO: 1881184
auaacuuaaucugugugaa

SEQ ID NO: 2024719 - RNA, 19 nt, Artificial Sequence
  Description of Artificial Sequence: Synthetic oligonucleotide
  Antisense strand to SEQ ID NO: 2024718
uucacacagauuaaguuau

SEQ ID NO: 2024720 - RNA, 19 nt, Artificial Sequence
  Description of Artificial Sequence: Synthetic oligonucleotide
  Sense strand starting at position 3870 of SEQ ID NO: 1881184
accuguagcucugcaauuu

SEQ ID NO: 2024721 - RNA, 19 nt, Artificial Sequence
  Description of Artificial Sequence: Synthetic oligonucleotide
  Antisense strand to SEQ ID NO: 2024720
aaauugcagagcuacaggu

SEQ ID NO: 2024722 - RNA, 19 nt, Artificial Sequence
  Description of Artificial Sequence: Synthetic oligonucleotide
  Sense strand starting at position 3947 of SEQ ID NO: 1881184
gaggcugaaugagucuaaa

SEQ ID NO: 2024723 - RNA, 19 nt, Artificial Sequence
  Description of Artificial Sequence: Synthetic oligonucleotide
  Antisense strand to SEQ ID NO: 2024722
uuuagacucauucagccuc

SEQ ID NO: 2024724 - RNA, 19 nt, Artificial Sequence
  Description of Artificial Sequence: Synthetic oligonucleotide
  Sense strand starting at position 3950 of SEQ ID NO: 1881184
gcugaaugagucuaaagca

SEQ ID NO: 2024725 - RNA, 19 nt, Artificial Sequence
  Description of Artificial Sequence: Synthetic oligonucleotide
  Antisense strand to SEQ ID NO: 2024724
ugcuuuagacucauucagc

SEQ ID NO: 2024726 - RNA, 19 nt, Artificial Sequence
  Description of Artificial Sequence: Synthetic oligonucleotide
  Sense strand starting at position 5 of SEQ ID NO: 1881185
cuuaauggugugcauugaa

SEQ ID NO: 2024727 - RNA, 19 nt, Artificial Sequence
  Description of Artificial Sequence: Synthetic oligonucleotide
  Antisense strand to SEQ ID NO: 2024726
uucaaugcacaccauuaag

SEQ ID NO: 2024728 - RNA, 19 nt, Artificial Sequence
  Description of Artificial Sequence: Synthetic oligonucleotide
  Sense strand starting at position 8 of SEQ ID NO: 1881185
aauggugugcauugaagau

SEQ ID NO: 2024729 - RNA, 19 nt, Artificial Sequence
  Description of Artificial Sequence: Synthetic oligonucleotide
  Antisense strand to SEQ ID NO: 2024728
aucuucaaugcacaccauu

SEQ ID NO: 2024730 - RNA, 19 nt, Artificial Sequence
  Description of Artificial Sequence: Synthetic oligonucleotide
  Sense strand starting at position 212 of SEQ ID NO: 1881185
ccgccagacaaugauguaa

SEQ ID NO: 2024731 - RNA, 19 nt, Artificial Sequence
  Description of Artificial Sequence: Synthetic oligonucleotide
  Antisense strand to SEQ ID NO: 2024730
uuacaucauugucuggcgg

SEQ ID NO: 2024732 - RNA, 19 nt, Artificial Sequence
  Description of Artificial Sequence: Synthetic oligonucleotide
  Sense strand starting at position 223 of SEQ ID NO: 1881185
ugauguaaacaacgucuaa

SEQ ID NO: 2024733 - RNA, 19 nt, Artificial Sequence
  Description of Artificial Sequence: Synthetic oligonucleotide
  Antisense strand to SEQ ID NO: 2024732
uuagacguuguuuacauca

SEQ ID NO: 2024734 - RNA, 19 nt, Artificial Sequence
  Description of Artificial Sequence: Synthetic oligonucleotide
  Sense strand starting at position 391 of SEQ ID NO: 1881185
uuuguugucaaggguaaca

SEQ ID NO: 2024735 - RNA, 19 nt, Artificial Sequence
  Description of Artificial Sequence: Synthetic oligonucleotide
  Antisense strand to SEQ ID NO: 2024734
uguuacccuugacaacaaa

SEQ ID NO: 2024736 - RNA, 19 nt, Artificial Sequence
  Description of Artificial Sequence: Synthetic oligonucleotide
  Sense strand starting at position 393 of SEQ ID NO: 1881185
uguugucaaggguaacaga

SEQ ID NO: 2024737 - RNA, 19 nt, Artificial Sequence
  Description of Artificial Sequence: Synthetic oligonucleotide
  Antisense strand to SEQ ID NO: 2024736
ucuguuacccuugacaaca

SEQ ID NO: 2024738 - RNA, 19 nt, Artificial Sequence
  Description of Artificial Sequence: Synthetic oligonucleotide
  Sense strand starting at position 482 of SEQ ID NO: 1881185
gugucucauguacauaauc

SEQ ID NO: 2024739 - RNA, 19 nt, Artificial Sequence
  Description of Artificial Sequence: Synthetic oligonucleotide
  Antisense strand to SEQ ID NO: 2024738
gauuauguacaugagacac

SEQ ID NO: 2024740 - RNA, 19 nt, Artificial Sequence
  Description of Artificial Sequence: Synthetic oligonucleotide
  Sense strand starting at position 532 of SEQ ID NO: 1881185
guauuauuaucaucacgau

SEQ ID NO: 2024741 - RNA, 19 nt, Artificial Sequence
  Description of Artificial Sequence: Synthetic oligonucleotide
  Antisense strand to SEQ ID NO: 2024740
aucgugaugauaauaauac

SEQ ID NO: 2024742 - RNA, 19 nt, Artificial Sequence
  Description of Artificial Sequence: Synthetic oligonucleotide
  Sense strand starting at position 575 of SEQ ID NO: 1881185
uggagaugucaggguaauu

SEQ ID NO: 2024743 - RNA, 19 nt, Artificial Sequence
  Description of Artificial Sequence: Synthetic oligonucleotide
  Antisense strand to SEQ ID NO: 2024742
aauuacccugacaucucca

SEQ ID NO: 2024744 - RNA, 19 nt, Artificial Sequence
  Description of Artificial Sequence: Synthetic oligonucleotide
  Sense strand starting at position 741 of SEQ ID NO: 1881185
cccuaauaugguggugaau

SEQ ID NO: 2024745 - RNA, 19 nt, Artificial Sequence
  Description of Artificial Sequence: Synthetic oligonucleotide
  Antisense strand to SEQ ID NO: 2024744
auucaccaccauauuaggg

SEQ ID NO: 2024746 - RNA, 19 nt, Artificial Sequence
  Description of Artificial Sequence: Synthetic oligonucleotide
  Sense strand starting at position 752 of SEQ ID NO: 1881185
uggugaauauguuuaguua

SEQ ID NO: 2024747 - RNA, 19 nt, Artificial Sequence
  Description of Artificial Sequence: Synthetic oligonucleotide
  Antisense strand to SEQ ID NO: 2024746
uaacuaaacauauucacca

SEQ ID NO: 2024748 - RNA, 19 nt, Artificial Sequence
  Description of Artificial Sequence: Synthetic oligonucleotide
  Sense strand starting at position 753 of SEQ ID NO: 1881185
ggugaauauguuuaguuac

SEQ ID NO: 2024749 - RNA, 19 nt, Artificial Sequence
  Description of Artificial Sequence: Synthetic oligonucleotide
  Antisense strand to SEQ ID NO: 2024748
guaacuaaacauauucacc

SEQ ID NO: 2024750 - RNA, 19 nt, Artificial Sequence
  Description of Artificial Sequence: Synthetic oligonucleotide
  Sense strand starting at position 791 of SEQ ID NO: 1881185
aaugaaagauuagaaggaa

SEQ ID NO: 2024751 - RNA, 19 nt, Artificial Sequence
  Description of Artificial Sequence: Synthetic oligonucleotide
  Antisense strand to SEQ ID NO: 2024750
uuccuucuaaucuuucauu

SEQ ID NO: 2024752 - RNA, 19 nt, Artificial Sequence
  Description of Artificial Sequence: Synthetic oligonucleotide
  Sense strand starting at position 951 of SEQ ID NO: 1881185
aguccugaaucugucucaa

SEQ ID NO: 2024753 - RNA, 19 nt, Artificial Sequence
  Description of Artificial Sequence: Synthetic oligonucleotide
  Antisense strand to SEQ ID NO: 2024752
uugagacagauucaggacu

SEQ ID NO: 2024754 - RNA, 19 nt, Artificial Sequence
  Description of Artificial Sequence: Synthetic oligonucleotide
  Sense strand starting at position 1175 of SEQ ID NO: 1881185
agaauaauauuugggcaua

SEQ ID NO: 2024755 - RNA, 19 nt, Artificial Sequence
  Description of Artificial Sequence: Synthetic oligonucleotide
  Antisense strand to SEQ ID NO: 2024754
uaugcccaaauauuauucu

SEQ ID NO: 2024756 - RNA, 19 nt, Artificial Sequence
  Description of Artificial Sequence: Synthetic oligonucleotide
  Sense strand starting at position 1254 of SEQ ID NO: 1881185
ggaguuggguggagagauu

SEQ ID NO: 2024757 - RNA, 19 nt, Artificial Sequence
  Description of Artificial Sequence: Synthetic oligonucleotide
  Antisense strand to SEQ ID NO: 2024756
aaucucuccacccaacucc

SEQ ID NO: 2024758 - RNA, 19 nt, Artificial Sequence
  Description of Artificial Sequence: Synthetic oligonucleotide
  Sense strand starting at position 1359 of SEQ ID NO: 1881185
ucugcuagaugucuagaua

SEQ ID NO: 2024759 - RNA, 19 nt, Artificial Sequence
  Description of Artificial Sequence: Synthetic oligonucleotide
  Antisense strand to SEQ ID NO: 2024758
uaucuagacaucuagcaga

SEQ ID NO: 2024760 - RNA, 19 nt, Artificial Sequence
  Description of Artificial Sequence: Synthetic oligonucleotide
  Sense strand starting at position 1360 of SEQ ID NO: 1881185
cugcuagaugucuagauau

SEQ ID NO: 2024761 - RNA, 19 nt, Artificial Sequence
  Description of Artificial Sequence: Synthetic oligonucleotide
  Antisense strand to SEQ ID NO: 2024760
auaucuagacaucuagcag

SEQ ID NO: 2024762 - RNA, 19 nt, Artificial Sequence
  Description of Artificial Sequence: Synthetic oligonucleotide
  Sense strand starting at position 1362 of SEQ ID NO: 1881185
gcuagaugucuagauaugc

SEQ ID NO: 2024763 - RNA, 19 nt, Artificial Sequence
  Description of Artificial Sequence: Synthetic oligonucleotide
  Antisense strand to SEQ ID NO: 2024762
gcauaucuagacaucuagc

SEQ ID NO: 2024764 - RNA, 19 nt, Artificial Sequence
  Description of Artificial Sequence: Synthetic oligonucleotide
  Sense strand starting at position 1370 of SEQ ID NO: 1881185
ucuagauaugcuggagauc

SEQ ID NO: 2024765 - RNA, 19 nt, Artificial Sequence
  Description of Artificial Sequence: Synthetic oligonucleotide
  Antisense strand to SEQ ID NO: 2024764
gaucuccagcauaucuaga

SEQ ID NO: 2024766 - RNA, 19 nt, Artificial Sequence
  Description of Artificial Sequence: Synthetic oligonucleotide
  Sense strand starting at position 1577 of SEQ ID NO: 1881185
agaauuuacuccgagagca

SEQ ID NO: 2024767 - RNA, 19 nt, Artificial Sequence
  Description of Artificial Sequence: Synthetic oligonucleotide
  Antisense strand to SEQ ID NO: 2024766
ugcucucggaguaaauucu

SEQ ID NO: 2024768 - RNA, 19 nt, Artificial Sequence
  Description of Artificial Sequence: Synthetic oligonucleotide
  Sense strand starting at position 1582 of SEQ ID NO: 1881185
uuacuccgagagcauuaaa

SEQ ID NO: 2024769 - RNA, 19 nt, Artificial Sequence
  Description of Artificial Sequence: Synthetic oligonucleotide
  Antisense strand to SEQ ID NO: 2024768
uuuaaugcucucggaguaa

SEQ ID NO: 2024770 - RNA, 19 nt, Artificial Sequence
  Description of Artificial Sequence: Synthetic oligonucleotide
  Sense strand starting at position 1681 of SEQ ID NO: 1881185
uuagaaaguccauacugua

SEQ ID NO: 2024771 - RNA, 19 nt, Artificial Sequence
  Description of Artificial Sequence: Synthetic oligonucleotide
  Antisense strand to SEQ ID NO: 2024770
uacaguauggacuuucuaa

SEQ ID NO: 2024772 - RNA, 19 nt, Artificial Sequence
  Description of Artificial Sequence: Synthetic oligonucleotide
  Sense strand starting at position 1691 of SEQ ID NO: 1881185
cauacuguacugcagagau

SEQ ID NO: 2024773 - RNA, 19 nt, Artificial Sequence
  Description of Artificial Sequence: Synthetic oligonucleotide
  Antisense strand to SEQ ID NO: 2024772
aucucugcaguacaguaug

SEQ ID NO: 2024774 - RNA, 19 nt, Artificial Sequence
  Description of Artificial Sequence: Synthetic oligonucleotide
  Sense strand starting at position 1812 of SEQ ID NO: 1881185
aagucaacacucgagguuu

SEQ ID NO: 2024775 - RNA, 19 nt, Artificial Sequence
  Description of Artificial Sequence: Synthetic oligonucleotide
  Antisense strand to SEQ ID NO: 2024774
aaaccucgaguguugacuu

SEQ ID NO: 2024776 - RNA, 19 nt, Artificial Sequence
  Description of Artificial Sequence: Synthetic oligonucleotide
  Sense strand starting at position 1814 of SEQ ID NO: 1881185
gucaacacucgagguuuga

SEQ ID NO: 2024777 - RNA, 19 nt, Artificial Sequence
  Description of Artificial Sequence: Synthetic oligonucleotide
  Antisense strand to SEQ ID NO: 2024776
ucaaaccucgaguguugac

SEQ ID NO: 2024778 - RNA, 19 nt, Artificial Sequence
  Description of Artificial Sequence: Synthetic oligonucleotide
  Sense strand starting at position 1824 of SEQ ID NO: 1881185
gagguuugacucuggucaa

SEQ ID NO: 2024779 - RNA, 19 nt, Artificial Sequence
  Description of Artificial Sequence: Synthetic oligonucleotide
  Antisense strand to SEQ ID NO: 2024778
uugaccagagucaaaccuc

SEQ ID NO: 2024780 - RNA, 19 nt, Artificial Sequence
  Description of Artificial Sequence: Synthetic oligonucleotide
  Sense strand starting at position 1827 of SEQ ID NO: 1881185
guuugacucuggucaaacu

SEQ ID NO: 2024781 - RNA, 19 nt, Artificial Sequence
  Description of Artificial Sequence: Synthetic oligonucleotide
  Antisense strand to SEQ ID NO: 2024780
aguuugaccagagucaaac

SEQ ID NO: 2024782 - RNA, 19 nt, Artificial Sequence
  Description of Artificial Sequence: Synthetic oligonucleotide
  Sense strand starting at position 1828 of SEQ ID NO: 1881185
uuugacucuggucaaacua

SEQ ID NO: 2024783 - RNA, 19 nt, Artificial Sequence
  Description of Artificial Sequence: Synthetic oligonucleotide
  Antisense strand to SEQ ID NO: 2024782
uaguuugaccagagucaaa

SEQ ID NO: 2024784 - RNA, 19 nt, Artificial Sequence
  Description of Artificial Sequence: Synthetic oligonucleotide
  Sense strand starting at position 1924 of SEQ ID NO: 1881185
ugggcuuuccaauauauaa

SEQ ID NO: 2024785 - RNA, 19 nt, Artificial Sequence
  Description of Artificial Sequence: Synthetic oligonucleotide
  Antisense strand to SEQ ID NO: 2024784
uuauauauuggaaagccca

SEQ ID NO: 2024786 - RNA, 19 nt, Artificial Sequence
  Description of Artificial Sequence: Synthetic oligonucleotide
  Sense strand starting at position 2013 of SEQ ID NO: 1881185
gcagaaaugcagcauuaaa

SEQ ID NO: 2024787 - RNA, 19 nt, Artificial Sequence
  Description of Artificial Sequence: Synthetic oligonucleotide
  Antisense strand to SEQ ID NO: 2024786
uuuaaugcugcauuucugc

SEQ ID NO: 2024788 - RNA, 19 nt, Artificial Sequence
  Description of Artificial Sequence: Synthetic oligonucleotide
  Sense strand starting at position 2119 of SEQ ID NO: 1881185
acaauaccugcaggaauau

SEQ ID NO: 2024789 - RNA, 19 nt, Artificial Sequence
  Description of Artificial Sequence: Synthetic oligonucleotide
  Antisense strand to SEQ ID NO: 2024788
auauuccugcagguauugu

SEQ ID NO: 2024790 - RNA, 19 nt, Artificial Sequence
  Description of Artificial Sequence: Synthetic oligonucleotide
  Sense strand starting at position 2545 of SEQ ID NO: 1881185
acaucugcaguugaugaaa

SEQ ID NO: 2024791 - RNA, 19 nt, Artificial Sequence
  Description of Artificial Sequence: Synthetic oligonucleotide
  Antisense strand to SEQ ID NO: 2024790
uuucaucaacugcagaugu

SEQ ID NO: 2024792 - RNA, 19 nt, Artificial Sequence
  Description of Artificial Sequence: Synthetic oligonucleotide
  Sense strand starting at position 2913 of SEQ ID NO: 1881185
uguguuuagcccgcacaau

SEQ ID NO: 2024793 - RNA, 19 nt, Artificial Sequence
  Description of Artificial Sequence: Synthetic oligonucleotide
  Antisense strand to SEQ ID NO: 2024792
auugugcgggcuaaacaca

SEQ ID NO: 2024794 - RNA, 19 nt, Artificial Sequence
  Description of Artificial Sequence: Synthetic oligonucleotide
  Sense strand starting at position 3011 of SEQ ID NO: 1881185
agugucugccgaguuauuc

SEQ ID NO: 2024795 - RNA, 19 nt, Artificial Sequence
  Description of Artificial Sequence: Synthetic oligonucleotide
  Antisense strand to SEQ ID NO: 2024794
gaauaacucggcagacacu

SEQ ID NO: 2024796 - RNA, 19 nt, Artificial Sequence
  Description of Artificial Sequence: Synthetic oligonucleotide
  Sense strand starting at position 3095 of SEQ ID NO: 1881185
cuggcagucgcucuguaau

SEQ ID NO: 2024797 - RNA, 19 nt, Artificial Sequence
  Description of Artificial Sequence: Synthetic oligonucleotide
  Antisense strand to SEQ ID NO: 2024796
auuacagagcgacugccag

SEQ ID NO: 2024798 - RNA, 19 nt, Artificial Sequence
  Description of Artificial Sequence: Synthetic oligonucleotide
  Sense strand starting at position 3170 of SEQ ID NO: 1881185
cuugcuuugcggcuguuaa

SEQ ID NO: 2024799 - RNA, 19 nt, Artificial Sequence
  Description of Artificial Sequence: Synthetic oligonucleotide
  Antisense strand to SEQ ID NO: 2024798
uuaacagccgcaaagcaag

SEQ ID NO: 2024800 - RNA, 19 nt, Artificial Sequence
  Description of Artificial Sequence: Synthetic oligonucleotide
  Sense strand starting at position 3491 of SEQ ID NO: 1881185
cucagauccaaggguguau

SEQ ID NO: 2024801 - RNA, 19 nt, Artificial Sequence
  Description of Artificial Sequence: Synthetic oligonucleotide
  Antisense strand to SEQ ID NO: 2024800
auacacccuuggaucugag

SEQ ID NO: 2024802 - RNA, 19 nt, Artificial Sequence
  Description of Artificial Sequence: Synthetic oligonucleotide
  Sense strand starting at position 3794 of SEQ ID NO: 1881185
aaacccauguguuugaagu

SEQ ID NO: 2024803 - RNA, 19 nt, Artificial Sequence
  Description of Artificial Sequence: Synthetic oligonucleotide
  Antisense strand to SEQ ID NO: 2024802
acuucaaacacauggguuu

SEQ ID NO: 2024804 - RNA, 19 nt, Artificial Sequence
  Description of Artificial Sequence: Synthetic oligonucleotide
  Sense strand starting at position 3879 of SEQ ID NO: 1881185
guguuuacacacuauauau

SEQ ID NO: 2024805 - RNA, 19 nt, Artificial Sequence
  Description of Artificial Sequence: Synthetic oligonucleotide
  Antisense strand to SEQ ID NO: 2024804
auauauaguguguaaacac

SEQ ID NO: 2024806 - RNA, 19 nt, Artificial Sequence
  Description of Artificial Sequence: Synthetic oligonucleotide
  Sense strand starting at position 147 of SEQ ID NO: 1881186
aacagucacuguuugaaug

SEQ ID NO: 2024807 - RNA, 19 nt, Artificial Sequence
  Description of Artificial Sequence: Synthetic oligonucleotide
  Antisense strand to SEQ ID NO: 2024806
cauucaaacagugacuguu

SEQ ID NO: 2024808 - RNA, 19 nt, Artificial Sequence
  Description of Artificial Sequence: Synthetic oligonucleotide
  Sense strand starting at position 282 of SEQ ID NO: 1881186
ccaugaguauucucaggca

SEQ ID NO: 2024809 - RNA, 19 nt, Artificial Sequence
  Description of Artificial Sequence: Synthetic oligonucleotide
  Antisense strand to SEQ ID NO: 2024808
ugccugagaauacucaugg

SEQ ID NO: 2024810 - RNA, 19 nt, Artificial Sequence
  Description of Artificial Sequence: Synthetic oligonucleotide
  Sense strand starting at position 285 of SEQ ID NO: 1881186
ugaguauucucaggcacug

SEQ ID NO: 2024811 - RNA, 19 nt, Artificial Sequence
  Description of Artificial Sequence: Synthetic oligonucleotide
  Antisense strand to SEQ ID NO: 2024810
cagugccugagaauacuca

SEQ ID NO: 2024812 - RNA, 19 nt, Artificial Sequence
  Description of Artificial Sequence: Synthetic oligonucleotide
  Sense strand starting at position 343 of SEQ ID NO: 1881186
accaauacccugugaggga

SEQ ID NO: 2024813 - RNA, 19 nt, Artificial Sequence
  Description of Artificial Sequence: Synthetic oligonucleotide
  Antisense strand to SEQ ID NO: 2024812
ucccucacaggguauuggu

SEQ ID NO: 2024814 - RNA, 19 nt, Artificial Sequence
  Description of Artificial Sequence: Synthetic oligonucleotide
  Sense strand starting at position 536 of SEQ ID NO: 1881186
uugauaggguuccaguacu

SEQ ID NO: 2024815 - RNA, 19 nt, Artificial Sequence
  Description of Artificial Sequence: Synthetic oligonucleotide
  Antisense strand to SEQ ID NO: 2024814
aguacuggaacccuaucaa

SEQ ID NO: 2024816 - RNA, 19 nt, Artificial Sequence
  Description of Artificial Sequence: Synthetic oligonucleotide
  Sense strand starting at position 705 of SEQ ID NO: 1881186
ccaauagcauagugagaug

SEQ ID NO: 2024817 - RNA, 19 nt, Artificial Sequence
  Description of Artificial Sequence: Synthetic oligonucleotide
  Antisense strand to SEQ ID NO: 2024816
caucucacuaugcuauugg

SEQ ID NO: 2024818 - RNA, 19 nt, Artificial Sequence
  Description of Artificial Sequence: Synthetic oligonucleotide
  Sense strand starting at position 710 of SEQ ID NO: 1881186
agcauagugagaugagcaa

SEQ ID NO: 2024819 - RNA, 19 nt, Artificial Sequence
  Description of Artificial Sequence: Synthetic oligonucleotide
  Antisense strand to SEQ ID NO: 2024818
uugcucaucucacuaugcu

SEQ ID NO: 2024820 - RNA, 19 nt, Artificial Sequence
  Description of Artificial Sequence: Synthetic oligonucleotide
  Sense strand starting at position 939 of SEQ ID NO: 1881186
acugcuuucuggugggaug

SEQ ID NO: 2024821 - RNA, 19 nt, Artificial Sequence
  Description of Artificial Sequence: Synthetic oligonucleotide
  Antisense strand to SEQ ID NO: 2024820
caucccaccagaaagcagu

SEQ ID NO: 2024822 - RNA, 19 nt, Artificial Sequence
  Description of Artificial Sequence: Synthetic oligonucleotide
  Sense strand starting at position 941 of SEQ ID NO: 1881186
ugcuuucuggugggauguu

SEQ ID NO: 2024823 - RNA, 19 nt, Artificial Sequence
  Description of Artificial Sequence: Synthetic oligonucleotide
  Antisense strand to SEQ ID NO: 2024822
aacaucccaccagaaagca

SEQ ID NO: 2024824 - RNA, 19 nt, Artificial Sequence
  Description of Artificial Sequence: Synthetic oligonucleotide
  Sense strand starting at position 949 of SEQ ID NO: 1881186
ggugggauguuugaguuga

SEQ ID NO: 2024825 - RNA, 19 nt, Artificial Sequence
  Description of Artificial Sequence: Synthetic oligonucleotide
  Antisense strand to SEQ ID NO: 2024824
ucaacucaaacaucccacc

SEQ ID NO: 2024826 - RNA, 19 nt, Artificial Sequence
  Description of Artificial Sequence: Synthetic oligonucleotide
  Sense strand starting at position 950 of SEQ ID NO: 1881186
gugggauguuugaguugaa

SEQ ID NO: 2024827 - RNA, 19 nt, Artificial Sequence
  Description of Artificial Sequence: Synthetic oligonucleotide
  Antisense strand to SEQ ID NO: 2024826
uucaacucaaacaucccac

SEQ ID NO: 2024828 - RNA, 19 nt, Artificial Sequence
  Description of Artificial Sequence: Synthetic oligonucleotide
  Sense strand starting at position 951 of SEQ ID NO: 1881186
ugggauguuugaguugaag

SEQ ID NO: 2024829 - RNA, 19 nt, Artificial Sequence
  Description of Artificial Sequence: Synthetic oligonucleotide
  Antisense strand to SEQ ID NO: 2024828
cuucaacucaaacauccca

SEQ ID NO: 2024830 - RNA, 19 nt, Artificial Sequence
  Description of Artificial Sequence: Synthetic oligonucleotide
  Sense strand starting at position 953 of SEQ ID NO: 1881186
ggauguuugaguugaagug

SEQ ID NO: 2024831 - RNA, 19 nt, Artificial Sequence
  Description of Artificial Sequence: Synthetic oligonucleotide
  Antisense strand to SEQ ID NO: 2024830
cacuucaacucaaacaucc

SEQ ID NO: 2024832 - RNA, 19 nt, Artificial Sequence
  Description of Artificial Sequence: Synthetic oligonucleotide
  Sense strand starting at position 954 of SEQ ID NO: 1881186
gauguuugaguugaaguga

SEQ ID NO: 2024833 - RNA, 19 nt, Artificial Sequence
  Description of Artificial Sequence: Synthetic oligonucleotide
  Antisense strand to SEQ ID NO: 2024832
ucacuucaacucaaacauc

SEQ ID NO: 2024834 - RNA, 19 nt, Artificial Sequence
  Description of Artificial Sequence: Synthetic oligonucleotide
  Sense strand starting at position 959 of SEQ ID NO: 1881186
uugaguugaagugaauguu

SEQ ID NO: 2024835 - RNA, 19 nt, Artificial Sequence
  Description of Artificial Sequence: Synthetic oligonucleotide
  Antisense strand to SEQ ID NO: 2024834
aacauucacuucaacucaa

SEQ ID NO: 2024836 - RNA, 19 nt, Artificial Sequence
  Description of Artificial Sequence: Synthetic oligonucleotide
  Sense strand starting at position 969 of SEQ ID NO: 1881186
gugaauguugaagggcaua

SEQ ID NO: 2024837 - RNA, 19 nt, Artificial Sequence
  Description of Artificial Sequence: Synthetic oligonucleotide
  Antisense strand to SEQ ID NO: 2024836
uaugcccuucaacauucac

SEQ ID NO: 2024838 - RNA, 19 nt, Artificial Sequence
  Description of Artificial Sequence: Synthetic oligonucleotide
  Sense strand starting at position 998 of SEQ ID NO: 1881186
agcugacugccuugcagaa

SEQ ID NO: 2024839 - RNA, 19 nt, Artificial Sequence
  Description of Artificial Sequence: Synthetic oligonucleotide
  Antisense strand to SEQ ID NO: 2024838
uucugcaaggcagucagcu

SEQ ID NO: 2024840 - RNA, 19 nt, Artificial Sequence
  Description of Artificial Sequence: Synthetic oligonucleotide
  Sense strand starting at position 1199 of SEQ ID NO: 1881186
gcagaauaggcuggacacu

SEQ ID NO: 2024841 - RNA, 19 nt, Artificial Sequence
  Description of Artificial Sequence: Synthetic oligonucleotide
  Antisense strand to SEQ ID NO: 2024840
aguguccagccuauucugc

SEQ ID NO: 2024842 - RNA, 19 nt, Artificial Sequence
  Description of Artificial Sequence: Synthetic oligonucleotide
  Sense strand starting at position 1383 of SEQ ID NO: 1881186
aggugagagcccugugguu

SEQ ID NO: 2024843 - RNA, 19 nt, Artificial Sequence
  Description of Artificial Sequence: Synthetic oligonucleotide
  Antisense strand to SEQ ID NO: 2024842
aaccacagggcucucaccu

SEQ ID NO: 2024844 - RNA, 19 nt, Artificial Sequence
  Description of Artificial Sequence: Synthetic oligonucleotide
  Sense strand starting at position 1385 of SEQ ID NO: 1881186
gugagagcccugugguugu

SEQ ID NO: 2024845 - RNA, 19 nt, Artificial Sequence
  Description of Artificial Sequence: Synthetic oligonucleotide
  Antisense strand to SEQ ID NO: 2024844
acaaccacagggcucucac

SEQ ID NO: 2024846 - RNA, 19 nt, Artificial Sequence
  Description of Artificial Sequence: Synthetic oligonucleotide
  Sense strand starting at position 1395 of SEQ ID NO: 1881186
ugugguuguuaguagaaau

SEQ ID NO: 2024847 - RNA, 19 nt, Artificial Sequence
  Description of Artificial Sequence: Synthetic oligonucleotide
  Antisense strand to SEQ ID NO: 2024846
auuucuacuaacaaccaca

SEQ ID NO: 2024848 - RNA, 19 nt, Artificial Sequence
  Description of Artificial Sequence: Synthetic oligonucleotide
  Sense strand starting at position 1476 of SEQ ID NO: 1881186
aucaaagucuuagaggcua

SEQ ID NO: 2024849 - RNA, 19 nt, Artificial Sequence
  Description of Artificial Sequence: Synthetic oligonucleotide
  Antisense strand to SEQ ID NO: 2024848
uagccucuaagacuuugau

SEQ ID NO: 2024850 - RNA, 19 nt, Artificial Sequence
  Description of Artificial Sequence: Synthetic oligonucleotide
  Sense strand starting at position 1679 of SEQ ID NO: 1881186
ggcuauaggugccuugauu

SEQ ID NO: 2024851 - RNA, 19 nt, Artificial Sequence
  Description of Artificial Sequence: Synthetic oligonucleotide
  Antisense strand to SEQ ID NO: 2024850
aaucaaggcaccuauagcc

SEQ ID NO: 2024852 - RNA, 19 nt, Artificial Sequence
  Description of Artificial Sequence: Synthetic oligonucleotide
  Sense strand starting at position 1694 of SEQ ID NO: 1881186
gauuguggcuguuucuuga

SEQ ID NO: 2024853 - RNA, 19 nt, Artificial Sequence
  Description of Artificial Sequence: Synthetic oligonucleotide
  Antisense strand to SEQ ID NO: 2024852
ucaagaaacagccacaauc

SEQ ID NO: 2024854 - RNA, 19 nt, Artificial Sequence
  Description of Artificial Sequence: Synthetic oligonucleotide
  Sense strand starting at position 1727 of SEQ ID NO: 1881186
ccgguuauugcagagcagu

SEQ ID NO: 2024855 - RNA, 19 nt, Artificial Sequence
  Description of Artificial Sequence: Synthetic oligonucleotide
  Antisense strand to SEQ ID NO: 2024854
acugcucugcaauaaccgg

SEQ ID NO: 2024856 - RNA, 19 nt, Artificial Sequence
  Description of Artificial Sequence: Synthetic oligonucleotide
  Sense strand starting at position 2032 of SEQ ID NO: 1881186
gugcauccucugugugcau

SEQ ID NO: 2024857 - RNA, 19 nt, Artificial Sequence
  Description of Artificial Sequence: Synthetic oligonucleotide
  Antisense strand to SEQ ID NO: 2024856
augcacacagaggaugcac

SEQ ID NO: 2024858 - RNA, 19 nt, Artificial Sequence
  Description of Artificial Sequence: Synthetic oligonucleotide
  Sense strand starting at position 2158 of SEQ ID NO: 1881186
gggagauguucagccacca

SEQ ID NO: 2024859 - RNA, 19 nt, Artificial Sequence
  Description of Artificial Sequence: Synthetic oligonucleotide
  Antisense strand to SEQ ID NO: 2024858
ugguggcugaacaucuccc

SEQ ID NO: 2024860 - RNA, 19 nt, Artificial Sequence
  Description of Artificial Sequence: Synthetic oligonucleotide
  Sense strand starting at position 2349 of SEQ ID NO: 1881186
ggcagaagcacuggaguuu

SEQ ID NO: 2024861 - RNA, 19 nt, Artificial Sequence
  Description of Artificial Sequence: Synthetic oligonucleotide
  Antisense strand to SEQ ID NO: 2024860
aaacuccagugcuucugcc

SEQ ID NO: 2024862 - RNA, 19 nt, Artificial Sequence
  Description of Artificial Sequence: Synthetic oligonucleotide
  Sense strand starting at position 2350 of SEQ ID NO: 1881186
gcagaagcacuggaguuua

SEQ ID NO: 2024863 - RNA, 19 nt, Artificial Sequence
  Description of Artificial Sequence: Synthetic oligonucleotide
  Antisense strand to SEQ ID NO: 2024862
uaaacuccagugcuucugc

SEQ ID NO: 2024864 - RNA, 19 nt, Artificial Sequence
  Description of Artificial Sequence: Synthetic oligonucleotide
  Sense strand starting at position 2441 of SEQ ID NO: 1881186
uuucuucuggcaugaggaa

SEQ ID NO: 2024865 - RNA, 19 nt, Artificial Sequence
  Description of Artificial Sequence: Synthetic oligonucleotide
  Antisense strand to SEQ ID NO: 2024864
uuccucaugccagaagaaa

SEQ ID NO: 2024866 - RNA, 19 nt, Artificial Sequence
  Description of Artificial Sequence: Synthetic oligonucleotide
  Sense strand starting at position 2609 of SEQ ID NO: 1881186
acuuacugguuccaguaaa

SEQ ID NO: 2024867 - RNA, 19 nt, Artificial Sequence
  Description of Artificial Sequence: Synthetic oligonucleotide
  Antisense strand to SEQ ID NO: 2024866
uuuacuggaaccaguaagu

SEQ ID NO: 2024868 - RNA, 19 nt, Artificial Sequence
  Description of Artificial Sequence: Synthetic oligonucleotide
  Sense strand starting at position 2785 of SEQ ID NO: 1881186
guuugauuaagccaggcau

SEQ ID NO: 2024869 - RNA, 19 nt, Artificial Sequence
  Description of Artificial Sequence: Synthetic oligonucleotide
  Antisense strand to SEQ ID NO: 2024868
augccuggcuuaaucaaac

SEQ ID NO: 2024870 - RNA, 19 nt, Artificial Sequence
  Description of Artificial Sequence: Synthetic oligonucleotide
  Sense strand starting at position 2787 of SEQ ID NO: 1881186
uugauuaagccaggcaucu

SEQ ID NO: 2024871 - RNA, 19 nt, Artificial Sequence
  Description of Artificial Sequence: Synthetic oligonucleotide
  Antisense strand to SEQ ID NO: 2024870
agaugccuggcuuaaucaa

SEQ ID NO: 2024872 - RNA, 19 nt, Artificial Sequence
  Description of Artificial Sequence: Synthetic oligonucleotide
  Sense strand starting at position 3252 of SEQ ID NO: 1881186
ucccaccaucugugacuua

SEQ ID NO: 2024873 - RNA, 19 nt, Artificial Sequence
  Description of Artificial Sequence: Synthetic oligonucleotide
  Antisense strand to SEQ ID NO: 2024872
uaagucacagaugguggga

SEQ ID NO: 2024874 - RNA, 19 nt, Artificial Sequence
  Description of Artificial Sequence: Synthetic oligonucleotide
  Sense strand starting at position 3253 of SEQ ID NO: 1881186
cccaccaucugugacuuau

SEQ ID NO: 2024875 - RNA, 19 nt, Artificial Sequence
  Description of Artificial Sequence: Synthetic oligonucleotide
  Antisense strand to SEQ ID NO: 2024874
auaagucacagaugguggg

SEQ ID NO: 2024876 - RNA, 19 nt, Artificial Sequence
  Description of Artificial Sequence: Synthetic oligonucleotide
  Sense strand starting at position 3261 of SEQ ID NO: 1881186
cugugacuuauguaaguca

SEQ ID NO: 2024877 - RNA, 19 nt, Artificial Sequence
  Description of Artificial Sequence: Synthetic oligonucleotide
  Antisense strand to SEQ ID NO: 2024876
ugacuuacauaagucacag

SEQ ID NO: 2024878 - RNA, 19 nt, Artificial Sequence
  Description of Artificial Sequence: Synthetic oligonucleotide
  Sense strand starting at position 3384 of SEQ ID NO: 1881186
uugccaucagccuacagau

SEQ ID NO: 2024879 - RNA, 19 nt, Artificial Sequence
  Description of Artificial Sequence: Synthetic oligonucleotide
  Antisense strand to SEQ ID NO: 2024878
aucuguaggcugauggcaa

SEQ ID NO: 2024880 - RNA, 19 nt, Artificial Sequence
  Description of Artificial Sequence: Synthetic oligonucleotide
  Sense strand starting at position 3721 of SEQ ID NO: 1881186
uaccuaguccugcaggaau

SEQ ID NO: 2024881 - RNA, 19 nt, Artificial Sequence
  Description of Artificial Sequence: Synthetic oligonucleotide
  Antisense strand to SEQ ID NO: 2024880
auuccugcaggacuaggua

SEQ ID NO: 2024882 - RNA, 19 nt, Artificial Sequence
  Description of Artificial Sequence: Synthetic oligonucleotide
  Sense strand starting at position 3723 of SEQ ID NO: 1881186
ccuaguccugcaggaauua

SEQ ID NO: 2024883 - RNA, 19 nt, Artificial Sequence
  Description of Artificial Sequence: Synthetic oligonucleotide
  Antisense strand to SEQ ID NO: 2024882
uaauuccugcaggacuagg

SEQ ID NO: 2024884 - RNA, 19 nt, Artificial Sequence
  Description of Artificial Sequence: Synthetic oligonucleotide
  Sense strand starting at position 3724 of SEQ ID NO: 1881186
cuaguccugcaggaauuau

SEQ ID NO: 2024885 - RNA, 19 nt, Artificial Sequence
  Description of Artificial Sequence: Synthetic oligonucleotide
  Antisense strand to SEQ ID NO: 2024884
auaauuccugcaggacuag

SEQ ID NO: 2024886 - RNA, 19 nt, Artificial Sequence
  Description of Artificial Sequence: Synthetic oligonucleotide
  Sense strand starting at position 3178 of SEQ ID NO: 1881187
gucccaagcguuugauuua

SEQ ID NO: 2024887 - RNA, 19 nt, Artificial Sequence
  Description of Artificial Sequence: Synthetic oligonucleotide
  Antisense strand to SEQ ID NO: 2024886
uaaaucaaacgcuugggac

SEQ ID NO: 2024888 - RNA, 19 nt, Artificial Sequence
  Description of Artificial Sequence: Synthetic oligonucleotide
  Sense strand starting at position 3179 of SEQ ID NO: 1881187
ucccaagcguuugauuuau

SEQ ID NO: 2024889 - RNA, 19 nt, Artificial Sequence
  Description of Artificial Sequence: Synthetic oligonucleotide
  Antisense strand to SEQ ID NO: 2024888
auaaaucaaacgcuuggga

SEQ ID NO: 2024890 - RNA, 19 nt, Artificial Sequence
  Description of Artificial Sequence: Synthetic oligonucleotide
  Sense strand starting at position 3191 of SEQ ID NO: 1881187
gauuuauaguuggagauuc

SEQ ID NO: 2024891 - RNA, 19 nt, Artificial Sequence
  Description of Artificial Sequence: Synthetic oligonucleotide
  Antisense strand to SEQ ID NO: 2024890
gaaucuccaacuauaaauc

SEQ ID NO: 2024892 - RNA, 19 nt, Artificial Sequence
  Description of Artificial Sequence: Synthetic oligonucleotide
  Sense strand starting at position 3281 of SEQ ID NO: 1881187
guuggaaccugcuugacua

SEQ ID NO: 2024893 - RNA, 19 nt, Artificial Sequence
  Description of Artificial Sequence: Synthetic oligonucleotide
  Antisense strand to SEQ ID NO: 2024892
uagucaagcagguuccaac

SEQ ID NO: 2024894 - RNA, 19 nt, Artificial Sequence
  Description of Artificial Sequence: Synthetic oligonucleotide
  Sense strand starting at position 3282 of SEQ ID NO: 1881187
uuggaaccugcuugacuau

SEQ ID NO: 2024895 - RNA, 19 nt, Artificial Sequence
  Description of Artificial Sequence: Synthetic oligonucleotide
  Antisense strand to SEQ ID NO: 2024894
auagucaagcagguuccaa

SEQ ID NO: 2024896 - RNA, 19 nt, Artificial Sequence
  Description of Artificial Sequence: Synthetic oligonucleotide
  Sense strand starting at position 3446 of SEQ ID NO: 1881187
gcagauguguuggaaccuu

SEQ ID NO: 2024897 - RNA, 19 nt, Artificial Sequence
  Description of Artificial Sequence: Synthetic oligonucleotide
  Antisense strand to SEQ ID NO: 2024896
aagguuccaacacaucugc

SEQ ID NO: 2024898 - RNA, 19 nt, Artificial Sequence
  Description of Artificial Sequence: Synthetic oligonucleotide
  Sense strand starting at position 3457 of SEQ ID NO: 1881187
ggaaccuucuugucucaga

SEQ ID NO: 2024899 - RNA, 19 nt, Artificial Sequence
  Description of Artificial Sequence: Synthetic oligonucleotide
  Antisense strand to SEQ ID NO: 2024898
ucugagacaagaagguucc

SEQ ID NO: 2024900 - RNA, 19 nt, Artificial Sequence
  Description of Artificial Sequence: Synthetic oligonucleotide
  Sense strand starting at position 3492 of SEQ ID NO: 1881187
gugugugauuuggcagaaa

SEQ ID NO: 2024901 - RNA, 19 nt, Artificial Sequence
  Description of Artificial Sequence: Synthetic oligonucleotide
  Antisense strand to SEQ ID NO: 2024900
uuucugccaaaucacacac

SEQ ID NO: 2024902 - RNA, 19 nt, Artificial Sequence
  Description of Artificial Sequence: Synthetic oligonucleotide
  Sense strand starting at position 3587 of SEQ ID NO: 1881187
gugugcgugugcaugaaua

SEQ ID NO: 2024903 - RNA, 19 nt, Artificial Sequence
  Description of Artificial Sequence: Synthetic oligonucleotide
  Antisense strand to SEQ ID NO: 2024902
uauucaugcacacgcacac

SEQ ID NO: 2024904 - RNA, 19 nt, Artificial Sequence
  Description of Artificial Sequence: Synthetic oligonucleotide
  Sense strand starting at position 3589 of SEQ ID NO: 1881187
gugcgugugcaugaauaua

SEQ ID NO: 2024905 - RNA, 19 nt, Artificial Sequence
  Description of Artificial Sequence: Synthetic oligonucleotide
  Antisense strand to SEQ ID NO: 2024904
uauauucaugcacacgcac

SEQ ID NO: 2024906 - RNA, 19 nt, Artificial Sequence
  Description of Artificial Sequence: Synthetic oligonucleotide
  Sense strand starting at position 3597 of SEQ ID NO: 1881187
gcaugaauauauguauaag

SEQ ID NO: 2024907 - RNA, 19 nt, Artificial Sequence
  Description of Artificial Sequence: Synthetic oligonucleotide
  Antisense strand to SEQ ID NO: 2024906
cuuauacauauauucaugc

SEQ ID NO: 2024908 - RNA, 19 nt, Artificial Sequence
  Description of Artificial Sequence: Synthetic oligonucleotide
  Sense strand starting at position 3608 of SEQ ID NO: 1881187
uguauaagcauguguaugu

SEQ ID NO: 2024909 - RNA, 19 nt, Artificial Sequence
  Description of Artificial Sequence: Synthetic oligonucleotide
  Antisense strand to SEQ ID NO: 2024908
acauacacaugcuuauaca

SEQ ID NO: 2024910 - RNA, 19 nt, Artificial Sequence
  Description of Artificial Sequence: Synthetic oligonucleotide
  Sense strand starting at position 3788 of SEQ ID NO: 1881187
cauugacaucaguggcaaa

SEQ ID NO: 2024911 - RNA, 19 nt, Artificial Sequence
  Description of Artificial Sequence: Synthetic oligonucleotide
  Antisense strand to SEQ ID NO: 2024910
uuugccacugaugucaaug

SEQ ID NO: 2024912 - RNA, 19 nt, Artificial Sequence
  Description of Artificial Sequence: Synthetic oligonucleotide
  Sense strand starting at position 3800 of SEQ ID NO: 1881187
uggcaaaccucaugaagau

SEQ ID NO: 2024913 - RNA, 19 nt, Artificial Sequence
  Description of Artificial Sequence: Synthetic oligonucleotide
  Antisense strand to SEQ ID NO: 2024912
aucuucaugagguuugcca

SEQ ID NO: 2024914 - RNA, 19 nt, Artificial Sequence
  Description of Artificial Sequence: Synthetic oligonucleotide
  Sense strand starting at position 3825 of SEQ ID NO: 1881187
agggaauaaugucaugaag

SEQ ID NO: 2024915 - RNA, 19 nt, Artificial Sequence
  Description of Artificial Sequence: Synthetic oligonucleotide
  Antisense strand to SEQ ID NO: 2024914
cuucaugacauuauucccu

SEQ ID NO: 2024916 - RNA, 19 nt, Artificial Sequence
  Description of Artificial Sequence: Synthetic oligonucleotide
  Sense strand starting at position 3827 of SEQ ID NO: 1881187
ggaauaaugucaugaagcu

SEQ ID NO: 2024917 - RNA, 19 nt, Artificial Sequence
  Description of Artificial Sequence: Synthetic oligonucleotide
  Antisense strand to SEQ ID NO: 2024916
agcuucaugacauuauucc

SEQ ID NO: 2024918 - RNA, 19 nt, Artificial Sequence
  Description of Artificial Sequence: Synthetic oligonucleotide
  Sense strand starting at position 3852 of SEQ ID NO: 1881187
ggacuuuaaugcugagagc

SEQ ID NO: 2024919 - RNA, 19 nt, Artificial Sequence
  Description of Artificial Sequence: Synthetic oligonucleotide
  Antisense strand to SEQ ID NO: 2024918
gcucucagcauuaaagucc

SEQ ID NO: 2024920 - RNA, 19 nt, Artificial Sequence
  Description of Artificial Sequence: Synthetic oligonucleotide
  Sense strand starting at position 43 of SEQ ID NO: 1881188
augggucccacugaaguua

SEQ ID NO: 2024921 - RNA, 19 nt, Artificial Sequence
  Description of Artificial Sequence: Synthetic oligonucleotide
  Antisense strand to SEQ ID NO: 2024920
uaacuucagugggacccau

SEQ ID NO: 2024922 - RNA, 19 nt, Artificial Sequence
  Description of Artificial Sequence: Synthetic oligonucleotide
  Sense strand starting at position 54 of SEQ ID NO: 1881188
ugaaguuagcgugaggaca

SEQ ID NO: 2024923 - RNA, 19 nt, Artificial Sequence
  Description of Artificial Sequence: Synthetic oligonucleotide
  Antisense strand to SEQ ID NO: 2024922
uguccucacgcuaacuuca

SEQ ID NO: 2024924 - RNA, 19 nt, Artificial Sequence
  Description of Artificial Sequence: Synthetic oligonucleotide
  Sense strand starting at position 139 of SEQ ID NO: 1881188
agaucauucugguuauaac

SEQ ID NO: 2024925 - RNA, 19 nt, Artificial Sequence
  Description of Artificial Sequence: Synthetic oligonucleotide
  Antisense strand to SEQ ID NO: 2024924
guuauaaccagaaugaucu

SEQ ID NO: 2024926 - RNA, 19 nt, Artificial Sequence
  Description of Artificial Sequence: Synthetic oligonucleotide
  Sense strand starting at position 147 of SEQ ID NO: 1881188
cugguuauaacauguggaa

SEQ ID NO: 2024927 - RNA, 19 nt, Artificial Sequence
  Description of Artificial Sequence: Synthetic oligonucleotide
  Antisense strand to SEQ ID NO: 2024926
uuccacauguuauaaccag

SEQ ID NO: 2024928 - RNA, 19 nt, Artificial Sequence
  Description of Artificial Sequence: Synthetic oligonucleotide
  Sense strand starting at position 149 of SEQ ID NO: 1881188
gguuauaacauguggaaga

SEQ ID NO: 2024929 - RNA, 19 nt, Artificial Sequence
  Description of Artificial Sequence: Synthetic oligonucleotide
  Antisense strand to SEQ ID NO: 2024928
ucuuccacauguuauaacc

SEQ ID NO: 2024930 - RNA, 19 nt, Artificial Sequence
  Description of Artificial Sequence: Synthetic oligonucleotide
  Sense strand starting at position 475 of SEQ ID NO: 1881188
agagauuaggucuggcuau

SEQ ID NO: 2024931 - RNA, 19 nt, Artificial Sequence
  Description of Artificial Sequence: Synthetic oligonucleotide
  Antisense strand to SEQ ID NO: 2024930
auagccagaccuaaucucu

SEQ ID NO: 2024932 - RNA, 19 nt, Artificial Sequence
  Description of Artificial Sequence: Synthetic oligonucleotide
  Sense strand starting at position 633 of SEQ ID NO: 1881188
ggaguugguaacuggauga

SEQ ID NO: 2024933 - RNA, 19 nt, Artificial Sequence
  Description of Artificial Sequence: Synthetic oligonucleotide
  Antisense strand to SEQ ID NO: 2024932
ucauccaguuaccaacucc

SEQ ID NO: 2024934 - RNA, 19 nt, Artificial Sequence
  Description of Artificial Sequence: Synthetic oligonucleotide
  Sense strand starting at position 637 of SEQ ID NO: 1881188
uugguaacuggaugaauuc

SEQ ID NO: 2024935 - RNA, 19 nt, Artificial Sequence
  Description of Artificial Sequence: Synthetic oligonucleotide
  Antisense strand to SEQ ID NO: 2024934
gaauucauccaguuaccaa

SEQ ID NO: 2024936 - RNA, 19 nt, Artificial Sequence
  Description of Artificial Sequence: Synthetic oligonucleotide
  Sense strand starting at position 743 of SEQ ID NO: 1881188
cagagaugcccuuaacgau

SEQ ID NO: 2024937 - RNA, 19 nt, Artificial Sequence
  Description of Artificial Sequence: Synthetic oligonucleotide
  Antisense strand to SEQ ID NO: 2024936
aucguuaagggcaucucug

SEQ ID NO: 2024938 - RNA, 19 nt, Artificial Sequence
  Description of Artificial Sequence: Synthetic oligonucleotide
  Sense strand starting at position 954 of SEQ ID NO: 1881188
auagacugggccugaguua

SEQ ID NO: 2024939 - RNA, 19 nt, Artificial Sequence
  Description of Artificial Sequence: Synthetic oligonucleotide
  Antisense strand to SEQ ID NO: 2024938
uaacucaggcccagucuau

SEQ ID NO: 2024940 - RNA, 19 nt, Artificial Sequence
  Description of Artificial Sequence: Synthetic oligonucleotide
  Sense strand starting at position 955 of SEQ ID NO: 1881188
uagacugggccugaguuaa

SEQ ID NO: 2024941 - RNA, 19 nt, Artificial Sequence
  Description of Artificial Sequence: Synthetic oligonucleotide
  Antisense strand to SEQ ID NO: 2024940
uuaacucaggcccagucua

SEQ ID NO: 2024942 - RNA, 19 nt, Artificial Sequence
  Description of Artificial Sequence: Synthetic oligonucleotide
  Sense strand starting at position 963 of SEQ ID NO: 1881188
gccugaguuaaucagagug

SEQ ID NO: 2024943 - RNA, 19 nt, Artificial Sequence
  Description of Artificial Sequence: Synthetic oligonucleotide
  Antisense strand to SEQ ID NO: 2024942
cacucugauuaacucaggc

SEQ ID NO: 2024944 - RNA, 19 nt, Artificial Sequence
  Description of Artificial Sequence: Synthetic oligonucleotide
  Sense strand starting at position 1157 of SEQ ID NO: 1881188
ucuagagaccuccauuagu

SEQ ID NO: 2024945 - RNA, 19 nt, Artificial Sequence
  Description of Artificial Sequence: Synthetic oligonucleotide
  Antisense strand to SEQ ID NO: 2024944
acuaauggaggucucuaga

SEQ ID NO: 2024946 - RNA, 19 nt, Artificial Sequence
  Description of Artificial Sequence: Synthetic oligonucleotide
  Sense strand starting at position 1249 of SEQ ID NO: 1881188
aaguauuaccuuugaugga

SEQ ID NO: 2024947 - RNA, 19 nt, Artificial Sequence
  Description of Artificial Sequence: Synthetic oligonucleotide
  Antisense strand to SEQ ID NO: 2024946
uccaucaaagguaauacuu

SEQ ID NO: 2024948 - RNA, 19 nt, Artificial Sequence
  Description of Artificial Sequence: Synthetic oligonucleotide
  Sense strand starting at position 1277 of SEQ ID NO: 1881188
agaucagugcccuaggaac

SEQ ID NO: 2024949 - RNA, 19 nt, Artificial Sequence
  Description of Artificial Sequence: Synthetic oligonucleotide
  Antisense strand to SEQ ID NO: 2024948
guuccuagggcacugaucu

SEQ ID NO: 2024950 - RNA, 19 nt, Artificial Sequence
  Description of Artificial Sequence: Synthetic oligonucleotide
  Sense strand starting at position 1346 of SEQ ID NO: 1881188
gauggagagcuguggaacu

SEQ ID NO: 2024951 - RNA, 19 nt, Artificial Sequence
  Description of Artificial Sequence: Synthetic oligonucleotide
  Antisense strand to SEQ ID NO: 2024950
aguuccacagcucuccauc

SEQ ID NO: 2024952 - RNA, 19 nt, Artificial Sequence
  Description of Artificial Sequence: Synthetic oligonucleotide
  Sense strand starting at position 1412 of SEQ ID NO: 1881188
cuaggaaguggaugcauua

SEQ ID NO: 2024953 - RNA, 19 nt, Artificial Sequence
  Description of Artificial Sequence: Synthetic oligonucleotide
  Antisense strand to SEQ ID NO: 2024952
uaaugcauccacuuccuag

SEQ ID NO: 2024954 - RNA, 19 nt, Artificial Sequence
  Description of Artificial Sequence: Synthetic oligonucleotide
  Sense strand starting at position 1591 of SEQ ID NO: 1881188
aggaaauguucaguugagu

SEQ ID NO: 2024955 - RNA, 19 nt, Artificial Sequence
  Description of Artificial Sequence: Synthetic oligonucleotide
  Antisense strand to SEQ ID NO: 2024954
acucaacugaacauuuccu

SEQ ID NO: 2024956 - RNA, 19 nt, Artificial Sequence
  Description of Artificial Sequence: Synthetic oligonucleotide
  Sense strand starting at position 2260 of SEQ ID NO: 1881188
guauuucucugggaagagg

SEQ ID NO: 2024957 - RNA, 19 nt, Artificial Sequence
  Description of Artificial Sequence: Synthetic oligonucleotide
  Antisense strand to SEQ ID NO: 2024956
ccucuucccagagaaauac

SEQ ID NO: 2024958 - RNA, 19 nt, Artificial Sequence
  Description of Artificial Sequence: Synthetic oligonucleotide
  Sense strand starting at position 2889 of SEQ ID NO: 1881188
guaguaagaucacuuggga

SEQ ID NO: 2024959 - RNA, 19 nt, Artificial Sequence
  Description of Artificial Sequence: Synthetic oligonucleotide
  Antisense strand to SEQ ID NO: 2024958
ucccaagugaucuuacuac

SEQ ID NO: 2024960 - RNA, 19 nt, Artificial Sequence
  Description of Artificial Sequence: Synthetic oligonucleotide
  Sense strand starting at position 2892 of SEQ ID NO: 1881188
guaagaucacuugggagcu

SEQ ID NO: 2024961 - RNA, 19 nt, Artificial Sequence
  Description of Artificial Sequence: Synthetic oligonucleotide
  Antisense strand to SEQ ID NO: 2024960
agcucccaagugaucuuac

SEQ ID NO: 2024962 - RNA, 19 nt, Artificial Sequence
  Description of Artificial Sequence: Synthetic oligonucleotide
  Sense strand starting at position 2957 of SEQ ID NO: 1881188
uagcauaaacuugauguga

SEQ ID NO: 2024963 - RNA, 19 nt, Artificial Sequence
  Description of Artificial Sequence: Synthetic oligonucleotide
  Antisense strand to SEQ ID NO: 2024962
ucacaucaaguuuaugcua

SEQ ID NO: 2024964 - RNA, 19 nt, Artificial Sequence
  Description of Artificial Sequence: Synthetic oligonucleotide
  Sense strand starting at position 3059 of SEQ ID NO: 1881188
gcaugcugugugguucuua

SEQ ID NO: 2024965 - RNA, 19 nt, Artificial Sequence
  Description of Artificial Sequence: Synthetic oligonucleotide
  Antisense strand to SEQ ID NO: 2024964
uaagaaccacacagcaugc

SEQ ID NO: 2024966 - RNA, 19 nt, Artificial Sequence
  Description of Artificial Sequence: Synthetic oligonucleotide
  Sense strand starting at position 3062 of SEQ ID NO: 1881188
ugcugugugguucuuaguu

SEQ ID NO: 2024967 - RNA, 19 nt, Artificial Sequence
  Description of Artificial Sequence: Synthetic oligonucleotide
  Antisense strand to SEQ ID NO: 2024966
aacuaagaaccacacagca

SEQ ID NO: 2024968 - RNA, 19 nt, Artificial Sequence
  Description of Artificial Sequence: Synthetic oligonucleotide
  Sense strand starting at position 3183 of SEQ ID NO: 1881188
cauagaaguucugccaaag

SEQ ID NO: 2024969 - RNA, 19 nt, Artificial Sequence
  Description of Artificial Sequence: Synthetic oligonucleotide
  Antisense strand to SEQ ID NO: 2024968
cuuuggcagaacuucuaug

SEQ ID NO: 2024970 - RNA, 19 nt, Artificial Sequence
  Description of Artificial Sequence: Synthetic oligonucleotide
  Sense strand starting at position 3282 of SEQ ID NO: 1881188
ggucuuggaguucagaaau

SEQ ID NO: 2024971 - RNA, 19 nt, Artificial Sequence
  Description of Artificial Sequence: Synthetic oligonucleotide
  Antisense strand to SEQ ID NO: 2024970
auuucugaacuccaagacc

SEQ ID NO: 2024972 - RNA, 19 nt, Artificial Sequence
  Description of Artificial Sequence: Synthetic oligonucleotide
  Sense strand starting at position 3328 of SEQ ID NO: 1881188
ugauucucugcugggacau

SEQ ID NO: 2024973 - RNA, 19 nt, Artificial Sequence
  Description of Artificial Sequence: Synthetic oligonucleotide
  Antisense strand to SEQ ID NO: 2024972
augucccagcagagaauca

SEQ ID NO: 2024974 - RNA, 19 nt, Artificial Sequence
  Description of Artificial Sequence: Synthetic oligonucleotide
  Sense strand starting at position 3329 of SEQ ID NO: 1881188
gauucucugcugggacauu

SEQ ID NO: 2024975 - RNA, 19 nt, Artificial Sequence
  Description of Artificial Sequence: Synthetic oligonucleotide
  Antisense strand to SEQ ID NO: 2024974
aaugucccagcagagaauc

SEQ ID NO: 2024976 - RNA, 19 nt, Artificial Sequence
  Description of Artificial Sequence: Synthetic oligonucleotide
  Sense strand starting at position 3338 of SEQ ID NO: 1881188
cugggacauuaggcuauaa

SEQ ID NO: 2024977 - RNA, 19 nt, Artificial Sequence
  Description of Artificial Sequence: Synthetic oligonucleotide
  Antisense strand to SEQ ID NO: 2024976
uuauagccuaaugucccag

SEQ ID NO: 2024978 - RNA, 19 nt, Artificial Sequence
  Description of Artificial Sequence: Synthetic oligonucleotide
  Sense strand starting at position 3349 of SEQ ID NO: 1881188
ggcuauaaucucuacacug

SEQ ID NO: 2024979 - RNA, 19 nt, Artificial Sequence
  Description of Artificial Sequence: Synthetic oligonucleotide
  Antisense strand to SEQ ID NO: 2024978
caguguagagauuauagcc

SEQ ID NO: 2024980 - RNA, 19 nt, Artificial Sequence
  Description of Artificial Sequence: Synthetic oligonucleotide
  Sense strand starting at position 3415 of SEQ ID NO: 1881188
acuagauaaauguguguau

SEQ ID NO: 2024981 - RNA, 19 nt, Artificial Sequence
  Description of Artificial Sequence: Synthetic oligonucleotide
  Antisense strand to SEQ ID NO: 2024980
auacacacauuuaucuagu

SEQ ID NO: 2024982 - RNA, 19 nt, Artificial Sequence
  Description of Artificial Sequence: Synthetic oligonucleotide
  Sense strand starting at position 3443 of SEQ ID NO: 1881188
auugguguugacuaaguua

SEQ ID NO: 2024983 - RNA, 19 nt, Artificial Sequence
  Description of Artificial Sequence: Synthetic oligonucleotide
  Antisense strand to SEQ ID NO: 2024982
uaacuuagucaacaccaau

SEQ ID NO: 2024984 - RNA, 19 nt, Artificial Sequence
  Description of Artificial Sequence: Synthetic oligonucleotide
  Sense strand starting at position 3446 of SEQ ID NO: 1881188
gguguugacuaaguuaaca

SEQ ID NO: 2024985 - RNA, 19 nt, Artificial Sequence
  Description of Artificial Sequence: Synthetic oligonucleotide
  Antisense strand to SEQ ID NO: 2024984
uguuaacuuagucaacacc

SEQ ID NO: 2024986 - RNA, 19 nt, Artificial Sequence
  Description of Artificial Sequence: Synthetic oligonucleotide
  Sense strand starting at position 3519 of SEQ ID NO: 1881188
gcugaaauuucugcggacu

SEQ ID NO: 2024987 - RNA, 19 nt, Artificial Sequence
  Description of Artificial Sequence: Synthetic oligonucleotide
  Antisense strand to SEQ ID NO: 2024986
aguccgcagaaauuucagc

SEQ ID NO: 2024988 - RNA, 19 nt, Artificial Sequence
  Description of Artificial Sequence: Synthetic oligonucleotide
  Sense strand starting at position 3559 of SEQ ID NO: 1881188
ucacuuugagaaugagcaa

SEQ ID NO: 2024989 - RNA, 19 nt, Artificial Sequence
  Description of Artificial Sequence: Synthetic oligonucleotide
  Antisense strand to SEQ ID NO: 2024988
uugcucauucucaaaguga

SEQ ID NO: 2024990 - RNA, 19 nt, Artificial Sequence
  Description of Artificial Sequence: Synthetic oligonucleotide
  Sense strand starting at position 3562 of SEQ ID NO: 1881188
cuuugagaaugagcaaguu

SEQ ID NO: 2024991 - RNA, 19 nt, Artificial Sequence
  Description of Artificial Sequence: Synthetic oligonucleotide
  Antisense strand to SEQ ID NO: 2024990
aacuugcucauucucaaag

SEQ ID NO: 2024992 - RNA, 19 nt, Artificial Sequence
  Description of Artificial Sequence: Synthetic oligonucleotide
  Sense strand starting at position 3572 of SEQ ID NO: 1881188
gagcaaguuccagaaagug

SEQ ID NO: 2024993 - RNA, 19 nt, Artificial Sequence
  Description of Artificial Sequence: Synthetic oligonucleotide
  Antisense strand to SEQ ID NO: 2024992
cacuuucuggaacuugcuc

SEQ ID NO: 2024994 - RNA, 19 nt, Artificial Sequence
  Description of Artificial Sequence: Synthetic oligonucleotide
  Sense strand starting at position 3578 of SEQ ID NO: 1881188
guuccagaaagugggauua

SEQ ID NO: 2024995 - RNA, 19 nt, Artificial Sequence
  Description of Artificial Sequence: Synthetic oligonucleotide
  Antisense strand to SEQ ID NO: 2024994
uaaucccacuuucuggaac

SEQ ID NO: 2024996 - RNA, 19 nt, Artificial Sequence
  Description of Artificial Sequence: Synthetic oligonucleotide
  Sense strand starting at position 3590 of SEQ ID NO: 1881188
gggauuaacuccuuguaaa

SEQ ID NO: 2024997 - RNA, 19 nt, Artificial Sequence
  Description of Artificial Sequence: Synthetic oligonucleotide
  Antisense strand to SEQ ID NO: 2024996
uuuacaaggaguuaauccc

SEQ ID NO: 2024998 - RNA, 19 nt, Artificial Sequence
  Description of Artificial Sequence: Synthetic oligonucleotide
  Sense strand starting at position 3864 of SEQ ID NO: 1881188
auaaauggccaucauguuu

SEQ ID NO: 2024999 - RNA, 19 nt, Artificial Sequence
  Description of Artificial Sequence: Synthetic oligonucleotide
  Antisense strand to SEQ ID NO: 2024998
aaacaugauggccauuuau

SEQ ID NO: 2025000 - RNA, 19 nt, Artificial Sequence
  Description of Artificial Sequence: Synthetic oligonucleotide
  Sense strand starting at position 7 of SEQ ID NO: 1881189
uuaggucuuggauguugau

SEQ ID NO: 2025001 - RNA, 19 nt, Artificial Sequence
  Description of Artificial Sequence: Synthetic oligonucleotide
  Antisense strand to SEQ ID NO: 2025000
aucaacauccaagaccuaa

SEQ ID NO: 2025002 - RNA, 19 nt, Artificial Sequence
  Description of Artificial Sequence: Synthetic oligonucleotide
  Sense strand starting at position 76 of SEQ ID NO: 1881189
agauguuauucaguaggag

SEQ ID NO: 2025003 - RNA, 19 nt, Artificial Sequence
  Description of Artificial Sequence: Synthetic oligonucleotide
  Antisense strand to SEQ ID NO: 2025002
cuccuacugaauaacaucu

SEQ ID NO: 2025004 - RNA, 19 nt, Artificial Sequence
  Description of Artificial Sequence: Synthetic oligonucleotide
  Sense strand starting at position 79 of SEQ ID NO: 1881189
uguuauucaguaggagaga

SEQ ID NO: 2025005 - RNA, 19 nt, Artificial Sequence
  Description of Artificial Sequence: Synthetic oligonucleotide
  Antisense strand to SEQ ID NO: 2025004
ucucuccuacugaauaaca

SEQ ID NO: 2025006 - RNA, 19 nt, Artificial Sequence
  Description of Artificial Sequence: Synthetic oligonucleotide
  Sense strand starting at position 146 of SEQ ID NO: 1881189
caguuaggagucugagauu

SEQ ID NO: 2025007 - RNA, 19 nt, Artificial Sequence
  Description of Artificial Sequence: Synthetic oligonucleotide
  Antisense strand to SEQ ID NO: 2025006
aaucucagacuccuaacug

SEQ ID NO: 2025008 - RNA, 19 nt, Artificial Sequence
  Description of Artificial Sequence: Synthetic oligonucleotide
  Sense strand starting at position 205 of SEQ ID NO: 1881189
gucacuuucccucaaaguu

SEQ ID NO: 2025009 - RNA, 19 nt, Artificial Sequence
  Description of Artificial Sequence: Synthetic oligonucleotide
  Antisense strand to SEQ ID NO: 2025008
aacuuugagggaaagugac

SEQ ID NO: 2025010 - RNA, 19 nt, Artificial Sequence
  Description of Artificial Sequence: Synthetic oligonucleotide
  Sense strand starting at position 224 of SEQ ID NO: 1881189
uuaauugggcacuauuagu

SEQ ID NO: 2025011 - RNA, 19 nt, Artificial Sequence
  Description of Artificial Sequence: Synthetic oligonucleotide
  Antisense strand to SEQ ID NO: 2025010
acuaauagugcccaauuaa

SEQ ID NO: 2025012 - RNA, 19 nt, Artificial Sequence
  Description of Artificial Sequence: Synthetic oligonucleotide
  Sense strand starting at position 273 of SEQ ID NO: 1881189
ccuaacaagugaguuccua

SEQ ID NO: 2025013 - RNA, 19 nt, Artificial Sequence
  Description of Artificial Sequence: Synthetic oligonucleotide
  Antisense strand to SEQ ID NO: 2025012
uaggaacucacuuguuagg

SEQ ID NO: 2025014 - RNA, 19 nt, Artificial Sequence
  Description of Artificial Sequence: Synthetic oligonucleotide
  Sense strand starting at position 277 of SEQ ID NO: 1881189
acaagugaguuccuaaggu

SEQ ID NO: 2025015 - RNA, 19 nt, Artificial Sequence
  Description of Artificial Sequence: Synthetic oligonucleotide
  Antisense strand to SEQ ID NO: 2025014
accuuaggaacucacuugu

SEQ ID NO: 2025016 - RNA, 19 nt, Artificial Sequence
  Description of Artificial Sequence: Synthetic oligonucleotide
  Sense strand starting at position 325 of SEQ ID NO: 1881189
ugaaucuguuaacuuggaa

SEQ ID NO: 2025017 - RNA, 19 nt, Artificial Sequence
  Description of Artificial Sequence: Synthetic oligonucleotide
  Antisense strand to SEQ ID NO: 2025016
uuccaaguuaacagauuca

SEQ ID NO: 2025018 - RNA, 19 nt, Artificial Sequence
  Description of Artificial Sequence: Synthetic oligonucleotide
  Sense strand starting at position 328 of SEQ ID NO: 1881189
aucuguuaacuuggaacau

SEQ ID NO: 2025019 - RNA, 19 nt, Artificial Sequence
  Description of Artificial Sequence: Synthetic oligonucleotide
  Antisense strand to SEQ ID NO: 2025018
auguuccaaguuaacagau

SEQ ID NO: 2025020 - RNA, 19 nt, Artificial Sequence
  Description of Artificial Sequence: Synthetic oligonucleotide
  Sense strand starting at position 352 of SEQ ID NO: 1881189
uuuguauuauuugggaaga

SEQ ID NO: 2025021 - RNA, 19 nt, Artificial Sequence
  Description of Artificial Sequence: Synthetic oligonucleotide
  Antisense strand to SEQ ID NO: 2025020
ucuucccaaauaauacaaa

SEQ ID NO: 2025022 - RNA, 19 nt, Artificial Sequence
  Description of Artificial Sequence: Synthetic oligonucleotide
  Sense strand starting at position 575 of SEQ ID NO: 1881189
uuauccuuagaaggguuaa

SEQ ID NO: 2025023 - RNA, 19 nt, Artificial Sequence
  Description of Artificial Sequence: Synthetic oligonucleotide
  Antisense strand to SEQ ID NO: 2025022
uuaacccuucuaaggauaa

SEQ ID NO: 2025024 - RNA, 19 nt, Artificial Sequence
  Description of Artificial Sequence: Synthetic oligonucleotide
  Sense strand starting at position 606 of SEQ ID NO: 1881189
uuugaugaaucuuuggaua

SEQ ID NO: 2025025 - RNA, 19 nt, Artificial Sequence
  Description of Artificial Sequence: Synthetic oligonucleotide
  Antisense strand to SEQ ID NO: 2025024
uauccaaagauucaucaaa

SEQ ID NO: 2025026 - RNA, 19 nt, Artificial Sequence
  Description of Artificial Sequence: Synthetic oligonucleotide
  Sense strand starting at position 636 of SEQ ID NO: 1881189
uugauuaucccaggaugac

SEQ ID NO: 2025027 - RNA, 19 nt, Artificial Sequence
  Description of Artificial Sequence: Synthetic oligonucleotide
  Antisense strand to SEQ ID NO: 2025026
gucauccugggauaaucaa

SEQ ID NO: 2025028 - RNA, 19 nt, Artificial Sequence
  Description of Artificial Sequence: Synthetic oligonucleotide
  Sense strand starting at position 906 of SEQ ID NO: 1881189
auaaguuuagguugaagua

SEQ ID NO: 2025029 - RNA, 19 nt, Artificial Sequence
  Description of Artificial Sequence: Synthetic oligonucleotide
  Antisense strand to SEQ ID NO: 2025028
uacuucaaccuaaacuuau

SEQ ID NO: 2025030 - RNA, 19 nt, Artificial Sequence
  Description of Artificial Sequence: Synthetic oligonucleotide
  Sense strand starting at position 907 of SEQ ID NO: 1881189
uaaguuuagguugaaguau

SEQ ID NO: 2025031 - RNA, 19 nt, Artificial Sequence
  Description of Artificial Sequence: Synthetic oligonucleotide
  Antisense strand to SEQ ID NO: 2025030
auacuucaaccuaaacuua

SEQ ID NO: 2025032 - RNA, 19 nt, Artificial Sequence
  Description of Artificial Sequence: Synthetic oligonucleotide
  Sense strand starting at position 930 of SEQ ID NO: 1881189
aauauacugugccugguaa

SEQ ID NO: 2025033 - RNA, 19 nt, Artificial Sequence
  Description of Artificial Sequence: Synthetic oligonucleotide
  Antisense strand to SEQ ID NO: 2025032
uuaccaggcacaguauauu

SEQ ID NO: 2025034 - RNA, 19 nt, Artificial Sequence
  Description of Artificial Sequence: Synthetic oligonucleotide
  Sense strand starting at position 967 of SEQ ID NO: 1881189
guuauccuagaaugauacu

SEQ ID NO: 2025035 - RNA, 19 nt, Artificial Sequence
  Description of Artificial Sequence: Synthetic oligonucleotide
  Antisense strand to SEQ ID NO: 2025034
aguaucauucuaggauaac

SEQ ID NO: 2025036 - RNA, 19 nt, Artificial Sequence
  Description of Artificial Sequence: Synthetic oligonucleotide
  Sense strand starting at position 973 of SEQ ID NO: 1881189
cuagaaugauacugauuua

SEQ ID NO: 2025037 - RNA, 19 nt, Artificial Sequence
  Description of Artificial Sequence: Synthetic oligonucleotide
  Antisense strand to SEQ ID NO: 2025036
uaaaucaguaucauucuag

SEQ ID NO: 2025038 - RNA, 19 nt, Artificial Sequence
  Description of Artificial Sequence: Synthetic oligonucleotide
  Sense strand starting at position 985 of SEQ ID NO: 1881189
ugauuuaccuuguauacua

SEQ ID NO: 2025039 - RNA, 19 nt, Artificial Sequence
  Description of Artificial Sequence: Synthetic oligonucleotide
  Antisense strand to SEQ ID NO: 2025038
uaguauacaagguaaauca

SEQ ID NO: 2025040 - RNA, 19 nt, Artificial Sequence
  Description of Artificial Sequence: Synthetic oligonucleotide
  Sense strand starting at position 992 of SEQ ID NO: 1881189
ccuuguauacuaugaaugu

SEQ ID NO: 2025041 - RNA, 19 nt, Artificial Sequence
  Description of Artificial Sequence: Synthetic oligonucleotide
  Antisense strand to SEQ ID NO: 2025040
acauucauaguauacaagg

SEQ ID NO: 2025042 - RNA, 19 nt, Artificial Sequence
  Description of Artificial Sequence: Synthetic oligonucleotide
  Sense strand starting at position 996 of SEQ ID NO: 1881189
guauacuaugaaugucuaa

SEQ ID NO: 2025043 - RNA, 19 nt, Artificial Sequence
  Description of Artificial Sequence: Synthetic oligonucleotide
  Antisense strand to SEQ ID NO: 2025042
uuagacauucauaguauac

SEQ ID NO: 2025044 - RNA, 19 nt, Artificial Sequence
  Description of Artificial Sequence: Synthetic oligonucleotide
  Sense strand starting at position 1421 of SEQ ID NO: 1881189
aaggacuugcucuguaaca

SEQ ID NO: 2025045 - RNA, 19 nt, Artificial Sequence
  Description of Artificial Sequence: Synthetic oligonucleotide
  Antisense strand to SEQ ID NO: 2025044
uguuacagagcaaguccuu

SEQ ID NO: 2025046 - RNA, 19 nt, Artificial Sequence
  Description of Artificial Sequence: Synthetic oligonucleotide
  Sense strand starting at position 1422 of SEQ ID NO: 1881189
aggacuugcucuguaacag

SEQ ID NO: 2025047 - RNA, 19 nt, Artificial Sequence
  Description of Artificial Sequence: Synthetic oligonucleotide
  Antisense strand to SEQ ID NO: 2025046
cuguuacagagcaaguccu

SEQ ID NO: 2025048 - RNA, 19 nt, Artificial Sequence
  Description of Artificial Sequence: Synthetic oligonucleotide
  Sense strand starting at position 1432 of SEQ ID NO: 1881189
cuguaacagcucugauacu

SEQ ID NO: 2025049 - RNA, 19 nt, Artificial Sequence
  Description of Artificial Sequence: Synthetic oligonucleotide
  Antisense strand to SEQ ID NO: 2025048
aguaucagagcuguuacag

SEQ ID NO: 2025050 - RNA, 19 nt, Artificial Sequence
  Description of Artificial Sequence: Synthetic oligonucleotide
  Sense strand starting at position 1533 of SEQ ID NO: 1881189
uugaguaaagguuaaguua

SEQ ID NO: 2025051 - RNA, 19 nt, Artificial Sequence
  Description of Artificial Sequence: Synthetic oligonucleotide
  Antisense strand to SEQ ID NO: 2025050
uaacuuaaccuuuacucaa

SEQ ID NO: 2025052 - RNA, 19 nt, Artificial Sequence
  Description of Artificial Sequence: Synthetic oligonucleotide
  Sense strand starting at position 1580 of SEQ ID NO: 1881189
uaacuaggugcuuagguaa

SEQ ID NO: 2025053 - RNA, 19 nt, Artificial Sequence
  Description of Artificial Sequence: Synthetic oligonucleotide
  Antisense strand to SEQ ID NO: 2025052
uuaccuaagcaccuaguua

SEQ ID NO: 2025054 - RNA, 19 nt, Artificial Sequence
  Description of Artificial Sequence: Synthetic oligonucleotide
  Sense strand starting at position 1832 of SEQ ID NO: 1881189
gcuagaguggaacaaguau

SEQ ID NO: 2025055 - RNA, 19 nt, Artificial Sequence
  Description of Artificial Sequence: Synthetic oligonucleotide
  Antisense strand to SEQ ID NO: 2025054
auacuuguuccacucuagc

SEQ ID NO: 2025056 - RNA, 19 nt, Artificial Sequence
  Description of Artificial Sequence: Synthetic oligonucleotide
  Sense strand starting at position 1838 of SEQ ID NO: 1881189
guggaacaaguaugucagu

SEQ ID NO: 2025057 - RNA, 19 nt, Artificial Sequence
  Description of Artificial Sequence: Synthetic oligonucleotide
  Antisense strand to SEQ ID NO: 2025056
acugacauacuuguuccac

SEQ ID NO: 2025058 - RNA, 19 nt, Artificial Sequence
  Description of Artificial Sequence: Synthetic oligonucleotide
  Sense strand starting at position 2396 of SEQ ID NO: 1881189
aguaguucucauuaauaac

SEQ ID NO: 2025059 - RNA, 19 nt, Artificial Sequence
  Description of Artificial Sequence: Synthetic oligonucleotide
  Antisense strand to SEQ ID NO: 2025058
guuauuaaugagaacuacu

SEQ ID NO: 2025060 - RNA, 19 nt, Artificial Sequence
  Description of Artificial Sequence: Synthetic oligonucleotide
  Sense strand starting at position 2534 of SEQ ID NO: 1881189
aaacguuuaugauugagaa

SEQ ID NO: 2025061 - RNA, 19 nt, Artificial Sequence
  Description of Artificial Sequence: Synthetic oligonucleotide
  Antisense strand to SEQ ID NO: 2025060
uucucaaucauaaacguuu

SEQ ID NO: 2025062 - RNA, 19 nt, Artificial Sequence
  Description of Artificial Sequence: Synthetic oligonucleotide
  Sense strand starting at position 2535 of SEQ ID NO: 1881189
aacguuuaugauugagaag

SEQ ID NO: 2025063 - RNA, 19 nt, Artificial Sequence
  Description of Artificial Sequence: Synthetic oligonucleotide
  Antisense strand to SEQ ID NO: 2025062
cuucucaaucauaaacguu

SEQ ID NO: 2025064 - RNA, 19 nt, Artificial Sequence
  Description of Artificial Sequence: Synthetic oligonucleotide
  Sense strand starting at position 2664 of SEQ ID NO: 1881189
guaguaaccgggugauaca

SEQ ID NO: 2025065 - RNA, 19 nt, Artificial Sequence
  Description of Artificial Sequence: Synthetic oligonucleotide
  Antisense strand to SEQ ID NO: 2025064
uguaucacccgguuacuac

SEQ ID NO: 2025066 - RNA, 19 nt, Artificial Sequence
  Description of Artificial Sequence: Synthetic oligonucleotide
  Sense strand starting at position 2987 of SEQ ID NO: 1881189
agaugauucuguguaauua

SEQ ID NO: 2025067 - RNA, 19 nt, Artificial Sequence
  Description of Artificial Sequence: Synthetic oligonucleotide
  Antisense strand to SEQ ID NO: 2025066
uaauuacacagaaucaucu

SEQ ID NO: 2025068 - RNA, 19 nt, Artificial Sequence
  Description of Artificial Sequence: Synthetic oligonucleotide
  Sense strand starting at position 2988 of SEQ ID NO: 1881189
gaugauucuguguaauuaa

SEQ ID NO: 2025069 - RNA, 19 nt, Artificial Sequence
  Description of Artificial Sequence: Synthetic oligonucleotide
  Antisense strand to SEQ ID NO: 2025068
uuaauuacacagaaucauc

SEQ ID NO: 2025070 - RNA, 19 nt, Artificial Sequence
  Description of Artificial Sequence: Synthetic oligonucleotide
  Sense strand starting at position 2991 of SEQ ID NO: 1881189
gauucuguguaauuaaagc

SEQ ID NO: 2025071 - RNA, 19 nt, Artificial Sequence
  Description of Artificial Sequence: Synthetic oligonucleotide
  Antisense strand to SEQ ID NO: 2025070
gcuuuaauuacacagaauc

SEQ ID NO: 2025072 - RNA, 19 nt, Artificial Sequence
  Description of Artificial Sequence: Synthetic oligonucleotide
  Sense strand starting at position 3090 of SEQ ID NO: 1881189
uuagguuccaucgagucau

SEQ ID NO: 2025073 - RNA, 19 nt, Artificial Sequence
  Description of Artificial Sequence: Synthetic oligonucleotide
  Antisense strand to SEQ ID NO: 2025072
augacucgauggaaccuaa

SEQ ID NO: 2025074 - RNA, 19 nt, Artificial Sequence
  Description of Artificial Sequence: Synthetic oligonucleotide
  Sense strand starting at position 3246 of SEQ ID NO: 1881189
acuuaauuacagcaguagu

SEQ ID NO: 2025075 - RNA, 19 nt, Artificial Sequence
  Description of Artificial Sequence: Synthetic oligonucleotide
  Antisense strand to SEQ ID NO: 2025074
acuacugcuguaauuaagu

SEQ ID NO: 2025076 - RNA, 19 nt, Artificial Sequence
  Description of Artificial Sequence: Synthetic oligonucleotide
  Sense strand starting at position 3305 of SEQ ID NO: 1881189
ggccacuaacauuagaguu

SEQ ID NO: 2025077 - RNA, 19 nt, Artificial Sequence
  Description of Artificial Sequence: Synthetic oligonucleotide
  Antisense strand to SEQ ID NO: 2025076
aacucuaauguuaguggcc

SEQ ID NO: 2025078 - RNA, 19 nt, Artificial Sequence
  Description of Artificial Sequence: Synthetic oligonucleotide
  Sense strand starting at position 3690 of SEQ ID NO: 1881189
ugaacuugccaauaacagu

SEQ ID NO: 2025079 - RNA, 19 nt, Artificial Sequence
  Description of Artificial Sequence: Synthetic oligonucleotide
  Antisense strand to SEQ ID NO: 2025078
acuguuauuggcaaguuca

SEQ ID NO: 2025080 - RNA, 19 nt, Artificial Sequence
  Description of Artificial Sequence: Synthetic oligonucleotide
  Sense strand starting at position 127 of SEQ ID NO: 1881190
ggccaaauagucuacaugu

SEQ ID NO: 2025081 - RNA, 19 nt, Artificial Sequence
  Description of Artificial Sequence: Synthetic oligonucleotide
  Antisense strand to SEQ ID NO: 2025080
acauguagacuauuuggcc

SEQ ID NO: 2025082 - RNA, 19 nt, Artificial Sequence
  Description of Artificial Sequence: Synthetic oligonucleotide
  Sense strand starting at position 129 of SEQ ID NO: 1881190
ccaaauagucuacauguuu

SEQ ID NO: 2025083 - RNA, 19 nt, Artificial Sequence
  Description of Artificial Sequence: Synthetic oligonucleotide
  Antisense strand to SEQ ID NO: 2025082
aaacauguagacuauuugg

SEQ ID NO: 2025084 - RNA, 19 nt, Artificial Sequence
  Description of Artificial Sequence: Synthetic oligonucleotide
  Sense strand starting at position 164 of SEQ ID NO: 1881190
uuaggucuuggauguugau

SEQ ID NO: 2025085 - RNA, 19 nt, Artificial Sequence
  Description of Artificial Sequence: Synthetic oligonucleotide
  Antisense strand to SEQ ID NO: 2025084
aucaacauccaagaccuaa

SEQ ID NO: 2025086 - RNA, 19 nt, Artificial Sequence
  Description of Artificial Sequence: Synthetic oligonucleotide
  Sense strand starting at position 233 of SEQ ID NO: 1881190
agauguuauucaguaggag

SEQ ID NO: 2025087 - RNA, 19 nt, Artificial Sequence
  Description of Artificial Sequence: Synthetic oligonucleotide
  Antisense strand to SEQ ID NO: 2025086
cuccuacugaauaacaucu

SEQ ID NO: 2025088 - RNA, 19 nt, Artificial Sequence
  Description of Artificial Sequence: Synthetic oligonucleotide
  Sense strand starting at position 236 of SEQ ID NO: 1881190
uguuauucaguaggagaga

SEQ ID NO: 2025089 - RNA, 19 nt, Artificial Sequence
  Description of Artificial Sequence: Synthetic oligonucleotide
  Antisense strand to SEQ ID NO: 2025088
ucucuccuacugaauaaca

SEQ ID NO: 2025090 - RNA, 19 nt, Artificial Sequence
  Description of Artificial Sequence: Synthetic oligonucleotide
  Sense strand starting at position 303 of SEQ ID NO: 1881190
caguuaggagucugagauu

SEQ ID NO: 2025091 - RNA, 19 nt, Artificial Sequence
  Description of Artificial Sequence: Synthetic oligonucleotide
  Antisense strand to SEQ ID NO: 2025090
aaucucagacuccuaacug

SEQ ID NO: 2025092 - RNA, 19 nt, Artificial Sequence
  Description of Artificial Sequence: Synthetic oligonucleotide
  Sense strand starting at position 362 of SEQ ID NO: 1881190
gucacuuucccucaaaguu

SEQ ID NO: 2025093 - RNA, 19 nt, Artificial Sequence
  Description of Artificial Sequence: Synthetic oligonucleotide
  Antisense strand to SEQ ID NO: 2025092
aacuuugagggaaagugac

SEQ ID NO: 2025094 - RNA, 19 nt, Artificial Sequence
  Description of Artificial Sequence: Synthetic oligonucleotide
  Sense strand starting at position 381 of SEQ ID NO: 1881190
uuaauugggcacuauuagu

SEQ ID NO: 2025095 - RNA, 19 nt, Artificial Sequence
  Description of Artificial Sequence: Synthetic oligonucleotide
  Antisense strand to SEQ ID NO: 2025094
acuaauagugcccaauuaa

SEQ ID NO: 2025096 - RNA, 19 nt, Artificial Sequence
  Description of Artificial Sequence: Synthetic oligonucleotide
  Sense strand starting at position 430 of SEQ ID NO: 1881190
ccuaacaagugaguuccua

SEQ ID NO: 2025097 - RNA, 19 nt, Artificial Sequence
  Description of Artificial Sequence: Synthetic oligonucleotide
  Antisense strand to SEQ ID NO: 2025096
uaggaacucacuuguuagg

SEQ ID NO: 2025098 - RNA, 19 nt, Artificial Sequence
  Description of Artificial Sequence: Synthetic oligonucleotide
  Sense strand starting at position 434 of SEQ ID NO: 1881190
acaagugaguuccuaaggu

SEQ ID NO: 2025099 - RNA, 19 nt, Artificial Sequence
  Description of Artificial Sequence: Synthetic oligonucleotide
  Antisense strand to SEQ ID NO: 2025098
accuuaggaacucacuugu

SEQ ID NO: 2025100 - RNA, 19 nt, Artificial Sequence
  Description of Artificial Sequence: Synthetic oligonucleotide
  Sense strand starting at position 482 of SEQ ID NO: 1881190
ugaaucuguuaacuuggaa

SEQ ID NO: 2025101 - RNA, 19 nt, Artificial Sequence
  Description of Artificial Sequence: Synthetic oligonucleotide
  Antisense strand to SEQ ID NO: 2025100
uuccaaguuaacagauuca

SEQ ID NO: 2025102 - RNA, 19 nt, Artificial Sequence
  Description of Artificial Sequence: Synthetic oligonucleotide
  Sense strand starting at position 485 of SEQ ID NO: 1881190
aucuguuaacuuggaacau

SEQ ID NO: 2025103 - RNA, 19 nt, Artificial Sequence
  Description of Artificial Sequence: Synthetic oligonucleotide
  Antisense strand to SEQ ID NO: 2025102
auguuccaaguuaacagau

SEQ ID NO: 2025104 - RNA, 19 nt, Artificial Sequence
  Description of Artificial Sequence: Synthetic oligonucleotide
  Sense strand starting at position 732 of SEQ ID NO: 1881190
uuauccuuagaaggguuaa

SEQ ID NO: 2025105 - RNA, 19 nt, Artificial Sequence
  Description of Artificial Sequence: Synthetic oligonucleotide
  Antisense strand to SEQ ID NO: 2025104
uuaacccuucuaaggauaa

SEQ ID NO: 2025106 - RNA, 19 nt, Artificial Sequence
  Description of Artificial Sequence: Synthetic oligonucleotide
  Sense strand starting at position 763 of SEQ ID NO: 1881190
uuugaugaaucuuuggaua

SEQ ID NO: 2025107 - RNA, 19 nt, Artificial Sequence
  Description of Artificial Sequence: Synthetic oligonucleotide
  Antisense strand to SEQ ID NO: 2025106
uauccaaagauucaucaaa

SEQ ID NO: 2025108 - RNA, 19 nt, Artificial Sequence
  Description of Artificial Sequence: Synthetic oligonucleotide
  Sense strand starting at position 793 of SEQ ID NO: 1881190
uugauuaucccaggaugac

SEQ ID NO: 2025109 - RNA, 19 nt, Artificial Sequence
  Description of Artificial Sequence: Synthetic oligonucleotide
  Antisense strand to SEQ ID NO: 2025108
gucauccugggauaaucaa

SEQ ID NO: 2025110 - RNA, 19 nt, Artificial Sequence
  Description of Artificial Sequence: Synthetic oligonucleotide
  Sense strand starting at position 1063 of SEQ ID NO: 1881190
auaaguuuagguugaagua

SEQ ID NO: 2025111 - RNA, 19 nt, Artificial Sequence
  Description of Artificial Sequence: Synthetic oligonucleotide
  Antisense strand to SEQ ID NO: 2025110
uacuucaaccuaaacuuau

SEQ ID NO: 2025112 - RNA, 19 nt, Artificial Sequence
  Description of Artificial Sequence: Synthetic oligonucleotide
  Sense strand starting at position 1064 of SEQ ID NO: 1881190
uaaguuuagguugaaguau

SEQ ID NO: 2025113 - RNA, 19 nt, Artificial Sequence
  Description of Artificial Sequence: Synthetic oligonucleotide
  Antisense strand to SEQ ID NO: 2025112
auacuucaaccuaaacuua

SEQ ID NO: 2025114 - RNA, 19 nt, Artificial Sequence
  Description of Artificial Sequence: Synthetic oligonucleotide
  Sense strand starting at position 1087 of SEQ ID NO: 1881190
aauauacugugccugguaa

SEQ ID NO: 2025115 - RNA, 19 nt, Artificial Sequence
  Description of Artificial Sequence: Synthetic oligonucleotide
  Antisense strand to SEQ ID NO: 2025114
uuaccaggcacaguauauu

SEQ ID NO: 2025116 - RNA, 19 nt, Artificial Sequence
  Description of Artificial Sequence: Synthetic oligonucleotide
  Sense strand starting at position 1124 of SEQ ID NO: 1881190
guuauccuagaaugauacu

SEQ ID NO: 2025117 - RNA, 19 nt, Artificial Sequence
  Description of Artificial Sequence: Synthetic oligonucleotide
  Antisense strand to SEQ ID NO: 2025116
aguaucauucuaggauaac

SEQ ID NO: 2025118 - RNA, 19 nt, Artificial Sequence
  Description of Artificial Sequence: Synthetic oligonucleotide
  Sense strand starting at position 1130 of SEQ ID NO: 1881190
cuagaaugauacugauuua

SEQ ID NO: 2025119 - RNA, 19 nt, Artificial Sequence
  Description of Artificial Sequence: Synthetic oligonucleotide
  Antisense strand to SEQ ID NO: 2025118
uaaaucaguaucauucuag

SEQ ID NO: 2025120 - RNA, 19 nt, Artificial Sequence
  Description of Artificial Sequence: Synthetic oligonucleotide
  Sense strand starting at position 1149 of SEQ ID NO: 1881190
ccuuguauacuaugaaugu

SEQ ID NO: 2025121 - RNA, 19 nt, Artificial Sequence
  Description of Artificial Sequence: Synthetic oligonucleotide
  Antisense strand to SEQ ID NO: 2025120
acauucauaguauacaagg

SEQ ID NO: 2025122 - RNA, 19 nt, Artificial Sequence
  Description of Artificial Sequence: Synthetic oligonucleotide
  Sense strand starting at position 1153 of SEQ ID NO: 1881190
guauacuaugaaugucuaa

SEQ ID NO: 2025123 - RNA, 19 nt, Artificial Sequence
  Description of Artificial Sequence: Synthetic oligonucleotide
  Antisense strand to SEQ ID NO: 2025122
uuagacauucauaguauac

SEQ ID NO: 2025124 - RNA, 19 nt, Artificial Sequence
  Description of Artificial Sequence: Synthetic oligonucleotide
  Sense strand starting at position 1578 of SEQ ID NO: 1881190
aaggacuugcucuguaaca

SEQ ID NO: 2025125 - RNA, 19 nt, Artificial Sequence
  Description of Artificial Sequence: Synthetic oligonucleotide
  Antisense strand to SEQ ID NO: 2025124
uguuacagagcaaguccuu

SEQ ID NO: 2025126 - RNA, 19 nt, Artificial Sequence
  Description of Artificial Sequence: Synthetic oligonucleotide
  Sense strand starting at position 1579 of SEQ ID NO: 1881190
aggacuugcucuguaacag

SEQ ID NO: 2025127 - RNA, 19 nt, Artificial Sequence
  Description of Artificial Sequence: Synthetic oligonucleotide
  Antisense strand to SEQ ID NO: 2025126
cuguuacagagcaaguccu

SEQ ID NO: 2025128 - RNA, 19 nt, Artificial Sequence
  Description of Artificial Sequence: Synthetic oligonucleotide
  Sense strand starting at position 1589 of SEQ ID NO: 1881190
cuguaacagcucugauacu

SEQ ID NO: 2025129 - RNA, 19 nt, Artificial Sequence
  Description of Artificial Sequence: Synthetic oligonucleotide
  Antisense strand to SEQ ID NO: 2025128
aguaucagagcuguuacag

SEQ ID NO: 2025130 - RNA, 19 nt, Artificial Sequence
  Description of Artificial Sequence: Synthetic oligonucleotide
  Sense strand starting at position 1690 of SEQ ID NO: 1881190
uugaguaaagguuaaguua

SEQ ID NO: 2025131 - RNA, 19 nt, Artificial Sequence
  Description of Artificial Sequence: Synthetic oligonucleotide
  Antisense strand to SEQ ID NO: 2025130
uaacuuaaccuuuacucaa

SEQ ID NO: 2025132 - RNA, 19 nt, Artificial Sequence
  Description of Artificial Sequence: Synthetic oligonucleotide
  Sense strand starting at position 1737 of SEQ ID NO: 1881190
uaacuaggugcuuagguaa

SEQ ID NO: 2025133 - RNA, 19 nt, Artificial Sequence
  Description of Artificial Sequence: Synthetic oligonucleotide
  Antisense strand to SEQ ID NO: 2025132
uuaccuaagcaccuaguua

SEQ ID NO: 2025134 - RNA, 19 nt, Artificial Sequence
  Description of Artificial Sequence: Synthetic oligonucleotide
  Sense strand starting at position 1989 of SEQ ID NO: 1881190
gcuagaguggaacaaguau

SEQ ID NO: 2025135 - RNA, 19 nt, Artificial Sequence
  Description of Artificial Sequence: Synthetic oligonucleotide
  Antisense strand to SEQ ID NO: 2025134
auacuuguuccacucuagc

SEQ ID NO: 2025136 - RNA, 19 nt, Artificial Sequence
  Description of Artificial Sequence: Synthetic oligonucleotide
  Sense strand starting at position 1995 of SEQ ID NO: 1881190
guggaacaaguaugucagu

SEQ ID NO: 2025137 - RNA, 19 nt, Artificial Sequence
  Description of Artificial Sequence: Synthetic oligonucleotide
  Antisense strand to SEQ ID NO: 2025136
acugacauacuuguuccac

SEQ ID NO: 2025138 - RNA, 19 nt, Artificial Sequence
  Description of Artificial Sequence: Synthetic oligonucleotide
  Sense strand starting at position 2553 of SEQ ID NO: 1881190
aguaguucucauuaauaac

SEQ ID NO: 2025139 - RNA, 19 nt, Artificial Sequence
  Description of Artificial Sequence: Synthetic oligonucleotide
  Antisense strand to SEQ ID NO: 2025138
guuauuaaugagaacuacu

SEQ ID NO: 2025140 - RNA, 19 nt, Artificial Sequence
  Description of Artificial Sequence: Synthetic oligonucleotide
  Sense strand starting at position 2691 of SEQ ID NO: 1881190
aaacguuuaugauugagaa

SEQ ID NO: 2025141 - RNA, 19 nt, Artificial Sequence
  Description of Artificial Sequence: Synthetic oligonucleotide
  Antisense strand to SEQ ID NO: 2025140
uucucaaucauaaacguuu

SEQ ID NO: 2025142 - RNA, 19 nt, Artificial Sequence
  Description of Artificial Sequence: Synthetic oligonucleotide
  Sense strand starting at position 2692 of SEQ ID NO: 1881190
aacguuuaugauugagaag

SEQ ID NO: 2025143 - RNA, 19 nt, Artificial Sequence
  Description of Artificial Sequence: Synthetic oligonucleotide
  Antisense strand to SEQ ID NO: 2025142
cuucucaaucauaaacguu

SEQ ID NO: 2025144 - RNA, 19 nt, Artificial Sequence
  Description of Artificial Sequence: Synthetic oligonucleotide
  Sense strand starting at position 2821 of SEQ ID NO: 1881190
guaguaaccgggugauaca

SEQ ID NO: 2025145 - RNA, 19 nt, Artificial Sequence
  Description of Artificial Sequence: Synthetic oligonucleotide
  Antisense strand to SEQ ID NO: 2025144
uguaucacccgguuacuac

SEQ ID NO: 2025146 - RNA, 19 nt, Artificial Sequence
  Description of Artificial Sequence: Synthetic oligonucleotide
  Sense strand starting at position 3144 of SEQ ID NO: 1881190
agaugauucuguguaauua

SEQ ID NO: 2025147 - RNA, 19 nt, Artificial Sequence
  Description of Artificial Sequence: Synthetic oligonucleotide
  Antisense strand to SEQ ID NO: 2025146
uaauuacacagaaucaucu

SEQ ID NO: 2025148 - RNA, 19 nt, Artificial Sequence
  Description of Artificial Sequence: Synthetic oligonucleotide
  Sense strand starting at position 3145 of SEQ ID NO: 1881190
gaugauucuguguaauuaa

SEQ ID NO: 2025149 - RNA, 19 nt, Artificial Sequence
  Description of Artificial Sequence: Synthetic oligonucleotide
  Antisense strand to SEQ ID NO: 2025148
uuaauuacacagaaucauc

SEQ ID NO: 2025150 - RNA, 19 nt, Artificial Sequence
  Description of Artificial Sequence: Synthetic oligonucleotide
  Sense strand starting at position 3148 of SEQ ID NO: 1881190
gauucuguguaauuaaagc

SEQ ID NO: 2025151 - RNA, 19 nt, Artificial Sequence
  Description of Artificial Sequence: Synthetic oligonucleotide
  Antisense strand to SEQ ID NO: 2025150
gcuuuaauuacacagaauc

SEQ ID NO: 2025152 - RNA, 19 nt, Artificial Sequence
  Description of Artificial Sequence: Synthetic oligonucleotide
  Sense strand starting at position 3247 of SEQ ID NO: 1881190
uuagguuccaucgagucau

SEQ ID NO: 2025153 - RNA, 19 nt, Artificial Sequence
  Description of Artificial Sequence: Synthetic oligonucleotide
  Antisense strand to SEQ ID NO: 2025152
augacucgauggaaccuaa

SEQ ID NO: 2025154 - RNA, 19 nt, Artificial Sequence
  Description of Artificial Sequence: Synthetic oligonucleotide
  Sense strand starting at position 3403 of SEQ ID NO: 1881190
acuuaauuacagcaguagu

SEQ ID NO: 2025155 - RNA, 19 nt, Artificial Sequence
  Description of Artificial Sequence: Synthetic oligonucleotide
  Antisense strand to SEQ ID NO: 2025154
acuacugcuguaauuaagu

SEQ ID NO: 2025156 - RNA, 19 nt, Artificial Sequence
  Description of Artificial Sequence: Synthetic oligonucleotide
  Sense strand starting at position 3462 of SEQ ID NO: 1881190
ggccacuaacauuagaguu

SEQ ID NO: 2025157 - RNA, 19 nt, Artificial Sequence
  Description of Artificial Sequence: Synthetic oligonucleotide
  Antisense strand to SEQ ID NO: 2025156
aacucuaauguuaguggcc

SEQ ID NO: 2025158 - RNA, 19 nt, Artificial Sequence
  Description of Artificial Sequence: Synthetic oligonucleotide
  Sense strand starting at position 3847 of SEQ ID NO: 1881190
ugaacuugccaauaacagu

SEQ ID NO: 2025159 - RNA, 19 nt, Artificial Sequence
  Description of Artificial Sequence: Synthetic oligonucleotide
  Antisense strand to SEQ ID NO: 2025158
acuguuauuggcaaguuca

SEQ ID NO: 2025160 - RNA, 19 nt, Artificial Sequence
  Description of Artificial Sequence: Synthetic oligonucleotide
  Sense strand starting at position 84 of SEQ ID NO: 1881191
uaggguucuuucgcuguga

SEQ ID NO: 2025161 - RNA, 19 nt, Artificial Sequence
  Description of Artificial Sequence: Synthetic oligonucleotide
  Antisense strand to SEQ ID NO: 2025160
ucacagcgaaagaacccua

SEQ ID NO: 2025162 - RNA, 19 nt, Artificial Sequence
  Description of Artificial Sequence: Synthetic oligonucleotide
  Sense strand starting at position 88 of SEQ ID NO: 1881191
guucuuucgcugugaccca

SEQ ID NO: 2025163 - RNA, 19 nt, Artificial Sequence
  Description of Artificial Sequence: Synthetic oligonucleotide
  Antisense strand to SEQ ID NO: 2025162
ugggucacagcgaaagaac

SEQ ID NO: 2025164 - RNA, 19 nt, Artificial Sequence
  Description of Artificial Sequence: Synthetic oligonucleotide
  Sense strand starting at position 161 of SEQ ID NO: 1881191
cgucucuucucaucgaagu

SEQ ID NO: 2025165 - RNA, 19 nt, Artificial Sequence
  Description of Artificial Sequence: Synthetic oligonucleotide
  Antisense strand to SEQ ID NO: 2025164
acuucgaugagaagagacg

SEQ ID NO: 2025166 - RNA, 19 nt, Artificial Sequence
  Description of Artificial Sequence: Synthetic oligonucleotide
  Sense strand starting at position 172 of SEQ ID NO: 1881191
aucgaagucucacauguuu

SEQ ID NO: 2025167 - RNA, 19 nt, Artificial Sequence
  Description of Artificial Sequence: Synthetic oligonucleotide
  Antisense strand to SEQ ID NO: 2025166
aaacaugugagacuucgau

SEQ ID NO: 2025168 - RNA, 19 nt, Artificial Sequence
  Description of Artificial Sequence: Synthetic oligonucleotide
  Sense strand starting at position 174 of SEQ ID NO: 1881191
cgaagucucacauguuugu

SEQ ID NO: 2025169 - RNA, 19 nt, Artificial Sequence
  Description of Artificial Sequence: Synthetic oligonucleotide
  Antisense strand to SEQ ID NO: 2025168
acaaacaugugagacuucg

SEQ ID NO: 2025170 - RNA, 19 nt, Artificial Sequence
  Description of Artificial Sequence: Synthetic oligonucleotide
  Sense strand starting at position 226 of SEQ ID NO: 1881191
ugaugaauauucgucacug

SEQ ID NO: 2025171 - RNA, 19 nt, Artificial Sequence
  Description of Artificial Sequence: Synthetic oligonucleotide
  Antisense strand to SEQ ID NO: 2025170
cagugacgaauauucauca

SEQ ID NO: 2025172 - RNA, 19 nt, Artificial Sequence
  Description of Artificial Sequence: Synthetic oligonucleotide
  Sense strand starting at position 227 of SEQ ID NO: 1881191
gaugaauauucgucacugg

SEQ ID NO: 2025173 - RNA, 19 nt, Artificial Sequence
  Description of Artificial Sequence: Synthetic oligonucleotide
  Antisense strand to SEQ ID NO: 2025172
ccagugacgaauauucauc

SEQ ID NO: 2025174 - RNA, 19 nt, Artificial Sequence
  Description of Artificial Sequence: Synthetic oligonucleotide
  Sense strand starting at position 228 of SEQ ID NO: 1881191
augaauauucgucacugga

SEQ ID NO: 2025175 - RNA, 19 nt, Artificial Sequence
  Description of Artificial Sequence: Synthetic oligonucleotide
  Antisense strand to SEQ ID NO: 2025174
uccagugacgaauauucau

SEQ ID NO: 2025176 - RNA, 19 nt, Artificial Sequence
  Description of Artificial Sequence: Synthetic oligonucleotide
  Sense strand starting at position 230 of SEQ ID NO: 1881191
gaauauucgucacuggaau

SEQ ID NO: 2025177 - RNA, 19 nt, Artificial Sequence
  Description of Artificial Sequence: Synthetic oligonucleotide
  Antisense strand to SEQ ID NO: 2025176
auuccagugacgaauauuc

SEQ ID NO: 2025178 - RNA, 19 nt, Artificial Sequence
  Description of Artificial Sequence: Synthetic oligonucleotide
  Sense strand starting at position 231 of SEQ ID NO: 1881191
aauauucgucacuggaaua

SEQ ID NO: 2025179 - RNA, 19 nt, Artificial Sequence
  Description of Artificial Sequence: Synthetic oligonucleotide
  Antisense strand to SEQ ID NO: 2025178
uauuccagugacgaauauu

SEQ ID NO: 2025180 - RNA, 19 nt, Artificial Sequence
  Description of Artificial Sequence: Synthetic oligonucleotide
  Sense strand starting at position 326 of SEQ ID NO: 1881191
ucagguuauuugcaagcau

SEQ ID NO: 2025181 - RNA, 19 nt, Artificial Sequence
  Description of Artificial Sequence: Synthetic oligonucleotide
  Antisense strand to SEQ ID NO: 2025180
augcuugcaaauaaccuga

SEQ ID NO: 2025182 - RNA, 19 nt, Artificial Sequence
  Description of Artificial Sequence: Synthetic oligonucleotide
  Sense strand starting at position 347 of SEQ ID NO: 1881191
ucucguuugagauaugggu

SEQ ID NO: 2025183 - RNA, 19 nt, Artificial Sequence
  Description of Artificial Sequence: Synthetic oligonucleotide
  Antisense strand to SEQ ID NO: 2025182
acccauaucucaaacgaga

SEQ ID NO: 2025184 - RNA, 19 nt, Artificial Sequence
  Description of Artificial Sequence: Synthetic oligonucleotide
  Sense strand starting at position 349 of SEQ ID NO: 1881191
ucguuugagauaugggugu

SEQ ID NO: 2025185 - RNA, 19 nt, Artificial Sequence
  Description of Artificial Sequence: Synthetic oligonucleotide
  Antisense strand to SEQ ID NO: 2025184
acacccauaucucaaacga

SEQ ID NO: 2025186 - RNA, 19 nt, Artificial Sequence
  Description of Artificial Sequence: Synthetic oligonucleotide
  Sense strand starting at position 351 of SEQ ID NO: 1881191
guuugagauauggguguuu

SEQ ID NO: 2025187 - RNA, 19 nt, Artificial Sequence
  Description of Artificial Sequence: Synthetic oligonucleotide
  Antisense strand to SEQ ID NO: 2025186
aaacacccauaucucaaac

SEQ ID NO: 2025188 - RNA, 19 nt, Artificial Sequence
  Description of Artificial Sequence: Synthetic oligonucleotide
  Sense strand starting at position 664 of SEQ ID NO: 1881191
gguggucuuuaugcccaau

SEQ ID NO: 2025189 - RNA, 19 nt, Artificial Sequence
  Description of Artificial Sequence: Synthetic oligonucleotide
  Antisense strand to SEQ ID NO: 2025188
auugggcauaaagaccacc

SEQ ID NO: 2025190 - RNA, 19 nt, Artificial Sequence
  Description of Artificial Sequence: Synthetic oligonucleotide
  Sense strand starting at position 666 of SEQ ID NO: 1881191
uggucuuuaugcccaauaa

SEQ ID NO: 2025191 - RNA, 19 nt, Artificial Sequence
  Description of Artificial Sequence: Synthetic oligonucleotide
  Antisense strand to SEQ ID NO: 2025190
uuauugggcauaaagacca

SEQ ID NO: 2025192 - RNA, 19 nt, Artificial Sequence
  Description of Artificial Sequence: Synthetic oligonucleotide
  Sense strand starting at position 667 of SEQ ID NO: 1881191
ggucuuuaugcccaauaaa

SEQ ID NO: 2025193 - RNA, 19 nt, Artificial Sequence
  Description of Artificial Sequence: Synthetic oligonucleotide
  Antisense strand to SEQ ID NO: 2025192
uuuauugggcauaaagacc

SEQ ID NO: 2025194 - RNA, 19 nt, Artificial Sequence
  Description of Artificial Sequence: Synthetic oligonucleotide
  Sense strand starting at position 715 of SEQ ID NO: 1881191
uucucuugauaccugagaa

SEQ ID NO: 2025195 - RNA, 19 nt, Artificial Sequence
  Description of Artificial Sequence: Synthetic oligonucleotide
  Antisense strand to SEQ ID NO: 2025194
uucucagguaucaagagaa

SEQ ID NO: 2025196 - RNA, 19 nt, Artificial Sequence
  Description of Artificial Sequence: Synthetic oligonucleotide
  Sense strand starting at position 719 of SEQ ID NO: 1881191
cuugauaccugagaaauca

SEQ ID NO: 2025197 - RNA, 19 nt, Artificial Sequence
  Description of Artificial Sequence: Synthetic oligonucleotide
  Antisense strand to SEQ ID NO: 2025196
ugauuucucagguaucaag

SEQ ID NO: 2025198 - RNA, 19 nt, Artificial Sequence
  Description of Artificial Sequence: Synthetic oligonucleotide
  Sense strand starting at position 1084 of SEQ ID NO: 1881191
augugacuccuuuaaccug

SEQ ID NO: 2025199 - RNA, 19 nt, Artificial Sequence
  Description of Artificial Sequence: Synthetic oligonucleotide
  Antisense strand to SEQ ID NO: 2025198
cagguuaaaggagucacau

SEQ ID NO: 2025200 - RNA, 19 nt, Artificial Sequence
  Description of Artificial Sequence: Synthetic oligonucleotide
  Sense strand starting at position 1099 of SEQ ID NO: 1881191
ccuggugugcuuuaacaac

SEQ ID NO: 2025201 - RNA, 19 nt, Artificial Sequence
  Description of Artificial Sequence: Synthetic oligonucleotide
  Antisense strand to SEQ ID NO: 2025200
guuguuaaagcacaccagg

SEQ ID NO: 2025202 - RNA, 19 nt, Artificial Sequence
  Description of Artificial Sequence: Synthetic oligonucleotide
  Sense strand starting at position 1163 of SEQ ID NO: 1881191
accaaauaaugcgaccaua

SEQ ID NO: 2025203 - RNA, 19 nt, Artificial Sequence
  Description of Artificial Sequence: Synthetic oligonucleotide
  Antisense strand to SEQ ID NO: 2025202
uauggucgcauuauuuggu

SEQ ID NO: 2025204 - RNA, 19 nt, Artificial Sequence
  Description of Artificial Sequence: Synthetic oligonucleotide
  Sense strand starting at position 1202 of SEQ ID NO: 1881191
ggaguaucuugcuccucua

SEQ ID NO: 2025205 - RNA, 19 nt, Artificial Sequence
  Description of Artificial Sequence: Synthetic oligonucleotide
  Antisense strand to SEQ ID NO: 2025204
uagaggagcaagauacucc

SEQ ID NO: 2025206 - RNA, 19 nt, Artificial Sequence
  Description of Artificial Sequence: Synthetic oligonucleotide
  Sense strand starting at position 1205 of SEQ ID NO: 1881191
guaucuugcuccucuacca

SEQ ID NO: 2025207 - RNA, 19 nt, Artificial Sequence
  Description of Artificial Sequence: Synthetic oligonucleotide
  Antisense strand to SEQ ID NO: 2025206
ugguagaggagcaagauac

SEQ ID NO: 2025208 - RNA, 19 nt, Artificial Sequence
  Description of Artificial Sequence: Synthetic oligonucleotide
  Sense strand starting at position 1320 of SEQ ID NO: 1881191
uagagaagcuaacucagua

SEQ ID NO: 2025209 - RNA, 19 nt, Artificial Sequence
  Description of Artificial Sequence: Synthetic oligonucleotide
  Antisense strand to SEQ ID NO: 2025208
uacugaguuagcuucucua

SEQ ID NO: 2025210 - RNA, 19 nt, Artificial Sequence
  Description of Artificial Sequence: Synthetic oligonucleotide
  Sense strand starting at position 1324 of SEQ ID NO: 1881191
gaagcuaacucaguagaga

SEQ ID NO: 2025211 - RNA, 19 nt, Artificial Sequence
  Description of Artificial Sequence: Synthetic oligonucleotide
  Antisense strand to SEQ ID NO: 2025210
ucucuacugaguuagcuuc

SEQ ID NO: 2025212 - RNA, 19 nt, Artificial Sequence
  Description of Artificial Sequence: Synthetic oligonucleotide
  Sense strand starting at position 1499 of SEQ ID NO: 1881191
gugaucgugucauuccaaa

SEQ ID NO: 2025213 - RNA, 19 nt, Artificial Sequence
  Description of Artificial Sequence: Synthetic oligonucleotide
  Antisense strand to SEQ ID NO: 2025212
uuuggaaugacacgaucac

SEQ ID NO: 2025214 - RNA, 19 nt, Artificial Sequence
  Description of Artificial Sequence: Synthetic oligonucleotide
  Sense strand starting at position 1535 of SEQ ID NO: 1881191
ggugcaugaccuggagaca

SEQ ID NO: 2025215 - RNA, 19 nt, Artificial Sequence
  Description of Artificial Sequence: Synthetic oligonucleotide
  Antisense strand to SEQ ID NO: 2025214
ugucuccaggucaugcacc

SEQ ID NO: 2025216 - RNA, 19 nt, Artificial Sequence
  Description of Artificial Sequence: Synthetic oligonucleotide
  Sense strand starting at position 1643 of SEQ ID NO: 1881191
aaguaagagggcuaucuuu

SEQ ID NO: 2025217 - RNA, 19 nt, Artificial Sequence
  Description of Artificial Sequence: Synthetic oligonucleotide
  Antisense strand to SEQ ID NO: 2025216
aaagauagcccucuuacuu

SEQ ID NO: 2025218 - RNA, 19 nt, Artificial Sequence
  Description of Artificial Sequence: Synthetic oligonucleotide
  Sense strand starting at position 1651 of SEQ ID NO: 1881191
gggcuaucuuuagcgagau

SEQ ID NO: 2025219 - RNA, 19 nt, Artificial Sequence
  Description of Artificial Sequence: Synthetic oligonucleotide
  Antisense strand to SEQ ID NO: 2025218
aucucgcuaaagauagccc

SEQ ID NO: 2025220 - RNA, 19 nt, Artificial Sequence
  Description of Artificial Sequence: Synthetic oligonucleotide
  Sense strand starting at position 1690 of SEQ ID NO: 1881191
gggagucacuaccauugca

SEQ ID NO: 2025221 - RNA, 19 nt, Artificial Sequence
  Description of Artificial Sequence: Synthetic oligonucleotide
  Antisense strand to SEQ ID NO: 2025220
ugcaaugguagugacuccc

SEQ ID NO: 2025222 - RNA, 19 nt, Artificial Sequence
  Description of Artificial Sequence: Synthetic oligonucleotide
  Sense strand starting at position 1846 of SEQ ID NO: 1881191
caagcagcucaguaaagua

SEQ ID NO: 2025223 - RNA, 19 nt, Artificial Sequence
  Description of Artificial Sequence: Synthetic oligonucleotide
  Antisense strand to SEQ ID NO: 2025222
uacuuuacugagcugcuug

SEQ ID NO: 2025224 - RNA, 19 nt, Artificial Sequence
  Description of Artificial Sequence: Synthetic oligonucleotide
  Sense strand starting at position 1942 of SEQ ID NO: 1881191
gcuggaaugcucuggagac

SEQ ID NO: 2025225 - RNA, 19 nt, Artificial Sequence
  Description of Artificial Sequence: Synthetic oligonucleotide
  Antisense strand to SEQ ID NO: 2025224
gucuccagagcauuccagc

SEQ ID NO: 2025226 - RNA, 19 nt, Artificial Sequence
  Description of Artificial Sequence: Synthetic oligonucleotide
  Sense strand starting at position 1943 of SEQ ID NO: 1881191
cuggaaugcucuggagaca

SEQ ID NO: 2025227 - RNA, 19 nt, Artificial Sequence
  Description of Artificial Sequence: Synthetic oligonucleotide
  Antisense strand to SEQ ID NO: 2025226
ugucuccagagcauuccag

SEQ ID NO: 2025228 - RNA, 19 nt, Artificial Sequence
  Description of Artificial Sequence: Synthetic oligonucleotide
  Sense strand starting at position 2090 of SEQ ID NO: 1881191
ccgggaguagguugugaaa

SEQ ID NO: 2025229 - RNA, 19 nt, Artificial Sequence
  Description of Artificial Sequence: Synthetic oligonucleotide
  Antisense strand to SEQ ID NO: 2025228
uuucacaaccuacucccgg

SEQ ID NO: 2025230 - RNA, 19 nt, Artificial Sequence
  Description of Artificial Sequence: Synthetic oligonucleotide
  Sense strand starting at position 2099 of SEQ ID NO: 1881191
gguugugaaacggagucua

SEQ ID NO: 2025231 - RNA, 19 nt, Artificial Sequence
  Description of Artificial Sequence: Synthetic oligonucleotide
  Antisense strand to SEQ ID NO: 2025230
uagacuccguuucacaacc

SEQ ID NO: 2025232 - RNA, 19 nt, Artificial Sequence
  Description of Artificial Sequence: Synthetic oligonucleotide
  Sense strand starting at position 2186 of SEQ ID NO: 1881191
ggucccgauccggauuaga

SEQ ID NO: 2025233 - RNA, 19 nt, Artificial Sequence
  Description of Artificial Sequence: Synthetic oligonucleotide
  Antisense strand to SEQ ID NO: 2025232
ucuaauccggaucgggacc

SEQ ID NO: 2025234 - RNA, 19 nt, Artificial Sequence
  Description of Artificial Sequence: Synthetic oligonucleotide
  Sense strand starting at position 2214 of SEQ ID NO: 1881191
caggauuagcccuguuggu

SEQ ID NO: 2025235 - RNA, 19 nt, Artificial Sequence
  Description of Artificial Sequence: Synthetic oligonucleotide
  Antisense strand to SEQ ID NO: 2025234
accaacagggcuaauccug

SEQ ID NO: 2025236 - RNA, 19 nt, Artificial Sequence
  Description of Artificial Sequence: Synthetic oligonucleotide
  Sense strand starting at position 3883 of SEQ ID NO: 1881191
ccugcuuggucccugcaaa

SEQ ID NO: 2025237 - RNA, 19 nt, Artificial Sequence
  Description of Artificial Sequence: Synthetic oligonucleotide
  Antisense strand to SEQ ID NO: 2025236
uuugcagggaccaagcagg

SEQ ID NO: 2025238 - RNA, 19 nt, Artificial Sequence
  Description of Artificial Sequence: Synthetic oligonucleotide
  Sense strand starting at position 3954 of SEQ ID NO: 1881191
guggauuugucguauuaaa

SEQ ID NO: 2025239 - RNA, 19 nt, Artificial Sequence
  Description of Artificial Sequence: Synthetic oligonucleotide
  Antisense strand to SEQ ID NO: 2025238
uuuaauacgacaaauccac

SEQ ID NO: 2025240 - RNA, 19 nt, Artificial Sequence
  Description of Artificial Sequence: Synthetic oligonucleotide
  Sense strand starting at position 30 of SEQ ID NO: 1881192
gcucuugggagaugauuag

SEQ ID NO: 2025241 - RNA, 19 nt, Artificial Sequence
  Description of Artificial Sequence: Synthetic oligonucleotide
  Antisense strand to SEQ ID NO: 2025240
cuaaucaucucccaagagc

SEQ ID NO: 2025242 - RNA, 19 nt, Artificial Sequence
  Description of Artificial Sequence: Synthetic oligonucleotide
  Sense strand starting at position 41 of SEQ ID NO: 1881192
augauuaggucaucaaagu

SEQ ID NO: 2025243 - RNA, 19 nt, Artificial Sequence
  Description of Artificial Sequence: Synthetic oligonucleotide
  Antisense strand to SEQ ID NO: 2025242
acuuugaugaccuaaucau

SEQ ID NO: 2025244 - RNA, 19 nt, Artificial Sequence
  Description of Artificial Sequence: Synthetic oligonucleotide
  Sense strand starting at position 64 of SEQ ID NO: 1881192
cccucaugaauggguaagu

SEQ ID NO: 2025245 - RNA, 19 nt, Artificial Sequence
  Description of Artificial Sequence: Synthetic oligonucleotide
  Antisense strand to SEQ ID NO: 2025244
acuuacccauucaugaggg

SEQ ID NO: 2025246 - RNA, 19 nt, Artificial Sequence
  Description of Artificial Sequence: Synthetic oligonucleotide
  Sense strand starting at position 174 of SEQ ID NO: 1881192
ucaacaagccgucaucaga

SEQ ID NO: 2025247 - RNA, 19 nt, Artificial Sequence
  Description of Artificial Sequence: Synthetic oligonucleotide
  Antisense strand to SEQ ID NO: 2025246
ucugaugacggcuuguuga

SEQ ID NO: 2025248 - RNA, 19 nt, Artificial Sequence
  Description of Artificial Sequence: Synthetic oligonucleotide
  Sense strand starting at position 396 of SEQ ID NO: 1881192
cgaguaaacuuuccaucca

SEQ ID NO: 2025249 - RNA, 19 nt, Artificial Sequence
  Description of Artificial Sequence: Synthetic oligonucleotide
  Antisense strand to SEQ ID NO: 2025248
uggauggaaaguuuacucg

SEQ ID NO: 2025250 - RNA, 19 nt, Artificial Sequence
  Description of Artificial Sequence: Synthetic oligonucleotide
  Sense strand starting at position 480 of SEQ ID NO: 1881192
ggaaguaaauggguaaugu

SEQ ID NO: 2025251 - RNA, 19 nt, Artificial Sequence
  Description of Artificial Sequence: Synthetic oligonucleotide
  Antisense strand to SEQ ID NO: 2025250
acauuacccauuuacuucc

SEQ ID NO: 2025252 - RNA, 19 nt, Artificial Sequence
  Description of Artificial Sequence: Synthetic oligonucleotide
  Sense strand starting at position 481 of SEQ ID NO: 1881192
gaaguaaauggguaauguu

SEQ ID NO: 2025253 - RNA, 19 nt, Artificial Sequence
  Description of Artificial Sequence: Synthetic oligonucleotide
  Antisense strand to SEQ ID NO: 2025252
aacauuacccauuuacuuc

SEQ ID NO: 2025254 - RNA, 19 nt, Artificial Sequence
  Description of Artificial Sequence: Synthetic oligonucleotide
  Sense strand starting at position 504 of SEQ ID NO: 1881192
cgacuuuauuuggccuuaa

SEQ ID NO: 2025255 - RNA, 19 nt, Artificial Sequence
  Description of Artificial Sequence: Synthetic oligonucleotide
  Antisense strand to SEQ ID NO: 2025254
uuaaggccaaauaaagucg

SEQ ID NO: 2025256 - RNA, 19 nt, Artificial Sequence
  Description of Artificial Sequence: Synthetic oligonucleotide
  Sense strand starting at position 672 of SEQ ID NO: 1881192
acagaaacuuguuuagauu

SEQ ID NO: 2025257 - RNA, 19 nt, Artificial Sequence
  Description of Artificial Sequence: Synthetic oligonucleotide
  Antisense strand to SEQ ID NO: 2025256
aaucuaaacaaguuucugu

SEQ ID NO: 2025258 - RNA, 19 nt, Artificial Sequence
  Description of Artificial Sequence: Synthetic oligonucleotide
  Sense strand starting at position 683 of SEQ ID NO: 1881192
uuuagauuguuucuugaag

SEQ ID NO: 2025259 - RNA, 19 nt, Artificial Sequence
  Description of Artificial Sequence: Synthetic oligonucleotide
  Antisense strand to SEQ ID NO: 2025258
cuucaagaaacaaucuaaa

SEQ ID NO: 2025260 - RNA, 19 nt, Artificial Sequence
  Description of Artificial Sequence: Synthetic oligonucleotide
  Sense strand starting at position 695 of SEQ ID NO: 1881192
cuugaaguuugacuacuua

SEQ ID NO: 2025261 - RNA, 19 nt, Artificial Sequence
  Description of Artificial Sequence: Synthetic oligonucleotide
  Antisense strand to SEQ ID NO: 2025260
uaaguagucaaacuucaag

SEQ ID NO: 2025262 - RNA, 19 nt, Artificial Sequence
  Description of Artificial Sequence: Synthetic oligonucleotide
  Sense strand starting at position 796 of SEQ ID NO: 1881192
ugauauaguccagagucac

SEQ ID NO: 2025263 - RNA, 19 nt, Artificial Sequence
  Description of Artificial Sequence: Synthetic oligonucleotide
  Antisense strand to SEQ ID NO: 2025262
gugacucuggacuauauca

SEQ ID NO: 2025264 - RNA, 19 nt, Artificial Sequence
  Description of Artificial Sequence: Synthetic oligonucleotide
  Sense strand starting at position 820 of SEQ ID NO: 1881192
gugggaauguuuccaugga

SEQ ID NO: 2025265 - RNA, 19 nt, Artificial Sequence
  Description of Artificial Sequence: Synthetic oligonucleotide
  Antisense strand to SEQ ID NO: 2025264
uccauggaaacauucccac

SEQ ID NO: 2025266 - RNA, 19 nt, Artificial Sequence
  Description of Artificial Sequence: Synthetic oligonucleotide
  Sense strand starting at position 1024 of SEQ ID NO: 1881192
caugaaugguccucagauc

SEQ ID NO: 2025267 - RNA, 19 nt, Artificial Sequence
  Description of Artificial Sequence: Synthetic oligonucleotide
  Antisense strand to SEQ ID NO: 2025266
gaucugaggaccauucaug

SEQ ID NO: 2025268 - RNA, 19 nt, Artificial Sequence
  Description of Artificial Sequence: Synthetic oligonucleotide
  Sense strand starting at position 1045 of SEQ ID NO: 1881192
gugauucuacggcauagac

SEQ ID NO: 2025269 - RNA, 19 nt, Artificial Sequence
  Description of Artificial Sequence: Synthetic oligonucleotide
  Antisense strand to SEQ ID NO: 2025268
gucuaugccguagaaucac

SEQ ID NO: 2025270 - RNA, 19 nt, Artificial Sequence
  Description of Artificial Sequence: Synthetic oligonucleotide
  Sense strand starting at position 1139 of SEQ ID NO: 1881192
aggguagaguagucuugga

SEQ ID NO: 2025271 - RNA, 19 nt, Artificial Sequence
  Description of Artificial Sequence: Synthetic oligonucleotide
  Antisense strand to SEQ ID NO: 2025270
uccaagacuacucuacccu

SEQ ID NO: 2025272 - RNA, 19 nt, Artificial Sequence
  Description of Artificial Sequence: Synthetic oligonucleotide
  Sense strand starting at position 1143 of SEQ ID NO: 1881192
uagaguagucuuggaugau

SEQ ID NO: 2025273 - RNA, 19 nt, Artificial Sequence
  Description of Artificial Sequence: Synthetic oligonucleotide
  Antisense strand to SEQ ID NO: 2025272
aucauccaagacuacucua

SEQ ID NO: 2025274 - RNA, 19 nt, Artificial Sequence
  Description of Artificial Sequence: Synthetic oligonucleotide
  Sense strand starting at position 1146 of SEQ ID NO: 1881192
aguagucuuggaugauaac

SEQ ID NO: 2025275 - RNA, 19 nt, Artificial Sequence
  Description of Artificial Sequence: Synthetic oligonucleotide
  Antisense strand to SEQ ID NO: 2025274
guuaucauccaagacuacu

SEQ ID NO: 2025276 - RNA, 19 nt, Artificial Sequence
  Description of Artificial Sequence: Synthetic oligonucleotide
  Sense strand starting at position 1155 of SEQ ID NO: 1881192
ggaugauaaccauguucua

SEQ ID NO: 2025277 - RNA, 19 nt, Artificial Sequence
  Description of Artificial Sequence: Synthetic oligonucleotide
  Antisense strand to SEQ ID NO: 2025276
uagaacaugguuaucaucc

SEQ ID NO: 2025278 - RNA, 19 nt, Artificial Sequence
  Description of Artificial Sequence: Synthetic oligonucleotide
  Sense strand starting at position 1167 of SEQ ID NO: 1881192
uguucuaaaugacuaguga

SEQ ID NO: 2025279 - RNA, 19 nt, Artificial Sequence
  Description of Artificial Sequence: Synthetic oligonucleotide
  Antisense strand to SEQ ID NO: 2025278
ucacuagucauuuagaaca

SEQ ID NO: 2025280 - RNA, 19 nt, Artificial Sequence
  Description of Artificial Sequence: Synthetic oligonucleotide
  Sense strand starting at position 1284 of SEQ ID NO: 1881192
cugugaguucuccaaggca

SEQ ID NO: 2025281 - RNA, 19 nt, Artificial Sequence
  Description of Artificial Sequence: Synthetic oligonucleotide
  Antisense strand to SEQ ID NO: 2025280
ugccuuggagaacucacag

SEQ ID NO: 2025282 - RNA, 19 nt, Artificial Sequence
  Description of Artificial Sequence: Synthetic oligonucleotide
  Sense strand starting at position 1500 of SEQ ID NO: 1881192
uccuucugauggucuuuaa

SEQ ID NO: 2025283 - RNA, 19 nt, Artificial Sequence
  Description of Artificial Sequence: Synthetic oligonucleotide
  Antisense strand to SEQ ID NO: 2025282
uuaaagaccaucagaagga

SEQ ID NO: 2025284 - RNA, 19 nt, Artificial Sequence
  Description of Artificial Sequence: Synthetic oligonucleotide
  Sense strand starting at position 1503 of SEQ ID NO: 1881192
uucugauggucuuuaaucu

SEQ ID NO: 2025285 - RNA, 19 nt, Artificial Sequence
  Description of Artificial Sequence: Synthetic oligonucleotide
  Antisense strand to SEQ ID NO: 2025284
agauuaaagaccaucagaa

SEQ ID NO: 2025286 - RNA, 19 nt, Artificial Sequence
  Description of Artificial Sequence: Synthetic oligonucleotide
  Sense strand starting at position 1518 of SEQ ID NO: 1881192
aucugcuuucugcaaauga

SEQ ID NO: 2025287 - RNA, 19 nt, Artificial Sequence
  Description of Artificial Sequence: Synthetic oligonucleotide
  Antisense strand to SEQ ID NO: 2025286
ucauuugcagaaagcagau

SEQ ID NO: 2025288 - RNA, 19 nt, Artificial Sequence
  Description of Artificial Sequence: Synthetic oligonucleotide
  Sense strand starting at position 1822 of SEQ ID NO: 1881192
cugcuuuacccaugaggac

SEQ ID NO: 2025289 - RNA, 19 nt, Artificial Sequence
  Description of Artificial Sequence: Synthetic oligonucleotide
  Antisense strand to SEQ ID NO: 2025288
guccucauggguaaagcag

SEQ ID NO: 2025290 - RNA, 19 nt, Artificial Sequence
  Description of Artificial Sequence: Synthetic oligonucleotide
  Sense strand starting at position 1823 of SEQ ID NO: 1881192
ugcuuuacccaugaggacu

SEQ ID NO: 2025291 - RNA, 19 nt, Artificial Sequence
  Description of Artificial Sequence: Synthetic oligonucleotide
  Antisense strand to SEQ ID NO: 2025290
aguccucauggguaaagca

SEQ ID NO: 2025292 - RNA, 19 nt, Artificial Sequence
  Description of Artificial Sequence: Synthetic oligonucleotide
  Sense strand starting at position 1864 of SEQ ID NO: 1881192
gggucaucaggcugagauc

SEQ ID NO: 2025293 - RNA, 19 nt, Artificial Sequence
  Description of Artificial Sequence: Synthetic oligonucleotide
  Antisense strand to SEQ ID NO: 2025292
gaucucagccugaugaccc

SEQ ID NO: 2025294 - RNA, 19 nt, Artificial Sequence
  Description of Artificial Sequence: Synthetic oligonucleotide
  Sense strand starting at position 1865 of SEQ ID NO: 1881192
ggucaucaggcugagauca

SEQ ID NO: 2025295 - RNA, 19 nt, Artificial Sequence
  Description of Artificial Sequence: Synthetic oligonucleotide
  Antisense strand to SEQ ID NO: 2025294
ugaucucagccugaugacc

SEQ ID NO: 2025296 - RNA, 19 nt, Artificial Sequence
  Description of Artificial Sequence: Synthetic oligonucleotide
  Sense strand starting at position 2050 of SEQ ID NO: 1881192
uuaccagcucacugaggaa

SEQ ID NO: 2025297 - RNA, 19 nt, Artificial Sequence
  Description of Artificial Sequence: Synthetic oligonucleotide
  Antisense strand to SEQ ID NO: 2025296
uuccucagugagcugguaa

SEQ ID NO: 2025298 - RNA, 19 nt, Artificial Sequence
  Description of Artificial Sequence: Synthetic oligonucleotide
  Sense strand starting at position 2431 of SEQ ID NO: 1881192
cuaugaaguggugggacua

SEQ ID NO: 2025299 - RNA, 19 nt, Artificial Sequence
  Description of Artificial Sequence: Synthetic oligonucleotide
  Antisense strand to SEQ ID NO: 2025298
uagucccaccacuucauag

SEQ ID NO: 2025300 - RNA, 19 nt, Artificial Sequence
  Description of Artificial Sequence: Synthetic oligonucleotide
  Sense strand starting at position 2718 of SEQ ID NO: 1881192
uguaucuagaggcaguuau

SEQ ID NO: 2025301 - RNA, 19 nt, Artificial Sequence
  Description of Artificial Sequence: Synthetic oligonucleotide
  Antisense strand to SEQ ID NO: 2025300
auaacugccucuagauaca

SEQ ID NO: 2025302 - RNA, 19 nt, Artificial Sequence
  Description of Artificial Sequence: Synthetic oligonucleotide
  Sense strand starting at position 2896 of SEQ ID NO: 1881192
ugcugacagaugcaguaaa

SEQ ID NO: 2025303 - RNA, 19 nt, Artificial Sequence
  Description of Artificial Sequence: Synthetic oligonucleotide
  Antisense strand to SEQ ID NO: 2025302
uuuacugcaucugucagca

SEQ ID NO: 2025304 - RNA, 19 nt, Artificial Sequence
  Description of Artificial Sequence: Synthetic oligonucleotide
  Sense strand starting at position 3148 of SEQ ID NO: 1881192
gacacuuguguauacugaa

SEQ ID NO: 2025305 - RNA, 19 nt, Artificial Sequence
  Description of Artificial Sequence: Synthetic oligonucleotide
  Antisense strand to SEQ ID NO: 2025304
uucaguauacacaaguguc

SEQ ID NO: 2025306 - RNA, 19 nt, Artificial Sequence
  Description of Artificial Sequence: Synthetic oligonucleotide
  Sense strand starting at position 3287 of SEQ ID NO: 1881192
auaggcgucauggaaauau

SEQ ID NO: 2025307 - RNA, 19 nt, Artificial Sequence
  Description of Artificial Sequence: Synthetic oligonucleotide
  Antisense strand to SEQ ID NO: 2025306
auauuuccaugacgccuau

SEQ ID NO: 2025308 - RNA, 19 nt, Artificial Sequence
  Description of Artificial Sequence: Synthetic oligonucleotide
  Sense strand starting at position 3291 of SEQ ID NO: 1881192
gcgucauggaaauauuaaa

SEQ ID NO: 2025309 - RNA, 19 nt, Artificial Sequence
  Description of Artificial Sequence: Synthetic oligonucleotide
  Antisense strand to SEQ ID NO: 2025308
uuuaauauuuccaugacgc

SEQ ID NO: 2025310 - RNA, 19 nt, Artificial Sequence
  Description of Artificial Sequence: Synthetic oligonucleotide
  Sense strand starting at position 3492 of SEQ ID NO: 1881192
uuuggacuccuaugaaaca

SEQ ID NO: 2025311 - RNA, 19 nt, Artificial Sequence
  Description of Artificial Sequence: Synthetic oligonucleotide
  Antisense strand to SEQ ID NO: 2025310
uguuucauaggaguccaaa

SEQ ID NO: 2025312 - RNA, 19 nt, Artificial Sequence
  Description of Artificial Sequence: Synthetic oligonucleotide
  Sense strand starting at position 3571 of SEQ ID NO: 1881192
gcuacaagauguucuuaau

SEQ ID NO: 2025313 - RNA, 19 nt, Artificial Sequence
  Description of Artificial Sequence: Synthetic oligonucleotide
  Antisense strand to SEQ ID NO: 2025312
auuaagaacaucuuguagc

SEQ ID NO: 2025314 - RNA, 19 nt, Artificial Sequence
  Description of Artificial Sequence: Synthetic oligonucleotide
  Sense strand starting at position 3596 of SEQ ID NO: 1881192
aguccaaagaaguguuaag

SEQ ID NO: 2025315 - RNA, 19 nt, Artificial Sequence
  Description of Artificial Sequence: Synthetic oligonucleotide
  Antisense strand to SEQ ID NO: 2025314
cuuaacacuucuuuggacu

SEQ ID NO: 2025316 - RNA, 19 nt, Artificial Sequence
  Description of Artificial Sequence: Synthetic oligonucleotide
  Sense strand starting at position 3910 of SEQ ID NO: 1881192
auuggaacucuauggugaa

SEQ ID NO: 2025317 - RNA, 19 nt, Artificial Sequence
  Description of Artificial Sequence: Synthetic oligonucleotide
  Antisense strand to SEQ ID NO: 2025316
uucaccauagaguuccaau

SEQ ID NO: 2025318 - RNA, 19 nt, Artificial Sequence
  Description of Artificial Sequence: Synthetic oligonucleotide
  Sense strand starting at position 3978 of SEQ ID NO: 1881192
aagguuaaacauggaguca

SEQ ID NO: 2025319 - RNA, 19 nt, Artificial Sequence
  Description of Artificial Sequence: Synthetic oligonucleotide
  Antisense strand to SEQ ID NO: 2025318
ugacuccauguuuaaccuu

SEQ ID NO: 2025320 - RNA, 19 nt, Artificial Sequence
  Description of Artificial Sequence: Synthetic oligonucleotide
  Sense strand starting at position 114 of SEQ ID NO: 1881193
accagagaauugucauuau

SEQ ID NO: 2025321 - RNA, 19 nt, Artificial Sequence
  Description of Artificial Sequence: Synthetic oligonucleotide
  Antisense strand to SEQ ID NO: 2025320
auaaugacaauucucuggu

SEQ ID NO: 2025322 - RNA, 19 nt, Artificial Sequence
  Description of Artificial Sequence: Synthetic oligonucleotide
  Sense strand starting at position 142 of SEQ ID NO: 1881193
cugggugguucucugaaag

SEQ ID NO: 2025323 - RNA, 19 nt, Artificial Sequence
  Description of Artificial Sequence: Synthetic oligonucleotide
  Antisense strand to SEQ ID NO: 2025322
cuuucagagaaccacccag

SEQ ID NO: 2025324 - RNA, 19 nt, Artificial Sequence
  Description of Artificial Sequence: Synthetic oligonucleotide
  Sense strand starting at position 249 of SEQ ID NO: 1881193
agaggcaacuguuuaacau

SEQ ID NO: 2025325 - RNA, 19 nt, Artificial Sequence
  Description of Artificial Sequence: Synthetic oligonucleotide
  Antisense strand to SEQ ID NO: 2025324
auguuaaacaguugccucu

SEQ ID NO: 2025326 - RNA, 19 nt, Artificial Sequence
  Description of Artificial Sequence: Synthetic oligonucleotide
  Sense strand starting at position 250 of SEQ ID NO: 1881193
gaggcaacuguuuaacauc

SEQ ID NO: 2025327 - RNA, 19 nt, Artificial Sequence
  Description of Artificial Sequence: Synthetic oligonucleotide
  Antisense strand to SEQ ID NO: 2025326
gauguuaaacaguugccuc

SEQ ID NO: 2025328 - RNA, 19 nt, Artificial Sequence
  Description of Artificial Sequence: Synthetic oligonucleotide
  Sense strand starting at position 307 of SEQ ID NO: 1881193
uagguuaaccaagagcuua

SEQ ID NO: 2025329 - RNA, 19 nt, Artificial Sequence
  Description of Artificial Sequence: Synthetic oligonucleotide
  Antisense strand to SEQ ID NO: 2025328
uaagcucuugguuaaccua

SEQ ID NO: 2025330 - RNA, 19 nt, Artificial Sequence
  Description of Artificial Sequence: Synthetic oligonucleotide
  Sense strand starting at position 330 of SEQ ID NO: 1881193
uaaguuaggcaaugagaug

SEQ ID NO: 2025331 - RNA, 19 nt, Artificial Sequence
  Description of Artificial Sequence: Synthetic oligonucleotide
  Antisense strand to SEQ ID NO: 2025330
caucucauugccuaacuua

SEQ ID NO: 2025332 - RNA, 19 nt, Artificial Sequence
  Description of Artificial Sequence: Synthetic oligonucleotide
  Sense strand starting at position 371 of SEQ ID NO: 1881193
ucuaacauguuacuggaaa

SEQ ID NO: 2025333 - RNA, 19 nt, Artificial Sequence
  Description of Artificial Sequence: Synthetic oligonucleotide
  Antisense strand to SEQ ID NO: 2025332
uuuccaguaacauguuaga

SEQ ID NO: 2025334 - RNA, 19 nt, Artificial Sequence
  Description of Artificial Sequence: Synthetic oligonucleotide
  Sense strand starting at position 418 of SEQ ID NO: 1881193
cuuucugcaugcucagaaa

SEQ ID NO: 2025335 - RNA, 19 nt, Artificial Sequence
  Description of Artificial Sequence: Synthetic oligonucleotide
  Antisense strand to SEQ ID NO: 2025334
uuucugagcaugcagaaag

SEQ ID NO: 2025336 - RNA, 19 nt, Artificial Sequence
  Description of Artificial Sequence: Synthetic oligonucleotide
  Sense strand starting at position 505 of SEQ ID NO: 1881193
acuaaaguguagcuuuaaa

SEQ ID NO: 2025337 - RNA, 19 nt, Artificial Sequence
  Description of Artificial Sequence: Synthetic oligonucleotide
  Antisense strand to SEQ ID NO: 2025336
uuuaaagcuacacuuuagu

SEQ ID NO: 2025338 - RNA, 19 nt, Artificial Sequence
  Description of Artificial Sequence: Synthetic oligonucleotide
  Sense strand starting at position 517 of SEQ ID NO: 1881193
cuuuaaacugccugguuga

SEQ ID NO: 2025339 - RNA, 19 nt, Artificial Sequence
  Description of Artificial Sequence: Synthetic oligonucleotide
  Antisense strand to SEQ ID NO: 2025338
ucaaccaggcaguuuaaag

SEQ ID NO: 2025340 - RNA, 19 nt, Artificial Sequence
  Description of Artificial Sequence: Synthetic oligonucleotide
  Sense strand starting at position 520 of SEQ ID NO: 1881193
uaaacugccugguugagua

SEQ ID NO: 2025341 - RNA, 19 nt, Artificial Sequence
  Description of Artificial Sequence: Synthetic oligonucleotide
  Antisense strand to SEQ ID NO: 2025340
uacucaaccaggcaguuua

SEQ ID NO: 2025342 - RNA, 19 nt, Artificial Sequence
  Description of Artificial Sequence: Synthetic oligonucleotide
  Sense strand starting at position 524 of SEQ ID NO: 1881193
cugccugguugaguagaga

SEQ ID NO: 2025343 - RNA, 19 nt, Artificial Sequence
  Description of Artificial Sequence: Synthetic oligonucleotide
  Antisense strand to SEQ ID NO: 2025342
ucucuacucaaccaggcag

SEQ ID NO: 2025344 - RNA, 19 nt, Artificial Sequence
  Description of Artificial Sequence: Synthetic oligonucleotide
  Sense strand starting at position 527 of SEQ ID NO: 1881193
ccugguugaguagagacau

SEQ ID NO: 2025345 - RNA, 19 nt, Artificial Sequence
  Description of Artificial Sequence: Synthetic oligonucleotide
  Antisense strand to SEQ ID NO: 2025344
augucucuacucaaccagg

SEQ ID NO: 2025346 - RNA, 19 nt, Artificial Sequence
  Description of Artificial Sequence: Synthetic oligonucleotide
  Sense strand starting at position 574 of SEQ ID NO: 1881193
gucaaagacugggagauuu

SEQ ID NO: 2025347 - RNA, 19 nt, Artificial Sequence
  Description of Artificial Sequence: Synthetic oligonucleotide
  Antisense strand to SEQ ID NO: 2025346
aaaucucccagucuuugac

SEQ ID NO: 2025348 - RNA, 19 nt, Artificial Sequence
  Description of Artificial Sequence: Synthetic oligonucleotide
  Sense strand starting at position 600 of SEQ ID NO: 1881193
ccagccauuuaaggaaauu

SEQ ID NO: 2025349 - RNA, 19 nt, Artificial Sequence
  Description of Artificial Sequence: Synthetic oligonucleotide
  Antisense strand to SEQ ID NO: 2025348
aauuuccuuaaauggcugg

SEQ ID NO: 2025350 - RNA, 19 nt, Artificial Sequence
  Description of Artificial Sequence: Synthetic oligonucleotide
  Sense strand starting at position 656 of SEQ ID NO: 1881193
ggaccagaucaauggccau

SEQ ID NO: 2025351 - RNA, 19 nt, Artificial Sequence
  Description of Artificial Sequence: Synthetic oligonucleotide
  Antisense strand to SEQ ID NO: 2025350
auggccauugaucuggucc

SEQ ID NO: 2025352 - RNA, 19 nt, Artificial Sequence
  Description of Artificial Sequence: Synthetic oligonucleotide
  Sense strand starting at position 659 of SEQ ID NO: 1881193
ccagaucaauggccauaca

SEQ ID NO: 2025353 - RNA, 19 nt, Artificial Sequence
  Description of Artificial Sequence: Synthetic oligonucleotide
  Antisense strand to SEQ ID NO: 2025352
uguauggccauugaucugg

SEQ ID NO: 2025354 - RNA, 19 nt, Artificial Sequence
  Description of Artificial Sequence: Synthetic oligonucleotide
  Sense strand starting at position 753 of SEQ ID NO: 1881193
gcaacaaaccuuggauaga

SEQ ID NO: 2025355 - RNA, 19 nt, Artificial Sequence
  Description of Artificial Sequence: Synthetic oligonucleotide
  Antisense strand to SEQ ID NO: 2025354
ucuauccaagguuuguugc

SEQ ID NO: 2025356 - RNA, 19 nt, Artificial Sequence
  Description of Artificial Sequence: Synthetic oligonucleotide
  Sense strand starting at position 835 of SEQ ID NO: 1881193
auagucauggcacguacaa

SEQ ID NO: 2025357 - RNA, 19 nt, Artificial Sequence
  Description of Artificial Sequence: Synthetic oligonucleotide
  Antisense strand to SEQ ID NO: 2025356
uuguacgugccaugacuau

SEQ ID NO: 2025358 - RNA, 19 nt, Artificial Sequence
  Description of Artificial Sequence: Synthetic oligonucleotide
  Sense strand starting at position 861 of SEQ ID NO: 1881193
gaaaguauggcucgcauau

SEQ ID NO: 2025359 - RNA, 19 nt, Artificial Sequence
  Description of Artificial Sequence: Synthetic oligonucleotide
  Antisense strand to SEQ ID NO: 2025358
auaugcgagccauacuuuc

SEQ ID NO: 2025360 - RNA, 19 nt, Artificial Sequence
  Description of Artificial Sequence: Synthetic oligonucleotide
  Sense strand starting at position 898 of SEQ ID NO: 1881193
uggaaucugucacugagga

SEQ ID NO: 2025361 - RNA, 19 nt, Artificial Sequence
  Description of Artificial Sequence: Synthetic oligonucleotide
  Antisense strand to SEQ ID NO: 2025360
uccucagugacagauucca

SEQ ID NO: 2025362 - RNA, 19 nt, Artificial Sequence
  Description of Artificial Sequence: Synthetic oligonucleotide
  Sense strand starting at position 1166 of SEQ ID NO: 1881193
auaggauaguugcuugaau

SEQ ID NO: 2025363 - RNA, 19 nt, Artificial Sequence
  Description of Artificial Sequence: Synthetic oligonucleotide
  Antisense strand to SEQ ID NO: 2025362
auucaagcaacuauccuau

SEQ ID NO: 2025364 - RNA, 19 nt, Artificial Sequence
  Description of Artificial Sequence: Synthetic oligonucleotide
  Sense strand starting at position 1167 of SEQ ID NO: 1881193
uaggauaguugcuugaauc

SEQ ID NO: 2025365 - RNA, 19 nt, Artificial Sequence
  Description of Artificial Sequence: Synthetic oligonucleotide
  Antisense strand to SEQ ID NO: 2025364
gauucaagcaacuauccua

SEQ ID NO: 2025366 - RNA, 19 nt, Artificial Sequence
  Description of Artificial Sequence: Synthetic oligonucleotide
  Sense strand starting at position 1327 of SEQ ID NO: 1881193
caaguaugagaaugauguc

SEQ ID NO: 2025367 - RNA, 19 nt, Artificial Sequence
  Description of Artificial Sequence: Synthetic oligonucleotide
  Antisense strand to SEQ ID NO: 2025366
gacaucauucucauacuug

SEQ ID NO: 2025368 - RNA, 19 nt, Artificial Sequence
  Description of Artificial Sequence: Synthetic oligonucleotide
  Sense strand starting at position 1455 of SEQ ID NO: 1881193
gggcucauauaagauuuga

SEQ ID NO: 2025369 - RNA, 19 nt, Artificial Sequence
  Description of Artificial Sequence: Synthetic oligonucleotide
  Antisense strand to SEQ ID NO: 2025368
ucaaaucuuauaugagccc

SEQ ID NO: 2025370 - RNA, 19 nt, Artificial Sequence
  Description of Artificial Sequence: Synthetic oligonucleotide
  Sense strand starting at position 1487 of SEQ ID NO: 1881193
agagucaaaugugcuugaa

SEQ ID NO: 2025371 - RNA, 19 nt, Artificial Sequence
  Description of Artificial Sequence: Synthetic oligonucleotide
  Antisense strand to SEQ ID NO: 2025370
uucaagcacauuugacucu

SEQ ID NO: 2025372 - RNA, 19 nt, Artificial Sequence
  Description of Artificial Sequence: Synthetic oligonucleotide
  Sense strand starting at position 1489 of SEQ ID NO: 1881193
agucaaaugugcuugaaga

SEQ ID NO: 2025373 - RNA, 19 nt, Artificial Sequence
  Description of Artificial Sequence: Synthetic oligonucleotide
  Antisense strand to SEQ ID NO: 2025372
ucuucaagcacauuugacu

SEQ ID NO: 2025374 - RNA, 19 nt, Artificial Sequence
  Description of Artificial Sequence: Synthetic oligonucleotide
  Sense strand starting at position 1490 of SEQ ID NO: 1881193
gucaaaugugcuugaagau

SEQ ID NO: 2025375 - RNA, 19 nt, Artificial Sequence
  Description of Artificial Sequence: Synthetic oligonucleotide
  Antisense strand to SEQ ID NO: 2025374
aucuucaagcacauuugac

SEQ ID NO: 2025376 - RNA, 19 nt, Artificial Sequence
  Description of Artificial Sequence: Synthetic oligonucleotide
  Sense strand starting at position 1520 of SEQ ID NO: 1881193
uaguaaccaguuugaggaa

SEQ ID NO: 2025377 - RNA, 19 nt, Artificial Sequence
  Description of Artificial Sequence: Synthetic oligonucleotide
  Antisense strand to SEQ ID NO: 2025376
uuccucaaacugguuacua

SEQ ID NO: 2025378 - RNA, 19 nt, Artificial Sequence
  Description of Artificial Sequence: Synthetic oligonucleotide
  Sense strand starting at position 1918 of SEQ ID NO: 1881193
gcuucuagccuccaugaau

SEQ ID NO: 2025379 - RNA, 19 nt, Artificial Sequence
  Description of Artificial Sequence: Synthetic oligonucleotide
  Antisense strand to SEQ ID NO: 2025378
auucauggaggcuagaagc

SEQ ID NO: 2025380 - RNA, 19 nt, Artificial Sequence
  Description of Artificial Sequence: Synthetic oligonucleotide
  Sense strand starting at position 1947 of SEQ ID NO: 1881193
ucaugugauuccuccauca

SEQ ID NO: 2025381 - RNA, 19 nt, Artificial Sequence
  Description of Artificial Sequence: Synthetic oligonucleotide
  Antisense strand to SEQ ID NO: 2025380
ugauggaggaaucacauga

SEQ ID NO: 2025382 - RNA, 19 nt, Artificial Sequence
  Description of Artificial Sequence: Synthetic oligonucleotide
  Sense strand starting at position 1949 of SEQ ID NO: 1881193
augugauuccuccaucagg

SEQ ID NO: 2025383 - RNA, 19 nt, Artificial Sequence
  Description of Artificial Sequence: Synthetic oligonucleotide
  Antisense strand to SEQ ID NO: 2025382
ccugauggaggaaucacau

SEQ ID NO: 2025384 - RNA, 19 nt, Artificial Sequence
  Description of Artificial Sequence: Synthetic oligonucleotide
  Sense strand starting at position 1952 of SEQ ID NO: 1881193
ugauuccuccaucaggagu

SEQ ID NO: 2025385 - RNA, 19 nt, Artificial Sequence
  Description of Artificial Sequence: Synthetic oligonucleotide
  Antisense strand to SEQ ID NO: 2025384
acuccugauggaggaauca

SEQ ID NO: 2025386 - RNA, 19 nt, Artificial Sequence
  Description of Artificial Sequence: Synthetic oligonucleotide
  Sense strand starting at position 2639 of SEQ ID NO: 1881193
uuauaaaucugugugaaug

SEQ ID NO: 2025387 - RNA, 19 nt, Artificial Sequence
  Description of Artificial Sequence: Synthetic oligonucleotide
  Antisense strand to SEQ ID NO: 2025386
cauucacacagauuuauaa

SEQ ID NO: 2025388 - RNA, 19 nt, Artificial Sequence
  Description of Artificial Sequence: Synthetic oligonucleotide
  Sense strand starting at position 2640 of SEQ ID NO: 1881193
uauaaaucugugugaaugg

SEQ ID NO: 2025389 - RNA, 19 nt, Artificial Sequence
  Description of Artificial Sequence: Synthetic oligonucleotide
  Antisense strand to SEQ ID NO: 2025388
ccauucacacagauuuaua

SEQ ID NO: 2025390 - RNA, 19 nt, Artificial Sequence
  Description of Artificial Sequence: Synthetic oligonucleotide
  Sense strand starting at position 2650 of SEQ ID NO: 1881193
ugugaauggguguacaaug

SEQ ID NO: 2025391 - RNA, 19 nt, Artificial Sequence
  Description of Artificial Sequence: Synthetic oligonucleotide
  Antisense strand to SEQ ID NO: 2025390
cauuguacacccauucaca

SEQ ID NO: 2025392 - RNA, 19 nt, Artificial Sequence
  Description of Artificial Sequence: Synthetic oligonucleotide
  Sense strand starting at position 2655 of SEQ ID NO: 1881193
auggguguacaaugaauaa

SEQ ID NO: 2025393 - RNA, 19 nt, Artificial Sequence
  Description of Artificial Sequence: Synthetic oligonucleotide
  Antisense strand to SEQ ID NO: 2025392
uuauucauuguacacccau

SEQ ID NO: 2025394 - RNA, 19 nt, Artificial Sequence
  Description of Artificial Sequence: Synthetic oligonucleotide
  Sense strand starting at position 2674 of SEQ ID NO: 1881193
agcuguaauuuguauaaca

SEQ ID NO: 2025395 - RNA, 19 nt, Artificial Sequence
  Description of Artificial Sequence: Synthetic oligonucleotide
  Antisense strand to SEQ ID NO: 2025394
uguuauacaaauuacagcu

SEQ ID NO: 2025396 - RNA, 19 nt, Artificial Sequence
  Description of Artificial Sequence: Synthetic oligonucleotide
  Sense strand starting at position 3621 of SEQ ID NO: 1881193
uccaaauuagauugguaua

SEQ ID NO: 2025397 - RNA, 19 nt, Artificial Sequence
  Description of Artificial Sequence: Synthetic oligonucleotide
  Antisense strand to SEQ ID NO: 2025396
uauaccaaucuaauuugga

SEQ ID NO: 2025398 - RNA, 19 nt, Artificial Sequence
  Description of Artificial Sequence: Synthetic oligonucleotide
  Sense strand starting at position 3655 of SEQ ID NO: 1881193
uguaauauccagugcaacu

SEQ ID NO: 2025399 - RNA, 19 nt, Artificial Sequence
  Description of Artificial Sequence: Synthetic oligonucleotide
  Antisense strand to SEQ ID NO: 2025398
aguugcacuggauauuaca

SEQ ID NO: 2025400 - RNA, 19 nt, Artificial Sequence
  Description of Artificial Sequence: Synthetic oligonucleotide
  Sense strand starting at position 289 of SEQ ID NO: 1881194
gguuguaccauguuugugu

SEQ ID NO: 2025401 - RNA, 19 nt, Artificial Sequence
  Description of Artificial Sequence: Synthetic oligonucleotide
  Antisense strand to SEQ ID NO: 2025400
acacaaacaugguacaacc

SEQ ID NO: 2025402 - RNA, 19 nt, Artificial Sequence
  Description of Artificial Sequence: Synthetic oligonucleotide
  Sense strand starting at position 297 of SEQ ID NO: 1881194
cauguuuguguguaaugac

SEQ ID NO: 2025403 - RNA, 19 nt, Artificial Sequence
  Description of Artificial Sequence: Synthetic oligonucleotide
  Antisense strand to SEQ ID NO: 2025402
gucauuacacacaaacaug

SEQ ID NO: 2025404 - RNA, 19 nt, Artificial Sequence
  Description of Artificial Sequence: Synthetic oligonucleotide
  Sense strand starting at position 457 of SEQ ID NO: 1881194
uucuguucuggauggacau

SEQ ID NO: 2025405 - RNA, 19 nt, Artificial Sequence
  Description of Artificial Sequence: Synthetic oligonucleotide
  Antisense strand to SEQ ID NO: 2025404
auguccauccagaacagaa

SEQ ID NO: 2025406 - RNA, 19 nt, Artificial Sequence
  Description of Artificial Sequence: Synthetic oligonucleotide
  Sense strand starting at position 549 of SEQ ID NO: 1881194
ugggaagcugucuaugaca

SEQ ID NO: 2025407 - RNA, 19 nt, Artificial Sequence
  Description of Artificial Sequence: Synthetic oligonucleotide
  Antisense strand to SEQ ID NO: 2025406
ugucauagacagcuuccca

SEQ ID NO: 2025408 - RNA, 19 nt, Artificial Sequence
  Description of Artificial Sequence: Synthetic oligonucleotide
  Sense strand starting at position 763 of SEQ ID NO: 1881194
auacauagguucuugauua

SEQ ID NO: 2025409 - RNA, 19 nt, Artificial Sequence
  Description of Artificial Sequence: Synthetic oligonucleotide
  Antisense strand to SEQ ID NO: 2025408
uaaucaagaaccuauguau

SEQ ID NO: 2025410 - RNA, 19 nt, Artificial Sequence
  Description of Artificial Sequence: Synthetic oligonucleotide
  Sense strand starting at position 767 of SEQ ID NO: 1881194
auagguucuugauuaggga

SEQ ID NO: 2025411 - RNA, 19 nt, Artificial Sequence
  Description of Artificial Sequence: Synthetic oligonucleotide
  Antisense strand to SEQ ID NO: 2025410
ucccuaaucaagaaccuau

SEQ ID NO: 2025412 - RNA, 19 nt, Artificial Sequence
  Description of Artificial Sequence: Synthetic oligonucleotide
  Sense strand starting at position 884 of SEQ ID NO: 1881194
ugaauaaauuccguuugaa

SEQ ID NO: 2025413 - RNA, 19 nt, Artificial Sequence
  Description of Artificial Sequence: Synthetic oligonucleotide
  Antisense strand to SEQ ID NO: 2025412
uucaaacggaauuuauuca

SEQ ID NO: 2025414 - RNA, 19 nt, Artificial Sequence
  Description of Artificial Sequence: Synthetic oligonucleotide
  Sense strand starting at position 987 of SEQ ID NO: 1881194
uguaguugcaaagaugaau

SEQ ID NO: 2025415 - RNA, 19 nt, Artificial Sequence
  Description of Artificial Sequence: Synthetic oligonucleotide
  Antisense strand to SEQ ID NO: 2025414
auucaucuuugcaacuaca

SEQ ID NO: 2025416 - RNA, 19 nt, Artificial Sequence
  Description of Artificial Sequence: Synthetic oligonucleotide
  Sense strand starting at position 1090 of SEQ ID NO: 1881194
aguuguaguagagggauaa

SEQ ID NO: 2025417 - RNA, 19 nt, Artificial Sequence
  Description of Artificial Sequence: Synthetic oligonucleotide
  Antisense strand to SEQ ID NO: 2025416
uuaucccucuacuacaacu

SEQ ID NO: 2025418 - RNA, 19 nt, Artificial Sequence
  Description of Artificial Sequence: Synthetic oligonucleotide
  Sense strand starting at position 1091 of SEQ ID NO: 1881194
guuguaguagagggauaaa

SEQ ID NO: 2025419 - RNA, 19 nt, Artificial Sequence
  Description of Artificial Sequence: Synthetic oligonucleotide
  Antisense strand to SEQ ID NO: 2025418
uuuaucccucuacuacaac

SEQ ID NO: 2025420 - RNA, 19 nt, Artificial Sequence
  Description of Artificial Sequence: Synthetic oligonucleotide
  Sense strand starting at position 1190 of SEQ ID NO: 1881194
ggccaauaagguugagaag

SEQ ID NO: 2025421 - RNA, 19 nt, Artificial Sequence
  Description of Artificial Sequence: Synthetic oligonucleotide
  Antisense strand to SEQ ID NO: 2025420
cuucucaaccuuauuggcc

SEQ ID NO: 2025422 - RNA, 19 nt, Artificial Sequence
  Description of Artificial Sequence: Synthetic oligonucleotide
  Sense strand starting at position 1245 of SEQ ID NO: 1881194
agacccgaggccugagaau

SEQ ID NO: 2025423 - RNA, 19 nt, Artificial Sequence
  Description of Artificial Sequence: Synthetic oligonucleotide
  Antisense strand to SEQ ID NO: 2025422
auucucaggccucgggucu

SEQ ID NO: 2025424 - RNA, 19 nt, Artificial Sequence
  Description of Artificial Sequence: Synthetic oligonucleotide
  Sense strand starting at position 1254 of SEQ ID NO: 1881194
gccugagaauacuugagaa

SEQ ID NO: 2025425 - RNA, 19 nt, Artificial Sequence
  Description of Artificial Sequence: Synthetic oligonucleotide
  Antisense strand to SEQ ID NO: 2025424
uucucaaguauucucaggc

SEQ ID NO: 2025426 - RNA, 19 nt, Artificial Sequence
  Description of Artificial Sequence: Synthetic oligonucleotide
  Sense strand starting at position 1600 of SEQ ID NO: 1881194
uggauuuguggcugagggu

SEQ ID NO: 2025427 - RNA, 19 nt, Artificial Sequence
  Description of Artificial Sequence: Synthetic oligonucleotide
  Antisense strand to SEQ ID NO: 2025426
acccucagccacaaaucca

SEQ ID NO: 2025428 - RNA, 19 nt, Artificial Sequence
  Description of Artificial Sequence: Synthetic oligonucleotide
  Sense strand starting at position 1801 of SEQ ID NO: 1881194
gggaguccugcuuggaaag

SEQ ID NO: 2025429 - RNA, 19 nt, Artificial Sequence
  Description of Artificial Sequence: Synthetic oligonucleotide
  Antisense strand to SEQ ID NO: 2025428
cuuuccaagcaggacuccc

SEQ ID NO: 2025430 - RNA, 19 nt, Artificial Sequence
  Description of Artificial Sequence: Synthetic oligonucleotide
  Sense strand starting at position 1853 of SEQ ID NO: 1881194
auuugugaacucugguguu

SEQ ID NO: 2025431 - RNA, 19 nt, Artificial Sequence
  Description of Artificial Sequence: Synthetic oligonucleotide
  Antisense strand to SEQ ID NO: 2025430
aacaccagaguucacaaau

SEQ ID NO: 2025432 - RNA, 19 nt, Artificial Sequence
  Description of Artificial Sequence: Synthetic oligonucleotide
  Sense strand starting at position 2135 of SEQ ID NO: 1881194
gcaagaaugggucagcagu

SEQ ID NO: 2025433 - RNA, 19 nt, Artificial Sequence
  Description of Artificial Sequence: Synthetic oligonucleotide
  Antisense strand to SEQ ID NO: 2025432
acugcugacccauucuugc

SEQ ID NO: 2025434 - RNA, 19 nt, Artificial Sequence
  Description of Artificial Sequence: Synthetic oligonucleotide
  Sense strand starting at position 2180 of SEQ ID NO: 1881194
cgugguacaaaggauuaau

SEQ ID NO: 2025435 - RNA, 19 nt, Artificial Sequence
  Description of Artificial Sequence: Synthetic oligonucleotide
  Antisense strand to SEQ ID NO: 2025434
auuaauccuuuguaccacg

SEQ ID NO: 2025436 - RNA, 19 nt, Artificial Sequence
  Description of Artificial Sequence: Synthetic oligonucleotide
  Sense strand starting at position 2242 of SEQ ID NO: 1881194
gucucaucaugagcacuau

SEQ ID NO: 2025437 - RNA, 19 nt, Artificial Sequence
  Description of Artificial Sequence: Synthetic oligonucleotide
  Antisense strand to SEQ ID NO: 2025436
auagugcucaugaugagac

SEQ ID NO: 2025438 - RNA, 19 nt, Artificial Sequence
  Description of Artificial Sequence: Synthetic oligonucleotide
  Sense strand starting at position 2248 of SEQ ID NO: 1881194
ucaugagcacuauguaaca

SEQ ID NO: 2025439 - RNA, 19 nt, Artificial Sequence
  Description of Artificial Sequence: Synthetic oligonucleotide
  Antisense strand to SEQ ID NO: 2025438
uguuacauagugcucauga

SEQ ID NO: 2025440 - RNA, 19 nt, Artificial Sequence
  Description of Artificial Sequence: Synthetic oligonucleotide
  Sense strand starting at position 2304 of SEQ ID NO: 1881194
cucagaugcugaguuaauu

SEQ ID NO: 2025441 - RNA, 19 nt, Artificial Sequence
  Description of Artificial Sequence: Synthetic oligonucleotide
  Antisense strand to SEQ ID NO: 2025440
aauuaacucagcaucugag

SEQ ID NO: 2025442 - RNA, 19 nt, Artificial Sequence
  Description of Artificial Sequence: Synthetic oligonucleotide
  Sense strand starting at position 2448 of SEQ ID NO: 1881194
gcaggauguccuggagaau

SEQ ID NO: 2025443 - RNA, 19 nt, Artificial Sequence
  Description of Artificial Sequence: Synthetic oligonucleotide
  Antisense strand to SEQ ID NO: 2025442
auucuccaggacauccugc

SEQ ID NO: 2025444 - RNA, 19 nt, Artificial Sequence
  Description of Artificial Sequence: Synthetic oligonucleotide
  Sense strand starting at position 2569 of SEQ ID NO: 1881194
ucguaugaccuuuaaccaa

SEQ ID NO: 2025445 - RNA, 19 nt, Artificial Sequence
  Description of Artificial Sequence: Synthetic oligonucleotide
  Antisense strand to SEQ ID NO: 2025444
uugguuaaaggucauacga

SEQ ID NO: 2025446 - RNA, 19 nt, Artificial Sequence
  Description of Artificial Sequence: Synthetic oligonucleotide
  Sense strand starting at position 2722 of SEQ ID NO: 1881194
ucccguuguggcucaagua

SEQ ID NO: 2025447 - RNA, 19 nt, Artificial Sequence
  Description of Artificial Sequence: Synthetic oligonucleotide
  Antisense strand to SEQ ID NO: 2025446
uacuugagccacaacggga

SEQ ID NO: 2025448 - RNA, 19 nt, Artificial Sequence
  Description of Artificial Sequence: Synthetic oligonucleotide
  Sense strand starting at position 2732 of SEQ ID NO: 1881194
gcucaaguaccaggaaagu

SEQ ID NO: 2025449 - RNA, 19 nt, Artificial Sequence
  Description of Artificial Sequence: Synthetic oligonucleotide
  Antisense strand to SEQ ID NO: 2025448
acuuuccugguacuugagc

SEQ ID NO: 2025450 - RNA, 19 nt, Artificial Sequence
  Description of Artificial Sequence: Synthetic oligonucleotide
  Sense strand starting at position 2748 of SEQ ID NO: 1881194
agucuccuuccugggauau

SEQ ID NO: 2025451 - RNA, 19 nt, Artificial Sequence
  Description of Artificial Sequence: Synthetic oligonucleotide
  Antisense strand to SEQ ID NO: 2025450
auaucccaggaaggagacu

SEQ ID NO: 2025452 - RNA, 19 nt, Artificial Sequence
  Description of Artificial Sequence: Synthetic oligonucleotide
  Sense strand starting at position 2749 of SEQ ID NO: 1881194
gucuccuuccugggauauc

SEQ ID NO: 2025453 - RNA, 19 nt, Artificial Sequence
  Description of Artificial Sequence: Synthetic oligonucleotide
  Antisense strand to SEQ ID NO: 2025452
gauaucccaggaaggagac

SEQ ID NO: 2025454 - RNA, 19 nt, Artificial Sequence
  Description of Artificial Sequence: Synthetic oligonucleotide
  Sense strand starting at position 2783 of SEQ ID NO: 1881194
ccuuuaagaccuuggacuu

SEQ ID NO: 2025455 - RNA, 19 nt, Artificial Sequence
  Description of Artificial Sequence: Synthetic oligonucleotide
  Antisense strand to SEQ ID NO: 2025454
aaguccaaggucuuaaagg

SEQ ID NO: 2025456 - RNA, 19 nt, Artificial Sequence
  Description of Artificial Sequence: Synthetic oligonucleotide
  Sense strand starting at position 2815 of SEQ ID NO: 1881194
guuagaucaucccugugga

SEQ ID NO: 2025457 - RNA, 19 nt, Artificial Sequence
  Description of Artificial Sequence: Synthetic oligonucleotide
  Antisense strand to SEQ ID NO: 2025456
uccacagggaugaucuaac

SEQ ID NO: 2025458 - RNA, 19 nt, Artificial Sequence
  Description of Artificial Sequence: Synthetic oligonucleotide
  Sense strand starting at position 2816 of SEQ ID NO: 1881194
uuagaucaucccuguggaa

SEQ ID NO: 2025459 - RNA, 19 nt, Artificial Sequence
  Description of Artificial Sequence: Synthetic oligonucleotide
  Antisense strand to SEQ ID NO: 2025458
uuccacagggaugaucuaa

SEQ ID NO: 2025460 - RNA, 19 nt, Artificial Sequence
  Description of Artificial Sequence: Synthetic oligonucleotide
  Sense strand starting at position 2918 of SEQ ID NO: 1881194
ccggaagagcuuuaugcag

SEQ ID NO: 2025461 - RNA, 19 nt, Artificial Sequence
  Description of Artificial Sequence: Synthetic oligonucleotide
  Antisense strand to SEQ ID NO: 2025460
cugcauaaagcucuuccgg

SEQ ID NO: 2025462 - RNA, 19 nt, Artificial Sequence
  Description of Artificial Sequence: Synthetic oligonucleotide
  Sense strand starting at position 2924 of SEQ ID NO: 1881194
gagcuuuaugcagauaagg

SEQ ID NO: 2025463 - RNA, 19 nt, Artificial Sequence
  Description of Artificial Sequence: Synthetic oligonucleotide
  Antisense strand to SEQ ID NO: 2025462
ccuuaucugcauaaagcuc

SEQ ID NO: 2025464 - RNA, 19 nt, Artificial Sequence
  Description of Artificial Sequence: Synthetic oligonucleotide
  Sense strand starting at position 3060 of SEQ ID NO: 1881194
gcuaaagauucucuggaga

SEQ ID NO: 2025465 - RNA, 19 nt, Artificial Sequence
  Description of Artificial Sequence: Synthetic oligonucleotide
  Antisense strand to SEQ ID NO: 2025464
ucuccagagaaucuuuagc

SEQ ID NO: 2025466 - RNA, 19 nt, Artificial Sequence
  Description of Artificial Sequence: Synthetic oligonucleotide
  Sense strand starting at position 3095 of SEQ ID NO: 1881194
auaagaucagucuggagca

SEQ ID NO: 2025467 - RNA, 19 nt, Artificial Sequence
  Description of Artificial Sequence: Synthetic oligonucleotide
  Antisense strand to SEQ ID NO: 2025466
ugcuccagacugaucuuau

SEQ ID NO: 2025468 - RNA, 19 nt, Artificial Sequence
  Description of Artificial Sequence: Synthetic oligonucleotide
  Sense strand starting at position 3141 of SEQ ID NO: 1881194
ccgagaguccaccauaagu

SEQ ID NO: 2025469 - RNA, 19 nt, Artificial Sequence
  Description of Artificial Sequence: Synthetic oligonucleotide
  Antisense strand to SEQ ID NO: 2025468
acuuaugguggacucucgg

SEQ ID NO: 2025470 - RNA, 19 nt, Artificial Sequence
  Description of Artificial Sequence: Synthetic oligonucleotide
  Sense strand starting at position 3208 of SEQ ID NO: 1881194
gcaauuacacaaggaaguu

SEQ ID NO: 2025471 - RNA, 19 nt, Artificial Sequence
  Description of Artificial Sequence: Synthetic oligonucleotide
  Antisense strand to SEQ ID NO: 2025470
aacuuccuuguguaauugc

SEQ ID NO: 2025472 - RNA, 19 nt, Artificial Sequence
  Description of Artificial Sequence: Synthetic oligonucleotide
  Sense strand starting at position 3321 of SEQ ID NO: 1881194
cgacuauaguuuccuuaua

SEQ ID NO: 2025473 - RNA, 19 nt, Artificial Sequence
  Description of Artificial Sequence: Synthetic oligonucleotide
  Antisense strand to SEQ ID NO: 2025472
uauaaggaaacuauagucg

SEQ ID NO: 2025474 - RNA, 19 nt, Artificial Sequence
  Description of Artificial Sequence: Synthetic oligonucleotide
  Sense strand starting at position 3513 of SEQ ID NO: 1881194
aguuucuuaccugauguau

SEQ ID NO: 2025475 - RNA, 19 nt, Artificial Sequence
  Description of Artificial Sequence: Synthetic oligonucleotide
  Antisense strand to SEQ ID NO: 2025474
auacaucagguaagaaacu

SEQ ID NO: 2025476 - RNA, 19 nt, Artificial Sequence
  Description of Artificial Sequence: Synthetic oligonucleotide
  Sense strand starting at position 3765 of SEQ ID NO: 1881194
cugugaaugucauuacauu

SEQ ID NO: 2025477 - RNA, 19 nt, Artificial Sequence
  Description of Artificial Sequence: Synthetic oligonucleotide
  Antisense strand to SEQ ID NO: 2025476
aauguaaugacauucacag

SEQ ID NO: 2025478 - RNA, 19 nt, Artificial Sequence
  Description of Artificial Sequence: Synthetic oligonucleotide
  Sense strand starting at position 3785 of SEQ ID NO: 1881194
ucagcaucuugguccaaua

SEQ ID NO: 2025479 - RNA, 19 nt, Artificial Sequence
  Description of Artificial Sequence: Synthetic oligonucleotide
  Antisense strand to SEQ ID NO: 2025478
uauuggaccaagaugcuga

SEQ ID NO: 2025480 - RNA, 19 nt, Artificial Sequence
  Description of Artificial Sequence: Synthetic oligonucleotide
  Sense strand starting at position 202 of SEQ ID NO: 1881195
guguuauugcuugugcuca

SEQ ID NO: 2025481 - RNA, 19 nt, Artificial Sequence
  Description of Artificial Sequence: Synthetic oligonucleotide
  Antisense strand to SEQ ID NO: 2025480
ugagcacaagcaauaacac

SEQ ID NO: 2025482 - RNA, 19 nt, Artificial Sequence
  Description of Artificial Sequence: Synthetic oligonucleotide
  Sense strand starting at position 417 of SEQ ID NO: 1881195
uacuaagaaguuuaucgau

SEQ ID NO: 2025483 - RNA, 19 nt, Artificial Sequence
  Description of Artificial Sequence: Synthetic oligonucleotide
  Antisense strand to SEQ ID NO: 2025482
aucgauaaacuucuuagua

SEQ ID NO: 2025484 - RNA, 19 nt, Artificial Sequence
  Description of Artificial Sequence: Synthetic oligonucleotide
  Sense strand starting at position 625 of SEQ ID NO: 1881195
auucuagacuaggucaauu

SEQ ID NO: 2025485 - RNA, 19 nt, Artificial Sequence
  Description of Artificial Sequence: Synthetic oligonucleotide
  Antisense strand to SEQ ID NO: 2025484
aauugaccuagucuagaau

SEQ ID NO: 2025486 - RNA, 19 nt, Artificial Sequence
  Description of Artificial Sequence: Synthetic oligonucleotide
  Sense strand starting at position 653 of SEQ ID NO: 1881195
cuuuauaagguagguauga

SEQ ID NO: 2025487 - RNA, 19 nt, Artificial Sequence
  Description of Artificial Sequence: Synthetic oligonucleotide
  Antisense strand to SEQ ID NO: 2025486
ucauaccuaccuuauaaag

SEQ ID NO: 2025488 - RNA, 19 nt, Artificial Sequence
  Description of Artificial Sequence: Synthetic oligonucleotide
  Sense strand starting at position 654 of SEQ ID NO: 1881195
uuuauaagguagguaugaa

SEQ ID NO: 2025489 - RNA, 19 nt, Artificial Sequence
  Description of Artificial Sequence: Synthetic oligonucleotide
  Antisense strand to SEQ ID NO: 2025488
uucauaccuaccuuauaaa

SEQ ID NO: 2025490 - RNA, 19 nt, Artificial Sequence
  Description of Artificial Sequence: Synthetic oligonucleotide
  Sense strand starting at position 679 of SEQ ID NO: 1881195
gaccuuugggagcauuaug

SEQ ID NO: 2025491 - RNA, 19 nt, Artificial Sequence
  Description of Artificial Sequence: Synthetic oligonucleotide
  Antisense strand to SEQ ID NO: 2025490
cauaaugcucccaaagguc

SEQ ID NO: 2025492 - RNA, 19 nt, Artificial Sequence
  Description of Artificial Sequence: Synthetic oligonucleotide
  Sense strand starting at position 867 of SEQ ID NO: 1881195
agcucagaauuccugauau

SEQ ID NO: 2025493 - RNA, 19 nt, Artificial Sequence
  Description of Artificial Sequence: Synthetic oligonucleotide
  Antisense strand to SEQ ID NO: 2025492
auaucaggaauucugagcu

SEQ ID NO: 2025494 - RNA, 19 nt, Artificial Sequence
  Description of Artificial Sequence: Synthetic oligonucleotide
  Sense strand starting at position 879 of SEQ ID NO: 1881195
cugauauaccaucaugugu

SEQ ID NO: 2025495 - RNA, 19 nt, Artificial Sequence
  Description of Artificial Sequence: Synthetic oligonucleotide
  Antisense strand to SEQ ID NO: 2025494
acacaugaugguauaucag

SEQ ID NO: 2025496 - RNA, 19 nt, Artificial Sequence
  Description of Artificial Sequence: Synthetic oligonucleotide
  Sense strand starting at position 890 of SEQ ID NO: 1881195
ucaugugucaaugggacaa

SEQ ID NO: 2025497 - RNA, 19 nt, Artificial Sequence
  Description of Artificial Sequence: Synthetic oligonucleotide
  Antisense strand to SEQ ID NO: 2025496
uugucccauugacacauga

SEQ ID NO: 2025498 - RNA, 19 nt, Artificial Sequence
  Description of Artificial Sequence: Synthetic oligonucleotide
  Sense strand starting at position 1069 of SEQ ID NO: 1881195
ggguacuaauucuuaccau

SEQ ID NO: 2025499 - RNA, 19 nt, Artificial Sequence
  Description of Artificial Sequence: Synthetic oligonucleotide
  Antisense strand to SEQ ID NO: 2025498
augguaagaauuaguaccc

SEQ ID NO: 2025500 - RNA, 19 nt, Artificial Sequence
  Description of Artificial Sequence: Synthetic oligonucleotide
  Sense strand starting at position 1110 of SEQ ID NO: 1881195
ggaacugugaagugagaua

SEQ ID NO: 2025501 - RNA, 19 nt, Artificial Sequence
  Description of Artificial Sequence: Synthetic oligonucleotide
  Antisense strand to SEQ ID NO: 2025500
uaucucacuucacaguucc

SEQ ID NO: 2025502 - RNA, 19 nt, Artificial Sequence
  Description of Artificial Sequence: Synthetic oligonucleotide
  Sense strand starting at position 1235 of SEQ ID NO: 1881195
cacucaaguguggaaucua

SEQ ID NO: 2025503 - RNA, 19 nt, Artificial Sequence
  Description of Artificial Sequence: Synthetic oligonucleotide
  Antisense strand to SEQ ID NO: 2025502
uagauuccacacuugagug

SEQ ID NO: 2025504 - RNA, 19 nt, Artificial Sequence
  Description of Artificial Sequence: Synthetic oligonucleotide
  Sense strand starting at position 1281 of SEQ ID NO: 1881195
guagaauagugguuaacac

SEQ ID NO: 2025505 - RNA, 19 nt, Artificial Sequence
  Description of Artificial Sequence: Synthetic oligonucleotide
  Antisense strand to SEQ ID NO: 2025504
guguuaaccacuauucuac

SEQ ID NO: 2025506 - RNA, 19 nt, Artificial Sequence
  Description of Artificial Sequence: Synthetic oligonucleotide
  Sense strand starting at position 1391 of SEQ ID NO: 1881195
auuuguugcccuuggugaa

SEQ ID NO: 2025507 - RNA, 19 nt, Artificial Sequence
  Description of Artificial Sequence: Synthetic oligonucleotide
  Antisense strand to SEQ ID NO: 2025506
uucaccaagggcaacaaau

SEQ ID NO: 2025508 - RNA, 19 nt, Artificial Sequence
  Description of Artificial Sequence: Synthetic oligonucleotide
  Sense strand starting at position 1395 of SEQ ID NO: 1881195
guugcccuuggugaaauaa

SEQ ID NO: 2025509 - RNA, 19 nt, Artificial Sequence
  Description of Artificial Sequence: Synthetic oligonucleotide
  Antisense strand to SEQ ID NO: 2025508
uuauuucaccaagggcaac

SEQ ID NO: 2025510 - RNA, 19 nt, Artificial Sequence
  Description of Artificial Sequence: Synthetic oligonucleotide
  Sense strand starting at position 1413 of SEQ ID NO: 1881195
auagcauucuggccagaaa

SEQ ID NO: 2025511 - RNA, 19 nt, Artificial Sequence
  Description of Artificial Sequence: Synthetic oligonucleotide
  Antisense strand to SEQ ID NO: 2025510
uuucuggccagaaugcuau

SEQ ID NO: 2025512 - RNA, 19 nt, Artificial Sequence
  Description of Artificial Sequence: Synthetic oligonucleotide
  Sense strand starting at position 1414 of SEQ ID NO: 1881195
uagcauucuggccagaaag

SEQ ID NO: 2025513 - RNA, 19 nt, Artificial Sequence
  Description of Artificial Sequence: Synthetic oligonucleotide
  Antisense strand to SEQ ID NO: 2025512
cuuucuggccagaaugcua

SEQ ID NO: 2025514 - RNA, 19 nt, Artificial Sequence
  Description of Artificial Sequence: Synthetic oligonucleotide
  Sense strand starting at position 1416 of SEQ ID NO: 1881195
gcauucuggccagaaagga

SEQ ID NO: 2025515 - RNA, 19 nt, Artificial Sequence
  Description of Artificial Sequence: Synthetic oligonucleotide
  Antisense strand to SEQ ID NO: 2025514
uccuuucuggccagaaugc

SEQ ID NO: 2025516 - RNA, 19 nt, Artificial Sequence
  Description of Artificial Sequence: Synthetic oligonucleotide
  Sense strand starting at position 1737 of SEQ ID NO: 1881195
gcuccugcugugucaauca

SEQ ID NO: 2025517 - RNA, 19 nt, Artificial Sequence
  Description of Artificial Sequence: Synthetic oligonucleotide
  Antisense strand to SEQ ID NO: 2025516
ugauugacacagcaggagc

SEQ ID NO: 2025518 - RNA, 19 nt, Artificial Sequence
  Description of Artificial Sequence: Synthetic oligonucleotide
  Sense strand starting at position 1775 of SEQ ID NO: 1881195
uuaaucuuucccugaugag

SEQ ID NO: 2025519 - RNA, 19 nt, Artificial Sequence
  Description of Artificial Sequence: Synthetic oligonucleotide
  Antisense strand to SEQ ID NO: 2025518
cucaucagggaaagauuaa

SEQ ID NO: 2025520 - RNA, 19 nt, Artificial Sequence
  Description of Artificial Sequence: Synthetic oligonucleotide
  Sense strand starting at position 1787 of SEQ ID NO: 1881195
ugaugagguaggcaguauu

SEQ ID NO: 2025521 - RNA, 19 nt, Artificial Sequence
  Description of Artificial Sequence: Synthetic oligonucleotide
  Antisense strand to SEQ ID NO: 2025520
aauacugccuaccucauca

SEQ ID NO: 2025522 - RNA, 19 nt, Artificial Sequence
  Description of Artificial Sequence: Synthetic oligonucleotide
  Sense strand starting at position 1848 of SEQ ID NO: 1881195
aaauaauagaggcgggauu

SEQ ID NO: 2025523 - RNA, 19 nt, Artificial Sequence
  Description of Artificial Sequence: Synthetic oligonucleotide
  Antisense strand to SEQ ID NO: 2025522
aaucccgccucuauuauuu

SEQ ID NO: 2025524 - RNA, 19 nt, Artificial Sequence
  Description of Artificial Sequence: Synthetic oligonucleotide
  Sense strand starting at position 1863 of SEQ ID NO: 1881195
gauuguaaucuaggauuaa

SEQ ID NO: 2025525 - RNA, 19 nt, Artificial Sequence
  Description of Artificial Sequence: Synthetic oligonucleotide
  Antisense strand to SEQ ID NO: 2025524
uuaauccuagauuacaauc

SEQ ID NO: 2025526 - RNA, 19 nt, Artificial Sequence
  Description of Artificial Sequence: Synthetic oligonucleotide
  Sense strand starting at position 2069 of SEQ ID NO: 1881195
gugcuugcugaauagacaa

SEQ ID NO: 2025527 - RNA, 19 nt, Artificial Sequence
  Description of Artificial Sequence: Synthetic oligonucleotide
  Antisense strand to SEQ ID NO: 2025526
uugucuauucagcaagcac

SEQ ID NO: 2025528 - RNA, 19 nt, Artificial Sequence
  Description of Artificial Sequence: Synthetic oligonucleotide
  Sense strand starting at position 2172 of SEQ ID NO: 1881195
ugucaaacuccugaguacu

SEQ ID NO: 2025529 - RNA, 19 nt, Artificial Sequence
  Description of Artificial Sequence: Synthetic oligonucleotide
  Antisense strand to SEQ ID NO: 2025528
aguacucaggaguuugaca

SEQ ID NO: 2025530 - RNA, 19 nt, Artificial Sequence
  Description of Artificial Sequence: Synthetic oligonucleotide
  Sense strand starting at position 2297 of SEQ ID NO: 1881195
ggugguguucaacaaaugu

SEQ ID NO: 2025531 - RNA, 19 nt, Artificial Sequence
  Description of Artificial Sequence: Synthetic oligonucleotide
  Antisense strand to SEQ ID NO: 2025530
acauuuguugaacaccacc

SEQ ID NO: 2025532 - RNA, 19 nt, Artificial Sequence
  Description of Artificial Sequence: Synthetic oligonucleotide
  Sense strand starting at position 2343 of SEQ ID NO: 1881195
agggauauaucugcauaac

SEQ ID NO: 2025533 - RNA, 19 nt, Artificial Sequence
  Description of Artificial Sequence: Synthetic oligonucleotide
  Antisense strand to SEQ ID NO: 2025532
guuaugcagauauaucccu

SEQ ID NO: 2025534 - RNA, 19 nt, Artificial Sequence
  Description of Artificial Sequence: Synthetic oligonucleotide
  Sense strand starting at position 2447 of SEQ ID NO: 1881195
gacaauugauuugagucau

SEQ ID NO: 2025535 - RNA, 19 nt, Artificial Sequence
  Description of Artificial Sequence: Synthetic oligonucleotide
  Antisense strand to SEQ ID NO: 2025534
augacucaaaucaauuguc

SEQ ID NO: 2025536 - RNA, 19 nt, Artificial Sequence
  Description of Artificial Sequence: Synthetic oligonucleotide
  Sense strand starting at position 2485 of SEQ ID NO: 1881195
gcuagaugacauugcauag

SEQ ID NO: 2025537 - RNA, 19 nt, Artificial Sequence
  Description of Artificial Sequence: Synthetic oligonucleotide
  Antisense strand to SEQ ID NO: 2025536
cuaugcaaugucaucuagc

SEQ ID NO: 2025538 - RNA, 19 nt, Artificial Sequence
  Description of Artificial Sequence: Synthetic oligonucleotide
  Sense strand starting at position 2524 of SEQ ID NO: 1881195
gcuauuaauuaggcaaaug

SEQ ID NO: 2025539 - RNA, 19 nt, Artificial Sequence
  Description of Artificial Sequence: Synthetic oligonucleotide
  Antisense strand to SEQ ID NO: 2025538
cauuugccuaauuaauagc

SEQ ID NO: 2025540 - RNA, 19 nt, Artificial Sequence
  Description of Artificial Sequence: Synthetic oligonucleotide
  Sense strand starting at position 2595 of SEQ ID NO: 1881195
ccgucaucuaaaggauaug

SEQ ID NO: 2025541 - RNA, 19 nt, Artificial Sequence
  Description of Artificial Sequence: Synthetic oligonucleotide
  Antisense strand to SEQ ID NO: 2025540
cauauccuuuagaugacgg

SEQ ID NO: 2025542 - RNA, 19 nt, Artificial Sequence
  Description of Artificial Sequence: Synthetic oligonucleotide
  Sense strand starting at position 2794 of SEQ ID NO: 1881195
auaagauaacguggugaaa

SEQ ID NO: 2025543 - RNA, 19 nt, Artificial Sequence
  Description of Artificial Sequence: Synthetic oligonucleotide
  Antisense strand to SEQ ID NO: 2025542
uuucaccacguuaucuuau

SEQ ID NO: 2025544 - RNA, 19 nt, Artificial Sequence
  Description of Artificial Sequence: Synthetic oligonucleotide
  Sense strand starting at position 3052 of SEQ ID NO: 1881195
agcuuuggucaagaaauca

SEQ ID NO: 2025545 - RNA, 19 nt, Artificial Sequence
  Description of Artificial Sequence: Synthetic oligonucleotide
  Antisense strand to SEQ ID NO: 2025544
ugauuucuugaccaaagcu

SEQ ID NO: 2025546 - RNA, 19 nt, Artificial Sequence
  Description of Artificial Sequence: Synthetic oligonucleotide
  Sense strand starting at position 3081 of SEQ ID NO: 1881195
ucaguaagaaagggucauu

SEQ ID NO: 2025547 - RNA, 19 nt, Artificial Sequence
  Description of Artificial Sequence: Synthetic oligonucleotide
  Antisense strand to SEQ ID NO: 2025546
aaugacccuuucuuacuga

SEQ ID NO: 2025548 - RNA, 19 nt, Artificial Sequence
  Description of Artificial Sequence: Synthetic oligonucleotide
  Sense strand starting at position 3143 of SEQ ID NO: 1881195
auggguaauuucuaaagag

SEQ ID NO: 2025549 - RNA, 19 nt, Artificial Sequence
  Description of Artificial Sequence: Synthetic oligonucleotide
  Antisense strand to SEQ ID NO: 2025548
cucuuuagaaauuacccau

SEQ ID NO: 2025550 - RNA, 19 nt, Artificial Sequence
  Description of Artificial Sequence: Synthetic oligonucleotide
  Sense strand starting at position 3488 of SEQ ID NO: 1881195
ccuugaucccagcauuaga

SEQ ID NO: 2025551 - RNA, 19 nt, Artificial Sequence
  Description of Artificial Sequence: Synthetic oligonucleotide
  Antisense strand to SEQ ID NO: 2025550
ucuaaugcugggaucaagg

SEQ ID NO: 2025552 - RNA, 19 nt, Artificial Sequence
  Description of Artificial Sequence: Synthetic oligonucleotide
  Sense strand starting at position 3609 of SEQ ID NO: 1881195
cgaacuagaugaucuccau

SEQ ID NO: 2025553 - RNA, 19 nt, Artificial Sequence
  Description of Artificial Sequence: Synthetic oligonucleotide
  Antisense strand to SEQ ID NO: 2025552
auggagaucaucuaguucg

SEQ ID NO: 2025554 - RNA, 19 nt, Artificial Sequence
  Description of Artificial Sequence: Synthetic oligonucleotide
  Sense strand starting at position 3847 of SEQ ID NO: 1881195
ccuaauaucuguuugaaga

SEQ ID NO: 2025555 - RNA, 19 nt, Artificial Sequence
  Description of Artificial Sequence: Synthetic oligonucleotide
  Antisense strand to SEQ ID NO: 2025554
ucuucaaacagauauuagg

SEQ ID NO: 2025556 - RNA, 19 nt, Artificial Sequence
  Description of Artificial Sequence: Synthetic oligonucleotide
  Sense strand starting at position 3848 of SEQ ID NO: 1881195
cuaauaucuguuugaagau

SEQ ID NO: 2025557 - RNA, 19 nt, Artificial Sequence
  Description of Artificial Sequence: Synthetic oligonucleotide
  Antisense strand to SEQ ID NO: 2025556
aucuucaaacagauauuag

SEQ ID NO: 2025558 - RNA, 19 nt, Artificial Sequence
  Description of Artificial Sequence: Synthetic oligonucleotide
  Sense strand starting at position 3885 of SEQ ID NO: 1881195
ccuugauaucaaggucuuc

SEQ ID NO: 2025559 - RNA, 19 nt, Artificial Sequence
  Description of Artificial Sequence: Synthetic oligonucleotide
  Antisense strand to SEQ ID NO: 2025558
gaagaccuugauaucaagg

SEQ ID NO: 2025560 - RNA, 19 nt, Artificial Sequence
  Description of Artificial Sequence: Synthetic oligonucleotide
  Sense strand starting at position 35 of SEQ ID NO: 1881196
uggugugaauauccauaac

SEQ ID NO: 2025561 - RNA, 19 nt, Artificial Sequence
  Description of Artificial Sequence: Synthetic oligonucleotide
  Antisense strand to SEQ ID NO: 2025560
guuauggauauucacacca

SEQ ID NO: 2025562 - RNA, 19 nt, Artificial Sequence
  Description of Artificial Sequence: Synthetic oligonucleotide
  Sense strand starting at position 38 of SEQ ID NO: 1881196
ugugaauauccauaacgua

SEQ ID NO: 2025563 - RNA, 19 nt, Artificial Sequence
  Description of Artificial Sequence: Synthetic oligonucleotide
  Antisense strand to SEQ ID NO: 2025562
uacguuauggauauucaca

SEQ ID NO: 2025564 - RNA, 19 nt, Artificial Sequence
  Description of Artificial Sequence: Synthetic oligonucleotide
  Sense strand starting at position 129 of SEQ ID NO: 1881196
aucuacgcucguugaauuu

SEQ ID NO: 2025565 - RNA, 19 nt, Artificial Sequence
  Description of Artificial Sequence: Synthetic oligonucleotide
  Antisense strand to SEQ ID NO: 2025564
aaauucaacgagcguagau

SEQ ID NO: 2025566 - RNA, 19 nt, Artificial Sequence
  Description of Artificial Sequence: Synthetic oligonucleotide
  Sense strand starting at position 163 of SEQ ID NO: 1881196
ggaagcaaaguuuaaugua

SEQ ID NO: 2025567 - RNA, 19 nt, Artificial Sequence
  Description of Artificial Sequence: Synthetic oligonucleotide
  Antisense strand to SEQ ID NO: 2025566
uacauuaaacuuugcuucc

SEQ ID NO: 2025568 - RNA, 19 nt, Artificial Sequence
  Description of Artificial Sequence: Synthetic oligonucleotide
  Sense strand starting at position 217 of SEQ ID NO: 1881196
ccuaaaguaucuguuacac

SEQ ID NO: 2025569 - RNA, 19 nt, Artificial Sequence
  Description of Artificial Sequence: Synthetic oligonucleotide
  Antisense strand to SEQ ID NO: 2025568
guguaacagauacuuuagg

SEQ ID NO: 2025570 - RNA, 19 nt, Artificial Sequence
  Description of Artificial Sequence: Synthetic oligonucleotide
  Sense strand starting at position 257 of SEQ ID NO: 1881196
cuuuccuucugguuuggua

SEQ ID NO: 2025571 - RNA, 19 nt, Artificial Sequence
  Description of Artificial Sequence: Synthetic oligonucleotide
  Antisense strand to SEQ ID NO: 2025570
uaccaaaccagaaggaaag

SEQ ID NO: 2025572 - RNA, 19 nt, Artificial Sequence
  Description of Artificial Sequence: Synthetic oligonucleotide
  Sense strand starting at position 259 of SEQ ID NO: 1881196
uuccuucugguuugguaaa

SEQ ID NO: 2025573 - RNA, 19 nt, Artificial Sequence
  Description of Artificial Sequence: Synthetic oligonucleotide
  Antisense strand to SEQ ID NO: 2025572
uuuaccaaaccagaaggaa

SEQ ID NO: 2025574 - RNA, 19 nt, Artificial Sequence
  Description of Artificial Sequence: Synthetic oligonucleotide
  Sense strand starting at position 261 of SEQ ID NO: 1881196
ccuucugguuugguaaauu

SEQ ID NO: 2025575 - RNA, 19 nt, Artificial Sequence
  Description of Artificial Sequence: Synthetic oligonucleotide
  Antisense strand to SEQ ID NO: 2025574
aauuuaccaaaccagaagg

SEQ ID NO: 2025576 - RNA, 19 nt, Artificial Sequence
  Description of Artificial Sequence: Synthetic oligonucleotide
  Sense strand starting at position 269 of SEQ ID NO: 1881196
uuugguaaauuugggugaa

SEQ ID NO: 2025577 - RNA, 19 nt, Artificial Sequence
  Description of Artificial Sequence: Synthetic oligonucleotide
  Antisense strand to SEQ ID NO: 2025576
uucacccaaauuuaccaaa

SEQ ID NO: 2025578 - RNA, 19 nt, Artificial Sequence
  Description of Artificial Sequence: Synthetic oligonucleotide
  Sense strand starting at position 270 of SEQ ID NO: 1881196
uugguaaauuugggugaau

SEQ ID NO: 2025579 - RNA, 19 nt, Artificial Sequence
  Description of Artificial Sequence: Synthetic oligonucleotide
  Antisense strand to SEQ ID NO: 2025578
auucacccaaauuuaccaa

SEQ ID NO: 2025580 - RNA, 19 nt, Artificial Sequence
  Description of Artificial Sequence: Synthetic oligonucleotide
  Sense strand starting at position 290 of SEQ ID NO: 1881196
gugguauucuauuccagaa

SEQ ID NO: 2025581 - RNA, 19 nt, Artificial Sequence
  Description of Artificial Sequence: Synthetic oligonucleotide
  Antisense strand to SEQ ID NO: 2025580
uucuggaauagaauaccac

SEQ ID NO: 2025582 - RNA, 19 nt, Artificial Sequence
  Description of Artificial Sequence: Synthetic oligonucleotide
  Sense strand starting at position 329 of SEQ ID NO: 1881196
aaacguccucugcagaagu

SEQ ID NO: 2025583 - RNA, 19 nt, Artificial Sequence
  Description of Artificial Sequence: Synthetic oligonucleotide
  Antisense strand to SEQ ID NO: 2025582
acuucugcagaggacguuu

SEQ ID NO: 2025584 - RNA, 19 nt, Artificial Sequence
  Description of Artificial Sequence: Synthetic oligonucleotide
  Sense strand starting at position 345 of SEQ ID NO: 1881196
aguggagucucccuuguua

SEQ ID NO: 2025585 - RNA, 19 nt, Artificial Sequence
  Description of Artificial Sequence: Synthetic oligonucleotide
  Antisense strand to SEQ ID NO: 2025584
uaacaagggagacuccacu

SEQ ID NO: 2025586 - RNA, 19 nt, Artificial Sequence
  Description of Artificial Sequence: Synthetic oligonucleotide
  Sense strand starting at position 471 of SEQ ID NO: 1881196
uuagaaacuuaugaggaau

SEQ ID NO: 2025587 - RNA, 19 nt, Artificial Sequence
  Description of Artificial Sequence: Synthetic oligonucleotide
  Antisense strand to SEQ ID NO: 2025586
auuccucauaaguuucuaa

SEQ ID NO: 2025588 - RNA, 19 nt, Artificial Sequence
  Description of Artificial Sequence: Synthetic oligonucleotide
  Sense strand starting at position 473 of SEQ ID NO: 1881196
agaaacuuaugaggaauau

SEQ ID NO: 2025589 - RNA, 19 nt, Artificial Sequence
  Description of Artificial Sequence: Synthetic oligonucleotide
  Antisense strand to SEQ ID NO: 2025588
auauuccucauaaguuucu

SEQ ID NO: 2025590 - RNA, 19 nt, Artificial Sequence
  Description of Artificial Sequence: Synthetic oligonucleotide
  Sense strand starting at position 612 of SEQ ID NO: 1881196
uaaagcaagugugaauuua

SEQ ID NO: 2025591 - RNA, 19 nt, Artificial Sequence
  Description of Artificial Sequence: Synthetic oligonucleotide
  Antisense strand to SEQ ID NO: 2025590
uaaauucacacuugcuuua

SEQ ID NO: 2025592 - RNA, 19 nt, Artificial Sequence
  Description of Artificial Sequence: Synthetic oligonucleotide
  Sense strand starting at position 620 of SEQ ID NO: 1881196
gugugaauuuaagagguau

SEQ ID NO: 2025593 - RNA, 19 nt, Artificial Sequence
  Description of Artificial Sequence: Synthetic oligonucleotide
  Antisense strand to SEQ ID NO: 2025592
auaccucuuaaauucacac

SEQ ID NO: 2025594 - RNA, 19 nt, Artificial Sequence
  Description of Artificial Sequence: Synthetic oligonucleotide
  Sense strand starting at position 785 of SEQ ID NO: 1881196
ccauaagcagcugaauaau

SEQ ID NO: 2025595 - RNA, 19 nt, Artificial Sequence
  Description of Artificial Sequence: Synthetic oligonucleotide
  Antisense strand to SEQ ID NO: 2025594
auuauucagcugcuuaugg

SEQ ID NO: 2025596 - RNA, 19 nt, Artificial Sequence
  Description of Artificial Sequence: Synthetic oligonucleotide
  Sense strand starting at position 798 of SEQ ID NO: 1881196
aauaaugaacugcguugua

SEQ ID NO: 2025597 - RNA, 19 nt, Artificial Sequence
  Description of Artificial Sequence: Synthetic oligonucleotide
  Antisense strand to SEQ ID NO: 2025596
uacaacgcaguucauuauu

SEQ ID NO: 2025598 - RNA, 19 nt, Artificial Sequence
  Description of Artificial Sequence: Synthetic oligonucleotide
  Sense strand starting at position 839 of SEQ ID NO: 1881196
ggauuugcaucguuucuua

SEQ ID NO: 2025599 - RNA, 19 nt, Artificial Sequence
  Description of Artificial Sequence: Synthetic oligonucleotide
  Antisense strand to SEQ ID NO: 2025598
uaagaaacgaugcaaaucc

SEQ ID NO: 2025600 - RNA, 19 nt, Artificial Sequence
  Description of Artificial Sequence: Synthetic oligonucleotide
  Sense strand starting at position 858 of SEQ ID NO: 1881196
auaaguauuccaggcaccu

SEQ ID NO: 2025601 - RNA, 19 nt, Artificial Sequence
  Description of Artificial Sequence: Synthetic oligonucleotide
  Antisense strand to SEQ ID NO: 2025600
aggugccuggaauacuuau

SEQ ID NO: 2025602 - RNA, 19 nt, Artificial Sequence
  Description of Artificial Sequence: Synthetic oligonucleotide
  Sense strand starting at position 1066 of SEQ ID NO: 1881196
ucaugagaaucuucuugau

SEQ ID NO: 2025603 - RNA, 19 nt, Artificial Sequence
  Description of Artificial Sequence: Synthetic oligonucleotide
  Antisense strand to SEQ ID NO: 2025602
aucaagaagauucucauga

SEQ ID NO: 2025604 - RNA, 19 nt, Artificial Sequence
  Description of Artificial Sequence: Synthetic oligonucleotide
  Sense strand starting at position 1068 of SEQ ID NO: 1881196
augagaaucuucuugauuc

SEQ ID NO: 2025605 - RNA, 19 nt, Artificial Sequence
  Description of Artificial Sequence: Synthetic oligonucleotide
  Antisense strand to SEQ ID NO: 2025604
gaaucaagaagauucucau

SEQ ID NO: 2025606 - RNA, 19 nt, Artificial Sequence
  Description of Artificial Sequence: Synthetic oligonucleotide
  Sense strand starting at position 1129 of SEQ ID NO: 1881196
auaugugaaggcuaucuuu

SEQ ID NO: 2025607 - RNA, 19 nt, Artificial Sequence
  Description of Artificial Sequence: Synthetic oligonucleotide
  Antisense strand to SEQ ID NO: 2025606
aaagauagccuucacauau

SEQ ID NO: 2025608 - RNA, 19 nt, Artificial Sequence
  Description of Artificial Sequence: Synthetic oligonucleotide
  Sense strand starting at position 1183 of SEQ ID NO: 1881196
uaaacaauguuggauagga

SEQ ID NO: 2025609 - RNA, 19 nt, Artificial Sequence
  Description of Artificial Sequence: Synthetic oligonucleotide
  Antisense strand to SEQ ID NO: 2025608
uccuauccaacauuguuua

SEQ ID NO: 2025610 - RNA, 19 nt, Artificial Sequence
  Description of Artificial Sequence: Synthetic oligonucleotide
  Sense strand starting at position 1188 of SEQ ID NO: 1881196
aauguuggauaggauuaaa

SEQ ID NO: 2025611 - RNA, 19 nt, Artificial Sequence
  Description of Artificial Sequence: Synthetic oligonucleotide
  Antisense strand to SEQ ID NO: 2025610
uuuaauccuauccaacauu

SEQ ID NO: 2025612 - RNA, 19 nt, Artificial Sequence
  Description of Artificial Sequence: Synthetic oligonucleotide
  Sense strand starting at position 1212 of SEQ ID NO: 1881196
cgugguggugaguacauaa

SEQ ID NO: 2025613 - RNA, 19 nt, Artificial Sequence
  Description of Artificial Sequence: Synthetic oligonucleotide
  Antisense strand to SEQ ID NO: 2025612
uuauguacucaccaccacg

SEQ ID NO: 2025614 - RNA, 19 nt, Artificial Sequence
  Description of Artificial Sequence: Synthetic oligonucleotide
  Sense strand starting at position 1337 of SEQ ID NO: 1881196
gucagaacucaaugaaucu

SEQ ID NO: 2025615 - RNA, 19 nt, Artificial Sequence
  Description of Artificial Sequence: Synthetic oligonucleotide
  Antisense strand to SEQ ID NO: 2025614
agauucauugaguucugac

SEQ ID NO: 2025616 - RNA, 19 nt, Artificial Sequence
  Description of Artificial Sequence: Synthetic oligonucleotide
  Sense strand starting at position 1350 of SEQ ID NO: 1881196
gaaucugaauuagaggacu

SEQ ID NO: 2025617 - RNA, 19 nt, Artificial Sequence
  Description of Artificial Sequence: Synthetic oligonucleotide
  Antisense strand to SEQ ID NO: 2025616
aguccucuaauucagauuc

SEQ ID NO: 2025618 - RNA, 19 nt, Artificial Sequence
  Description of Artificial Sequence: Synthetic oligonucleotide
  Sense strand starting at position 1395 of SEQ ID NO: 1881196
gugguaagaagguauccau

SEQ ID NO: 2025619 - RNA, 19 nt, Artificial Sequence
  Description of Artificial Sequence: Synthetic oligonucleotide
  Antisense strand to SEQ ID NO: 2025618
auggauaccuucuuaccac

SEQ ID NO: 2025620 - RNA, 19 nt, Artificial Sequence
  Description of Artificial Sequence: Synthetic oligonucleotide
  Sense strand starting at position 1398 of SEQ ID NO: 1881196
guaagaagguauccauaag

SEQ ID NO: 2025621 - RNA, 19 nt, Artificial Sequence
  Description of Artificial Sequence: Synthetic oligonucleotide
  Antisense strand to SEQ ID NO: 2025620
cuuauggauaccuucuuac

SEQ ID NO: 2025622 - RNA, 19 nt, Artificial Sequence
  Description of Artificial Sequence: Synthetic oligonucleotide
  Sense strand starting at position 1673 of SEQ ID NO: 1881196
gcuaucuaucaacgaacga

SEQ ID NO: 2025623 - RNA, 19 nt, Artificial Sequence
  Description of Artificial Sequence: Synthetic oligonucleotide
  Antisense strand to SEQ ID NO: 2025622
ucguucguugauagauagc

SEQ ID NO: 2025624 - RNA, 19 nt, Artificial Sequence
  Description of Artificial Sequence: Synthetic oligonucleotide
  Sense strand starting at position 2179 of SEQ ID NO: 1881196
cguguauugauuugcguac

SEQ ID NO: 2025625 - RNA, 19 nt, Artificial Sequence
  Description of Artificial Sequence: Synthetic oligonucleotide
  Antisense strand to SEQ ID NO: 2025624
guacgcaaaucaauacacg

SEQ ID NO: 2025626 - RNA, 19 nt, Artificial Sequence
  Description of Artificial Sequence: Synthetic oligonucleotide
  Sense strand starting at position 2499 of SEQ ID NO: 1881196
auuuguuugguaggcuauu

SEQ ID NO: 2025627 - RNA, 19 nt, Artificial Sequence
  Description of Artificial Sequence: Synthetic oligonucleotide
  Antisense strand to SEQ ID NO: 2025626
aauagccuaccaaacaaau

SEQ ID NO: 2025628 - RNA, 19 nt, Artificial Sequence
  Description of Artificial Sequence: Synthetic oligonucleotide
  Sense strand starting at position 2678 of SEQ ID NO: 1881196
guuuguauuucuuugagcu

SEQ ID NO: 2025629 - RNA, 19 nt, Artificial Sequence
  Description of Artificial Sequence: Synthetic oligonucleotide
  Antisense strand to SEQ ID NO: 2025628
agcucaaagaaauacaaac

SEQ ID NO: 2025630 - RNA, 19 nt, Artificial Sequence
  Description of Artificial Sequence: Synthetic oligonucleotide
  Sense strand starting at position 2679 of SEQ ID NO: 1881196
uuuguauuucuuugagcuc

SEQ ID NO: 2025631 - RNA, 19 nt, Artificial Sequence
  Description of Artificial Sequence: Synthetic oligonucleotide
  Antisense strand to SEQ ID NO: 2025630
gagcucaaagaaauacaaa

SEQ ID NO: 2025632 - RNA, 19 nt, Artificial Sequence
  Description of Artificial Sequence: Synthetic oligonucleotide
  Sense strand starting at position 2700 of SEQ ID NO: 1881196
uggugauauucccuuuaug

SEQ ID NO: 2025633 - RNA, 19 nt, Artificial Sequence
  Description of Artificial Sequence: Synthetic oligonucleotide
  Antisense strand to SEQ ID NO: 2025632
cauaaagggaauaucacca

SEQ ID NO: 2025634 - RNA, 19 nt, Artificial Sequence
  Description of Artificial Sequence: Synthetic oligonucleotide
  Sense strand starting at position 2758 of SEQ ID NO: 1881196
gcuagcggucugucugauu

SEQ ID NO: 2025635 - RNA, 19 nt, Artificial Sequence
  Description of Artificial Sequence: Synthetic oligonucleotide
  Antisense strand to SEQ ID NO: 2025634
aaucagacagaccgcuagc

SEQ ID NO: 2025636 - RNA, 19 nt, Artificial Sequence
  Description of Artificial Sequence: Synthetic oligonucleotide
  Sense strand starting at position 2872 of SEQ ID NO: 1881196
aauaguaagggcuaguuau

SEQ ID NO: 2025637 - RNA, 19 nt, Artificial Sequence
  Description of Artificial Sequence: Synthetic oligonucleotide
  Antisense strand to SEQ ID NO: 2025636
auaacuagcccuuacuauu

SEQ ID NO: 2025638 - RNA, 19 nt, Artificial Sequence
  Description of Artificial Sequence: Synthetic oligonucleotide
  Sense strand starting at position 3433 of SEQ ID NO: 1881196
ggccauacuacccgaggua

SEQ ID NO: 2025639 - RNA, 19 nt, Artificial Sequence
  Description of Artificial Sequence: Synthetic oligonucleotide
  Antisense strand to SEQ ID NO: 2025638
uaccucggguaguauggcc

SEQ ID NO: 2025640 - RNA, 19 nt, Artificial Sequence
  Description of Artificial Sequence: Synthetic oligonucleotide
  Sense strand starting at position 179 of SEQ ID NO: 1881197
ugcucaagaccucagugaa

SEQ ID NO: 2025641 - RNA, 19 nt, Artificial Sequence
  Description of Artificial Sequence: Synthetic oligonucleotide
  Antisense strand to SEQ ID NO: 2025640
uucacugaggucuugagca

SEQ ID NO: 2025642 - RNA, 19 nt, Artificial Sequence
  Description of Artificial Sequence: Synthetic oligonucleotide
  Sense strand starting at position 203 of SEQ ID NO: 1881197
ccaauuaaguucucaguga

SEQ ID NO: 2025643 - RNA, 19 nt, Artificial Sequence
  Description of Artificial Sequence: Synthetic oligonucleotide
  Antisense strand to SEQ ID NO: 2025642
ucacugagaacuuaauugg

SEQ ID NO: 2025644 - RNA, 19 nt, Artificial Sequence
  Description of Artificial Sequence: Synthetic oligonucleotide
  Sense strand starting at position 207 of SEQ ID NO: 1881197
uuaaguucucagugaguuu

SEQ ID NO: 2025645 - RNA, 19 nt, Artificial Sequence
  Description of Artificial Sequence: Synthetic oligonucleotide
  Antisense strand to SEQ ID NO: 2025644
aaacucacugagaacuuaa

SEQ ID NO: 2025646 - RNA, 19 nt, Artificial Sequence
  Description of Artificial Sequence: Synthetic oligonucleotide
  Sense strand starting at position 248 of SEQ ID NO: 1881197
cucaaacaaugagaagaua

SEQ ID NO: 2025647 - RNA, 19 nt, Artificial Sequence
  Description of Artificial Sequence: Synthetic oligonucleotide
  Antisense strand to SEQ ID NO: 2025646
uaucuucucauuguuugag

SEQ ID NO: 2025648 - RNA, 19 nt, Artificial Sequence
  Description of Artificial Sequence: Synthetic oligonucleotide
  Sense strand starting at position 744 of SEQ ID NO: 1881197
agccauaagcaauguugaa

SEQ ID NO: 2025649 - RNA, 19 nt, Artificial Sequence
  Description of Artificial Sequence: Synthetic oligonucleotide
  Antisense strand to SEQ ID NO: 2025648
uucaacauugcuuauggcu

SEQ ID NO: 2025650 - RNA, 19 nt, Artificial Sequence
  Description of Artificial Sequence: Synthetic oligonucleotide
  Sense strand starting at position 1305 of SEQ ID NO: 1881197
gcauuaacagcauagguau

SEQ ID NO: 2025651 - RNA, 19 nt, Artificial Sequence
  Description of Artificial Sequence: Synthetic oligonucleotide
  Antisense strand to SEQ ID NO: 2025650
auaccuaugcuguuaaugc

SEQ ID NO: 2025652 - RNA, 19 nt, Artificial Sequence
  Description of Artificial Sequence: Synthetic oligonucleotide
  Sense strand starting at position 1534 of SEQ ID NO: 1881197
gucaaagaauaguccucaa

SEQ ID NO: 2025653 - RNA, 19 nt, Artificial Sequence
  Description of Artificial Sequence: Synthetic oligonucleotide
  Antisense strand to SEQ ID NO: 2025652
uugaggacuauucuuugac

SEQ ID NO: 2025654 - RNA, 19 nt, Artificial Sequence
  Description of Artificial Sequence: Synthetic oligonucleotide
  Sense strand starting at position 2082 of SEQ ID NO: 1881197
cacuaugugcuguagaauc

SEQ ID NO: 2025655 - RNA, 19 nt, Artificial Sequence
  Description of Artificial Sequence: Synthetic oligonucleotide
  Antisense strand to SEQ ID NO: 2025654
gauucuacagcacauagug

SEQ ID NO: 2025656 - RNA, 19 nt, Artificial Sequence
  Description of Artificial Sequence: Synthetic oligonucleotide
  Sense strand starting at position 2195 of SEQ ID NO: 1881197
agagaaugcuacccaccaa

SEQ ID NO: 2025657 - RNA, 19 nt, Artificial Sequence
  Description of Artificial Sequence: Synthetic oligonucleotide
  Antisense strand to SEQ ID NO: 2025656
uugguggguagcauucucu

SEQ ID NO: 2025658 - RNA, 19 nt, Artificial Sequence
  Description of Artificial Sequence: Synthetic oligonucleotide
  Sense strand starting at position 2226 of SEQ ID NO: 1881197
ggaauuucuuauuagaaac

SEQ ID NO: 2025659 - RNA, 19 nt, Artificial Sequence
  Description of Artificial Sequence: Synthetic oligonucleotide
  Antisense strand to SEQ ID NO: 2025658
guuucuaauaagaaauucc

SEQ ID NO: 2025660 - RNA, 19 nt, Artificial Sequence
  Description of Artificial Sequence: Synthetic oligonucleotide
  Sense strand starting at position 2349 of SEQ ID NO: 1881197
cucucuaauccaggcugaa

SEQ ID NO: 2025661 - RNA, 19 nt, Artificial Sequence
  Description of Artificial Sequence: Synthetic oligonucleotide
  Antisense strand to SEQ ID NO: 2025660
uucagccuggauuagagag

SEQ ID NO: 2025662 - RNA, 19 nt, Artificial Sequence
  Description of Artificial Sequence: Synthetic oligonucleotide
  Sense strand starting at position 2432 of SEQ ID NO: 1881197
agaaacuuauuuggaagaa

SEQ ID NO: 2025663 - RNA, 19 nt, Artificial Sequence
  Description of Artificial Sequence: Synthetic oligonucleotide
  Antisense strand to SEQ ID NO: 2025662
uucuuccaaauaaguuucu

SEQ ID NO: 2025664 - RNA, 19 nt, Artificial Sequence
  Description of Artificial Sequence: Synthetic oligonucleotide
  Sense strand starting at position 2445 of SEQ ID NO: 1881197
gaagaacgcuaccugagaa

SEQ ID NO: 2025665 - RNA, 19 nt, Artificial Sequence
  Description of Artificial Sequence: Synthetic oligonucleotide
  Antisense strand to SEQ ID NO: 2025664
uucucagguagcguucuuc

SEQ ID NO: 2025666 - RNA, 19 nt, Artificial Sequence
  Description of Artificial Sequence: Synthetic oligonucleotide
  Sense strand starting at position 2457 of SEQ ID NO: 1881197
cugagaacauauuaagaaa

SEQ ID NO: 2025667 - RNA, 19 nt, Artificial Sequence
  Description of Artificial Sequence: Synthetic oligonucleotide
  Antisense strand to SEQ ID NO: 2025666
uuucuuaauauguucucag

SEQ ID NO: 2025668 - RNA, 19 nt, Artificial Sequence
  Description of Artificial Sequence: Synthetic oligonucleotide
  Sense strand starting at position 2509 of SEQ ID NO: 1881197
ccaaccuguuucuuaaagu

SEQ ID NO: 2025669 - RNA, 19 nt, Artificial Sequence
  Description of Artificial Sequence: Synthetic oligonucleotide
  Antisense strand to SEQ ID NO: 2025668
acuuuaagaaacagguugg

SEQ ID NO: 2025670 - RNA, 19 nt, Artificial Sequence
  Description of Artificial Sequence: Synthetic oligonucleotide
  Sense strand starting at position 2616 of SEQ ID NO: 1881197
uccauagcccuguguggaa

SEQ ID NO: 2025671 - RNA, 19 nt, Artificial Sequence
  Description of Artificial Sequence: Synthetic oligonucleotide
  Antisense strand to SEQ ID NO: 2025670
uuccacacagggcuaugga

SEQ ID NO: 2025672 - RNA, 19 nt, Artificial Sequence
  Description of Artificial Sequence: Synthetic oligonucleotide
  Sense strand starting at position 2625 of SEQ ID NO: 1881197
cuguguggaaguuaguaua

SEQ ID NO: 2025673 - RNA, 19 nt, Artificial Sequence
  Description of Artificial Sequence: Synthetic oligonucleotide
  Antisense strand to SEQ ID NO: 2025672
uauacuaacuuccacacag

SEQ ID NO: 2025674 - RNA, 19 nt, Artificial Sequence
  Description of Artificial Sequence: Synthetic oligonucleotide
  Sense strand starting at position 2771 of SEQ ID NO: 1881197
cccuuucuugcguuucuua

SEQ ID NO: 2025675 - RNA, 19 nt, Artificial Sequence
  Description of Artificial Sequence: Synthetic oligonucleotide
  Antisense strand to SEQ ID NO: 2025674
uaagaaacgcaagaaaggg

SEQ ID NO: 2025676 - RNA, 19 nt, Artificial Sequence
  Description of Artificial Sequence: Synthetic oligonucleotide
  Sense strand starting at position 2865 of SEQ ID NO: 1881197
guaaguuucuaguuauuug

SEQ ID NO: 2025677 - RNA, 19 nt, Artificial Sequence
  Description of Artificial Sequence: Synthetic oligonucleotide
  Antisense strand to SEQ ID NO: 2025676
caaauaacuagaaacuuac

SEQ ID NO: 2025678 - RNA, 19 nt, Artificial Sequence
  Description of Artificial Sequence: Synthetic oligonucleotide
  Sense strand starting at position 2926 of SEQ ID NO: 1881197
agaucacuugcugaauagu

SEQ ID NO: 2025679 - RNA, 19 nt, Artificial Sequence
  Description of Artificial Sequence: Synthetic oligonucleotide
  Antisense strand to SEQ ID NO: 2025678
acuauucagcaagugaucu

SEQ ID NO: 2025680 - RNA, 19 nt, Artificial Sequence
  Description of Artificial Sequence: Synthetic oligonucleotide
  Sense strand starting at position 2929 of SEQ ID NO: 1881197
ucacuugcugaauaguaau

SEQ ID NO: 2025681 - RNA, 19 nt, Artificial Sequence
  Description of Artificial Sequence: Synthetic oligonucleotide
  Antisense strand to SEQ ID NO: 2025680
auuacuauucagcaaguga

SEQ ID NO: 2025682 - RNA, 19 nt, Artificial Sequence
  Description of Artificial Sequence: Synthetic oligonucleotide
  Sense strand starting at position 2995 of SEQ ID NO: 1881197
uaagguauuugagaaucuc

SEQ ID NO: 2025683 - RNA, 19 nt, Artificial Sequence
  Description of Artificial Sequence: Synthetic oligonucleotide
  Antisense strand to SEQ ID NO: 2025682
gagauucucaaauaccuua

SEQ ID NO: 2025684 - RNA, 19 nt, Artificial Sequence
  Description of Artificial Sequence: Synthetic oligonucleotide
  Sense strand starting at position 3003 of SEQ ID NO: 1881197
uugagaaucucagaagaaa

SEQ ID NO: 2025685 - RNA, 19 nt, Artificial Sequence
  Description of Artificial Sequence: Synthetic oligonucleotide
  Antisense strand to SEQ ID NO: 2025684
uuucuucugagauucucaa

SEQ ID NO: 2025686 - RNA, 19 nt, Artificial Sequence
  Description of Artificial Sequence: Synthetic oligonucleotide
  Sense strand starting at position 3167 of SEQ ID NO: 1881197
ccaaguaaggucugagaag

SEQ ID NO: 2025687 - RNA, 19 nt, Artificial Sequence
  Description of Artificial Sequence: Synthetic oligonucleotide
  Antisense strand to SEQ ID NO: 2025686
cuucucagaccuuacuugg

SEQ ID NO: 2025688 - RNA, 19 nt, Artificial Sequence
  Description of Artificial Sequence: Synthetic oligonucleotide
  Sense strand starting at position 3228 of SEQ ID NO: 1881197
aaagguagucaacaauguu

SEQ ID NO: 2025689 - RNA, 19 nt, Artificial Sequence
  Description of Artificial Sequence: Synthetic oligonucleotide
  Antisense strand to SEQ ID NO: 2025688
aacauuguugacuaccuuu

SEQ ID NO: 2025690 - RNA, 19 nt, Artificial Sequence
  Description of Artificial Sequence: Synthetic oligonucleotide
  Sense strand starting at position 3231 of SEQ ID NO: 1881197
gguagucaacaauguugaa

SEQ ID NO: 2025691 - RNA, 19 nt, Artificial Sequence
  Description of Artificial Sequence: Synthetic oligonucleotide
  Antisense strand to SEQ ID NO: 2025690
uucaacauuguugacuacc

SEQ ID NO: 2025692 - RNA, 19 nt, Artificial Sequence
  Description of Artificial Sequence: Synthetic oligonucleotide
  Sense strand starting at position 3246 of SEQ ID NO: 1881197
ugaauaaacucagucauug

SEQ ID NO: 2025693 - RNA, 19 nt, Artificial Sequence
  Description of Artificial Sequence: Synthetic oligonucleotide
  Antisense strand to SEQ ID NO: 2025692
caaugacugaguuuauuca

SEQ ID NO: 2025694 - RNA, 19 nt, Artificial Sequence
  Description of Artificial Sequence: Synthetic oligonucleotide
  Sense strand starting at position 3408 of SEQ ID NO: 1881197
gcaauuugguggcacauuu

SEQ ID NO: 2025695 - RNA, 19 nt, Artificial Sequence
  Description of Artificial Sequence: Synthetic oligonucleotide
  Antisense strand to SEQ ID NO: 2025694
aaaugugccaccaaauugc

SEQ ID NO: 2025696 - RNA, 19 nt, Artificial Sequence
  Description of Artificial Sequence: Synthetic oligonucleotide
  Sense strand starting at position 3454 of SEQ ID NO: 1881197
guaugaucucauggaauca

SEQ ID NO: 2025697 - RNA, 19 nt, Artificial Sequence
  Description of Artificial Sequence: Synthetic oligonucleotide
  Antisense strand to SEQ ID NO: 2025696
ugauuccaugagaucauac

SEQ ID NO: 2025698 - RNA, 19 nt, Artificial Sequence
  Description of Artificial Sequence: Synthetic oligonucleotide
  Sense strand starting at position 3598 of SEQ ID NO: 1881197
caauuccuugguggugaga

SEQ ID NO: 2025699 - RNA, 19 nt, Artificial Sequence
  Description of Artificial Sequence: Synthetic oligonucleotide
  Antisense strand to SEQ ID NO: 2025698
ucucaccaccaaggaauug

SEQ ID NO: 2025700 - RNA, 19 nt, Artificial Sequence
  Description of Artificial Sequence: Synthetic oligonucleotide
  Sense strand starting at position 3649 of SEQ ID NO: 1881197
gggaauuccuuccuaacgu

SEQ ID NO: 2025701 - RNA, 19 nt, Artificial Sequence
  Description of Artificial Sequence: Synthetic oligonucleotide
  Antisense strand to SEQ ID NO: 2025700
acguuaggaaggaauuccc

SEQ ID NO: 2025702 - RNA, 19 nt, Artificial Sequence
  Description of Artificial Sequence: Synthetic oligonucleotide
  Sense strand starting at position 3672 of SEQ ID NO: 1881197
ccaagaucuggucauuguu

SEQ ID NO: 2025703 - RNA, 19 nt, Artificial Sequence
  Description of Artificial Sequence: Synthetic oligonucleotide
  Antisense strand to SEQ ID NO: 2025702
aacaaugaccagaucuugg

SEQ ID NO: 2025704 - RNA, 19 nt, Artificial Sequence
  Description of Artificial Sequence: Synthetic oligonucleotide
  Sense strand starting at position 3674 of SEQ ID NO: 1881197
aagaucuggucauuguuau

SEQ ID NO: 2025705 - RNA, 19 nt, Artificial Sequence
  Description of Artificial Sequence: Synthetic oligonucleotide
  Antisense strand to SEQ ID NO: 2025704
auaacaaugaccagaucuu

SEQ ID NO: 2025706 - RNA, 19 nt, Artificial Sequence
  Description of Artificial Sequence: Synthetic oligonucleotide
  Sense strand starting at position 3675 of SEQ ID NO: 1881197
agaucuggucauuguuauu

SEQ ID NO: 2025707 - RNA, 19 nt, Artificial Sequence
  Description of Artificial Sequence: Synthetic oligonucleotide
  Antisense strand to SEQ ID NO: 2025706
aauaacaaugaccagaucu

SEQ ID NO: 2025708 - RNA, 19 nt, Artificial Sequence
  Description of Artificial Sequence: Synthetic oligonucleotide
  Sense strand starting at position 3681 of SEQ ID NO: 1881197
ggucauuguuauuucuacu

SEQ ID NO: 2025709 - RNA, 19 nt, Artificial Sequence
  Description of Artificial Sequence: Synthetic oligonucleotide
  Antisense strand to SEQ ID NO: 2025708
aguagaaauaacaaugacc

SEQ ID NO: 2025710 - RNA, 19 nt, Artificial Sequence
  Description of Artificial Sequence: Synthetic oligonucleotide
  Sense strand starting at position 3711 of SEQ ID NO: 1881197
guucuacuccuagaguuac

SEQ ID NO: 2025711 - RNA, 19 nt, Artificial Sequence
  Description of Artificial Sequence: Synthetic oligonucleotide
  Antisense strand to SEQ ID NO: 2025710
guaacucuaggaguagaac

SEQ ID NO: 2025712 - RNA, 19 nt, Artificial Sequence
  Description of Artificial Sequence: Synthetic oligonucleotide
  Sense strand starting at position 3768 of SEQ ID NO: 1881197
ugaagauuaugcucucuca

SEQ ID NO: 2025713 - RNA, 19 nt, Artificial Sequence
  Description of Artificial Sequence: Synthetic oligonucleotide
  Antisense strand to SEQ ID NO: 2025712
ugagagagcauaaucuuca

SEQ ID NO: 2025714 - RNA, 19 nt, Artificial Sequence
  Description of Artificial Sequence: Synthetic oligonucleotide
  Sense strand starting at position 3826 of SEQ ID NO: 1881197
ccaucaaggcuauagucau

SEQ ID NO: 2025715 - RNA, 19 nt, Artificial Sequence
  Description of Artificial Sequence: Synthetic oligonucleotide
  Antisense strand to SEQ ID NO: 2025714
augacuauagccuugaugg

SEQ ID NO: 2025716 - RNA, 19 nt, Artificial Sequence
  Description of Artificial Sequence: Synthetic oligonucleotide
  Sense strand starting at position 3832 of SEQ ID NO: 1881197
aggcuauagucauuccuca

SEQ ID NO: 2025717 - RNA, 19 nt, Artificial Sequence
  Description of Artificial Sequence: Synthetic oligonucleotide
  Antisense strand to SEQ ID NO: 2025716
ugaggaaugacuauagccu

SEQ ID NO: 2025718 - RNA, 19 nt, Artificial Sequence
  Description of Artificial Sequence: Synthetic oligonucleotide
  Sense strand starting at position 3846 of SEQ ID NO: 1881197
ccucauauggcaugacuga

SEQ ID NO: 2025719 - RNA, 19 nt, Artificial Sequence
  Description of Artificial Sequence: Synthetic oligonucleotide
  Antisense strand to SEQ ID NO: 2025718
ucagucaugccauaugagg

SEQ ID NO: 2025720 - RNA, 19 nt, Artificial Sequence
  Description of Artificial Sequence: Synthetic oligonucleotide
  Sense strand starting at position 124 of SEQ ID NO: 1881198
ccauaauugccuuggagaa

SEQ ID NO: 2025721 - RNA, 19 nt, Artificial Sequence
  Description of Artificial Sequence: Synthetic oligonucleotide
  Antisense strand to SEQ ID NO: 2025720
uucuccaaggcaauuaugg

SEQ ID NO: 2025722 - RNA, 19 nt, Artificial Sequence
  Description of Artificial Sequence: Synthetic oligonucleotide
  Sense strand starting at position 660 of SEQ ID NO: 1881198
cggcuaucuaaugacugua

SEQ ID NO: 2025723 - RNA, 19 nt, Artificial Sequence
  Description of Artificial Sequence: Synthetic oligonucleotide
  Antisense strand to SEQ ID NO: 2025722
uacagucauuagauagccg

SEQ ID NO: 2025724 - RNA, 19 nt, Artificial Sequence
  Description of Artificial Sequence: Synthetic oligonucleotide
  Sense strand starting at position 662 of SEQ ID NO: 1881198
gcuaucuaaugacuguaca

SEQ ID NO: 2025725 - RNA, 19 nt, Artificial Sequence
  Description of Artificial Sequence: Synthetic oligonucleotide
  Antisense strand to SEQ ID NO: 2025724
uguacagucauuagauagc

SEQ ID NO: 2025726 - RNA, 19 nt, Artificial Sequence
  Description of Artificial Sequence: Synthetic oligonucleotide
  Sense strand starting at position 794 of SEQ ID NO: 1881198
agaugucugcaucaaguga

SEQ ID NO: 2025727 - RNA, 19 nt, Artificial Sequence
  Description of Artificial Sequence: Synthetic oligonucleotide
  Antisense strand to SEQ ID NO: 2025726
ucacuugaugcagacaucu

SEQ ID NO: 2025728 - RNA, 19 nt, Artificial Sequence
  Description of Artificial Sequence: Synthetic oligonucleotide
  Sense strand starting at position 893 of SEQ ID NO: 1881198
aauaucacuggugguagaa

SEQ ID NO: 2025729 - RNA, 19 nt, Artificial Sequence
  Description of Artificial Sequence: Synthetic oligonucleotide
  Antisense strand to SEQ ID NO: 2025728
uucuaccaccagugauauu

SEQ ID NO: 2025730 - RNA, 19 nt, Artificial Sequence
  Description of Artificial Sequence: Synthetic oligonucleotide
  Sense strand starting at position 905 of SEQ ID NO: 1881198
gguagaaguaccugaugaa

SEQ ID NO: 2025731 - RNA, 19 nt, Artificial Sequence
  Description of Artificial Sequence: Synthetic oligonucleotide
  Antisense strand to SEQ ID NO: 2025730
uucaucagguacuucuacc

SEQ ID NO: 2025732 - RNA, 19 nt, Artificial Sequence
  Description of Artificial Sequence: Synthetic oligonucleotide
  Sense strand starting at position 1235 of SEQ ID NO: 1881198
aggaguucuugacuggcca

SEQ ID NO: 2025733 - RNA, 19 nt, Artificial Sequence
  Description of Artificial Sequence: Synthetic oligonucleotide
  Antisense strand to SEQ ID NO: 2025732
uggccagucaagaacuccu

SEQ ID NO: 2025734 - RNA, 19 nt, Artificial Sequence
  Description of Artificial Sequence: Synthetic oligonucleotide
  Sense strand starting at position 1236 of SEQ ID NO: 1881198
ggaguucuugacuggccaa

SEQ ID NO: 2025735 - RNA, 19 nt, Artificial Sequence
  Description of Artificial Sequence: Synthetic oligonucleotide
  Antisense strand to SEQ ID NO: 2025734
uuggccagucaagaacucc

SEQ ID NO: 2025736 - RNA, 19 nt, Artificial Sequence
  Description of Artificial Sequence: Synthetic oligonucleotide
  Sense strand starting at position 1338 of SEQ ID NO: 1881198
uucugaauggucuggacau

SEQ ID NO: 2025737 - RNA, 19 nt, Artificial Sequence
  Description of Artificial Sequence: Synthetic oligonucleotide
  Antisense strand to SEQ ID NO: 2025736
auguccagaccauucagaa

SEQ ID NO: 2025738 - RNA, 19 nt, Artificial Sequence
  Description of Artificial Sequence: Synthetic oligonucleotide
  Sense strand starting at position 1353 of SEQ ID NO: 1881198
acaucaguuggcgagagaa

SEQ ID NO: 2025739 - RNA, 19 nt, Artificial Sequence
  Description of Artificial Sequence: Synthetic oligonucleotide
  Antisense strand to SEQ ID NO: 2025738
uucucucgccaacugaugu

SEQ ID NO: 2025740 - RNA, 19 nt, Artificial Sequence
  Description of Artificial Sequence: Synthetic oligonucleotide
  Sense strand starting at position 1423 of SEQ ID NO: 1881198
uugugauugcuuuaggaga

SEQ ID NO: 2025741 - RNA, 19 nt, Artificial Sequence
  Description of Artificial Sequence: Synthetic oligonucleotide
  Antisense strand to SEQ ID NO: 2025740
ucuccuaaagcaaucacaa

SEQ ID NO: 2025742 - RNA, 19 nt, Artificial Sequence
  Description of Artificial Sequence: Synthetic oligonucleotide
  Sense strand starting at position 1516 of SEQ ID NO: 1881198
gggaacuuauuccuuuaac

SEQ ID NO: 2025743 - RNA, 19 nt, Artificial Sequence
  Description of Artificial Sequence: Synthetic oligonucleotide
  Antisense strand to SEQ ID NO: 2025742
guuaaaggaauaaguuccc

SEQ ID NO: 2025744 - RNA, 19 nt, Artificial Sequence
  Description of Artificial Sequence: Synthetic oligonucleotide
  Sense strand starting at position 1677 of SEQ ID NO: 1881198
aucauuaaguaguuuccaa

SEQ ID NO: 2025745 - RNA, 19 nt, Artificial Sequence
  Description of Artificial Sequence: Synthetic oligonucleotide
  Antisense strand to SEQ ID NO: 2025744
uuggaaacuacuuaaugau

SEQ ID NO: 2025746 - RNA, 19 nt, Artificial Sequence
  Description of Artificial Sequence: Synthetic oligonucleotide
  Sense strand starting at position 1786 of SEQ ID NO: 1881198
accagaugcgaguauguua

SEQ ID NO: 2025747 - RNA, 19 nt, Artificial Sequence
  Description of Artificial Sequence: Synthetic oligonucleotide
  Antisense strand to SEQ ID NO: 2025746
uaacauacucgcaucuggu

SEQ ID NO: 2025748 - RNA, 19 nt, Artificial Sequence
  Description of Artificial Sequence: Synthetic oligonucleotide
  Sense strand starting at position 1827 of SEQ ID NO: 1881198
gaaguaacaguauauguuu

SEQ ID NO: 2025749 - RNA, 19 nt, Artificial Sequence
  Description of Artificial Sequence: Synthetic oligonucleotide
  Antisense strand to SEQ ID NO: 2025748
aaacauauacuguuacuuc

SEQ ID NO: 2025750 - RNA, 19 nt, Artificial Sequence
  Description of Artificial Sequence: Synthetic oligonucleotide
  Sense strand starting at position 1860 of SEQ ID NO: 1881198
aguccaagauaccuaugau

SEQ ID NO: 2025751 - RNA, 19 nt, Artificial Sequence
  Description of Artificial Sequence: Synthetic oligonucleotide
  Antisense strand to SEQ ID NO: 2025750
aucauagguaucuuggacu

SEQ ID NO: 2025752 - RNA, 19 nt, Artificial Sequence
  Description of Artificial Sequence: Synthetic oligonucleotide
  Sense strand starting at position 2018 of SEQ ID NO: 1881198
ucaguaauauaguuaugag

SEQ ID NO: 2025753 - RNA, 19 nt, Artificial Sequence
  Description of Artificial Sequence: Synthetic oligonucleotide
  Antisense strand to SEQ ID NO: 2025752
cucauaacuauauuacuga

SEQ ID NO: 2025754 - RNA, 19 nt, Artificial Sequence
  Description of Artificial Sequence: Synthetic oligonucleotide
  Sense strand starting at position 2060 of SEQ ID NO: 1881198
aacugaacucaguggguau

SEQ ID NO: 2025755 - RNA, 19 nt, Artificial Sequence
  Description of Artificial Sequence: Synthetic oligonucleotide
  Antisense strand to SEQ ID NO: 2025754
auacccacugaguucaguu

SEQ ID NO: 2025756 - RNA, 19 nt, Artificial Sequence
  Description of Artificial Sequence: Synthetic oligonucleotide
  Sense strand starting at position 2382 of SEQ ID NO: 1881198
gacaaauguucuuucccga

SEQ ID NO: 2025757 - RNA, 19 nt, Artificial Sequence
  Description of Artificial Sequence: Synthetic oligonucleotide
  Antisense strand to SEQ ID NO: 2025756
ucgggaaagaacauuuguc

SEQ ID NO: 2025758 - RNA, 19 nt, Artificial Sequence
  Description of Artificial Sequence: Synthetic oligonucleotide
  Sense strand starting at position 2385 of SEQ ID NO: 1881198
aaauguucuuucccgaaga

SEQ ID NO: 2025759 - RNA, 19 nt, Artificial Sequence
  Description of Artificial Sequence: Synthetic oligonucleotide
  Antisense strand to SEQ ID NO: 2025758
ucuucgggaaagaacauuu

SEQ ID NO: 2025760 - RNA, 19 nt, Artificial Sequence
  Description of Artificial Sequence: Synthetic oligonucleotide
  Sense strand starting at position 2387 of SEQ ID NO: 1881198
auguucuuucccgaagauc

SEQ ID NO: 2025761 - RNA, 19 nt, Artificial Sequence
  Description of Artificial Sequence: Synthetic oligonucleotide
  Antisense strand to SEQ ID NO: 2025760
gaucuucgggaaagaacau

SEQ ID NO: 2025762 - RNA, 19 nt, Artificial Sequence
  Description of Artificial Sequence: Synthetic oligonucleotide
  Sense strand starting at position 2390 of SEQ ID NO: 1881198
uucuuucccgaagaucaua

SEQ ID NO: 2025763 - RNA, 19 nt, Artificial Sequence
  Description of Artificial Sequence: Synthetic oligonucleotide
  Antisense strand to SEQ ID NO: 2025762
uaugaucuucgggaaagaa

SEQ ID NO: 2025764 - RNA, 19 nt, Artificial Sequence
  Description of Artificial Sequence: Synthetic oligonucleotide
  Sense strand starting at position 2466 of SEQ ID NO: 1881198
acaggcugauucucuaaau

SEQ ID NO: 2025765 - RNA, 19 nt, Artificial Sequence
  Description of Artificial Sequence: Synthetic oligonucleotide
  Antisense strand to SEQ ID NO: 2025764
auuuagagaaucagccugu

SEQ ID NO: 2025766 - RNA, 19 nt, Artificial Sequence
  Description of Artificial Sequence: Synthetic oligonucleotide
  Sense strand starting at position 2596 of SEQ ID NO: 1881198
ugcucuuugacauagaggu

SEQ ID NO: 2025767 - RNA, 19 nt, Artificial Sequence
  Description of Artificial Sequence: Synthetic oligonucleotide
  Antisense strand to SEQ ID NO: 2025766
accucuaugucaaagagca

SEQ ID NO: 2025768 - RNA, 19 nt, Artificial Sequence
  Description of Artificial Sequence: Synthetic oligonucleotide
  Sense strand starting at position 2602 of SEQ ID NO: 1881198
uugacauagaggugguuga

SEQ ID NO: 2025769 - RNA, 19 nt, Artificial Sequence
  Description of Artificial Sequence: Synthetic oligonucleotide
  Antisense strand to SEQ ID NO: 2025768
ucaaccaccucuaugucaa

SEQ ID NO: 2025770 - RNA, 19 nt, Artificial Sequence
  Description of Artificial Sequence: Synthetic oligonucleotide
  Sense strand starting at position 2755 of SEQ ID NO: 1881198
aaugguauauucguuaaag

SEQ ID NO: 2025771 - RNA, 19 nt, Artificial Sequence
  Description of Artificial Sequence: Synthetic oligonucleotide
  Antisense strand to SEQ ID NO: 2025770
cuuuaacgaauauaccauu

SEQ ID NO: 2025772 - RNA, 19 nt, Artificial Sequence
  Description of Artificial Sequence: Synthetic oligonucleotide
  Sense strand starting at position 2757 of SEQ ID NO: 1881198
ugguauauucguuaaagua

SEQ ID NO: 2025773 - RNA, 19 nt, Artificial Sequence
  Description of Artificial Sequence: Synthetic oligonucleotide
  Antisense strand to SEQ ID NO: 2025772
uacuuuaacgaauauacca

SEQ ID NO: 2025774 - RNA, 19 nt, Artificial Sequence
  Description of Artificial Sequence: Synthetic oligonucleotide
  Sense strand starting at position 2906 of SEQ ID NO: 1881198
agccuuauaguagaaucua

SEQ ID NO: 2025775 - RNA, 19 nt, Artificial Sequence
  Description of Artificial Sequence: Synthetic oligonucleotide
  Antisense strand to SEQ ID NO: 2025774
uagauucuacuauaaggcu

SEQ ID NO: 2025776 - RNA, 19 nt, Artificial Sequence
  Description of Artificial Sequence: Synthetic oligonucleotide
  Sense strand starting at position 3316 of SEQ ID NO: 1881198
ucaguuuggaggcauaguu

SEQ ID NO: 2025777 - RNA, 19 nt, Artificial Sequence
  Description of Artificial Sequence: Synthetic oligonucleotide
  Antisense strand to SEQ ID NO: 2025776
aacuaugccuccaaacuga

SEQ ID NO: 2025778 - RNA, 19 nt, Artificial Sequence
  Description of Artificial Sequence: Synthetic oligonucleotide
  Sense strand starting at position 3326 of SEQ ID NO: 1881198
ggcauaguucuacacauuc

SEQ ID NO: 2025779 - RNA, 19 nt, Artificial Sequence
  Description of Artificial Sequence: Synthetic oligonucleotide
  Antisense strand to SEQ ID NO: 2025778
gaauguguagaacuaugcc

SEQ ID NO: 2025780 - RNA, 19 nt, Artificial Sequence
  Description of Artificial Sequence: Synthetic oligonucleotide
  Sense strand starting at position 3399 of SEQ ID NO: 1881198
ccaagauuaugucugauua

SEQ ID NO: 2025781 - RNA, 19 nt, Artificial Sequence
  Description of Artificial Sequence: Synthetic oligonucleotide
  Antisense strand to SEQ ID NO: 2025780
uaaucagacauaaucuugg

SEQ ID NO: 2025782 - RNA, 19 nt, Artificial Sequence
  Description of Artificial Sequence: Synthetic oligonucleotide
  Sense strand starting at position 3453 of SEQ ID NO: 1881198
uugccucuuggagaauacu

SEQ ID NO: 2025783 - RNA, 19 nt, Artificial Sequence
  Description of Artificial Sequence: Synthetic oligonucleotide
  Antisense strand to SEQ ID NO: 2025782
aguauucuccaagaggcaa

SEQ ID NO: 2025784 - RNA, 19 nt, Artificial Sequence
  Description of Artificial Sequence: Synthetic oligonucleotide
  Sense strand starting at position 3474 of SEQ ID NO: 1881198
auauaaucccaggguuauu

SEQ ID NO: 2025785 - RNA, 19 nt, Artificial Sequence
  Description of Artificial Sequence: Synthetic oligonucleotide
  Antisense strand to SEQ ID NO: 2025784
aauaacccugggauuauau

SEQ ID NO: 2025786 - RNA, 19 nt, Artificial Sequence
  Description of Artificial Sequence: Synthetic oligonucleotide
  Sense strand starting at position 3629 of SEQ ID NO: 1881198
gaguuacuccagcaagguu

SEQ ID NO: 2025787 - RNA, 19 nt, Artificial Sequence
  Description of Artificial Sequence: Synthetic oligonucleotide
  Antisense strand to SEQ ID NO: 2025786
aaccuugcuggaguaacuc

SEQ ID NO: 2025788 - RNA, 19 nt, Artificial Sequence
  Description of Artificial Sequence: Synthetic oligonucleotide
  Sense strand starting at position 3632 of SEQ ID NO: 1881198
uuacuccagcaagguuaua

SEQ ID NO: 2025789 - RNA, 19 nt, Artificial Sequence
  Description of Artificial Sequence: Synthetic oligonucleotide
  Antisense strand to SEQ ID NO: 2025788
uauaaccuugcuggaguaa

SEQ ID NO: 2025790 - RNA, 19 nt, Artificial Sequence
  Description of Artificial Sequence: Synthetic oligonucleotide
  Sense strand starting at position 3777 of SEQ ID NO: 1881198
ggaguagucaaguacaucu

SEQ ID NO: 2025791 - RNA, 19 nt, Artificial Sequence
  Description of Artificial Sequence: Synthetic oligonucleotide
  Antisense strand to SEQ ID NO: 2025790
agauguacuugacuacucc

SEQ ID NO: 2025792 - RNA, 19 nt, Artificial Sequence
  Description of Artificial Sequence: Synthetic oligonucleotide
  Sense strand starting at position 3864 of SEQ ID NO: 1881198
cugaacuguuccuuagacu

SEQ ID NO: 2025793 - RNA, 19 nt, Artificial Sequence
  Description of Artificial Sequence: Synthetic oligonucleotide
  Antisense strand to SEQ ID NO: 2025792
agucuaaggaacaguucag

SEQ ID NO: 2025794 - RNA, 19 nt, Artificial Sequence
  Description of Artificial Sequence: Synthetic oligonucleotide
  Sense strand starting at position 3865 of SEQ ID NO: 1881198
ugaacuguuccuuagacuu

SEQ ID NO: 2025795 - RNA, 19 nt, Artificial Sequence
  Description of Artificial Sequence: Synthetic oligonucleotide
  Antisense strand to SEQ ID NO: 2025794
aagucuaaggaacaguuca

SEQ ID NO: 2025796 - RNA, 19 nt, Artificial Sequence
  Description of Artificial Sequence: Synthetic oligonucleotide
  Sense strand starting at position 3913 of SEQ ID NO: 1881198
cugaaagauuaagcucaau

SEQ ID NO: 2025797 - RNA, 19 nt, Artificial Sequence
  Description of Artificial Sequence: Synthetic oligonucleotide
  Antisense strand to SEQ ID NO: 2025796
auugagcuuaaucuuucag

SEQ ID NO: 2025798 - RNA, 19 nt, Artificial Sequence
  Description of Artificial Sequence: Synthetic oligonucleotide
  Sense strand starting at position 3980 of SEQ ID NO: 1881198
uccagaaaucuugggucac

SEQ ID NO: 2025799 - RNA, 19 nt, Artificial Sequence
  Description of Artificial Sequence: Synthetic oligonucleotide
  Antisense strand to SEQ ID NO: 2025798
gugacccaagauuucugga

SEQ ID NO: 2025800 - RNA, 19 nt, Artificial Sequence
  Description of Artificial Sequence: Synthetic oligonucleotide
  Sense strand starting at position 19 of SEQ ID NO: 1881199
caguuugagagguaggcaa

SEQ ID NO: 2025801 - RNA, 19 nt, Artificial Sequence
  Description of Artificial Sequence: Synthetic oligonucleotide
  Antisense strand to SEQ ID NO: 2025800
uugccuaccucucaaacug

SEQ ID NO: 2025802 - RNA, 19 nt, Artificial Sequence
  Description of Artificial Sequence: Synthetic oligonucleotide
  Sense strand starting at position 23 of SEQ ID NO: 1881199
uugagagguaggcaaaguu

SEQ ID NO: 2025803 - RNA, 19 nt, Artificial Sequence
  Description of Artificial Sequence: Synthetic oligonucleotide
  Antisense strand to SEQ ID NO: 2025802
aacuuugccuaccucucaa

SEQ ID NO: 2025804 - RNA, 19 nt, Artificial Sequence
  Description of Artificial Sequence: Synthetic oligonucleotide
  Sense strand starting at position 142 of SEQ ID NO: 1881199
cuuggagauuugcaacuga

SEQ ID NO: 2025805 - RNA, 19 nt, Artificial Sequence
  Description of Artificial Sequence: Synthetic oligonucleotide
  Antisense strand to SEQ ID NO: 2025804
ucaguugcaaaucuccaag

SEQ ID NO: 2025806 - RNA, 19 nt, Artificial Sequence
  Description of Artificial Sequence: Synthetic oligonucleotide
  Sense strand starting at position 186 of SEQ ID NO: 1881199
gaagcaggaugcuuaaaga

SEQ ID NO: 2025807 - RNA, 19 nt, Artificial Sequence
  Description of Artificial Sequence: Synthetic oligonucleotide
  Antisense strand to SEQ ID NO: 2025806
ucuuuaagcauccugcuuc

SEQ ID NO: 2025808 - RNA, 19 nt, Artificial Sequence
  Description of Artificial Sequence: Synthetic oligonucleotide
  Sense strand starting at position 194 of SEQ ID NO: 1881199
augcuuaaagacuaguaau

SEQ ID NO: 2025809 - RNA, 19 nt, Artificial Sequence
  Description of Artificial Sequence: Synthetic oligonucleotide
  Antisense strand to SEQ ID NO: 2025808
auuacuagucuuuaagcau

SEQ ID NO: 2025810 - RNA, 19 nt, Artificial Sequence
  Description of Artificial Sequence: Synthetic oligonucleotide
  Sense strand starting at position 253 of SEQ ID NO: 1881199
acagauuaacgcugagaug

SEQ ID NO: 2025811 - RNA, 19 nt, Artificial Sequence
  Description of Artificial Sequence: Synthetic oligonucleotide
  Antisense strand to SEQ ID NO: 2025810
caucucagcguuaaucugu

SEQ ID NO: 2025812 - RNA, 19 nt, Artificial Sequence
  Description of Artificial Sequence: Synthetic oligonucleotide
  Sense strand starting at position 262 of SEQ ID NO: 1881199
cgcugagaugcacaauaug

SEQ ID NO: 2025813 - RNA, 19 nt, Artificial Sequence
  Description of Artificial Sequence: Synthetic oligonucleotide
  Antisense strand to SEQ ID NO: 2025812
cauauugugcaucucagcg

SEQ ID NO: 2025814 - RNA, 19 nt, Artificial Sequence
  Description of Artificial Sequence: Synthetic oligonucleotide
  Sense strand starting at position 695 of SEQ ID NO: 1881199
ccugaauggcccuggagua

SEQ ID NO: 2025815 - RNA, 19 nt, Artificial Sequence
  Description of Artificial Sequence: Synthetic oligonucleotide
  Antisense strand to SEQ ID NO: 2025814
uacuccagggccauucagg

SEQ ID NO: 2025816 - RNA, 19 nt, Artificial Sequence
  Description of Artificial Sequence: Synthetic oligonucleotide
  Sense strand starting at position 786 of SEQ ID NO: 1881199
gugggaacuuucuucucaa

SEQ ID NO: 2025817 - RNA, 19 nt, Artificial Sequence
  Description of Artificial Sequence: Synthetic oligonucleotide
  Antisense strand to SEQ ID NO: 2025816
uugagaagaaaguucccac

SEQ ID NO: 2025818 - RNA, 19 nt, Artificial Sequence
  Description of Artificial Sequence: Synthetic oligonucleotide
  Sense strand starting at position 787 of SEQ ID NO: 1881199
ugggaacuuucuucucaag

SEQ ID NO: 2025819 - RNA, 19 nt, Artificial Sequence
  Description of Artificial Sequence: Synthetic oligonucleotide
  Antisense strand to SEQ ID NO: 2025818
cuugagaagaaaguuccca

SEQ ID NO: 2025820 - RNA, 19 nt, Artificial Sequence
  Description of Artificial Sequence: Synthetic oligonucleotide
  Sense strand starting at position 789 of SEQ ID NO: 1881199
ggaacuuucuucucaagua

SEQ ID NO: 2025821 - RNA, 19 nt, Artificial Sequence
  Description of Artificial Sequence: Synthetic oligonucleotide
  Antisense strand to SEQ ID NO: 2025820
uacuugagaagaaaguucc

SEQ ID NO: 2025822 - RNA, 19 nt, Artificial Sequence
  Description of Artificial Sequence: Synthetic oligonucleotide
  Sense strand starting at position 829 of SEQ ID NO: 1881199
ucaauagguguccaagagu

SEQ ID NO: 2025823 - RNA, 19 nt, Artificial Sequence
  Description of Artificial Sequence: Synthetic oligonucleotide
  Antisense strand to SEQ ID NO: 2025822
acucuuggacaccuauuga

SEQ ID NO: 2025824 - RNA, 19 nt, Artificial Sequence
  Description of Artificial Sequence: Synthetic oligonucleotide
  Sense strand starting at position 832 of SEQ ID NO: 1881199
auagguguccaagaguuuc

SEQ ID NO: 2025825 - RNA, 19 nt, Artificial Sequence
  Description of Artificial Sequence: Synthetic oligonucleotide
  Antisense strand to SEQ ID NO: 2025824
gaaacucuuggacaccuau

SEQ ID NO: 2025826 - RNA, 19 nt, Artificial Sequence
  Description of Artificial Sequence: Synthetic oligonucleotide
  Sense strand starting at position 838 of SEQ ID NO: 1881199
guccaagaguuucuggaag

SEQ ID NO: 2025827 - RNA, 19 nt, Artificial Sequence
  Description of Artificial Sequence: Synthetic oligonucleotide
  Antisense strand to SEQ ID NO: 2025826
cuuccagaaacucuuggac

SEQ ID NO: 2025828 - RNA, 19 nt, Artificial Sequence
  Description of Artificial Sequence: Synthetic oligonucleotide
  Sense strand starting at position 850 of SEQ ID NO: 1881199
cuggaaguucuacaggcaa

SEQ ID NO: 2025829 - RNA, 19 nt, Artificial Sequence
  Description of Artificial Sequence: Synthetic oligonucleotide
  Antisense strand to SEQ ID NO: 2025828
uugccuguagaacuuccag

SEQ ID NO: 2025830 - RNA, 19 nt, Artificial Sequence
  Description of Artificial Sequence: Synthetic oligonucleotide
  Sense strand starting at position 852 of SEQ ID NO: 1881199
ggaaguucuacaggcaaau

SEQ ID NO: 2025831 - RNA, 19 nt, Artificial Sequence
  Description of Artificial Sequence: Synthetic oligonucleotide
  Antisense strand to SEQ ID NO: 2025830
auuugccuguagaacuucc

SEQ ID NO: 2025832 - RNA, 19 nt, Artificial Sequence
  Description of Artificial Sequence: Synthetic oligonucleotide
  Sense strand starting at position 863 of SEQ ID NO: 1881199
aggcaaaugugaucaaaga

SEQ ID NO: 2025833 - RNA, 19 nt, Artificial Sequence
  Description of Artificial Sequence: Synthetic oligonucleotide
  Antisense strand to SEQ ID NO: 2025832
ucuuugaucacauuugccu

SEQ ID NO: 2025834 - RNA, 19 nt, Artificial Sequence
  Description of Artificial Sequence: Synthetic oligonucleotide
  Sense strand starting at position 888 of SEQ ID NO: 1881199
ggagaaaugugucccauaa

SEQ ID NO: 2025835 - RNA, 19 nt, Artificial Sequence
  Description of Artificial Sequence: Synthetic oligonucleotide
  Antisense strand to SEQ ID NO: 2025834
uuaugggacacauuucucc

SEQ ID NO: 2025836 - RNA, 19 nt, Artificial Sequence
  Description of Artificial Sequence: Synthetic oligonucleotide
  Sense strand starting at position 892 of SEQ ID NO: 1881199
aaaugugucccauaaguga

SEQ ID NO: 2025837 - RNA, 19 nt, Artificial Sequence
  Description of Artificial Sequence: Synthetic oligonucleotide
  Antisense strand to SEQ ID NO: 2025836
ucacuuaugggacacauuu

SEQ ID NO: 2025838 - RNA, 19 nt, Artificial Sequence
  Description of Artificial Sequence: Synthetic oligonucleotide
  Sense strand starting at position 937 of SEQ ID NO: 1881199
augugucugcaccaagaaa

SEQ ID NO: 2025839 - RNA, 19 nt, Artificial Sequence
  Description of Artificial Sequence: Synthetic oligonucleotide
  Antisense strand to SEQ ID NO: 2025838
uuucuuggugcagacacau

SEQ ID NO: 2025840 - RNA, 19 nt, Artificial Sequence
  Description of Artificial Sequence: Synthetic oligonucleotide
  Sense strand starting at position 1122 of SEQ ID NO: 1881199
guugcagucaacgacagaa

SEQ ID NO: 2025841 - RNA, 19 nt, Artificial Sequence
  Description of Artificial Sequence: Synthetic oligonucleotide
  Antisense strand to SEQ ID NO: 2025840
uucugucguugacugcaac

SEQ ID NO: 2025842 - RNA, 19 nt, Artificial Sequence
  Description of Artificial Sequence: Synthetic oligonucleotide
  Sense strand starting at position 1987 of SEQ ID NO: 1881199
gcuacagaccuguauacca

SEQ ID NO: 2025843 - RNA, 19 nt, Artificial Sequence
  Description of Artificial Sequence: Synthetic oligonucleotide
  Antisense strand to SEQ ID NO: 2025842
ugguauacaggucuguagc

SEQ ID NO: 2025844 - RNA, 19 nt, Artificial Sequence
  Description of Artificial Sequence: Synthetic oligonucleotide
  Sense strand starting at position 2012 of SEQ ID NO: 1881199
uguaaugaaucagcacaca

SEQ ID NO: 2025845 - RNA, 19 nt, Artificial Sequence
  Description of Artificial Sequence: Synthetic oligonucleotide
  Antisense strand to SEQ ID NO: 2025844
ugugugcugauucauuaca

SEQ ID NO: 2025846 - RNA, 19 nt, Artificial Sequence
  Description of Artificial Sequence: Synthetic oligonucleotide
  Sense strand starting at position 2044 of SEQ ID NO: 1881199
agcagcugacaagauuaau

SEQ ID NO: 2025847 - RNA, 19 nt, Artificial Sequence
  Description of Artificial Sequence: Synthetic oligonucleotide
  Antisense strand to SEQ ID NO: 2025846
auuaaucuugucagcugcu

SEQ ID NO: 2025848 - RNA, 19 nt, Artificial Sequence
  Description of Artificial Sequence: Synthetic oligonucleotide
  Sense strand starting at position 2120 of SEQ ID NO: 1881199
cgguaagaaauguaugucu

SEQ ID NO: 2025849 - RNA, 19 nt, Artificial Sequence
  Description of Artificial Sequence: Synthetic oligonucleotide
  Antisense strand to SEQ ID NO: 2025848
agacauacauuucuuaccg

SEQ ID NO: 2025850 - RNA, 19 nt, Artificial Sequence
  Description of Artificial Sequence: Synthetic oligonucleotide
  Sense strand starting at position 2125 of SEQ ID NO: 1881199
agaaauguaugucugcaua

SEQ ID NO: 2025851 - RNA, 19 nt, Artificial Sequence
  Description of Artificial Sequence: Synthetic oligonucleotide
  Antisense strand to SEQ ID NO: 2025850
uaugcagacauacauuucu

SEQ ID NO: 2025852 - RNA, 19 nt, Artificial Sequence
  Description of Artificial Sequence: Synthetic oligonucleotide
  Sense strand starting at position 2128 of SEQ ID NO: 1881199
aauguaugucugcauagag

SEQ ID NO: 2025853 - RNA, 19 nt, Artificial Sequence
  Description of Artificial Sequence: Synthetic oligonucleotide
  Antisense strand to SEQ ID NO: 2025852
cucuaugcagacauacauu

SEQ ID NO: 2025854 - RNA, 19 nt, Artificial Sequence
  Description of Artificial Sequence: Synthetic oligonucleotide
  Sense strand starting at position 2364 of SEQ ID NO: 1881199
cuguaaaucugaguaucug

SEQ ID NO: 2025855 - RNA, 19 nt, Artificial Sequence
  Description of Artificial Sequence: Synthetic oligonucleotide
  Antisense strand to SEQ ID NO: 2025854
cagauacucagauuuacag

SEQ ID NO: 2025856 - RNA, 19 nt, Artificial Sequence
  Description of Artificial Sequence: Synthetic oligonucleotide
  Sense strand starting at position 2373 of SEQ ID NO: 1881199
ugaguaucugaaggacuuu

SEQ ID NO: 2025857 - RNA, 19 nt, Artificial Sequence
  Description of Artificial Sequence: Synthetic oligonucleotide
  Antisense strand to SEQ ID NO: 2025856
aaaguccuucagauacuca

SEQ ID NO: 2025858 - RNA, 19 nt, Artificial Sequence
  Description of Artificial Sequence: Synthetic oligonucleotide
  Sense strand starting at position 2423 of SEQ ID NO: 1881199
uuggcaucagaguauguuu

SEQ ID NO: 2025859 - RNA, 19 nt, Artificial Sequence
  Description of Artificial Sequence: Synthetic oligonucleotide
  Antisense strand to SEQ ID NO: 2025858
aaacauacucugaugccaa

SEQ ID NO: 2025860 - RNA, 19 nt, Artificial Sequence
  Description of Artificial Sequence: Synthetic oligonucleotide
  Sense strand starting at position 2581 of SEQ ID NO: 1881199
ccgcuugagacugacagau

SEQ ID NO: 2025861 - RNA, 19 nt, Artificial Sequence
  Description of Artificial Sequence: Synthetic oligonucleotide
  Antisense strand to SEQ ID NO: 2025860
aucugucagucucaagcgg

SEQ ID NO: 2025862 - RNA, 19 nt, Artificial Sequence
  Description of Artificial Sequence: Synthetic oligonucleotide
  Sense strand starting at position 2663 of SEQ ID NO: 1881199
gaauucugcgacgauauca

SEQ ID NO: 2025863 - RNA, 19 nt, Artificial Sequence
  Description of Artificial Sequence: Synthetic oligonucleotide
  Antisense strand to SEQ ID NO: 2025862
ugauaucgucgcagaauuc

SEQ ID NO: 2025864 - RNA, 19 nt, Artificial Sequence
  Description of Artificial Sequence: Synthetic oligonucleotide
  Sense strand starting at position 2689 of SEQ ID NO: 1881199
cuauaauggucugcuagag

SEQ ID NO: 2025865 - RNA, 19 nt, Artificial Sequence
  Description of Artificial Sequence: Synthetic oligonucleotide
  Antisense strand to SEQ ID NO: 2025864
cucuagcagaccauuauag

SEQ ID NO: 2025866 - RNA, 19 nt, Artificial Sequence
  Description of Artificial Sequence: Synthetic oligonucleotide
  Sense strand starting at position 2697 of SEQ ID NO: 1881199
gucugcuagaguuaggaaa

SEQ ID NO: 2025867 - RNA, 19 nt, Artificial Sequence
  Description of Artificial Sequence: Synthetic oligonucleotide
  Antisense strand to SEQ ID NO: 2025866
uuuccuaacucuagcagac

SEQ ID NO: 2025868 - RNA, 19 nt, Artificial Sequence
  Description of Artificial Sequence: Synthetic oligonucleotide
  Sense strand starting at position 2955 of SEQ ID NO: 1881199
uccacacuucccuggagaa

SEQ ID NO: 2025869 - RNA, 19 nt, Artificial Sequence
  Description of Artificial Sequence: Synthetic oligonucleotide
  Antisense strand to SEQ ID NO: 2025868
uucuccagggaagugugga

SEQ ID NO: 2025870 - RNA, 19 nt, Artificial Sequence
  Description of Artificial Sequence: Synthetic oligonucleotide
  Sense strand starting at position 3018 of SEQ ID NO: 1881199
ggcugagacccacgggaau

SEQ ID NO: 2025871 - RNA, 19 nt, Artificial Sequence
  Description of Artificial Sequence: Synthetic oligonucleotide
  Antisense strand to SEQ ID NO: 2025870
auucccgugggucucagcc

SEQ ID NO: 2025872 - RNA, 19 nt, Artificial Sequence
  Description of Artificial Sequence: Synthetic oligonucleotide
  Sense strand starting at position 3194 of SEQ ID NO: 1881199
gucaccuuagauggauaaa

SEQ ID NO: 2025873 - RNA, 19 nt, Artificial Sequence
  Description of Artificial Sequence: Synthetic oligonucleotide
  Antisense strand to SEQ ID NO: 2025872
uuuauccaucuaaggugac

SEQ ID NO: 2025874 - RNA, 19 nt, Artificial Sequence
  Description of Artificial Sequence: Synthetic oligonucleotide
  Sense strand starting at position 3377 of SEQ ID NO: 1881199
ugguguagaagcuaugaau

SEQ ID NO: 2025875 - RNA, 19 nt, Artificial Sequence
  Description of Artificial Sequence: Synthetic oligonucleotide
  Antisense strand to SEQ ID NO: 2025874
auucauagcuucuacacca

SEQ ID NO: 2025876 - RNA, 19 nt, Artificial Sequence
  Description of Artificial Sequence: Synthetic oligonucleotide
  Sense strand starting at position 3404 of SEQ ID NO: 1881199
uggauacaguuuccacuaa

SEQ ID NO: 2025877 - RNA, 19 nt, Artificial Sequence
  Description of Artificial Sequence: Synthetic oligonucleotide
  Antisense strand to SEQ ID NO: 2025876
uuaguggaaacuguaucca

SEQ ID NO: 2025878 - RNA, 19 nt, Artificial Sequence
  Description of Artificial Sequence: Synthetic oligonucleotide
  Sense strand starting at position 3685 of SEQ ID NO: 1881199
cuccuauagguuugaauga

SEQ ID NO: 2025879 - RNA, 19 nt, Artificial Sequence
  Description of Artificial Sequence: Synthetic oligonucleotide
  Antisense strand to SEQ ID NO: 2025878
ucauucaaaccuauaggag

SEQ ID NO: 2025880 - RNA, 19 nt, Artificial Sequence
  Description of Artificial Sequence: Synthetic oligonucleotide
  Sense strand starting at position 3 of SEQ ID NO: 1881200
auuaguugauaagcaugaa

SEQ ID NO: 2025881 - RNA, 19 nt, Artificial Sequence
  Description of Artificial Sequence: Synthetic oligonucleotide
  Antisense strand to SEQ ID NO: 2025880
uucaugcuuaucaacuaau

SEQ ID NO: 2025882 - RNA, 19 nt, Artificial Sequence
  Description of Artificial Sequence: Synthetic oligonucleotide
  Sense strand starting at position 90 of SEQ ID NO: 1881200
ccuaucagauuggugucaa

SEQ ID NO: 2025883 - RNA, 19 nt, Artificial Sequence
  Description of Artificial Sequence: Synthetic oligonucleotide
  Antisense strand to SEQ ID NO: 2025882
uugacaccaaucugauagg

SEQ ID NO: 2025884 - RNA, 19 nt, Artificial Sequence
  Description of Artificial Sequence: Synthetic oligonucleotide
  Sense strand starting at position 113 of SEQ ID NO: 1881200
aagcgauaauacucaguga

SEQ ID NO: 2025885 - RNA, 19 nt, Artificial Sequence
  Description of Artificial Sequence: Synthetic oligonucleotide
  Antisense strand to SEQ ID NO: 2025884
ucacugaguauuaucgcuu

SEQ ID NO: 2025886 - RNA, 19 nt, Artificial Sequence
  Description of Artificial Sequence: Synthetic oligonucleotide
  Sense strand starting at position 117 of SEQ ID NO: 1881200
gauaauacucagugaggcu

SEQ ID NO: 2025887 - RNA, 19 nt, Artificial Sequence
  Description of Artificial Sequence: Synthetic oligonucleotide
  Antisense strand to SEQ ID NO: 2025886
agccucacugaguauuauc

SEQ ID NO: 2025888 - RNA, 19 nt, Artificial Sequence
  Description of Artificial Sequence: Synthetic oligonucleotide
  Sense strand starting at position 407 of SEQ ID NO: 1881200
ugauuccacugucugaaga

SEQ ID NO: 2025889 - RNA, 19 nt, Artificial Sequence
  Description of Artificial Sequence: Synthetic oligonucleotide
  Antisense strand to SEQ ID NO: 2025888
ucuucagacaguggaauca

SEQ ID NO: 2025890 - RNA, 19 nt, Artificial Sequence
  Description of Artificial Sequence: Synthetic oligonucleotide
  Sense strand starting at position 673 of SEQ ID NO: 1881200
ugauuccaaugccugauua

SEQ ID NO: 2025891 - RNA, 19 nt, Artificial Sequence
  Description of Artificial Sequence: Synthetic oligonucleotide
  Antisense strand to SEQ ID NO: 2025890
uaaucaggcauuggaauca

SEQ ID NO: 2025892 - RNA, 19 nt, Artificial Sequence
  Description of Artificial Sequence: Synthetic oligonucleotide
  Sense strand starting at position 748 of SEQ ID NO: 1881200
ccaugaugaucucugggca

SEQ ID NO: 2025893 - RNA, 19 nt, Artificial Sequence
  Description of Artificial Sequence: Synthetic oligonucleotide
  Antisense strand to SEQ ID NO: 2025892
ugcccagagaucaucaugg

SEQ ID NO: 2025894 - RNA, 19 nt, Artificial Sequence
  Description of Artificial Sequence: Synthetic oligonucleotide
  Sense strand starting at position 857 of SEQ ID NO: 1881200
gcaggaacuuccuuagggu

SEQ ID NO: 2025895 - RNA, 19 nt, Artificial Sequence
  Description of Artificial Sequence: Synthetic oligonucleotide
  Antisense strand to SEQ ID NO: 2025894
acccuaaggaaguuccugc

SEQ ID NO: 2025896 - RNA, 19 nt, Artificial Sequence
  Description of Artificial Sequence: Synthetic oligonucleotide
  Sense strand starting at position 892 of SEQ ID NO: 1881200
uccagcacuugagugaaau

SEQ ID NO: 2025897 - RNA, 19 nt, Artificial Sequence
  Description of Artificial Sequence: Synthetic oligonucleotide
  Antisense strand to SEQ ID NO: 2025896
auuucacucaagugcugga

SEQ ID NO: 2025898 - RNA, 19 nt, Artificial Sequence
  Description of Artificial Sequence: Synthetic oligonucleotide
  Sense strand starting at position 893 of SEQ ID NO: 1881200
ccagcacuugagugaaaug

SEQ ID NO: 2025899 - RNA, 19 nt, Artificial Sequence
  Description of Artificial Sequence: Synthetic oligonucleotide
  Antisense strand to SEQ ID NO: 2025898
cauuucacucaagugcugg

SEQ ID NO: 2025900 - RNA, 19 nt, Artificial Sequence
  Description of Artificial Sequence: Synthetic oligonucleotide
  Sense strand starting at position 903 of SEQ ID NO: 1881200
agugaaauguagcucuuag

SEQ ID NO: 2025901 - RNA, 19 nt, Artificial Sequence
  Description of Artificial Sequence: Synthetic oligonucleotide
  Antisense strand to SEQ ID NO: 2025900
cuaagagcuacauuucacu

SEQ ID NO: 2025902 - RNA, 19 nt, Artificial Sequence
  Description of Artificial Sequence: Synthetic oligonucleotide
  Sense strand starting at position 994 of SEQ ID NO: 1881200
gggucaucaguuuacaggu

SEQ ID NO: 2025903 - RNA, 19 nt, Artificial Sequence
  Description of Artificial Sequence: Synthetic oligonucleotide
  Antisense strand to SEQ ID NO: 2025902
accuguaaacugaugaccc

SEQ ID NO: 2025904 - RNA, 19 nt, Artificial Sequence
  Description of Artificial Sequence: Synthetic oligonucleotide
  Sense strand starting at position 1367 of SEQ ID NO: 1881200
cuccaagagagcugggauu

SEQ ID NO: 2025905 - RNA, 19 nt, Artificial Sequence
  Description of Artificial Sequence: Synthetic oligonucleotide
  Antisense strand to SEQ ID NO: 2025904
aaucccagcucucuuggag

SEQ ID NO: 2025906 - RNA, 19 nt, Artificial Sequence
  Description of Artificial Sequence: Synthetic oligonucleotide
  Sense strand starting at position 1455 of SEQ ID NO: 1881200
ggauguguacuuuacacau

SEQ ID NO: 2025907 - RNA, 19 nt, Artificial Sequence
  Description of Artificial Sequence: Synthetic oligonucleotide
  Antisense strand to SEQ ID NO: 2025906
auguguaaaguacacaucc

SEQ ID NO: 2025908 - RNA, 19 nt, Artificial Sequence
  Description of Artificial Sequence: Synthetic oligonucleotide
  Sense strand starting at position 1542 of SEQ ID NO: 1881200
caggaaauaguguaagguu

SEQ ID NO: 2025909 - RNA, 19 nt, Artificial Sequence
  Description of Artificial Sequence: Synthetic oligonucleotide
  Antisense strand to SEQ ID NO: 2025908
aaccuuacacuauuuccug

SEQ ID NO: 2025910 - RNA, 19 nt, Artificial Sequence
  Description of Artificial Sequence: Synthetic oligonucleotide
  Sense strand starting at position 1582 of SEQ ID NO: 1881200
gcugaacaauauucuagua

SEQ ID NO: 2025911 - RNA, 19 nt, Artificial Sequence
  Description of Artificial Sequence: Synthetic oligonucleotide
  Antisense strand to SEQ ID NO: 2025910
uacuagaauauuguucagc

SEQ ID NO: 2025912 - RNA, 19 nt, Artificial Sequence
  Description of Artificial Sequence: Synthetic oligonucleotide
  Sense strand starting at position 1602 of SEQ ID NO: 1881200
gcugcuacaguguaugaaa

SEQ ID NO: 2025913 - RNA, 19 nt, Artificial Sequence
  Description of Artificial Sequence: Synthetic oligonucleotide
  Antisense strand to SEQ ID NO: 2025912
uuucauacacuguagcagc

SEQ ID NO: 2025914 - RNA, 19 nt, Artificial Sequence
  Description of Artificial Sequence: Synthetic oligonucleotide
  Sense strand starting at position 1629 of SEQ ID NO: 1881200
auaugaauauaugugcuga

SEQ ID NO: 2025915 - RNA, 19 nt, Artificial Sequence
  Description of Artificial Sequence: Synthetic oligonucleotide
  Antisense strand to SEQ ID NO: 2025914
ucagcacauauauucauau

SEQ ID NO: 2025916 - RNA, 19 nt, Artificial Sequence
  Description of Artificial Sequence: Synthetic oligonucleotide
  Sense strand starting at position 1631 of SEQ ID NO: 1881200
augaauauaugugcugauu

SEQ ID NO: 2025917 - RNA, 19 nt, Artificial Sequence
  Description of Artificial Sequence: Synthetic oligonucleotide
  Antisense strand to SEQ ID NO: 2025916
aaucagcacauauauucau

SEQ ID NO: 2025918 - RNA, 19 nt, Artificial Sequence
  Description of Artificial Sequence: Synthetic oligonucleotide
  Sense strand starting at position 1654 of SEQ ID NO: 1881200
agucaaauaucucucugga

SEQ ID NO: 2025919 - RNA, 19 nt, Artificial Sequence
  Description of Artificial Sequence: Synthetic oligonucleotide
  Antisense strand to SEQ ID NO: 2025918
uccagagagauauuugacu

SEQ ID NO: 2025920 - RNA, 19 nt, Artificial Sequence
  Description of Artificial Sequence: Synthetic oligonucleotide
  Sense strand starting at position 1722 of SEQ ID NO: 1881200
ggacuuucccuguauaauc

SEQ ID NO: 2025921 - RNA, 19 nt, Artificial Sequence
  Description of Artificial Sequence: Synthetic oligonucleotide
  Antisense strand to SEQ ID NO: 2025920
gauuauacagggaaagucc

SEQ ID NO: 2025922 - RNA, 19 nt, Artificial Sequence
  Description of Artificial Sequence: Synthetic oligonucleotide
  Sense strand starting at position 1779 of SEQ ID NO: 1881200
augauagcuuacuuuggau

SEQ ID NO: 2025923 - RNA, 19 nt, Artificial Sequence
  Description of Artificial Sequence: Synthetic oligonucleotide
  Antisense strand to SEQ ID NO: 2025922
auccaaaguaagcuaucau

SEQ ID NO: 2025924 - RNA, 19 nt, Artificial Sequence
  Description of Artificial Sequence: Synthetic oligonucleotide
  Sense strand starting at position 1808 of SEQ ID NO: 1881200
cuaaguagucguaagcguu

SEQ ID NO: 2025925 - RNA, 19 nt, Artificial Sequence
  Description of Artificial Sequence: Synthetic oligonucleotide
  Antisense strand to SEQ ID NO: 2025924
aacgcuuacgacuacuuag

SEQ ID NO: 2025926 - RNA, 19 nt, Artificial Sequence
  Description of Artificial Sequence: Synthetic oligonucleotide
  Sense strand starting at position 2131 of SEQ ID NO: 1881200
cuaugacaguuucuucuca

SEQ ID NO: 2025927 - RNA, 19 nt, Artificial Sequence
  Description of Artificial Sequence: Synthetic oligonucleotide
  Antisense strand to SEQ ID NO: 2025926
ugagaagaaacugucauag

SEQ ID NO: 2025928 - RNA, 19 nt, Artificial Sequence
  Description of Artificial Sequence: Synthetic oligonucleotide
  Sense strand starting at position 2133 of SEQ ID NO: 1881200
augacaguuucuucucaca

SEQ ID NO: 2025929 - RNA, 19 nt, Artificial Sequence
  Description of Artificial Sequence: Synthetic oligonucleotide
  Antisense strand to SEQ ID NO: 2025928
ugugagaagaaacugucau

SEQ ID NO: 2025930 - RNA, 19 nt, Artificial Sequence
  Description of Artificial Sequence: Synthetic oligonucleotide
  Sense strand starting at position 2150 of SEQ ID NO: 1881200
caaaguggugcuggaauca

SEQ ID NO: 2025931 - RNA, 19 nt, Artificial Sequence
  Description of Artificial Sequence: Synthetic oligonucleotide
  Antisense strand to SEQ ID NO: 2025930
ugauuccagcaccacuuug

SEQ ID NO: 2025932 - RNA, 19 nt, Artificial Sequence
  Description of Artificial Sequence: Synthetic oligonucleotide
  Sense strand starting at position 2466 of SEQ ID NO: 1881200
agauacguucaagggagua

SEQ ID NO: 2025933 - RNA, 19 nt, Artificial Sequence
  Description of Artificial Sequence: Synthetic oligonucleotide
  Antisense strand to SEQ ID NO: 2025932
uacucccuugaacguaucu

SEQ ID NO: 2025934 - RNA, 19 nt, Artificial Sequence
  Description of Artificial Sequence: Synthetic oligonucleotide
  Sense strand starting at position 2471 of SEQ ID NO: 1881200
cguucaagggaguaauaug

SEQ ID NO: 2025935 - RNA, 19 nt, Artificial Sequence
  Description of Artificial Sequence: Synthetic oligonucleotide
  Antisense strand to SEQ ID NO: 2025934
cauauuacucccuugaacg

SEQ ID NO: 2025936 - RNA, 19 nt, Artificial Sequence
  Description of Artificial Sequence: Synthetic oligonucleotide
  Sense strand starting at position 2479 of SEQ ID NO: 1881200
ggaguaauaugcucuggau

SEQ ID NO: 2025937 - RNA, 19 nt, Artificial Sequence
  Description of Artificial Sequence: Synthetic oligonucleotide
  Antisense strand to SEQ ID NO: 2025936
auccagagcauauuacucc

SEQ ID NO: 2025938 - RNA, 19 nt, Artificial Sequence
  Description of Artificial Sequence: Synthetic oligonucleotide
  Sense strand starting at position 2481 of SEQ ID NO: 1881200
aguaauaugcucuggaucu

SEQ ID NO: 2025939 - RNA, 19 nt, Artificial Sequence
  Description of Artificial Sequence: Synthetic oligonucleotide
  Antisense strand to SEQ ID NO: 2025938
agauccagagcauauuacu

SEQ ID NO: 2025940 - RNA, 19 nt, Artificial Sequence
  Description of Artificial Sequence: Synthetic oligonucleotide
  Sense strand starting at position 2870 of SEQ ID NO: 1881200
ggauguuacuaaccugaaa

SEQ ID NO: 2025941 - RNA, 19 nt, Artificial Sequence
  Description of Artificial Sequence: Synthetic oligonucleotide
  Antisense strand to SEQ ID NO: 2025940
uuucagguuaguaacaucc

SEQ ID NO: 2025942 - RNA, 19 nt, Artificial Sequence
  Description of Artificial Sequence: Synthetic oligonucleotide
  Sense strand starting at position 2905 of SEQ ID NO: 1881200
aaaguuaguccuugagaca

SEQ ID NO: 2025943 - RNA, 19 nt, Artificial Sequence
  Description of Artificial Sequence: Synthetic oligonucleotide
  Antisense strand to SEQ ID NO: 2025942
ugucucaaggacuaacuuu

SEQ ID NO: 2025944 - RNA, 19 nt, Artificial Sequence
  Description of Artificial Sequence: Synthetic oligonucleotide
  Sense strand starting at position 2917 of SEQ ID NO: 1881200
ugagacaaugcguaugcua

SEQ ID NO: 2025945 - RNA, 19 nt, Artificial Sequence
  Description of Artificial Sequence: Synthetic oligonucleotide
  Antisense strand to SEQ ID NO: 2025944
uagcauacgcauugucuca

SEQ ID NO: 2025946 - RNA, 19 nt, Artificial Sequence
  Description of Artificial Sequence: Synthetic oligonucleotide
  Sense strand starting at position 3316 of SEQ ID NO: 1881200
auuguaucucaauguauga

SEQ ID NO: 2025947 - RNA, 19 nt, Artificial Sequence
  Description of Artificial Sequence: Synthetic oligonucleotide
  Antisense strand to SEQ ID NO: 2025946
ucauacauugagauacaau

SEQ ID NO: 2025948 - RNA, 19 nt, Artificial Sequence
  Description of Artificial Sequence: Synthetic oligonucleotide
  Sense strand starting at position 3365 of SEQ ID NO: 1881200
aguuuauucuaugucagaa

SEQ ID NO: 2025949 - RNA, 19 nt, Artificial Sequence
  Description of Artificial Sequence: Synthetic oligonucleotide
  Antisense strand to SEQ ID NO: 2025948
uucugacauagaauaaacu

SEQ ID NO: 2025950 - RNA, 19 nt, Artificial Sequence
  Description of Artificial Sequence: Synthetic oligonucleotide
  Sense strand starting at position 3388 of SEQ ID NO: 1881200
gugucuuaccuauacaaga

SEQ ID NO: 2025951 - RNA, 19 nt, Artificial Sequence
  Description of Artificial Sequence: Synthetic oligonucleotide
  Antisense strand to SEQ ID NO: 2025950
ucuuguauagguaagacac

SEQ ID NO: 2025952 - RNA, 19 nt, Artificial Sequence
  Description of Artificial Sequence: Synthetic oligonucleotide
  Sense strand starting at position 3465 of SEQ ID NO: 1881200
uucucauugcaagggagaa

SEQ ID NO: 2025953 - RNA, 19 nt, Artificial Sequence
  Description of Artificial Sequence: Synthetic oligonucleotide
  Antisense strand to SEQ ID NO: 2025952
uucucccuugcaaugagaa

SEQ ID NO: 2025954 - RNA, 19 nt, Artificial Sequence
  Description of Artificial Sequence: Synthetic oligonucleotide
  Sense strand starting at position 3911 of SEQ ID NO: 1881200
gugccagacacggaucuaa

SEQ ID NO: 2025955 - RNA, 19 nt, Artificial Sequence
  Description of Artificial Sequence: Synthetic oligonucleotide
  Antisense strand to SEQ ID NO: 2025954
uuagauccgugucuggcac

SEQ ID NO: 2025956 - RNA, 19 nt, Artificial Sequence
  Description of Artificial Sequence: Synthetic oligonucleotide
  Sense strand starting at position 3929 of SEQ ID NO: 1881200
aguacaaucuggguuccua

SEQ ID NO: 2025957 - RNA, 19 nt, Artificial Sequence
  Description of Artificial Sequence: Synthetic oligonucleotide
  Antisense strand to SEQ ID NO: 2025956
uaggaacccagauuguacu

SEQ ID NO: 2025958 - RNA, 19 nt, Artificial Sequence
  Description of Artificial Sequence: Synthetic oligonucleotide
  Sense strand starting at position 3937 of SEQ ID NO: 1881200
cuggguuccuacucucaaa

SEQ ID NO: 2025959 - RNA, 19 nt, Artificial Sequence
  Description of Artificial Sequence: Synthetic oligonucleotide
  Antisense strand to SEQ ID NO: 2025958
uuugagaguaggaacccag

SEQ ID NO: 2025960 - RNA, 19 nt, Artificial Sequence
  Description of Artificial Sequence: Synthetic oligonucleotide
  Sense strand starting at position 65 of SEQ ID NO: 1881201
uggacuucucauuagcguu

SEQ ID NO: 2025961 - RNA, 19 nt, Artificial Sequence
  Description of Artificial Sequence: Synthetic oligonucleotide
  Antisense strand to SEQ ID NO: 2025960
aacgcuaaugagaagucca

SEQ ID NO: 2025962 - RNA, 19 nt, Artificial Sequence
  Description of Artificial Sequence: Synthetic oligonucleotide
  Sense strand starting at position 254 of SEQ ID NO: 1881201
agucuuuaaccuugagccu

SEQ ID NO: 2025963 - RNA, 19 nt, Artificial Sequence
  Description of Artificial Sequence: Synthetic oligonucleotide
  Antisense strand to SEQ ID NO: 2025962
aggcucaagguuaaagacu

SEQ ID NO: 2025964 - RNA, 19 nt, Artificial Sequence
  Description of Artificial Sequence: Synthetic oligonucleotide
  Sense strand starting at position 269 of SEQ ID NO: 1881201
gccugaaaugaaugugaau

SEQ ID NO: 2025965 - RNA, 19 nt, Artificial Sequence
  Description of Artificial Sequence: Synthetic oligonucleotide
  Antisense strand to SEQ ID NO: 2025964
auucacauucauuucaggc

SEQ ID NO: 2025966 - RNA, 19 nt, Artificial Sequence
  Description of Artificial Sequence: Synthetic oligonucleotide
  Sense strand starting at position 272 of SEQ ID NO: 1881201
ugaaaugaaugugaaucaa

SEQ ID NO: 2025967 - RNA, 19 nt, Artificial Sequence
  Description of Artificial Sequence: Synthetic oligonucleotide
  Antisense strand to SEQ ID NO: 2025966
uugauucacauucauuuca

SEQ ID NO: 2025968 - RNA, 19 nt, Artificial Sequence
  Description of Artificial Sequence: Synthetic oligonucleotide
  Sense strand starting at position 309 of SEQ ID NO: 1881201
cuugaagccggguaaacau

SEQ ID NO: 2025969 - RNA, 19 nt, Artificial Sequence
  Description of Artificial Sequence: Synthetic oligonucleotide
  Antisense strand to SEQ ID NO: 2025968
auguuuacccggcuucaag

SEQ ID NO: 2025970 - RNA, 19 nt, Artificial Sequence
  Description of Artificial Sequence: Synthetic oligonucleotide
  Sense strand starting at position 317 of SEQ ID NO: 1881201
cggguaaacauucgaguau

SEQ ID NO: 2025971 - RNA, 19 nt, Artificial Sequence
  Description of Artificial Sequence: Synthetic oligonucleotide
  Antisense strand to SEQ ID NO: 2025970
auacucgaauguuuacccg

SEQ ID NO: 2025972 - RNA, 19 nt, Artificial Sequence
  Description of Artificial Sequence: Synthetic oligonucleotide
  Sense strand starting at position 321 of SEQ ID NO: 1881201
uaaacauucgaguauguag

SEQ ID NO: 2025973 - RNA, 19 nt, Artificial Sequence
  Description of Artificial Sequence: Synthetic oligonucleotide
  Antisense strand to SEQ ID NO: 2025972
cuacauacucgaauguuua

SEQ ID NO: 2025974 - RNA, 19 nt, Artificial Sequence
  Description of Artificial Sequence: Synthetic oligonucleotide
  Sense strand starting at position 323 of SEQ ID NO: 1881201
aacauucgaguauguagaa

SEQ ID NO: 2025975 - RNA, 19 nt, Artificial Sequence
  Description of Artificial Sequence: Synthetic oligonucleotide
  Antisense strand to SEQ ID NO: 2025974
uucuacauacucgaauguu

SEQ ID NO: 2025976 - RNA, 19 nt, Artificial Sequence
  Description of Artificial Sequence: Synthetic oligonucleotide
  Sense strand starting at position 408 of SEQ ID NO: 1881201
ucccuuugugcugacgaaa

SEQ ID NO: 2025977 - RNA, 19 nt, Artificial Sequence
  Description of Artificial Sequence: Synthetic oligonucleotide
  Antisense strand to SEQ ID NO: 2025976
uuucgucagcacaaaggga

SEQ ID NO: 2025978 - RNA, 19 nt, Artificial Sequence
  Description of Artificial Sequence: Synthetic oligonucleotide
  Sense strand starting at position 660 of SEQ ID NO: 1881201
cacagucuuguccagagca

SEQ ID NO: 2025979 - RNA, 19 nt, Artificial Sequence
  Description of Artificial Sequence: Synthetic oligonucleotide
  Antisense strand to SEQ ID NO: 2025978
ugcucuggacaagacugug

SEQ ID NO: 2025980 - RNA, 19 nt, Artificial Sequence
  Description of Artificial Sequence: Synthetic oligonucleotide
  Sense strand starting at position 662 of SEQ ID NO: 1881201
cagucuuguccagagcagu

SEQ ID NO: 2025981 - RNA, 19 nt, Artificial Sequence
  Description of Artificial Sequence: Synthetic oligonucleotide
  Antisense strand to SEQ ID NO: 2025980
acugcucuggacaagacug

SEQ ID NO: 2025982 - RNA, 19 nt, Artificial Sequence
  Description of Artificial Sequence: Synthetic oligonucleotide
  Sense strand starting at position 750 of SEQ ID NO: 1881201
cugcguugucagucacaug

SEQ ID NO: 2025983 - RNA, 19 nt, Artificial Sequence
  Description of Artificial Sequence: Synthetic oligonucleotide
  Antisense strand to SEQ ID NO: 2025982
caugugacugacaacgcag

SEQ ID NO: 2025984 - RNA, 19 nt, Artificial Sequence
  Description of Artificial Sequence: Synthetic oligonucleotide
  Sense strand starting at position 942 of SEQ ID NO: 1881201
ucaguuaaucaagguguaa

SEQ ID NO: 2025985 - RNA, 19 nt, Artificial Sequence
  Description of Artificial Sequence: Synthetic oligonucleotide
  Antisense strand to SEQ ID NO: 2025984
uuacaccuugauuaacuga

SEQ ID NO: 2025986 - RNA, 19 nt, Artificial Sequence
  Description of Artificial Sequence: Synthetic oligonucleotide
  Sense strand starting at position 1108 of SEQ ID NO: 1881201
uguugccucuuauuuaaag

SEQ ID NO: 2025987 - RNA, 19 nt, Artificial Sequence
  Description of Artificial Sequence: Synthetic oligonucleotide
  Antisense strand to SEQ ID NO: 2025986
cuuuaaauaagaggcaaca

SEQ ID NO: 2025988 - RNA, 19 nt, Artificial Sequence
  Description of Artificial Sequence: Synthetic oligonucleotide
  Sense strand starting at position 1165 of SEQ ID NO: 1881201
cacaguaugcaaggugaaa

SEQ ID NO: 2025989 - RNA, 19 nt, Artificial Sequence
  Description of Artificial Sequence: Synthetic oligonucleotide
  Antisense strand to SEQ ID NO: 2025988
uuucaccuugcauacugug

SEQ ID NO: 2025990 - RNA, 19 nt, Artificial Sequence
  Description of Artificial Sequence: Synthetic oligonucleotide
  Sense strand starting at position 1224 of SEQ ID NO: 1881201
acuaguaagcgaugacuga

SEQ ID NO: 2025991 - RNA, 19 nt, Artificial Sequence
  Description of Artificial Sequence: Synthetic oligonucleotide
  Antisense strand to SEQ ID NO: 2025990
ucagucaucgcuuacuagu

SEQ ID NO: 2025992 - RNA, 19 nt, Artificial Sequence
  Description of Artificial Sequence: Synthetic oligonucleotide
  Sense strand starting at position 1301 of SEQ ID NO: 1881201
auugacaaagcuuauguua

SEQ ID NO: 2025993 - RNA, 19 nt, Artificial Sequence
  Description of Artificial Sequence: Synthetic oligonucleotide
  Antisense strand to SEQ ID NO: 2025992
uaacauaagcuuugucaau

SEQ ID NO: 2025994 - RNA, 19 nt, Artificial Sequence
  Description of Artificial Sequence: Synthetic oligonucleotide
  Sense strand starting at position 1314 of SEQ ID NO: 1881201
auguuaaauucuucucugu

SEQ ID NO: 2025995 - RNA, 19 nt, Artificial Sequence
  Description of Artificial Sequence: Synthetic oligonucleotide
  Antisense strand to SEQ ID NO: 2025994
acagagaagaauuuaacau

SEQ ID NO: 2025996 - RNA, 19 nt, Artificial Sequence
  Description of Artificial Sequence: Synthetic oligonucleotide
  Sense strand starting at position 1522 of SEQ ID NO: 1881201
agcucaaguccugggacuu

SEQ ID NO: 2025997 - RNA, 19 nt, Artificial Sequence
  Description of Artificial Sequence: Synthetic oligonucleotide
  Antisense strand to SEQ ID NO: 2025996
aagucccaggacuugagcu

SEQ ID NO: 2025998 - RNA, 19 nt, Artificial Sequence
  Description of Artificial Sequence: Synthetic oligonucleotide
  Sense strand starting at position 1523 of SEQ ID NO: 1881201
gcucaaguccugggacuuc

SEQ ID NO: 2025999 - RNA, 19 nt, Artificial Sequence
  Description of Artificial Sequence: Synthetic oligonucleotide
  Antisense strand to SEQ ID NO: 2025998
gaagucccaggacuugagc

SEQ ID NO: 2026000 - RNA, 19 nt, Artificial Sequence
  Description of Artificial Sequence: Synthetic oligonucleotide
  Sense strand starting at position 1892 of SEQ ID NO: 1881201
guggcuuguccacagucaa

SEQ ID NO: 2026001 - RNA, 19 nt, Artificial Sequence
  Description of Artificial Sequence: Synthetic oligonucleotide
  Antisense strand to SEQ ID NO: 2026000
uugacuguggacaagccac

SEQ ID NO: 2026002 - RNA, 19 nt, Artificial Sequence
  Description of Artificial Sequence: Synthetic oligonucleotide
  Sense strand starting at position 2040 of SEQ ID NO: 1881201
caggacgugugguucacaa

SEQ ID NO: 2026003 - RNA, 19 nt, Artificial Sequence
  Description of Artificial Sequence: Synthetic oligonucleotide
  Antisense strand to SEQ ID NO: 2026002
uugugaaccacacguccug

SEQ ID NO: 2026004 - RNA, 19 nt, Artificial Sequence
  Description of Artificial Sequence: Synthetic oligonucleotide
  Sense strand starting at position 2042 of SEQ ID NO: 1881201
ggacgugugguucacaacu

SEQ ID NO: 2026005 - RNA, 19 nt, Artificial Sequence
  Description of Artificial Sequence: Synthetic oligonucleotide
  Antisense strand to SEQ ID NO: 2026004
aguugugaaccacacgucc

SEQ ID NO: 2026006 - RNA, 19 nt, Artificial Sequence
  Description of Artificial Sequence: Synthetic oligonucleotide
  Sense strand starting at position 2255 of SEQ ID NO: 1881201
gggcuuugagucuauacuc

SEQ ID NO: 2026007 - RNA, 19 nt, Artificial Sequence
  Description of Artificial Sequence: Synthetic oligonucleotide
  Antisense strand to SEQ ID NO: 2026006
gaguauagacucaaagccc

SEQ ID NO: 2026008 - RNA, 19 nt, Artificial Sequence
  Description of Artificial Sequence: Synthetic oligonucleotide
  Sense strand starting at position 2262 of SEQ ID NO: 1881201
gagucuauacucgaguguu

SEQ ID NO: 2026009 - RNA, 19 nt, Artificial Sequence
  Description of Artificial Sequence: Synthetic oligonucleotide
  Antisense strand to SEQ ID NO: 2026008
aacacucgaguauagacuc

SEQ ID NO: 2026010 - RNA, 19 nt, Artificial Sequence
  Description of Artificial Sequence: Synthetic oligonucleotide
  Sense strand starting at position 2524 of SEQ ID NO: 1881201
ugauguucccguucuguuu

SEQ ID NO: 2026011 - RNA, 19 nt, Artificial Sequence
  Description of Artificial Sequence: Synthetic oligonucleotide
  Antisense strand to SEQ ID NO: 2026010
aaacagaacgggaacauca

SEQ ID NO: 2026012 - RNA, 19 nt, Artificial Sequence
  Description of Artificial Sequence: Synthetic oligonucleotide
  Sense strand starting at position 2605 of SEQ ID NO: 1881201
guuugugacacguaacaug

SEQ ID NO: 2026013 - RNA, 19 nt, Artificial Sequence
  Description of Artificial Sequence: Synthetic oligonucleotide
  Antisense strand to SEQ ID NO: 2026012
cauguuacgugucacaaac

SEQ ID NO: 2026014 - RNA, 19 nt, Artificial Sequence
  Description of Artificial Sequence: Synthetic oligonucleotide
  Sense strand starting at position 2735 of SEQ ID NO: 1881201
gguugaaccucugcuuuaa

SEQ ID NO: 2026015 - RNA, 19 nt, Artificial Sequence
  Description of Artificial Sequence: Synthetic oligonucleotide
  Antisense strand to SEQ ID NO: 2026014
uuaaagcagagguucaacc

SEQ ID NO: 2026016 - RNA, 19 nt, Artificial Sequence
  Description of Artificial Sequence: Synthetic oligonucleotide
  Sense strand starting at position 2799 of SEQ ID NO: 1881201
gucgacugugcuuccuuua

SEQ ID NO: 2026017 - RNA, 19 nt, Artificial Sequence
  Description of Artificial Sequence: Synthetic oligonucleotide
  Antisense strand to SEQ ID NO: 2026016
uaaaggaagcacagucgac

SEQ ID NO: 2026018 - RNA, 19 nt, Artificial Sequence
  Description of Artificial Sequence: Synthetic oligonucleotide
  Sense strand starting at position 2829 of SEQ ID NO: 1881201
ccaucaucucuuugauggu

SEQ ID NO: 2026019 - RNA, 19 nt, Artificial Sequence
  Description of Artificial Sequence: Synthetic oligonucleotide
  Antisense strand to SEQ ID NO: 2026018
accaucaaagagaugaugg

SEQ ID NO: 2026020 - RNA, 19 nt, Artificial Sequence
  Description of Artificial Sequence: Synthetic oligonucleotide
  Sense strand starting at position 3100 of SEQ ID NO: 1881201
ugcagauccgcgucgugaa

SEQ ID NO: 2026021 - RNA, 19 nt, Artificial Sequence
  Description of Artificial Sequence: Synthetic oligonucleotide
  Antisense strand to SEQ ID NO: 2026020
uucacgacgcggaucugca

SEQ ID NO: 2026022 - RNA, 19 nt, Artificial Sequence
  Description of Artificial Sequence: Synthetic oligonucleotide
  Sense strand starting at position 3111 of SEQ ID NO: 1881201
gucgugaaggcguuccgua

SEQ ID NO: 2026023 - RNA, 19 nt, Artificial Sequence
  Description of Artificial Sequence: Synthetic oligonucleotide
  Antisense strand to SEQ ID NO: 2026022
uacggaacgccuucacgac

SEQ ID NO: 2026024 - RNA, 19 nt, Artificial Sequence
  Description of Artificial Sequence: Synthetic oligonucleotide
  Sense strand starting at position 3194 of SEQ ID NO: 1881201
uccugaauuccggaucgaa

SEQ ID NO: 2026025 - RNA, 19 nt, Artificial Sequence
  Description of Artificial Sequence: Synthetic oligonucleotide
  Antisense strand to SEQ ID NO: 2026024
uucgauccggaauucagga

SEQ ID NO: 2026026 - RNA, 19 nt, Artificial Sequence
  Description of Artificial Sequence: Synthetic oligonucleotide
  Sense strand starting at position 3197 of SEQ ID NO: 1881201
ugaauuccggaucgaagau

SEQ ID NO: 2026027 - RNA, 19 nt, Artificial Sequence
  Description of Artificial Sequence: Synthetic oligonucleotide
  Antisense strand to SEQ ID NO: 2026026
aucuucgauccggaauuca

SEQ ID NO: 2026028 - RNA, 19 nt, Artificial Sequence
  Description of Artificial Sequence: Synthetic oligonucleotide
  Sense strand starting at position 3400 of SEQ ID NO: 1881201
uggagacgucgcuuuagcu

SEQ ID NO: 2026029 - RNA, 19 nt, Artificial Sequence
  Description of Artificial Sequence: Synthetic oligonucleotide
  Antisense strand to SEQ ID NO: 2026028
agcuaaagcgacgucucca

SEQ ID NO: 2026030 - RNA, 19 nt, Artificial Sequence
  Description of Artificial Sequence: Synthetic oligonucleotide
  Sense strand starting at position 3583 of SEQ ID NO: 1881201
ggcugcgaugcuguuugaa

SEQ ID NO: 2026031 - RNA, 19 nt, Artificial Sequence
  Description of Artificial Sequence: Synthetic oligonucleotide
  Antisense strand to SEQ ID NO: 2026030
uucaaacagcaucgcagcc

SEQ ID NO: 2026032 - RNA, 19 nt, Artificial Sequence
  Description of Artificial Sequence: Synthetic oligonucleotide
  Sense strand starting at position 3869 of SEQ ID NO: 1881201
aauccacuggucugugagu

SEQ ID NO: 2026033 - RNA, 19 nt, Artificial Sequence
  Description of Artificial Sequence: Synthetic oligonucleotide
  Antisense strand to SEQ ID NO: 2026032
acucacagaccaguggauu

SEQ ID NO: 2026034 - RNA, 19 nt, Artificial Sequence
  Description of Artificial Sequence: Synthetic oligonucleotide
  Sense strand starting at position 3911 of SEQ ID NO: 1881201
gucucaguuguauagauua

SEQ ID NO: 2026035 - RNA, 19 nt, Artificial Sequence
  Description of Artificial Sequence: Synthetic oligonucleotide
  Antisense strand to SEQ ID NO: 2026034
uaaucuauacaacugagac

SEQ ID NO: 2026036 - RNA, 19 nt, Artificial Sequence
  Description of Artificial Sequence: Synthetic oligonucleotide
  Sense strand starting at position 3942 of SEQ ID NO: 1881201
uuugaaauugcagagcuua

SEQ ID NO: 2026037 - RNA, 19 nt, Artificial Sequence
  Description of Artificial Sequence: Synthetic oligonucleotide
  Antisense strand to SEQ ID NO: 2026036
uaagcucugcaauuucaaa

SEQ ID NO: 2026038 - RNA, 19 nt, Artificial Sequence
  Description of Artificial Sequence: Synthetic oligonucleotide
  Sense strand starting at position 3967 of SEQ ID NO: 1881201
cuaguagauuugcaccaau

SEQ ID NO: 2026039 - RNA, 19 nt, Artificial Sequence
  Description of Artificial Sequence: Synthetic oligonucleotide
  Antisense strand to SEQ ID NO: 2026038
auuggugcaaaucuacuag

SEQ ID NO: 2026040 - RNA, 19 nt, Artificial Sequence
  Description of Artificial Sequence: Synthetic oligonucleotide
  Sense strand starting at position 356 of SEQ ID NO: 1881202
cuuauauaucuuggaaagu

SEQ ID NO: 2026041 - RNA, 19 nt, Artificial Sequence
  Description of Artificial Sequence: Synthetic oligonucleotide
  Antisense strand to SEQ ID NO: 2026040
acuuuccaagauauauaag

SEQ ID NO: 2026042 - RNA, 19 nt, Artificial Sequence
  Description of Artificial Sequence: Synthetic oligonucleotide
  Sense strand starting at position 769 of SEQ ID NO: 1881202
ucgcaucaacuauggauaa

SEQ ID NO: 2026043 - RNA, 19 nt, Artificial Sequence
  Description of Artificial Sequence: Synthetic oligonucleotide
  Antisense strand to SEQ ID NO: 2026042
uuauccauaguugaugcga

SEQ ID NO: 2026044 - RNA, 19 nt, Artificial Sequence
  Description of Artificial Sequence: Synthetic oligonucleotide
  Sense strand starting at position 852 of SEQ ID NO: 1881202
gaggcaauuuaguauuauu

SEQ ID NO: 2026045 - RNA, 19 nt, Artificial Sequence
  Description of Artificial Sequence: Synthetic oligonucleotide
  Antisense strand to SEQ ID NO: 2026044
aauaauacuaaauugccuc

SEQ ID NO: 2026046 - RNA, 19 nt, Artificial Sequence
  Description of Artificial Sequence: Synthetic oligonucleotide
  Sense strand starting at position 891 of SEQ ID NO: 1881202
gguuaacaaccucgaaaga

SEQ ID NO: 2026047 - RNA, 19 nt, Artificial Sequence
  Description of Artificial Sequence: Synthetic oligonucleotide
  Antisense strand to SEQ ID NO: 2026046
ucuuucgagguuguuaacc

SEQ ID NO: 2026048 - RNA, 19 nt, Artificial Sequence
  Description of Artificial Sequence: Synthetic oligonucleotide
  Sense strand starting at position 1526 of SEQ ID NO: 1881202
aucuauaucuauucguguu

SEQ ID NO: 2026049 - RNA, 19 nt, Artificial Sequence
  Description of Artificial Sequence: Synthetic oligonucleotide
  Antisense strand to SEQ ID NO: 2026048
aacacgaauagauauagau

SEQ ID NO: 2026050 - RNA, 19 nt, Artificial Sequence
  Description of Artificial Sequence: Synthetic oligonucleotide
  Sense strand starting at position 1589 of SEQ ID NO: 1881202
gcguuccuagaugguaaga

SEQ ID NO: 2026051 - RNA, 19 nt, Artificial Sequence
  Description of Artificial Sequence: Synthetic oligonucleotide
  Antisense strand to SEQ ID NO: 2026050
ucuuaccaucuaggaacgc

SEQ ID NO: 2026052 - RNA, 19 nt, Artificial Sequence
  Description of Artificial Sequence: Synthetic oligonucleotide
  Sense strand starting at position 1594 of SEQ ID NO: 1881202
ccuagaugguaagaacaaa

SEQ ID NO: 2026053 - RNA, 19 nt, Artificial Sequence
  Description of Artificial Sequence: Synthetic oligonucleotide
  Antisense strand to SEQ ID NO: 2026052
uuuguucuuaccaucuagg

SEQ ID NO: 2026054 - RNA, 19 nt, Artificial Sequence
  Description of Artificial Sequence: Synthetic oligonucleotide
  Sense strand starting at position 1620 of SEQ ID NO: 1881202
agguaucaguucuuauauu

SEQ ID NO: 2026055 - RNA, 19 nt, Artificial Sequence
  Description of Artificial Sequence: Synthetic oligonucleotide
  Antisense strand to SEQ ID NO: 2026054
aauauaagaacugauaccu

SEQ ID NO: 2026056 - RNA, 19 nt, Artificial Sequence
  Description of Artificial Sequence: Synthetic oligonucleotide
  Sense strand starting at position 1640 of SEQ ID NO: 1881202
guuuacagauuugaugcaa

SEQ ID NO: 2026057 - RNA, 19 nt, Artificial Sequence
  Description of Artificial Sequence: Synthetic oligonucleotide
  Antisense strand to SEQ ID NO: 2026056
uugcaucaaaucuguaaac

SEQ ID NO: 2026058 - RNA, 19 nt, Artificial Sequence
  Description of Artificial Sequence: Synthetic oligonucleotide
  Sense strand starting at position 1699 of SEQ ID NO: 1881202
uguagaguuuaucuggaau

SEQ ID NO: 2026059 - RNA, 19 nt, Artificial Sequence
  Description of Artificial Sequence: Synthetic oligonucleotide
  Antisense strand to SEQ ID NO: 2026058
auuccagauaaacucuaca

SEQ ID NO: 2026060 - RNA, 19 nt, Artificial Sequence
  Description of Artificial Sequence: Synthetic oligonucleotide
  Sense strand starting at position 1705 of SEQ ID NO: 1881202
guuuaucuggaaugagucu

SEQ ID NO: 2026061 - RNA, 19 nt, Artificial Sequence
  Description of Artificial Sequence: Synthetic oligonucleotide
  Antisense strand to SEQ ID NO: 2026060
agacucauuccagauaaac

SEQ ID NO: 2026062 - RNA, 19 nt, Artificial Sequence
  Description of Artificial Sequence: Synthetic oligonucleotide
  Sense strand starting at position 1711 of SEQ ID NO: 1881202
cuggaaugagucugaccau

SEQ ID NO: 2026063 - RNA, 19 nt, Artificial Sequence
  Description of Artificial Sequence: Synthetic oligonucleotide
  Antisense strand to SEQ ID NO: 2026062
auggucagacucauuccag

SEQ ID NO: 2026064 - RNA, 19 nt, Artificial Sequence
  Description of Artificial Sequence: Synthetic oligonucleotide
  Sense strand starting at position 1714 of SEQ ID NO: 1881202
gaaugagucugaccaucca

SEQ ID NO: 2026065 - RNA, 19 nt, Artificial Sequence
  Description of Artificial Sequence: Synthetic oligonucleotide
  Antisense strand to SEQ ID NO: 2026064
uggauggucagacucauuc

SEQ ID NO: 2026066 - RNA, 19 nt, Artificial Sequence
  Description of Artificial Sequence: Synthetic oligonucleotide
  Sense strand starting at position 1752 of SEQ ID NO: 1881202
aguggagaauucccugcua

SEQ ID NO: 2026067 - RNA, 19 nt, Artificial Sequence
  Description of Artificial Sequence: Synthetic oligonucleotide
  Antisense strand to SEQ ID NO: 2026066
uagcagggaauucuccacu

SEQ ID NO: 2026068 - RNA, 19 nt, Artificial Sequence
  Description of Artificial Sequence: Synthetic oligonucleotide
  Sense strand starting at position 1754 of SEQ ID NO: 1881202
uggagaauucccugcuaga

SEQ ID NO: 2026069 - RNA, 19 nt, Artificial Sequence
  Description of Artificial Sequence: Synthetic oligonucleotide
  Antisense strand to SEQ ID NO: 2026068
ucuagcagggaauucucca

SEQ ID NO: 2026070 - RNA, 19 nt, Artificial Sequence
  Description of Artificial Sequence: Synthetic oligonucleotide
  Sense strand starting at position 1868 of SEQ ID NO: 1881202
agaaacagauucuaaugga

SEQ ID NO: 2026071 - RNA, 19 nt, Artificial Sequence
  Description of Artificial Sequence: Synthetic oligonucleotide
  Antisense strand to SEQ ID NO: 2026070
uccauuagaaucuguuucu

SEQ ID NO: 2026072 - RNA, 19 nt, Artificial Sequence
  Description of Artificial Sequence: Synthetic oligonucleotide
  Sense strand starting at position 1902 of SEQ ID NO: 1881202
ugguaaagauuccugagca

SEQ ID NO: 2026073 - RNA, 19 nt, Artificial Sequence
  Description of Artificial Sequence: Synthetic oligonucleotide
  Antisense strand to SEQ ID NO: 2026072
ugcucaggaaucuuuacca

SEQ ID NO: 2026074 - RNA, 19 nt, Artificial Sequence
  Description of Artificial Sequence: Synthetic oligonucleotide
  Sense strand starting at position 1985 of SEQ ID NO: 1881202
aguaaauggugcucaggua

SEQ ID NO: 2026075 - RNA, 19 nt, Artificial Sequence
  Description of Artificial Sequence: Synthetic oligonucleotide
  Antisense strand to SEQ ID NO: 2026074
uaccugagcaccauuuacu

SEQ ID NO: 2026076 - RNA, 19 nt, Artificial Sequence
  Description of Artificial Sequence: Synthetic oligonucleotide
  Sense strand starting at position 1986 of SEQ ID NO: 1881202
guaaauggugcucagguaa

SEQ ID NO: 2026077 - RNA, 19 nt, Artificial Sequence
  Description of Artificial Sequence: Synthetic oligonucleotide
  Antisense strand to SEQ ID NO: 2026076
uuaccugagcaccauuuac

SEQ ID NO: 2026078 - RNA, 19 nt, Artificial Sequence
  Description of Artificial Sequence: Synthetic oligonucleotide
  Sense strand starting at position 2005 of SEQ ID NO: 1881202
aggguuaacuacuuggaau

SEQ ID NO: 2026079 - RNA, 19 nt, Artificial Sequence
  Description of Artificial Sequence: Synthetic oligonucleotide
  Antisense strand to SEQ ID NO: 2026078
auuccaaguaguuaacccu

SEQ ID NO: 2026080 - RNA, 19 nt, Artificial Sequence
  Description of Artificial Sequence: Synthetic oligonucleotide
  Sense strand starting at position 2006 of SEQ ID NO: 1881202
ggguuaacuacuuggaaua

SEQ ID NO: 2026081 - RNA, 19 nt, Artificial Sequence
  Description of Artificial Sequence: Synthetic oligonucleotide
  Antisense strand to SEQ ID NO: 2026080
uauuccaaguaguuaaccc

SEQ ID NO: 2026082 - RNA, 19 nt, Artificial Sequence
  Description of Artificial Sequence: Synthetic oligonucleotide
  Sense strand starting at position 2007 of SEQ ID NO: 1881202
gguuaacuacuuggaauaa

SEQ ID NO: 2026083 - RNA, 19 nt, Artificial Sequence
  Description of Artificial Sequence: Synthetic oligonucleotide
  Antisense strand to SEQ ID NO: 2026082
uuauuccaaguaguuaacc

SEQ ID NO: 2026084 - RNA, 19 nt, Artificial Sequence
  Description of Artificial Sequence: Synthetic oligonucleotide
  Sense strand starting at position 2125 of SEQ ID NO: 1881202
auaggugaaugggauacua

SEQ ID NO: 2026085 - RNA, 19 nt, Artificial Sequence
  Description of Artificial Sequence: Synthetic oligonucleotide
  Antisense strand to SEQ ID NO: 2026084
uaguaucccauucaccuau

SEQ ID NO: 2026086 - RNA, 19 nt, Artificial Sequence
  Description of Artificial Sequence: Synthetic oligonucleotide
  Sense strand starting at position 2409 of SEQ ID NO: 1881202
acaacaguucuagggaugu

SEQ ID NO: 2026087 - RNA, 19 nt, Artificial Sequence
  Description of Artificial Sequence: Synthetic oligonucleotide
  Antisense strand to SEQ ID NO: 2026086
acaucccuagaacuguugu

SEQ ID NO: 2026088 - RNA, 19 nt, Artificial Sequence
  Description of Artificial Sequence: Synthetic oligonucleotide
  Sense strand starting at position 2413 of SEQ ID NO: 1881202
caguucuagggauguaaca

SEQ ID NO: 2026089 - RNA, 19 nt, Artificial Sequence
  Description of Artificial Sequence: Synthetic oligonucleotide
  Antisense strand to SEQ ID NO: 2026088
uguuacaucccuagaacug

SEQ ID NO: 2026090 - RNA, 19 nt, Artificial Sequence
  Description of Artificial Sequence: Synthetic oligonucleotide
  Sense strand starting at position 2534 of SEQ ID NO: 1881202
ugacauugauaacuauagu

SEQ ID NO: 2026091 - RNA, 19 nt, Artificial Sequence
  Description of Artificial Sequence: Synthetic oligonucleotide
  Antisense strand to SEQ ID NO: 2026090
acuauaguuaucaauguca

SEQ ID NO: 2026092 - RNA, 19 nt, Artificial Sequence
  Description of Artificial Sequence: Synthetic oligonucleotide
  Sense strand starting at position 2746 of SEQ ID NO: 1881202
cggaaucuccaaggaaauu

SEQ ID NO: 2026093 - RNA, 19 nt, Artificial Sequence
  Description of Artificial Sequence: Synthetic oligonucleotide
  Antisense strand to SEQ ID NO: 2026092
aauuuccuuggagauuccg

SEQ ID NO: 2026094 - RNA, 19 nt, Artificial Sequence
  Description of Artificial Sequence: Synthetic oligonucleotide
  Sense strand starting at position 2866 of SEQ ID NO: 1881202
augaauaggcauugcuaua

SEQ ID NO: 2026095 - RNA, 19 nt, Artificial Sequence
  Description of Artificial Sequence: Synthetic oligonucleotide
  Antisense strand to SEQ ID NO: 2026094
uauagcaaugccuauucau

SEQ ID NO: 2026096 - RNA, 19 nt, Artificial Sequence
  Description of Artificial Sequence: Synthetic oligonucleotide
  Sense strand starting at position 2955 of SEQ ID NO: 1881202
guaaccguccauuauugau

SEQ ID NO: 2026097 - RNA, 19 nt, Artificial Sequence
  Description of Artificial Sequence: Synthetic oligonucleotide
  Antisense strand to SEQ ID NO: 2026096
aucaauaauggacgguuac

SEQ ID NO: 2026098 - RNA, 19 nt, Artificial Sequence
  Description of Artificial Sequence: Synthetic oligonucleotide
  Sense strand starting at position 2961 of SEQ ID NO: 1881202
guccauuauugauagauuu

SEQ ID NO: 2026099 - RNA, 19 nt, Artificial Sequence
  Description of Artificial Sequence: Synthetic oligonucleotide
  Antisense strand to SEQ ID NO: 2026098
aaaucuaucaauaauggac

SEQ ID NO: 2026100 - RNA, 19 nt, Artificial Sequence
  Description of Artificial Sequence: Synthetic oligonucleotide
  Sense strand starting at position 3016 of SEQ ID NO: 1881202
auaaauuagugaucacugu

SEQ ID NO: 2026101 - RNA, 19 nt, Artificial Sequence
  Description of Artificial Sequence: Synthetic oligonucleotide
  Antisense strand to SEQ ID NO: 2026100
acagugaucacuaauuuau

SEQ ID NO: 2026102 - RNA, 19 nt, Artificial Sequence
  Description of Artificial Sequence: Synthetic oligonucleotide
  Sense strand starting at position 3020 of SEQ ID NO: 1881202
auuagugaucacuguacuu

SEQ ID NO: 2026103 - RNA, 19 nt, Artificial Sequence
  Description of Artificial Sequence: Synthetic oligonucleotide
  Antisense strand to SEQ ID NO: 2026102
aaguacagugaucacuaau

SEQ ID NO: 2026104 - RNA, 19 nt, Artificial Sequence
  Description of Artificial Sequence: Synthetic oligonucleotide
  Sense strand starting at position 3022 of SEQ ID NO: 1881202
uagugaucacuguacuuug

SEQ ID NO: 2026105 - RNA, 19 nt, Artificial Sequence
  Description of Artificial Sequence: Synthetic oligonucleotide
  Antisense strand to SEQ ID NO: 2026104
caaaguacagugaucacua

SEQ ID NO: 2026106 - RNA, 19 nt, Artificial Sequence
  Description of Artificial Sequence: Synthetic oligonucleotide
  Sense strand starting at position 3124 of SEQ ID NO: 1881202
uaagaaguguaagcacauu

SEQ ID NO: 2026107 - RNA, 19 nt, Artificial Sequence
  Description of Artificial Sequence: Synthetic oligonucleotide
  Antisense strand to SEQ ID NO: 2026106
aaugugcuuacacuucuua

SEQ ID NO: 2026108 - RNA, 19 nt, Artificial Sequence
  Description of Artificial Sequence: Synthetic oligonucleotide
  Sense strand starting at position 3315 of SEQ ID NO: 1881202
guguaauuaugaucacaua

SEQ ID NO: 2026109 - RNA, 19 nt, Artificial Sequence
  Description of Artificial Sequence: Synthetic oligonucleotide
  Antisense strand to SEQ ID NO: 2026108
uaugugaucauaauuacac

SEQ ID NO: 2026110 - RNA, 19 nt, Artificial Sequence
  Description of Artificial Sequence: Synthetic oligonucleotide
  Sense strand starting at position 3568 of SEQ ID NO: 1881202
cugugaucuucaguagggu

SEQ ID NO: 2026111 - RNA, 19 nt, Artificial Sequence
  Description of Artificial Sequence: Synthetic oligonucleotide
  Antisense strand to SEQ ID NO: 2026110
acccuacugaagaucacag

SEQ ID NO: 2026112 - RNA, 19 nt, Artificial Sequence
  Description of Artificial Sequence: Synthetic oligonucleotide
  Sense strand starting at position 3660 of SEQ ID NO: 1881202
caugcaaucguggauuacu

SEQ ID NO: 2026113 - RNA, 19 nt, Artificial Sequence
  Description of Artificial Sequence: Synthetic oligonucleotide
  Antisense strand to SEQ ID NO: 2026112
aguaauccacgauugcaug

SEQ ID NO: 2026114 - RNA, 19 nt, Artificial Sequence
  Description of Artificial Sequence: Synthetic oligonucleotide
  Sense strand starting at position 3669 of SEQ ID NO: 1881202
guggauuacucccuuccca

SEQ ID NO: 2026115 - RNA, 19 nt, Artificial Sequence
  Description of Artificial Sequence: Synthetic oligonucleotide
  Antisense strand to SEQ ID NO: 2026114
ugggaagggaguaauccac

SEQ ID NO: 2026116 - RNA, 19 nt, Artificial Sequence
  Description of Artificial Sequence: Synthetic oligonucleotide
  Sense strand starting at position 3751 of SEQ ID NO: 1881202
agcaauuuagagugugcau

SEQ ID NO: 2026117 - RNA, 19 nt, Artificial Sequence
  Description of Artificial Sequence: Synthetic oligonucleotide
  Antisense strand to SEQ ID NO: 2026116
augcacacucuaaauugcu

SEQ ID NO: 2026118 - RNA, 19 nt, Artificial Sequence
  Description of Artificial Sequence: Synthetic oligonucleotide
  Sense strand starting at position 3797 of SEQ ID NO: 1881202
ggaagauaggccuggcaca

SEQ ID NO: 2026119 - RNA, 19 nt, Artificial Sequence
  Description of Artificial Sequence: Synthetic oligonucleotide
  Antisense strand to SEQ ID NO: 2026118
ugugccaggccuaucuucc

SEQ ID NO: 2026120 - RNA, 19 nt, Artificial Sequence
  Description of Artificial Sequence: Synthetic oligonucleotide
  Sense strand starting at position 122 of SEQ ID NO: 1881203
gcaacaauauguuuggaga

SEQ ID NO: 2026121 - RNA, 19 nt, Artificial Sequence
  Description of Artificial Sequence: Synthetic oligonucleotide
  Antisense strand to SEQ ID NO: 2026120
ucuccaaacauauuguugc

SEQ ID NO: 2026122 - RNA, 19 nt, Artificial Sequence
  Description of Artificial Sequence: Synthetic oligonucleotide
  Sense strand starting at position 170 of SEQ ID NO: 1881203
cauucuuaugacugugaga

SEQ ID NO: 2026123 - RNA, 19 nt, Artificial Sequence
  Description of Artificial Sequence: Synthetic oligonucleotide
  Antisense strand to SEQ ID NO: 2026122
ucucacagucauaagaaug

SEQ ID NO: 2026124 - RNA, 19 nt, Artificial Sequence
  Description of Artificial Sequence: Synthetic oligonucleotide
  Sense strand starting at position 172 of SEQ ID NO: 1881203
uucuuaugacugugagaaa

SEQ ID NO: 2026125 - RNA, 19 nt, Artificial Sequence
  Description of Artificial Sequence: Synthetic oligonucleotide
  Antisense strand to SEQ ID NO: 2026124
uuucucacagucauaagaa

SEQ ID NO: 2026126 - RNA, 19 nt, Artificial Sequence
  Description of Artificial Sequence: Synthetic oligonucleotide
  Sense strand starting at position 301 of SEQ ID NO: 1881203
acauuaacucuaugaggua

SEQ ID NO: 2026127 - RNA, 19 nt, Artificial Sequence
  Description of Artificial Sequence: Synthetic oligonucleotide
  Antisense strand to SEQ ID NO: 2026126
uaccucauagaguuaaugu

SEQ ID NO: 2026128 - RNA, 19 nt, Artificial Sequence
  Description of Artificial Sequence: Synthetic oligonucleotide
  Sense strand starting at position 423 of SEQ ID NO: 1881203
agauuuaagucauagauga

SEQ ID NO: 2026129 - RNA, 19 nt, Artificial Sequence
  Description of Artificial Sequence: Synthetic oligonucleotide
  Antisense strand to SEQ ID NO: 2026128
ucaucuaugacuuaaaucu

SEQ ID NO: 2026130 - RNA, 19 nt, Artificial Sequence
  Description of Artificial Sequence: Synthetic oligonucleotide
  Sense strand starting at position 469 of SEQ ID NO: 1881203
ggcuguagccugcuguuua

SEQ ID NO: 2026131 - RNA, 19 nt, Artificial Sequence
  Description of Artificial Sequence: Synthetic oligonucleotide
  Antisense strand to SEQ ID NO: 2026130
uaaacagcaggcuacagcc

SEQ ID NO: 2026132 - RNA, 19 nt, Artificial Sequence
  Description of Artificial Sequence: Synthetic oligonucleotide
  Sense strand starting at position 513 of SEQ ID NO: 1881203
auguucauggccgagauaa

SEQ ID NO: 2026133 - RNA, 19 nt, Artificial Sequence
  Description of Artificial Sequence: Synthetic oligonucleotide
  Antisense strand to SEQ ID NO: 2026132
uuaucucggccaugaacau

SEQ ID NO: 2026134 - RNA, 19 nt, Artificial Sequence
  Description of Artificial Sequence: Synthetic oligonucleotide
  Sense strand starting at position 515 of SEQ ID NO: 1881203
guucauggccgagauaaau

SEQ ID NO: 2026135 - RNA, 19 nt, Artificial Sequence
  Description of Artificial Sequence: Synthetic oligonucleotide
  Antisense strand to SEQ ID NO: 2026134
auuuaucucggccaugaac

SEQ ID NO: 2026136 - RNA, 19 nt, Artificial Sequence
  Description of Artificial Sequence: Synthetic oligonucleotide
  Sense strand starting at position 521 of SEQ ID NO: 1881203
ggccgagauaaauaaagca

SEQ ID NO: 2026137 - RNA, 19 nt, Artificial Sequence
  Description of Artificial Sequence: Synthetic oligonucleotide
  Antisense strand to SEQ ID NO: 2026136
ugcuuuauuuaucucggcc

SEQ ID NO: 2026138 - RNA, 19 nt, Artificial Sequence
  Description of Artificial Sequence: Synthetic oligonucleotide
  Sense strand starting at position 585 of SEQ ID NO: 1881203
ggaagagauugcucucuug

SEQ ID NO: 2026139 - RNA, 19 nt, Artificial Sequence
  Description of Artificial Sequence: Synthetic oligonucleotide
  Antisense strand to SEQ ID NO: 2026138
caagagagcaaucucuucc

SEQ ID NO: 2026140 - RNA, 19 nt, Artificial Sequence
  Description of Artificial Sequence: Synthetic oligonucleotide
  Sense strand starting at position 591 of SEQ ID NO: 1881203
gauugcucucuugauggau

SEQ ID NO: 2026141 - RNA, 19 nt, Artificial Sequence
  Description of Artificial Sequence: Synthetic oligonucleotide
  Antisense strand to SEQ ID NO: 2026140
auccaucaagagagcaauc

SEQ ID NO: 2026142 - RNA, 19 nt, Artificial Sequence
  Description of Artificial Sequence: Synthetic oligonucleotide
  Sense strand starting at position 883 of SEQ ID NO: 1881203
ucccaugugguggauauau

SEQ ID NO: 2026143 - RNA, 19 nt, Artificial Sequence
  Description of Artificial Sequence: Synthetic oligonucleotide
  Antisense strand to SEQ ID NO: 2026142
auauauccaccacauggga

SEQ ID NO: 2026144 - RNA, 19 nt, Artificial Sequence
  Description of Artificial Sequence: Synthetic oligonucleotide
  Sense strand starting at position 891 of SEQ ID NO: 1881203
gguggauauaugcagguaa

SEQ ID NO: 2026145 - RNA, 19 nt, Artificial Sequence
  Description of Artificial Sequence: Synthetic oligonucleotide
  Antisense strand to SEQ ID NO: 2026144
uuaccugcauauauccacc

SEQ ID NO: 2026146 - RNA, 19 nt, Artificial Sequence
  Description of Artificial Sequence: Synthetic oligonucleotide
  Sense strand starting at position 1010 of SEQ ID NO: 1881203
ugggcuguuauauaaggau

SEQ ID NO: 2026147 - RNA, 19 nt, Artificial Sequence
  Description of Artificial Sequence: Synthetic oligonucleotide
  Antisense strand to SEQ ID NO: 2026146
auccuuauauaacagccca

SEQ ID NO: 2026148 - RNA, 19 nt, Artificial Sequence
  Description of Artificial Sequence: Synthetic oligonucleotide
  Sense strand starting at position 1085 of SEQ ID NO: 1881203
gagcaacugcuugaaagua

SEQ ID NO: 2026149 - RNA, 19 nt, Artificial Sequence
  Description of Artificial Sequence: Synthetic oligonucleotide
  Antisense strand to SEQ ID NO: 2026148
uacuuucaagcaguugcuc

SEQ ID NO: 2026150 - RNA, 19 nt, Artificial Sequence
  Description of Artificial Sequence: Synthetic oligonucleotide
  Sense strand starting at position 1703 of SEQ ID NO: 1881203
ucguucuguggugcagauu

SEQ ID NO: 2026151 - RNA, 19 nt, Artificial Sequence
  Description of Artificial Sequence: Synthetic oligonucleotide
  Antisense strand to SEQ ID NO: 2026150
aaucugcaccacagaacga

SEQ ID NO: 2026152 - RNA, 19 nt, Artificial Sequence
  Description of Artificial Sequence: Synthetic oligonucleotide
  Sense strand starting at position 1734 of SEQ ID NO: 1881203
uuauaugcucaguaggaag

SEQ ID NO: 2026153 - RNA, 19 nt, Artificial Sequence
  Description of Artificial Sequence: Synthetic oligonucleotide
  Antisense strand to SEQ ID NO: 2026152
cuuccuacugagcauauaa

SEQ ID NO: 2026154 - RNA, 19 nt, Artificial Sequence
  Description of Artificial Sequence: Synthetic oligonucleotide
  Sense strand starting at position 1746 of SEQ ID NO: 1881203
uaggaaguacauugaguuu

SEQ ID NO: 2026155 - RNA, 19 nt, Artificial Sequence
  Description of Artificial Sequence: Synthetic oligonucleotide
  Antisense strand to SEQ ID NO: 2026154
aaacucaauguacuuccua

SEQ ID NO: 2026156 - RNA, 19 nt, Artificial Sequence
  Description of Artificial Sequence: Synthetic oligonucleotide
  Sense strand starting at position 1931 of SEQ ID NO: 1881203
ggcauaugguacucagaga

SEQ ID NO: 2026157 - RNA, 19 nt, Artificial Sequence
  Description of Artificial Sequence: Synthetic oligonucleotide
  Antisense strand to SEQ ID NO: 2026156
ucucugaguaccauaugcc

SEQ ID NO: 2026158 - RNA, 19 nt, Artificial Sequence
  Description of Artificial Sequence: Synthetic oligonucleotide
  Sense strand starting at position 1932 of SEQ ID NO: 1881203
gcauaugguacucagagac

SEQ ID NO: 2026159 - RNA, 19 nt, Artificial Sequence
  Description of Artificial Sequence: Synthetic oligonucleotide
  Antisense strand to SEQ ID NO: 2026158
gucucugaguaccauaugc

SEQ ID NO: 2026160 - RNA, 19 nt, Artificial Sequence
  Description of Artificial Sequence: Synthetic oligonucleotide
  Sense strand starting at position 2008 of SEQ ID NO: 1881203
uaggauggguccuuaaaca

SEQ ID NO: 2026161 - RNA, 19 nt, Artificial Sequence
  Description of Artificial Sequence: Synthetic oligonucleotide
  Antisense strand to SEQ ID NO: 2026160
uguuuaaggacccauccua

SEQ ID NO: 2026162 - RNA, 19 nt, Artificial Sequence
  Description of Artificial Sequence: Synthetic oligonucleotide
  Sense strand starting at position 2049 of SEQ ID NO: 1881203
auuauagugaggcagucaa

SEQ ID NO: 2026163 - RNA, 19 nt, Artificial Sequence
  Description of Artificial Sequence: Synthetic oligonucleotide
  Antisense strand to SEQ ID NO: 2026162
uugacugccucacuauaau

SEQ ID NO: 2026164 - RNA, 19 nt, Artificial Sequence
  Description of Artificial Sequence: Synthetic oligonucleotide
  Sense strand starting at position 2068 of SEQ ID NO: 1881203
gguccugacagguaaguga

SEQ ID NO: 2026165 - RNA, 19 nt, Artificial Sequence
  Description of Artificial Sequence: Synthetic oligonucleotide
  Antisense strand to SEQ ID NO: 2026164
ucacuuaccugucaggacc

SEQ ID NO: 2026166 - RNA, 19 nt, Artificial Sequence
  Description of Artificial Sequence: Synthetic oligonucleotide
  Sense strand starting at position 2227 of SEQ ID NO: 1881203
aaggaaauguguuuccuaa

SEQ ID NO: 2026167 - RNA, 19 nt, Artificial Sequence
  Description of Artificial Sequence: Synthetic oligonucleotide
  Antisense strand to SEQ ID NO: 2026166
uuaggaaacacauuuccuu

SEQ ID NO: 2026168 - RNA, 19 nt, Artificial Sequence
  Description of Artificial Sequence: Synthetic oligonucleotide
  Sense strand starting at position 2301 of SEQ ID NO: 1881203
ugucuagaacaguauggua

SEQ ID NO: 2026169 - RNA, 19 nt, Artificial Sequence
  Description of Artificial Sequence: Synthetic oligonucleotide
  Antisense strand to SEQ ID NO: 2026168
uaccauacuguucuagaca

SEQ ID NO: 2026170 - RNA, 19 nt, Artificial Sequence
  Description of Artificial Sequence: Synthetic oligonucleotide
  Sense strand starting at position 2303 of SEQ ID NO: 1881203
ucuagaacaguaugguaaa

SEQ ID NO: 2026171 - RNA, 19 nt, Artificial Sequence
  Description of Artificial Sequence: Synthetic oligonucleotide
  Antisense strand to SEQ ID NO: 2026170
uuuaccauacuguucuaga

SEQ ID NO: 2026172 - RNA, 19 nt, Artificial Sequence
  Description of Artificial Sequence: Synthetic oligonucleotide
  Sense strand starting at position 2375 of SEQ ID NO: 1881203
cccagaaaccuccaggcua

SEQ ID NO: 2026173 - RNA, 19 nt, Artificial Sequence
  Description of Artificial Sequence: Synthetic oligonucleotide
  Antisense strand to SEQ ID NO: 2026172
uagccuggagguuucuggg

SEQ ID NO: 2026174 - RNA, 19 nt, Artificial Sequence
  Description of Artificial Sequence: Synthetic oligonucleotide
  Sense strand starting at position 2662 of SEQ ID NO: 1881203
aaaggaaauuuacaagugu

SEQ ID NO: 2026175 - RNA, 19 nt, Artificial Sequence
  Description of Artificial Sequence: Synthetic oligonucleotide
  Antisense strand to SEQ ID NO: 2026174
acacuuguaaauuuccuuu

SEQ ID NO: 2026176 - RNA, 19 nt, Artificial Sequence
  Description of Artificial Sequence: Synthetic oligonucleotide
  Sense strand starting at position 2701 of SEQ ID NO: 1881203
gaaagauuacauuggucca

SEQ ID NO: 2026177 - RNA, 19 nt, Artificial Sequence
  Description of Artificial Sequence: Synthetic oligonucleotide
  Antisense strand to SEQ ID NO: 2026176
uggaccaauguaaucuuuc

SEQ ID NO: 2026178 - RNA, 19 nt, Artificial Sequence
  Description of Artificial Sequence: Synthetic oligonucleotide
  Sense strand starting at position 2704 of SEQ ID NO: 1881203
agauuacauugguccagga

SEQ ID NO: 2026179 - RNA, 19 nt, Artificial Sequence
  Description of Artificial Sequence: Synthetic oligonucleotide
  Antisense strand to SEQ ID NO: 2026178
uccuggaccaauguaaucu

SEQ ID NO: 2026180 - RNA, 19 nt, Artificial Sequence
  Description of Artificial Sequence: Synthetic oligonucleotide
  Sense strand starting at position 2784 of SEQ ID NO: 1881203
agaugagggauaugugcuu

SEQ ID NO: 2026181 - RNA, 19 nt, Artificial Sequence
  Description of Artificial Sequence: Synthetic oligonucleotide
  Antisense strand to SEQ ID NO: 2026180
aagcacauaucccucaucu

SEQ ID NO: 2026182 - RNA, 19 nt, Artificial Sequence
  Description of Artificial Sequence: Synthetic oligonucleotide
  Sense strand starting at position 2790 of SEQ ID NO: 1881203
gggauaugugcuuaaauug

SEQ ID NO: 2026183 - RNA, 19 nt, Artificial Sequence
  Description of Artificial Sequence: Synthetic oligonucleotide
  Antisense strand to SEQ ID NO: 2026182
caauuuaagcacauauccc

SEQ ID NO: 2026184 - RNA, 19 nt, Artificial Sequence
  Description of Artificial Sequence: Synthetic oligonucleotide
  Sense strand starting at position 3056 of SEQ ID NO: 1881203
uuuccagaccuuuggaauu

SEQ ID NO: 2026185 - RNA, 19 nt, Artificial Sequence
  Description of Artificial Sequence: Synthetic oligonucleotide
  Antisense strand to SEQ ID NO: 2026184
aauuccaaaggucuggaaa

SEQ ID NO: 2026186 - RNA, 19 nt, Artificial Sequence
  Description of Artificial Sequence: Synthetic oligonucleotide
  Sense strand starting at position 3092 of SEQ ID NO: 1881203
uguagcuaucucugaauuu

SEQ ID NO: 2026187 - RNA, 19 nt, Artificial Sequence
  Description of Artificial Sequence: Synthetic oligonucleotide
  Antisense strand to SEQ ID NO: 2026186
aaauucagagauagcuaca

SEQ ID NO: 2026188 - RNA, 19 nt, Artificial Sequence
  Description of Artificial Sequence: Synthetic oligonucleotide
  Sense strand starting at position 3136 of SEQ ID NO: 1881203
uuguuuguaggguaaacau

SEQ ID NO: 2026189 - RNA, 19 nt, Artificial Sequence
  Description of Artificial Sequence: Synthetic oligonucleotide
  Antisense strand to SEQ ID NO: 2026188
auguuuacccuacaaacaa

SEQ ID NO: 2026190 - RNA, 19 nt, Artificial Sequence
  Description of Artificial Sequence: Synthetic oligonucleotide
  Sense strand starting at position 3180 of SEQ ID NO: 1881203
cccuuagaaugaccaugua

SEQ ID NO: 2026191 - RNA, 19 nt, Artificial Sequence
  Description of Artificial Sequence: Synthetic oligonucleotide
  Antisense strand to SEQ ID NO: 2026190
uacauggucauucuaaggg

SEQ ID NO: 2026192 - RNA, 19 nt, Artificial Sequence
  Description of Artificial Sequence: Synthetic oligonucleotide
  Sense strand starting at position 3690 of SEQ ID NO: 1881203
aagugauauuuacagggau

SEQ ID NO: 2026193 - RNA, 19 nt, Artificial Sequence
  Description of Artificial Sequence: Synthetic oligonucleotide
  Antisense strand to SEQ ID NO: 2026192
aucccuguaaauaucacuu

SEQ ID NO: 2026194 - RNA, 19 nt, Artificial Sequence
  Description of Artificial Sequence: Synthetic oligonucleotide
  Sense strand starting at position 3753 of SEQ ID NO: 1881203
caacuuguaggugaguaau

SEQ ID NO: 2026195 - RNA, 19 nt, Artificial Sequence
  Description of Artificial Sequence: Synthetic oligonucleotide
  Antisense strand to SEQ ID NO: 2026194
auuacucaccuacaaguug

SEQ ID NO: 2026196 - RNA, 19 nt, Artificial Sequence
  Description of Artificial Sequence: Synthetic oligonucleotide
  Sense strand starting at position 3763 of SEQ ID NO: 1881203
gugaguaauuccuuagaua

SEQ ID NO: 2026197 - RNA, 19 nt, Artificial Sequence
  Description of Artificial Sequence: Synthetic oligonucleotide
  Antisense strand to SEQ ID NO: 2026196
uaucuaaggaauuacucac

SEQ ID NO: 2026198 - RNA, 19 nt, Artificial Sequence
  Description of Artificial Sequence: Synthetic oligonucleotide
  Sense strand starting at position 3786 of SEQ ID NO: 1881203
guuucuuaacuugggagga

SEQ ID NO: 2026199 - RNA, 19 nt, Artificial Sequence
  Description of Artificial Sequence: Synthetic oligonucleotide
  Antisense strand to SEQ ID NO: 2026198
uccucccaaguuaagaaac

SEQ ID NO: 2026200 - RNA, 19 nt, Artificial Sequence
  Description of Artificial Sequence: Synthetic oligonucleotide
  Sense strand starting at position 330 of SEQ ID NO: 1881204
auguauuaaggcggaaaua

SEQ ID NO: 2026201 - RNA, 19 nt, Artificial Sequence
  Description of Artificial Sequence: Synthetic oligonucleotide
  Antisense strand to SEQ ID NO: 2026200
uauuuccgccuuaauacau

SEQ ID NO: 2026202 - RNA, 19 nt, Artificial Sequence
  Description of Artificial Sequence: Synthetic oligonucleotide
  Sense strand starting at position 331 of SEQ ID NO: 1881204
uguauuaaggcggaaauau

SEQ ID NO: 2026203 - RNA, 19 nt, Artificial Sequence
  Description of Artificial Sequence: Synthetic oligonucleotide
  Antisense strand to SEQ ID NO: 2026202
auauuuccgccuuaauaca

SEQ ID NO: 2026204 - RNA, 19 nt, Artificial Sequence
  Description of Artificial Sequence: Synthetic oligonucleotide
  Sense strand starting at position 366 of SEQ ID NO: 1881204
ucaagacuguuccuagaau

SEQ ID NO: 2026205 - RNA, 19 nt, Artificial Sequence
  Description of Artificial Sequence: Synthetic oligonucleotide
  Antisense strand to SEQ ID NO: 2026204
auucuaggaacagucuuga

SEQ ID NO: 2026206 - RNA, 19 nt, Artificial Sequence
  Description of Artificial Sequence: Synthetic oligonucleotide
  Sense strand starting at position 490 of SEQ ID NO: 1881204
aggauacagucuuuaaguu

SEQ ID NO: 2026207 - RNA, 19 nt, Artificial Sequence
  Description of Artificial Sequence: Synthetic oligonucleotide
  Antisense strand to SEQ ID NO: 2026206
aacuuaaagacuguauccu

SEQ ID NO: 2026208 - RNA, 19 nt, Artificial Sequence
  Description of Artificial Sequence: Synthetic oligonucleotide
  Sense strand starting at position 491 of SEQ ID NO: 1881204
ggauacagucuuuaaguuu

SEQ ID NO: 2026209 - RNA, 19 nt, Artificial Sequence
  Description of Artificial Sequence: Synthetic oligonucleotide
  Antisense strand to SEQ ID NO: 2026208
aaacuuaaagacuguaucc

SEQ ID NO: 2026210 - RNA, 19 nt, Artificial Sequence
  Description of Artificial Sequence: Synthetic oligonucleotide
  Sense strand starting at position 497 of SEQ ID NO: 1881204
agucuuuaaguuugaggua

SEQ ID NO: 2026211 - RNA, 19 nt, Artificial Sequence
  Description of Artificial Sequence: Synthetic oligonucleotide
  Antisense strand to SEQ ID NO: 2026210
uaccucaaacuuaaagacu

SEQ ID NO: 2026212 - RNA, 19 nt, Artificial Sequence
  Description of Artificial Sequence: Synthetic oligonucleotide
  Sense strand starting at position 558 of SEQ ID NO: 1881204
guguuuaaacuacagcaaa

SEQ ID NO: 2026213 - RNA, 19 nt, Artificial Sequence
  Description of Artificial Sequence: Synthetic oligonucleotide
  Antisense strand to SEQ ID NO: 2026212
uuugcuguaguuuaaacac

SEQ ID NO: 2026214 - RNA, 19 nt, Artificial Sequence
  Description of Artificial Sequence: Synthetic oligonucleotide
  Sense strand starting at position 600 of SEQ ID NO: 1881204
auugcuaagcacugaaauu

SEQ ID NO: 2026215 - RNA, 19 nt, Artificial Sequence
  Description of Artificial Sequence: Synthetic oligonucleotide
  Antisense strand to SEQ ID NO: 2026214
aauuucagugcuuagcaau

SEQ ID NO: 2026216 - RNA, 19 nt, Artificial Sequence
  Description of Artificial Sequence: Synthetic oligonucleotide
  Sense strand starting at position 611 of SEQ ID NO: 1881204
cugaaauuuggcugccuuc

SEQ ID NO: 2026217 - RNA, 19 nt, Artificial Sequence
  Description of Artificial Sequence: Synthetic oligonucleotide
  Antisense strand to SEQ ID NO: 2026216
gaaggcagccaaauuucag

SEQ ID NO: 2026218 - RNA, 19 nt, Artificial Sequence
  Description of Artificial Sequence: Synthetic oligonucleotide
  Sense strand starting at position 697 of SEQ ID NO: 1881204
aagacaagucuaggugauu

SEQ ID NO: 2026219 - RNA, 19 nt, Artificial Sequence
  Description of Artificial Sequence: Synthetic oligonucleotide
  Antisense strand to SEQ ID NO: 2026218
aaucaccuagacuugucuu

SEQ ID NO: 2026220 - RNA, 19 nt, Artificial Sequence
  Description of Artificial Sequence: Synthetic oligonucleotide
  Sense strand starting at position 698 of SEQ ID NO: 1881204
agacaagucuaggugauuc

SEQ ID NO: 2026221 - RNA, 19 nt, Artificial Sequence
  Description of Artificial Sequence: Synthetic oligonucleotide
  Antisense strand to SEQ ID NO: 2026220
gaaucaccuagacuugucu

SEQ ID NO: 2026222 - RNA, 19 nt, Artificial Sequence
  Description of Artificial Sequence: Synthetic oligonucleotide
  Sense strand starting at position 706 of SEQ ID NO: 1881204
cuaggugauuccuuuaggu

SEQ ID NO: 2026223 - RNA, 19 nt, Artificial Sequence
  Description of Artificial Sequence: Synthetic oligonucleotide
  Antisense strand to SEQ ID NO: 2026222
accuaaaggaaucaccuag

SEQ ID NO: 2026224 - RNA, 19 nt, Artificial Sequence
  Description of Artificial Sequence: Synthetic oligonucleotide
  Sense strand starting at position 708 of SEQ ID NO: 1881204
aggugauuccuuuagguac

SEQ ID NO: 2026225 - RNA, 19 nt, Artificial Sequence
  Description of Artificial Sequence: Synthetic oligonucleotide
  Antisense strand to SEQ ID NO: 2026224
guaccuaaaggaaucaccu

SEQ ID NO: 2026226 - RNA, 19 nt, Artificial Sequence
  Description of Artificial Sequence: Synthetic oligonucleotide
  Sense strand starting at position 711 of SEQ ID NO: 1881204
ugauuccuuuagguacaua

SEQ ID NO: 2026227 - RNA, 19 nt, Artificial Sequence
  Description of Artificial Sequence: Synthetic oligonucleotide
  Antisense strand to SEQ ID NO: 2026226
uauguaccuaaaggaauca

SEQ ID NO: 2026228 - RNA, 19 nt, Artificial Sequence
  Description of Artificial Sequence: Synthetic oligonucleotide
  Sense strand starting at position 737 of SEQ ID NO: 1881204
ugaauccauguuggaaauu

SEQ ID NO: 2026229 - RNA, 19 nt, Artificial Sequence
  Description of Artificial Sequence: Synthetic oligonucleotide
  Antisense strand to SEQ ID NO: 2026228
aauuuccaacauggauuca

SEQ ID NO: 2026230 - RNA, 19 nt, Artificial Sequence
  Description of Artificial Sequence: Synthetic oligonucleotide
  Sense strand starting at position 845 of SEQ ID NO: 1881204
acuaaugugucaucaaaua

SEQ ID NO: 2026231 - RNA, 19 nt, Artificial Sequence
  Description of Artificial Sequence: Synthetic oligonucleotide
  Antisense strand to SEQ ID NO: 2026230
uauuugaugacacauuagu

SEQ ID NO: 2026232 - RNA, 19 nt, Artificial Sequence
  Description of Artificial Sequence: Synthetic oligonucleotide
  Sense strand starting at position 957 of SEQ ID NO: 1881204
gucagauuguaucuuaaau

SEQ ID NO: 2026233 - RNA, 19 nt, Artificial Sequence
  Description of Artificial Sequence: Synthetic oligonucleotide
  Antisense strand to SEQ ID NO: 2026232
auuuaagauacaaucugac

SEQ ID NO: 2026234 - RNA, 19 nt, Artificial Sequence
  Description of Artificial Sequence: Synthetic oligonucleotide
  Sense strand starting at position 1037 of SEQ ID NO: 1881204
auaaauguuugucuacaga

SEQ ID NO: 2026235 - RNA, 19 nt, Artificial Sequence
  Description of Artificial Sequence: Synthetic oligonucleotide
  Antisense strand to SEQ ID NO: 2026234
ucuguagacaaacauuuau

SEQ ID NO: 2026236 - RNA, 19 nt, Artificial Sequence
  Description of Artificial Sequence: Synthetic oligonucleotide
  Sense strand starting at position 1351 of SEQ ID NO: 1881204
cauucuauugagcaauggu

SEQ ID NO: 2026237 - RNA, 19 nt, Artificial Sequence
  Description of Artificial Sequence: Synthetic oligonucleotide
  Antisense strand to SEQ ID NO: 2026236
accauugcucaauagaaug

SEQ ID NO: 2026238 - RNA, 19 nt, Artificial Sequence
  Description of Artificial Sequence: Synthetic oligonucleotide
  Sense strand starting at position 1379 of SEQ ID NO: 1881204
aucuuuguuacugagugua

SEQ ID NO: 2026239 - RNA, 19 nt, Artificial Sequence
  Description of Artificial Sequence: Synthetic oligonucleotide
  Antisense strand to SEQ ID NO: 2026238
uacacucaguaacaaagau

SEQ ID NO: 2026240 - RNA, 19 nt, Artificial Sequence
  Description of Artificial Sequence: Synthetic oligonucleotide
  Sense strand starting at position 1384 of SEQ ID NO: 1881204
uguuacugaguguauuagu

SEQ ID NO: 2026241 - RNA, 19 nt, Artificial Sequence
  Description of Artificial Sequence: Synthetic oligonucleotide
  Antisense strand to SEQ ID NO: 2026240
acuaauacacucaguaaca

SEQ ID NO: 2026242 - RNA, 19 nt, Artificial Sequence
  Description of Artificial Sequence: Synthetic oligonucleotide
  Sense strand starting at position 1485 of SEQ ID NO: 1881204
gaaguuugagaucaacguu

SEQ ID NO: 2026243 - RNA, 19 nt, Artificial Sequence
  Description of Artificial Sequence: Synthetic oligonucleotide
  Antisense strand to SEQ ID NO: 2026242
aacguugaucucaaacuuc

SEQ ID NO: 2026244 - RNA, 19 nt, Artificial Sequence
  Description of Artificial Sequence: Synthetic oligonucleotide
  Sense strand starting at position 1488 of SEQ ID NO: 1881204
guuugagaucaacguuuag

SEQ ID NO: 2026245 - RNA, 19 nt, Artificial Sequence
  Description of Artificial Sequence: Synthetic oligonucleotide
  Antisense strand to SEQ ID NO: 2026244
cuaaacguugaucucaaac

SEQ ID NO: 2026246 - RNA, 19 nt, Artificial Sequence
  Description of Artificial Sequence: Synthetic oligonucleotide
  Sense strand starting at position 1538 of SEQ ID NO: 1881204
uugguuuguagauagcuau

SEQ ID NO: 2026247 - RNA, 19 nt, Artificial Sequence
  Description of Artificial Sequence: Synthetic oligonucleotide
  Antisense strand to SEQ ID NO: 2026246
auagcuaucuacaaaccaa

SEQ ID NO: 2026248 - RNA, 19 nt, Artificial Sequence
  Description of Artificial Sequence: Synthetic oligonucleotide
  Sense strand starting at position 2125 of SEQ ID NO: 1881204
auggauaccuuccugaaug

SEQ ID NO: 2026249 - RNA, 19 nt, Artificial Sequence
  Description of Artificial Sequence: Synthetic oligonucleotide
  Antisense strand to SEQ ID NO: 2026248
cauucaggaagguauccau

SEQ ID NO: 2026250 - RNA, 19 nt, Artificial Sequence
  Description of Artificial Sequence: Synthetic oligonucleotide
  Sense strand starting at position 2127 of SEQ ID NO: 1881204
ggauaccuuccugaauguu

SEQ ID NO: 2026251 - RNA, 19 nt, Artificial Sequence
  Description of Artificial Sequence: Synthetic oligonucleotide
  Antisense strand to SEQ ID NO: 2026250
aacauucaggaagguaucc

SEQ ID NO: 2026252 - RNA, 19 nt, Artificial Sequence
  Description of Artificial Sequence: Synthetic oligonucleotide
  Sense strand starting at position 2135 of SEQ ID NO: 1881204
uccugaauguugcuaaaug

SEQ ID NO: 2026253 - RNA, 19 nt, Artificial Sequence
  Description of Artificial Sequence: Synthetic oligonucleotide
  Antisense strand to SEQ ID NO: 2026252
cauuuagcaacauucagga

SEQ ID NO: 2026254 - RNA, 19 nt, Artificial Sequence
  Description of Artificial Sequence: Synthetic oligonucleotide
  Sense strand starting at position 2169 of SEQ ID NO: 1881204
aaauuaaagccuggugagu

SEQ ID NO: 2026255 - RNA, 19 nt, Artificial Sequence
  Description of Artificial Sequence: Synthetic oligonucleotide
  Antisense strand to SEQ ID NO: 2026254
acucaccaggcuuuaauuu

SEQ ID NO: 2026256 - RNA, 19 nt, Artificial Sequence
  Description of Artificial Sequence: Synthetic oligonucleotide
  Sense strand starting at position 2379 of SEQ ID NO: 1881204
aggaaagcaugcuuggaaa

SEQ ID NO: 2026257 - RNA, 19 nt, Artificial Sequence
  Description of Artificial Sequence: Synthetic oligonucleotide
  Antisense strand to SEQ ID NO: 2026256
uuuccaagcaugcuuuccu

SEQ ID NO: 2026258 - RNA, 19 nt, Artificial Sequence
  Description of Artificial Sequence: Synthetic oligonucleotide
  Sense strand starting at position 2381 of SEQ ID NO: 1881204
gaaagcaugcuuggaaaga

SEQ ID NO: 2026259 - RNA, 19 nt, Artificial Sequence
  Description of Artificial Sequence: Synthetic oligonucleotide
  Antisense strand to SEQ ID NO: 2026258
ucuuuccaagcaugcuuuc

SEQ ID NO: 2026260 - RNA, 19 nt, Artificial Sequence
  Description of Artificial Sequence: Synthetic oligonucleotide
  Sense strand starting at position 2543 of SEQ ID NO: 1881204
ucuaauggucccgauaguu

SEQ ID NO: 2026261 - RNA, 19 nt, Artificial Sequence
  Description of Artificial Sequence: Synthetic oligonucleotide
  Antisense strand to SEQ ID NO: 2026260
aacuaucgggaccauuaga

SEQ ID NO: 2026262 - RNA, 19 nt, Artificial Sequence
  Description of Artificial Sequence: Synthetic oligonucleotide
  Sense strand starting at position 2676 of SEQ ID NO: 1881204
ggucacaagggauguaguu

SEQ ID NO: 2026263 - RNA, 19 nt, Artificial Sequence
  Description of Artificial Sequence: Synthetic oligonucleotide
  Antisense strand to SEQ ID NO: 2026262
aacuacaucccuugugacc

SEQ ID NO: 2026264 - RNA, 19 nt, Artificial Sequence
  Description of Artificial Sequence: Synthetic oligonucleotide
  Sense strand starting at position 2777 of SEQ ID NO: 1881204
augaucuaucaucagguuu

SEQ ID NO: 2026265 - RNA, 19 nt, Artificial Sequence
  Description of Artificial Sequence: Synthetic oligonucleotide
  Antisense strand to SEQ ID NO: 2026264
aaaccugaugauagaucau

SEQ ID NO: 2026266 - RNA, 19 nt, Artificial Sequence
  Description of Artificial Sequence: Synthetic oligonucleotide
  Sense strand starting at position 2873 of SEQ ID NO: 1881204
uccagaaucuaggugaugu

SEQ ID NO: 2026267 - RNA, 19 nt, Artificial Sequence
  Description of Artificial Sequence: Synthetic oligonucleotide
  Antisense strand to SEQ ID NO: 2026266
acaucaccuagauucugga

SEQ ID NO: 2026268 - RNA, 19 nt, Artificial Sequence
  Description of Artificial Sequence: Synthetic oligonucleotide
  Sense strand starting at position 2874 of SEQ ID NO: 1881204
ccagaaucuaggugaugug

SEQ ID NO: 2026269 - RNA, 19 nt, Artificial Sequence
  Description of Artificial Sequence: Synthetic oligonucleotide
  Antisense strand to SEQ ID NO: 2026268
cacaucaccuagauucugg

SEQ ID NO: 2026270 - RNA, 19 nt, Artificial Sequence
  Description of Artificial Sequence: Synthetic oligonucleotide
  Sense strand starting at position 3655 of SEQ ID NO: 1881204
ucaguuauuccucacugcu

SEQ ID NO: 2026271 - RNA, 19 nt, Artificial Sequence
  Description of Artificial Sequence: Synthetic oligonucleotide
  Antisense strand to SEQ ID NO: 2026270
agcagugaggaauaacuga

SEQ ID NO: 2026272 - RNA, 19 nt, Artificial Sequence
  Description of Artificial Sequence: Synthetic oligonucleotide
  Sense strand starting at position 3822 of SEQ ID NO: 1881204
auaagauguugucuaggug

SEQ ID NO: 2026273 - RNA, 19 nt, Artificial Sequence
  Description of Artificial Sequence: Synthetic oligonucleotide
  Antisense strand to SEQ ID NO: 2026272
caccuagacaacaucuuau

SEQ ID NO: 2026274 - RNA, 19 nt, Artificial Sequence
  Description of Artificial Sequence: Synthetic oligonucleotide
  Sense strand starting at position 3823 of SEQ ID NO: 1881204
uaagauguugucuaggugu

SEQ ID NO: 2026275 - RNA, 19 nt, Artificial Sequence
  Description of Artificial Sequence: Synthetic oligonucleotide
  Antisense strand to SEQ ID NO: 2026274
acaccuagacaacaucuua

SEQ ID NO: 2026276 - RNA, 19 nt, Artificial Sequence
  Description of Artificial Sequence: Synthetic oligonucleotide
  Sense strand starting at position 3846 of SEQ ID NO: 1881204
ccaguccaggcuuaacauu

SEQ ID NO: 2026277 - RNA, 19 nt, Artificial Sequence
  Description of Artificial Sequence: Synthetic oligonucleotide
  Antisense strand to SEQ ID NO: 2026276
aauguuaagccuggacugg

SEQ ID NO: 2026278 - RNA, 19 nt, Artificial Sequence
  Description of Artificial Sequence: Synthetic oligonucleotide
  Sense strand starting at position 3965 of SEQ ID NO: 1881204
ggucauggccuguaauucu

SEQ ID NO: 2026279 - RNA, 19 nt, Artificial Sequence
  Description of Artificial Sequence: Synthetic oligonucleotide
  Antisense strand to SEQ ID NO: 2026278
agaauuacaggccaugacc

SEQ ID NO: 2026280 - RNA, 19 nt, Artificial Sequence
  Description of Artificial Sequence: Synthetic oligonucleotide
  Sense strand starting at position 134 of SEQ ID NO: 1881205
aucacagaguuguucccua

SEQ ID NO: 2026281 - RNA, 19 nt, Artificial Sequence
  Description of Artificial Sequence: Synthetic oligonucleotide
  Antisense strand to SEQ ID NO: 2026280
uagggaacaacucugugau

SEQ ID NO: 2026282 - RNA, 19 nt, Artificial Sequence
  Description of Artificial Sequence: Synthetic oligonucleotide
  Sense strand starting at position 139 of SEQ ID NO: 1881205
agaguuguucccuauggca

SEQ ID NO: 2026283 - RNA, 19 nt, Artificial Sequence
  Description of Artificial Sequence: Synthetic oligonucleotide
  Antisense strand to SEQ ID NO: 2026282
ugccauagggaacaacucu

SEQ ID NO: 2026284 - RNA, 19 nt, Artificial Sequence
  Description of Artificial Sequence: Synthetic oligonucleotide
  Sense strand starting at position 194 of SEQ ID NO: 1881205
aagguagcacucugaauga

SEQ ID NO: 2026285 - RNA, 19 nt, Artificial Sequence
  Description of Artificial Sequence: Synthetic oligonucleotide
  Antisense strand to SEQ ID NO: 2026284
ucauucagagugcuaccuu

SEQ ID NO: 2026286 - RNA, 19 nt, Artificial Sequence
  Description of Artificial Sequence: Synthetic oligonucleotide
  Sense strand starting at position 220 of SEQ ID NO: 1881205
ugaccauccuguuucuaga

SEQ ID NO: 2026287 - RNA, 19 nt, Artificial Sequence
  Description of Artificial Sequence: Synthetic oligonucleotide
  Antisense strand to SEQ ID NO: 2026286
ucuagaaacaggaugguca

SEQ ID NO: 2026288 - RNA, 19 nt, Artificial Sequence
  Description of Artificial Sequence: Synthetic oligonucleotide
  Sense strand starting at position 222 of SEQ ID NO: 1881205
accauccuguuucuagaua

SEQ ID NO: 2026289 - RNA, 19 nt, Artificial Sequence
  Description of Artificial Sequence: Synthetic oligonucleotide
  Antisense strand to SEQ ID NO: 2026288
uaucuagaaacaggauggu

SEQ ID NO: 2026290 - RNA, 19 nt, Artificial Sequence
  Description of Artificial Sequence: Synthetic oligonucleotide
  Sense strand starting at position 383 of SEQ ID NO: 1881205
gccuuccaagucugauuga

SEQ ID NO: 2026291 - RNA, 19 nt, Artificial Sequence
  Description of Artificial Sequence: Synthetic oligonucleotide
  Antisense strand to SEQ ID NO: 2026290
ucaaucagacuuggaaggc

SEQ ID NO: 2026292 - RNA, 19 nt, Artificial Sequence
  Description of Artificial Sequence: Synthetic oligonucleotide
  Sense strand starting at position 386 of SEQ ID NO: 1881205
uuccaagucugauugacag

SEQ ID NO: 2026293 - RNA, 19 nt, Artificial Sequence
  Description of Artificial Sequence: Synthetic oligonucleotide
  Antisense strand to SEQ ID NO: 2026292
cugucaaucagacuuggaa

SEQ ID NO: 2026294 - RNA, 19 nt, Artificial Sequence
  Description of Artificial Sequence: Synthetic oligonucleotide
  Sense strand starting at position 442 of SEQ ID NO: 1881205
gacagaaguccaugcucaa

SEQ ID NO: 2026295 - RNA, 19 nt, Artificial Sequence
  Description of Artificial Sequence: Synthetic oligonucleotide
  Antisense strand to SEQ ID NO: 2026294
uugagcauggacuucuguc

SEQ ID NO: 2026296 - RNA, 19 nt, Artificial Sequence
  Description of Artificial Sequence: Synthetic oligonucleotide
  Sense strand starting at position 473 of SEQ ID NO: 1881205
aucagauguuguuugaaau

SEQ ID NO: 2026297 - RNA, 19 nt, Artificial Sequence
  Description of Artificial Sequence: Synthetic oligonucleotide
  Antisense strand to SEQ ID NO: 2026296
auuucaaacaacaucugau

SEQ ID NO: 2026298 - RNA, 19 nt, Artificial Sequence
  Description of Artificial Sequence: Synthetic oligonucleotide
  Sense strand starting at position 474 of SEQ ID NO: 1881205
ucagauguuguuugaaauu

SEQ ID NO: 2026299 - RNA, 19 nt, Artificial Sequence
  Description of Artificial Sequence: Synthetic oligonucleotide
  Antisense strand to SEQ ID NO: 2026298
aauuucaaacaacaucuga

SEQ ID NO: 2026300 - RNA, 19 nt, Artificial Sequence
  Description of Artificial Sequence: Synthetic oligonucleotide
  Sense strand starting at position 510 of SEQ ID NO: 1881205
gcuggcacauucuuggaaa

SEQ ID NO: 2026301 - RNA, 19 nt, Artificial Sequence
  Description of Artificial Sequence: Synthetic oligonucleotide
  Antisense strand to SEQ ID NO: 2026300
uuuccaagaaugugccagc

SEQ ID NO: 2026302 - RNA, 19 nt, Artificial Sequence
  Description of Artificial Sequence: Synthetic oligonucleotide
  Sense strand starting at position 529 of SEQ ID NO: 1881205
agcucugaccuugggaaga

SEQ ID NO: 2026303 - RNA, 19 nt, Artificial Sequence
  Description of Artificial Sequence: Synthetic oligonucleotide
  Antisense strand to SEQ ID NO: 2026302
ucuucccaaggucagagcu

SEQ ID NO: 2026304 - RNA, 19 nt, Artificial Sequence
  Description of Artificial Sequence: Synthetic oligonucleotide
  Sense strand starting at position 623 of SEQ ID NO: 1881205
ugagaaugcacaugguaac

SEQ ID NO: 2026305 - RNA, 19 nt, Artificial Sequence
  Description of Artificial Sequence: Synthetic oligonucleotide
  Antisense strand to SEQ ID NO: 2026304
guuaccaugugcauucuca

SEQ ID NO: 2026306 - RNA, 19 nt, Artificial Sequence
  Description of Artificial Sequence: Synthetic oligonucleotide
  Sense strand starting at position 624 of SEQ ID NO: 1881205
gagaaugcacaugguaaca

SEQ ID NO: 2026307 - RNA, 19 nt, Artificial Sequence
  Description of Artificial Sequence: Synthetic oligonucleotide
  Antisense strand to SEQ ID NO: 2026306
uguuaccaugugcauucuc

SEQ ID NO: 2026308 - RNA, 19 nt, Artificial Sequence
  Description of Artificial Sequence: Synthetic oligonucleotide
  Sense strand starting at position 755 of SEQ ID NO: 1881205
agauaaugguguuugcuac

SEQ ID NO: 2026309 - RNA, 19 nt, Artificial Sequence
  Description of Artificial Sequence: Synthetic oligonucleotide
  Antisense strand to SEQ ID NO: 2026308
guagcaaacaccauuaucu

SEQ ID NO: 2026310 - RNA, 19 nt, Artificial Sequence
  Description of Artificial Sequence: Synthetic oligonucleotide
  Sense strand starting at position 761 of SEQ ID NO: 1881205
ugguguuugcuacaacucu

SEQ ID NO: 2026311 - RNA, 19 nt, Artificial Sequence
  Description of Artificial Sequence: Synthetic oligonucleotide
  Antisense strand to SEQ ID NO: 2026310
agaguuguagcaaacacca

SEQ ID NO: 2026312 - RNA, 19 nt, Artificial Sequence
  Description of Artificial Sequence: Synthetic oligonucleotide
  Sense strand starting at position 923 of SEQ ID NO: 1881205
ugaagaucaccagggcuuu

SEQ ID NO: 2026313 - RNA, 19 nt, Artificial Sequence
  Description of Artificial Sequence: Synthetic oligonucleotide
  Antisense strand to SEQ ID NO: 2026312
aaagcccuggugaucuuca

SEQ ID NO: 2026314 - RNA, 19 nt, Artificial Sequence
  Description of Artificial Sequence: Synthetic oligonucleotide
  Sense strand starting at position 924 of SEQ ID NO: 1881205
gaagaucaccagggcuuua

SEQ ID NO: 2026315 - RNA, 19 nt, Artificial Sequence
  Description of Artificial Sequence: Synthetic oligonucleotide
  Antisense strand to SEQ ID NO: 2026314
uaaagcccuggugaucuuc

SEQ ID NO: 2026316 - RNA, 19 nt, Artificial Sequence
  Description of Artificial Sequence: Synthetic oligonucleotide
  Sense strand starting at position 936 of SEQ ID NO: 1881205
ggcuuuauuuaguuugguu

SEQ ID NO: 2026317 - RNA, 19 nt, Artificial Sequence
  Description of Artificial Sequence: Synthetic oligonucleotide
  Antisense strand to SEQ ID NO: 2026316
aaccaaacuaaauaaagcc

SEQ ID NO: 2026318 - RNA, 19 nt, Artificial Sequence
  Description of Artificial Sequence: Synthetic oligonucleotide
  Sense strand starting at position 948 of SEQ ID NO: 1881205
uuugguucccauuaucauu

SEQ ID NO: 2026319 - RNA, 19 nt, Artificial Sequence
  Description of Artificial Sequence: Synthetic oligonucleotide
  Antisense strand to SEQ ID NO: 2026318
aaugauaaugggaaccaaa

SEQ ID NO: 2026320 - RNA, 19 nt, Artificial Sequence
  Description of Artificial Sequence: Synthetic oligonucleotide
  Sense strand starting at position 954 of SEQ ID NO: 1881205
ucccauuaucauuauguga

SEQ ID NO: 2026321 - RNA, 19 nt, Artificial Sequence
  Description of Artificial Sequence: Synthetic oligonucleotide
  Antisense strand to SEQ ID NO: 2026320
ucacauaaugauaauggga

SEQ ID NO: 2026322 - RNA, 19 nt, Artificial Sequence
  Description of Artificial Sequence: Synthetic oligonucleotide
  Sense strand starting at position 974 of SEQ ID NO: 1881205
gcauguuaauaacuggacu

SEQ ID NO: 2026323 - RNA, 19 nt, Artificial Sequence
  Description of Artificial Sequence: Synthetic oligonucleotide
  Antisense strand to SEQ ID NO: 2026322
aguccaguuauuaacaugc

SEQ ID NO: 2026324 - RNA, 19 nt, Artificial Sequence
  Description of Artificial Sequence: Synthetic oligonucleotide
  Sense strand starting at position 1121 of SEQ ID NO: 1881205
aucuacucucauuagaguu

SEQ ID NO: 2026325 - RNA, 19 nt, Artificial Sequence
  Description of Artificial Sequence: Synthetic oligonucleotide
  Antisense strand to SEQ ID NO: 2026324
aacucuaaugagaguagau

SEQ ID NO: 2026326 - RNA, 19 nt, Artificial Sequence
  Description of Artificial Sequence: Synthetic oligonucleotide
  Sense strand starting at position 1184 of SEQ ID NO: 1881205
ggaucacaugggugucaca

SEQ ID NO: 2026327 - RNA, 19 nt, Artificial Sequence
  Description of Artificial Sequence: Synthetic oligonucleotide
  Antisense strand to SEQ ID NO: 2026326
ugugacacccaugugaucc

SEQ ID NO: 2026328 - RNA, 19 nt, Artificial Sequence
  Description of Artificial Sequence: Synthetic oligonucleotide
  Sense strand starting at position 1217 of SEQ ID NO: 1881205
gggagcucagccuaauaag

SEQ ID NO: 2026329 - RNA, 19 nt, Artificial Sequence
  Description of Artificial Sequence: Synthetic oligonucleotide
  Antisense strand to SEQ ID NO: 2026328
cuuauuaggcugagcuccc

SEQ ID NO: 2026330 - RNA, 19 nt, Artificial Sequence
  Description of Artificial Sequence: Synthetic oligonucleotide
  Sense strand starting at position 1663 of SEQ ID NO: 1881205
ugugcuuuacaguaauuac

SEQ ID NO: 2026331 - RNA, 19 nt, Artificial Sequence
  Description of Artificial Sequence: Synthetic oligonucleotide
  Antisense strand to SEQ ID NO: 2026330
guaauuacuguaaagcaca

SEQ ID NO: 2026332 - RNA, 19 nt, Artificial Sequence
  Description of Artificial Sequence: Synthetic oligonucleotide
  Sense strand starting at position 1799 of SEQ ID NO: 1881205
gagggauaaucagaacuac

SEQ ID NO: 2026333 - RNA, 19 nt, Artificial Sequence
  Description of Artificial Sequence: Synthetic oligonucleotide
  Antisense strand to SEQ ID NO: 2026332
guaguucugauuaucccuc

SEQ ID NO: 2026334 - RNA, 19 nt, Artificial Sequence
  Description of Artificial Sequence: Synthetic oligonucleotide
  Sense strand starting at position 1921 of SEQ ID NO: 1881205
ccggguuaucuacaaggga

SEQ ID NO: 2026335 - RNA, 19 nt, Artificial Sequence
  Description of Artificial Sequence: Synthetic oligonucleotide
  Antisense strand to SEQ ID NO: 2026334
ucccuuguagauaacccgg

SEQ ID NO: 2026336 - RNA, 19 nt, Artificial Sequence
  Description of Artificial Sequence: Synthetic oligonucleotide
  Sense strand starting at position 1972 of SEQ ID NO: 1881205
auaaucuagugaucggguu

SEQ ID NO: 2026337 - RNA, 19 nt, Artificial Sequence
  Description of Artificial Sequence: Synthetic oligonucleotide
  Antisense strand to SEQ ID NO: 2026336
aacccgaucacuagauuau

SEQ ID NO: 2026338 - RNA, 19 nt, Artificial Sequence
  Description of Artificial Sequence: Synthetic oligonucleotide
  Sense strand starting at position 1973 of SEQ ID NO: 1881205
uaaucuagugaucggguua

SEQ ID NO: 2026339 - RNA, 19 nt, Artificial Sequence
  Description of Artificial Sequence: Synthetic oligonucleotide
  Antisense strand to SEQ ID NO: 2026338
uaacccgaucacuagauua

SEQ ID NO: 2026340 - RNA, 19 nt, Artificial Sequence
  Description of Artificial Sequence: Synthetic oligonucleotide
  Sense strand starting at position 2077 of SEQ ID NO: 1881205
accugaaguuacuccauga

SEQ ID NO: 2026341 - RNA, 19 nt, Artificial Sequence
  Description of Artificial Sequence: Synthetic oligonucleotide
  Antisense strand to SEQ ID NO: 2026340
ucauggaguaacuucaggu

SEQ ID NO: 2026342 - RNA, 19 nt, Artificial Sequence
  Description of Artificial Sequence: Synthetic oligonucleotide
  Sense strand starting at position 2246 of SEQ ID NO: 1881205
ccuaaauuauuggcauagu

SEQ ID NO: 2026343 - RNA, 19 nt, Artificial Sequence
  Description of Artificial Sequence: Synthetic oligonucleotide
  Antisense strand to SEQ ID NO: 2026342
acuaugccaauaauuuagg

SEQ ID NO: 2026344 - RNA, 19 nt, Artificial Sequence
  Description of Artificial Sequence: Synthetic oligonucleotide
  Sense strand starting at position 2264 of SEQ ID NO: 1881205
ucauuagcccuuuauagga

SEQ ID NO: 2026345 - RNA, 19 nt, Artificial Sequence
  Description of Artificial Sequence: Synthetic oligonucleotide
  Antisense strand to SEQ ID NO: 2026344
uccuauaaagggcuaauga

SEQ ID NO: 2026346 - RNA, 19 nt, Artificial Sequence
  Description of Artificial Sequence: Synthetic oligonucleotide
  Sense strand starting at position 2339 of SEQ ID NO: 1881205
uguccugugcacuacagaa

SEQ ID NO: 2026347 - RNA, 19 nt, Artificial Sequence
  Description of Artificial Sequence: Synthetic oligonucleotide
  Antisense strand to SEQ ID NO: 2026346
uucuguagugcacaggaca

SEQ ID NO: 2026348 - RNA, 19 nt, Artificial Sequence
  Description of Artificial Sequence: Synthetic oligonucleotide
  Sense strand starting at position 2352 of SEQ ID NO: 1881205
acagaauguuuaguagcau

SEQ ID NO: 2026349 - RNA, 19 nt, Artificial Sequence
  Description of Artificial Sequence: Synthetic oligonucleotide
  Antisense strand to SEQ ID NO: 2026348
augcuacuaaacauucugu

SEQ ID NO: 2026350 - RNA, 19 nt, Artificial Sequence
  Description of Artificial Sequence: Synthetic oligonucleotide
  Sense strand starting at position 2374 of SEQ ID NO: 1881205
uggccucugcccuauacau

SEQ ID NO: 2026351 - RNA, 19 nt, Artificial Sequence
  Description of Artificial Sequence: Synthetic oligonucleotide
  Antisense strand to SEQ ID NO: 2026350
auguauagggcagaggcca

SEQ ID NO: 2026352 - RNA, 19 nt, Artificial Sequence
  Description of Artificial Sequence: Synthetic oligonucleotide
  Sense strand starting at position 3186 of SEQ ID NO: 1881205
auagaaugagugcagaguu

SEQ ID NO: 2026353 - RNA, 19 nt, Artificial Sequence
  Description of Artificial Sequence: Synthetic oligonucleotide
  Antisense strand to SEQ ID NO: 2026352
aacucugcacucauucuau

SEQ ID NO: 2026354 - RNA, 19 nt, Artificial Sequence
  Description of Artificial Sequence: Synthetic oligonucleotide
  Sense strand starting at position 3373 of SEQ ID NO: 1881205
ggccuaauuccacaaagca

SEQ ID NO: 2026355 - RNA, 19 nt, Artificial Sequence
  Description of Artificial Sequence: Synthetic oligonucleotide
  Antisense strand to SEQ ID NO: 2026354
ugcuuuguggaauuaggcc

SEQ ID NO: 2026356 - RNA, 19 nt, Artificial Sequence
  Description of Artificial Sequence: Synthetic oligonucleotide
  Sense strand starting at position 3706 of SEQ ID NO: 1881205
gcaccuagauaagauuuaa

SEQ ID NO: 2026357 - RNA, 19 nt, Artificial Sequence
  Description of Artificial Sequence: Synthetic oligonucleotide
  Antisense strand to SEQ ID NO: 2026356
uuaaaucuuaucuaggugc

SEQ ID NO: 2026358 - RNA, 19 nt, Artificial Sequence
  Description of Artificial Sequence: Synthetic oligonucleotide
  Sense strand starting at position 3981 of SEQ ID NO: 1881205
auuuaagagucuucucgug

SEQ ID NO: 2026359 - RNA, 19 nt, Artificial Sequence
  Description of Artificial Sequence: Synthetic oligonucleotide
  Antisense strand to SEQ ID NO: 2026358
cacgagaagacucuuaaau

SEQ ID NO: 2026360 - RNA, 19 nt, Artificial Sequence
  Description of Artificial Sequence: Synthetic oligonucleotide
  Sense strand starting at position 206 of SEQ ID NO: 1881206
gccagaaagucucgggaac

SEQ ID NO: 2026361 - RNA, 19 nt, Artificial Sequence
  Description of Artificial Sequence: Synthetic oligonucleotide
  Antisense strand to SEQ ID NO: 2026360
guucccgagacuuucuggc

SEQ ID NO: 2026362 - RNA, 19 nt, Artificial Sequence
  Description of Artificial Sequence: Synthetic oligonucleotide
  Sense strand starting at position 559 of SEQ ID NO: 1881206
uaggguucuuucgcuguga

SEQ ID NO: 2026363 - RNA, 19 nt, Artificial Sequence
  Description of Artificial Sequence: Synthetic oligonucleotide
  Antisense strand to SEQ ID NO: 2026362
ucacagcgaaagaacccua

SEQ ID NO: 2026364 - RNA, 19 nt, Artificial Sequence
  Description of Artificial Sequence: Synthetic oligonucleotide
  Sense strand starting at position 563 of SEQ ID NO: 1881206
guucuuucgcugugaccca

SEQ ID NO: 2026365 - RNA, 19 nt, Artificial Sequence
  Description of Artificial Sequence: Synthetic oligonucleotide
  Antisense strand to SEQ ID NO: 2026364
ugggucacagcgaaagaac

SEQ ID NO: 2026366 - RNA, 19 nt, Artificial Sequence
  Description of Artificial Sequence: Synthetic oligonucleotide
  Sense strand starting at position 636 of SEQ ID NO: 1881206
cgucucuucucaucgaagu

SEQ ID NO: 2026367 - RNA, 19 nt, Artificial Sequence
  Description of Artificial Sequence: Synthetic oligonucleotide
  Antisense strand to SEQ ID NO: 2026366
acuucgaugagaagagacg

SEQ ID NO: 2026368 - RNA, 19 nt, Artificial Sequence
  Description of Artificial Sequence: Synthetic oligonucleotide
  Sense strand starting at position 647 of SEQ ID NO: 1881206
aucgaagucucacauguuu

SEQ ID NO: 2026369 - RNA, 19 nt, Artificial Sequence
  Description of Artificial Sequence: Synthetic oligonucleotide
  Antisense strand to SEQ ID NO: 2026368
aaacaugugagacuucgau

SEQ ID NO: 2026370 - RNA, 19 nt, Artificial Sequence
  Description of Artificial Sequence: Synthetic oligonucleotide
  Sense strand starting at position 649 of SEQ ID NO: 1881206
cgaagucucacauguuugu

SEQ ID NO: 2026371 - RNA, 19 nt, Artificial Sequence
  Description of Artificial Sequence: Synthetic oligonucleotide
  Antisense strand to SEQ ID NO: 2026370
acaaacaugugagacuucg

SEQ ID NO: 2026372 - RNA, 19 nt, Artificial Sequence
  Description of Artificial Sequence: Synthetic oligonucleotide
  Sense strand starting at position 701 of SEQ ID NO: 1881206
ugaugaauauucgucacug

SEQ ID NO: 2026373 - RNA, 19 nt, Artificial Sequence
  Description of Artificial Sequence: Synthetic oligonucleotide
  Antisense strand to SEQ ID NO: 2026372
cagugacgaauauucauca

SEQ ID NO: 2026374 - RNA, 19 nt, Artificial Sequence
  Description of Artificial Sequence: Synthetic oligonucleotide
  Sense strand starting at position 702 of SEQ ID NO: 1881206
gaugaauauucgucacugg

SEQ ID NO: 2026375 - RNA, 19 nt, Artificial Sequence
  Description of Artificial Sequence: Synthetic oligonucleotide
  Antisense strand to SEQ ID NO: 2026374
ccagugacgaauauucauc

SEQ ID NO: 2026376 - RNA, 19 nt, Artificial Sequence
  Description of Artificial Sequence: Synthetic oligonucleotide
  Sense strand starting at position 703 of SEQ ID NO: 1881206
augaauauucgucacugga

SEQ ID NO: 2026377 - RNA, 19 nt, Artificial Sequence
  Description of Artificial Sequence: Synthetic oligonucleotide
  Antisense strand to SEQ ID NO: 2026376
uccagugacgaauauucau

SEQ ID NO: 2026378 - RNA, 19 nt, Artificial Sequence
  Description of Artificial Sequence: Synthetic oligonucleotide
  Sense strand starting at position 705 of SEQ ID NO: 1881206
gaauauucgucacuggaau

SEQ ID NO: 2026379 - RNA, 19 nt, Artificial Sequence
  Description of Artificial Sequence: Synthetic oligonucleotide
  Antisense strand to SEQ ID NO: 2026378
auuccagugacgaauauuc

SEQ ID NO: 2026380 - RNA, 19 nt, Artificial Sequence
  Description of Artificial Sequence: Synthetic oligonucleotide
  Sense strand starting at position 706 of SEQ ID NO: 1881206
aauauucgucacuggaaua

SEQ ID NO: 2026381 - RNA, 19 nt, Artificial Sequence
  Description of Artificial Sequence: Synthetic oligonucleotide
  Antisense strand to SEQ ID NO: 2026380
uauuccagugacgaauauu

SEQ ID NO: 2026382 - RNA, 19 nt, Artificial Sequence
  Description of Artificial Sequence: Synthetic oligonucleotide
  Sense strand starting at position 801 of SEQ ID NO: 1881206
ucagguuauuugcaagcau

SEQ ID NO: 2026383 - RNA, 19 nt, Artificial Sequence
  Description of Artificial Sequence: Synthetic oligonucleotide
  Antisense strand to SEQ ID NO: 2026382
augcuugcaaauaaccuga

SEQ ID NO: 2026384 - RNA, 19 nt, Artificial Sequence
  Description of Artificial Sequence: Synthetic oligonucleotide
  Sense strand starting at position 822 of SEQ ID NO: 1881206
ucucguuugagauaugggu

SEQ ID NO: 2026385 - RNA, 19 nt, Artificial Sequence
  Description of Artificial Sequence: Synthetic oligonucleotide
  Antisense strand to SEQ ID NO: 2026384
acccauaucucaaacgaga

SEQ ID NO: 2026386 - RNA, 19 nt, Artificial Sequence
  Description of Artificial Sequence: Synthetic oligonucleotide
  Sense strand starting at position 824 of SEQ ID NO: 1881206
ucguuugagauaugggugu

SEQ ID NO: 2026387 - RNA, 19 nt, Artificial Sequence
  Description of Artificial Sequence: Synthetic oligonucleotide
  Antisense strand to SEQ ID NO: 2026386
acacccauaucucaaacga

SEQ ID NO: 2026388 - RNA, 19 nt, Artificial Sequence
  Description of Artificial Sequence: Synthetic oligonucleotide
  Sense strand starting at position 826 of SEQ ID NO: 1881206
guuugagauauggguguuu

SEQ ID NO: 2026389 - RNA, 19 nt, Artificial Sequence
  Description of Artificial Sequence: Synthetic oligonucleotide
  Antisense strand to SEQ ID NO: 2026388
aaacacccauaucucaaac

SEQ ID NO: 2026390 - RNA, 19 nt, Artificial Sequence
  Description of Artificial Sequence: Synthetic oligonucleotide
  Sense strand starting at position 1139 of SEQ ID NO: 1881206
gguggucuuuaugcccaau

SEQ ID NO: 2026391 - RNA, 19 nt, Artificial Sequence
  Description of Artificial Sequence: Synthetic oligonucleotide
  Antisense strand to SEQ ID NO: 2026390
auugggcauaaagaccacc

SEQ ID NO: 2026392 - RNA, 19 nt, Artificial Sequence
  Description of Artificial Sequence: Synthetic oligonucleotide
  Sense strand starting at position 1141 of SEQ ID NO: 1881206
uggucuuuaugcccaauaa

SEQ ID NO: 2026393 - RNA, 19 nt, Artificial Sequence
  Description of Artificial Sequence: Synthetic oligonucleotide
  Antisense strand to SEQ ID NO: 2026392
uuauugggcauaaagacca

SEQ ID NO: 2026394 - RNA, 19 nt, Artificial Sequence
  Description of Artificial Sequence: Synthetic oligonucleotide
  Sense strand starting at position 1142 of SEQ ID NO: 1881206
ggucuuuaugcccaauaaa

SEQ ID NO: 2026395 - RNA, 19 nt, Artificial Sequence
  Description of Artificial Sequence: Synthetic oligonucleotide
  Antisense strand to SEQ ID NO: 2026394
uuuauugggcauaaagacc

SEQ ID NO: 2026396 - RNA, 19 nt, Artificial Sequence
  Description of Artificial Sequence: Synthetic oligonucleotide
  Sense strand starting at position 1190 of SEQ ID NO: 1881206
uucucuugauaccugagaa

SEQ ID NO: 2026397 - RNA, 19 nt, Artificial Sequence
  Description of Artificial Sequence: Synthetic oligonucleotide
  Antisense strand to SEQ ID NO: 2026396
uucucagguaucaagagaa

SEQ ID NO: 2026398 - RNA, 19 nt, Artificial Sequence
  Description of Artificial Sequence: Synthetic oligonucleotide
  Sense strand starting at position 1194 of SEQ ID NO: 1881206
cuugauaccugagaaauca

SEQ ID NO: 2026399 - RNA, 19 nt, Artificial Sequence
  Description of Artificial Sequence: Synthetic oligonucleotide
  Antisense strand to SEQ ID NO: 2026398
ugauuucucagguaucaag

SEQ ID NO: 2026400 - RNA, 19 nt, Artificial Sequence
  Description of Artificial Sequence: Synthetic oligonucleotide
  Sense strand starting at position 1559 of SEQ ID NO: 1881206
augugacuccuuuaaccug

SEQ ID NO: 2026401 - RNA, 19 nt, Artificial Sequence
  Description of Artificial Sequence: Synthetic oligonucleotide
  Antisense strand to SEQ ID NO: 2026400
cagguuaaaggagucacau

SEQ ID NO: 2026402 - RNA, 19 nt, Artificial Sequence
  Description of Artificial Sequence: Synthetic oligonucleotide
  Sense strand starting at position 1574 of SEQ ID NO: 1881206
ccuggugugcuuuaacaac

SEQ ID NO: 2026403 - RNA, 19 nt, Artificial Sequence
  Description of Artificial Sequence: Synthetic oligonucleotide
  Antisense strand to SEQ ID NO: 2026402
guuguuaaagcacaccagg

SEQ ID NO: 2026404 - RNA, 19 nt, Artificial Sequence
  Description of Artificial Sequence: Synthetic oligonucleotide
  Sense strand starting at position 1638 of SEQ ID NO: 1881206
accaaauaaugcgaccaua

SEQ ID NO: 2026405 - RNA, 19 nt, Artificial Sequence
  Description of Artificial Sequence: Synthetic oligonucleotide
  Antisense strand to SEQ ID NO: 2026404
uauggucgcauuauuuggu

SEQ ID NO: 2026406 - RNA, 19 nt, Artificial Sequence
  Description of Artificial Sequence: Synthetic oligonucleotide
  Sense strand starting at position 1677 of SEQ ID NO: 1881206
ggaguaucuugcuccucua

SEQ ID NO: 2026407 - RNA, 19 nt, Artificial Sequence
  Description of Artificial Sequence: Synthetic oligonucleotide
  Antisense strand to SEQ ID NO: 2026406
uagaggagcaagauacucc

SEQ ID NO: 2026408 - RNA, 19 nt, Artificial Sequence
  Description of Artificial Sequence: Synthetic oligonucleotide
  Sense strand starting at position 1680 of SEQ ID NO: 1881206
guaucuugcuccucuacca

SEQ ID NO: 2026409 - RNA, 19 nt, Artificial Sequence
  Description of Artificial Sequence: Synthetic oligonucleotide
  Antisense strand to SEQ ID NO: 2026408
ugguagaggagcaagauac

SEQ ID NO: 2026410 - RNA, 19 nt, Artificial Sequence
  Description of Artificial Sequence: Synthetic oligonucleotide
  Sense strand starting at position 1795 of SEQ ID NO: 1881206
uagagaagcuaacucagua

SEQ ID NO: 2026411 - RNA, 19 nt, Artificial Sequence
  Description of Artificial Sequence: Synthetic oligonucleotide
  Antisense strand to SEQ ID NO: 2026410
uacugaguuagcuucucua

SEQ ID NO: 2026412 - RNA, 19 nt, Artificial Sequence
  Description of Artificial Sequence: Synthetic oligonucleotide
  Sense strand starting at position 1799 of SEQ ID NO: 1881206
gaagcuaacucaguagaga

SEQ ID NO: 2026413 - RNA, 19 nt, Artificial Sequence
  Description of Artificial Sequence: Synthetic oligonucleotide
  Antisense strand to SEQ ID NO: 2026412
ucucuacugaguuagcuuc

SEQ ID NO: 2026414 - RNA, 19 nt, Artificial Sequence
  Description of Artificial Sequence: Synthetic oligonucleotide
  Sense strand starting at position 1972 of SEQ ID NO: 1881206
gagugaucgugucauucca

SEQ ID NO: 2026415 - RNA, 19 nt, Artificial Sequence
  Description of Artificial Sequence: Synthetic oligonucleotide
  Antisense strand to SEQ ID NO: 2026414
uggaaugacacgaucacuc

SEQ ID NO: 2026416 - RNA, 19 nt, Artificial Sequence
  Description of Artificial Sequence: Synthetic oligonucleotide
  Sense strand starting at position 1974 of SEQ ID NO: 1881206
gugaucgugucauuccaaa

SEQ ID NO: 2026417 - RNA, 19 nt, Artificial Sequence
  Description of Artificial Sequence: Synthetic oligonucleotide
  Antisense strand to SEQ ID NO: 2026416
uuuggaaugacacgaucac

SEQ ID NO: 2026418 - RNA, 19 nt, Artificial Sequence
  Description of Artificial Sequence: Synthetic oligonucleotide
  Sense strand starting at position 2010 of SEQ ID NO: 1881206
ggugcaugaccuggagaca

SEQ ID NO: 2026419 - RNA, 19 nt, Artificial Sequence
  Description of Artificial Sequence: Synthetic oligonucleotide
  Antisense strand to SEQ ID NO: 2026418
ugucuccaggucaugcacc

SEQ ID NO: 2026420 - RNA, 19 nt, Artificial Sequence
  Description of Artificial Sequence: Synthetic oligonucleotide
  Sense strand starting at position 2118 of SEQ ID NO: 1881206
aaguaagagggcuaucuuu

SEQ ID NO: 2026421 - RNA, 19 nt, Artificial Sequence
  Description of Artificial Sequence: Synthetic oligonucleotide
  Antisense strand to SEQ ID NO: 2026420
aaagauagcccucuuacuu

SEQ ID NO: 2026422 - RNA, 19 nt, Artificial Sequence
  Description of Artificial Sequence: Synthetic oligonucleotide
  Sense strand starting at position 2126 of SEQ ID NO: 1881206
gggcuaucuuuagcgagau

SEQ ID NO: 2026423 - RNA, 19 nt, Artificial Sequence
  Description of Artificial Sequence: Synthetic oligonucleotide
  Antisense strand to SEQ ID NO: 2026422
aucucgcuaaagauagccc

SEQ ID NO: 2026424 - RNA, 19 nt, Artificial Sequence
  Description of Artificial Sequence: Synthetic oligonucleotide
  Sense strand starting at position 2165 of SEQ ID NO: 1881206
gggagucacuaccauugca

SEQ ID NO: 2026425 - RNA, 19 nt, Artificial Sequence
  Description of Artificial Sequence: Synthetic oligonucleotide
  Antisense strand to SEQ ID NO: 2026424
ugcaaugguagugacuccc

SEQ ID NO: 2026426 - RNA, 19 nt, Artificial Sequence
  Description of Artificial Sequence: Synthetic oligonucleotide
  Sense strand starting at position 2321 of SEQ ID NO: 1881206
caagcagcucaguaaagua

SEQ ID NO: 2026427 - RNA, 19 nt, Artificial Sequence
  Description of Artificial Sequence: Synthetic oligonucleotide
  Antisense strand to SEQ ID NO: 2026426
uacuuuacugagcugcuug

SEQ ID NO: 2026428 - RNA, 19 nt, Artificial Sequence
  Description of Artificial Sequence: Synthetic oligonucleotide
  Sense strand starting at position 2417 of SEQ ID NO: 1881206
gcuggaaugcucuggagac

SEQ ID NO: 2026429 - RNA, 19 nt, Artificial Sequence
  Description of Artificial Sequence: Synthetic oligonucleotide
  Antisense strand to SEQ ID NO: 2026428
gucuccagagcauuccagc

SEQ ID NO: 2026430 - RNA, 19 nt, Artificial Sequence
  Description of Artificial Sequence: Synthetic oligonucleotide
  Sense strand starting at position 2418 of SEQ ID NO: 1881206
cuggaaugcucuggagaca

SEQ ID NO: 2026431 - RNA, 19 nt, Artificial Sequence
  Description of Artificial Sequence: Synthetic oligonucleotide
  Antisense strand to SEQ ID NO: 2026430
ugucuccagagcauuccag

SEQ ID NO: 2026432 - RNA, 19 nt, Artificial Sequence
  Description of Artificial Sequence: Synthetic oligonucleotide
  Sense strand starting at position 2565 of SEQ ID NO: 1881206
ccgggaguagguugugaaa

SEQ ID NO: 2026433 - RNA, 19 nt, Artificial Sequence
  Description of Artificial Sequence: Synthetic oligonucleotide
  Antisense strand to SEQ ID NO: 2026432
uuucacaaccuacucccgg

SEQ ID NO: 2026434 - RNA, 19 nt, Artificial Sequence
  Description of Artificial Sequence: Synthetic oligonucleotide
  Sense strand starting at position 2574 of SEQ ID NO: 1881206
gguugugaaacggagucua

SEQ ID NO: 2026435 - RNA, 19 nt, Artificial Sequence
  Description of Artificial Sequence: Synthetic oligonucleotide
  Antisense strand to SEQ ID NO: 2026434
uagacuccguuucacaacc

SEQ ID NO: 2026436 - RNA, 19 nt, Artificial Sequence
  Description of Artificial Sequence: Synthetic oligonucleotide
  Sense strand starting at position 2661 of SEQ ID NO: 1881206
ggucccgauccggauuaga

SEQ ID NO: 2026437 - RNA, 19 nt, Artificial Sequence
  Description of Artificial Sequence: Synthetic oligonucleotide
  Antisense strand to SEQ ID NO: 2026436
ucuaauccggaucgggacc

SEQ ID NO: 2026438 - RNA, 19 nt, Artificial Sequence
  Description of Artificial Sequence: Synthetic oligonucleotide
  Sense strand starting at position 2689 of SEQ ID NO: 1881206
caggauuagcccuguuggu

SEQ ID NO: 2026439 - RNA, 19 nt, Artificial Sequence
  Description of Artificial Sequence: Synthetic oligonucleotide
  Antisense strand to SEQ ID NO: 2026438
accaacagggcuaauccug

SEQ ID NO: 2026440 - RNA, 19 nt, Artificial Sequence
  Description of Artificial Sequence: Synthetic oligonucleotide
  Sense strand starting at position 71 of SEQ ID NO: 1881207
ggaagaaucaagggugguu

SEQ ID NO: 2026441 - RNA, 19 nt, Artificial Sequence
  Description of Artificial Sequence: Synthetic oligonucleotide
  Antisense strand to SEQ ID NO: 2026440
aaccacccuugauucuucc

SEQ ID NO: 2026442 - RNA, 19 nt, Artificial Sequence
  Description of Artificial Sequence: Synthetic oligonucleotide
  Sense strand starting at position 111 of SEQ ID NO: 1881207
ggcaacaguggucagaguu

SEQ ID NO: 2026443 - RNA, 19 nt, Artificial Sequence
  Description of Artificial Sequence: Synthetic oligonucleotide
  Antisense strand to SEQ ID NO: 2026442
aacucugaccacuguugcc

SEQ ID NO: 2026444 - RNA, 19 nt, Artificial Sequence
  Description of Artificial Sequence: Synthetic oligonucleotide
  Sense strand starting at position 118 of SEQ ID NO: 1881207
guggucagaguuugagaaa

SEQ ID NO: 2026445 - RNA, 19 nt, Artificial Sequence
  Description of Artificial Sequence: Synthetic oligonucleotide
  Antisense strand to SEQ ID NO: 2026444
uuucucaaacucugaccac

SEQ ID NO: 2026446 - RNA, 19 nt, Artificial Sequence
  Description of Artificial Sequence: Synthetic oligonucleotide
  Sense strand starting at position 357 of SEQ ID NO: 1881207
cuugacuucccaggcaaga

SEQ ID NO: 2026447 - RNA, 19 nt, Artificial Sequence
  Description of Artificial Sequence: Synthetic oligonucleotide
  Antisense strand to SEQ ID NO: 2026446
ucuugccugggaagucaag

SEQ ID NO: 2026448 - RNA, 19 nt, Artificial Sequence
  Description of Artificial Sequence: Synthetic oligonucleotide
  Sense strand starting at position 637 of SEQ ID NO: 1881207
cccuaagagcuagguacua

SEQ ID NO: 2026449 - RNA, 19 nt, Artificial Sequence
  Description of Artificial Sequence: Synthetic oligonucleotide
  Antisense strand to SEQ ID NO: 2026448
uaguaccuagcucuuaggg

SEQ ID NO: 2026450 - RNA, 19 nt, Artificial Sequence
  Description of Artificial Sequence: Synthetic oligonucleotide
  Sense strand starting at position 709 of SEQ ID NO: 1881207
uaagcaauuuguccgaagu

SEQ ID NO: 2026451 - RNA, 19 nt, Artificial Sequence
  Description of Artificial Sequence: Synthetic oligonucleotide
  Antisense strand to SEQ ID NO: 2026450
acuucggacaaauugcuua

SEQ ID NO: 2026452 - RNA, 19 nt, Artificial Sequence
  Description of Artificial Sequence: Synthetic oligonucleotide
  Sense strand starting at position 710 of SEQ ID NO: 1881207
aagcaauuuguccgaaguc

SEQ ID NO: 2026453 - RNA, 19 nt, Artificial Sequence
  Description of Artificial Sequence: Synthetic oligonucleotide
  Antisense strand to SEQ ID NO: 2026452
gacuucggacaaauugcuu

SEQ ID NO: 2026454 - RNA, 19 nt, Artificial Sequence
  Description of Artificial Sequence: Synthetic oligonucleotide
  Sense strand starting at position 723 of SEQ ID NO: 1881207
gaagucauauagcuaguaa

SEQ ID NO: 2026455 - RNA, 19 nt, Artificial Sequence
  Description of Artificial Sequence: Synthetic oligonucleotide
  Antisense strand to SEQ ID NO: 2026454
uuacuagcuauaugacuuc

SEQ ID NO: 2026456 - RNA, 19 nt, Artificial Sequence
  Description of Artificial Sequence: Synthetic oligonucleotide
  Sense strand starting at position 799 of SEQ ID NO: 1881207
cugcaugugguagaaauga

SEQ ID NO: 2026457 - RNA, 19 nt, Artificial Sequence
  Description of Artificial Sequence: Synthetic oligonucleotide
  Antisense strand to SEQ ID NO: 2026456
ucauuucuaccacaugcag

SEQ ID NO: 2026458 - RNA, 19 nt, Artificial Sequence
  Description of Artificial Sequence: Synthetic oligonucleotide
  Sense strand starting at position 892 of SEQ ID NO: 1881207
gaaccaagcuggguuuauu

SEQ ID NO: 2026459 - RNA, 19 nt, Artificial Sequence
  Description of Artificial Sequence: Synthetic oligonucleotide
  Antisense strand to SEQ ID NO: 2026458
aauaaacccagcuugguuc

SEQ ID NO: 2026460 - RNA, 19 nt, Artificial Sequence
  Description of Artificial Sequence: Synthetic oligonucleotide
  Sense strand starting at position 1187 of SEQ ID NO: 1881207
auaggagaauguuuaguua

SEQ ID NO: 2026461 - RNA, 19 nt, Artificial Sequence
  Description of Artificial Sequence: Synthetic oligonucleotide
  Antisense strand to SEQ ID NO: 2026460
uaacuaaacauucuccuau

SEQ ID NO: 2026462 - RNA, 19 nt, Artificial Sequence
  Description of Artificial Sequence: Synthetic oligonucleotide
  Sense strand starting at position 1190 of SEQ ID NO: 1881207
ggagaauguuuaguuacuu

SEQ ID NO: 2026463 - RNA, 19 nt, Artificial Sequence
  Description of Artificial Sequence: Synthetic oligonucleotide
  Antisense strand to SEQ ID NO: 2026462
aaguaacuaaacauucucc

SEQ ID NO: 2026464 - RNA, 19 nt, Artificial Sequence
  Description of Artificial Sequence: Synthetic oligonucleotide
  Sense strand starting at position 1191 of SEQ ID NO: 1881207
gagaauguuuaguuacuuu

SEQ ID NO: 2026465 - RNA, 19 nt, Artificial Sequence
  Description of Artificial Sequence: Synthetic oligonucleotide
  Antisense strand to SEQ ID NO: 2026464
aaaguaacuaaacauucuc

SEQ ID NO: 2026466 - RNA, 19 nt, Artificial Sequence
  Description of Artificial Sequence: Synthetic oligonucleotide
  Sense strand starting at position 1236 of SEQ ID NO: 1881207
gucuguguucaguugugau

SEQ ID NO: 2026467 - RNA, 19 nt, Artificial Sequence
  Description of Artificial Sequence: Synthetic oligonucleotide
  Antisense strand to SEQ ID NO: 2026466
aucacaacugaacacagac

SEQ ID NO: 2026468 - RNA, 19 nt, Artificial Sequence
  Description of Artificial Sequence: Synthetic oligonucleotide
  Sense strand starting at position 1325 of SEQ ID NO: 1881207
ugugacaucgcuucugugu

SEQ ID NO: 2026469 - RNA, 19 nt, Artificial Sequence
  Description of Artificial Sequence: Synthetic oligonucleotide
  Antisense strand to SEQ ID NO: 2026468
acacagaagcgaugucaca

SEQ ID NO: 2026470 - RNA, 19 nt, Artificial Sequence
  Description of Artificial Sequence: Synthetic oligonucleotide
  Sense strand starting at position 1326 of SEQ ID NO: 1881207
gugacaucgcuucuguguu

SEQ ID NO: 2026471 - RNA, 19 nt, Artificial Sequence
  Description of Artificial Sequence: Synthetic oligonucleotide
  Antisense strand to SEQ ID NO: 2026470
aacacagaagcgaugucac

SEQ ID NO: 2026472 - RNA, 19 nt, Artificial Sequence
  Description of Artificial Sequence: Synthetic oligonucleotide
  Sense strand starting at position 1331 of SEQ ID NO: 1881207
aucgcuucuguguugcaaa

SEQ ID NO: 2026473 - RNA, 19 nt, Artificial Sequence
  Description of Artificial Sequence: Synthetic oligonucleotide
  Antisense strand to SEQ ID NO: 2026472
uuugcaacacagaagcgau

SEQ ID NO: 2026474 - RNA, 19 nt, Artificial Sequence
  Description of Artificial Sequence: Synthetic oligonucleotide
  Sense strand starting at position 1423 of SEQ ID NO: 1881207
uggauacauuguucccgaa

SEQ ID NO: 2026475 - RNA, 19 nt, Artificial Sequence
  Description of Artificial Sequence: Synthetic oligonucleotide
  Antisense strand to SEQ ID NO: 2026474
uucgggaacaauguaucca

SEQ ID NO: 2026476 - RNA, 19 nt, Artificial Sequence
  Description of Artificial Sequence: Synthetic oligonucleotide
  Sense strand starting at position 1553 of SEQ ID NO: 1881207
acaccaaucccggaacguu

SEQ ID NO: 2026477 - RNA, 19 nt, Artificial Sequence
  Description of Artificial Sequence: Synthetic oligonucleotide
  Antisense strand to SEQ ID NO: 2026476
aacguuccgggauuggugu

SEQ ID NO: 2026478 - RNA, 19 nt, Artificial Sequence
  Description of Artificial Sequence: Synthetic oligonucleotide
  Sense strand starting at position 1774 of SEQ ID NO: 1881207
gaugaaggaccuuguauca

SEQ ID NO: 2026479 - RNA, 19 nt, Artificial Sequence
  Description of Artificial Sequence: Synthetic oligonucleotide
  Antisense strand to SEQ ID NO: 2026478
ugauacaagguccuucauc

SEQ ID NO: 2026480 - RNA, 19 nt, Artificial Sequence
  Description of Artificial Sequence: Synthetic oligonucleotide
  Sense strand starting at position 1779 of SEQ ID NO: 1881207
aggaccuuguaucauuuaa

SEQ ID NO: 2026481 - RNA, 19 nt, Artificial Sequence
  Description of Artificial Sequence: Synthetic oligonucleotide
  Antisense strand to SEQ ID NO: 2026480
uuaaaugauacaagguccu

SEQ ID NO: 2026482 - RNA, 19 nt, Artificial Sequence
  Description of Artificial Sequence: Synthetic oligonucleotide
  Sense strand starting at position 1864 of SEQ ID NO: 1881207
gcauuucuggcugaggcuu

SEQ ID NO: 2026483 - RNA, 19 nt, Artificial Sequence
  Description of Artificial Sequence: Synthetic oligonucleotide
  Antisense strand to SEQ ID NO: 2026482
aagccucagccagaaaugc

SEQ ID NO: 2026484 - RNA, 19 nt, Artificial Sequence
  Description of Artificial Sequence: Synthetic oligonucleotide
  Sense strand starting at position 1977 of SEQ ID NO: 1881207
cccugacucccugaagcua

SEQ ID NO: 2026485 - RNA, 19 nt, Artificial Sequence
  Description of Artificial Sequence: Synthetic oligonucleotide
  Antisense strand to SEQ ID NO: 2026484
uagcuucagggagucaggg

SEQ ID NO: 2026486 - RNA, 19 nt, Artificial Sequence
  Description of Artificial Sequence: Synthetic oligonucleotide
  Sense strand starting at position 2163 of SEQ ID NO: 1881207
cauggacugucucuauaga

SEQ ID NO: 2026487 - RNA, 19 nt, Artificial Sequence
  Description of Artificial Sequence: Synthetic oligonucleotide
  Antisense strand to SEQ ID NO: 2026486
ucuauagagacaguccaug

SEQ ID NO: 2026488 - RNA, 19 nt, Artificial Sequence
  Description of Artificial Sequence: Synthetic oligonucleotide
  Sense strand starting at position 2402 of SEQ ID NO: 1881207
gccaaauuauggguaauug

SEQ ID NO: 2026489 - RNA, 19 nt, Artificial Sequence
  Description of Artificial Sequence: Synthetic oligonucleotide
  Antisense strand to SEQ ID NO: 2026488
caauuacccauaauuuggc

SEQ ID NO: 2026490 - RNA, 19 nt, Artificial Sequence
  Description of Artificial Sequence: Synthetic oligonucleotide
  Sense strand starting at position 2403 of SEQ ID NO: 1881207
ccaaauuauggguaauugu

SEQ ID NO: 2026491 - RNA, 19 nt, Artificial Sequence
  Description of Artificial Sequence: Synthetic oligonucleotide
  Antisense strand to SEQ ID NO: 2026490
acaauuacccauaauuugg

SEQ ID NO: 2026492 - RNA, 19 nt, Artificial Sequence
  Description of Artificial Sequence: Synthetic oligonucleotide
  Sense strand starting at position 2411 of SEQ ID NO: 1881207
uggguaauuguuuaaugca

SEQ ID NO: 2026493 - RNA, 19 nt, Artificial Sequence
  Description of Artificial Sequence: Synthetic oligonucleotide
  Antisense strand to SEQ ID NO: 2026492
ugcauuaaacaauuaccca

SEQ ID NO: 2026494 - RNA, 19 nt, Artificial Sequence
  Description of Artificial Sequence: Synthetic oligonucleotide
  Sense strand starting at position 2507 of SEQ ID NO: 1881207
aggagacuuucucuuguuu

SEQ ID NO: 2026495 - RNA, 19 nt, Artificial Sequence
  Description of Artificial Sequence: Synthetic oligonucleotide
  Antisense strand to SEQ ID NO: 2026494
aaacaagagaaagucuccu

SEQ ID NO: 2026496 - RNA, 19 nt, Artificial Sequence
  Description of Artificial Sequence: Synthetic oligonucleotide
  Sense strand starting at position 2539 of SEQ ID NO: 1881207
ugaggcacaucuuuggaaa

SEQ ID NO: 2026497 - RNA, 19 nt, Artificial Sequence
  Description of Artificial Sequence: Synthetic oligonucleotide
  Antisense strand to SEQ ID NO: 2026496
uuuccaaagaugugccuca

SEQ ID NO: 2026498 - RNA, 19 nt, Artificial Sequence
  Description of Artificial Sequence: Synthetic oligonucleotide
  Sense strand starting at position 2540 of SEQ ID NO: 1881207
gaggcacaucuuuggaaag

SEQ ID NO: 2026499 - RNA, 19 nt, Artificial Sequence
  Description of Artificial Sequence: Synthetic oligonucleotide
  Antisense strand to SEQ ID NO: 2026498
cuuuccaaagaugugccuc

SEQ ID NO: 2026500 - RNA, 19 nt, Artificial Sequence
  Description of Artificial Sequence: Synthetic oligonucleotide
  Sense strand starting at position 2595 of SEQ ID NO: 1881207
uugauuaaagaguguuaag

SEQ ID NO: 2026501 - RNA, 19 nt, Artificial Sequence
  Description of Artificial Sequence: Synthetic oligonucleotide
  Antisense strand to SEQ ID NO: 2026500
cuuaacacucuuuaaucaa

SEQ ID NO: 2026502 - RNA, 19 nt, Artificial Sequence
  Description of Artificial Sequence: Synthetic oligonucleotide
  Sense strand starting at position 3200 of SEQ ID NO: 1881207
uccaacaaaugugucauua

SEQ ID NO: 2026503 - RNA, 19 nt, Artificial Sequence
  Description of Artificial Sequence: Synthetic oligonucleotide
  Antisense strand to SEQ ID NO: 2026502
uaaugacacauuuguugga

SEQ ID NO: 2026504 - RNA, 19 nt, Artificial Sequence
  Description of Artificial Sequence: Synthetic oligonucleotide
  Sense strand starting at position 3204 of SEQ ID NO: 1881207
acaaaugugucauuagaaa

SEQ ID NO: 2026505 - RNA, 19 nt, Artificial Sequence
  Description of Artificial Sequence: Synthetic oligonucleotide
  Antisense strand to SEQ ID NO: 2026504
uuucuaaugacacauuugu

SEQ ID NO: 2026506 - RNA, 19 nt, Artificial Sequence
  Description of Artificial Sequence: Synthetic oligonucleotide
  Sense strand starting at position 3376 of SEQ ID NO: 1881207
ugggaacuugcaugagaga

SEQ ID NO: 2026507 - RNA, 19 nt, Artificial Sequence
  Description of Artificial Sequence: Synthetic oligonucleotide
  Antisense strand to SEQ ID NO: 2026506
ucucucaugcaaguuccca

SEQ ID NO: 2026508 - RNA, 19 nt, Artificial Sequence
  Description of Artificial Sequence: Synthetic oligonucleotide
  Sense strand starting at position 3431 of SEQ ID NO: 1881207
cgcuguauggcagcucaga

SEQ ID NO: 2026509 - RNA, 19 nt, Artificial Sequence
  Description of Artificial Sequence: Synthetic oligonucleotide
  Antisense strand to SEQ ID NO: 2026508
ucugagcugccauacagcg

SEQ ID NO: 2026510 - RNA, 19 nt, Artificial Sequence
  Description of Artificial Sequence: Synthetic oligonucleotide
  Sense strand starting at position 3476 of SEQ ID NO: 1881207
gggucucagcuacaguaaa

SEQ ID NO: 2026511 - RNA, 19 nt, Artificial Sequence
  Description of Artificial Sequence: Synthetic oligonucleotide
  Antisense strand to SEQ ID NO: 2026510
uuuacuguagcugagaccc

SEQ ID NO: 2026512 - RNA, 19 nt, Artificial Sequence
  Description of Artificial Sequence: Synthetic oligonucleotide
  Sense strand starting at position 3487 of SEQ ID NO: 1881207
acaguaaaguucuuacauu

SEQ ID NO: 2026513 - RNA, 19 nt, Artificial Sequence
  Description of Artificial Sequence: Synthetic oligonucleotide
  Antisense strand to SEQ ID NO: 2026512
aauguaagaacuuuacugu

SEQ ID NO: 2026514 - RNA, 19 nt, Artificial Sequence
  Description of Artificial Sequence: Synthetic oligonucleotide
  Sense strand starting at position 3542 of SEQ ID NO: 1881207
acauguuccagagaaggcu

SEQ ID NO: 2026515 - RNA, 19 nt, Artificial Sequence
  Description of Artificial Sequence: Synthetic oligonucleotide
  Antisense strand to SEQ ID NO: 2026514
agccuucucuggaacaugu

SEQ ID NO: 2026516 - RNA, 19 nt, Artificial Sequence
  Description of Artificial Sequence: Synthetic oligonucleotide
  Sense strand starting at position 3635 of SEQ ID NO: 1881207
uuugaacuucucugaaaga

SEQ ID NO: 2026517 - RNA, 19 nt, Artificial Sequence
  Description of Artificial Sequence: Synthetic oligonucleotide
  Antisense strand to SEQ ID NO: 2026516
ucuuucagagaaguucaaa

SEQ ID NO: 2026518 - RNA, 19 nt, Artificial Sequence
  Description of Artificial Sequence: Synthetic oligonucleotide
  Sense strand starting at position 3763 of SEQ ID NO: 1881207
caguccacucaagagugau

SEQ ID NO: 2026519 - RNA, 19 nt, Artificial Sequence
  Description of Artificial Sequence: Synthetic oligonucleotide
  Antisense strand to SEQ ID NO: 2026518
aucacucuugaguggacug

SEQ ID NO: 2026520 - RNA, 19 nt, Artificial Sequence
  Description of Artificial Sequence: Synthetic oligonucleotide
  Sense strand starting at position 37 of SEQ ID NO: 1881208
ucuuaacuccuguguuuga

SEQ ID NO: 2026521 - RNA, 19 nt, Artificial Sequence
  Description of Artificial Sequence: Synthetic oligonucleotide
  Antisense strand to SEQ ID NO: 2026520
ucaaacacaggaguuaaga

SEQ ID NO: 2026522 - RNA, 19 nt, Artificial Sequence
  Description of Artificial Sequence: Synthetic oligonucleotide
  Sense strand starting at position 38 of SEQ ID NO: 1881208
cuuaacuccuguguuugaa

SEQ ID NO: 2026523 - RNA, 19 nt, Artificial Sequence
  Description of Artificial Sequence: Synthetic oligonucleotide
  Antisense strand to SEQ ID NO: 2026522
uucaaacacaggaguuaag

SEQ ID NO: 2026524 - RNA, 19 nt, Artificial Sequence
  Description of Artificial Sequence: Synthetic oligonucleotide
  Sense strand starting at position 227 of SEQ ID NO: 1881208
uugaaauugccugguccca

SEQ ID NO: 2026525 - RNA, 19 nt, Artificial Sequence
  Description of Artificial Sequence: Synthetic oligonucleotide
  Antisense strand to SEQ ID NO: 2026524
ugggaccaggcaauuucaa

SEQ ID NO: 2026526 - RNA, 19 nt, Artificial Sequence
  Description of Artificial Sequence: Synthetic oligonucleotide
  Sense strand starting at position 246 of SEQ ID NO: 1881208
ggcaccuugacuuggagaa

SEQ ID NO: 2026527 - RNA, 19 nt, Artificial Sequence
  Description of Artificial Sequence: Synthetic oligonucleotide
  Antisense strand to SEQ ID NO: 2026526
uucuccaagucaaggugcc

SEQ ID NO: 2026528 - RNA, 19 nt, Artificial Sequence
  Description of Artificial Sequence: Synthetic oligonucleotide
  Sense strand starting at position 266 of SEQ ID NO: 1881208
ggaugaauguaugagauga

SEQ ID NO: 2026529 - RNA, 19 nt, Artificial Sequence
  Description of Artificial Sequence: Synthetic oligonucleotide
  Antisense strand to SEQ ID NO: 2026528
ucaucucauacauucaucc

SEQ ID NO: 2026530 - RNA, 19 nt, Artificial Sequence
  Description of Artificial Sequence: Synthetic oligonucleotide
  Sense strand starting at position 268 of SEQ ID NO: 1881208
augaauguaugagaugaaa

SEQ ID NO: 2026531 - RNA, 19 nt, Artificial Sequence
  Description of Artificial Sequence: Synthetic oligonucleotide
  Antisense strand to SEQ ID NO: 2026530
uuucaucucauacauucau

SEQ ID NO: 2026532 - RNA, 19 nt, Artificial Sequence
  Description of Artificial Sequence: Synthetic oligonucleotide
  Sense strand starting at position 706 of SEQ ID NO: 1881208
uuauauugguacucauaag

SEQ ID NO: 2026533 - RNA, 19 nt, Artificial Sequence
  Description of Artificial Sequence: Synthetic oligonucleotide
  Antisense strand to SEQ ID NO: 2026532
cuuaugaguaccaauauaa

SEQ ID NO: 2026534 - RNA, 19 nt, Artificial Sequence
  Description of Artificial Sequence: Synthetic oligonucleotide
  Sense strand starting at position 1829 of SEQ ID NO: 1881208
guuuccaauuguccuuuaa

SEQ ID NO: 2026535 - RNA, 19 nt, Artificial Sequence
  Description of Artificial Sequence: Synthetic oligonucleotide
  Antisense strand to SEQ ID NO: 2026534
uuaaaggacaauuggaaac

SEQ ID NO: 2026536 - RNA, 19 nt, Artificial Sequence
  Description of Artificial Sequence: Synthetic oligonucleotide
  Sense strand starting at position 1859 of SEQ ID NO: 1881208
augacaaggucaccaguaa

SEQ ID NO: 2026537 - RNA, 19 nt, Artificial Sequence
  Description of Artificial Sequence: Synthetic oligonucleotide
  Antisense strand to SEQ ID NO: 2026536
uuacuggugaccuugucau

SEQ ID NO: 2026538 - RNA, 19 nt, Artificial Sequence
  Description of Artificial Sequence: Synthetic oligonucleotide
  Sense strand starting at position 1863 of SEQ ID NO: 1881208
caaggucaccaguaaguuu

SEQ ID NO: 2026539 - RNA, 19 nt, Artificial Sequence
  Description of Artificial Sequence: Synthetic oligonucleotide
  Antisense strand to SEQ ID NO: 2026538
aaacuuacuggugaccuug

SEQ ID NO: 2026540 - RNA, 19 nt, Artificial Sequence
  Description of Artificial Sequence: Synthetic oligonucleotide
  Sense strand starting at position 1883 of SEQ ID NO: 1881208
ugucuuugagauuaucuaa

SEQ ID NO: 2026541 - RNA, 19 nt, Artificial Sequence
  Description of Artificial Sequence: Synthetic oligonucleotide
  Antisense strand to SEQ ID NO: 2026540
uuagauaaucucaaagaca

SEQ ID NO: 2026542 - RNA, 19 nt, Artificial Sequence
  Description of Artificial Sequence: Synthetic oligonucleotide
  Sense strand starting at position 2050 of SEQ ID NO: 1881208
aaaggaucugcuugauaug

SEQ ID NO: 2026543 - RNA, 19 nt, Artificial Sequence
  Description of Artificial Sequence: Synthetic oligonucleotide
  Antisense strand to SEQ ID NO: 2026542
cauaucaagcagauccuuu

SEQ ID NO: 2026544 - RNA, 19 nt, Artificial Sequence
  Description of Artificial Sequence: Synthetic oligonucleotide
  Sense strand starting at position 2059 of SEQ ID NO: 1881208
gcuugauaugauuggugag

SEQ ID NO: 2026545 - RNA, 19 nt, Artificial Sequence
  Description of Artificial Sequence: Synthetic oligonucleotide
  Antisense strand to SEQ ID NO: 2026544
cucaccaaucauaucaagc

SEQ ID NO: 2026546 - RNA, 19 nt, Artificial Sequence
  Description of Artificial Sequence: Synthetic oligonucleotide
  Sense strand starting at position 2060 of SEQ ID NO: 1881208
cuugauaugauuggugagu

SEQ ID NO: 2026547 - RNA, 19 nt, Artificial Sequence
  Description of Artificial Sequence: Synthetic oligonucleotide
  Antisense strand to SEQ ID NO: 2026546
acucaccaaucauaucaag

SEQ ID NO: 2026548 - RNA, 19 nt, Artificial Sequence
  Description of Artificial Sequence: Synthetic oligonucleotide
  Sense strand starting at position 2061 of SEQ ID NO: 1881208
uugauaugauuggugagua

SEQ ID NO: 2026549 - RNA, 19 nt, Artificial Sequence
  Description of Artificial Sequence: Synthetic oligonucleotide
  Antisense strand to SEQ ID NO: 2026548
uacucaccaaucauaucaa

SEQ ID NO: 2026550 - RNA, 19 nt, Artificial Sequence
  Description of Artificial Sequence: Synthetic oligonucleotide
  Sense strand starting at position 2065 of SEQ ID NO: 1881208
uaugauuggugaguacagu

SEQ ID NO: 2026551 - RNA, 19 nt, Artificial Sequence
  Description of Artificial Sequence: Synthetic oligonucleotide
  Antisense strand to SEQ ID NO: 2026550
acuguacucaccaaucaua

SEQ ID NO: 2026552 - RNA, 19 nt, Artificial Sequence
  Description of Artificial Sequence: Synthetic oligonucleotide
  Sense strand starting at position 2093 of SEQ ID NO: 1881208
cauccuguccuugggaaga

SEQ ID NO: 2026553 - RNA, 19 nt, Artificial Sequence
  Description of Artificial Sequence: Synthetic oligonucleotide
  Antisense strand to SEQ ID NO: 2026552
ucuucccaaggacaggaug

SEQ ID NO: 2026554 - RNA, 19 nt, Artificial Sequence
  Description of Artificial Sequence: Synthetic oligonucleotide
  Sense strand starting at position 2124 of SEQ ID NO: 1881208
augggucugagucagcaaa

SEQ ID NO: 2026555 - RNA, 19 nt, Artificial Sequence
  Description of Artificial Sequence: Synthetic oligonucleotide
  Antisense strand to SEQ ID NO: 2026554
uuugcugacucagacccau

SEQ ID NO: 2026556 - RNA, 19 nt, Artificial Sequence
  Description of Artificial Sequence: Synthetic oligonucleotide
  Sense strand starting at position 2126 of SEQ ID NO: 1881208
gggucugagucagcaaaua

SEQ ID NO: 2026557 - RNA, 19 nt, Artificial Sequence
  Description of Artificial Sequence: Synthetic oligonucleotide
  Antisense strand to SEQ ID NO: 2026556
uauuugcugacucagaccc

SEQ ID NO: 2026558 - RNA, 19 nt, Artificial Sequence
  Description of Artificial Sequence: Synthetic oligonucleotide
  Sense strand starting at position 2487 of SEQ ID NO: 1881208
cauacauagcgagaucugu

SEQ ID NO: 2026559 - RNA, 19 nt, Artificial Sequence
  Description of Artificial Sequence: Synthetic oligonucleotide
  Antisense strand to SEQ ID NO: 2026558
acagaucucgcuauguaug

SEQ ID NO: 2026560 - RNA, 19 nt, Artificial Sequence
  Description of Artificial Sequence: Synthetic oligonucleotide
  Sense strand starting at position 2844 of SEQ ID NO: 1881208
ccaccaugauuggcuaaua

SEQ ID NO: 2026561 - RNA, 19 nt, Artificial Sequence
  Description of Artificial Sequence: Synthetic oligonucleotide
  Antisense strand to SEQ ID NO: 2026560
uauuagccaaucauggugg

SEQ ID NO: 2026562 - RNA, 19 nt, Artificial Sequence
  Description of Artificial Sequence: Synthetic oligonucleotide
  Sense strand starting at position 3035 of SEQ ID NO: 1881208
ggaacugaauguuaacaaa

SEQ ID NO: 2026563 - RNA, 19 nt, Artificial Sequence
  Description of Artificial Sequence: Synthetic oligonucleotide
  Antisense strand to SEQ ID NO: 2026562
uuuguuaacauucaguucc

SEQ ID NO: 2026564 - RNA, 19 nt, Artificial Sequence
  Description of Artificial Sequence: Synthetic oligonucleotide
  Sense strand starting at position 3072 of SEQ ID NO: 1881208
acaacugauuaucuuguga

SEQ ID NO: 2026565 - RNA, 19 nt, Artificial Sequence
  Description of Artificial Sequence: Synthetic oligonucleotide
  Antisense strand to SEQ ID NO: 2026564
ucacaagauaaucaguugu

SEQ ID NO: 2026566 - RNA, 19 nt, Artificial Sequence
  Description of Artificial Sequence: Synthetic oligonucleotide
  Sense strand starting at position 3081 of SEQ ID NO: 1881208
uaucuugugaggugauaga

SEQ ID NO: 2026567 - RNA, 19 nt, Artificial Sequence
  Description of Artificial Sequence: Synthetic oligonucleotide
  Antisense strand to SEQ ID NO: 2026566
ucuaucaccucacaagaua

SEQ ID NO: 2026568 - RNA, 19 nt, Artificial Sequence
  Description of Artificial Sequence: Synthetic oligonucleotide
  Sense strand starting at position 3109 of SEQ ID NO: 1881208
caggucaugucaucaaugu

SEQ ID NO: 2026569 - RNA, 19 nt, Artificial Sequence
  Description of Artificial Sequence: Synthetic oligonucleotide
  Antisense strand to SEQ ID NO: 2026568
acauugaugacaugaccug

SEQ ID NO: 2026570 - RNA, 19 nt, Artificial Sequence
  Description of Artificial Sequence: Synthetic oligonucleotide
  Sense strand starting at position 3110 of SEQ ID NO: 1881208
aggucaugucaucaauguu

SEQ ID NO: 2026571 - RNA, 19 nt, Artificial Sequence
  Description of Artificial Sequence: Synthetic oligonucleotide
  Antisense strand to SEQ ID NO: 2026570
aacauugaugacaugaccu

SEQ ID NO: 2026572 - RNA, 19 nt, Artificial Sequence
  Description of Artificial Sequence: Synthetic oligonucleotide
  Sense strand starting at position 3113 of SEQ ID NO: 1881208
ucaugucaucaauguuuag

SEQ ID NO: 2026573 - RNA, 19 nt, Artificial Sequence
  Description of Artificial Sequence: Synthetic oligonucleotide
  Antisense strand to SEQ ID NO: 2026572
cuaaacauugaugacauga

SEQ ID NO: 2026574 - RNA, 19 nt, Artificial Sequence
  Description of Artificial Sequence: Synthetic oligonucleotide
  Sense strand starting at position 3116 of SEQ ID NO: 1881208
ugucaucaauguuuagaug

SEQ ID NO: 2026575 - RNA, 19 nt, Artificial Sequence
  Description of Artificial Sequence: Synthetic oligonucleotide
  Antisense strand to SEQ ID NO: 2026574
caucuaaacauugaugaca

SEQ ID NO: 2026576 - RNA, 19 nt, Artificial Sequence
  Description of Artificial Sequence: Synthetic oligonucleotide
  Sense strand starting at position 3165 of SEQ ID NO: 1881208
ccacuaggacauggugauu

SEQ ID NO: 2026577 - RNA, 19 nt, Artificial Sequence
  Description of Artificial Sequence: Synthetic oligonucleotide
  Antisense strand to SEQ ID NO: 2026576
aaucaccauguccuagugg

SEQ ID NO: 2026578 - RNA, 19 nt, Artificial Sequence
  Description of Artificial Sequence: Synthetic oligonucleotide
  Sense strand starting at position 3171 of SEQ ID NO: 1881208
ggacauggugauugagcuu

SEQ ID NO: 2026579 - RNA, 19 nt, Artificial Sequence
  Description of Artificial Sequence: Synthetic oligonucleotide
  Antisense strand to SEQ ID NO: 2026578
aagcucaaucaccaugucc

SEQ ID NO: 2026580 - RNA, 19 nt, Artificial Sequence
  Description of Artificial Sequence: Synthetic oligonucleotide
  Sense strand starting at position 3174 of SEQ ID NO: 1881208
cauggugauugagcuuaaa

SEQ ID NO: 2026581 - RNA, 19 nt, Artificial Sequence
  Description of Artificial Sequence: Synthetic oligonucleotide
  Antisense strand to SEQ ID NO: 2026580
uuuaagcucaaucaccaug

SEQ ID NO: 2026582 - RNA, 19 nt, Artificial Sequence
  Description of Artificial Sequence: Synthetic oligonucleotide
  Sense strand starting at position 3707 of SEQ ID NO: 1881208
cugaauguccuguauguga

SEQ ID NO: 2026583 - RNA, 19 nt, Artificial Sequence
  Description of Artificial Sequence: Synthetic oligonucleotide
  Antisense strand to SEQ ID NO: 2026582
ucacauacaggacauucag

SEQ ID NO: 2026584 - RNA, 19 nt, Artificial Sequence
  Description of Artificial Sequence: Synthetic oligonucleotide
  Sense strand starting at position 3709 of SEQ ID NO: 1881208
gaauguccuguaugugaac

SEQ ID NO: 2026585 - RNA, 19 nt, Artificial Sequence
  Description of Artificial Sequence: Synthetic oligonucleotide
  Antisense strand to SEQ ID NO: 2026584
guucacauacaggacauuc

SEQ ID NO: 2026586 - RNA, 19 nt, Artificial Sequence
  Description of Artificial Sequence: Synthetic oligonucleotide
  Sense strand starting at position 3711 of SEQ ID NO: 1881208
auguccuguaugugaacua

SEQ ID NO: 2026587 - RNA, 19 nt, Artificial Sequence
  Description of Artificial Sequence: Synthetic oligonucleotide
  Antisense strand to SEQ ID NO: 2026586
uaguucacauacaggacau

SEQ ID NO: 2026588 - RNA, 19 nt, Artificial Sequence
  Description of Artificial Sequence: Synthetic oligonucleotide
  Sense strand starting at position 3716 of SEQ ID NO: 1881208
cuguaugugaacuacaugu

SEQ ID NO: 2026589 - RNA, 19 nt, Artificial Sequence
  Description of Artificial Sequence: Synthetic oligonucleotide
  Antisense strand to SEQ ID NO: 2026588
acauguaguucacauacag

SEQ ID NO: 2026590 - RNA, 19 nt, Artificial Sequence
  Description of Artificial Sequence: Synthetic oligonucleotide
  Sense strand starting at position 3929 of SEQ ID NO: 1881208
cuccuaguaaagggaugua

SEQ ID NO: 2026591 - RNA, 19 nt, Artificial Sequence
  Description of Artificial Sequence: Synthetic oligonucleotide
  Antisense strand to SEQ ID NO: 2026590
uacaucccuuuacuaggag

SEQ ID NO: 2026592 - RNA, 19 nt, Artificial Sequence
  Description of Artificial Sequence: Synthetic oligonucleotide
  Sense strand starting at position 3932 of SEQ ID NO: 1881208
cuaguaaagggauguauaa

SEQ ID NO: 2026593 - RNA, 19 nt, Artificial Sequence
  Description of Artificial Sequence: Synthetic oligonucleotide
  Antisense strand to SEQ ID NO: 2026592
uuauacaucccuuuacuag

SEQ ID NO: 2026594 - RNA, 19 nt, Artificial Sequence
  Description of Artificial Sequence: Synthetic oligonucleotide
  Sense strand starting at position 3965 of SEQ ID NO: 1881208
ugaagcuguuguuucugaa

SEQ ID NO: 2026595 - RNA, 19 nt, Artificial Sequence
  Description of Artificial Sequence: Synthetic oligonucleotide
  Antisense strand to SEQ ID NO: 2026594
uucagaaacaacagcuuca

SEQ ID NO: 2026596 - RNA, 19 nt, Artificial Sequence
  Description of Artificial Sequence: Synthetic oligonucleotide
  Sense strand starting at position 3978 of SEQ ID NO: 1881208
ucugaaggaucuccagguu

SEQ ID NO: 2026597 - RNA, 19 nt, Artificial Sequence
  Description of Artificial Sequence: Synthetic oligonucleotide
  Antisense strand to SEQ ID NO: 2026596
aaccuggagauccuucaga

SEQ ID NO: 2026598 - RNA, 19 nt, Artificial Sequence
  Description of Artificial Sequence: Synthetic oligonucleotide
  Sense strand starting at position 3981 of SEQ ID NO: 1881208
gaaggaucuccagguuaug

SEQ ID NO: 2026599 - RNA, 19 nt, Artificial Sequence
  Description of Artificial Sequence: Synthetic oligonucleotide
  Antisense strand to SEQ ID NO: 2026598
cauaaccuggagauccuuc

SEQ ID NO: 2026600 - RNA, 19 nt, Artificial Sequence
  Description of Artificial Sequence: Synthetic oligonucleotide
  Sense strand starting at position 31 of SEQ ID NO: 1881209
uuaagagagcugcagaguu

SEQ ID NO: 2026601 - RNA, 19 nt, Artificial Sequence
  Description of Artificial Sequence: Synthetic oligonucleotide
  Antisense strand to SEQ ID NO: 2026600
aacucugcagcucucuuaa

SEQ ID NO: 2026602 - RNA, 19 nt, Artificial Sequence
  Description of Artificial Sequence: Synthetic oligonucleotide
  Sense strand starting at position 273 of SEQ ID NO: 1881209
acagauguugcauaacuau

SEQ ID NO: 2026603 - RNA, 19 nt, Artificial Sequence
  Description of Artificial Sequence: Synthetic oligonucleotide
  Antisense strand to SEQ ID NO: 2026602
auaguuaugcaacaucugu

SEQ ID NO: 2026604 - RNA, 19 nt, Artificial Sequence
  Description of Artificial Sequence: Synthetic oligonucleotide
  Sense strand starting at position 449 of SEQ ID NO: 1881209
gguugagaucuccauguuu

SEQ ID NO: 2026605 - RNA, 19 nt, Artificial Sequence
  Description of Artificial Sequence: Synthetic oligonucleotide
  Antisense strand to SEQ ID NO: 2026604
aaacauggagaucucaacc

SEQ ID NO: 2026606 - RNA, 19 nt, Artificial Sequence
  Description of Artificial Sequence: Synthetic oligonucleotide
  Sense strand starting at position 484 of SEQ ID NO: 1881209
acuauaagccugugacaaa

SEQ ID NO: 2026607 - RNA, 19 nt, Artificial Sequence
  Description of Artificial Sequence: Synthetic oligonucleotide
  Antisense strand to SEQ ID NO: 2026606
uuugucacaggcuuauagu

SEQ ID NO: 2026608 - RNA, 19 nt, Artificial Sequence
  Description of Artificial Sequence: Synthetic oligonucleotide
  Sense strand starting at position 629 of SEQ ID NO: 1881209
cagggaaaugccugaaauu

SEQ ID NO: 2026609 - RNA, 19 nt, Artificial Sequence
  Description of Artificial Sequence: Synthetic oligonucleotide
  Antisense strand to SEQ ID NO: 2026608
aauuucaggcauuucccug

SEQ ID NO: 2026610 - RNA, 19 nt, Artificial Sequence
  Description of Artificial Sequence: Synthetic oligonucleotide
  Sense strand starting at position 694 of SEQ ID NO: 1881209
cugggaagauugccacauu

SEQ ID NO: 2026611 - RNA, 19 nt, Artificial Sequence
  Description of Artificial Sequence: Synthetic oligonucleotide
  Antisense strand to SEQ ID NO: 2026610
aauguggcaaucuucccag

SEQ ID NO: 2026612 - RNA, 19 nt, Artificial Sequence
  Description of Artificial Sequence: Synthetic oligonucleotide
  Sense strand starting at position 863 of SEQ ID NO: 1881209
gggcuauauccauaaaguu

SEQ ID NO: 2026613 - RNA, 19 nt, Artificial Sequence
  Description of Artificial Sequence: Synthetic oligonucleotide
  Antisense strand to SEQ ID NO: 2026612
aacuuuauggauauagccc

SEQ ID NO: 2026614 - RNA, 19 nt, Artificial Sequence
  Description of Artificial Sequence: Synthetic oligonucleotide
  Sense strand starting at position 1160 of SEQ ID NO: 1881209
gguugaaugucuguuauuu

SEQ ID NO: 2026615 - RNA, 19 nt, Artificial Sequence
  Description of Artificial Sequence: Synthetic oligonucleotide
  Antisense strand to SEQ ID NO: 2026614
aaauaacagacauucaacc

SEQ ID NO: 2026616 - RNA, 19 nt, Artificial Sequence
  Description of Artificial Sequence: Synthetic oligonucleotide
  Sense strand starting at position 1496 of SEQ ID NO: 1881209
uuucuaaggcaauaucuga

SEQ ID NO: 2026617 - RNA, 19 nt, Artificial Sequence
  Description of Artificial Sequence: Synthetic oligonucleotide
  Antisense strand to SEQ ID NO: 2026616
ucagauauugccuuagaaa

SEQ ID NO: 2026618 - RNA, 19 nt, Artificial Sequence
  Description of Artificial Sequence: Synthetic oligonucleotide
  Sense strand starting at position 1503 of SEQ ID NO: 1881209
ggcaauaucugacuuaaua

SEQ ID NO: 2026619 - RNA, 19 nt, Artificial Sequence
  Description of Artificial Sequence: Synthetic oligonucleotide
  Antisense strand to SEQ ID NO: 2026618
uauuaagucagauauugcc

SEQ ID NO: 2026620 - RNA, 19 nt, Artificial Sequence
  Description of Artificial Sequence: Synthetic oligonucleotide
  Sense strand starting at position 1773 of SEQ ID NO: 1881209
ugagaagacuggcauuuga

SEQ ID NO: 2026621 - RNA, 19 nt, Artificial Sequence
  Description of Artificial Sequence: Synthetic oligonucleotide
  Antisense strand to SEQ ID NO: 2026620
ucaaaugccagucuucuca

SEQ ID NO: 2026622 - RNA, 19 nt, Artificial Sequence
  Description of Artificial Sequence: Synthetic oligonucleotide
  Sense strand starting at position 1809 of SEQ ID NO: 1881209
caacaucuuugagugguua

SEQ ID NO: 2026623 - RNA, 19 nt, Artificial Sequence
  Description of Artificial Sequence: Synthetic oligonucleotide
  Antisense strand to SEQ ID NO: 2026622
uaaccacucaaagauguug

SEQ ID NO: 2026624 - RNA, 19 nt, Artificial Sequence
  Description of Artificial Sequence: Synthetic oligonucleotide
  Sense strand starting at position 1920 of SEQ ID NO: 1881209
caguaauauugagcagauc

SEQ ID NO: 2026625 - RNA, 19 nt, Artificial Sequence
  Description of Artificial Sequence: Synthetic oligonucleotide
  Antisense strand to SEQ ID NO: 2026624
gaucugcucaauauuacug

SEQ ID NO: 2026626 - RNA, 19 nt, Artificial Sequence
  Description of Artificial Sequence: Synthetic oligonucleotide
  Sense strand starting at position 1921 of SEQ ID NO: 1881209
aguaauauugagcagaucu

SEQ ID NO: 2026627 - RNA, 19 nt, Artificial Sequence
  Description of Artificial Sequence: Synthetic oligonucleotide
  Antisense strand to SEQ ID NO: 2026626
agaucugcucaauauuacu

SEQ ID NO: 2026628 - RNA, 19 nt, Artificial Sequence
  Description of Artificial Sequence: Synthetic oligonucleotide
  Sense strand starting at position 1928 of SEQ ID NO: 1881209
uugagcagaucucuuauaa

SEQ ID NO: 2026629 - RNA, 19 nt, Artificial Sequence
  Description of Artificial Sequence: Synthetic oligonucleotide
  Antisense strand to SEQ ID NO: 2026628
uuauaagagaucugcucaa

SEQ ID NO: 2026630 - RNA, 19 nt, Artificial Sequence
  Description of Artificial Sequence: Synthetic oligonucleotide
  Sense strand starting at position 2073 of SEQ ID NO: 1881209
cugcuagugcuguccugau

SEQ ID NO: 2026631 - RNA, 19 nt, Artificial Sequence
  Description of Artificial Sequence: Synthetic oligonucleotide
  Antisense strand to SEQ ID NO: 2026630
aucaggacagcacuagcag

SEQ ID NO: 2026632 - RNA, 19 nt, Artificial Sequence
  Description of Artificial Sequence: Synthetic oligonucleotide
  Sense strand starting at position 2165 of SEQ ID NO: 1881209
ugacuauuccuaggagucu

SEQ ID NO: 2026633 - RNA, 19 nt, Artificial Sequence
  Description of Artificial Sequence: Synthetic oligonucleotide
  Antisense strand to SEQ ID NO: 2026632
agacuccuaggaauaguca

SEQ ID NO: 2026634 - RNA, 19 nt, Artificial Sequence
  Description of Artificial Sequence: Synthetic oligonucleotide
  Sense strand starting at position 2273 of SEQ ID NO: 1881209
uucugcuaggcauaaagaa

SEQ ID NO: 2026635 - RNA, 19 nt, Artificial Sequence
  Description of Artificial Sequence: Synthetic oligonucleotide
  Antisense strand to SEQ ID NO: 2026634
uucuuuaugccuagcagaa

SEQ ID NO: 2026636 - RNA, 19 nt, Artificial Sequence
  Description of Artificial Sequence: Synthetic oligonucleotide
  Sense strand starting at position 2379 of SEQ ID NO: 1881209
ccuagugguagacagcaaa

SEQ ID NO: 2026637 - RNA, 19 nt, Artificial Sequence
  Description of Artificial Sequence: Synthetic oligonucleotide
  Antisense strand to SEQ ID NO: 2026636
uuugcugucuaccacuagg

SEQ ID NO: 2026638 - RNA, 19 nt, Artificial Sequence
  Description of Artificial Sequence: Synthetic oligonucleotide
  Sense strand starting at position 2436 of SEQ ID NO: 1881209
gaaguaauacagcagugau

SEQ ID NO: 2026639 - RNA, 19 nt, Artificial Sequence
  Description of Artificial Sequence: Synthetic oligonucleotide
  Antisense strand to SEQ ID NO: 2026638
aucacugcuguauuacuuc

SEQ ID NO: 2026640 - RNA, 19 nt, Artificial Sequence
  Description of Artificial Sequence: Synthetic oligonucleotide
  Sense strand starting at position 2482 of SEQ ID NO: 1881209
augugaggaucuuauuuaa

SEQ ID NO: 2026641 - RNA, 19 nt, Artificial Sequence
  Description of Artificial Sequence: Synthetic oligonucleotide
  Antisense strand to SEQ ID NO: 2026640
uuaaauaagauccucacau

SEQ ID NO: 2026642 - RNA, 19 nt, Artificial Sequence
  Description of Artificial Sequence: Synthetic oligonucleotide
  Sense strand starting at position 2636 of SEQ ID NO: 1881209
cuggucugugcauaacaga

SEQ ID NO: 2026643 - RNA, 19 nt, Artificial Sequence
  Description of Artificial Sequence: Synthetic oligonucleotide
  Antisense strand to SEQ ID NO: 2026642
ucuguuaugcacagaccag

SEQ ID NO: 2026644 - RNA, 19 nt, Artificial Sequence
  Description of Artificial Sequence: Synthetic oligonucleotide
  Sense strand starting at position 2723 of SEQ ID NO: 1881209
agaauccuggcaugauagu

SEQ ID NO: 2026645 - RNA, 19 nt, Artificial Sequence
  Description of Artificial Sequence: Synthetic oligonucleotide
  Antisense strand to SEQ ID NO: 2026644
acuaucaugccaggauucu

SEQ ID NO: 2026646 - RNA, 19 nt, Artificial Sequence
  Description of Artificial Sequence: Synthetic oligonucleotide
  Sense strand starting at position 2724 of SEQ ID NO: 1881209
gaauccuggcaugauaguu

SEQ ID NO: 2026647 - RNA, 19 nt, Artificial Sequence
  Description of Artificial Sequence: Synthetic oligonucleotide
  Antisense strand to SEQ ID NO: 2026646
aacuaucaugccaggauuc

SEQ ID NO: 2026648 - RNA, 19 nt, Artificial Sequence
  Description of Artificial Sequence: Synthetic oligonucleotide
  Sense strand starting at position 2736 of SEQ ID NO: 1881209
gauaguuaacauuaggugu

SEQ ID NO: 2026649 - RNA, 19 nt, Artificial Sequence
  Description of Artificial Sequence: Synthetic oligonucleotide
  Antisense strand to SEQ ID NO: 2026648
acaccuaauguuaacuauc

SEQ ID NO: 2026650 - RNA, 19 nt, Artificial Sequence
  Description of Artificial Sequence: Synthetic oligonucleotide
  Sense strand starting at position 2833 of SEQ ID NO: 1881209
gcagguugacauuagaauu

SEQ ID NO: 2026651 - RNA, 19 nt, Artificial Sequence
  Description of Artificial Sequence: Synthetic oligonucleotide
  Antisense strand to SEQ ID NO: 2026650
aauucuaaugucaaccugc

SEQ ID NO: 2026652 - RNA, 19 nt, Artificial Sequence
  Description of Artificial Sequence: Synthetic oligonucleotide
  Sense strand starting at position 2909 of SEQ ID NO: 1881209
ccagcauaccuaggucaaa

SEQ ID NO: 2026653 - RNA, 19 nt, Artificial Sequence
  Description of Artificial Sequence: Synthetic oligonucleotide
  Antisense strand to SEQ ID NO: 2026652
uuugaccuagguaugcugg

SEQ ID NO: 2026654 - RNA, 19 nt, Artificial Sequence
  Description of Artificial Sequence: Synthetic oligonucleotide
  Sense strand starting at position 3014 of SEQ ID NO: 1881209
ccugccauucgauaucaga

SEQ ID NO: 2026655 - RNA, 19 nt, Artificial Sequence
  Description of Artificial Sequence: Synthetic oligonucleotide
  Antisense strand to SEQ ID NO: 2026654
ucugauaucgaauggcagg

SEQ ID NO: 2026656 - RNA, 19 nt, Artificial Sequence
  Description of Artificial Sequence: Synthetic oligonucleotide
  Sense strand starting at position 3304 of SEQ ID NO: 1881209
ccuaauauaccuggguauu

SEQ ID NO: 2026657 - RNA, 19 nt, Artificial Sequence
  Description of Artificial Sequence: Synthetic oligonucleotide
  Antisense strand to SEQ ID NO: 2026656
aauacccagguauauuagg

SEQ ID NO: 2026658 - RNA, 19 nt, Artificial Sequence
  Description of Artificial Sequence: Synthetic oligonucleotide
  Sense strand starting at position 3305 of SEQ ID NO: 1881209
cuaauauaccuggguauug

SEQ ID NO: 2026659 - RNA, 19 nt, Artificial Sequence
  Description of Artificial Sequence: Synthetic oligonucleotide
  Antisense strand to SEQ ID NO: 2026658
caauacccagguauauuag

SEQ ID NO: 2026660 - RNA, 19 nt, Artificial Sequence
  Description of Artificial Sequence: Synthetic oligonucleotide
  Sense strand starting at position 3342 of SEQ ID NO: 1881209
cuuuauuggguguaaauua

SEQ ID NO: 2026661 - RNA, 19 nt, Artificial Sequence
  Description of Artificial Sequence: Synthetic oligonucleotide
  Antisense strand to SEQ ID NO: 2026660
uaauuuacacccaauaaag

SEQ ID NO: 2026662 - RNA, 19 nt, Artificial Sequence
  Description of Artificial Sequence: Synthetic oligonucleotide
  Sense strand starting at position 3416 of SEQ ID NO: 1881209
uuuagugugucuguaauuu

SEQ ID NO: 2026663 - RNA, 19 nt, Artificial Sequence
  Description of Artificial Sequence: Synthetic oligonucleotide
  Antisense strand to SEQ ID NO: 2026662
aaauuacagacacacuaaa

SEQ ID NO: 2026664 - RNA, 19 nt, Artificial Sequence
  Description of Artificial Sequence: Synthetic oligonucleotide
  Sense strand starting at position 3711 of SEQ ID NO: 1881209
gauugugugguauaaguag

SEQ ID NO: 2026665 - RNA, 19 nt, Artificial Sequence
  Description of Artificial Sequence: Synthetic oligonucleotide
  Antisense strand to SEQ ID NO: 2026664
cuacuuauaccacacaauc

SEQ ID NO: 2026666 - RNA, 19 nt, Artificial Sequence
  Description of Artificial Sequence: Synthetic oligonucleotide
  Sense strand starting at position 3717 of SEQ ID NO: 1881209
gugguauaaguagauuaca

SEQ ID NO: 2026667 - RNA, 19 nt, Artificial Sequence
  Description of Artificial Sequence: Synthetic oligonucleotide
  Antisense strand to SEQ ID NO: 2026666
uguaaucuacuuauaccac

SEQ ID NO: 2026668 - RNA, 19 nt, Artificial Sequence
  Description of Artificial Sequence: Synthetic oligonucleotide
  Sense strand starting at position 3756 of SEQ ID NO: 1881209
guuggcugacaucagaguu

SEQ ID NO: 2026669 - RNA, 19 nt, Artificial Sequence
  Description of Artificial Sequence: Synthetic oligonucleotide
  Antisense strand to SEQ ID NO: 2026668
aacucugaugucagccaac

SEQ ID NO: 2026670 - RNA, 19 nt, Artificial Sequence
  Description of Artificial Sequence: Synthetic oligonucleotide
  Sense strand starting at position 3846 of SEQ ID NO: 1881209
aucuguguugguuagagac

SEQ ID NO: 2026671 - RNA, 19 nt, Artificial Sequence
  Description of Artificial Sequence: Synthetic oligonucleotide
  Antisense strand to SEQ ID NO: 2026670
gucucuaaccaacacagau

SEQ ID NO: 2026672 - RNA, 19 nt, Artificial Sequence
  Description of Artificial Sequence: Synthetic oligonucleotide
  Sense strand starting at position 3860 of SEQ ID NO: 1881209
gagacuuaagaguggguuu

SEQ ID NO: 2026673 - RNA, 19 nt, Artificial Sequence
  Description of Artificial Sequence: Synthetic oligonucleotide
  Antisense strand to SEQ ID NO: 2026672
aaacccacucuuaagucuc

SEQ ID NO: 2026674 - RNA, 19 nt, Artificial Sequence
  Description of Artificial Sequence: Synthetic oligonucleotide
  Sense strand starting at position 3900 of SEQ ID NO: 1881209
auggguagcucuuuaagaa

SEQ ID NO: 2026675 - RNA, 19 nt, Artificial Sequence
  Description of Artificial Sequence: Synthetic oligonucleotide
  Antisense strand to SEQ ID NO: 2026674
uucuuaaagagcuacccau

SEQ ID NO: 2026676 - RNA, 19 nt, Artificial Sequence
  Description of Artificial Sequence: Synthetic oligonucleotide
  Sense strand starting at position 3901 of SEQ ID NO: 1881209
uggguagcucuuuaagaaa

SEQ ID NO: 2026677 - RNA, 19 nt, Artificial Sequence
  Description of Artificial Sequence: Synthetic oligonucleotide
  Antisense strand to SEQ ID NO: 2026676
uuucuuaaagagcuaccca

SEQ ID NO: 2026678 - RNA, 19 nt, Artificial Sequence
  Description of Artificial Sequence: Synthetic oligonucleotide
  Sense strand starting at position 3966 of SEQ ID NO: 1881209
ugauguaugaaggguuucu

SEQ ID NO: 2026679 - RNA, 19 nt, Artificial Sequence
  Description of Artificial Sequence: Synthetic oligonucleotide
  Antisense strand to SEQ ID NO: 2026678
agaaacccuucauacauca

SEQ ID NO: 2026680 - RNA, 19 nt, Artificial Sequence
  Description of Artificial Sequence: Synthetic oligonucleotide
  Sense strand starting at position 14 of SEQ ID NO: 1881210
ggaguuuguaguuaccauu

SEQ ID NO: 2026681 - RNA, 19 nt, Artificial Sequence
  Description of Artificial Sequence: Synthetic oligonucleotide
  Antisense strand to SEQ ID NO: 2026680
aaugguaacuacaaacucc

SEQ ID NO: 2026682 - RNA, 19 nt, Artificial Sequence
  Description of Artificial Sequence: Synthetic oligonucleotide
  Sense strand starting at position 20 of SEQ ID NO: 1881210
uguaguuaccauuggaaga

SEQ ID NO: 2026683 - RNA, 19 nt, Artificial Sequence
  Description of Artificial Sequence: Synthetic oligonucleotide
  Antisense strand to SEQ ID NO: 2026682
ucuuccaaugguaacuaca

SEQ ID NO: 2026684 - RNA, 19 nt, Artificial Sequence
  Description of Artificial Sequence: Synthetic oligonucleotide
  Sense strand starting at position 21 of SEQ ID NO: 1881210
guaguuaccauuggaagau

SEQ ID NO: 2026685 - RNA, 19 nt, Artificial Sequence
  Description of Artificial Sequence: Synthetic oligonucleotide
  Antisense strand to SEQ ID NO: 2026684
aucuuccaaugguaacuac

SEQ ID NO: 2026686 - RNA, 19 nt, Artificial Sequence
  Description of Artificial Sequence: Synthetic oligonucleotide
  Sense strand starting at position 219 of SEQ ID NO: 1881210
gccugaguugcagaaccaa

SEQ ID NO: 2026687 - RNA, 19 nt, Artificial Sequence
  Description of Artificial Sequence: Synthetic oligonucleotide
  Antisense strand to SEQ ID NO: 2026686
uugguucugcaacucaggc

SEQ ID NO: 2026688 - RNA, 19 nt, Artificial Sequence
  Description of Artificial Sequence: Synthetic oligonucleotide
  Sense strand starting at position 305 of SEQ ID NO: 1881210
ggaugucauguuuaaguag

SEQ ID NO: 2026689 - RNA, 19 nt, Artificial Sequence
  Description of Artificial Sequence: Synthetic oligonucleotide
  Antisense strand to SEQ ID NO: 2026688
cuacuuaaacaugacaucc

SEQ ID NO: 2026690 - RNA, 19 nt, Artificial Sequence
  Description of Artificial Sequence: Synthetic oligonucleotide
  Sense strand starting at position 308 of SEQ ID NO: 1881210
ugucauguuuaaguaggaa

SEQ ID NO: 2026691 - RNA, 19 nt, Artificial Sequence
  Description of Artificial Sequence: Synthetic oligonucleotide
  Antisense strand to SEQ ID NO: 2026690
uuccuacuuaaacaugaca

SEQ ID NO: 2026692 - RNA, 19 nt, Artificial Sequence
  Description of Artificial Sequence: Synthetic oligonucleotide
  Sense strand starting at position 619 of SEQ ID NO: 1881210
ugacaauaaugagcacuua

SEQ ID NO: 2026693 - RNA, 19 nt, Artificial Sequence
  Description of Artificial Sequence: Synthetic oligonucleotide
  Antisense strand to SEQ ID NO: 2026692
uaagugcucauuauuguca

SEQ ID NO: 2026694 - RNA, 19 nt, Artificial Sequence
  Description of Artificial Sequence: Synthetic oligonucleotide
  Sense strand starting at position 642 of SEQ ID NO: 1881210
aaccuaugaguaggaagua

SEQ ID NO: 2026695 - RNA, 19 nt, Artificial Sequence
  Description of Artificial Sequence: Synthetic oligonucleotide
  Antisense strand to SEQ ID NO: 2026694
uacuuccuacucauagguu

SEQ ID NO: 2026696 - RNA, 19 nt, Artificial Sequence
  Description of Artificial Sequence: Synthetic oligonucleotide
  Sense strand starting at position 651 of SEQ ID NO: 1881210
guaggaaguagaugcauau

SEQ ID NO: 2026697 - RNA, 19 nt, Artificial Sequence
  Description of Artificial Sequence: Synthetic oligonucleotide
  Antisense strand to SEQ ID NO: 2026696
auaugcaucuacuuccuac

SEQ ID NO: 2026698 - RNA, 19 nt, Artificial Sequence
  Description of Artificial Sequence: Synthetic oligonucleotide
  Sense strand starting at position 655 of SEQ ID NO: 1881210
gaaguagaugcauauuauu

SEQ ID NO: 2026699 - RNA, 19 nt, Artificial Sequence
  Description of Artificial Sequence: Synthetic oligonucleotide
  Antisense strand to SEQ ID NO: 2026698
aauaauaugcaucuacuuc

SEQ ID NO: 2026700 - RNA, 19 nt, Artificial Sequence
  Description of Artificial Sequence: Synthetic oligonucleotide
  Sense strand starting at position 766 of SEQ ID NO: 1881210
uacauuaugucaguaggaa

SEQ ID NO: 2026701 - RNA, 19 nt, Artificial Sequence
  Description of Artificial Sequence: Synthetic oligonucleotide
  Antisense strand to SEQ ID NO: 2026700
uuccuacugacauaaugua

SEQ ID NO: 2026702 - RNA, 19 nt, Artificial Sequence
  Description of Artificial Sequence: Synthetic oligonucleotide
  Sense strand starting at position 876 of SEQ ID NO: 1881210
acaagcauucuguaagaca

SEQ ID NO: 2026703 - RNA, 19 nt, Artificial Sequence
  Description of Artificial Sequence: Synthetic oligonucleotide
  Antisense strand to SEQ ID NO: 2026702
ugucuuacagaaugcuugu

SEQ ID NO: 2026704 - RNA, 19 nt, Artificial Sequence
  Description of Artificial Sequence: Synthetic oligonucleotide
  Sense strand starting at position 898 of SEQ ID NO: 1881210
ucaugugugguucauggau

SEQ ID NO: 2026705 - RNA, 19 nt, Artificial Sequence
  Description of Artificial Sequence: Synthetic oligonucleotide
  Antisense strand to SEQ ID NO: 2026704
auccaugaaccacacauga

SEQ ID NO: 2026706 - RNA, 19 nt, Artificial Sequence
  Description of Artificial Sequence: Synthetic oligonucleotide
  Sense strand starting at position 934 of SEQ ID NO: 1881210
agcuguccagaucauugau

SEQ ID NO: 2026707 - RNA, 19 nt, Artificial Sequence
  Description of Artificial Sequence: Synthetic oligonucleotide
  Antisense strand to SEQ ID NO: 2026706
aucaaugaucuggacagcu

SEQ ID NO: 2026708 - RNA, 19 nt, Artificial Sequence
  Description of Artificial Sequence: Synthetic oligonucleotide
  Sense strand starting at position 936 of SEQ ID NO: 1881210
cuguccagaucauugauga

SEQ ID NO: 2026709 - RNA, 19 nt, Artificial Sequence
  Description of Artificial Sequence: Synthetic oligonucleotide
  Antisense strand to SEQ ID NO: 2026708
ucaucaaugaucuggacag

SEQ ID NO: 2026710 - RNA, 19 nt, Artificial Sequence
  Description of Artificial Sequence: Synthetic oligonucleotide
  Sense strand starting at position 996 of SEQ ID NO: 1881210
ggcaaauuguaaucaccaa

SEQ ID NO: 2026711 - RNA, 19 nt, Artificial Sequence
  Description of Artificial Sequence: Synthetic oligonucleotide
  Antisense strand to SEQ ID NO: 2026710
uuggugauuacaauuugcc

SEQ ID NO: 2026712 - RNA, 19 nt, Artificial Sequence
  Description of Artificial Sequence: Synthetic oligonucleotide
  Sense strand starting at position 1132 of SEQ ID NO: 1881210
guuuaaugauugccagaac

SEQ ID NO: 2026713 - RNA, 19 nt, Artificial Sequence
  Description of Artificial Sequence: Synthetic oligonucleotide
  Antisense strand to SEQ ID NO: 2026712
guucuggcaaucauuaaac

SEQ ID NO: 2026714 - RNA, 19 nt, Artificial Sequence
  Description of Artificial Sequence: Synthetic oligonucleotide
  Sense strand starting at position 1192 of SEQ ID NO: 1881210
gaaaccucaugucugugau

SEQ ID NO: 2026715 - RNA, 19 nt, Artificial Sequence
  Description of Artificial Sequence: Synthetic oligonucleotide
  Antisense strand to SEQ ID NO: 2026714
aucacagacaugagguuuc

SEQ ID NO: 2026716 - RNA, 19 nt, Artificial Sequence
  Description of Artificial Sequence: Synthetic oligonucleotide
  Sense strand starting at position 1320 of SEQ ID NO: 1881210
aggcaauguucuuuauaca

SEQ ID NO: 2026717 - RNA, 19 nt, Artificial Sequence
  Description of Artificial Sequence: Synthetic oligonucleotide
  Antisense strand to SEQ ID NO: 2026716
uguauaaagaacauugccu

SEQ ID NO: 2026718 - RNA, 19 nt, Artificial Sequence
  Description of Artificial Sequence: Synthetic oligonucleotide
  Sense strand starting at position 1321 of SEQ ID NO: 1881210
ggcaauguucuuuauacau

SEQ ID NO: 2026719 - RNA, 19 nt, Artificial Sequence
  Description of Artificial Sequence: Synthetic oligonucleotide
  Antisense strand to SEQ ID NO: 2026718
auguauaaagaacauugcc

SEQ ID NO: 2026720 - RNA, 19 nt, Artificial Sequence
  Description of Artificial Sequence: Synthetic oligonucleotide
  Sense strand starting at position 1354 of SEQ ID NO: 1881210
aguacagaccuuugguaaa

SEQ ID NO: 2026721 - RNA, 19 nt, Artificial Sequence
  Description of Artificial Sequence: Synthetic oligonucleotide
  Antisense strand to SEQ ID NO: 2026720
uuuaccaaaggucuguacu

SEQ ID NO: 2026722 - RNA, 19 nt, Artificial Sequence
  Description of Artificial Sequence: Synthetic oligonucleotide
  Sense strand starting at position 1676 of SEQ ID NO: 1881210
ggaugcaaugaauguggua

SEQ ID NO: 2026723 - RNA, 19 nt, Artificial Sequence
  Description of Artificial Sequence: Synthetic oligonucleotide
  Antisense strand to SEQ ID NO: 2026722
uaccacauucauugcaucc

SEQ ID NO: 2026724 - RNA, 19 nt, Artificial Sequence
  Description of Artificial Sequence: Synthetic oligonucleotide
  Sense strand starting at position 1760 of SEQ ID NO: 1881210
aaauguauugaauguggaa

SEQ ID NO: 2026725 - RNA, 19 nt, Artificial Sequence
  Description of Artificial Sequence: Synthetic oligonucleotide
  Antisense strand to SEQ ID NO: 2026724
uuccacauucaauacauuu

SEQ ID NO: 2026726 - RNA, 19 nt, Artificial Sequence
  Description of Artificial Sequence: Synthetic oligonucleotide
  Sense strand starting at position 2464 of SEQ ID NO: 1881210
uaaguuaaaccuugggaua

SEQ ID NO: 2026727 - RNA, 19 nt, Artificial Sequence
  Description of Artificial Sequence: Synthetic oligonucleotide
  Antisense strand to SEQ ID NO: 2026726
uaucccaagguuuaacuua

SEQ ID NO: 2026728 - RNA, 19 nt, Artificial Sequence
  Description of Artificial Sequence: Synthetic oligonucleotide
  Sense strand starting at position 2465 of SEQ ID NO: 1881210
aaguuaaaccuugggauac

SEQ ID NO: 2026729 - RNA, 19 nt, Artificial Sequence
  Description of Artificial Sequence: Synthetic oligonucleotide
  Antisense strand to SEQ ID NO: 2026728
guaucccaagguuuaacuu

SEQ ID NO: 2026730 - RNA, 19 nt, Artificial Sequence
  Description of Artificial Sequence: Synthetic oligonucleotide
  Sense strand starting at position 2588 of SEQ ID NO: 1881210
gagaaaccuuacguaugua

SEQ ID NO: 2026731 - RNA, 19 nt, Artificial Sequence
  Description of Artificial Sequence: Synthetic oligonucleotide
  Antisense strand to SEQ ID NO: 2026730
uacauacguaagguuucuc

SEQ ID NO: 2026732 - RNA, 19 nt, Artificial Sequence
  Description of Artificial Sequence: Synthetic oligonucleotide
  Sense strand starting at position 2592 of SEQ ID NO: 1881210
aaccuuacguauguaauga

SEQ ID NO: 2026733 - RNA, 19 nt, Artificial Sequence
  Description of Artificial Sequence: Synthetic oligonucleotide
  Antisense strand to SEQ ID NO: 2026732
ucauuacauacguaagguu

SEQ ID NO: 2026734 - RNA, 19 nt, Artificial Sequence
  Description of Artificial Sequence: Synthetic oligonucleotide
  Sense strand starting at position 2600 of SEQ ID NO: 1881210
guauguaaugaauguggaa

SEQ ID NO: 2026735 - RNA, 19 nt, Artificial Sequence
  Description of Artificial Sequence: Synthetic oligonucleotide
  Antisense strand to SEQ ID NO: 2026734
uuccacauucauuacauac

SEQ ID NO: 2026736 - RNA, 19 nt, Artificial Sequence
  Description of Artificial Sequence: Synthetic oligonucleotide
  Sense strand starting at position 2676 of SEQ ID NO: 1881210
accguauggauguaaugaa

SEQ ID NO: 2026737 - RNA, 19 nt, Artificial Sequence
  Description of Artificial Sequence: Synthetic oligonucleotide
  Antisense strand to SEQ ID NO: 2026736
uucauuacauccauacggu

SEQ ID NO: 2026738 - RNA, 19 nt, Artificial Sequence
  Description of Artificial Sequence: Synthetic oligonucleotide
  Sense strand starting at position 2881 of SEQ ID NO: 1881210
gaagucaguccucacugua

SEQ ID NO: 2026739 - RNA, 19 nt, Artificial Sequence
  Description of Artificial Sequence: Synthetic oligonucleotide
  Antisense strand to SEQ ID NO: 2026738
uacagugaggacugacuuc

SEQ ID NO: 2026740 - RNA, 19 nt, Artificial Sequence
  Description of Artificial Sequence: Synthetic oligonucleotide
  Sense strand starting at position 2888 of SEQ ID NO: 1881210
guccucacuguacaucaua

SEQ ID NO: 2026741 - RNA, 19 nt, Artificial Sequence
  Description of Artificial Sequence: Synthetic oligonucleotide
  Antisense strand to SEQ ID NO: 2026740
uaugauguacagugaggac

SEQ ID NO: 2026742 - RNA, 19 nt, Artificial Sequence
  Description of Artificial Sequence: Synthetic oligonucleotide
  Sense strand starting at position 3017 of SEQ ID NO: 1881210
gaaugugaugaauguagga

SEQ ID NO: 2026743 - RNA, 19 nt, Artificial Sequence
  Description of Artificial Sequence: Synthetic oligonucleotide
  Antisense strand to SEQ ID NO: 2026742
uccuacauucaucacauuc

SEQ ID NO: 2026744 - RNA, 19 nt, Artificial Sequence
  Description of Artificial Sequence: Synthetic oligonucleotide
  Sense strand starting at position 3217 of SEQ ID NO: 1881210
gaagucaggccucaguaua

SEQ ID NO: 2026745 - RNA, 19 nt, Artificial Sequence
  Description of Artificial Sequence: Synthetic oligonucleotide
  Antisense strand to SEQ ID NO: 2026744
uauacugaggccugacuuc

SEQ ID NO: 2026746 - RNA, 19 nt, Artificial Sequence
  Description of Artificial Sequence: Synthetic oligonucleotide
  Sense strand starting at position 3445 of SEQ ID NO: 1881210
ccaugcucagucuaggaga

SEQ ID NO: 2026747 - RNA, 19 nt, Artificial Sequence
  Description of Artificial Sequence: Synthetic oligonucleotide
  Antisense strand to SEQ ID NO: 2026746
ucuccuagacugagcaugg

SEQ ID NO: 2026748 - RNA, 19 nt, Artificial Sequence
  Description of Artificial Sequence: Synthetic oligonucleotide
  Sense strand starting at position 3447 of SEQ ID NO: 1881210
augcucagucuaggagaau

SEQ ID NO: 2026749 - RNA, 19 nt, Artificial Sequence
  Description of Artificial Sequence: Synthetic oligonucleotide
  Antisense strand to SEQ ID NO: 2026748
auucuccuagacugagcau

SEQ ID NO: 2026750 - RNA, 19 nt, Artificial Sequence
  Description of Artificial Sequence: Synthetic oligonucleotide
  Sense strand starting at position 3515 of SEQ ID NO: 1881210
uuaaccaugcuguaacaga

SEQ ID NO: 2026751 - RNA, 19 nt, Artificial Sequence
  Description of Artificial Sequence: Synthetic oligonucleotide
  Antisense strand to SEQ ID NO: 2026750
ucuguuacagcaugguuaa

SEQ ID NO: 2026752 - RNA, 19 nt, Artificial Sequence
  Description of Artificial Sequence: Synthetic oligonucleotide
  Sense strand starting at position 3724 of SEQ ID NO: 1881210
cuuugucucaagggaaugu

SEQ ID NO: 2026753 - RNA, 19 nt, Artificial Sequence
  Description of Artificial Sequence: Synthetic oligonucleotide
  Antisense strand to SEQ ID NO: 2026752
acauucccuugagacaaag

SEQ ID NO: 2026754 - RNA, 19 nt, Artificial Sequence
  Description of Artificial Sequence: Synthetic oligonucleotide
  Sense strand starting at position 3725 of SEQ ID NO: 1881210
uuugucucaagggaauguu

SEQ ID NO: 2026755 - RNA, 19 nt, Artificial Sequence
  Description of Artificial Sequence: Synthetic oligonucleotide
  Antisense strand to SEQ ID NO: 2026754
aacauucccuugagacaaa

SEQ ID NO: 2026756 - RNA, 19 nt, Artificial Sequence
  Description of Artificial Sequence: Synthetic oligonucleotide
  Sense strand starting at position 3886 of SEQ ID NO: 1881210
acuugaguagcugaugcaa

SEQ ID NO: 2026757 - RNA, 19 nt, Artificial Sequence
  Description of Artificial Sequence: Synthetic oligonucleotide
  Antisense strand to SEQ ID NO: 2026756
uugcaucagcuacucaagu

SEQ ID NO: 2026758 - RNA, 19 nt, Artificial Sequence
  Description of Artificial Sequence: Synthetic oligonucleotide
  Sense strand starting at position 3954 of SEQ ID NO: 1881210
gcucgaugauuucuaccuu

SEQ ID NO: 2026759 - RNA, 19 nt, Artificial Sequence
  Description of Artificial Sequence: Synthetic oligonucleotide
  Antisense strand to SEQ ID NO: 2026758
aagguagaaaucaucgagc

SEQ ID NO: 2026760 - RNA, 19 nt, Artificial Sequence
  Description of Artificial Sequence: Synthetic oligonucleotide
  Sense strand starting at position 186 of SEQ ID NO: 1881211
acgcaaacauaagugauua

SEQ ID NO: 2026761 - RNA, 19 nt, Artificial Sequence
  Description of Artificial Sequence: Synthetic oligonucleotide
  Antisense strand to SEQ ID NO: 2026760
uaaucacuuauguuugcgu

SEQ ID NO: 2026762 - RNA, 19 nt, Artificial Sequence
  Description of Artificial Sequence: Synthetic oligonucleotide
  Sense strand starting at position 244 of SEQ ID NO: 1881211
agcaguugucaauauagca

SEQ ID NO: 2026763 - RNA, 19 nt, Artificial Sequence
  Description of Artificial Sequence: Synthetic oligonucleotide
  Antisense strand to SEQ ID NO: 2026762
ugcuauauugacaacugcu

SEQ ID NO: 2026764 - RNA, 19 nt, Artificial Sequence
  Description of Artificial Sequence: Synthetic oligonucleotide
  Sense strand starting at position 337 of SEQ ID NO: 1881211
gaaagcucccuugagguau

SEQ ID NO: 2026765 - RNA, 19 nt, Artificial Sequence
  Description of Artificial Sequence: Synthetic oligonucleotide
  Antisense strand to SEQ ID NO: 2026764
auaccucaagggagcuuuc

SEQ ID NO: 2026766 - RNA, 19 nt, Artificial Sequence
  Description of Artificial Sequence: Synthetic oligonucleotide
  Sense strand starting at position 446 of SEQ ID NO: 1881211
ggaaaugacccuggucuga

SEQ ID NO: 2026767 - RNA, 19 nt, Artificial Sequence
  Description of Artificial Sequence: Synthetic oligonucleotide
  Antisense strand to SEQ ID NO: 2026766
ucagaccagggucauuucc

SEQ ID NO: 2026768 - RNA, 19 nt, Artificial Sequence
  Description of Artificial Sequence: Synthetic oligonucleotide
  Sense strand starting at position 482 of SEQ ID NO: 1881211
ugaaaugccggcgaauuau

SEQ ID NO: 2026769 - RNA, 19 nt, Artificial Sequence
  Description of Artificial Sequence: Synthetic oligonucleotide
  Antisense strand to SEQ ID NO: 2026768
auaauucgccggcauuuca

SEQ ID NO: 2026770 - RNA, 19 nt, Artificial Sequence
  Description of Artificial Sequence: Synthetic oligonucleotide
  Sense strand starting at position 575 of SEQ ID NO: 1881211
gucgaaauccuuuaacuuc

SEQ ID NO: 2026771 - RNA, 19 nt, Artificial Sequence
  Description of Artificial Sequence: Synthetic oligonucleotide
  Antisense strand to SEQ ID NO: 2026770
gaaguuaaaggauuucgac

SEQ ID NO: 2026772 - RNA, 19 nt, Artificial Sequence
  Description of Artificial Sequence: Synthetic oligonucleotide
  Sense strand starting at position 719 of SEQ ID NO: 1881211
uauuaacugcugugaaagu

SEQ ID NO: 2026773 - RNA, 19 nt, Artificial Sequence
  Description of Artificial Sequence: Synthetic oligonucleotide
  Antisense strand to SEQ ID NO: 2026772
acuuucacagcaguuaaua

SEQ ID NO: 2026774 - RNA, 19 nt, Artificial Sequence
  Description of Artificial Sequence: Synthetic oligonucleotide
  Sense strand starting at position 753 of SEQ ID NO: 1881211
cucaauugagcgcauugaa

SEQ ID NO: 2026775 - RNA, 19 nt, Artificial Sequence
  Description of Artificial Sequence: Synthetic oligonucleotide
  Antisense strand to SEQ ID NO: 2026774
uucaaugcgcucaauugag

SEQ ID NO: 2026776 - RNA, 19 nt, Artificial Sequence
  Description of Artificial Sequence: Synthetic oligonucleotide
  Sense strand starting at position 756 of SEQ ID NO: 1881211
aauugagcgcauugaauga

SEQ ID NO: 2026777 - RNA, 19 nt, Artificial Sequence
  Description of Artificial Sequence: Synthetic oligonucleotide
  Antisense strand to SEQ ID NO: 2026776
ucauucaaugcgcucaauu

SEQ ID NO: 2026778 - RNA, 19 nt, Artificial Sequence
  Description of Artificial Sequence: Synthetic oligonucleotide
  Sense strand starting at position 815 of SEQ ID NO: 1881211
augcauucuucuuugagau

SEQ ID NO: 2026779 - RNA, 19 nt, Artificial Sequence
  Description of Artificial Sequence: Synthetic oligonucleotide
  Antisense strand to SEQ ID NO: 2026778
aucucaaagaagaaugcau

SEQ ID NO: 2026780 - RNA, 19 nt, Artificial Sequence
  Description of Artificial Sequence: Synthetic oligonucleotide
  Sense strand starting at position 816 of SEQ ID NO: 1881211
ugcauucuucuuugagauu

SEQ ID NO: 2026781 - RNA, 19 nt, Artificial Sequence
  Description of Artificial Sequence: Synthetic oligonucleotide
  Antisense strand to SEQ ID NO: 2026780
aaucucaaagaagaaugca

SEQ ID NO: 2026782 - RNA, 19 nt, Artificial Sequence
  Description of Artificial Sequence: Synthetic oligonucleotide
  Sense strand starting at position 980 of SEQ ID NO: 1881211
cccggaagagucugguuaa

SEQ ID NO: 2026783 - RNA, 19 nt, Artificial Sequence
  Description of Artificial Sequence: Synthetic oligonucleotide
  Antisense strand to SEQ ID NO: 2026782
uuaaccagacucuuccggg

SEQ ID NO: 2026784 - RNA, 19 nt, Artificial Sequence
  Description of Artificial Sequence: Synthetic oligonucleotide
  Sense strand starting at position 1084 of SEQ ID NO: 1881211
ucaggacuuccagagacgu

SEQ ID NO: 2026785 - RNA, 19 nt, Artificial Sequence
  Description of Artificial Sequence: Synthetic oligonucleotide
  Antisense strand to SEQ ID NO: 2026784
acgucucuggaaguccuga

SEQ ID NO: 2026786 - RNA, 19 nt, Artificial Sequence
  Description of Artificial Sequence: Synthetic oligonucleotide
  Sense strand starting at position 1940 of SEQ ID NO: 1881211
ccucuuguccggcauaaca

SEQ ID NO: 2026787 - RNA, 19 nt, Artificial Sequence
  Description of Artificial Sequence: Synthetic oligonucleotide
  Antisense strand to SEQ ID NO: 2026786
uguuaugccggacaagagg

SEQ ID NO: 2026788 - RNA, 19 nt, Artificial Sequence
  Description of Artificial Sequence: Synthetic oligonucleotide
  Sense strand starting at position 2119 of SEQ ID NO: 1881211
acgucauugcggguagcaa

SEQ ID NO: 2026789 - RNA, 19 nt, Artificial Sequence
  Description of Artificial Sequence: Synthetic oligonucleotide
  Antisense strand to SEQ ID NO: 2026788
uugcuacccgcaaugacgu

SEQ ID NO: 2026790 - RNA, 19 nt, Artificial Sequence
  Description of Artificial Sequence: Synthetic oligonucleotide
  Sense strand starting at position 2255 of SEQ ID NO: 1881211
ggccucgggucgauuguaa

SEQ ID NO: 2026791 - RNA, 19 nt, Artificial Sequence
  Description of Artificial Sequence: Synthetic oligonucleotide
  Antisense strand to SEQ ID NO: 2026790
uuacaaucgacccgaggcc

SEQ ID NO: 2026792 - RNA, 19 nt, Artificial Sequence
  Description of Artificial Sequence: Synthetic oligonucleotide
  Sense strand starting at position 2275 of SEQ ID NO: 1881211
ccuccaagcgugcuguuua

SEQ ID NO: 2026793 - RNA, 19 nt, Artificial Sequence
  Description of Artificial Sequence: Synthetic oligonucleotide
  Antisense strand to SEQ ID NO: 2026792
uaaacagcacgcuuggagg

SEQ ID NO: 2026794 - RNA, 19 nt, Artificial Sequence
  Description of Artificial Sequence: Synthetic oligonucleotide
  Sense strand starting at position 2307 of SEQ ID NO: 1881211
ccgggaauccgaagcguuu

SEQ ID NO: 2026795 - RNA, 19 nt, Artificial Sequence
  Description of Artificial Sequence: Synthetic oligonucleotide
  Antisense strand to SEQ ID NO: 2026794
aaacgcuucggauucccgg

SEQ ID NO: 2026796 - RNA, 19 nt, Artificial Sequence
  Description of Artificial Sequence: Synthetic oligonucleotide
  Sense strand starting at position 2575 of SEQ ID NO: 1881211
aagagcauauggucaguuu

SEQ ID NO: 2026797 - RNA, 19 nt, Artificial Sequence
  Description of Artificial Sequence: Synthetic oligonucleotide
  Antisense strand to SEQ ID NO: 2026796
aaacugaccauaugcucuu

SEQ ID NO: 2026798 - RNA, 19 nt, Artificial Sequence
  Description of Artificial Sequence: Synthetic oligonucleotide
  Sense strand starting at position 2666 of SEQ ID NO: 1881211
uggguugaguguucuauuu

SEQ ID NO: 2026799 - RNA, 19 nt, Artificial Sequence
  Description of Artificial Sequence: Synthetic oligonucleotide
  Antisense strand to SEQ ID NO: 2026798
aaauagaacacucaaccca

SEQ ID NO: 2026800 - RNA, 19 nt, Artificial Sequence
  Description of Artificial Sequence: Synthetic oligonucleotide
  Sense strand starting at position 2719 of SEQ ID NO: 1881211
cagagaugucacugucacu

SEQ ID NO: 2026801 - RNA, 19 nt, Artificial Sequence
  Description of Artificial Sequence: Synthetic oligonucleotide
  Antisense strand to SEQ ID NO: 2026800
agugacagugacaucucug

SEQ ID NO: 2026802 - RNA, 19 nt, Artificial Sequence
  Description of Artificial Sequence: Synthetic oligonucleotide
  Sense strand starting at position 2741 of SEQ ID NO: 1881211
cucaucuguccagaacugu

SEQ ID NO: 2026803 - RNA, 19 nt, Artificial Sequence
  Description of Artificial Sequence: Synthetic oligonucleotide
  Antisense strand to SEQ ID NO: 2026802
acaguucuggacagaugag

SEQ ID NO: 2026804 - RNA, 19 nt, Artificial Sequence
  Description of Artificial Sequence: Synthetic oligonucleotide
  Sense strand starting at position 2887 of SEQ ID NO: 1881211
caucacagucuuuggcaga

SEQ ID NO: 2026805 - RNA, 19 nt, Artificial Sequence
  Description of Artificial Sequence: Synthetic oligonucleotide
  Antisense strand to SEQ ID NO: 2026804
ucugccaaagacugugaug

SEQ ID NO: 2026806 - RNA, 19 nt, Artificial Sequence
  Description of Artificial Sequence: Synthetic oligonucleotide
  Sense strand starting at position 2892 of SEQ ID NO: 1881211
cagucuuuggcagauggaa

SEQ ID NO: 2026807 - RNA, 19 nt, Artificial Sequence
  Description of Artificial Sequence: Synthetic oligonucleotide
  Antisense strand to SEQ ID NO: 2026806
uuccaucugccaaagacug

SEQ ID NO: 2026808 - RNA, 19 nt, Artificial Sequence
  Description of Artificial Sequence: Synthetic oligonucleotide
  Sense strand starting at position 2894 of SEQ ID NO: 1881211
gucuuuggcagauggaaga

SEQ ID NO: 2026809 - RNA, 19 nt, Artificial Sequence
  Description of Artificial Sequence: Synthetic oligonucleotide
  Antisense strand to SEQ ID NO: 2026808
ucuuccaucugccaaagac

SEQ ID NO: 2026810 - RNA, 19 nt, Artificial Sequence
  Description of Artificial Sequence: Synthetic oligonucleotide
  Sense strand starting at position 2904 of SEQ ID NO: 1881211
gauggaagauggcuuuacu

SEQ ID NO: 2026811 - RNA, 19 nt, Artificial Sequence
  Description of Artificial Sequence: Synthetic oligonucleotide
  Antisense strand to SEQ ID NO: 2026810
aguaaagccaucuuccauc

SEQ ID NO: 2026812 - RNA, 19 nt, Artificial Sequence
  Description of Artificial Sequence: Synthetic oligonucleotide
  Sense strand starting at position 2907 of SEQ ID NO: 1881211
ggaagauggcuuuacuucu

SEQ ID NO: 2026813 - RNA, 19 nt, Artificial Sequence
  Description of Artificial Sequence: Synthetic oligonucleotide
  Antisense strand to SEQ ID NO: 2026812
agaaguaaagccaucuucc

SEQ ID NO: 2026814 - RNA, 19 nt, Artificial Sequence
  Description of Artificial Sequence: Synthetic oligonucleotide
  Sense strand starting at position 2953 of SEQ ID NO: 1881211
aguauuuauugggcgcaca

SEQ ID NO: 2026815 - RNA, 19 nt, Artificial Sequence
  Description of Artificial Sequence: Synthetic oligonucleotide
  Antisense strand to SEQ ID NO: 2026814
ugugcgcccaauaaauacu

SEQ ID NO: 2026816 - RNA, 19 nt, Artificial Sequence
  Description of Artificial Sequence: Synthetic oligonucleotide
  Sense strand starting at position 2994 of SEQ ID NO: 1881211
cugcgauggguucaaagua

SEQ ID NO: 2026817 - RNA, 19 nt, Artificial Sequence
  Description of Artificial Sequence: Synthetic oligonucleotide
  Antisense strand to SEQ ID NO: 2026816
uacuuugaacccaucgcag

SEQ ID NO: 2026818 - RNA, 19 nt, Artificial Sequence
  Description of Artificial Sequence: Synthetic oligonucleotide
  Sense strand starting at position 3039 of SEQ ID NO: 1881211
uuuauaaccuggcuuguga

SEQ ID NO: 2026819 - RNA, 19 nt, Artificial Sequence
  Description of Artificial Sequence: Synthetic oligonucleotide
  Antisense strand to SEQ ID NO: 2026818
ucacaagccagguuauaaa

SEQ ID NO: 2026820 - RNA, 19 nt, Artificial Sequence
  Description of Artificial Sequence: Synthetic oligonucleotide
  Sense strand starting at position 3041 of SEQ ID NO: 1881211
uauaaccuggcuugugaga

SEQ ID NO: 2026821 - RNA, 19 nt, Artificial Sequence
  Description of Artificial Sequence: Synthetic oligonucleotide
  Antisense strand to SEQ ID NO: 2026820
ucucacaagccagguuaua

SEQ ID NO: 2026822 - RNA, 19 nt, Artificial Sequence
  Description of Artificial Sequence: Synthetic oligonucleotide
  Sense strand starting at position 3048 of SEQ ID NO: 1881211
uggcuugugagacagacua

SEQ ID NO: 2026823 - RNA, 19 nt, Artificial Sequence
  Description of Artificial Sequence: Synthetic oligonucleotide
  Antisense strand to SEQ ID NO: 2026822
uagucugucucacaagcca

SEQ ID NO: 2026824 - RNA, 19 nt, Artificial Sequence
  Description of Artificial Sequence: Synthetic oligonucleotide
  Sense strand starting at position 3114 of SEQ ID NO: 1881211
ccaccaaagaguugugaug

SEQ ID NO: 2026825 - RNA, 19 nt, Artificial Sequence
  Description of Artificial Sequence: Synthetic oligonucleotide
  Antisense strand to SEQ ID NO: 2026824
caucacaacucuuuggugg

SEQ ID NO: 2026826 - RNA, 19 nt, Artificial Sequence
  Description of Artificial Sequence: Synthetic oligonucleotide
  Sense strand starting at position 3251 of SEQ ID NO: 1881211
acugcauucugagucuaga

SEQ ID NO: 2026827 - RNA, 19 nt, Artificial Sequence
  Description of Artificial Sequence: Synthetic oligonucleotide
  Antisense strand to SEQ ID NO: 2026826
ucuagacucagaaugcagu

SEQ ID NO: 2026828 - RNA, 19 nt, Artificial Sequence
  Description of Artificial Sequence: Synthetic oligonucleotide
  Sense strand starting at position 3254 of SEQ ID NO: 1881211
gcauucugagucuagaggu

SEQ ID NO: 2026829 - RNA, 19 nt, Artificial Sequence
  Description of Artificial Sequence: Synthetic oligonucleotide
  Antisense strand to SEQ ID NO: 2026828
accucuagacucagaaugc

SEQ ID NO: 2026830 - RNA, 19 nt, Artificial Sequence
  Description of Artificial Sequence: Synthetic oligonucleotide
  Sense strand starting at position 3260 of SEQ ID NO: 1881211
ugagucuagagguggagaa

SEQ ID NO: 2026831 - RNA, 19 nt, Artificial Sequence
  Description of Artificial Sequence: Synthetic oligonucleotide
  Antisense strand to SEQ ID NO: 2026830
uucuccaccucuagacuca

SEQ ID NO: 2026832 - RNA, 19 nt, Artificial Sequence
  Description of Artificial Sequence: Synthetic oligonucleotide
  Sense strand starting at position 3322 of SEQ ID NO: 1881211
cucucugauggccauguaa

SEQ ID NO: 2026833 - RNA, 19 nt, Artificial Sequence
  Description of Artificial Sequence: Synthetic oligonucleotide
  Antisense strand to SEQ ID NO: 2026832
uuacauggccaucagagag

SEQ ID NO: 2026834 - RNA, 19 nt, Artificial Sequence
  Description of Artificial Sequence: Synthetic oligonucleotide
  Sense strand starting at position 3324 of SEQ ID NO: 1881211
cucugauggccauguaacu

SEQ ID NO: 2026835 - RNA, 19 nt, Artificial Sequence
  Description of Artificial Sequence: Synthetic oligonucleotide
  Antisense strand to SEQ ID NO: 2026834
aguuacauggccaucagag

SEQ ID NO: 2026836 - RNA, 19 nt, Artificial Sequence
  Description of Artificial Sequence: Synthetic oligonucleotide
  Sense strand starting at position 3426 of SEQ ID NO: 1881211
uccauagccuuguuauuua

SEQ ID NO: 2026837 - RNA, 19 nt, Artificial Sequence
  Description of Artificial Sequence: Synthetic oligonucleotide
  Antisense strand to SEQ ID NO: 2026836
uaaauaacaaggcuaugga

SEQ ID NO: 2026838 - RNA, 19 nt, Artificial Sequence
  Description of Artificial Sequence: Synthetic oligonucleotide
  Sense strand starting at position 3584 of SEQ ID NO: 1881211
gguagaagcuaagcuauaa

SEQ ID NO: 2026839 - RNA, 19 nt, Artificial Sequence
  Description of Artificial Sequence: Synthetic oligonucleotide
  Antisense strand to SEQ ID NO: 2026838
uuauagcuuagcuucuacc

SEQ ID NO: 2026840 - RNA, 19 nt, Artificial Sequence
  Description of Artificial Sequence: Synthetic oligonucleotide
  Sense strand starting at position 428 of SEQ ID NO: 1881212
uguccaugaaacuguggua

SEQ ID NO: 2026841 - RNA, 19 nt, Artificial Sequence
  Description of Artificial Sequence: Synthetic oligonucleotide
  Antisense strand to SEQ ID NO: 2026840
uaccacaguuucauggaca

SEQ ID NO: 2026842 - RNA, 19 nt, Artificial Sequence
  Description of Artificial Sequence: Synthetic oligonucleotide
  Sense strand starting at position 457 of SEQ ID NO: 1881212
auggaaugcugcuugucaa

SEQ ID NO: 2026843 - RNA, 19 nt, Artificial Sequence
  Description of Artificial Sequence: Synthetic oligonucleotide
  Antisense strand to SEQ ID NO: 2026842
uugacaagcagcauuccau

SEQ ID NO: 2026844 - RNA, 19 nt, Artificial Sequence
  Description of Artificial Sequence: Synthetic oligonucleotide
  Sense strand starting at position 458 of SEQ ID NO: 1881212
uggaaugcugcuugucaau

SEQ ID NO: 2026845 - RNA, 19 nt, Artificial Sequence
  Description of Artificial Sequence: Synthetic oligonucleotide
  Antisense strand to SEQ ID NO: 2026844
auugacaagcagcauucca

SEQ ID NO: 2026846 - RNA, 19 nt, Artificial Sequence
  Description of Artificial Sequence: Synthetic oligonucleotide
  Sense strand starting at position 464 of SEQ ID NO: 1881212
gcugcuugucaauaaagag

SEQ ID NO: 2026847 - RNA, 19 nt, Artificial Sequence
  Description of Artificial Sequence: Synthetic oligonucleotide
  Antisense strand to SEQ ID NO: 2026846
cucuuuauugacaagcagc

SEQ ID NO: 2026848 - RNA, 19 nt, Artificial Sequence
  Description of Artificial Sequence: Synthetic oligonucleotide
  Sense strand starting at position 562 of SEQ ID NO: 1881212
ucacauaugggaugauucu

SEQ ID NO: 2026849 - RNA, 19 nt, Artificial Sequence
  Description of Artificial Sequence: Synthetic oligonucleotide
  Antisense strand to SEQ ID NO: 2026848
agaaucaucccauauguga

SEQ ID NO: 2026850 - RNA, 19 nt, Artificial Sequence
  Description of Artificial Sequence: Synthetic oligonucleotide
  Sense strand starting at position 568 of SEQ ID NO: 1881212
augggaugauucuauuuau

SEQ ID NO: 2026851 - RNA, 19 nt, Artificial Sequence
  Description of Artificial Sequence: Synthetic oligonucleotide
  Antisense strand to SEQ ID NO: 2026850
auaaauagaaucaucccau

SEQ ID NO: 2026852 - RNA, 19 nt, Artificial Sequence
  Description of Artificial Sequence: Synthetic oligonucleotide
  Sense strand starting at position 1165 of SEQ ID NO: 1881212
gggagcauauuugggacaa

SEQ ID NO: 2026853 - RNA, 19 nt, Artificial Sequence
  Description of Artificial Sequence: Synthetic oligonucleotide
  Antisense strand to SEQ ID NO: 2026852
uugucccaaauaugcuccc

SEQ ID NO: 2026854 - RNA, 19 nt, Artificial Sequence
  Description of Artificial Sequence: Synthetic oligonucleotide
  Sense strand starting at position 1166 of SEQ ID NO: 1881212
ggagcauauuugggacaau

SEQ ID NO: 2026855 - RNA, 19 nt, Artificial Sequence
  Description of Artificial Sequence: Synthetic oligonucleotide
  Antisense strand to SEQ ID NO: 2026854
auugucccaaauaugcucc

SEQ ID NO: 2026856 - RNA, 19 nt, Artificial Sequence
  Description of Artificial Sequence: Synthetic oligonucleotide
  Sense strand starting at position 1167 of SEQ ID NO: 1881212
gagcauauuugggacaaug

SEQ ID NO: 2026857 - RNA, 19 nt, Artificial Sequence
  Description of Artificial Sequence: Synthetic oligonucleotide
  Antisense strand to SEQ ID NO: 2026856
cauugucccaaauaugcuc

SEQ ID NO: 2026858 - RNA, 19 nt, Artificial Sequence
  Description of Artificial Sequence: Synthetic oligonucleotide
  Sense strand starting at position 1244 of SEQ ID NO: 1881212
aucauagagguagguaauu

SEQ ID NO: 2026859 - RNA, 19 nt, Artificial Sequence
  Description of Artificial Sequence: Synthetic oligonucleotide
  Antisense strand to SEQ ID NO: 2026858
aauuaccuaccucuaugau

SEQ ID NO: 2026860 - RNA, 19 nt, Artificial Sequence
  Description of Artificial Sequence: Synthetic oligonucleotide
  Sense strand starting at position 1253 of SEQ ID NO: 1881212
guagguaauuuacaucuca

SEQ ID NO: 2026861 - RNA, 19 nt, Artificial Sequence
  Description of Artificial Sequence: Synthetic oligonucleotide
  Antisense strand to SEQ ID NO: 2026860
ugagauguaaauuaccuac

SEQ ID NO: 2026862 - RNA, 19 nt, Artificial Sequence
  Description of Artificial Sequence: Synthetic oligonucleotide
  Sense strand starting at position 1294 of SEQ ID NO: 1881212
gagguaaguguugguaaug

SEQ ID NO: 2026863 - RNA, 19 nt, Artificial Sequence
  Description of Artificial Sequence: Synthetic oligonucleotide
  Antisense strand to SEQ ID NO: 2026862
cauuaccaacacuuaccuc

SEQ ID NO: 2026864 - RNA, 19 nt, Artificial Sequence
  Description of Artificial Sequence: Synthetic oligonucleotide
  Sense strand starting at position 1295 of SEQ ID NO: 1881212
agguaaguguugguaaugu

SEQ ID NO: 2026865 - RNA, 19 nt, Artificial Sequence
  Description of Artificial Sequence: Synthetic oligonucleotide
  Antisense strand to SEQ ID NO: 2026864
acauuaccaacacuuaccu

SEQ ID NO: 2026866 - RNA, 19 nt, Artificial Sequence
  Description of Artificial Sequence: Synthetic oligonucleotide
  Sense strand starting at position 1297 of SEQ ID NO: 1881212
guaaguguugguaaugugu

SEQ ID NO: 2026867 - RNA, 19 nt, Artificial Sequence
  Description of Artificial Sequence: Synthetic oligonucleotide
  Antisense strand to SEQ ID NO: 2026866
acacauuaccaacacuuac

SEQ ID NO: 2026868 - RNA, 19 nt, Artificial Sequence
  Description of Artificial Sequence: Synthetic oligonucleotide
  Sense strand starting at position 1635 of SEQ ID NO: 1881212
cuucuuacaguguguucua

SEQ ID NO: 2026869 - RNA, 19 nt, Artificial Sequence
  Description of Artificial Sequence: Synthetic oligonucleotide
  Antisense strand to SEQ ID NO: 2026868
uagaacacacuguaagaag

SEQ ID NO: 2026870 - RNA, 19 nt, Artificial Sequence
  Description of Artificial Sequence: Synthetic oligonucleotide
  Sense strand starting at position 1636 of SEQ ID NO: 1881212
uucuuacaguguguucuau

SEQ ID NO: 2026871 - RNA, 19 nt, Artificial Sequence
  Description of Artificial Sequence: Synthetic oligonucleotide
  Antisense strand to SEQ ID NO: 2026870
auagaacacacuguaagaa

SEQ ID NO: 2026872 - RNA, 19 nt, Artificial Sequence
  Description of Artificial Sequence: Synthetic oligonucleotide
  Sense strand starting at position 1642 of SEQ ID NO: 1881212
caguguguucuauggaaca

SEQ ID NO: 2026873 - RNA, 19 nt, Artificial Sequence
  Description of Artificial Sequence: Synthetic oligonucleotide
  Antisense strand to SEQ ID NO: 2026872
uguuccauagaacacacug

SEQ ID NO: 2026874 - RNA, 19 nt, Artificial Sequence
  Description of Artificial Sequence: Synthetic oligonucleotide
  Sense strand starting at position 1644 of SEQ ID NO: 1881212
guguguucuauggaacagu

SEQ ID NO: 2026875 - RNA, 19 nt, Artificial Sequence
  Description of Artificial Sequence: Synthetic oligonucleotide
  Antisense strand to SEQ ID NO: 2026874
acuguuccauagaacacac

SEQ ID NO: 2026876 - RNA, 19 nt, Artificial Sequence
  Description of Artificial Sequence: Synthetic oligonucleotide
  Sense strand starting at position 1653 of SEQ ID NO: 1881212
auggaacaguggucugcaa

SEQ ID NO: 2026877 - RNA, 19 nt, Artificial Sequence
  Description of Artificial Sequence: Synthetic oligonucleotide
  Antisense strand to SEQ ID NO: 2026876
uugcagaccacuguuccau

SEQ ID NO: 2026878 - RNA, 19 nt, Artificial Sequence
  Description of Artificial Sequence: Synthetic oligonucleotide
  Sense strand starting at position 1687 of SEQ ID NO: 1881212
ggguuccucaugcaaggaa

SEQ ID NO: 2026879 - RNA, 19 nt, Artificial Sequence
  Description of Artificial Sequence: Synthetic oligonucleotide
  Antisense strand to SEQ ID NO: 2026878
uuccuugcaugaggaaccc

SEQ ID NO: 2026880 - RNA, 19 nt, Artificial Sequence
  Description of Artificial Sequence: Synthetic oligonucleotide
  Sense strand starting at position 1758 of SEQ ID NO: 1881212
gcuaaaggcacugaguaau

SEQ ID NO: 2026881 - RNA, 19 nt, Artificial Sequence
  Description of Artificial Sequence: Synthetic oligonucleotide
  Antisense strand to SEQ ID NO: 2026880
auuacucagugccuuuagc

SEQ ID NO: 2026882 - RNA, 19 nt, Artificial Sequence
  Description of Artificial Sequence: Synthetic oligonucleotide
  Sense strand starting at position 1890 of SEQ ID NO: 1881212
ggaucuuaggcuggaagga

SEQ ID NO: 2026883 - RNA, 19 nt, Artificial Sequence
  Description of Artificial Sequence: Synthetic oligonucleotide
  Antisense strand to SEQ ID NO: 2026882
uccuuccagccuaagaucc

SEQ ID NO: 2026884 - RNA, 19 nt, Artificial Sequence
  Description of Artificial Sequence: Synthetic oligonucleotide
  Sense strand starting at position 1944 of SEQ ID NO: 1881212
agcauugcucagggcuaga

SEQ ID NO: 2026885 - RNA, 19 nt, Artificial Sequence
  Description of Artificial Sequence: Synthetic oligonucleotide
  Antisense strand to SEQ ID NO: 2026884
ucuagcccugagcaaugcu

SEQ ID NO: 2026886 - RNA, 19 nt, Artificial Sequence
  Description of Artificial Sequence: Synthetic oligonucleotide
  Sense strand starting at position 2219 of SEQ ID NO: 1881212
gguguuuccucuccucuga

SEQ ID NO: 2026887 - RNA, 19 nt, Artificial Sequence
  Description of Artificial Sequence: Synthetic oligonucleotide
  Antisense strand to SEQ ID NO: 2026886
ucagaggagaggaaacacc

SEQ ID NO: 2026888 - RNA, 19 nt, Artificial Sequence
  Description of Artificial Sequence: Synthetic oligonucleotide
  Sense strand starting at position 2287 of SEQ ID NO: 1881212
cucagaugcugccuaggaa

SEQ ID NO: 2026889 - RNA, 19 nt, Artificial Sequence
  Description of Artificial Sequence: Synthetic oligonucleotide
  Antisense strand to SEQ ID NO: 2026888
uuccuaggcagcaucugag

SEQ ID NO: 2026890 - RNA, 19 nt, Artificial Sequence
  Description of Artificial Sequence: Synthetic oligonucleotide
  Sense strand starting at position 2364 of SEQ ID NO: 1881212
augaaauccucacccgauu

SEQ ID NO: 2026891 - RNA, 19 nt, Artificial Sequence
  Description of Artificial Sequence: Synthetic oligonucleotide
  Antisense strand to SEQ ID NO: 2026890
aaucgggugaggauuucau

SEQ ID NO: 2026892 - RNA, 19 nt, Artificial Sequence
  Description of Artificial Sequence: Synthetic oligonucleotide
  Sense strand starting at position 2471 of SEQ ID NO: 1881212
ggaaucaccuuccacagaa

SEQ ID NO: 2026893 - RNA, 19 nt, Artificial Sequence
  Description of Artificial Sequence: Synthetic oligonucleotide
  Antisense strand to SEQ ID NO: 2026892
uucuguggaaggugauucc

SEQ ID NO: 2026894 - RNA, 19 nt, Artificial Sequence
  Description of Artificial Sequence: Synthetic oligonucleotide
  Sense strand starting at position 2823 of SEQ ID NO: 1881212
agcaguguucaugugugua

SEQ ID NO: 2026895 - RNA, 19 nt, Artificial Sequence
  Description of Artificial Sequence: Synthetic oligonucleotide
  Antisense strand to SEQ ID NO: 2026894
uacacacaugaacacugcu

SEQ ID NO: 2026896 - RNA, 19 nt, Artificial Sequence
  Description of Artificial Sequence: Synthetic oligonucleotide
  Sense strand starting at position 2833 of SEQ ID NO: 1881212
auguguguagcgucauaca

SEQ ID NO: 2026897 - RNA, 19 nt, Artificial Sequence
  Description of Artificial Sequence: Synthetic oligonucleotide
  Antisense strand to SEQ ID NO: 2026896
uguaugacgcuacacacau

SEQ ID NO: 2026898 - RNA, 19 nt, Artificial Sequence
  Description of Artificial Sequence: Synthetic oligonucleotide
  Sense strand starting at position 2842 of SEQ ID NO: 1881212
gcgucauacacucaguagu

SEQ ID NO: 2026899 - RNA, 19 nt, Artificial Sequence
  Description of Artificial Sequence: Synthetic oligonucleotide
  Antisense strand to SEQ ID NO: 2026898
acuacugaguguaugacgc

SEQ ID NO: 2026900 - RNA, 19 nt, Artificial Sequence
  Description of Artificial Sequence: Synthetic oligonucleotide
  Sense strand starting at position 2844 of SEQ ID NO: 1881212
gucauacacucaguagugu

SEQ ID NO: 2026901 - RNA, 19 nt, Artificial Sequence
  Description of Artificial Sequence: Synthetic oligonucleotide
  Antisense strand to SEQ ID NO: 2026900
acacuacugaguguaugac

SEQ ID NO: 2026902 - RNA, 19 nt, Artificial Sequence
  Description of Artificial Sequence: Synthetic oligonucleotide
  Sense strand starting at position 2990 of SEQ ID NO: 1881212
cggagucucgcuguuacga

SEQ ID NO: 2026903 - RNA, 19 nt, Artificial Sequence
  Description of Artificial Sequence: Synthetic oligonucleotide
  Antisense strand to SEQ ID NO: 2026902
ucguaacagcgagacuccg

SEQ ID NO: 2026904 - RNA, 19 nt, Artificial Sequence
  Description of Artificial Sequence: Synthetic oligonucleotide
  Sense strand starting at position 3106 of SEQ ID NO: 1881212
aggaauuucuccgguacau

SEQ ID NO: 2026905 - RNA, 19 nt, Artificial Sequence
  Description of Artificial Sequence: Synthetic oligonucleotide
  Antisense strand to SEQ ID NO: 2026904
auguaccggagaaauuccu

SEQ ID NO: 2026906 - RNA, 19 nt, Artificial Sequence
  Description of Artificial Sequence: Synthetic oligonucleotide
  Sense strand starting at position 3552 of SEQ ID NO: 1881212
gaccaagagucgucaagag

SEQ ID NO: 2026907 - RNA, 19 nt, Artificial Sequence
  Description of Artificial Sequence: Synthetic oligonucleotide
  Antisense strand to SEQ ID NO: 2026906
cucuugacgacucuugguc

SEQ ID NO: 2026908 - RNA, 19 nt, Artificial Sequence
  Description of Artificial Sequence: Synthetic oligonucleotide
  Sense strand starting at position 3855 of SEQ ID NO: 1881212
ggguguauuugguuucuca

SEQ ID NO: 2026909 - RNA, 19 nt, Artificial Sequence
  Description of Artificial Sequence: Synthetic oligonucleotide
  Antisense strand to SEQ ID NO: 2026908
ugagaaaccaaauacaccc

SEQ ID NO: 2026910 - RNA, 19 nt, Artificial Sequence
  Description of Artificial Sequence: Synthetic oligonucleotide
  Sense strand starting at position 3875 of SEQ ID NO: 1881212
acgugugcuaagcuuuauu

SEQ ID NO: 2026911 - RNA, 19 nt, Artificial Sequence
  Description of Artificial Sequence: Synthetic oligonucleotide
  Antisense strand to SEQ ID NO: 2026910
aauaaagcuuagcacacgu

SEQ ID NO: 2026912 - RNA, 19 nt, Artificial Sequence
  Description of Artificial Sequence: Synthetic oligonucleotide
  Sense strand starting at position 3877 of SEQ ID NO: 1881212
gugugcuaagcuuuauucu

SEQ ID NO: 2026913 - RNA, 19 nt, Artificial Sequence
  Description of Artificial Sequence: Synthetic oligonucleotide
  Antisense strand to SEQ ID NO: 2026912
agaauaaagcuuagcacac

SEQ ID NO: 2026914 - RNA, 19 nt, Artificial Sequence
  Description of Artificial Sequence: Synthetic oligonucleotide
  Sense strand starting at position 3878 of SEQ ID NO: 1881212
ugugcuaagcuuuauucuu

SEQ ID NO: 2026915 - RNA, 19 nt, Artificial Sequence
  Description of Artificial Sequence: Synthetic oligonucleotide
  Antisense strand to SEQ ID NO: 2026914
aagaauaaagcuuagcaca

SEQ ID NO: 2026916 - RNA, 19 nt, Artificial Sequence
  Description of Artificial Sequence: Synthetic oligonucleotide
  Sense strand starting at position 3925 of SEQ ID NO: 1881212
aaauaauggucuccuggga

SEQ ID NO: 2026917 - RNA, 19 nt, Artificial Sequence
  Description of Artificial Sequence: Synthetic oligonucleotide
  Antisense strand to SEQ ID NO: 2026916
ucccaggagaccauuauuu

SEQ ID NO: 2026918 - RNA, 19 nt, Artificial Sequence
  Description of Artificial Sequence: Synthetic oligonucleotide
  Sense strand starting at position 3929 of SEQ ID NO: 1881212
aauggucuccugggaauau

SEQ ID NO: 2026919 - RNA, 19 nt, Artificial Sequence
  Description of Artificial Sequence: Synthetic oligonucleotide
  Antisense strand to SEQ ID NO: 2026918
auauucccaggagaccauu

SEQ ID NO: 2026920 - RNA, 19 nt, Artificial Sequence
  Description of Artificial Sequence: Synthetic oligonucleotide
  Sense strand starting at position 107 of SEQ ID NO: 1881213
ugaauagugcuguauugaa

SEQ ID NO: 2026921 - RNA, 19 nt, Artificial Sequence
  Description of Artificial Sequence: Synthetic oligonucleotide
  Antisense strand to SEQ ID NO: 2026920
uucaauacagcacuauuca

SEQ ID NO: 2026922 - RNA, 19 nt, Artificial Sequence
  Description of Artificial Sequence: Synthetic oligonucleotide
  Sense strand starting at position 114 of SEQ ID NO: 1881213
ugcuguauugaacauacau

SEQ ID NO: 2026923 - RNA, 19 nt, Artificial Sequence
  Description of Artificial Sequence: Synthetic oligonucleotide
  Antisense strand to SEQ ID NO: 2026922
auguauguucaauacagca

SEQ ID NO: 2026924 - RNA, 19 nt, Artificial Sequence
  Description of Artificial Sequence: Synthetic oligonucleotide
  Sense strand starting at position 183 of SEQ ID NO: 1881213
uccuauuaucuggacaugu

SEQ ID NO: 2026925 - RNA, 19 nt, Artificial Sequence
  Description of Artificial Sequence: Synthetic oligonucleotide
  Antisense strand to SEQ ID NO: 2026924
acauguccagauaauagga

SEQ ID NO: 2026926 - RNA, 19 nt, Artificial Sequence
  Description of Artificial Sequence: Synthetic oligonucleotide
  Sense strand starting at position 185 of SEQ ID NO: 1881213
cuauuaucuggacauguuc

SEQ ID NO: 2026927 - RNA, 19 nt, Artificial Sequence
  Description of Artificial Sequence: Synthetic oligonucleotide
  Antisense strand to SEQ ID NO: 2026926
gaacauguccagauaauag

SEQ ID NO: 2026928 - RNA, 19 nt, Artificial Sequence
  Description of Artificial Sequence: Synthetic oligonucleotide
  Sense strand starting at position 262 of SEQ ID NO: 1881213
agagaccaaugagaauaaa

SEQ ID NO: 2026929 - RNA, 19 nt, Artificial Sequence
  Description of Artificial Sequence: Synthetic oligonucleotide
  Antisense strand to SEQ ID NO: 2026928
uuuauucucauuggucucu

SEQ ID NO: 2026930 - RNA, 19 nt, Artificial Sequence
  Description of Artificial Sequence: Synthetic oligonucleotide
  Sense strand starting at position 463 of SEQ ID NO: 1881213
ugguaagcugcugcucauu

SEQ ID NO: 2026931 - RNA, 19 nt, Artificial Sequence
  Description of Artificial Sequence: Synthetic oligonucleotide
  Antisense strand to SEQ ID NO: 2026930
aaugagcagcagcuuacca

SEQ ID NO: 2026932 - RNA, 19 nt, Artificial Sequence
  Description of Artificial Sequence: Synthetic oligonucleotide
  Sense strand starting at position 474 of SEQ ID NO: 1881213
ugcucauuguuagauuuau

SEQ ID NO: 2026933 - RNA, 19 nt, Artificial Sequence
  Description of Artificial Sequence: Synthetic oligonucleotide
  Antisense strand to SEQ ID NO: 2026932
auaaaucuaacaaugagca

SEQ ID NO: 2026934 - RNA, 19 nt, Artificial Sequence
  Description of Artificial Sequence: Synthetic oligonucleotide
  Sense strand starting at position 570 of SEQ ID NO: 1881213
gauagaugcaaacguggaa

SEQ ID NO: 2026935 - RNA, 19 nt, Artificial Sequence
  Description of Artificial Sequence: Synthetic oligonucleotide
  Antisense strand to SEQ ID NO: 2026934
uuccacguuugcaucuauc

SEQ ID NO: 2026936 - RNA, 19 nt, Artificial Sequence
  Description of Artificial Sequence: Synthetic oligonucleotide
  Sense strand starting at position 670 of SEQ ID NO: 1881213
uuuacauauccaugccgau

SEQ ID NO: 2026937 - RNA, 19 nt, Artificial Sequence
  Description of Artificial Sequence: Synthetic oligonucleotide
  Antisense strand to SEQ ID NO: 2026936
aucggcauggauauguaaa

SEQ ID NO: 2026938 - RNA, 19 nt, Artificial Sequence
  Description of Artificial Sequence: Synthetic oligonucleotide
  Sense strand starting at position 2015 of SEQ ID NO: 1881213
cccgauuuguuucuuauau

SEQ ID NO: 2026939 - RNA, 19 nt, Artificial Sequence
  Description of Artificial Sequence: Synthetic oligonucleotide
  Antisense strand to SEQ ID NO: 2026938
auauaagaaacaaaucggg

SEQ ID NO: 2026940 - RNA, 19 nt, Artificial Sequence
  Description of Artificial Sequence: Synthetic oligonucleotide
  Sense strand starting at position 2016 of SEQ ID NO: 1881213
ccgauuuguuucuuauauc

SEQ ID NO: 2026941 - RNA, 19 nt, Artificial Sequence
  Description of Artificial Sequence: Synthetic oligonucleotide
  Antisense strand to SEQ ID NO: 2026940
gauauaagaaacaaaucgg

SEQ ID NO: 2026942 - RNA, 19 nt, Artificial Sequence
  Description of Artificial Sequence: Synthetic oligonucleotide
  Sense strand starting at position 2017 of SEQ ID NO: 1881213
cgauuuguuucuuauauca

SEQ ID NO: 2026943 - RNA, 19 nt, Artificial Sequence
  Description of Artificial Sequence: Synthetic oligonucleotide
  Antisense strand to SEQ ID NO: 2026942
ugauauaagaaacaaaucg

SEQ ID NO: 2026944 - RNA, 19 nt, Artificial Sequence
  Description of Artificial Sequence: Synthetic oligonucleotide
  Sense strand starting at position 2027 of SEQ ID NO: 1881213
cuuauaucagucuaaagua

SEQ ID NO: 2026945 - RNA, 19 nt, Artificial Sequence
  Description of Artificial Sequence: Synthetic oligonucleotide
  Antisense strand to SEQ ID NO: 2026944
uacuuuagacugauauaag

SEQ ID NO: 2026946 - RNA, 19 nt, Artificial Sequence
  Description of Artificial Sequence: Synthetic oligonucleotide
  Sense strand starting at position 2097 of SEQ ID NO: 1881213
augacuuggcaagguugua

SEQ ID NO: 2026947 - RNA, 19 nt, Artificial Sequence
  Description of Artificial Sequence: Synthetic oligonucleotide
  Antisense strand to SEQ ID NO: 2026946
uacaaccuugccaagucau

SEQ ID NO: 2026948 - RNA, 19 nt, Artificial Sequence
  Description of Artificial Sequence: Synthetic oligonucleotide
  Sense strand starting at position 2214 of SEQ ID NO: 1881213
accagucacuucccugaua

SEQ ID NO: 2026949 - RNA, 19 nt, Artificial Sequence
  Description of Artificial Sequence: Synthetic oligonucleotide
  Antisense strand to SEQ ID NO: 2026948
uaucagggaagugacuggu

SEQ ID NO: 2026950 - RNA, 19 nt, Artificial Sequence
  Description of Artificial Sequence: Synthetic oligonucleotide
  Sense strand starting at position 2215 of SEQ ID NO: 1881213
ccagucacuucccugauau

SEQ ID NO: 2026951 - RNA, 19 nt, Artificial Sequence
  Description of Artificial Sequence: Synthetic oligonucleotide
  Antisense strand to SEQ ID NO: 2026950
auaucagggaagugacugg

SEQ ID NO: 2026952 - RNA, 19 nt, Artificial Sequence
  Description of Artificial Sequence: Synthetic oligonucleotide
  Sense strand starting at position 2239 of SEQ ID NO: 1881213
gucagauucuucccuugau

SEQ ID NO: 2026953 - RNA, 19 nt, Artificial Sequence
  Description of Artificial Sequence: Synthetic oligonucleotide
  Antisense strand to SEQ ID NO: 2026952
aucaagggaagaaucugac

SEQ ID NO: 2026954 - RNA, 19 nt, Artificial Sequence
  Description of Artificial Sequence: Synthetic oligonucleotide
  Sense strand starting at position 2529 of SEQ ID NO: 1881213
guguaugacucaguucuuc

SEQ ID NO: 2026955 - RNA, 19 nt, Artificial Sequence
  Description of Artificial Sequence: Synthetic oligonucleotide
  Antisense strand to SEQ ID NO: 2026954
gaagaacugagucauacac

SEQ ID NO: 2026956 - RNA, 19 nt, Artificial Sequence
  Description of Artificial Sequence: Synthetic oligonucleotide
  Sense strand starting at position 2537 of SEQ ID NO: 1881213
cucaguucuucucuacagu

SEQ ID NO: 2026957 - RNA, 19 nt, Artificial Sequence
  Description of Artificial Sequence: Synthetic oligonucleotide
  Antisense strand to SEQ ID NO: 2026956
acuguagagaagaacugag

SEQ ID NO: 2026958 - RNA, 19 nt, Artificial Sequence
  Description of Artificial Sequence: Synthetic oligonucleotide
  Sense strand starting at position 2538 of SEQ ID NO: 1881213
ucaguucuucucuacagua

SEQ ID NO: 2026959 - RNA, 19 nt, Artificial Sequence
  Description of Artificial Sequence: Synthetic oligonucleotide
  Antisense strand to SEQ ID NO: 2026958
uacuguagagaagaacuga

SEQ ID NO: 2026960 - RNA, 19 nt, Artificial Sequence
  Description of Artificial Sequence: Synthetic oligonucleotide
  Sense strand starting at position 2637 of SEQ ID NO: 1881213
ccucaacaguguuccagua

SEQ ID NO: 2026961 - RNA, 19 nt, Artificial Sequence
  Description of Artificial Sequence: Synthetic oligonucleotide
  Antisense strand to SEQ ID NO: 2026960
uacuggaacacuguugagg

SEQ ID NO: 2026962 - RNA, 19 nt, Artificial Sequence
  Description of Artificial Sequence: Synthetic oligonucleotide
  Sense strand starting at position 2662 of SEQ ID NO: 1881213
cuggguuugccuuggauua

SEQ ID NO: 2026963 - RNA, 19 nt, Artificial Sequence
  Description of Artificial Sequence: Synthetic oligonucleotide
  Antisense strand to SEQ ID NO: 2026962
uaauccaaggcaaacccag

SEQ ID NO: 2026964 - RNA, 19 nt, Artificial Sequence
  Description of Artificial Sequence: Synthetic oligonucleotide
  Sense strand starting at position 2663 of SEQ ID NO: 1881213
uggguuugccuuggauuaa

SEQ ID NO: 2026965 - RNA, 19 nt, Artificial Sequence
  Description of Artificial Sequence: Synthetic oligonucleotide
  Antisense strand to SEQ ID NO: 2026964
uuaauccaaggcaaaccca

SEQ ID NO: 2026966 - RNA, 19 nt, Artificial Sequence
  Description of Artificial Sequence: Synthetic oligonucleotide
  Sense strand starting at position 2673 of SEQ ID NO: 1881213
uuggauuaacucugaguua

SEQ ID NO: 2026967 - RNA, 19 nt, Artificial Sequence
  Description of Artificial Sequence: Synthetic oligonucleotide
  Antisense strand to SEQ ID NO: 2026966
uaacucagaguuaauccaa

SEQ ID NO: 2026968 - RNA, 19 nt, Artificial Sequence
  Description of Artificial Sequence: Synthetic oligonucleotide
  Sense strand starting at position 2676 of SEQ ID NO: 1881213
gauuaacucugaguuagug

SEQ ID NO: 2026969 - RNA, 19 nt, Artificial Sequence
  Description of Artificial Sequence: Synthetic oligonucleotide
  Antisense strand to SEQ ID NO: 2026968
cacuaacucagaguuaauc

SEQ ID NO: 2026970 - RNA, 19 nt, Artificial Sequence
  Description of Artificial Sequence: Synthetic oligonucleotide
  Sense strand starting at position 2723 of SEQ ID NO: 1881213
agcugaggcuuucuuccua

SEQ ID NO: 2026971 - RNA, 19 nt, Artificial Sequence
  Description of Artificial Sequence: Synthetic oligonucleotide
  Antisense strand to SEQ ID NO: 2026970
uaggaagaaagccucagcu

SEQ ID NO: 2026972 - RNA, 19 nt, Artificial Sequence
  Description of Artificial Sequence: Synthetic oligonucleotide
  Sense strand starting at position 2977 of SEQ ID NO: 1881213
gccagugguccauguggaa

SEQ ID NO: 2026973 - RNA, 19 nt, Artificial Sequence
  Description of Artificial Sequence: Synthetic oligonucleotide
  Antisense strand to SEQ ID NO: 2026972
uuccacauggaccacuggc

SEQ ID NO: 2026974 - RNA, 19 nt, Artificial Sequence
  Description of Artificial Sequence: Synthetic oligonucleotide
  Sense strand starting at position 3004 of SEQ ID NO: 1881213
acggaacauuuauacauua

SEQ ID NO: 2026975 - RNA, 19 nt, Artificial Sequence
  Description of Artificial Sequence: Synthetic oligonucleotide
  Antisense strand to SEQ ID NO: 2026974
uaauguauaaauguuccgu

SEQ ID NO: 2026976 - RNA, 19 nt, Artificial Sequence
  Description of Artificial Sequence: Synthetic oligonucleotide
  Sense strand starting at position 3080 of SEQ ID NO: 1881213
gaacuuggaaaguguggaa

SEQ ID NO: 2026977 - RNA, 19 nt, Artificial Sequence
  Description of Artificial Sequence: Synthetic oligonucleotide
  Antisense strand to SEQ ID NO: 2026976
uuccacacuuuccaaguuc

SEQ ID NO: 2026978 - RNA, 19 nt, Artificial Sequence
  Description of Artificial Sequence: Synthetic oligonucleotide
  Sense strand starting at position 3109 of SEQ ID NO: 1881213
gcucuaaugcuuugaacuu

SEQ ID NO: 2026979 - RNA, 19 nt, Artificial Sequence
  Description of Artificial Sequence: Synthetic oligonucleotide
  Antisense strand to SEQ ID NO: 2026978
aaguucaaagcauuagagc

SEQ ID NO: 2026980 - RNA, 19 nt, Artificial Sequence
  Description of Artificial Sequence: Synthetic oligonucleotide
  Sense strand starting at position 3141 of SEQ ID NO: 1881213
cuauuaaagucagucauug

SEQ ID NO: 2026981 - RNA, 19 nt, Artificial Sequence
  Description of Artificial Sequence: Synthetic oligonucleotide
  Antisense strand to SEQ ID NO: 2026980
caaugacugacuuuaauag

SEQ ID NO: 2026982 - RNA, 19 nt, Artificial Sequence
  Description of Artificial Sequence: Synthetic oligonucleotide
  Sense strand starting at position 3180 of SEQ ID NO: 1881213
gguacuuguaucuguccaa

SEQ ID NO: 2026983 - RNA, 19 nt, Artificial Sequence
  Description of Artificial Sequence: Synthetic oligonucleotide
  Antisense strand to SEQ ID NO: 2026982
uuggacagauacaaguacc

SEQ ID NO: 2026984 - RNA, 19 nt, Artificial Sequence
  Description of Artificial Sequence: Synthetic oligonucleotide
  Sense strand starting at position 3187 of SEQ ID NO: 1881213
guaucuguccaaugccaga

SEQ ID NO: 2026985 - RNA, 19 nt, Artificial Sequence
  Description of Artificial Sequence: Synthetic oligonucleotide
  Antisense strand to SEQ ID NO: 2026984
ucuggcauuggacagauac

SEQ ID NO: 2026986 - RNA, 19 nt, Artificial Sequence
  Description of Artificial Sequence: Synthetic oligonucleotide
  Sense strand starting at position 3437 of SEQ ID NO: 1881213
aguggugucuagaaggaag

SEQ ID NO: 2026987 - RNA, 19 nt, Artificial Sequence
  Description of Artificial Sequence: Synthetic oligonucleotide
  Antisense strand to SEQ ID NO: 2026986
cuuccuucuagacaccacu

SEQ ID NO: 2026988 - RNA, 19 nt, Artificial Sequence
  Description of Artificial Sequence: Synthetic oligonucleotide
  Sense strand starting at position 3439 of SEQ ID NO: 1881213
uggugucuagaaggaagaa

SEQ ID NO: 2026989 - RNA, 19 nt, Artificial Sequence
  Description of Artificial Sequence: Synthetic oligonucleotide
  Antisense strand to SEQ ID NO: 2026988
uucuuccuucuagacacca

SEQ ID NO: 2026990 - RNA, 19 nt, Artificial Sequence
  Description of Artificial Sequence: Synthetic oligonucleotide
  Sense strand starting at position 3518 of SEQ ID NO: 1881213
guuauuaagcccuagaacc

SEQ ID NO: 2026991 - RNA, 19 nt, Artificial Sequence
  Description of Artificial Sequence: Synthetic oligonucleotide
  Antisense strand to SEQ ID NO: 2026990
gguucuagggcuuaauaac

SEQ ID NO: 2026992 - RNA, 19 nt, Artificial Sequence
  Description of Artificial Sequence: Synthetic oligonucleotide
  Sense strand starting at position 3754 of SEQ ID NO: 1881213
ugcugagggagucaucaca

SEQ ID NO: 2026993 - RNA, 19 nt, Artificial Sequence
  Description of Artificial Sequence: Synthetic oligonucleotide
  Antisense strand to SEQ ID NO: 2026992
ugugaugacucccucagca

SEQ ID NO: 2026994 - RNA, 19 nt, Artificial Sequence
  Description of Artificial Sequence: Synthetic oligonucleotide
  Sense strand starting at position 3834 of SEQ ID NO: 1881213
uguaauaguuuauugagcu

SEQ ID NO: 2026995 - RNA, 19 nt, Artificial Sequence
  Description of Artificial Sequence: Synthetic oligonucleotide
  Antisense strand to SEQ ID NO: 2026994
agcucaauaaacuauuaca

SEQ ID NO: 2026996 - RNA, 19 nt, Artificial Sequence
  Description of Artificial Sequence: Synthetic oligonucleotide
  Sense strand starting at position 3905 of SEQ ID NO: 1881213
gguagacugucccucaauu

SEQ ID NO: 2026997 - RNA, 19 nt, Artificial Sequence
  Description of Artificial Sequence: Synthetic oligonucleotide
  Antisense strand to SEQ ID NO: 2026996
aauugagggacagucuacc

SEQ ID NO: 2026998 - RNA, 19 nt, Artificial Sequence
  Description of Artificial Sequence: Synthetic oligonucleotide
  Sense strand starting at position 3934 of SEQ ID NO: 1881213
agacauucuuuaugauuug

SEQ ID NO: 2026999 - RNA, 19 nt, Artificial Sequence
  Description of Artificial Sequence: Synthetic oligonucleotide
  Antisense strand to SEQ ID NO: 2026998
caaaucauaaagaaugucu

SEQ ID NO: 2027000 - RNA, 19 nt, Artificial Sequence
  Description of Artificial Sequence: Synthetic oligonucleotide
  Sense strand starting at position 107 of SEQ ID NO: 1881214
ugaauagugcuguauugaa

SEQ ID NO: 2027001 - RNA, 19 nt, Artificial Sequence
  Description of Artificial Sequence: Synthetic oligonucleotide
  Antisense strand to SEQ ID NO: 2027000
uucaauacagcacuauuca

SEQ ID NO: 2027002 - RNA, 19 nt, Artificial Sequence
  Description of Artificial Sequence: Synthetic oligonucleotide
  Sense strand starting at position 114 of SEQ ID NO: 1881214
ugcuguauugaacauacau

SEQ ID NO: 2027003 - RNA, 19 nt, Artificial Sequence
  Description of Artificial Sequence: Synthetic oligonucleotide
  Antisense strand to SEQ ID NO: 2027002
auguauguucaauacagca

SEQ ID NO: 2027004 - RNA, 19 nt, Artificial Sequence
  Description of Artificial Sequence: Synthetic oligonucleotide
  Sense strand starting at position 183 of SEQ ID NO: 1881214
uccuauuaucuggacaugu

SEQ ID NO: 2027005 - RNA, 19 nt, Artificial Sequence
  Description of Artificial Sequence: Synthetic oligonucleotide
  Antisense strand to SEQ ID NO: 2027004
acauguccagauaauagga

SEQ ID NO: 2027006 - RNA, 19 nt, Artificial Sequence
  Description of Artificial Sequence: Synthetic oligonucleotide
  Sense strand starting at position 185 of SEQ ID NO: 1881214
cuauuaucuggacauguuc

SEQ ID NO: 2027007 - RNA, 19 nt, Artificial Sequence
  Description of Artificial Sequence: Synthetic oligonucleotide
  Antisense strand to SEQ ID NO: 2027006
gaacauguccagauaauag

SEQ ID NO: 2027008 - RNA, 19 nt, Artificial Sequence
  Description of Artificial Sequence: Synthetic oligonucleotide
  Sense strand starting at position 262 of SEQ ID NO: 1881214
agagaccaaugagaauaaa

SEQ ID NO: 2027009 - RNA, 19 nt, Artificial Sequence
  Description of Artificial Sequence: Synthetic oligonucleotide
  Antisense strand to SEQ ID NO: 2027008
uuuauucucauuggucucu

SEQ ID NO: 2027010 - RNA, 19 nt, Artificial Sequence
  Description of Artificial Sequence: Synthetic oligonucleotide
  Sense strand starting at position 463 of SEQ ID NO: 1881214
ugguaagcugcugcucauu

SEQ ID NO: 2027011 - RNA, 19 nt, Artificial Sequence
  Description of Artificial Sequence: Synthetic oligonucleotide
  Antisense strand to SEQ ID NO: 2027010
aaugagcagcagcuuacca

SEQ ID NO: 2027012 - RNA, 19 nt, Artificial Sequence
  Description of Artificial Sequence: Synthetic oligonucleotide
  Sense strand starting at position 474 of SEQ ID NO: 1881214
ugcucauuguuagauuuau

SEQ ID NO: 2027013 - RNA, 19 nt, Artificial Sequence
  Description of Artificial Sequence: Synthetic oligonucleotide
  Antisense strand to SEQ ID NO: 2027012
auaaaucuaacaaugagca

SEQ ID NO: 2027014 - RNA, 19 nt, Artificial Sequence
  Description of Artificial Sequence: Synthetic oligonucleotide
  Sense strand starting at position 570 of SEQ ID NO: 1881214
gauagaugcaaacguggaa

SEQ ID NO: 2027015 - RNA, 19 nt, Artificial Sequence
  Description of Artificial Sequence: Synthetic oligonucleotide
  Antisense strand to SEQ ID NO: 2027014
uuccacguuugcaucuauc

SEQ ID NO: 2027016 - RNA, 19 nt, Artificial Sequence
  Description of Artificial Sequence: Synthetic oligonucleotide
  Sense strand starting at position 670 of SEQ ID NO: 1881214
uuuacauauccaugccgau

SEQ ID NO: 2027017 - RNA, 19 nt, Artificial Sequence
  Description of Artificial Sequence: Synthetic oligonucleotide
  Antisense strand to SEQ ID NO: 2027016
aucggcauggauauguaaa

SEQ ID NO: 2027018 - RNA, 19 nt, Artificial Sequence
  Description of Artificial Sequence: Synthetic oligonucleotide
  Sense strand starting at position 2015 of SEQ ID NO: 1881214
cccgauuuguuucuuauau

SEQ ID NO: 2027019 - RNA, 19 nt, Artificial Sequence
  Description of Artificial Sequence: Synthetic oligonucleotide
  Antisense strand to SEQ ID NO: 2027018
auauaagaaacaaaucggg

SEQ ID NO: 2027020 - RNA, 19 nt, Artificial Sequence
  Description of Artificial Sequence: Synthetic oligonucleotide
  Sense strand starting at position 2016 of SEQ ID NO: 1881214
ccgauuuguuucuuauauc

SEQ ID NO: 2027021 - RNA, 19 nt, Artificial Sequence
  Description of Artificial Sequence: Synthetic oligonucleotide
  Antisense strand to SEQ ID NO: 2027020
gauauaagaaacaaaucgg

SEQ ID NO: 2027022 - RNA, 19 nt, Artificial Sequence
  Description of Artificial Sequence: Synthetic oligonucleotide
  Sense strand starting at position 2017 of SEQ ID NO: 1881214
cgauuuguuucuuauauca

SEQ ID NO: 2027023 - RNA, 19 nt, Artificial Sequence
  Description of Artificial Sequence: Synthetic oligonucleotide
  Antisense strand to SEQ ID NO: 2027022
ugauauaagaaacaaaucg

SEQ ID NO: 2027024 - RNA, 19 nt, Artificial Sequence
  Description of Artificial Sequence: Synthetic oligonucleotide
  Sense strand starting at position 2027 of SEQ ID NO: 1881214
cuuauaucagucuaaagua

SEQ ID NO: 2027025 - RNA, 19 nt, Artificial Sequence
  Description of Artificial Sequence: Synthetic oligonucleotide
  Antisense strand to SEQ ID NO: 2027024
uacuuuagacugauauaag

SEQ ID NO: 2027026 - RNA, 19 nt, Artificial Sequence
  Description of Artificial Sequence: Synthetic oligonucleotide
  Sense strand starting at position 2097 of SEQ ID NO: 1881214
augacuuggcaagguugua

SEQ ID NO: 2027027 - RNA, 19 nt, Artificial Sequence
  Description of Artificial Sequence: Synthetic oligonucleotide
  Antisense strand to SEQ ID NO: 2027026
uacaaccuugccaagucau

SEQ ID NO: 2027028 - RNA, 19 nt, Artificial Sequence
  Description of Artificial Sequence: Synthetic oligonucleotide
  Sense strand starting at position 2214 of SEQ ID NO: 1881214
accagucacuucccugaua

SEQ ID NO: 2027029 - RNA, 19 nt, Artificial Sequence
  Description of Artificial Sequence: Synthetic oligonucleotide
  Antisense strand to SEQ ID NO: 2027028
uaucagggaagugacuggu

SEQ ID NO: 2027030 - RNA, 19 nt, Artificial Sequence
  Description of Artificial Sequence: Synthetic oligonucleotide
  Sense strand starting at position 2215 of SEQ ID NO: 1881214
ccagucacuucccugauau

SEQ ID NO: 2027031 - RNA, 19 nt, Artificial Sequence
  Description of Artificial Sequence: Synthetic oligonucleotide
  Antisense strand to SEQ ID NO: 2027030
auaucagggaagugacugg

SEQ ID NO: 2027032 - RNA, 19 nt, Artificial Sequence
  Description of Artificial Sequence: Synthetic oligonucleotide
  Sense strand starting at position 2239 of SEQ ID NO: 1881214
gucagauucuucccuugau

SEQ ID NO: 2027033 - RNA, 19 nt, Artificial Sequence
  Description of Artificial Sequence: Synthetic oligonucleotide
  Antisense strand to SEQ ID NO: 2027032
aucaagggaagaaucugac

SEQ ID NO: 2027034 - RNA, 19 nt, Artificial Sequence
  Description of Artificial Sequence: Synthetic oligonucleotide
  Sense strand starting at position 2529 of SEQ ID NO: 1881214
guguaugacucaguucuuc

SEQ ID NO: 2027035 - RNA, 19 nt, Artificial Sequence
  Description of Artificial Sequence: Synthetic oligonucleotide
  Antisense strand to SEQ ID NO: 2027034
gaagaacugagucauacac

SEQ ID NO: 2027036 - RNA, 19 nt, Artificial Sequence
  Description of Artificial Sequence: Synthetic oligonucleotide
  Sense strand starting at position 2537 of SEQ ID NO: 1881214
cucaguucuucucuacagu

SEQ ID NO: 2027037 - RNA, 19 nt, Artificial Sequence
  Description of Artificial Sequence: Synthetic oligonucleotide
  Antisense strand to SEQ ID NO: 2027036
acuguagagaagaacugag

SEQ ID NO: 2027038 - RNA, 19 nt, Artificial Sequence
  Description of Artificial Sequence: Synthetic oligonucleotide
  Sense strand starting at position 2538 of SEQ ID NO: 1881214
ucaguucuucucuacagua

SEQ ID NO: 2027039 - RNA, 19 nt, Artificial Sequence
  Description of Artificial Sequence: Synthetic oligonucleotide
  Antisense strand to SEQ ID NO: 2027038
uacuguagagaagaacuga

SEQ ID NO: 2027040 - RNA, 19 nt, Artificial Sequence
  Description of Artificial Sequence: Synthetic oligonucleotide
  Sense strand starting at position 2637 of SEQ ID NO: 1881214
ccucaacaguguuccagua

SEQ ID NO: 2027041 - RNA, 19 nt, Artificial Sequence
  Description of Artificial Sequence: Synthetic oligonucleotide
  Antisense strand to SEQ ID NO: 2027040
uacuggaacacuguugagg

SEQ ID NO: 2027042 - RNA, 19 nt, Artificial Sequence
  Description of Artificial Sequence: Synthetic oligonucleotide
  Sense strand starting at position 2662 of SEQ ID NO: 1881214
cuggguuugccuuggauua

SEQ ID NO: 2027043 - RNA, 19 nt, Artificial Sequence
  Description of Artificial Sequence: Synthetic oligonucleotide
  Antisense strand to SEQ ID NO: 2027042
uaauccaaggcaaacccag

SEQ ID NO: 2027044 - RNA, 19 nt, Artificial Sequence
  Description of Artificial Sequence: Synthetic oligonucleotide
  Sense strand starting at position 2663 of SEQ ID NO: 1881214
uggguuugccuuggauuaa

SEQ ID NO: 2027045 - RNA, 19 nt, Artificial Sequence
  Description of Artificial Sequence: Synthetic oligonucleotide
  Antisense strand to SEQ ID NO: 2027044
uuaauccaaggcaaaccca

SEQ ID NO: 2027046 - RNA, 19 nt, Artificial Sequence
  Description of Artificial Sequence: Synthetic oligonucleotide
  Sense strand starting at position 2673 of SEQ ID NO: 1881214
uuggauuaacucugaguua

SEQ ID NO: 2027047 - RNA, 19 nt, Artificial Sequence
  Description of Artificial Sequence: Synthetic oligonucleotide
  Antisense strand to SEQ ID NO: 2027046
uaacucagaguuaauccaa

SEQ ID NO: 2027048 - RNA, 19 nt, Artificial Sequence
  Description of Artificial Sequence: Synthetic oligonucleotide
  Sense strand starting at position 2676 of SEQ ID NO: 1881214
gauuaacucugaguuagug

SEQ ID NO: 2027049 - RNA, 19 nt, Artificial Sequence
  Description of Artificial Sequence: Synthetic oligonucleotide
  Antisense strand to SEQ ID NO: 2027048
cacuaacucagaguuaauc

SEQ ID NO: 2027050 - RNA, 19 nt, Artificial Sequence
  Description of Artificial Sequence: Synthetic oligonucleotide
  Sense strand starting at position 2723 of SEQ ID NO: 1881214
agcugaggcuuucuuccua

SEQ ID NO: 2027051 - RNA, 19 nt, Artificial Sequence
  Description of Artificial Sequence: Synthetic oligonucleotide
  Antisense strand to SEQ ID NO: 2027050
uaggaagaaagccucagcu

SEQ ID NO: 2027052 - RNA, 19 nt, Artificial Sequence
  Description of Artificial Sequence: Synthetic oligonucleotide
  Sense strand starting at position 2977 of SEQ ID NO: 1881214
gccagugguccauguggaa

SEQ ID NO: 2027053 - RNA, 19 nt, Artificial Sequence
  Description of Artificial Sequence: Synthetic oligonucleotide
  Antisense strand to SEQ ID NO: 2027052
uuccacauggaccacuggc

SEQ ID NO: 2027054 - RNA, 19 nt, Artificial Sequence
  Description of Artificial Sequence: Synthetic oligonucleotide
  Sense strand starting at position 3004 of SEQ ID NO: 1881214
acggaacauuuauacauua

SEQ ID NO: 2027055 - RNA, 19 nt, Artificial Sequence
  Description of Artificial Sequence: Synthetic oligonucleotide
  Antisense strand to SEQ ID NO: 2027054
uaauguauaaauguuccgu

SEQ ID NO: 2027056 - RNA, 19 nt, Artificial Sequence
  Description of Artificial Sequence: Synthetic oligonucleotide
  Sense strand starting at position 3080 of SEQ ID NO: 1881214
gaacuuggaaaguguggaa

SEQ ID NO: 2027057 - RNA, 19 nt, Artificial Sequence
  Description of Artificial Sequence: Synthetic oligonucleotide
  Antisense strand to SEQ ID NO: 2027056
uuccacacuuuccaaguuc

SEQ ID NO: 2027058 - RNA, 19 nt, Artificial Sequence
  Description of Artificial Sequence: Synthetic oligonucleotide
  Sense strand starting at position 3109 of SEQ ID NO: 1881214
gcucuaaugcuuugaacuu

SEQ ID NO: 2027059 - RNA, 19 nt, Artificial Sequence
  Description of Artificial Sequence: Synthetic oligonucleotide
  Antisense strand to SEQ ID NO: 2027058
aaguucaaagcauuagagc

SEQ ID NO: 2027060 - RNA, 19 nt, Artificial Sequence
  Description of Artificial Sequence: Synthetic oligonucleotide
  Sense strand starting at position 3141 of SEQ ID NO: 1881214
cuauuaaagucagucauug

SEQ ID NO: 2027061 - RNA, 19 nt, Artificial Sequence
  Description of Artificial Sequence: Synthetic oligonucleotide
  Antisense strand to SEQ ID NO: 2027060
caaugacugacuuuaauag

SEQ ID NO: 2027062 - RNA, 19 nt, Artificial Sequence
  Description of Artificial Sequence: Synthetic oligonucleotide
  Sense strand starting at position 3180 of SEQ ID NO: 1881214
gguacuuguaucuguccaa

SEQ ID NO: 2027063 - RNA, 19 nt, Artificial Sequence
  Description of Artificial Sequence: Synthetic oligonucleotide
  Antisense strand to SEQ ID NO: 2027062
uuggacagauacaaguacc

SEQ ID NO: 2027064 - RNA, 19 nt, Artificial Sequence
  Description of Artificial Sequence: Synthetic oligonucleotide
  Sense strand starting at position 3187 of SEQ ID NO: 1881214
guaucuguccaaugccaga

SEQ ID NO: 2027065 - RNA, 19 nt, Artificial Sequence
  Description of Artificial Sequence: Synthetic oligonucleotide
  Antisense strand to SEQ ID NO: 2027064
ucuggcauuggacagauac

SEQ ID NO: 2027066 - RNA, 19 nt, Artificial Sequence
  Description of Artificial Sequence: Synthetic oligonucleotide
  Sense strand starting at position 3437 of SEQ ID NO: 1881214
aguggugucuagaaggaag

SEQ ID NO: 2027067 - RNA, 19 nt, Artificial Sequence
  Description of Artificial Sequence: Synthetic oligonucleotide
  Antisense strand to SEQ ID NO: 2027066
cuuccuucuagacaccacu

SEQ ID NO: 2027068 - RNA, 19 nt, Artificial Sequence
  Description of Artificial Sequence: Synthetic oligonucleotide
  Sense strand starting at position 3439 of SEQ ID NO: 1881214
uggugucuagaaggaagaa

SEQ ID NO: 2027069 - RNA, 19 nt, Artificial Sequence
  Description of Artificial Sequence: Synthetic oligonucleotide
  Antisense strand to SEQ ID NO: 2027068
uucuuccuucuagacacca

SEQ ID NO: 2027070 - RNA, 19 nt, Artificial Sequence
  Description of Artificial Sequence: Synthetic oligonucleotide
  Sense strand starting at position 3518 of SEQ ID NO: 1881214
guuauuaagcccuagaacc

SEQ ID NO: 2027071 - RNA, 19 nt, Artificial Sequence
  Description of Artificial Sequence: Synthetic oligonucleotide
  Antisense strand to SEQ ID NO: 2027070
gguucuagggcuuaauaac

SEQ ID NO: 2027072 - RNA, 19 nt, Artificial Sequence
  Description of Artificial Sequence: Synthetic oligonucleotide
  Sense strand starting at position 3754 of SEQ ID NO: 1881214
ugcugagggagucaucaca

SEQ ID NO: 2027073 - RNA, 19 nt, Artificial Sequence
  Description of Artificial Sequence: Synthetic oligonucleotide
  Antisense strand to SEQ ID NO: 2027072
ugugaugacucccucagca

SEQ ID NO: 2027074 - RNA, 19 nt, Artificial Sequence
  Description of Artificial Sequence: Synthetic oligonucleotide
  Sense strand starting at position 3834 of SEQ ID NO: 1881214
uguaauaguuuauugagcu

SEQ ID NO: 2027075 - RNA, 19 nt, Artificial Sequence
  Description of Artificial Sequence: Synthetic oligonucleotide
  Antisense strand to SEQ ID NO: 2027074
agcucaauaaacuauuaca

SEQ ID NO: 2027076 - RNA, 19 nt, Artificial Sequence
  Description of Artificial Sequence: Synthetic oligonucleotide
  Sense strand starting at position 3905 of SEQ ID NO: 1881214
gguagacugucccucaauu

SEQ ID NO: 2027077 - RNA, 19 nt, Artificial Sequence
  Description of Artificial Sequence: Synthetic oligonucleotide
  Antisense strand to SEQ ID NO: 2027076
aauugagggacagucuacc

SEQ ID NO: 2027078 - RNA, 19 nt, Artificial Sequence
  Description of Artificial Sequence: Synthetic oligonucleotide
  Sense strand starting at position 3934 of SEQ ID NO: 1881214
agacauucuuuaugauuug

SEQ ID NO: 2027079 - RNA, 19 nt, Artificial Sequence
  Description of Artificial Sequence: Synthetic oligonucleotide
  Antisense strand to SEQ ID NO: 2027078
caaaucauaaagaaugucu

SEQ ID NO: 2027080 - RNA, 19 nt, Artificial Sequence
  Description of Artificial Sequence: Synthetic oligonucleotide
  Sense strand starting at position 75 of SEQ ID NO: 1881215
aggcucugcuaaucagacu

SEQ ID NO: 2027081 - RNA, 19 nt, Artificial Sequence
  Description of Artificial Sequence: Synthetic oligonucleotide
  Antisense strand to SEQ ID NO: 2027080
agucugauuagcagagccu

SEQ ID NO: 2027082 - RNA, 19 nt, Artificial Sequence
  Description of Artificial Sequence: Synthetic oligonucleotide
  Sense strand starting at position 82 of SEQ ID NO: 1881215
gcuaaucagacuugguagu

SEQ ID NO: 2027083 - RNA, 19 nt, Artificial Sequence
  Description of Artificial Sequence: Synthetic oligonucleotide
  Antisense strand to SEQ ID NO: 2027082
acuaccaagucugauuagc

SEQ ID NO: 2027084 - RNA, 19 nt, Artificial Sequence
  Description of Artificial Sequence: Synthetic oligonucleotide
  Sense strand starting at position 88 of SEQ ID NO: 1881215
cagacuugguaguacuaaa

SEQ ID NO: 2027085 - RNA, 19 nt, Artificial Sequence
  Description of Artificial Sequence: Synthetic oligonucleotide
  Antisense strand to SEQ ID NO: 2027084
uuuaguacuaccaagucug

SEQ ID NO: 2027086 - RNA, 19 nt, Artificial Sequence
  Description of Artificial Sequence: Synthetic oligonucleotide
  Sense strand starting at position 145 of SEQ ID NO: 1881215
aaagaaauguucucuggug

SEQ ID NO: 2027087 - RNA, 19 nt, Artificial Sequence
  Description of Artificial Sequence: Synthetic oligonucleotide
  Antisense strand to SEQ ID NO: 2027086
caccagagaacauuucuuu

SEQ ID NO: 2027088 - RNA, 19 nt, Artificial Sequence
  Description of Artificial Sequence: Synthetic oligonucleotide
  Sense strand starting at position 210 of SEQ ID NO: 1881215
gguuccugcagcugauauu

SEQ ID NO: 2027089 - RNA, 19 nt, Artificial Sequence
  Description of Artificial Sequence: Synthetic oligonucleotide
  Antisense strand to SEQ ID NO: 2027088
aauaucagcugcaggaacc

SEQ ID NO: 2027090 - RNA, 19 nt, Artificial Sequence
  Description of Artificial Sequence: Synthetic oligonucleotide
  Sense strand starting at position 237 of SEQ ID NO: 1881215
ggguaauaguggcuguguu

SEQ ID NO: 2027091 - RNA, 19 nt, Artificial Sequence
  Description of Artificial Sequence: Synthetic oligonucleotide
  Antisense strand to SEQ ID NO: 2027090
aacacagccacuauuaccc

SEQ ID NO: 2027092 - RNA, 19 nt, Artificial Sequence
  Description of Artificial Sequence: Synthetic oligonucleotide
  Sense strand starting at position 238 of SEQ ID NO: 1881215
gguaauaguggcuguguuu

SEQ ID NO: 2027093 - RNA, 19 nt, Artificial Sequence
  Description of Artificial Sequence: Synthetic oligonucleotide
  Antisense strand to SEQ ID NO: 2027092
aaacacagccacuauuacc

SEQ ID NO: 2027094 - RNA, 19 nt, Artificial Sequence
  Description of Artificial Sequence: Synthetic oligonucleotide
  Sense strand starting at position 654 of SEQ ID NO: 1881215
uguaacuugugacauugaa

SEQ ID NO: 2027095 - RNA, 19 nt, Artificial Sequence
  Description of Artificial Sequence: Synthetic oligonucleotide
  Antisense strand to SEQ ID NO: 2027094
uucaaugucacaaguuaca

SEQ ID NO: 2027096 - RNA, 19 nt, Artificial Sequence
  Description of Artificial Sequence: Synthetic oligonucleotide
  Sense strand starting at position 694 of SEQ ID NO: 1881215
uuggaagagugaucuuagu

SEQ ID NO: 2027097 - RNA, 19 nt, Artificial Sequence
  Description of Artificial Sequence: Synthetic oligonucleotide
  Antisense strand to SEQ ID NO: 2027096
acuaagaucacucuuccaa

SEQ ID NO: 2027098 - RNA, 19 nt, Artificial Sequence
  Description of Artificial Sequence: Synthetic oligonucleotide
  Sense strand starting at position 700 of SEQ ID NO: 1881215
gagugaucuuaguacuuua

SEQ ID NO: 2027099 - RNA, 19 nt, Artificial Sequence
  Description of Artificial Sequence: Synthetic oligonucleotide
  Antisense strand to SEQ ID NO: 2027098
uaaaguacuaagaucacuc

SEQ ID NO: 2027100 - RNA, 19 nt, Artificial Sequence
  Description of Artificial Sequence: Synthetic oligonucleotide
  Sense strand starting at position 883 of SEQ ID NO: 1881215
uuauuugucucugaccuga

SEQ ID NO: 2027101 - RNA, 19 nt, Artificial Sequence
  Description of Artificial Sequence: Synthetic oligonucleotide
  Antisense strand to SEQ ID NO: 2027100
ucaggucagagacaaauaa

SEQ ID NO: 2027102 - RNA, 19 nt, Artificial Sequence
  Description of Artificial Sequence: Synthetic oligonucleotide
  Sense strand starting at position 888 of SEQ ID NO: 1881215
ugucucugaccugauauua

SEQ ID NO: 2027103 - RNA, 19 nt, Artificial Sequence
  Description of Artificial Sequence: Synthetic oligonucleotide
  Antisense strand to SEQ ID NO: 2027102
uaauaucaggucagagaca

SEQ ID NO: 2027104 - RNA, 19 nt, Artificial Sequence
  Description of Artificial Sequence: Synthetic oligonucleotide
  Sense strand starting at position 974 of SEQ ID NO: 1881215
uucuaugaguuccuccacu

SEQ ID NO: 2027105 - RNA, 19 nt, Artificial Sequence
  Description of Artificial Sequence: Synthetic oligonucleotide
  Antisense strand to SEQ ID NO: 2027104
aguggaggaacucauagaa

SEQ ID NO: 2027106 - RNA, 19 nt, Artificial Sequence
  Description of Artificial Sequence: Synthetic oligonucleotide
  Sense strand starting at position 1045 of SEQ ID NO: 1881215
aacaguagguguuugguua

SEQ ID NO: 2027107 - RNA, 19 nt, Artificial Sequence
  Description of Artificial Sequence: Synthetic oligonucleotide
  Antisense strand to SEQ ID NO: 2027106
uaaccaaacaccuacuguu

SEQ ID NO: 2027108 - RNA, 19 nt, Artificial Sequence
  Description of Artificial Sequence: Synthetic oligonucleotide
  Sense strand starting at position 1049 of SEQ ID NO: 1881215
guagguguuugguuacaug

SEQ ID NO: 2027109 - RNA, 19 nt, Artificial Sequence
  Description of Artificial Sequence: Synthetic oligonucleotide
  Antisense strand to SEQ ID NO: 2027108
cauguaaccaaacaccuac

SEQ ID NO: 2027110 - RNA, 19 nt, Artificial Sequence
  Description of Artificial Sequence: Synthetic oligonucleotide
  Sense strand starting at position 1166 of SEQ ID NO: 1881215
ccacauccguucucaaagu

SEQ ID NO: 2027111 - RNA, 19 nt, Artificial Sequence
  Description of Artificial Sequence: Synthetic oligonucleotide
  Antisense strand to SEQ ID NO: 2027110
acuuugagaacggaugugg

SEQ ID NO: 2027112 - RNA, 19 nt, Artificial Sequence
  Description of Artificial Sequence: Synthetic oligonucleotide
  Sense strand starting at position 1361 of SEQ ID NO: 1881215
ugacuaguauucuacagua

SEQ ID NO: 2027113 - RNA, 19 nt, Artificial Sequence
  Description of Artificial Sequence: Synthetic oligonucleotide
  Antisense strand to SEQ ID NO: 2027112
uacuguagaauacuaguca

SEQ ID NO: 2027114 - RNA, 19 nt, Artificial Sequence
  Description of Artificial Sequence: Synthetic oligonucleotide
  Sense strand starting at position 1363 of SEQ ID NO: 1881215
acuaguauucuacaguaua

SEQ ID NO: 2027115 - RNA, 19 nt, Artificial Sequence
  Description of Artificial Sequence: Synthetic oligonucleotide
  Antisense strand to SEQ ID NO: 2027114
uauacuguagaauacuagu

SEQ ID NO: 2027116 - RNA, 19 nt, Artificial Sequence
  Description of Artificial Sequence: Synthetic oligonucleotide
  Sense strand starting at position 1402 of SEQ ID NO: 1881215
cauauugauugauggacau

SEQ ID NO: 2027117 - RNA, 19 nt, Artificial Sequence
  Description of Artificial Sequence: Synthetic oligonucleotide
  Antisense strand to SEQ ID NO: 2027116
auguccaucaaucaauaug

SEQ ID NO: 2027118 - RNA, 19 nt, Artificial Sequence
  Description of Artificial Sequence: Synthetic oligonucleotide
  Sense strand starting at position 1449 of SEQ ID NO: 1881215
ugaauucugcugcauaaac

SEQ ID NO: 2027119 - RNA, 19 nt, Artificial Sequence
  Description of Artificial Sequence: Synthetic oligonucleotide
  Antisense strand to SEQ ID NO: 2027118
guuuaugcagcagaauuca

SEQ ID NO: 2027120 - RNA, 19 nt, Artificial Sequence
  Description of Artificial Sequence: Synthetic oligonucleotide
  Sense strand starting at position 1683 of SEQ ID NO: 1881215
gugguaucacacugcaguu

SEQ ID NO: 2027121 - RNA, 19 nt, Artificial Sequence
  Description of Artificial Sequence: Synthetic oligonucleotide
  Antisense strand to SEQ ID NO: 2027120
aacugcagugugauaccac

SEQ ID NO: 2027122 - RNA, 19 nt, Artificial Sequence
  Description of Artificial Sequence: Synthetic oligonucleotide
  Sense strand starting at position 1867 of SEQ ID NO: 1881215
auguuagcucuuugucgga

SEQ ID NO: 2027123 - RNA, 19 nt, Artificial Sequence
  Description of Artificial Sequence: Synthetic oligonucleotide
  Antisense strand to SEQ ID NO: 2027122
uccgacaaagagcuaacau

SEQ ID NO: 2027124 - RNA, 19 nt, Artificial Sequence
  Description of Artificial Sequence: Synthetic oligonucleotide
  Sense strand starting at position 1871 of SEQ ID NO: 1881215
uagcucuuugucggaugua

SEQ ID NO: 2027125 - RNA, 19 nt, Artificial Sequence
  Description of Artificial Sequence: Synthetic oligonucleotide
  Antisense strand to SEQ ID NO: 2027124
uacauccgacaaagagcua

SEQ ID NO: 2027126 - RNA, 19 nt, Artificial Sequence
  Description of Artificial Sequence: Synthetic oligonucleotide
  Sense strand starting at position 1874 of SEQ ID NO: 1881215
cucuuugucggauguauag

SEQ ID NO: 2027127 - RNA, 19 nt, Artificial Sequence
  Description of Artificial Sequence: Synthetic oligonucleotide
  Antisense strand to SEQ ID NO: 2027126
cuauacauccgacaaagag

SEQ ID NO: 2027128 - RNA, 19 nt, Artificial Sequence
  Description of Artificial Sequence: Synthetic oligonucleotide
  Sense strand starting at position 1883 of SEQ ID NO: 1881215
ggauguauagaucgcaaag

SEQ ID NO: 2027129 - RNA, 19 nt, Artificial Sequence
  Description of Artificial Sequence: Synthetic oligonucleotide
  Antisense strand to SEQ ID NO: 2027128
cuuugcgaucuauacaucc

SEQ ID NO: 2027130 - RNA, 19 nt, Artificial Sequence
  Description of Artificial Sequence: Synthetic oligonucleotide
  Sense strand starting at position 2023 of SEQ ID NO: 1881215
ugcugugcuuaauuuaguu

SEQ ID NO: 2027131 - RNA, 19 nt, Artificial Sequence
  Description of Artificial Sequence: Synthetic oligonucleotide
  Antisense strand to SEQ ID NO: 2027130
aacuaaauuaagcacagca

SEQ ID NO: 2027132 - RNA, 19 nt, Artificial Sequence
  Description of Artificial Sequence: Synthetic oligonucleotide
  Sense strand starting at position 2253 of SEQ ID NO: 1881215
ccacauguagcuuguuaau

SEQ ID NO: 2027133 - RNA, 19 nt, Artificial Sequence
  Description of Artificial Sequence: Synthetic oligonucleotide
  Antisense strand to SEQ ID NO: 2027132
auuaacaagcuacaugugg

SEQ ID NO: 2027134 - RNA, 19 nt, Artificial Sequence
  Description of Artificial Sequence: Synthetic oligonucleotide
  Sense strand starting at position 2255 of SEQ ID NO: 1881215
acauguagcuuguuaauua

SEQ ID NO: 2027135 - RNA, 19 nt, Artificial Sequence
  Description of Artificial Sequence: Synthetic oligonucleotide
  Antisense strand to SEQ ID NO: 2027134
uaauuaacaagcuacaugu

SEQ ID NO: 2027136 - RNA, 19 nt, Artificial Sequence
  Description of Artificial Sequence: Synthetic oligonucleotide
  Sense strand starting at position 2278 of SEQ ID NO: 1881215
agcaccauuuguuguugaa

SEQ ID NO: 2027137 - RNA, 19 nt, Artificial Sequence
  Description of Artificial Sequence: Synthetic oligonucleotide
  Antisense strand to SEQ ID NO: 2027136
uucaacaacaaauggugcu

SEQ ID NO: 2027138 - RNA, 19 nt, Artificial Sequence
  Description of Artificial Sequence: Synthetic oligonucleotide
  Sense strand starting at position 2281 of SEQ ID NO: 1881215
accauuuguuguugaauag

SEQ ID NO: 2027139 - RNA, 19 nt, Artificial Sequence
  Description of Artificial Sequence: Synthetic oligonucleotide
  Antisense strand to SEQ ID NO: 2027138
cuauucaacaacaaauggu

SEQ ID NO: 2027140 - RNA, 19 nt, Artificial Sequence
  Description of Artificial Sequence: Synthetic oligonucleotide
  Sense strand starting at position 2468 of SEQ ID NO: 1881215
gcuuaaucuuucuuuggcu

SEQ ID NO: 2027141 - RNA, 19 nt, Artificial Sequence
  Description of Artificial Sequence: Synthetic oligonucleotide
  Antisense strand to SEQ ID NO: 2027140
agccaaagaaagauuaagc

SEQ ID NO: 2027142 - RNA, 19 nt, Artificial Sequence
  Description of Artificial Sequence: Synthetic oligonucleotide
  Sense strand starting at position 2634 of SEQ ID NO: 1881215
cauccaugggcaugggaua

SEQ ID NO: 2027143 - RNA, 19 nt, Artificial Sequence
  Description of Artificial Sequence: Synthetic oligonucleotide
  Antisense strand to SEQ ID NO: 2027142
uaucccaugcccauggaug

SEQ ID NO: 2027144 - RNA, 19 nt, Artificial Sequence
  Description of Artificial Sequence: Synthetic oligonucleotide
  Sense strand starting at position 2799 of SEQ ID NO: 1881215
gauccuuagcuuggucacu

SEQ ID NO: 2027145 - RNA, 19 nt, Artificial Sequence
  Description of Artificial Sequence: Synthetic oligonucleotide
  Antisense strand to SEQ ID NO: 2027144
agugaccaagcuaaggauc

SEQ ID NO: 2027146 - RNA, 19 nt, Artificial Sequence
  Description of Artificial Sequence: Synthetic oligonucleotide
  Sense strand starting at position 2818 of SEQ ID NO: 1881215
guugguauauaacagaguu

SEQ ID NO: 2027147 - RNA, 19 nt, Artificial Sequence
  Description of Artificial Sequence: Synthetic oligonucleotide
  Antisense strand to SEQ ID NO: 2027146
aacucuguuauauaccaac

SEQ ID NO: 2027148 - RNA, 19 nt, Artificial Sequence
  Description of Artificial Sequence: Synthetic oligonucleotide
  Sense strand starting at position 2908 of SEQ ID NO: 1881215
cuucgaacugaaugauaac

SEQ ID NO: 2027149 - RNA, 19 nt, Artificial Sequence
  Description of Artificial Sequence: Synthetic oligonucleotide
  Antisense strand to SEQ ID NO: 2027148
guuaucauucaguucgaag

SEQ ID NO: 2027150 - RNA, 19 nt, Artificial Sequence
  Description of Artificial Sequence: Synthetic oligonucleotide
  Sense strand starting at position 3106 of SEQ ID NO: 1881215
ugacaaagaucagagaaga

SEQ ID NO: 2027151 - RNA, 19 nt, Artificial Sequence
  Description of Artificial Sequence: Synthetic oligonucleotide
  Antisense strand to SEQ ID NO: 2027150
ucuucucugaucuuuguca

SEQ ID NO: 2027152 - RNA, 19 nt, Artificial Sequence
  Description of Artificial Sequence: Synthetic oligonucleotide
  Sense strand starting at position 3193 of SEQ ID NO: 1881215
gauugauuagcccauuagu

SEQ ID NO: 2027153 - RNA, 19 nt, Artificial Sequence
  Description of Artificial Sequence: Synthetic oligonucleotide
  Antisense strand to SEQ ID NO: 2027152
acuaaugggcuaaucaauc

SEQ ID NO: 2027154 - RNA, 19 nt, Artificial Sequence
  Description of Artificial Sequence: Synthetic oligonucleotide
  Sense strand starting at position 3196 of SEQ ID NO: 1881215
ugauuagcccauuagugau

SEQ ID NO: 2027155 - RNA, 19 nt, Artificial Sequence
  Description of Artificial Sequence: Synthetic oligonucleotide
  Antisense strand to SEQ ID NO: 2027154
aucacuaaugggcuaauca

SEQ ID NO: 2027156 - RNA, 19 nt, Artificial Sequence
  Description of Artificial Sequence: Synthetic oligonucleotide
  Sense strand starting at position 3314 of SEQ ID NO: 1881215
agucaaggcuacuaugaau

SEQ ID NO: 2027157 - RNA, 19 nt, Artificial Sequence
  Description of Artificial Sequence: Synthetic oligonucleotide
  Antisense strand to SEQ ID NO: 2027156
auucauaguagccuugacu

SEQ ID NO: 2027158 - RNA, 19 nt, Artificial Sequence
  Description of Artificial Sequence: Synthetic oligonucleotide
  Sense strand starting at position 3810 of SEQ ID NO: 1881215
gguugaacauaauacaagu

SEQ ID NO: 2027159 - RNA, 19 nt, Artificial Sequence
  Description of Artificial Sequence: Synthetic oligonucleotide
  Antisense strand to SEQ ID NO: 2027158
acuuguauuauguucaacc

SEQ ID NO: 2027160 - RNA, 19 nt, Artificial Sequence
  Description of Artificial Sequence: Synthetic oligonucleotide
  Sense strand starting at position 458 of SEQ ID NO: 1881216
uggagcuaacauggagauu

SEQ ID NO: 2027161 - RNA, 19 nt, Artificial Sequence
  Description of Artificial Sequence: Synthetic oligonucleotide
  Antisense strand to SEQ ID NO: 2027160
aaucuccauguuagcucca

SEQ ID NO: 2027162 - RNA, 19 nt, Artificial Sequence
  Description of Artificial Sequence: Synthetic oligonucleotide
  Sense strand starting at position 641 of SEQ ID NO: 1881216
aggugaaagccuuaggcua

SEQ ID NO: 2027163 - RNA, 19 nt, Artificial Sequence
  Description of Artificial Sequence: Synthetic oligonucleotide
  Antisense strand to SEQ ID NO: 2027162
uagccuaaggcuuucaccu

SEQ ID NO: 2027164 - RNA, 19 nt, Artificial Sequence
  Description of Artificial Sequence: Synthetic oligonucleotide
  Sense strand starting at position 655 of SEQ ID NO: 1881216
ggcuaaguuccacagauau

SEQ ID NO: 2027165 - RNA, 19 nt, Artificial Sequence
  Description of Artificial Sequence: Synthetic oligonucleotide
  Antisense strand to SEQ ID NO: 2027164
auaucuguggaacuuagcc

SEQ ID NO: 2027166 - RNA, 19 nt, Artificial Sequence
  Description of Artificial Sequence: Synthetic oligonucleotide
  Sense strand starting at position 902 of SEQ ID NO: 1881216
cagauaugguccuuacuug

SEQ ID NO: 2027167 - RNA, 19 nt, Artificial Sequence
  Description of Artificial Sequence: Synthetic oligonucleotide
  Antisense strand to SEQ ID NO: 2027166
caaguaaggaccauaucug

SEQ ID NO: 2027168 - RNA, 19 nt, Artificial Sequence
  Description of Artificial Sequence: Synthetic oligonucleotide
  Sense strand starting at position 929 of SEQ ID NO: 1881216
ucuugcuccugguugauuu

SEQ ID NO: 2027169 - RNA, 19 nt, Artificial Sequence
  Description of Artificial Sequence: Synthetic oligonucleotide
  Antisense strand to SEQ ID NO: 2027168
aaaucaaccaggagcaaga

SEQ ID NO: 2027170 - RNA, 19 nt, Artificial Sequence
  Description of Artificial Sequence: Synthetic oligonucleotide
  Sense strand starting at position 1178 of SEQ ID NO: 1881216
ugguguguuauuuaggugu

SEQ ID NO: 2027171 - RNA, 19 nt, Artificial Sequence
  Description of Artificial Sequence: Synthetic oligonucleotide
  Antisense strand to SEQ ID NO: 2027170
acaccuaaauaacacacca

SEQ ID NO: 2027172 - RNA, 19 nt, Artificial Sequence
  Description of Artificial Sequence: Synthetic oligonucleotide
  Sense strand starting at position 1181 of SEQ ID NO: 1881216
uguguuauuuaggugucuu

SEQ ID NO: 2027173 - RNA, 19 nt, Artificial Sequence
  Description of Artificial Sequence: Synthetic oligonucleotide
  Antisense strand to SEQ ID NO: 2027172
aagacaccuaaauaacaca

SEQ ID NO: 2027174 - RNA, 19 nt, Artificial Sequence
  Description of Artificial Sequence: Synthetic oligonucleotide
  Sense strand starting at position 1640 of SEQ ID NO: 1881216
ggaagugaaggaugcuauu

SEQ ID NO: 2027175 - RNA, 19 nt, Artificial Sequence
  Description of Artificial Sequence: Synthetic oligonucleotide
  Antisense strand to SEQ ID NO: 2027174
aauagcauccuucacuucc

SEQ ID NO: 2027176 - RNA, 19 nt, Artificial Sequence
  Description of Artificial Sequence: Synthetic oligonucleotide
  Sense strand starting at position 1697 of SEQ ID NO: 1881216
agaauuaucuggccuauga

SEQ ID NO: 2027177 - RNA, 19 nt, Artificial Sequence
  Description of Artificial Sequence: Synthetic oligonucleotide
  Antisense strand to SEQ ID NO: 2027176
ucauaggccagauaauucu

SEQ ID NO: 2027178 - RNA, 19 nt, Artificial Sequence
  Description of Artificial Sequence: Synthetic oligonucleotide
  Sense strand starting at position 1719 of SEQ ID NO: 1881216
caauaauauugaguuugag

SEQ ID NO: 2027179 - RNA, 19 nt, Artificial Sequence
  Description of Artificial Sequence: Synthetic oligonucleotide
  Antisense strand to SEQ ID NO: 2027178
cucaaacucaauauuauug

SEQ ID NO: 2027180 - RNA, 19 nt, Artificial Sequence
  Description of Artificial Sequence: Synthetic oligonucleotide
  Sense strand starting at position 1735 of SEQ ID NO: 1881216
gagaaacucuggucuuaga

SEQ ID NO: 2027181 - RNA, 19 nt, Artificial Sequence
  Description of Artificial Sequence: Synthetic oligonucleotide
  Antisense strand to SEQ ID NO: 2027180
ucuaagaccagaguuucuc

SEQ ID NO: 2027182 - RNA, 19 nt, Artificial Sequence
  Description of Artificial Sequence: Synthetic oligonucleotide
  Sense strand starting at position 1778 of SEQ ID NO: 1881216
aaaguagguuuaucugaug

SEQ ID NO: 2027183 - RNA, 19 nt, Artificial Sequence
  Description of Artificial Sequence: Synthetic oligonucleotide
  Antisense strand to SEQ ID NO: 2027182
caucagauaaaccuacuuu

SEQ ID NO: 2027184 - RNA, 19 nt, Artificial Sequence
  Description of Artificial Sequence: Synthetic oligonucleotide
  Sense strand starting at position 1787 of SEQ ID NO: 1881216
uuaucugauguguagguaa

SEQ ID NO: 2027185 - RNA, 19 nt, Artificial Sequence
  Description of Artificial Sequence: Synthetic oligonucleotide
  Antisense strand to SEQ ID NO: 2027184
uuaccuacacaucagauaa

SEQ ID NO: 2027186 - RNA, 19 nt, Artificial Sequence
  Description of Artificial Sequence: Synthetic oligonucleotide
  Sense strand starting at position 1818 of SEQ ID NO: 1881216
cagugacugguuuaacaau

SEQ ID NO: 2027187 - RNA, 19 nt, Artificial Sequence
  Description of Artificial Sequence: Synthetic oligonucleotide
  Antisense strand to SEQ ID NO: 2027186
auuguuaaaccagucacug

SEQ ID NO: 2027188 - RNA, 19 nt, Artificial Sequence
  Description of Artificial Sequence: Synthetic oligonucleotide
  Sense strand starting at position 1850 of SEQ ID NO: 1881216
acucuaggccaaugaaaca

SEQ ID NO: 2027189 - RNA, 19 nt, Artificial Sequence
  Description of Artificial Sequence: Synthetic oligonucleotide
  Antisense strand to SEQ ID NO: 2027188
uguuucauuggccuagagu

SEQ ID NO: 2027190 - RNA, 19 nt, Artificial Sequence
  Description of Artificial Sequence: Synthetic oligonucleotide
  Sense strand starting at position 2059 of SEQ ID NO: 1881216
agucucuuucuugauuaag

SEQ ID NO: 2027191 - RNA, 19 nt, Artificial Sequence
  Description of Artificial Sequence: Synthetic oligonucleotide
  Antisense strand to SEQ ID NO: 2027190
cuuaaucaagaaagagacu

SEQ ID NO: 2027192 - RNA, 19 nt, Artificial Sequence
  Description of Artificial Sequence: Synthetic oligonucleotide
  Sense strand starting at position 2162 of SEQ ID NO: 1881216
acucauuuguuuccgcuua

SEQ ID NO: 2027193 - RNA, 19 nt, Artificial Sequence
  Description of Artificial Sequence: Synthetic oligonucleotide
  Antisense strand to SEQ ID NO: 2027192
uaagcggaaacaaaugagu

SEQ ID NO: 2027194 - RNA, 19 nt, Artificial Sequence
  Description of Artificial Sequence: Synthetic oligonucleotide
  Sense strand starting at position 2234 of SEQ ID NO: 1881216
uggacaaugaucuggcuca

SEQ ID NO: 2027195 - RNA, 19 nt, Artificial Sequence
  Description of Artificial Sequence: Synthetic oligonucleotide
  Antisense strand to SEQ ID NO: 2027194
ugagccagaucauugucca

SEQ ID NO: 2027196 - RNA, 19 nt, Artificial Sequence
  Description of Artificial Sequence: Synthetic oligonucleotide
  Sense strand starting at position 2381 of SEQ ID NO: 1881216
gaggcuacccaaugggauu

SEQ ID NO: 2027197 - RNA, 19 nt, Artificial Sequence
  Description of Artificial Sequence: Synthetic oligonucleotide
  Antisense strand to SEQ ID NO: 2027196
aaucccauuggguagccuc

SEQ ID NO: 2027198 - RNA, 19 nt, Artificial Sequence
  Description of Artificial Sequence: Synthetic oligonucleotide
  Sense strand starting at position 2554 of SEQ ID NO: 1881216
gcacuuuaaagccacgaga

SEQ ID NO: 2027199 - RNA, 19 nt, Artificial Sequence
  Description of Artificial Sequence: Synthetic oligonucleotide
  Antisense strand to SEQ ID NO: 2027198
ucucguggcuuuaaagugc

SEQ ID NO: 2027200 - RNA, 19 nt, Artificial Sequence
  Description of Artificial Sequence: Synthetic oligonucleotide
  Sense strand starting at position 2603 of SEQ ID NO: 1881216
acagcugaauguuuauaaa

SEQ ID NO: 2027201 - RNA, 19 nt, Artificial Sequence
  Description of Artificial Sequence: Synthetic oligonucleotide
  Antisense strand to SEQ ID NO: 2027200
uuuauaaacauucagcugu

SEQ ID NO: 2027202 - RNA, 19 nt, Artificial Sequence
  Description of Artificial Sequence: Synthetic oligonucleotide
  Sense strand starting at position 2651 of SEQ ID NO: 1881216
gcaugcugacauuaaggaa

SEQ ID NO: 2027203 - RNA, 19 nt, Artificial Sequence
  Description of Artificial Sequence: Synthetic oligonucleotide
  Antisense strand to SEQ ID NO: 2027202
uuccuuaaugucagcaugc

SEQ ID NO: 2027204 - RNA, 19 nt, Artificial Sequence
  Description of Artificial Sequence: Synthetic oligonucleotide
  Sense strand starting at position 2744 of SEQ ID NO: 1881216
gaguuaaagucuuucuaag

SEQ ID NO: 2027205 - RNA, 19 nt, Artificial Sequence
  Description of Artificial Sequence: Synthetic oligonucleotide
  Antisense strand to SEQ ID NO: 2027204
cuuagaaagacuuuaacuc

SEQ ID NO: 2027206 - RNA, 19 nt, Artificial Sequence
  Description of Artificial Sequence: Synthetic oligonucleotide
  Sense strand starting at position 2746 of SEQ ID NO: 1881216
guuaaagucuuucuaagau

SEQ ID NO: 2027207 - RNA, 19 nt, Artificial Sequence
  Description of Artificial Sequence: Synthetic oligonucleotide
  Antisense strand to SEQ ID NO: 2027206
aucuuagaaagacuuuaac

SEQ ID NO: 2027208 - RNA, 19 nt, Artificial Sequence
  Description of Artificial Sequence: Synthetic oligonucleotide
  Sense strand starting at position 2946 of SEQ ID NO: 1881216
agaucaggucauugaauuc

SEQ ID NO: 2027209 - RNA, 19 nt, Artificial Sequence
  Description of Artificial Sequence: Synthetic oligonucleotide
  Antisense strand to SEQ ID NO: 2027208
gaauucaaugaccugaucu

SEQ ID NO: 2027210 - RNA, 19 nt, Artificial Sequence
  Description of Artificial Sequence: Synthetic oligonucleotide
  Sense strand starting at position 2998 of SEQ ID NO: 1881216
auaguacaauugcuggaua

SEQ ID NO: 2027211 - RNA, 19 nt, Artificial Sequence
  Description of Artificial Sequence: Synthetic oligonucleotide
  Antisense strand to SEQ ID NO: 2027210
uauccagcaauuguacuau

SEQ ID NO: 2027212 - RNA, 19 nt, Artificial Sequence
  Description of Artificial Sequence: Synthetic oligonucleotide
  Sense strand starting at position 3001 of SEQ ID NO: 1881216
guacaauugcuggauaguc

SEQ ID NO: 2027213 - RNA, 19 nt, Artificial Sequence
  Description of Artificial Sequence: Synthetic oligonucleotide
  Antisense strand to SEQ ID NO: 2027212
gacuauccagcaauuguac

SEQ ID NO: 2027214 - RNA, 19 nt, Artificial Sequence
  Description of Artificial Sequence: Synthetic oligonucleotide
  Sense strand starting at position 3003 of SEQ ID NO: 1881216
acaauugcuggauagucaa

SEQ ID NO: 2027215 - RNA, 19 nt, Artificial Sequence
  Description of Artificial Sequence: Synthetic oligonucleotide
  Antisense strand to SEQ ID NO: 2027214
uugacuauccagcaauugu

SEQ ID NO: 2027216 - RNA, 19 nt, Artificial Sequence
  Description of Artificial Sequence: Synthetic oligonucleotide
  Sense strand starting at position 3014 of SEQ ID NO: 1881216
auagucaauuacucuggau

SEQ ID NO: 2027217 - RNA, 19 nt, Artificial Sequence
  Description of Artificial Sequence: Synthetic oligonucleotide
  Antisense strand to SEQ ID NO: 2027216
auccagaguaauugacuau

SEQ ID NO: 2027218 - RNA, 19 nt, Artificial Sequence
  Description of Artificial Sequence: Synthetic oligonucleotide
  Sense strand starting at position 3061 of SEQ ID NO: 1881216
acuugcuagggucaaguau

SEQ ID NO: 2027219 - RNA, 19 nt, Artificial Sequence
  Description of Artificial Sequence: Synthetic oligonucleotide
  Antisense strand to SEQ ID NO: 2027218
auacuugacccuagcaagu

SEQ ID NO: 2027220 - RNA, 19 nt, Artificial Sequence
  Description of Artificial Sequence: Synthetic oligonucleotide
  Sense strand starting at position 3108 of SEQ ID NO: 1881216
uccaucuuaguuugggaaa

SEQ ID NO: 2027221 - RNA, 19 nt, Artificial Sequence
  Description of Artificial Sequence: Synthetic oligonucleotide
  Antisense strand to SEQ ID NO: 2027220
uuucccaaacuaagaugga

SEQ ID NO: 2027222 - RNA, 19 nt, Artificial Sequence
  Description of Artificial Sequence: Synthetic oligonucleotide
  Sense strand starting at position 3175 of SEQ ID NO: 1881216
acaaaucagcuuugggaua

SEQ ID NO: 2027223 - RNA, 19 nt, Artificial Sequence
  Description of Artificial Sequence: Synthetic oligonucleotide
  Antisense strand to SEQ ID NO: 2027222
uaucccaaagcugauuugu

SEQ ID NO: 2027224 - RNA, 19 nt, Artificial Sequence
  Description of Artificial Sequence: Synthetic oligonucleotide
  Sense strand starting at position 3254 of SEQ ID NO: 1881216
gaccaaugaucugugauua

SEQ ID NO: 2027225 - RNA, 19 nt, Artificial Sequence
  Description of Artificial Sequence: Synthetic oligonucleotide
  Antisense strand to SEQ ID NO: 2027224
uaaucacagaucauugguc

SEQ ID NO: 2027226 - RNA, 19 nt, Artificial Sequence
  Description of Artificial Sequence: Synthetic oligonucleotide
  Sense strand starting at position 3255 of SEQ ID NO: 1881216
accaaugaucugugauuac

SEQ ID NO: 2027227 - RNA, 19 nt, Artificial Sequence
  Description of Artificial Sequence: Synthetic oligonucleotide
  Antisense strand to SEQ ID NO: 2027226
guaaucacagaucauuggu

SEQ ID NO: 2027228 - RNA, 19 nt, Artificial Sequence
  Description of Artificial Sequence: Synthetic oligonucleotide
  Sense strand starting at position 3258 of SEQ ID NO: 1881216
aaugaucugugauuacaag

SEQ ID NO: 2027229 - RNA, 19 nt, Artificial Sequence
  Description of Artificial Sequence: Synthetic oligonucleotide
  Antisense strand to SEQ ID NO: 2027228
cuuguaaucacagaucauu

SEQ ID NO: 2027230 - RNA, 19 nt, Artificial Sequence
  Description of Artificial Sequence: Synthetic oligonucleotide
  Sense strand starting at position 3265 of SEQ ID NO: 1881216
ugugauuacaagggacacu

SEQ ID NO: 2027231 - RNA, 19 nt, Artificial Sequence
  Description of Artificial Sequence: Synthetic oligonucleotide
  Antisense strand to SEQ ID NO: 2027230
agugucccuuguaaucaca

SEQ ID NO: 2027232 - RNA, 19 nt, Artificial Sequence
  Description of Artificial Sequence: Synthetic oligonucleotide
  Sense strand starting at position 3419 of SEQ ID NO: 1881216
ggguuauggcauuagauuc

SEQ ID NO: 2027233 - RNA, 19 nt, Artificial Sequence
  Description of Artificial Sequence: Synthetic oligonucleotide
  Antisense strand to SEQ ID NO: 2027232
gaaucuaaugccauaaccc

SEQ ID NO: 2027234 - RNA, 19 nt, Artificial Sequence
  Description of Artificial Sequence: Synthetic oligonucleotide
  Sense strand starting at position 3700 of SEQ ID NO: 1881216
uacucugcgggauaggaau

SEQ ID NO: 2027235 - RNA, 19 nt, Artificial Sequence
  Description of Artificial Sequence: Synthetic oligonucleotide
  Antisense strand to SEQ ID NO: 2027234
auuccuaucccgcagagua

SEQ ID NO: 2027236 - RNA, 19 nt, Artificial Sequence
  Description of Artificial Sequence: Synthetic oligonucleotide
  Sense strand starting at position 3720 of SEQ ID NO: 1881216
aagggaggguuuguaaauu

SEQ ID NO: 2027237 - RNA, 19 nt, Artificial Sequence
  Description of Artificial Sequence: Synthetic oligonucleotide
  Antisense strand to SEQ ID NO: 2027236
aauuuacaaacccucccuu

SEQ ID NO: 2027238 - RNA, 19 nt, Artificial Sequence
  Description of Artificial Sequence: Synthetic oligonucleotide
  Sense strand starting at position 3820 of SEQ ID NO: 1881216
ugcucuuaccaucauugga

SEQ ID NO: 2027239 - RNA, 19 nt, Artificial Sequence
  Description of Artificial Sequence: Synthetic oligonucleotide
  Antisense strand to SEQ ID NO: 2027238
uccaaugaugguaagagca

SEQ ID NO: 2027240 - RNA, 19 nt, Artificial Sequence
  Description of Artificial Sequence: Synthetic oligonucleotide
  Sense strand starting at position 18 of SEQ ID NO: 1881217
ggcucaucauuacccaaga

SEQ ID NO: 2027241 - RNA, 19 nt, Artificial Sequence
  Description of Artificial Sequence: Synthetic oligonucleotide
  Antisense strand to SEQ ID NO: 2027240
ucuuggguaaugaugagcc

SEQ ID NO: 2027242 - RNA, 19 nt, Artificial Sequence
  Description of Artificial Sequence: Synthetic oligonucleotide
  Sense strand starting at position 75 of SEQ ID NO: 1881217
gguguacaugcccaugaua

SEQ ID NO: 2027243 - RNA, 19 nt, Artificial Sequence
  Description of Artificial Sequence: Synthetic oligonucleotide
  Antisense strand to SEQ ID NO: 2027242
uaucaugggcauguacacc

SEQ ID NO: 2027244 - RNA, 19 nt, Artificial Sequence
  Description of Artificial Sequence: Synthetic oligonucleotide
  Sense strand starting at position 167 of SEQ ID NO: 1881217
gugcuaauucugcaaagaa

SEQ ID NO: 2027245 - RNA, 19 nt, Artificial Sequence
  Description of Artificial Sequence: Synthetic oligonucleotide
  Antisense strand to SEQ ID NO: 2027244
uucuuugcagaauuagcac

SEQ ID NO: 2027246 - RNA, 19 nt, Artificial Sequence
  Description of Artificial Sequence: Synthetic oligonucleotide
  Sense strand starting at position 220 of SEQ ID NO: 1881217
aaucuuagaugugcugaaa

SEQ ID NO: 2027247 - RNA, 19 nt, Artificial Sequence
  Description of Artificial Sequence: Synthetic oligonucleotide
  Antisense strand to SEQ ID NO: 2027246
uuucagcacaucuaagauu

SEQ ID NO: 2027248 - RNA, 19 nt, Artificial Sequence
  Description of Artificial Sequence: Synthetic oligonucleotide
  Sense strand starting at position 361 of SEQ ID NO: 1881217
cgaauaaauugagcacuaa

SEQ ID NO: 2027249 - RNA, 19 nt, Artificial Sequence
  Description of Artificial Sequence: Synthetic oligonucleotide
  Antisense strand to SEQ ID NO: 2027248
uuagugcucaauuuauucg

SEQ ID NO: 2027250 - RNA, 19 nt, Artificial Sequence
  Description of Artificial Sequence: Synthetic oligonucleotide
  Sense strand starting at position 512 of SEQ ID NO: 1881217
guaauaaugcucuagcaaa

SEQ ID NO: 2027251 - RNA, 19 nt, Artificial Sequence
  Description of Artificial Sequence: Synthetic oligonucleotide
  Antisense strand to SEQ ID NO: 2027250
uuugcuagagcauuauuac

SEQ ID NO: 2027252 - RNA, 19 nt, Artificial Sequence
  Description of Artificial Sequence: Synthetic oligonucleotide
  Sense strand starting at position 633 of SEQ ID NO: 1881217
cccucagaagcaugauaaa

SEQ ID NO: 2027253 - RNA, 19 nt, Artificial Sequence
  Description of Artificial Sequence: Synthetic oligonucleotide
  Antisense strand to SEQ ID NO: 2027252
uuuaucaugcuucugaggg

SEQ ID NO: 2027254 - RNA, 19 nt, Artificial Sequence
  Description of Artificial Sequence: Synthetic oligonucleotide
  Sense strand starting at position 1204 of SEQ ID NO: 1881217
cauagauugcuugauguau

SEQ ID NO: 2027255 - RNA, 19 nt, Artificial Sequence
  Description of Artificial Sequence: Synthetic oligonucleotide
  Antisense strand to SEQ ID NO: 2027254
auacaucaagcaaucuaug

SEQ ID NO: 2027256 - RNA, 19 nt, Artificial Sequence
  Description of Artificial Sequence: Synthetic oligonucleotide
  Sense strand starting at position 1403 of SEQ ID NO: 1881217
gcaguuaagaugcaucaag

SEQ ID NO: 2027257 - RNA, 19 nt, Artificial Sequence
  Description of Artificial Sequence: Synthetic oligonucleotide
  Antisense strand to SEQ ID NO: 2027256
cuugaugcaucuuaacugc

SEQ ID NO: 2027258 - RNA, 19 nt, Artificial Sequence
  Description of Artificial Sequence: Synthetic oligonucleotide
  Sense strand starting at position 1594 of SEQ ID NO: 1881217
agauguaaagauugguuga

SEQ ID NO: 2027259 - RNA, 19 nt, Artificial Sequence
  Description of Artificial Sequence: Synthetic oligonucleotide
  Antisense strand to SEQ ID NO: 2027258
ucaaccaaucuuuacaucu

SEQ ID NO: 2027260 - RNA, 19 nt, Artificial Sequence
  Description of Artificial Sequence: Synthetic oligonucleotide
  Sense strand starting at position 1596 of SEQ ID NO: 1881217
auguaaagauugguugaaa

SEQ ID NO: 2027261 - RNA, 19 nt, Artificial Sequence
  Description of Artificial Sequence: Synthetic oligonucleotide
  Antisense strand to SEQ ID NO: 2027260
uuucaaccaaucuuuacau

SEQ ID NO: 2027262 - RNA, 19 nt, Artificial Sequence
  Description of Artificial Sequence: Synthetic oligonucleotide
  Sense strand starting at position 1597 of SEQ ID NO: 1881217
uguaaagauugguugaaag

SEQ ID NO: 2027263 - RNA, 19 nt, Artificial Sequence
  Description of Artificial Sequence: Synthetic oligonucleotide
  Antisense strand to SEQ ID NO: 2027262
cuuucaaccaaucuuuaca

SEQ ID NO: 2027264 - RNA, 19 nt, Artificial Sequence
  Description of Artificial Sequence: Synthetic oligonucleotide
  Sense strand starting at position 1616 of SEQ ID NO: 1881217
cugguaugugguuagaauc

SEQ ID NO: 2027265 - RNA, 19 nt, Artificial Sequence
  Description of Artificial Sequence: Synthetic oligonucleotide
  Antisense strand to SEQ ID NO: 2027264
gauucuaaccacauaccag

SEQ ID NO: 2027266 - RNA, 19 nt, Artificial Sequence
  Description of Artificial Sequence: Synthetic oligonucleotide
  Sense strand starting at position 1626 of SEQ ID NO: 1881217
guuagaauccugcaucaac

SEQ ID NO: 2027267 - RNA, 19 nt, Artificial Sequence
  Description of Artificial Sequence: Synthetic oligonucleotide
  Antisense strand to SEQ ID NO: 2027266
guugaugcaggauucuaac

SEQ ID NO: 2027268 - RNA, 19 nt, Artificial Sequence
  Description of Artificial Sequence: Synthetic oligonucleotide
  Sense strand starting at position 1654 of SEQ ID NO: 1881217
guaugauaacugcacuccu

SEQ ID NO: 2027269 - RNA, 19 nt, Artificial Sequence
  Description of Artificial Sequence: Synthetic oligonucleotide
  Antisense strand to SEQ ID NO: 2027268
aggagugcaguuaucauac

SEQ ID NO: 2027270 - RNA, 19 nt, Artificial Sequence
  Description of Artificial Sequence: Synthetic oligonucleotide
  Sense strand starting at position 1794 of SEQ ID NO: 1881217
uuugcuucccaagggauau

SEQ ID NO: 2027271 - RNA, 19 nt, Artificial Sequence
  Description of Artificial Sequence: Synthetic oligonucleotide
  Antisense strand to SEQ ID NO: 2027270
auaucccuugggaagcaaa

SEQ ID NO: 2027272 - RNA, 19 nt, Artificial Sequence
  Description of Artificial Sequence: Synthetic oligonucleotide
  Sense strand starting at position 1815 of SEQ ID NO: 1881217
ggcaauaugccaugaagac

SEQ ID NO: 2027273 - RNA, 19 nt, Artificial Sequence
  Description of Artificial Sequence: Synthetic oligonucleotide
  Antisense strand to SEQ ID NO: 2027272
gucuucauggcauauugcc

SEQ ID NO: 2027274 - RNA, 19 nt, Artificial Sequence
  Description of Artificial Sequence: Synthetic oligonucleotide
  Sense strand starting at position 1816 of SEQ ID NO: 1881217
gcaauaugccaugaagaca

SEQ ID NO: 2027275 - RNA, 19 nt, Artificial Sequence
  Description of Artificial Sequence: Synthetic oligonucleotide
  Antisense strand to SEQ ID NO: 2027274
ugucuucauggcauauugc

SEQ ID NO: 2027276 - RNA, 19 nt, Artificial Sequence
  Description of Artificial Sequence: Synthetic oligonucleotide
  Sense strand starting at position 1961 of SEQ ID NO: 1881217
guaucaguagugcaaauga

SEQ ID NO: 2027277 - RNA, 19 nt, Artificial Sequence
  Description of Artificial Sequence: Synthetic oligonucleotide
  Antisense strand to SEQ ID NO: 2027276
ucauuugcacuacugauac

SEQ ID NO: 2027278 - RNA, 19 nt, Artificial Sequence
  Description of Artificial Sequence: Synthetic oligonucleotide
  Sense strand starting at position 2070 of SEQ ID NO: 1881217
cugugagaucugcaucuug

SEQ ID NO: 2027279 - RNA, 19 nt, Artificial Sequence
  Description of Artificial Sequence: Synthetic oligonucleotide
  Antisense strand to SEQ ID NO: 2027278
caagaugcagaucucacag

SEQ ID NO: 2027280 - RNA, 19 nt, Artificial Sequence
  Description of Artificial Sequence: Synthetic oligonucleotide
  Sense strand starting at position 2121 of SEQ ID NO: 1881217
cuaguuguaucucugagaa

SEQ ID NO: 2027281 - RNA, 19 nt, Artificial Sequence
  Description of Artificial Sequence: Synthetic oligonucleotide
  Antisense strand to SEQ ID NO: 2027280
uucucagagauacaacuag

SEQ ID NO: 2027282 - RNA, 19 nt, Artificial Sequence
  Description of Artificial Sequence: Synthetic oligonucleotide
  Sense strand starting at position 2166 of SEQ ID NO: 1881217
aggcaauagaucugaggcu

SEQ ID NO: 2027283 - RNA, 19 nt, Artificial Sequence
  Description of Artificial Sequence: Synthetic oligonucleotide
  Antisense strand to SEQ ID NO: 2027282
agccucagaucuauugccu

SEQ ID NO: 2027284 - RNA, 19 nt, Artificial Sequence
  Description of Artificial Sequence: Synthetic oligonucleotide
  Sense strand starting at position 2317 of SEQ ID NO: 1881217
gugauaacuuguuccuaaa

SEQ ID NO: 2027285 - RNA, 19 nt, Artificial Sequence
  Description of Artificial Sequence: Synthetic oligonucleotide
  Antisense strand to SEQ ID NO: 2027284
uuuaggaacaaguuaucac

SEQ ID NO: 2027286 - RNA, 19 nt, Artificial Sequence
  Description of Artificial Sequence: Synthetic oligonucleotide
  Sense strand starting at position 2347 of SEQ ID NO: 1881217
agcaaaggauuagcagaua

SEQ ID NO: 2027287 - RNA, 19 nt, Artificial Sequence
  Description of Artificial Sequence: Synthetic oligonucleotide
  Antisense strand to SEQ ID NO: 2027286
uaucugcuaauccuuugcu

SEQ ID NO: 2027288 - RNA, 19 nt, Artificial Sequence
  Description of Artificial Sequence: Synthetic oligonucleotide
  Sense strand starting at position 2362 of SEQ ID NO: 1881217
gauauuaaggaaggcuuau

SEQ ID NO: 2027289 - RNA, 19 nt, Artificial Sequence
  Description of Artificial Sequence: Synthetic oligonucleotide
  Antisense strand to SEQ ID NO: 2027288
auaagccuuccuuaauauc

SEQ ID NO: 2027290 - RNA, 19 nt, Artificial Sequence
  Description of Artificial Sequence: Synthetic oligonucleotide
  Sense strand starting at position 2374 of SEQ ID NO: 1881217
ggcuuauaacaugaaaguu

SEQ ID NO: 2027291 - RNA, 19 nt, Artificial Sequence
  Description of Artificial Sequence: Synthetic oligonucleotide
  Antisense strand to SEQ ID NO: 2027290
aacuuucauguuauaagcc

SEQ ID NO: 2027292 - RNA, 19 nt, Artificial Sequence
  Description of Artificial Sequence: Synthetic oligonucleotide
  Sense strand starting at position 2764 of SEQ ID NO: 1881217
uuuauagaagugugagaag

SEQ ID NO: 2027293 - RNA, 19 nt, Artificial Sequence
  Description of Artificial Sequence: Synthetic oligonucleotide
  Antisense strand to SEQ ID NO: 2027292
cuucucacacuucuauaaa

SEQ ID NO: 2027294 - RNA, 19 nt, Artificial Sequence
  Description of Artificial Sequence: Synthetic oligonucleotide
  Sense strand starting at position 2778 of SEQ ID NO: 1881217
agaagagacuaacacaaua

SEQ ID NO: 2027295 - RNA, 19 nt, Artificial Sequence
  Description of Artificial Sequence: Synthetic oligonucleotide
  Antisense strand to SEQ ID NO: 2027294
uauuguguuagucucuucu

SEQ ID NO: 2027296 - RNA, 19 nt, Artificial Sequence
  Description of Artificial Sequence: Synthetic oligonucleotide
  Sense strand starting at position 2880 of SEQ ID NO: 1881217
ugaaauuucuuaggaagau

SEQ ID NO: 2027297 - RNA, 19 nt, Artificial Sequence
  Description of Artificial Sequence: Synthetic oligonucleotide
  Antisense strand to SEQ ID NO: 2027296
aucuuccuaagaaauuuca

SEQ ID NO: 2027298 - RNA, 19 nt, Artificial Sequence
  Description of Artificial Sequence: Synthetic oligonucleotide
  Sense strand starting at position 3049 of SEQ ID NO: 1881217
uuguacaaguaauuagaga

SEQ ID NO: 2027299 - RNA, 19 nt, Artificial Sequence
  Description of Artificial Sequence: Synthetic oligonucleotide
  Antisense strand to SEQ ID NO: 2027298
ucucuaauuacuuguacaa

SEQ ID NO: 2027300 - RNA, 19 nt, Artificial Sequence
  Description of Artificial Sequence: Synthetic oligonucleotide
  Sense strand starting at position 3064 of SEQ ID NO: 1881217
gagaaauauguaugcaaua

SEQ ID NO: 2027301 - RNA, 19 nt, Artificial Sequence
  Description of Artificial Sequence: Synthetic oligonucleotide
  Antisense strand to SEQ ID NO: 2027300
uauugcauacauauuucuc

SEQ ID NO: 2027302 - RNA, 19 nt, Artificial Sequence
  Description of Artificial Sequence: Synthetic oligonucleotide
  Sense strand starting at position 3069 of SEQ ID NO: 1881217
auauguaugcaauauagac

SEQ ID NO: 2027303 - RNA, 19 nt, Artificial Sequence
  Description of Artificial Sequence: Synthetic oligonucleotide
  Antisense strand to SEQ ID NO: 2027302
gucuauauugcauacauau

SEQ ID NO: 2027304 - RNA, 19 nt, Artificial Sequence
  Description of Artificial Sequence: Synthetic oligonucleotide
  Sense strand starting at position 3229 of SEQ ID NO: 1881217
ggagguugugaauaacugu

SEQ ID NO: 2027305 - RNA, 19 nt, Artificial Sequence
  Description of Artificial Sequence: Synthetic oligonucleotide
  Antisense strand to SEQ ID NO: 2027304
acaguuauucacaaccucc

SEQ ID NO: 2027306 - RNA, 19 nt, Artificial Sequence
  Description of Artificial Sequence: Synthetic oligonucleotide
  Sense strand starting at position 3371 of SEQ ID NO: 1881217
ugugauugacuuuacacua

SEQ ID NO: 2027307 - RNA, 19 nt, Artificial Sequence
  Description of Artificial Sequence: Synthetic oligonucleotide
  Antisense strand to SEQ ID NO: 2027306
uaguguaaagucaaucaca

SEQ ID NO: 2027308 - RNA, 19 nt, Artificial Sequence
  Description of Artificial Sequence: Synthetic oligonucleotide
  Sense strand starting at position 3456 of SEQ ID NO: 1881217
cuuuaagcuggugauagau

SEQ ID NO: 2027309 - RNA, 19 nt, Artificial Sequence
  Description of Artificial Sequence: Synthetic oligonucleotide
  Antisense strand to SEQ ID NO: 2027308
aucuaucaccagcuuaaag

SEQ ID NO: 2027310 - RNA, 19 nt, Artificial Sequence
  Description of Artificial Sequence: Synthetic oligonucleotide
  Sense strand starting at position 3599 of SEQ ID NO: 1881217
gaagaagacugugcuauga

SEQ ID NO: 2027311 - RNA, 19 nt, Artificial Sequence
  Description of Artificial Sequence: Synthetic oligonucleotide
  Antisense strand to SEQ ID NO: 2027310
ucauagcacagucuucuuc

SEQ ID NO: 2027312 - RNA, 19 nt, Artificial Sequence
  Description of Artificial Sequence: Synthetic oligonucleotide
  Sense strand starting at position 3603 of SEQ ID NO: 1881217
aagacugugcuaugaagga

SEQ ID NO: 2027313 - RNA, 19 nt, Artificial Sequence
  Description of Artificial Sequence: Synthetic oligonucleotide
  Antisense strand to SEQ ID NO: 2027312
uccuucauagcacagucuu

SEQ ID NO: 2027314 - RNA, 19 nt, Artificial Sequence
  Description of Artificial Sequence: Synthetic oligonucleotide
  Sense strand starting at position 3971 of SEQ ID NO: 1881217
acaggagucuuucuguaca

SEQ ID NO: 2027315 - RNA, 19 nt, Artificial Sequence
  Description of Artificial Sequence: Synthetic oligonucleotide
  Antisense strand to SEQ ID NO: 2027314
uguacagaaagacuccugu

SEQ ID NO: 2027316 - RNA, 19 nt, Artificial Sequence
  Description of Artificial Sequence: Synthetic oligonucleotide
  Sense strand starting at position 3973 of SEQ ID NO: 1881217
aggagucuuucuguacaaa

SEQ ID NO: 2027317 - RNA, 19 nt, Artificial Sequence
  Description of Artificial Sequence: Synthetic oligonucleotide
  Antisense strand to SEQ ID NO: 2027316
uuuguacagaaagacuccu

SEQ ID NO: 2027318 - RNA, 19 nt, Artificial Sequence
  Description of Artificial Sequence: Synthetic oligonucleotide
  Sense strand starting at position 3974 of SEQ ID NO: 1881217
ggagucuuucuguacaaau

SEQ ID NO: 2027319 - RNA, 19 nt, Artificial Sequence
  Description of Artificial Sequence: Synthetic oligonucleotide
  Antisense strand to SEQ ID NO: 2027318
auuuguacagaaagacucc

SEQ ID NO: 2027320 - RNA, 19 nt, Artificial Sequence
  Description of Artificial Sequence: Synthetic oligonucleotide
  Sense strand starting at position 2 of SEQ ID NO: 1881218
gauuguucgcuuguuuacu

SEQ ID NO: 2027321 - RNA, 19 nt, Artificial Sequence
  Description of Artificial Sequence: Synthetic oligonucleotide
  Antisense strand to SEQ ID NO: 2027320
aguaaacaagcgaacaauc

SEQ ID NO: 2027322 - RNA, 19 nt, Artificial Sequence
  Description of Artificial Sequence: Synthetic oligonucleotide
  Sense strand starting at position 7 of SEQ ID NO: 1881218
uucgcuuguuuacuauaaa

SEQ ID NO: 2027323 - RNA, 19 nt, Artificial Sequence
  Description of Artificial Sequence: Synthetic oligonucleotide
  Antisense strand to SEQ ID NO: 2027322
uuuauaguaaacaagcgaa

SEQ ID NO: 2027324 - RNA, 19 nt, Artificial Sequence
  Description of Artificial Sequence: Synthetic oligonucleotide
  Sense strand starting at position 54 of SEQ ID NO: 1881218
ggcucaguauucuuugguu

SEQ ID NO: 2027325 - RNA, 19 nt, Artificial Sequence
  Description of Artificial Sequence: Synthetic oligonucleotide
  Antisense strand to SEQ ID NO: 2027324
aaccaaagaauacugagcc

SEQ ID NO: 2027326 - RNA, 19 nt, Artificial Sequence
  Description of Artificial Sequence: Synthetic oligonucleotide
  Sense strand starting at position 56 of SEQ ID NO: 1881218
cucaguauucuuugguuga

SEQ ID NO: 2027327 - RNA, 19 nt, Artificial Sequence
  Description of Artificial Sequence: Synthetic oligonucleotide
  Antisense strand to SEQ ID NO: 2027326
ucaaccaaagaauacugag

SEQ ID NO: 2027328 - RNA, 19 nt, Artificial Sequence
  Description of Artificial Sequence: Synthetic oligonucleotide
  Sense strand starting at position 58 of SEQ ID NO: 1881218
caguauucuuugguugaga

SEQ ID NO: 2027329 - RNA, 19 nt, Artificial Sequence
  Description of Artificial Sequence: Synthetic oligonucleotide
  Antisense strand to SEQ ID NO: 2027328
ucucaaccaaagaauacug

SEQ ID NO: 2027330 - RNA, 19 nt, Artificial Sequence
  Description of Artificial Sequence: Synthetic oligonucleotide
  Sense strand starting at position 59 of SEQ ID NO: 1881218
aguauucuuugguugagau

SEQ ID NO: 2027331 - RNA, 19 nt, Artificial Sequence
  Description of Artificial Sequence: Synthetic oligonucleotide
  Antisense strand to SEQ ID NO: 2027330
aucucaaccaaagaauacu

SEQ ID NO: 2027332 - RNA, 19 nt, Artificial Sequence
  Description of Artificial Sequence: Synthetic oligonucleotide
  Sense strand starting at position 60 of SEQ ID NO: 1881218
guauucuuugguugagaug

SEQ ID NO: 2027333 - RNA, 19 nt, Artificial Sequence
  Description of Artificial Sequence: Synthetic oligonucleotide
  Antisense strand to SEQ ID NO: 2027332
caucucaaccaaagaauac

SEQ ID NO: 2027334 - RNA, 19 nt, Artificial Sequence
  Description of Artificial Sequence: Synthetic oligonucleotide
  Sense strand starting at position 137 of SEQ ID NO: 1881218
gagaacaugccgugguaau

SEQ ID NO: 2027335 - RNA, 19 nt, Artificial Sequence
  Description of Artificial Sequence: Synthetic oligonucleotide
  Antisense strand to SEQ ID NO: 2027334
auuaccacggcauguucuc

SEQ ID NO: 2027336 - RNA, 19 nt, Artificial Sequence
  Description of Artificial Sequence: Synthetic oligonucleotide
  Sense strand starting at position 138 of SEQ ID NO: 1881218
agaacaugccgugguaaua

SEQ ID NO: 2027337 - RNA, 19 nt, Artificial Sequence
  Description of Artificial Sequence: Synthetic oligonucleotide
  Antisense strand to SEQ ID NO: 2027336
uauuaccacggcauguucu

SEQ ID NO: 2027338 - RNA, 19 nt, Artificial Sequence
  Description of Artificial Sequence: Synthetic oligonucleotide
  Sense strand starting at position 513 of SEQ ID NO: 1881218
gcugaauagcggugaacuc

SEQ ID NO: 2027339 - RNA, 19 nt, Artificial Sequence
  Description of Artificial Sequence: Synthetic oligonucleotide
  Antisense strand to SEQ ID NO: 2027338
gaguucaccgcuauucagc

SEQ ID NO: 2027340 - RNA, 19 nt, Artificial Sequence
  Description of Artificial Sequence: Synthetic oligonucleotide
  Sense strand starting at position 657 of SEQ ID NO: 1881218
auggguguucgagggaaau

SEQ ID NO: 2027341 - RNA, 19 nt, Artificial Sequence
  Description of Artificial Sequence: Synthetic oligonucleotide
  Antisense strand to SEQ ID NO: 2027340
auuucccucgaacacccau

SEQ ID NO: 2027342 - RNA, 19 nt, Artificial Sequence
  Description of Artificial Sequence: Synthetic oligonucleotide
  Sense strand starting at position 658 of SEQ ID NO: 1881218
uggguguucgagggaaaug

SEQ ID NO: 2027343 - RNA, 19 nt, Artificial Sequence
  Description of Artificial Sequence: Synthetic oligonucleotide
  Antisense strand to SEQ ID NO: 2027342
cauuucccucgaacaccca

SEQ ID NO: 2027344 - RNA, 19 nt, Artificial Sequence
  Description of Artificial Sequence: Synthetic oligonucleotide
  Sense strand starting at position 789 of SEQ ID NO: 1881218
cugugugacauagagcaau

SEQ ID NO: 2027345 - RNA, 19 nt, Artificial Sequence
  Description of Artificial Sequence: Synthetic oligonucleotide
  Antisense strand to SEQ ID NO: 2027344
auugcucuaugucacacag

SEQ ID NO: 2027346 - RNA, 19 nt, Artificial Sequence
  Description of Artificial Sequence: Synthetic oligonucleotide
  Sense strand starting at position 823 of SEQ ID NO: 1881218
auaagaugucucugugaga

SEQ ID NO: 2027347 - RNA, 19 nt, Artificial Sequence
  Description of Artificial Sequence: Synthetic oligonucleotide
  Antisense strand to SEQ ID NO: 2027346
ucucacagagacaucuuau

SEQ ID NO: 2027348 - RNA, 19 nt, Artificial Sequence
  Description of Artificial Sequence: Synthetic oligonucleotide
  Sense strand starting at position 824 of SEQ ID NO: 1881218
uaagaugucucugugagag

SEQ ID NO: 2027349 - RNA, 19 nt, Artificial Sequence
  Description of Artificial Sequence: Synthetic oligonucleotide
  Antisense strand to SEQ ID NO: 2027348
cucucacagagacaucuua

SEQ ID NO: 2027350 - RNA, 19 nt, Artificial Sequence
  Description of Artificial Sequence: Synthetic oligonucleotide
  Sense strand starting at position 992 of SEQ ID NO: 1881218
ccaguauugcuagaggaca

SEQ ID NO: 2027351 - RNA, 19 nt, Artificial Sequence
  Description of Artificial Sequence: Synthetic oligonucleotide
  Antisense strand to SEQ ID NO: 2027350
uguccucuagcaauacugg

SEQ ID NO: 2027352 - RNA, 19 nt, Artificial Sequence
  Description of Artificial Sequence: Synthetic oligonucleotide
  Sense strand starting at position 1608 of SEQ ID NO: 1881218
acaccauuaugagagacuu

SEQ ID NO: 2027353 - RNA, 19 nt, Artificial Sequence
  Description of Artificial Sequence: Synthetic oligonucleotide
  Antisense strand to SEQ ID NO: 2027352
aagucucucauaauggugu

SEQ ID NO: 2027354 - RNA, 19 nt, Artificial Sequence
  Description of Artificial Sequence: Synthetic oligonucleotide
  Sense strand starting at position 1750 of SEQ ID NO: 1881218
uccggauaacugcgggaaa

SEQ ID NO: 2027355 - RNA, 19 nt, Artificial Sequence
  Description of Artificial Sequence: Synthetic oligonucleotide
  Antisense strand to SEQ ID NO: 2027354
uuucccgcaguuauccgga

SEQ ID NO: 2027356 - RNA, 19 nt, Artificial Sequence
  Description of Artificial Sequence: Synthetic oligonucleotide
  Sense strand starting at position 1761 of SEQ ID NO: 1881218
gcgggaaagccugacuaau

SEQ ID NO: 2027357 - RNA, 19 nt, Artificial Sequence
  Description of Artificial Sequence: Synthetic oligonucleotide
  Antisense strand to SEQ ID NO: 2027356
auuagucaggcuuucccgc

SEQ ID NO: 2027358 - RNA, 19 nt, Artificial Sequence
  Description of Artificial Sequence: Synthetic oligonucleotide
  Sense strand starting at position 1763 of SEQ ID NO: 1881218
gggaaagccugacuaaugu

SEQ ID NO: 2027359 - RNA, 19 nt, Artificial Sequence
  Description of Artificial Sequence: Synthetic oligonucleotide
  Antisense strand to SEQ ID NO: 2027358
acauuagucaggcuuuccc

SEQ ID NO: 2027360 - RNA, 19 nt, Artificial Sequence
  Description of Artificial Sequence: Synthetic oligonucleotide
  Sense strand starting at position 1989 of SEQ ID NO: 1881218
uuuggucacuccucacuau

SEQ ID NO: 2027361 - RNA, 19 nt, Artificial Sequence
  Description of Artificial Sequence: Synthetic oligonucleotide
  Antisense strand to SEQ ID NO: 2027360
auagugaggagugaccaaa

SEQ ID NO: 2027362 - RNA, 19 nt, Artificial Sequence
  Description of Artificial Sequence: Synthetic oligonucleotide
  Sense strand starting at position 2354 of SEQ ID NO: 1881218
augcuauucuuucugagga

SEQ ID NO: 2027363 - RNA, 19 nt, Artificial Sequence
  Description of Artificial Sequence: Synthetic oligonucleotide
  Antisense strand to SEQ ID NO: 2027362
uccucagaaagaauagcau

SEQ ID NO: 2027364 - RNA, 19 nt, Artificial Sequence
  Description of Artificial Sequence: Synthetic oligonucleotide
  Sense strand starting at position 2402 of SEQ ID NO: 1881218
cuaucaguuucucugggaa

SEQ ID NO: 2027365 - RNA, 19 nt, Artificial Sequence
  Description of Artificial Sequence: Synthetic oligonucleotide
  Antisense strand to SEQ ID NO: 2027364
uucccagagaaacugauag

SEQ ID NO: 2027366 - RNA, 19 nt, Artificial Sequence
  Description of Artificial Sequence: Synthetic oligonucleotide
  Sense strand starting at position 2507 of SEQ ID NO: 1881218
acaauagaaucuuugugag

SEQ ID NO: 2027367 - RNA, 19 nt, Artificial Sequence
  Description of Artificial Sequence: Synthetic oligonucleotide
  Antisense strand to SEQ ID NO: 2027366
cucacaaagauucuauugu

SEQ ID NO: 2027368 - RNA, 19 nt, Artificial Sequence
  Description of Artificial Sequence: Synthetic oligonucleotide
  Sense strand starting at position 2509 of SEQ ID NO: 1881218
aauagaaucuuugugaggu

SEQ ID NO: 2027369 - RNA, 19 nt, Artificial Sequence
  Description of Artificial Sequence: Synthetic oligonucleotide
  Antisense strand to SEQ ID NO: 2027368
accucacaaagauucuauu

SEQ ID NO: 2027370 - RNA, 19 nt, Artificial Sequence
  Description of Artificial Sequence: Synthetic oligonucleotide
  Sense strand starting at position 2618 of SEQ ID NO: 1881218
agugcuauugcagagauaa

SEQ ID NO: 2027371 - RNA, 19 nt, Artificial Sequence
  Description of Artificial Sequence: Synthetic oligonucleotide
  Antisense strand to SEQ ID NO: 2027370
uuaucucugcaauagcacu

SEQ ID NO: 2027372 - RNA, 19 nt, Artificial Sequence
  Description of Artificial Sequence: Synthetic oligonucleotide
  Sense strand starting at position 2636 of SEQ ID NO: 1881218
agcauaaagcgguauguga

SEQ ID NO: 2027373 - RNA, 19 nt, Artificial Sequence
  Description of Artificial Sequence: Synthetic oligonucleotide
  Antisense strand to SEQ ID NO: 2027372
ucacauaccgcuuuaugcu

SEQ ID NO: 2027374 - RNA, 19 nt, Artificial Sequence
  Description of Artificial Sequence: Synthetic oligonucleotide
  Sense strand starting at position 2638 of SEQ ID NO: 1881218
cauaaagcgguaugugagu

SEQ ID NO: 2027375 - RNA, 19 nt, Artificial Sequence
  Description of Artificial Sequence: Synthetic oligonucleotide
  Antisense strand to SEQ ID NO: 2027374
acucacauaccgcuuuaug

SEQ ID NO: 2027376 - RNA, 19 nt, Artificial Sequence
  Description of Artificial Sequence: Synthetic oligonucleotide
  Sense strand starting at position 2643 of SEQ ID NO: 1881218
agcgguaugugaguacaaa

SEQ ID NO: 2027377 - RNA, 19 nt, Artificial Sequence
  Description of Artificial Sequence: Synthetic oligonucleotide
  Antisense strand to SEQ ID NO: 2027376
uuuguacucacauaccgcu

SEQ ID NO: 2027378 - RNA, 19 nt, Artificial Sequence
  Description of Artificial Sequence: Synthetic oligonucleotide
  Sense strand starting at position 2644 of SEQ ID NO: 1881218
gcgguaugugaguacaaag

SEQ ID NO: 2027379 - RNA, 19 nt, Artificial Sequence
  Description of Artificial Sequence: Synthetic oligonucleotide
  Antisense strand to SEQ ID NO: 2027378
cuuuguacucacauaccgc

SEQ ID NO: 2027380 - RNA, 19 nt, Artificial Sequence
  Description of Artificial Sequence: Synthetic oligonucleotide
  Sense strand starting at position 2679 of SEQ ID NO: 1881218
ggaguggaggucugggaaa

SEQ ID NO: 2027381 - RNA, 19 nt, Artificial Sequence
  Description of Artificial Sequence: Synthetic oligonucleotide
  Antisense strand to SEQ ID NO: 2027380
uuucccagaccuccacucc

SEQ ID NO: 2027382 - RNA, 19 nt, Artificial Sequence
  Description of Artificial Sequence: Synthetic oligonucleotide
  Sense strand starting at position 2733 of SEQ ID NO: 1881218
gaaggacaagucgguuaga

SEQ ID NO: 2027383 - RNA, 19 nt, Artificial Sequence
  Description of Artificial Sequence: Synthetic oligonucleotide
  Antisense strand to SEQ ID NO: 2027382
ucuaaccgacuuguccuuc

SEQ ID NO: 2027384 - RNA, 19 nt, Artificial Sequence
  Description of Artificial Sequence: Synthetic oligonucleotide
  Sense strand starting at position 2734 of SEQ ID NO: 1881218
aaggacaagucgguuagau

SEQ ID NO: 2027385 - RNA, 19 nt, Artificial Sequence
  Description of Artificial Sequence: Synthetic oligonucleotide
  Antisense strand to SEQ ID NO: 2027384
aucuaaccgacuuguccuu

SEQ ID NO: 2027386 - RNA, 19 nt, Artificial Sequence
  Description of Artificial Sequence: Synthetic oligonucleotide
  Sense strand starting at position 2736 of SEQ ID NO: 1881218
ggacaagucgguuagaugu

SEQ ID NO: 2027387 - RNA, 19 nt, Artificial Sequence
  Description of Artificial Sequence: Synthetic oligonucleotide
  Antisense strand to SEQ ID NO: 2027386
acaucuaaccgacuugucc

SEQ ID NO: 2027388 - RNA, 19 nt, Artificial Sequence
  Description of Artificial Sequence: Synthetic oligonucleotide
  Sense strand starting at position 2743 of SEQ ID NO: 1881218
ucgguuagauguuucaagu

SEQ ID NO: 2027389 - RNA, 19 nt, Artificial Sequence
  Description of Artificial Sequence: Synthetic oligonucleotide
  Antisense strand to SEQ ID NO: 2027388
acuugaaacaucuaaccga

SEQ ID NO: 2027390 - RNA, 19 nt, Artificial Sequence
  Description of Artificial Sequence: Synthetic oligonucleotide
  Sense strand starting at position 2799 of SEQ ID NO: 1881218
gcggauggugccuuugagu

SEQ ID NO: 2027391 - RNA, 19 nt, Artificial Sequence
  Description of Artificial Sequence: Synthetic oligonucleotide
  Antisense strand to SEQ ID NO: 2027390
acucaaaggcaccauccgc

SEQ ID NO: 2027392 - RNA, 19 nt, Artificial Sequence
  Description of Artificial Sequence: Synthetic oligonucleotide
  Sense strand starting at position 2891 of SEQ ID NO: 1881218
guaguugagggauggauua

SEQ ID NO: 2027393 - RNA, 19 nt, Artificial Sequence
  Description of Artificial Sequence: Synthetic oligonucleotide
  Antisense strand to SEQ ID NO: 2027392
uaauccaucccucaacuac

SEQ ID NO: 2027394 - RNA, 19 nt, Artificial Sequence
  Description of Artificial Sequence: Synthetic oligonucleotide
  Sense strand starting at position 3410 of SEQ ID NO: 1881218
gcccgauaggcuuggacuu

SEQ ID NO: 2027395 - RNA, 19 nt, Artificial Sequence
  Description of Artificial Sequence: Synthetic oligonucleotide
  Antisense strand to SEQ ID NO: 2027394
aaguccaagccuaucgggc

SEQ ID NO: 2027396 - RNA, 19 nt, Artificial Sequence
  Description of Artificial Sequence: Synthetic oligonucleotide
  Sense strand starting at position 3417 of SEQ ID NO: 1881218
aggcuuggacuuuguuaaa

SEQ ID NO: 2027397 - RNA, 19 nt, Artificial Sequence
  Description of Artificial Sequence: Synthetic oligonucleotide
  Antisense strand to SEQ ID NO: 2027396
uuuaacaaaguccaagccu

SEQ ID NO: 2027398 - RNA, 19 nt, Artificial Sequence
  Description of Artificial Sequence: Synthetic oligonucleotide
  Sense strand starting at position 3600 of SEQ ID NO: 1881218
cagugcugugacgauuaaa

SEQ ID NO: 2027399 - RNA, 19 nt, Artificial Sequence
  Description of Artificial Sequence: Synthetic oligonucleotide
  Antisense strand to SEQ ID NO: 2027398
uuuaaucgucacagcacug

SEQ ID NO: 2027400 - RNA, 19 nt, Artificial Sequence
  Description of Artificial Sequence: Synthetic oligonucleotide
  Sense strand starting at position 20 of SEQ ID NO: 1881219
gcaagaauuucguugcauc

SEQ ID NO: 2027401 - RNA, 19 nt, Artificial Sequence
  Description of Artificial Sequence: Synthetic oligonucleotide
  Antisense strand to SEQ ID NO: 2027400
gaugcaacgaaauucuugc

SEQ ID NO: 2027402 - RNA, 19 nt, Artificial Sequence
  Description of Artificial Sequence: Synthetic oligonucleotide
  Sense strand starting at position 21 of SEQ ID NO: 1881219
caagaauuucguugcaucu

SEQ ID NO: 2027403 - RNA, 19 nt, Artificial Sequence
  Description of Artificial Sequence: Synthetic oligonucleotide
  Antisense strand to SEQ ID NO: 2027402
agaugcaacgaaauucuug

SEQ ID NO: 2027404 - RNA, 19 nt, Artificial Sequence
  Description of Artificial Sequence: Synthetic oligonucleotide
  Sense strand starting at position 60 of SEQ ID NO: 1881219
aaauccuagugcuuugaga

SEQ ID NO: 2027405 - RNA, 19 nt, Artificial Sequence
  Description of Artificial Sequence: Synthetic oligonucleotide
  Antisense strand to SEQ ID NO: 2027404
ucucaaagcacuaggauuu

SEQ ID NO: 2027406 - RNA, 19 nt, Artificial Sequence
  Description of Artificial Sequence: Synthetic oligonucleotide
  Sense strand starting at position 82 of SEQ ID NO: 1881219
acauguaccuaucuugauu

SEQ ID NO: 2027407 - RNA, 19 nt, Artificial Sequence
  Description of Artificial Sequence: Synthetic oligonucleotide
  Antisense strand to SEQ ID NO: 2027406
aaucaagauagguacaugu

SEQ ID NO: 2027408 - RNA, 19 nt, Artificial Sequence
  Description of Artificial Sequence: Synthetic oligonucleotide
  Sense strand starting at position 122 of SEQ ID NO: 1881219
agaacacacuuaguguuau

SEQ ID NO: 2027409 - RNA, 19 nt, Artificial Sequence
  Description of Artificial Sequence: Synthetic oligonucleotide
  Antisense strand to SEQ ID NO: 2027408
auaacacuaaguguguucu

SEQ ID NO: 2027410 - RNA, 19 nt, Artificial Sequence
  Description of Artificial Sequence: Synthetic oligonucleotide
  Sense strand starting at position 210 of SEQ ID NO: 1881219
ccuguaagauagguaaaca

SEQ ID NO: 2027411 - RNA, 19 nt, Artificial Sequence
  Description of Artificial Sequence: Synthetic oligonucleotide
  Antisense strand to SEQ ID NO: 2027410
uguuuaccuaucuuacagg

SEQ ID NO: 2027412 - RNA, 19 nt, Artificial Sequence
  Description of Artificial Sequence: Synthetic oligonucleotide
  Sense strand starting at position 463 of SEQ ID NO: 1881219
agcaguucugggagcgagu

SEQ ID NO: 2027413 - RNA, 19 nt, Artificial Sequence
  Description of Artificial Sequence: Synthetic oligonucleotide
  Antisense strand to SEQ ID NO: 2027412
acucgcucccagaacugcu

SEQ ID NO: 2027414 - RNA, 19 nt, Artificial Sequence
  Description of Artificial Sequence: Synthetic oligonucleotide
  Sense strand starting at position 466 of SEQ ID NO: 1881219
aguucugggagcgaguuau

SEQ ID NO: 2027415 - RNA, 19 nt, Artificial Sequence
  Description of Artificial Sequence: Synthetic oligonucleotide
  Antisense strand to SEQ ID NO: 2027414
auaacucgcucccagaacu

SEQ ID NO: 2027416 - RNA, 19 nt, Artificial Sequence
  Description of Artificial Sequence: Synthetic oligonucleotide
  Sense strand starting at position 476 of SEQ ID NO: 1881219
gcgaguuauggagaagaua

SEQ ID NO: 2027417 - RNA, 19 nt, Artificial Sequence
  Description of Artificial Sequence: Synthetic oligonucleotide
  Antisense strand to SEQ ID NO: 2027416
uaucuucuccauaacucgc

SEQ ID NO: 2027418 - RNA, 19 nt, Artificial Sequence
  Description of Artificial Sequence: Synthetic oligonucleotide
  Sense strand starting at position 537 of SEQ ID NO: 1881219
ggaauacucuaagagaagg
